(19) United States
(12) Patent Application Publication
(10) Pub. No.: US 2025/0333448 A1
(43) Pub. Date: Oct. 30, 2025

(54) COMPOSITIONS FOR OPTIMIZED INFLUENZA PEPTIDE VACCINES

(71) Applicant: Think Therapeutics, Inc., Newton, MA (US)

(72) Inventors: David Gifford, Newton, MA (US); Brandon Carter, Cambridge, MA (US)

(73) Assignee: Think Therapeutics, Inc., Newton, MA (US)

(21) Appl. No.: 18/292,158

(22) PCT Filed: Jun. 28, 2022
(86) PCT No.: PCT/US2022/035317

§ 371 Date: Jan. 25, 2024

Related U.S. Application Data
(60) Provisional application No. 63/203,504, filed on Jul. 26, 2021.
(60) Provisional application No. 63/265,692, filed on Dec. 17, 2021.

(51) Int. Cl. C07K 14/005; A61K 39/00

(52) U.S. Cl. CPC C07K 14/005; A61K 39/001164; C12N 2760/16122; C12N 2760/16134

(57) ABSTRACT

Described herein is a composition comprising nucleic acid sequences encoding at least two amino acid sequences selected from the group consisting of SEQ ID NOs: 1 to 49. Also described herein is a composition comprising nucleic acid sequences encoding at least two amino acid sequences selected from the group consisting of SEQ ID NOs: 81 to 143. Also described herein is a composition comprising nucleic acid sequences encoding at least two amino acid sequences selected from the group consisting of SEQ ID NOs: 137515 to 137675. Also described herein is a composition comprising nucleic acid sequences encoding at least two amino acid sequences selected from the group consisting of SEQ ID NOs: 137682 to 137830.

### CROSS-REFERENCE TO RELATED APPLICATIONS

[0001] This application claims the benefit and priority of U.S. Provisional Application Ser. No. 63/203,504 filed on Jul. 26, 2021, and of U.S. Provisional Application No. 63/265,692 filed on Dec. 17, 2021, the contents of each of which are herein incorporated by reference in their entirety.

### COPYRIGHT

[0002] This patent disclosure contains material that is subject to copyright protection. The copyright owner has no objection to the facsimile reproduction of the patent document or the patent disclosure as it appears in the U.S. Patent and Trademark Office patent file or records, but otherwise reserves any and all copyright rights.

### INCORPORATION BY REFERENCE

[0003] For countries that permit incorporation by reference, all of the references cited in this disclosure are hereby incorporated by reference in their entireties. In addition, any manufacturers' instructions or catalogues for any products cited or mentioned herein are incorporated by reference. Documents incorporated by reference into this text, or any teachings therein, can be used in the practice of the present invention. Documents incorporated by reference into this text are not admitted to be prior art.

### SEQUENCE LISTING

[0004] The instant application contains a Sequence Listing which has been submitted electronically in ASCII format and is hereby incorporated by reference in its entirety. The ASCII copy, created on May 16, 2022, is named ThinkTx_001_WO1_SL.txt and is 78,210,693 bytes in size.

### FIELD OF THE INVENTION

[0005] The present invention relates generally to compositions, systems, and methods of peptide vaccines. More particularly, the present invention relates to compositions, systems, and methods of designing peptide vaccines to treat or prevent disease optimized based on predicted population immunogenicity.

### BACKGROUND

[0006] The goal of a peptide vaccine is to train the immune system to recognize and expand its capacity to engage cells that display target peptides to improve the immune response to cancerous cells or pathogens. A peptide vaccine can also be administered to someone who is already diseased to increase their immune response to a causal cancer, other diseases, or pathogen. Alternatively, a peptide vaccine can be administered to induce the immune system to have therapeutic tolerance to one or more peptides.

[0007] There exists a need for compositions, systems, and methods of peptide vaccines based on prediction of the target peptides that will be displayed to protect a host from cancer, other disease, or pathogen infection. We introduce novel prophylactic and therapeutic vaccines for influenza based upon the influenza proteins Nucleoprotein, RNA-directed RNA polymerase catalytic subunit, Matrix protein 1, Polymerase basic protein 2, Polymerase acidic protein, and Protein PA-X.

### SUMMARY OF THE INVENTION

[0008] In one aspect, the invention provides for nucleic acid sequences encoding one or more amino acid sequences selected from the group consisting of SEQ ID NOs: 1 to 80.

[0009] In some embodiments, the nucleic acid sequences encoding two or more amino acid sequences selected from the group consisting of SEQ ID NOs: 1 to 80.

[0010] In another aspect, the invention provides for a composition comprising nucleic acid sequences encoding one or more amino acid sequences selected from the group consisting of SEQ ID NOs: 1 to 80.

[0011] In some embodiments, the composition is administered to a subject. In some embodiments, the composition comprises nucleic acid sequences encoding two or more amino acid sequences selected from the group consisting of SEQ ID NOs: 1 to 80. In some embodiments, the nucleic acid sequences are administered in a construct for expression in vivo. In some embodiments, the in vivo administration of the nucleic acid sequences produce one or more peptides that is displayed by an HLA class I molecule. In some embodiments, the one or more peptides is a modified or unmodified fragment of the influenza nucleoprotein protein. In some embodiments, the composition is administered in an effective amount to a subject to prevent influenza. In some embodiments, the composition is administered in an effective amount to a subject to treat influenza.

[0012] In some embodiments, the composition comprises nucleic acid sequences encoding at least three amino acid sequences selected from the group consisting of SEQ ID NOs: 1 to 80.

[0013] In another aspect, the invention provides for a peptide composition comprising one or more peptides, in which each peptide comprises an amino acid sequence selected from the group consisting of SEQ ID NOs: 1 to 80.

[0014] In some embodiments, the peptide composition comprises two or more peptides, in which each peptide comprises an amino acid sequence selected from the group consisting of SEQ ID NOs: 1 to 80. In some embodiments, the composition is administered to a subject.

[0015] In some embodiments, the peptide composition comprises three or more peptides, in which each peptide comprises an amino acid sequence selected from the group consisting of SEQ ID NOs: 1 to 80.

[0016] In another aspect, the invention provides for a composition comprising nucleic acid sequences encoding one or more amino acid sequences selected from the group consisting of SEQ ID NOs: 1 to 49.

[0017] In some embodiments, the composition is administered to a subject. In some embodiments, the composition comprises nucleic acid sequences encoding two or more amino acid sequences selected from the group consisting of SEQ ID NOs: 1 to 49. In some embodiments, the nucleic acid sequences are administered in a construct for expression in vivo. In some embodiments, the in vivo administration of the nucleic acid sequences produce one or more peptides that is displayed by an HLA class I molecule. In some embodiments, the one or more peptides is a modified or unmodified fragment of the influenza nucleoprotein protein. In some embodiments, the composition is administered in an effective amount to a subject to prevent influenza. In some embodiments, the composition is administered in an effective amount to a subject to treat influenza.

[0018] In some embodiments, the composition comprises nucleic acid sequences encoding at least three amino acid sequences, in which each peptide comprises an amino acid sequence selected from the group consisting of SEQ ID NOs: 1 to 49.

[0019] In another aspect, the invention provides for a method of treating or preventing influenza by administering to a subject a composition comprising nucleic acid sequences encoding one or more amino acid sequences selected from the group consisting of SEQ ID NOs: 1 to 49.

[0020] In some embodiments, the composition comprises nucleic acid sequences encoding two or more amino acid sequences selected from the group consisting of SEQ ID NOs: 1 to 49.

[0021] In another aspect, the invention provides for a peptide composition comprising one or more peptides, in which each peptide comprises an amino acid sequence selected from the group consisting of SEQ ID NOs: 1 to 49.

[0022] In some embodiments, the peptide composition comprises two or more peptides, in which each peptide comprises an amino acid sequence selected from the group consisting of SEQ ID NOs: 1 to 49. In some embodiments a peptide in the peptide composition is displayed by an HLA class I molecule. In some embodiments, a peptide in the peptide composition is a modified or unmodified fragment of the influenza nucleoprotein protein. In some embodiments, the peptide composition is administered in an effective amount to a subject to prevent influenza. In some embodiments, the peptide composition is administered in an effective amount to a subject to treat influenza.

[0023] In some embodiments, the peptide composition comprises three or more peptides, in which each peptide comprises an amino acid sequence selected from the group consisting of SEQ ID NOs: 1 to 49.

[0024] In another aspect, the invention provides for a method of treating or preventing influenza in a subject comprising administering to the subject a peptide composition comprising one or more peptides, in which each peptide comprises an amino acid sequence selected from the group consisting of SEQ ID NOs: 1 to 49.

[0025] In some embodiments, the peptide composition comprises two or more peptides, in which each peptide comprises an amino acid sequence selected from the group consisting of SEQ ID NOs: 1 to 49.

[0026] In another aspect, the invention provides for nucleic acid sequences encoding one or more amino acid sequences selected from the group consisting of SEQ ID NOs: 81 to 143.

[0027] In some embodiments, the nucleic acid sequences encode two or more amino acid sequences selected from the group consisting of SEQ ID NOs: 81 to 143.

[0028] In another aspect, the invention provides for a composition comprising nucleic acid sequences encoding one or more amino acid sequences selected from the group consisting of SEQ ID NOs: 81 to 143.

[0029] In some embodiments, the composition comprises nucleic acid sequences encoding two or more amino acid sequences selected from the group consisting of SEQ ID NOs: 81 to 143. In some embodiments, the nucleic acid sequences are administered in a construct for expression in vivo. In some embodiments, the in vivo administration of the nucleic acid sequences produce one or more peptides that is displayed by an HLA class II molecule. In some embodiments, the one or more peptides is a modified or unmodified fragment of the influenza nucleoprotein protein. In some embodiments, the composition is administered in an effective amount to a subject to prevent influenza. In some embodiments, the composition is administered in an effective amount to a subject to treat influenza. In some embodiments, the composition comprises nucleic acid sequences encoding at least three amino acid sequences selected from the group consisting of SEQ ID NOs: 81 to 143.

[0030] In another aspect, the invention provides for a method of treating or preventing influenza by administering to a subject a composition comprising nucleic acid sequences encoding one or more amino acid sequences selected from the group consisting of SEQ ID NOs: 81 to 143.

[0031] In some embodiments, the composition comprises nucleic acid sequences encoding two or more amino acid sequences selected from the group consisting of SEQ ID NOs: 81 to 143.

[0032] In another aspect, the invention provides for a peptide composition comprising one or more peptides, in which each peptide comprises an amino acid sequence selected from the group consisting of SEQ ID NOs: 81 to 143.

[0033] In some embodiments, the peptide composition comprises two or more peptides, in which each peptide comprises an amino acid sequence selected from the group consisting of SEQ ID NOs: 81 to 143. In some embodiments a peptide in the peptide composition is displayed by an HLA class II molecule. In some embodiments, a peptide in the peptide composition is a modified or unmodified fragment of the influenza nucleoprotein protein. In some embodiments, the peptide composition is administered in an effective amount to a subject to prevent influenza. In some embodiments, the peptide composition is administered in an effective amount to a subject to treat influenza.

[0034] In another aspect, the invention provides for a method of treating or preventing influenza in a subject comprising administering to the subject a peptide composition comprising one or more peptides, in which each peptide comprises an amino acid sequence selected from the group consisting of SEQ ID NOs: 81 to 143.

[0035] In some embodiments, the peptide composition comprises two or more peptides, in which each peptide comprises an amino acid sequence selected from the group consisting of SEQ ID NOs: 81 to 143.

[0036] In one aspect, the invention provides for nucleic acid sequences encoding one or more amino acid sequences selected from the group consisting of SEQ ID NOs: 137515 to 137681.

[0037] In some embodiments, the nucleic acid sequences encode two or more amino acid sequences selected from the group consisting of SEQ ID NOs: 137515 to 137681.

[0038] In another aspect, the invention provides for a composition comprising nucleic acid sequences encoding one or more amino acid sequences selected from the group consisting of SEQ ID NOs: 137515 to 137681.

[0039] In some embodiments, the composition is administered to a subject. In some embodiments, the composition comprises nucleic acid sequences encoding two or more amino acid sequences selected from the group consisting of SEQ ID NOs: 137515 to 137681. In some embodiments, the nucleic acid sequences are administered in a construct for expression in vivo. In some embodiments, the in vivo administration of the nucleic acid sequences produce one or more peptides that is displayed by an HLA class I molecule. In some embodiments, the nucleic acid sequences are configured to allow expression of at least two peptides encoded by the nucleic acid sequences that are each displayed by a peptide specific set of HLA class I alleles, wherein all of the peptide specific sets of HLA class I alleles are not identical. In some embodiments, each of the one or more peptides is a modified or unmodified fragment of a protein selected from the group consisting of RNA-directed RNA polymerase catalytic subunit, Matrix protein 1, Polymerase basic protein 2, Polymerase acidic protein, and Protein PA-X. In some embodiments, the composition is administered in an effective amount to a subject to prevent influenza. In some embodiments, the composition is administered in an effective amount to a subject to treat influenza.

[0040] In some embodiments, the composition comprises nucleic acid sequences encoding at least three amino acid sequences selected from the group consisting of SEQ ID NOs: 137515 to 137681.

[0041] In another aspect, the invention provides for a peptide composition comprising one or more peptides, in which each peptide comprises an amino acid sequence selected from the group consisting of SEQ ID NOs: 137515 to 137681.

[0042] In some embodiments, the peptide composition comprises two or more peptides, in which each peptide comprises an amino acid sequence selected from the group consisting of SEQ ID NOs: 137515 to 137681. In some embodiments, the composition is administered to a subject.

[0043] In some embodiments, the peptide composition comprises three or more peptides, in which each peptide comprises an amino acid sequence selected from the group consisting of SEQ ID NOs: 137515 to 137681.

[0044] In another aspect, the invention provides for a composition comprising nucleic acid sequences encoding one or more amino acid sequences selected from the group consisting of SEQ ID NOs: 137515 to 137675.

[0045] In some embodiments, the composition is administered to a subject. In some embodiments, the composition comprises nucleic acid sequences encoding two or more amino acid sequences selected from the group consisting of SEQ ID NOs: 137515 to 137675. In some embodiments, the nucleic acid sequences are administered in a construct for expression in vivo. In some embodiments, the in vivo administration of the nucleic acid sequences produce one or more peptides that is displayed by an HLA class I molecule. In some embodiments, the nucleic acid sequences are configured to allow expression of at least two peptides encoded by the nucleic acid sequences that are each displayed by a peptide specific set of HLA class I alleles, wherein all of the peptide specific sets of HLA class I alleles are not identical. In some embodiments, each of the one or more peptides is a modified or unmodified fragment of a protein selected from the group consisting of RNA-directed RNA polymerase catalytic subunit, Matrix protein 1, Polymerase basic protein 2, Polymerase acidic protein, and Protein PA-X. In some embodiments, the composition is administered in an effective amount to a subject to prevent influenza. In some embodiments, the composition is administered in an effective amount to a subject to treat influenza.

[0046] In some embodiments, the composition comprises nucleic acid sequences encoding at least three amino acid sequences selected from the group consisting of SEQ ID NOs: 137515 to 137675.

[0047] In another aspect, the invention provides for a method of treating or preventing influenza by administering to a subject a composition comprising nucleic acid sequences encoding one or more amino acid sequences selected from the group consisting of SEQ ID NOs: 137515 to 137675.

[0048] In some embodiments, the composition comprises nucleic acid sequences encoding two or more amino acid sequences selected from the group consisting of SEQ ID NOs: 137515 to 137675.

[0049] In another aspect, the invention provides for a peptide composition comprising one or more peptides, in which each peptide comprises an amino acid sequence selected from the group consisting of SEQ ID NOs: 137515 to 137675.

[0050] In some embodiments, the peptide composition comprises two or more peptides, in which each peptide comprises an amino acid sequence selected from the group consisting of SEQ ID NOs: 137515 to 137675. In some embodiments a peptide in the peptide composition is displayed by an HLA class I molecule. In some embodiments, the at least two peptides are each capable of being displayed by a peptide specific set of HLA class I alleles, wherein all of the peptide specific sets of HLA class I alleles are not identical. In some embodiments, a peptide in the peptide composition is a modified or unmodified fragment of a protein selected from the group consisting of RNA-directed RNA polymerase catalytic subunit, Matrix protein 1, Polymerase basic protein 2, Polymerase acidic protein, and Protein PA-X. In some embodiments, the peptide composition is administered in an effective amount to a subject to prevent influenza. In some embodiments, the peptide composition is administered in an effective amount to a subject to treat influenza.

[0051] In some embodiments, the peptide composition comprises three or more peptides, in which each peptide comprises an amino acid sequence selected from the group consisting of SEQ ID NOs: 137515 to 137675.

[0052] In another aspect, the invention provides for a method of treating or preventing influenza in a subject comprising administering to the subject a peptide composition comprising one or more peptides, in which each peptide comprises an amino acid sequence selected from the group consisting of SEQ ID NOs: 137515 to 137675.

[0053] In some embodiments, the peptide composition comprises two or more peptides, in which each peptide comprises an amino acid sequence selected from the group consisting of SEQ ID NOs: 137515 to 137675.

[0054] In another aspect, the invention provides for nucleic acid sequences encoding one or more amino acid sequences selected from the group consisting of SEQ ID NOs: 137682 to 137830.

[0055] In some embodiments, the nucleic acid sequences encode two or more amino acid sequences selected from the group consisting of SEQ ID NOs: 137682 to 137830.

[0056] In another aspect, the invention provides for a composition comprising nucleic acid sequences encoding one or more amino acid sequences selected from the group consisting of SEQ ID NOs: 137682 to 137830.

[0057] In some embodiments, the composition comprises nucleic acid sequences encoding two or more amino acid sequences selected from the group consisting of SEQ ID NOs: 137682 to 137830. In some embodiments, the nucleic acid sequences are administered in a construct for expression in vivo. In some embodiments, the in vivo administration of the nucleic acid sequences produce one or more peptides that is displayed by an HLA class II molecule. In some embodiments, the nucleic acid sequences are configured to allow expression of at least two peptides encoded by the nucleic acid sequences that are each displayed by a peptide specific set of HLA class II alleles, wherein all of the peptide specific sets of HLA class II alleles are not identical. In some embodiments, each of the one or more peptides is a modified or unmodified fragment of a protein selected from the group consisting of RNA-directed RNA polymerase catalytic subunit, Matrix protein 1, Polymerase basic protein 2, Polymerase acidic protein, and Protein PA-X. In some embodiments, the composition is administered in an effective amount to a subject to prevent influenza. In some embodiments, the composition is administered in an effective amount to a subject to treat influenza. In some embodiments, the composition comprises nucleic acid sequences encoding at least three amino acid sequences selected from the group consisting of SEQ ID NOs: 137682 to 137830.

[0058] In another aspect, the invention provides for a method of treating or preventing influenza by administering to a subject a composition comprising nucleic acid sequences encoding one or more amino acid sequences selected from the group consisting of SEQ ID NOs: 137682 to 137830.

[0059] In some embodiments, the composition comprises nucleic acid sequences encoding two or more amino acid sequences selected from the group consisting of SEQ ID NOs: 137682 to 137830.

[0060] In another aspect, the invention provides for a peptide composition comprising one or more peptides, in which each peptide comprises an amino acid sequence selected from the group consisting of SEQ ID NOs: 137682 to 137830.

[0061] In some embodiments, the peptide composition comprises two or more peptides, in which each peptide comprises an amino acid sequence selected from the group consisting of SEQ ID NOs: 137682 to 137830. In some embodiments a peptide in the peptide composition is displayed by an HLA class II molecule. In some embodiments, the at least two peptides are each capable of being displayed by a peptide specific set of HLA class II alleles, wherein all of the peptide specific sets of HLA class II alleles are not identical. In some embodiments, a peptide in the peptide composition is a modified or unmodified fragment of a protein selected from the group consisting of RNA-directed RNA polymerase catalytic subunit, Matrix protein 1, Polymerase basic protein 2, Polymerase acidic protein, and Protein PA-X. In some embodiments, the peptide composition is administered in an effective amount to a subject to prevent influenza. In some embodiments, the peptide composition is administered in an effective amount to a subject to treat influenza.

[0062] In another aspect, the invention provides for a method of treating or preventing influenza in a subject comprising administering to the subject a peptide composition comprising one or more peptides, in which each peptide comprises an amino acid sequence selected from the group consisting of SEQ ID NOs: 137682 to 137830.

[0063] In some embodiments, the peptide composition comprises two or more peptides, in which each peptide comprises an amino acid sequence selected from the group consisting of SEQ ID NOs: 137682 to 137830.

[0064] In another aspect, the invention provides for nucleic acid sequences encoding one or more amino acid sequences selected from the group consisting of SEQ ID NOs: 137515 to 137549 and SEQ ID NO: 137676.

[0065] In some embodiments, the nucleic acid sequences encode two or more amino acid sequences selected from the group consisting of SEQ ID NOs: 137515 to 137549 and SEQ ID NO: 137676.

[0066] In another aspect, the invention provides for a composition comprising nucleic acid sequences encoding one or more amino acid sequences selected from the group consisting of SEQ ID NOs: 137515 to 137549 and SEQ ID NO: 137676.

[0067] In some embodiments, the composition is administered to a subject. In some embodiments, the composition comprises nucleic acid sequences encoding two or more amino acid sequences selected from the group consisting of SEQ ID NOs: 137515 to 137549 and SEQ ID NO: 137676. In some embodiments, the nucleic acid sequences are administered in a construct for expression in vivo. In some embodiments, the in vivo administration of the nucleic acid sequences produce one or more peptides that is displayed by an HLA class I molecule. In some embodiments, the nucleic acid sequences are configured to allow expression of at least two peptides encoded by the nucleic acid sequences that are each displayed by a peptide specific set of HLA class I alleles, wherein all of the peptide specific sets of HLA class I alleles are not identical. In some embodiments, each of the one or more peptides is a modified or unmodified fragment of the influenza RNA-directed RNA polymerase catalytic subunit. In some embodiments, the composition is administered in an effective amount to a subject to prevent influenza. In some embodiments, the composition is administered in an effective amount to a subject to treat influenza.

[0068] In some embodiments, the composition comprises nucleic acid sequences encoding at least three amino acid sequences selected from the group consisting of SEQ ID NOs: 137515 to 137549 and SEQ ID NO: 137676.

[0069] In another aspect, the invention provides for a peptide composition comprising one or more peptides, in which each peptide comprises an amino acid sequence selected from the group consisting of SEQ ID NOs: 137515 to 137549 and SEQ ID NO: 137676.

[0070] In some embodiments, the peptide composition comprises two or more peptides, in which each peptide comprises an amino acid sequence selected from the group consisting of SEQ ID NOs: 137515 to 137549 and SEQ ID NO: 137676. In some embodiments, the composition is administered to a subject.

[0071] In some embodiments, the peptide composition comprises three or more peptides, in which each peptide comprises an amino acid sequence selected from the group consisting of SEQ ID NOs: 137515 to 137549 and SEQ ID NO: 137676.

[0072] In another aspect, the invention provides for a composition comprising nucleic acid sequences encoding one or more amino acid sequences selected from the group consisting of SEQ ID NOs: 137515 to 137549.

[0073] In some embodiments, the composition is administered to a subject. In some embodiments, the composition comprises nucleic acid sequences encoding two or more amino acid sequences selected from the group consisting of SEQ ID NOs: 137515 to 137549. In some embodiments, the nucleic acid sequences are administered in a construct for expression in vivo. In some embodiments, the in vivo administration of the nucleic acid sequences produce one or more peptides that is displayed by an HLA class I molecule. In some embodiments, the nucleic acid sequences are configured to allow expression of at least two peptides encoded by the nucleic acid sequences that are each displayed by a peptide specific set of HLA class I alleles, wherein all of the peptide specific sets of HLA class I alleles are not identical. In some embodiments, each of the one or more peptides is a modified or unmodified fragment of the influenza RNA-directed RNA polymerase catalytic subunit. In some embodiments, the composition is administered in an effective amount to a subject to prevent influenza. In some embodiments, the composition is administered in an effective amount to a subject to treat influenza.

[0074] In some embodiments, the composition comprises nucleic acid sequences encoding at least three amino acid sequences selected from the group consisting of SEQ ID NOs: 137515 to 137549.

[0075] In another aspect, the invention provides for a method of treating or preventing influenza by administering to a subject a composition comprising nucleic acid sequences encoding one or more amino acid sequences selected from the group consisting of SEQ ID NOs: 137515 to 137549.

[0076] In some embodiments, the composition comprises nucleic acid sequences encoding two or more amino acid sequences selected from the group consisting of SEQ ID NOs: 137515 to 137549.

[0077] In another aspect, the invention provides for a peptide composition comprising one or more peptides, in which each peptide comprises an amino acid sequence selected from the group consisting of SEQ ID NOs: 137515 to 137549.

[0078] In some embodiments, the peptide composition comprises two or more peptides, in which each peptide comprises an amino acid sequence selected from the group consisting of SEQ ID NOs: 137515 to 137549. In some embodiments a peptide in the peptide composition is displayed by an HLA class I molecule. In some embodiments, the at least two peptides are each capable of being displayed by a peptide specific set of HLA class I alleles, wherein all of the peptide specific sets of HLA class I alleles are not identical. In some embodiments, a peptide in the peptide composition is a modified or unmodified fragment of the influenza RNA-directed RNA polymerase catalytic subunit. In some embodiments, the peptide composition is administered in an effective amount to a subject to prevent influenza. In some embodiments, the peptide composition is administered in an effective amount to a subject to treat influenza.

[0079] In some embodiments, the peptide composition comprises three or more peptides, in which each peptide comprises an amino acid sequence selected from the group consisting of SEQ ID NOs: 137515 to 137549.

[0080] In another aspect, the invention provides for a method of treating or preventing influenza in a subject comprising administering to the subject a peptide composition comprising one or more peptides, in which each peptide comprises an amino acid sequence selected from the group consisting of SEQ ID NOs: 137515 to 137549.

[0081] In some embodiments, the peptide composition comprises two or more peptides, in which each peptide comprises an amino acid sequence selected from the group consisting of SEQ ID NOs: 137515 to 137549.

[0082] In another aspect, the invention provides for nucleic acid sequences encoding one or more amino acid sequences selected from the group consisting of SEQ ID NOs: 137682 to 137712.

[0083] In some embodiments, the nucleic acid sequences encode two or more amino acid sequences selected from the group consisting of SEQ ID NOs: 137682 to 137712.

[0084] In another aspect, the invention provides for a composition comprising nucleic acid sequences encoding one or more amino acid sequences selected from the group consisting of SEQ ID NOs: 137682 to 137712.

[0085] In some embodiments, the composition comprises nucleic acid sequences encoding two or more amino acid sequences selected from the group consisting of SEQ ID NOs: 137682 to 137712. In some embodiments, the nucleic acid sequences are administered in a construct for expression in vivo. In some embodiments, the in vivo administration of the nucleic acid sequences produce one or more peptides that is displayed by an HLA class II molecule. In some embodiments, the nucleic acid sequences are configured to allow expression of at least two peptides encoded by the nucleic acid sequences that are each displayed by a peptide specific set of HLA class II alleles, wherein all of the peptide specific sets of HLA class II alleles are not identical. In some embodiments, each of the one or more peptides is a modified or unmodified fragment of the influenza RNA-directed RNA polymerase catalytic subunit. In some embodiments, the composition is administered in an effective amount to a subject to prevent influenza. In some embodiments, the composition is administered in an effective amount to a subject to treat influenza. In some embodiments, the composition comprises nucleic acid sequences encoding at least three amino acid sequences selected from the group consisting of SEQ ID NOs: 137682 to 137712.

[0086] In another aspect, the invention provides for a method of treating or preventing influenza by administering to a subject a composition comprising nucleic acid sequences encoding one or more amino acid sequences selected from the group consisting of SEQ ID NOs: 137682 to 137712.

[0087] In some embodiments, the composition comprises nucleic acid sequences encoding two or more amino acid sequences selected from the group consisting of SEQ ID NOs: 137682 to 137712.

[0088] In another aspect, the invention provides for a peptide composition comprising one or more peptides, in which each peptide comprises an amino acid sequence selected from the group consisting of SEQ ID NOs: 137682 to 137712.

[0089] In some embodiments, the peptide composition comprises two or more peptides, in which each peptide comprises an amino acid sequence selected from the group consisting of SEQ ID NOs: 137682 to 137712. In some embodiments a peptide in the peptide composition is displayed by an HLA class II molecule. In some embodiments, the at least two peptides are each capable of being displayed by a peptide specific set of HLA class II alleles, wherein all of the peptide specific sets of HLA class II alleles are not identical. In some embodiments, a peptide in the peptide composition is a modified or unmodified fragment of the influenza RNA-directed RNA polymerase catalytic subunit. In some embodiments, the peptide composition is administered in an effective amount to a subject to prevent influenza. In some embodiments, the peptide composition is administered in an effective amount to a subject to treat influenza.

[0090] In another aspect, the invention provides for a method of treating or preventing influenza in a subject comprising administering to the subject a peptide composition comprising one or more peptides, in which each peptide comprises an amino acid sequence selected from the group consisting of SEQ ID NOs: 137682 to 137712.

[0091] In some embodiments, the peptide composition comprises two or more peptides, in which each peptide comprises an amino acid sequence selected from the group consisting of SEQ ID NOs: 137682 to 137712.

[0092] In another aspect, the invention provides for nucleic acid sequences encoding one or more amino acid sequences selected from the group consisting of SEQ ID NOs: 137642 to 137675.

[0093] In some embodiments, the nucleic acid sequences encode two or more amino acid sequences selected from the group consisting of SEQ ID NOs: 137642 to 137675.

[0094] In another aspect, the invention provides for a composition comprising nucleic acid sequences encoding one or more amino acid sequences selected from the group consisting of SEQ ID NOs: 137642 to 137675.

[0095] In some embodiments, the composition is administered to a subject. In some embodiments, the composition comprises nucleic acid sequences encoding two or more amino acid sequences selected from the group consisting of SEQ ID NOs: 137642 to 137675. In some embodiments, the nucleic acid sequences are administered in a construct for expression in vivo. In some embodiments, the in vivo administration of the nucleic acid sequences produce one or more peptides that is displayed by an HLA class I molecule. In some embodiments, the nucleic acid sequences are configured to allow expression of at least two peptides encoded by the nucleic acid sequences that are each displayed by a peptide specific set of HLA class I alleles, wherein all of the peptide specific sets of HLA class I alleles are not identical. In some embodiments, each of the one or more peptides is a modified or unmodified fragment of the influenza Matrix protein 1. In some embodiments, the composition is administered in an effective amount to a subject to prevent influenza. In some embodiments, the composition is administered in an effective amount to a subject to treat influenza.

[0096] In some embodiments, the composition comprises nucleic acid sequences encoding at least three amino acid sequences selected from the group consisting of SEQ ID NOs: 137642 to 137675.

[0097] In another aspect, the invention provides for a peptide composition comprising one or more peptides, in which each peptide comprises an amino acid sequence selected from the group consisting of SEQ ID NOs: 137642 to 137675.

[0098] In some embodiments, the peptide composition comprises two or more peptides, in which each peptide comprises an amino acid sequence selected from the group consisting of SEQ ID NOs: 137642 to 137675. In some embodiments, the composition is administered to a subject.

[0099] In some embodiments, the peptide composition comprises three or more peptides, in which each peptide comprises an amino acid sequence selected from the group consisting of SEQ ID NOs: 137642 to 137675.

[0100] In another aspect, the invention provides for a composition comprising nucleic acid sequences encoding one or more amino acid sequences selected from the group consisting of SEQ ID NOs: 137642 to 137675.

[0101] In some embodiments, the composition is administered to a subject. In some embodiments, the composition comprises nucleic acid sequences encoding two or more amino acid sequences selected from the group consisting of SEQ ID NOs: 137642 to 137675. In some embodiments, the nucleic acid sequences are administered in a construct for expression in vivo. In some embodiments, the in vivo administration of the nucleic acid sequences produce one or more peptides that is displayed by an HLA class I molecule. In some embodiments, the nucleic acid sequences are configured to allow expression of at least two peptides encoded by the nucleic acid sequences that are each displayed by a peptide specific set of HLA class I alleles, wherein all of the peptide specific sets of HLA class I alleles are not identical. In some embodiments, each of the one or more peptides is a modified or unmodified fragment of the influenza Matrix protein 1. In some embodiments, the composition is administered in an effective amount to a subject to prevent influenza. In some embodiments, the composition is administered in an effective amount to a subject to treat influenza.

[0102] In some embodiments, the composition comprises nucleic acid sequences encoding at least three amino acid sequences selected from the group consisting of SEQ ID NOs: 137642 to 137675.

[0103] In another aspect, the invention provides for a method of treating or preventing influenza by administering to a subject a composition comprising nucleic acid sequences encoding one or more amino acid sequences selected from the group consisting of SEQ ID NOs: 137642 to 137675.

[0104] In some embodiments, the composition comprises nucleic acid sequences encoding two or more amino acid sequences selected from the group consisting of SEQ ID NOs: 137642 to 137675.

[0105] In another aspect, the invention provides for a peptide composition comprising one or more peptides, in which each peptide comprises an amino acid sequence selected from the group consisting of SEQ ID NOs: 137642 to 137675.

[0106] In some embodiments, the peptide composition comprises two or more peptides, in which each peptide comprises an amino acid sequence selected from the group consisting of SEQ ID NOs: 137642 to 137675. In some embodiments a peptide in the peptide composition is displayed by an HLA class I molecule. In some embodiments, the at least two peptides are each capable of being displayed by a peptide specific set of HLA class I alleles, wherein all of the peptide specific sets of HLA class I alleles are not identical. In some embodiments, a peptide in the peptide composition is a modified or unmodified fragment of the influenza Matrix protein 1. In some embodiments, the peptide composition is administered in an effective amount to a subject to prevent influenza. In some embodiments, the peptide composition is administered in an effective amount to a subject to treat influenza.

[0107] In some embodiments, the peptide composition comprises three or more peptides, in which each peptide comprises an amino acid sequence selected from the group consisting of SEQ ID NOs: 137642 to 137675.

[0108] In another aspect, the invention provides for a method of treating or preventing influenza in a subject comprising administering to the subject a peptide composition comprising one or more peptides, in which each peptide comprises an amino acid sequence selected from the group consisting of SEQ ID NOs: 137642 to 137675.

[0109] In some embodiments, the peptide composition comprises two or more peptides, in which each peptide comprises an amino acid sequence selected from the group consisting of SEQ ID NOs: 137642 to 137675.

[0110] In another aspect, the invention provides for nucleic acid sequences encoding one or more amino acid sequences selected from the group consisting of SEQ ID NOs: 137796 to 137830.

[0111] In some embodiments, the nucleic acid sequences encode two or more amino acid sequences selected from the group consisting of SEQ ID NOs: 137796 to 137830.

[0112] In another aspect, the invention provides for a composition comprising nucleic acid sequences encoding one or more amino acid sequences selected from the group consisting of SEQ ID NOs: 137796 to 137830.

[0113] In some embodiments, the composition comprises nucleic acid sequences encoding two or more amino acid sequences selected from the group consisting of SEQ ID NOs: 137796 to 137830. In some embodiments, the nucleic acid sequences are administered in a construct for expression in vivo. In some embodiments, the in vivo administration of the nucleic acid sequences produce one or more peptides that is displayed by an HLA class II molecule. In some embodiments, the nucleic acid sequences are configured to allow expression of at least two peptides encoded by the nucleic acid sequences that are each displayed by a peptide specific set of HLA class II alleles, wherein all of the peptide specific sets of HLA class II alleles are not identical. In some embodiments, each of the one or more peptides is a modified or unmodified fragment of the influenza Matrix protein 1. In some embodiments, the composition is administered in an effective amount to a subject to prevent influenza. In some embodiments, the composition is administered in an effective amount to a subject to treat influenza. In some embodiments, the composition comprises nucleic acid sequences encoding at least three amino acid sequences selected from the group consisting of SEQ ID NOs: 137796 to 137830.

[0114] In another aspect, the invention provides for a method of treating or preventing influenza by administering to a subject a composition comprising nucleic acid sequences encoding one or more amino acid sequences selected from the group consisting of SEQ ID NOs: 137796 to 137830.

[0115] In some embodiments, the composition comprises nucleic acid sequences encoding two or more amino acid sequences selected from the group consisting of SEQ ID NOs: 137796 to 137830.

[0116] In another aspect, the invention provides for a peptide composition comprising one or more peptides, in which each peptide comprises an amino acid sequence selected from the group consisting of SEQ ID NOs: 137796 to 137830.

[0117] In some embodiments, the peptide composition comprises two or more peptides, in which each peptide comprises an amino acid sequence selected from the group consisting of SEQ ID NOs: 137796 to 137830. In some embodiments a peptide in the peptide composition is displayed by an HLA class II molecule. In some embodiments, the at least two peptides are each capable of being displayed by a peptide specific set of HLA class II alleles, wherein all of the peptide specific sets of HLA class II alleles are not identical. In some embodiments, a peptide in the peptide composition is a modified or unmodified fragment of the influenza Matrix protein 1. In some embodiments, the peptide composition is administered in an effective amount to a subject to prevent influenza. In some embodiments, the peptide composition is administered in an effective amount to a subject to treat influenza.

[0118] In another aspect, the invention provides for a method of treating or preventing influenza in a subject comprising administering to the subject a peptide composition comprising one or more peptides, in which each peptide comprises an amino acid sequence selected from the group consisting of SEQ ID NOs: 137796 to 137830.

[0119] In some embodiments, the peptide composition comprises two or more peptides, in which each peptide comprises an amino acid sequence selected from the group consisting of SEQ ID NOs: 137796 to 137830.

[0120] In another aspect, the invention provides for nucleic acid sequences encoding one or more amino acid sequences selected from the group consisting of SEQ ID NOs: 137582 to 137609 and SEQ ID NOs: 137678 to 137679.

[0121] In some embodiments, the nucleic acid sequences encode two or more amino acid sequences selected from the group consisting of SEQ ID NOs: 137582 to 137609 and SEQ ID NOs: 137678 to 137679.

[0122] In another aspect, the invention provides for a composition comprising nucleic acid sequences encoding one or more amino acid sequences selected from the group consisting of SEQ ID NOs: 137582 to 137609 and SEQ ID NOs: 137678 to 137679.

[0123] In some embodiments, the composition is administered to a subject. In some embodiments, the composition comprises nucleic acid sequences encoding two or more amino acid sequences selected from the group consisting of SEQ ID NOs: 137582 to 137609 and SEQ ID NOs: 137678 to 137679. In some embodiments, the nucleic acid sequences are administered in a construct for expression in vivo. In some embodiments, the in vivo administration of the nucleic acid sequences produce one or more peptides that is displayed by an HLA class I molecule. In some embodiments, the nucleic acid sequences are configured to allow expression of at least two peptides encoded by the nucleic acid sequences that are each displayed by a peptide specific set of HLA class I alleles, wherein all of the peptide specific sets of HLA class I alleles are not identical. In some embodiments, each of the one or more peptides is a modified or unmodified fragment of the influenza Polymerase basic protein 2. In some embodiments, the composition is administered in an effective amount to a subject to prevent influenza. In some embodiments, the composition is administered in an effective amount to a subject to treat influenza.

[0124] In some embodiments, the composition comprises nucleic acid sequences encoding at least three amino acid sequences selected from the group consisting of SEQ ID NOs: 137582 to 137609 and SEQ ID NOs: 137678 to 137679.

[0125] In another aspect, the invention provides for a peptide composition comprising one or more peptides, in which each peptide comprises an amino acid sequence selected from the group consisting of SEQ ID NOs: 137582 to 137609 and SEQ ID NOs: 137678 to 137679.

[0126] In some embodiments, the peptide composition comprises two or more peptides, in which each peptide comprises an amino acid sequence selected from the group consisting of SEQ ID NOs: 137582 to 137609 and SEQ ID NOs: 137678 to 137679. In some embodiments, the composition is administered to a subject.

[0127] In some embodiments, the peptide composition comprises three or more peptides, in which each peptide comprises an amino acid sequence selected from the group consisting of SEQ ID NOs: 137582 to 137609 and SEQ ID NOs: 137678 to 137679.

[0128] In another aspect, the invention provides for a composition comprising nucleic acid sequences encoding one or more amino acid sequences selected from the group consisting of SEQ ID NOs: 137582 to 137609.

[0129] In some embodiments, the composition is administered to a subject. In some embodiments, the composition comprises nucleic acid sequences encoding two or more amino acid sequences selected from the group consisting of SEQ ID NOs: 137582 to 137609. In some embodiments, the nucleic acid sequences are administered in a construct for expression in vivo. In some embodiments, the in vivo administration of the nucleic acid sequences produce one or more peptides that is displayed by an HLA class I molecule. In some embodiments, the nucleic acid sequences are configured to allow expression of at least two peptides encoded by the nucleic acid sequences that are each displayed by a peptide specific set of HLA class I alleles, wherein all of the peptide specific sets of HLA class I alleles are not identical. In some embodiments, each of the one or more peptides is a modified or unmodified fragment of the influenza Polymerase basic protein 2. In some embodiments, the composition is administered in an effective amount to a subject to prevent influenza. In some embodiments, the composition is administered in an effective amount to a subject to treat influenza.

[0130] In some embodiments, the composition comprises nucleic acid sequences encoding at least three amino acid sequences selected from the group consisting of SEQ ID NOs: 137582 to 137609.

[0131] In another aspect, the invention provides for a method of treating or preventing influenza by administering to a subject a composition comprising nucleic acid sequences encoding one or more amino acid sequences selected from the group consisting of SEQ ID NOs: 137582 to 137609.

[0132] In some embodiments, the composition comprises nucleic acid sequences encoding two or more amino acid sequences selected from the group consisting of SEQ ID NOs: 137582 to 137609.

[0133] In another aspect, the invention provides for a peptide composition comprising one or more peptides, in which each peptide comprises an amino acid sequence selected from the group consisting of SEQ ID NOs: 137582 to 137609.

[0134] In some embodiments, the peptide composition comprises two or more peptides, in which each peptide comprises an amino acid sequence selected from the group consisting of SEQ ID NOs: 137582 to 137609. In some embodiments a peptide in the peptide composition is displayed by an HLA class I molecule. In some embodiments, the at least two peptides are each capable of being displayed by a peptide specific set of HLA class I alleles, wherein all of the peptide specific sets of HLA class I alleles are not identical. In some embodiments, a peptide in the peptide composition is a modified or unmodified fragment of the influenza Polymerase basic protein 2. In some embodiments, the peptide composition is administered in an effective amount to a subject to prevent influenza. In some embodiments, the peptide composition is administered in an effective amount to a subject to treat influenza.

[0135] In some embodiments, the peptide composition comprises three or more peptides, in which each peptide comprises an amino acid sequence selected from the group consisting of SEQ ID NOs: 137582 to 137609.

[0136] In another aspect, the invention provides for a method of treating or preventing influenza in a subject comprising administering to the subject a peptide composition comprising one or more peptides, in which each peptide comprises an amino acid sequence selected from the group consisting of SEQ ID NOs: 137582 to 137609.

[0137] In some embodiments, the peptide composition comprises two or more peptides, in which each peptide comprises an amino acid sequence selected from the group consisting of SEQ ID NOs: 137582 to 137609.

[0138] In another aspect, the invention provides for nucleic acid sequences encoding one or more amino acid sequences selected from the group consisting of SEQ ID NOs: 137746 to 137763.

[0139] In some embodiments, the nucleic acid sequences encode two or more amino acid sequences selected from the group consisting of SEQ ID NOs: 137746 to 137763.

[0140] In another aspect, the invention provides for a composition comprising nucleic acid sequences encoding one or more amino acid sequences selected from the group consisting of SEQ ID NOs: 137746 to 137763.

[0141] In some embodiments, the composition comprises nucleic acid sequences encoding two or more amino acid sequences selected from the group consisting of SEQ ID NOs: 137746 to 137763. In some embodiments, the nucleic acid sequences are administered in a construct for expression in vivo. In some embodiments, the in vivo administration of the nucleic acid sequences produce one or more peptides that is displayed by an HLA class II molecule. In some embodiments, the nucleic acid sequences are configured to allow expression of at least two peptides encoded by the nucleic acid sequences that are each displayed by a peptide specific set of HLA class II alleles, wherein all of the peptide specific sets of HLA class II alleles are not identical. In some embodiments, each of the one or more peptides is a modified or unmodified fragment of the influenza Polymerase basic protein 2. In some embodiments, the composition is administered in an effective amount to a subject to prevent influenza. In some embodiments, the composition is administered in an effective amount to a subject to treat influenza. In some embodiments, the composition comprises nucleic acid sequences encoding at least three amino acid sequences selected from the group consisting of SEQ ID NOs: 137746 to 137763.

[0142] In another aspect, the invention provides for a method of treating or preventing influenza by administering to a subject a composition comprising nucleic acid sequences encoding one or more amino acid sequences selected from the group consisting of SEQ ID NOs: 137746 to 137763.

[0143] In some embodiments, the composition comprises nucleic acid sequences encoding two or more amino acid sequences selected from the group consisting of SEQ ID NOs: 137746 to 137763.

[0144] In another aspect, the invention provides for a peptide composition comprising one or more peptides, in which each peptide comprises an amino acid sequence selected from the group consisting of SEQ ID NOs: 137746 to 137763.

[0145] In some embodiments, the peptide composition comprises two or more peptides, in which each peptide comprises an amino acid sequence selected from the group consisting of SEQ ID NOs: 137746 to 137763. In some embodiments a peptide in the peptide composition is displayed by an HLA class II molecule. In some embodiments, the at least two peptides are each capable of being displayed by a peptide specific set of HLA class II alleles, wherein all of the peptide specific sets of HLA class II alleles are not identical. In some embodiments, a peptide in the peptide composition is a modified or unmodified fragment of the influenza Polymerase basic protein 2. In some embodiments, the peptide composition is administered in an effective amount to a subject to prevent influenza. In some embodiments, the peptide composition is administered in an effective amount to a subject to treat influenza.

[0146] In another aspect, the invention provides for a method of treating or preventing influenza in a subject comprising administering to the subject a peptide composition comprising one or more peptides, in which each peptide comprises an amino acid sequence selected from the group consisting of SEQ ID NOs: 137746 to 137763.

[0147] In some embodiments, the peptide composition comprises two or more peptides, in which each peptide comprises an amino acid sequence selected from the group consisting of SEQ ID NOs: 137746 to 137763.

[0148] In another aspect, the invention provides for nucleic acid sequences encoding one or more amino acid sequences selected from the group consisting of SEQ ID NOs: 137610 to 137641 and SEQ ID NOs: 137680 to 137681.

[0149] In some embodiments, the nucleic acid sequences encode two or more amino acid sequences selected from the group consisting of SEQ ID NOs: 137610 to 137641 and SEQ ID NOs: 137680 to 137681.

[0150] In another aspect, the invention provides for a composition comprising nucleic acid sequences encoding one or more amino acid sequences selected from the group consisting of SEQ ID NOs: 137610 to 137641 and SEQ ID NOs: 137680 to 137681.

[0151] In some embodiments, the composition is administered to a subject. In some embodiments, the composition comprises nucleic acid sequences encoding two or more amino acid sequences selected from the group consisting of SEQ ID NOs: 137610 to 137641 and SEQ ID NOs: 137680 to 137681. In some embodiments, the nucleic acid sequences are administered in a construct for expression in vivo. In some embodiments, the in vivo administration of the nucleic acid sequences produce one or more peptides that is displayed by an HLA class I molecule. In some embodiments, the nucleic acid sequences are configured to allow expression of at least two peptides encoded by the nucleic acid sequences that are each displayed by a peptide specific set of HLA class I alleles, wherein all of the peptide specific sets of HLA class I alleles are not identical. In some embodiments, each of the one or more peptides is a modified or unmodified fragment of the influenza Polymerase acidic protein. In some embodiments, the composition is administered in an effective amount to a subject to prevent influenza. In some embodiments, the composition is administered in an effective amount to a subject to treat influenza.

[0152] In some embodiments, the composition comprises nucleic acid sequences encoding at least three amino acid sequences selected from the group consisting of SEQ ID NOs: 137610 to 137641 and SEQ ID NOs: 137680 to 137681.

[0153] In another aspect, the invention provides for a peptide composition comprising one or more peptides, in which each peptide comprises an amino acid sequence selected from the group consisting of SEQ ID NOs: 137610 to 137641 and SEQ ID NOs: 137680 to 137681.

[0154] In some embodiments, the peptide composition comprises two or more peptides, in which each peptide comprises an amino acid sequence selected from the group consisting of SEQ ID NOs: 137610 to 137641 and SEQ ID NOs: 137680 to 137681. In some embodiments, the composition is administered to a subject.

[0155] In some embodiments, the peptide composition comprises three or more peptides, in which each peptide comprises an amino acid sequence selected from the group consisting of SEQ ID NOs: 137610 to 137641 and SEQ ID NOs: 137680 to 137681.

[0156] In another aspect, the invention provides for a composition comprising nucleic acid sequences encoding one or more amino acid sequences selected from the group consisting of SEQ ID NOs: 137610 to 137641.

[0157] In some embodiments, the composition is administered to a subject. In some embodiments, the composition comprises nucleic acid sequences encoding two or more amino acid sequences selected from the group consisting of SEQ ID NOs: 137610 to 137641. In some embodiments, the nucleic acid sequences are administered in a construct for expression in vivo. In some embodiments, the in vivo administration of the nucleic acid sequences produce one or more peptides that is displayed by an HLA class I molecule. In some embodiments, the nucleic acid sequences are configured to allow expression of at least two peptides encoded by the nucleic acid sequences that are each displayed by a peptide specific set of HLA class I alleles, wherein all of the peptide specific sets of HLA class I alleles are not identical. In some embodiments, each of the one or more peptides is a modified or unmodified fragment of the influenza Polymerase acidic protein. In some embodiments, the composition is administered in an effective amount to a subject to prevent influenza. In some embodiments, the composition is administered in an effective amount to a subject to treat influenza.

[0158] In some embodiments, the composition comprises nucleic acid sequences encoding at least three amino acid sequences selected from the group consisting of SEQ ID NOs: 137610 to 137641.

[0159] In another aspect, the invention provides for a method of treating or preventing influenza by administering to a subject a composition comprising nucleic acid sequences encoding one or more amino acid sequences selected from the group consisting of SEQ ID NOs: 137610 to 137641.

[0160] In some embodiments, the composition comprises nucleic acid sequences encoding two or more amino acid sequences selected from the group consisting of SEQ ID NOs: 137610 to 137641.

[0161] In another aspect, the invention provides for a peptide composition comprising one or more peptides, in which each peptide comprises an amino acid sequence selected from the group consisting of SEQ ID NOs: 137610 to 137641.

[0162] In some embodiments, the peptide composition comprises two or more peptides, in which each peptide comprises an amino acid sequence selected from the group consisting of SEQ ID NOs: 137610 to 137641. In some embodiments a peptide in the peptide composition is displayed by an HLA class I molecule. In some embodiments, the at least two peptides are each capable of being displayed by a peptide specific set of HLA class I alleles, wherein all of the peptide specific sets of HLA class I alleles are not identical. In some embodiments, a peptide in the peptide composition is a modified or unmodified fragment of the influenza Polymerase acidic protein. In some embodiments, the peptide composition is administered in an effective amount to a subject to prevent influenza. In some embodiments, the peptide composition is administered in an effective amount to a subject to treat influenza.

[0163] In some embodiments, the peptide composition comprises three or more peptides, in which each peptide comprises an amino acid sequence selected from the group consisting of SEQ ID NOs: 137610 to 137641.

[0164] In another aspect, the invention provides for a method of treating or preventing influenza in a subject comprising administering to the subject a peptide composition comprising one or more peptides, in which each peptide comprises an amino acid sequence selected from the group consisting of SEQ ID NOs: 137610 to 137641.

[0165] In some embodiments, the peptide composition comprises two or more peptides, in which each peptide comprises an amino acid sequence selected from the group consisting of SEQ ID NOs: 137610 to 137641.

[0166] In another aspect, the invention provides for nucleic acid sequences encoding one or more amino acid sequences selected from the group consisting of SEQ ID NOs: 137764 to 137795.

[0167] In some embodiments, the nucleic acid sequences encode two or more amino acid sequences selected from the group consisting of SEQ ID NOs: 137764 to 137795.

[0168] In another aspect, the invention provides for a composition comprising nucleic acid sequences encoding one or more amino acid sequences selected from the group consisting of SEQ ID NOs: 137764 to 137795.

[0169] In some embodiments, the composition comprises nucleic acid sequences encoding two or more amino acid sequences selected from the group consisting of SEQ ID NOs: 137764 to 137795. In some embodiments, the nucleic acid sequences are administered in a construct for expression in vivo. In some embodiments, the in vivo administration of the nucleic acid sequences produce one or more peptides that is displayed by an HLA class II molecule. In some embodiments, the nucleic acid sequences are configured to allow expression of at least two peptides encoded by the nucleic acid sequences that are each displayed by a peptide specific set of HLA class II alleles, wherein all of the peptide specific sets of HLA class II alleles are not identical. In some embodiments, each of the one or more peptides is a modified or unmodified fragment of the influenza Polymerase acidic protein. In some embodiments, the composition is administered in an effective amount to a subject to prevent influenza. In some embodiments, the composition is administered in an effective amount to a subject to treat influenza. In some embodiments, the composition comprises nucleic acid sequences encoding at least three amino acid sequences selected from the group consisting of SEQ ID NOs: 137764 to 137795.

[0170] In another aspect, the invention provides for a method of treating or preventing influenza by administering to a subject a composition comprising nucleic acid sequences encoding one or more amino acid sequences selected from the group consisting of SEQ ID NOs: 137764 to 137795.

[0171] In some embodiments, the composition comprises nucleic acid sequences encoding two or more amino acid sequences selected from the group consisting of SEQ ID NOs: 137764 to 137795.

[0172] In another aspect, the invention provides for a peptide composition comprising one or more peptides, in which each peptide comprises an amino acid sequence selected from the group consisting of SEQ ID NOs: 137764 to 137795.

[0173] In some embodiments, the peptide composition comprises two or more peptides, in which each peptide comprises an amino acid sequence selected from the group consisting of SEQ ID NOs: 137764 to 137795. In some embodiments a peptide in the peptide composition is displayed by an HLA class II molecule. In some embodiments, the at least two peptides are each capable of being displayed by a peptide specific set of HLA class II alleles, wherein all of the peptide specific sets of HLA class II alleles are not identical. In some embodiments, a peptide in the peptide composition is a modified or unmodified fragment of the influenza Polymerase acidic protein. In some embodiments, the peptide composition is administered in an effective amount to a subject to prevent influenza. In some embodiments, the peptide composition is administered in an effective amount to a subject to treat influenza.

[0174] In another aspect, the invention provides for a method of treating or preventing influenza in a subject comprising administering to the subject a peptide composition comprising one or more peptides, in which each peptide comprises an amino acid sequence selected from the group consisting of SEQ ID NOs: 137764 to 137795.

[0175] In some embodiments, the peptide composition comprises two or more peptides, in which each peptide comprises an amino acid sequence selected from the group consisting of SEQ ID NOs: 137764 to 137795.

[0176] In another aspect, the invention provides for nucleic acid sequences encoding one or more amino acid sequences selected from the group consisting of SEQ ID NOs: 137550 to 137581, SEQ ID NO: 137614, SEQ ID NOs: 137619 to 137620, SEQ ID NO: 137624, SEQ ID NO: 137630, and SEQ ID NO: 137677.

[0177] In some embodiments, the nucleic acid sequences encode two or more amino acid sequences selected from the group consisting of SEQ ID NOs: 137550 to 137581, SEQ ID NO: 137614, SEQ ID NOs: 137619 to 137620, SEQ ID NO: 137624, SEQ ID NO: 137630, and SEQ ID NO: 137677.

[0178] In another aspect, the invention provides for a composition comprising nucleic acid sequences encoding one or more amino acid sequences selected from the group consisting of SEQ ID NOs: 137550 to 137581, SEQ ID NO: 137614, SEQ ID NOs: 137619 to 137620, SEQ ID NO: 137624, SEQ ID NO: 137630, and SEQ ID NO: 137677.

[0179] In some embodiments, the composition is administered to a subject. In some embodiments, the composition comprises nucleic acid sequences encoding two or more amino acid sequences selected from the group consisting of SEQ ID NOs: 137550 to 137581, SEQ ID NO: 137614, SEQ ID NOs: 137619 to 137620, SEQ ID NO: 137624, SEQ ID NO: 137630, and SEQ ID NO: 137677. In some embodiments, the nucleic acid sequences are administered in a construct for expression in vivo. In some embodiments, the in vivo administration of the nucleic acid sequences produce one or more peptides that is displayed by an HLA class I molecule. In some embodiments, the nucleic acid sequences are configured to allow expression of at least two peptides encoded by the nucleic acid sequences that are each displayed by a peptide specific set of HLA class I alleles, wherein all of the peptide specific sets of HLA class I alleles are not identical. In some embodiments, each of the one or more peptides is a modified or unmodified fragment of the influenza Protein PA-X. In some embodiments, the composition is administered in an effective amount to a subject to prevent influenza. In some embodiments, the composition is administered in an effective amount to a subject to treat influenza.

[0180] In some embodiments, the composition comprises nucleic acid sequences encoding at least three amino acid sequences selected from the group consisting of SEQ ID NOs: 137550 to 137581, SEQ ID NO: 137614, SEQ ID NOs: 137619 to 137620, SEQ ID NO: 137624, SEQ ID NO: 137630, and SEQ ID NO: 137677.

[0181] In another aspect, the invention provides for a peptide composition comprising one or more peptides, in which each peptide comprises an amino acid sequence selected from the group consisting of SEQ ID NOs: 137550 to 137581, SEQ ID NO: 137614, SEQ ID NOs: 137619 to 137620, SEQ ID NO: 137624, SEQ ID NO: 137630, and SEQ ID NO: 137677.

[0182] In some embodiments, the peptide composition comprises two or more peptides, in which each peptide comprises an amino acid sequence selected from the group consisting of SEQ ID NOs: 137550 to 137581, SEQ ID NO: 137614, SEQ ID NOs: 137619 to 137620, SEQ ID NO: 137624, SEQ ID NO: 137630, and SEQ ID NO: 137677. In some embodiments, the composition is administered to a subject.

[0183] In some embodiments, the peptide composition comprises three or more peptides, in which each peptide comprises an amino acid sequence selected from the group consisting of SEQ ID NOs: 137550 to 137581, SEQ ID NO: 137614, SEQ ID NOs: 137619 to 137620, SEQ ID NO: 137624, SEQ ID NO: 137630, and SEQ ID NO: 137677.

[0184] In another aspect, the invention provides for a composition comprising nucleic acid sequences encoding one or more amino acid sequences selected from the group consisting of SEQ ID NOs: 137550 to 137581, SEQ ID NO: 137614, SEQ ID NOs: 137619 to 137620, SEQ ID NO: 137624, and SEQ ID NO: 137630.

[0185] In some embodiments, the composition is administered to a subject. In some embodiments, the composition comprises nucleic acid sequences encoding two or more amino acid sequences selected from the group consisting of SEQ ID NOs: 137550 to 137581, SEQ ID NO: 137614, SEQ ID NOs: 137619 to 137620, SEQ ID NO: 137624, and SEQ ID NO: 137630. In some embodiments, the nucleic acid sequences are administered in a construct for expression in vivo. In some embodiments, the in vivo administration of the nucleic acid sequences produce one or more peptides that is displayed by an HLA class I molecule. In some embodiments, the nucleic acid sequences are configured to allow expression of at least two peptides encoded by the nucleic acid sequences that are each displayed by a peptide specific set of HLA class I alleles, wherein all of the peptide specific sets of HLA class I alleles are not identical. In some embodiments, each of the one or more peptides is a modified or unmodified fragment of the influenza Protein PA-X. In some embodiments, the composition is administered in an effective amount to a subject to prevent influenza. In some embodiments, the composition is administered in an effective amount to a subject to treat influenza.

[0186] In some embodiments, the composition comprises nucleic acid sequences encoding at least three amino acid sequences selected from the group consisting of SEQ ID NOs: 137550 to 137581, SEQ ID NO: 137614, SEQ ID NOs: 137619 to 137620, SEQ ID NO: 137624, and SEQ ID NO: 137630.

[0187] In another aspect, the invention provides for a method of treating or preventing influenza by administering to a subject a composition comprising nucleic acid sequences encoding one or more amino acid sequences selected from the group consisting of SEQ ID NOs: 137550 to 137581, SEQ ID NO: 137614, SEQ ID NOs: 137619 to 137620, SEQ ID NO: 137624, and SEQ ID NO: 137630.

[0188] In some embodiments, the composition comprises nucleic acid sequences encoding two or more amino acid sequences selected from the group consisting of SEQ ID NOs: 137550 to 137581, SEQ ID NO: 137614, SEQ ID NOs: 137619 to 137620, SEQ ID NO: 137624, and SEQ ID NO: 137630.

[0189] In another aspect, the invention provides for a peptide composition comprising one or more peptides, in which each peptide comprises an amino acid sequence selected from the group consisting of SEQ ID NOs: 137550 to 137581, SEQ ID NO: 137614, SEQ ID NOs: 137619 to 137620, SEQ ID NO: 137624, and SEQ ID NO: 137630.

[0190] In some embodiments, the peptide composition comprises two or more peptides, in which each peptide comprises an amino acid sequence selected from the group consisting of SEQ ID NOs: 137550 to 137581, SEQ ID NO: 137614, SEQ ID NOs: 137619 to 137620, SEQ ID NO: 137624, and SEQ ID NO: 137630. In some embodiments a peptide in the peptide composition is displayed by an HLA class I molecule. In some embodiments, the at least two peptides are each capable of being displayed by a peptide specific set of HLA class I alleles, wherein all of the peptide specific sets of HLA class I alleles are not identical. In some embodiments, a peptide in the peptide composition is a modified or unmodified fragment of the influenza Protein PA-X. In some embodiments, the peptide composition is administered in an effective amount to a subject to prevent influenza. In some embodiments, the peptide composition is administered in an effective amount to a subject to treat influenza.

[0191] In some embodiments, the peptide composition comprises three or more peptides, in which each peptide comprises an amino acid sequence selected from the group consisting of SEQ ID NOs: 137550 to 137581, SEQ ID NO: 137614, SEQ ID NOs: 137619 to 137620, SEQ ID NO: 137624, and SEQ ID NO: 137630.

[0192] In another aspect, the invention provides for a method of treating or preventing influenza in a subject comprising administering to the subject a peptide composition comprising one or more peptides, in which each peptide comprises an amino acid sequence selected from the group consisting of SEQ ID NOs: 137550 to 137581, SEQ ID NO: 137614, SEQ ID NOs: 137619 to 137620, SEQ ID NO: 137624, and SEQ ID NO: 137630.

[0193] In some embodiments, the peptide composition comprises two or more peptides, in which each peptide comprises an amino acid sequence selected from the group consisting of SEQ ID NOs: 137550 to 137581, SEQ ID NO: 137614, SEQ ID NOs: 137619 to 137620, SEQ ID NO: 137624, and SEQ ID NO: 137630.

[0194] In another aspect, the invention provides for nucleic acid sequences encoding one or more amino acid sequences selected from the group consisting of SEQ ID NOs: 137713 to 137745.

[0195] In some embodiments, the nucleic acid sequences encode two or more amino acid sequences selected from the group consisting of SEQ ID NOs: 137713 to 137745.

[0196] In another aspect, the invention provides for a composition comprising nucleic acid sequences encoding one or more amino acid sequences selected from the group consisting of SEQ ID NOs: 137713 to 137745.

[0197] In some embodiments, the composition comprises nucleic acid sequences encoding two or more amino acid sequences selected from the group consisting of SEQ ID NOs: 137713 to 137745. In some embodiments, the nucleic acid sequences are administered in a construct for expression in vivo. In some embodiments, the in vivo administration of the nucleic acid sequences produce one or more peptides that is displayed by an HLA class II molecule. In some embodiments, the nucleic acid sequences are configured to allow expression of at least two peptides encoded by the nucleic acid sequences that are each displayed by a peptide specific set of HLA class II alleles, wherein all of the peptide specific sets of HLA class II alleles are not identical. In some embodiments, each of the one or more peptides is a modified or unmodified fragment of the influenza Protein PA-X. In some embodiments, the composition is administered in an effective amount to a subject to prevent influenza. In some embodiments, the composition is administered in an effective amount to a subject to treat influenza. In some embodiments, the composition comprises nucleic acid sequences encoding at least three amino acid sequences selected from the group consisting of SEQ ID NOs: 137713 to 137745.

[0198] In another aspect, the invention provides for a method of treating or preventing influenza by administering to a subject a composition comprising nucleic acid sequences encoding one or more amino acid sequences selected from the group consisting of SEQ ID NOs: 137713 to 137745.

[0199] In some embodiments, the composition comprises nucleic acid sequences encoding two or more amino acid sequences selected from the group consisting of SEQ ID NOs: 137713 to 137745.

[0200] In another aspect, the invention provides for a peptide composition comprising one or more peptides, in which each peptide comprises an amino acid sequence selected from the group consisting of SEQ ID NOs: 137713 to 137745.

[0201] In some embodiments, the peptide composition comprises two or more peptides, in which each peptide comprises an amino acid sequence selected from the group consisting of SEQ ID NOs: 137713 to 137745. In some embodiments a peptide in the peptide composition is displayed by an HLA class II molecule. In some embodiments, the at least two peptides are each capable of being displayed by a peptide specific set of HLA class II alleles, wherein all of the peptide specific sets of HLA class II alleles are not identical. In some embodiments, a peptide in the peptide composition is a modified or unmodified fragment of the influenza Protein PA-X. In some embodiments, the peptide composition is administered in an effective amount to a subject to prevent influenza. In some embodiments, the peptide composition is administered in an effective amount to a subject to treat influenza.

[0202] In another aspect, the invention provides for a method of treating or preventing influenza in a subject comprising administering to the subject a peptide composition comprising one or more peptides, in which each peptide comprises an amino acid sequence selected from the group consisting of SEQ ID NOs: 137713 to 137745.

[0203] In some embodiments, the peptide composition comprises two or more peptides, in which each peptide comprises an amino acid sequence selected from the group consisting of SEQ ID NOs: 137713 to 137745.

[0204] In some embodiments, the compositions, including peptide compositions, of the invention are immunogenic compositions. To this end, the invention provides for a method of inducing an immunogenic response in a subject comprising administering to the subject a composition of the invention.

[0205] In some embodiments, compositions, including peptide compositions, of the invention are vaccines.

### BRIEF DESCRIPTION OF THE DRAWINGS

[0206] The following figures depict illustrative embodiments of the invention.

[0207] FIG. 1 is a flow chart of a vaccine optimization method.

[0208] FIG. 2 is a flow chart of a vaccine optimization method with seed set compression.

[0209] FIG. 3 shows predicted population coverage for MHC class I vaccines by vaccine size for Influenza A nucleoprotein made by augmentation, starting with 100% conserved peptides (1-3), 98-100% conserved peptides (4-7), and 90-100% conserved peptides (8-30) for 1, 3, and 5 predicted peptide-HLA hits per-individual. The dashed lines show the predicted population coverage of vaccines made from all candidates 90-100% conserved for 1 (top line), 3 (middle line), and 5 (bottom line) peptide-HLA hits per-individual and shows the ability of vaccine augmentation to approach this upper bound while utilizing highly conserved peptides.

[0210] FIG. 4 shows predicted population coverage for MHC class I vaccines by vaccine size for Influenza A nucleoprotein peptides 98-100% conserved and their heteroclitic derivatives for 1, 3, and 5 peptide-HLA hits per-individual. The dashed lines show predicted vaccine coverage without heteroclitic derivatives for 1 (top line), 3 (middle line), and 5 (bottom line) peptide-HLA hits per-individual.

[0211] FIG. 5 shows predicted population coverage for MHC class I vaccines by vaccine size for Influenza A nucleoprotein peptides 100% conserved and their heteroclitic derivatives for 1, 3, and 5 peptide-HLA hits per-individual. The dashed lines show predicted vaccine coverage without heteroclitic derivatives for 1 (top line), 3 (middle line), and 5 (bottom line) peptide-HLA hits per-individual.

[0212] FIG. 6 shows predicted population coverage for MHC class II vaccines by vaccine size for Influenza A nucleoprotein peptides 95-100% conserved and their heteroclitic derivatives for 1, 3, and 5 peptide-HLA hits per-individual. The dashed lines show predicted vaccine coverage without heteroclitic derivatives for 1 (top line), 3 (middle line), and 5 (bottom line) peptide-HLA hits per-individual.

[0213] FIG. 7 shows predicted population coverage for MHC class II vaccines by vaccine size for Influenza A nucleoprotein peptides 100% conserved and their heteroclitic derivatives for 1, 3, and 5 peptide-HLA hits per-individual. The dashed line shows the equivalent predicted vaccine coverage without heteroclitic derivatives for 1, 3, and 5 peptide-HLA hits per-individual.

[0214] FIGS. 8A-8D shows predicted population coverage for MHC class I vaccines by vaccine size for the Influenza A virus RNA-directed RNA polymerase catalytic subunit (FIG. 8A), matrix protein 1 (FIG. 8B), polymerase acidic protein (FIG. 8C), and polymerase basic protein 2 (FIG. 8D). Predicted population coverage is shown for at least 1, 3, and 5 predicted peptide-HLA hits per-individual as a function of vaccine size (number of peptides). The dashed lines show the predicted population coverage of vaccines made from all 100% conserved peptide candidates without heteroclitic derivatives for at least 1 (top line), 3 (middle line), and 5 (bottom line) peptide-HLA hits per-individual.

[0215] FIG. 9 shows predicted population coverage for MHC class I vaccines by vaccine size for the Influenza A virus PA-X protein. Predicted population coverage is shown for at least 1, 3, and 5 predicted peptide-HLA hits per-individual as a function of vaccine size (number of peptides). The dashed lines show the predicted population coverage of vaccines made from all 100% conserved peptide candidates without heteroclitic derivatives for at least 1 (top line), 3 (middle line), and 5 (bottom line) peptide-HLA hits per-individual.

[0216] FIGS. 10A-10D shows predicted population coverage for MHC class II vaccines by vaccine size for the Influenza A virus RNA-directed RNA polymerase catalytic subunit (FIG. 10A), matrix protein 1 (FIG. 10B), polymerase acidic protein (FIG. 10C), and polymerase basic protein 2 (FIG. 10D). Predicted population coverage is shown for at least 1, 3, and 5 predicted peptide-HLA hits per-individual as a function of vaccine size (number of peptides). The dashed lines show the predicted population coverage of vaccines made from all 100% conserved peptide candidates without heteroclitic derivatives for at least 1 (top line), 3 (middle line), and 5 (bottom line) peptide-HLA hits per-individual.

[0217] FIG. 11 shows predicted population coverage for MHC class II vaccines by vaccine size for the Influenza A virus PA-X protein. Predicted population coverage is shown for at least 1, 3, and 5 predicted peptide-HLA hits per-individual as a function of vaccine size (number of peptides). The dashed lines show the predicted population coverage of vaccines made from all 100% conserved peptide candidates without heteroclitic derivatives for at least 1 (top line), 3 (middle line), and 5 (bottom line) peptide-HLA hits per-individual.

[0218] FIG. 12 shows predicated peptide-HLA hits by vaccine size for a KRAS G12V vaccine for the HLA diplotype HLA-A02:03, HLA-A11:01, HLA-B55:02, HLA-B58:01, HLA-C03:02, HLA-C03:03.

[0219] FIG. 13 is a table showing the respective probabilities of target presentations for various mutated protein targets across different cancers.

[0220] FIG. 14 is a flow chart showing a multiple target (combined) vaccine optimization method.

[0221] FIG. 15 shows an example Python implementation of the MergeMulti function for combined vaccine design procedures.

### DETAILED DESCRIPTION OF THE INVENTION

[0222] The practice of the present invention can employ, unless otherwise indicated, conventional techniques of genetics, molecular biology, protein chemistry, computational biology, and formulation science, which are within the skill of the art.

[0223] In order that the present invention can be more readily understood, certain terms are first defined. Additional definitions are set forth throughout the disclosure. Unless defined otherwise, all technical and scientific terms used herein have the same meaning as commonly understood by one of ordinary skill in the art to which this invention is related.

[0224] Any headings provided herein are not limitations of the various aspects or embodiments of the invention, which can be had by reference to the specification as a whole. Accordingly, the terms defined immediately below are more fully defined by reference to the specification in its entirety.

[0225] All references cited in this disclosure are hereby incorporated by reference in their entireties. In addition, any manufacturers' instructions or catalogues for any products cited or mentioned herein are incorporated by reference. Documents incorporated by reference into this text, or any teachings therein, can be used in the practice of the present invention. Documents incorporated by reference into this text are not admitted to be prior art.

### Definitions

[0226] The phraseology or terminology in this disclosure is for the purpose of description and not of limitation, such that the terminology or phraseology of the present specification is to be interpreted by the skilled artisan in light of the teachings and guidance.

[0227] As used in this specification and the appended claims, the singular forms “a,” “an,” and “the” include plural referents, unless the context clearly dictates otherwise. The terms “a” (or “an”) as well as the terms “one or more” and “at least one” can be used interchangeably.

[0228] Furthermore, “and/or” is to be taken as specific disclosure of each of the two specified features or components with or without the other. Thus, the term “and/or” as used in a phrase such as “A and/or B” is intended to include A and B, A or B, A (alone), and B (alone). Likewise, the term “and/or” as used in a phrase such as “A, B, and/or C” is intended to include A, B, and C; A, B, or C; A or B; A or C; B or C; A and B; A and C; B and C; A (alone); B (alone); and C (alone).

[0229] Wherever embodiments are described with the language “comprising,” otherwise analogous embodiments described in terms of “consisting of” and/or “consisting essentially of” are included.

[0230] Units, prefixes, and symbols are denoted in their Système International d'Unités (SI) accepted form. Numeric ranges are inclusive of the numbers defining the range, and any individual value provided herein can serve as an endpoint for a range that includes other individual values provided herein. For example, a set of values such as 1, 2, 3, 8, 9, and 10 is also a disclosure of a range of numbers from 1-10, from 1-8, from 3-9, and so forth. Likewise, a disclosed range is a disclosure of each individual value (i.e., intermediate) encompassed by the range, including integers and fractions. For example, a stated range of 5-10 is also a disclosure of 5, 6, 7, 8, 9, and 10 individually, and of 5.2, 7.5, 8.7, and so forth.

[0231] Unless otherwise indicated, the terms “at least” or “about” preceding a series of elements is to be understood to refer to every element in the series. The term “about” preceding a numerical value includes ±10% of the recited value. For example, a concentration of about 1 mg/mL includes 0.9 mg/mL to 1.1 mg/mL. Likewise, a concentration range of about 10% to 10% (w/v) includes 0.9% (w/v) to 11% (w/v).

[0232] The term “nucleic acid” as used herein, in its broadest sense, refers to any compound and/or substance that is or can be incorporated into an oligonucleotide chain. In some embodiments, a nucleic acid is a compound and/or substance that is or can be incorporated into an oligonucleotide chain via a phosphodiester linkage. As will be clear from context, in some embodiments, “nucleic acid” refers to an individual nucleic acid residue (e.g., a nucleotide and/or nucleoside); in some embodiments, “nucleic acid” refers to an oligonucleotide chain comprising individual nucleic acid residues. In some embodiments, a “nucleic acid” is or comprises RNA; in some embodiments, a “nucleic acid” is or comprises DNA. In some embodiments, a nucleic acid is, comprises, or consists of one or more natural nucleic acid residues. In some embodiments, a nucleic acid is, comprises, or consists of one or more nucleic acid analogs. In some embodiments, a nucleic acid analog differs from a nucleic acid in that it does not utilize a phosphodiester backbone.

[0233] The term “peptide” refers to polymers of amino acids of any length. The polymer can be linear or branched, can comprise modified amino acids, and can be interrupted by non-amino acids. Except where indicated otherwise, e.g., for the abbreviations for the uncommon or unnatural amino acids set forth herein, the three-letter and one-letter abbreviations, as used in the art, are used herein to represent amino acid residues. Groups or strings of amino acid abbreviations are used to represent peptides. Except where specifically indicated, peptides are indicated with the N-terminus of the left and the sequence is written from the N-terminus to the C-terminus.

[0234] The term “composition,” such as a peptide composition, refers to a preparation that is in such form as to permit the biological activity of the active ingredient to be effective.

[0235] A “pharmaceutical composition” refers to a composition which contains no additional components that are unacceptably toxic to a subject to which the composition would be administered and that additionally comprises a pharmaceutically acceptable carrier, such as physiological saline.

[0236] An “immunogenic composition,” such as an immunogenic peptide composition, refers to a composition that can induce an immune response in a subject.

[0237] A “vaccine” or “vaccine composition,” such as a peptide vaccine,” is a composition that can generate acquired immunity against a pathogen or disease in a subject.

[0238] An “effective amount” of an active agent is an amount sufficient to carry out a specifically stated purpose.

[0239] A “subject” or “individual” or “animal” or “patient” or “mammal,” is any subject, particularly a mammalian subject, for whom diagnosis, prognosis, or therapy is desired. Mammalian subjects include humans, domestic animals, farm animals, sports animals, and laboratory animals including, e.g., humans, non-human primates, canines, felines, porcines, bovines, equines, rodents, including rats and mice, rabbits, etc. A subject can also include an in vitro culture of one or more cells that are exposed to the compositions described herein.

[0240] The term “identity” refers to the overall relatedness between polymeric molecules, e.g., between nucleic acid molecules (e.g., DNA molecules and/or RNA molecules) and/or between polypeptide molecules. Calculation of the percent identity of two nucleic acid or polypeptide sequences, for example, can be performed by aligning the two sequences for optimal comparison purposes (e.g., gaps can be introduced in one or both of a first and a second sequences for optimal alignment and non-identical sequences can be disregarded for comparison purposes). The comparison of sequences and determination of percent identity between two sequences can be accomplished using a mathematical algorithm. For example, the percent identity between two nucleotide sequences can be determined using the algorithm of Meyers and Miller (CABIOS, 1989, 4: 11-17), which has been incorporated into the ALIGN program (version 2.0). In some exemplary embodiments, nucleic acid sequence comparisons made with the ALIGN program use a PAM120 weight residue table, a gap length penalty of 12 and a gap penalty of 4. The percent identity between two nucleotide sequences can, alternatively, be determined using the GAP program in the GCG software package using an NWSgapdna.CMP matrix.

[0241] Terms such as “treating” or “treatment” or “to treat” or “alleviating” or “to alleviate” refer to therapeutic measures that cure, slow down, lessen symptoms of, and/or halt progression of a diagnosed pathologic condition or disorder. In certain embodiments, a subject is successfully “treated” for a disease or disorder if the patient shows total, partial, or transient alleviation or elimination of at least one symptom or measurable physical parameter associated with the disease or disorder.

### Composition/Vaccine Design Considerations

[0242] In some embodiments, the disclosure provides for compositions and vaccines that incorporate peptide sequences that will be displayed by Major Histocompatibility Complex (MHC) molecules on cells and train the immune system to recognize cancer or pathogen diseased cells. In some embodiments, the disclosure provides for compositions and vaccines that that incorporate peptide sequences that will be displayed by Major Histocompatibility Complex (MHC) molecules on cells to induce therapeutic tolerance in antigen-specific immunotherapy for autoimmune diseases (Alhadj et al., 2017; Gibson et al., 2015). In some embodiments, a composition or vaccine comprises one or more peptides. In some embodiments, a composition or vaccine is an mRNA or DNA construct administered for expression in vivo that encodes for one or more peptides.

[0243] It is to be understood that methods and procedures described herein for designing and preparing vaccines are applicable and cover methods and procedures for designing and preparing compositions, pharmaceutical compositions, and immunogenic compositions.

[0244] Peptide display by an MHC molecule is necessary, but not sufficient, for a peptide to be immunogenic and cause the recognition of the resulting peptide-MHC complex by an individual's T cells to trigger T cell activation, expansion, and immune memory. In some embodiments, ELISPOT (Slota et al., 2011) or the Multiplex Identification of Antigen-Specific T Cell Receptors Using a Combination of Immune Assays and Immune Receptor Sequencing (MIRA) assay (Klinger et al., 2015) are used to score peptide display (e.g., a peptide immunogenicity that requires peptide binding) by an MHC molecule (e.g., HLA allele) (e.g., measured as a peptide-HLA binding score). In some embodiments, experimental data from assays such as the ELISPOT (Slota et al., 2011) or the Multiplex Identification of Antigen-Specific T Cell Receptors Using a Combination of Immune Assays and Immune Receptor Sequencing (MIRA) assay (Klinger et al., 2015) can be used to produce a peptide-HLA immunogenicity metric with respect to a peptide and an HLA allele in a given experimental context or individual. In some embodiments, experimental data from assays such as the ELISPOT (Slota et al., 2011) or the Multiplex Identification of Antigen-Specific T Cell Receptors Using a Combination of Immune Assays and Immune Receptor Sequencing (MIRA) assay (Klinger et al., 2015) can be combined with machine learning based predictions for scoring peptide display (e.g., binding affinity) by an MHC molecule (e.g., HLA allele) (e.g., measured as a peptide-HLA binding score) or for determining a peptide-HLA immunogenicity metric. In some embodiments, the MHCflurry or NetMHCpan (Reynisson et al., 2020) computational methods (as known in the art) are used to predict MHC class I display of a peptide by an HLA allele (see Table 1). In some embodiments, the NetMHCIIpan computational method (Reynisson et al., 2020) is used to predict MHC class II display of a peptide by an HLA allele (see Table 2).

[0245] In some embodiments, computational methods such as MHCflurry (O'Donnell et al., 2018; O'Donnell et al., 2020; incorporated by reference in their entireties herein), NetMHCpan (Reynisson et al., 2020, incorporated by reference in its entirety herein), and NetMHCIIpan (Reynisson et al., 2020) are used to predict either MHC class I (MHCflurry, NetMHCpan) or class II (NetMHCIIpan) display of peptides by an HLA allele. In other embodiments, other methods of determining peptide-HLA binding are used as disclosed in International Publication No. WO 2005/042698, incorporated by reference in its entirety herein. NetMHCpan-4.1 and NetMHCIIpan-4.0 utilize the NNAlign_MA algorithm (Alvarez et al., 2019, incorporated by reference in its entirety herein) for predicting peptide-HLA binding. NNAlign_MA is in turn based upon the NNAlign (Nielsen et al., 2009, Nielsen et al., 2017, incorporated by reference in their entireties herein) neural network. NetMHCpan-4.1 (Reynisson et al., 2020) uses NNAlign_MA networks with at least 180 inputs that describe the peptide sequence (9×20=180 inputs). Networks with both 56 and 66 hidden neurons and two outputs are utilized (Alvarez et al., 2019). Each network architecture (56 or 66 hidden neurons) is trained with 5 different random parameter initializations and 5-fold cross-validation resulting in a total of 50 individual trained networks (2 architectures×5 initializations×5 cross-validation). These 50 trained networks are used as an ensemble with 25 networks having at least 10,800 parameters (180 inputs×56 neurons) and 25 networks consist of at least 11,880 parameters (180 inputs×66 neurons). Thus, the ensemble of 50 networks in NetMHCpan-4.1 consists of at least 567,000 parameters that must be evaluated with at least 567,000 arithmetic operations for computing peptide-MHC binding. NetMHCIIpan-4.1 (Reynisson et al., 2020) uses NNAlign_MA networks with at least 180 inputs that describe the peptide sequence (9×20=180 inputs). Networks with 2, 10, 20, 40, and 60 hidden neurons and two outputs are utilized (Alvarez et al., 2019). Each network architecture (2, 10, 20, 40, or 60 hidden neurons) is trained with 10 different random parameter initializations and 5-fold cross-validation resulting in a total of 250 individual trained networks (5 architectures×10 initializations×5 cross-validation). These 250 trained networks are used as an ensemble with 50 networks having at least 360 parameters (180 inputs×2 neurons), 50 networks having at least 1800 parameters (180 inputs×10 neurons), 50 networks having at least 3600 parameters (180 inputs×20 neurons), 50 networks having at least 7200 parameters (180 inputs×40 neurons), and 50 networks having at least 10,800 parameters (180 inputs×60 neurons). Thus, the ensemble of 250 networks in NetMHCIIpan-4.0 consists of at least 1,188,000 parameters that must be evaluated with at least 1,188,000 arithmetic operations for computing peptide-MHC binding.

[0246] In some embodiments, computational methods used to predict either MHC class I (e.g., MHCflurry, NetMHCpan) or class II (e.g., NetMHCIIpan) peptide-HLA binding scores or peptide-HLA immunogenicity metrics are based upon data from experimental mass spectrometry observations of peptides bound by MHC molecules. In some embodiments, computational methods used to predict either MHC class I (e.g., MHCflurry, NetMHCpan) or class II (e.g., NetMHCIIpan) peptide-HLA binding scores or peptide-HLA immunogenicity metrics are based upon data from experimental observations of peptide-MHC binding affinity. In some embodiments, experimental observations of peptide-MHC binding affinity or immunogenicity, including mass spectrometry measurements of peptide-HLA binding and measurements of T cell activation, can be found in databases such as the Immune Epitope Database (IEDB) (Vita et al., 2018). The output of MHCflurry 2.0 (O'Donnell et al., 2020, incorporated by reference in its entirety herein) is based upon 493,473 mass spectrometry measurements of peptide-HLA binding, and 219,596 affinity measurements of peptide-HLA binding. The output of NetMHCpan-4.1 (Reynisson et al., 2020) is based upon 665,492 mass spectrometry measurements of peptide-HLA binding, and 52,402 affinity measurements of peptide-HLA binding. The output of NetMHCIIpan-4.0 (Reynisson et al., 2020) is based upon 381,066 mass spectrometry measurements of peptide-HLA binding, and 44,861 affinity measurements of peptide-HLA binding.

[0247] A peptide is displayed by an MHC molecule when it binds within the groove of the MHC molecule and is transported to the cell surface where it can be recognized by a T cell receptor. A target peptide refers to a foreign peptide or a self-peptide. In some embodiments, a peptide that is part of the normal proteome in a healthy individual is a self-peptide, and a peptide that is not part of the normal proteome is a foreign peptide. In some embodiments, target peptides can be part of the normal proteome that exhibit aberrant expression (e.g., cancer-testis antigens such as NY-ESO-1). Foreign peptides can be generated by mutations in normal self-proteins in tumor cells that create epitopes called neoantigens, or by pathogenic infections. In some embodiments, a neoantigen is any subsequence of a human protein, where the subsequence contains one or more altered amino acids or protein modifications that do not appear in a healthy individual. Therefore, in this disclosure, foreign peptide refers to an amino acid sequence encoding a fragment of a target protein/peptide (or a full-length protein/peptide), the target protein/peptide consisting of a neoantigen protein, a pathogen proteome, or any other undesired protein that is non-self and is expected to be bound and displayed by an HLA allele.

[0248] The Influenza A virus Nucleoprotein, RNA-directed RNA polymerase catalytic subunit, matrix protein 1, polymerase basic protein 2, polymerase acidic protein, and PA-X protein are part of the influenza proteome, and their sequences vary by influenza strain and influenza strain variants. One example strain is Influenza A virus (strain A/Puerto Rico/8/1934 H1N1) UniProt P03466 (NCAP_I34A1). For each Influenza A protein, we consider multiple protein sequences from different influenza strain variants, and the methods described are not restricted to specific strains or pathogen proteins.

[0249] A challenge for the design of peptide vaccines is the diversity of human MHC alleles (HLA alleles) that each have specific preferences for the peptide sequences they will display. The Human Leukocyte Antigen (HLA) loci, located within the MHC, encode the HLA class I and class II molecules. There are three classical class I loci (HLA-A, HLA-B, and HLA-C) and three loci that encode class II molecules (HLA-DR, HLA-DQ, and HLA-DP). An individual's HLA type describes the alleles they carry at each of these loci. Peptides of length of between about 8 and about 11 residues can bind to HLA class I (or MHC class I) molecules whereas those peptides of length of between about 13 and about 25 residues bind to HLA class II (or MHC class II) molecules (Rist et al., 2013; Chicz et al., 1992). Human populations that originate from different geographies have differing frequencies of HLA alleles, and these populations exhibit linkage disequilibrium between HLA loci that result in population specific haplotype frequencies. In some embodiments, methods are disclosed for creating effective vaccines that include consideration of the HLA allelic frequency in the target population, as well as linkage disequilibrium between HLA genes to achieve a set of peptides that is likely to be robustly displayed.

[0250] The present disclosure provides for compositions, systems, and methods of vaccine designs that produce immunity to single or multiple targets. In some embodiments, a target is a neoantigen protein sequence, a pathogen proteome, or any other undesired protein sequence that is non-self and is expected to be bound and displayed by an HLA molecule (also referred to herein as an HLA allele). When a target is present in an individual, it may result in multiple peptide sequences that are displayed by a variety of HLA alleles. In some embodiments, it may be desirable to create a vaccine that includes selected self-peptides, and thus these selected self-peptides are considered to be the target peptides for this purpose.

[0251] The term peptide-HLA binding is defined to be the binding of a peptide to an HLA allele, and can either be computationally predicted, experimentally observed, or computationally predicted using experimental observations. The metric of peptide-HLA binding can be expressed as affinity, percentile rank, binary at a predetermined threshold, probability, or other metrics as are known in the art. The term peptide-HLA immunogenicity metric is defined as the activation of T cells based upon their recognition of a peptide when bound by an HLA allele. The term peptide-HLA immunogenicity score is another term for a peptide-HLA immunogenicity metric, and the terms are interchangeable. A peptide-HLA immunogenicity metric can vary from individual to individual, and the metric for peptide-HLA immunogenicity can be expressed as a probability, a binary indicator, or other metric that relates to the likelihood that a peptide-HLA combination will be immunogenic. In some embodiments, peptide-HLA immunogenicity is defined as the induction of immune tolerance based upon the recognition of a peptide when bound by an HLA allele. A peptide-HLA immunogenicity metric can be computationally predicted, experimentally observed, or computationally predicted using experimental observations. In some embodiments, a peptide-HLA immunogenicity metric is based only upon peptide-HLA binding, since peptide-HLA binding is necessary for peptide-HLA immunogenicity. In some embodiments, peptide-HLA immunogenicity data or computational predictions of peptide-HLA immunogenicity can be included and combined with scores for peptide display in the methods disclosed herein. One way of combining the scores is using immunogenicity data for peptides assayed for immunogenicity in diseased or vaccinated individuals and assigning peptides to the HLA allele that displayed them in the individual by choosing the HLA allele that computational methods predict has the highest likelihood of display. For peptides that are not experimentally assayed, computational predictions of display can be used. In some embodiments, different computational methods of predicting peptide-HLA immunogenicity or peptide-HLA binding can be combined (Liu et al., 2020b). For a given set of peptides and a set of HLA alleles, the term peptide-HLA hits is the number of unique combinations of peptides and HLA alleles that exhibit peptide-HLA immunogenicity or binding at a predetermined threshold. For example, a peptide-HLA hit of 2 can mean that one peptide is predicted to be bound (or trigger T cell activation) by two different HLA alleles, two peptides are predicted to be bound (or trigger T cell activation) by two different HLA alleles, or two peptides are predicted to be bound (or trigger T cell activation) by the same HLA allele. For a given set of peptides and HLA frequencies, HLA haplotype frequencies, or HLA diplotype frequencies, the expected number of peptide-HLA hits is the average number of peptide-HLA hits in each set of HLAs that represent an individual, weighted by their frequency of occurrence.

[0252] Because immunogenicity may vary from individual to individual, one method to increase the probability of vaccine efficacy is to use a diverse set of target peptides (e.g., at least two peptides) to increase the chances that some subset of them will be immunogenic in a given individual. Prior research using mouse models has shown that most MHC displayed peptides are immunogenic, but immunogenicity varies from individual to individual as described in Croft et al. (2019). In some embodiments, experimental peptide-HLA immunogenicity data are used to determine which target peptides and their modifications will be effective immunogens in a vaccine.

[0253] Considerations for the design of peptide vaccines are outlined in Liu et al. (2020a) and (Liu et al., 2020b) and U.S. Pat. Nos. 11,058,751 and 11,161,892, which are incorporated by reference in their entireties herein.

[0254] Certain target peptides may not bind with high affinity to a wide range of HLA molecules. To increase the binding of target peptides to HLA molecules, their amino acid composition can be altered to change one or more anchor residues or other residues. In some embodiments, to increase the immunogenicity of a target peptide when displayed by HLA molecules, a target peptide's amino acid composition can be altered to change one or more residues. Anchor residues are amino acids that interact with an HLA molecule and have the largest influence on the affinity of a peptide for an HLA molecule. Peptides with one or more altered amino acid residues are called heteroclitic peptides. In some embodiments, heteroclitic peptides include target peptides with residue modifications at anchor positions. In some embodiments, heteroclitic peptides include target peptides with residue modifications at non-anchor positions. In some embodiments, heteroclitic peptides include target peptides with residue modifications that include unnatural amino acids and amino acid derivatives. Modifications to create heteroclitic peptides can improve the binding of peptides to both MHC class I and MHC class II molecules, and the modifications required can be both peptide and MHC class specific. Since peptide anchor residues face the MHC molecule groove, they are less visible than other peptide residues to T cell receptors. Thus, heteroclitic peptides with anchor residue modifications have been observed to induce a T cell response where the stimulated T cells also respond to unmodified peptides. It has been observed that the use of heteroclitic peptides in a vaccine can improve a vaccine's effectiveness (Zirlik et al., 2006). In some embodiments, the immunogenicity of heteroclitic peptides are experimentally determined and their ability to activate T cells that also recognize the corresponding base (also called seed) peptide of the heteroclitic peptide is determined, as is known in the art (Houghton et al., 2007). In some embodiments, these assays of the immunogenicity and cross-reactivity of heteroclitic peptides are performed when the heteroclitic peptides are displayed by specific HLA alleles.

### Peptide Vaccines to Induce Immunity to One or More Targets

[0255] In some embodiments, a method is provided for formulating peptide vaccines using a single vaccine design for one or more targets. In some embodiments, a single target is a foreign protein with a specific mutation (e.g., KRAS G12D). In some embodiments, a single target is a self-protein (e.g., a protein that is overexpressed in tumor cells such as cancer/testis antigens). In some embodiments, a single target is a pathogen protein (e.g., a protein contained in a viral proteome). In some embodiments, multiple targets can be used (e.g., different influenza proteins from the same or from different strains or variants).

[0256] In some embodiments, the method includes extracting peptides to construct a candidate set from all target proteome sequences (e.g., entire KRAS G12D protein) as described in Liu et al. (2020a).

[0257] FIGS. 1 and 2 depict flow charts for example vaccine design methods that can be used for MHC class I or MHC class II vaccine design. A Candidate Peptide Set (see FIGS. 1 and 2) is comprised of target peptides extracted by windowing an input protein sequence. In some embodiments, extracted target peptides are of amino acid length of between about 8 and about 10 (e.g., for MHC class I binding (Rist et al., 2013)). In some embodiments, the extracted target peptides presented by MHC class I molecules are longer than 10 amino acid residues, such as 11 residues (Trolle et al., 2016). In some embodiments, extracted target peptides are of length between about 13 and about 25 (e.g., for class II binding (Chicz et al., 1992)). In some embodiments, sliding windows of various size ranges described herein are used over the entire proteome. In some embodiments, other target peptide lengths for MHC class I and class II sliding windows can be utilized. In some embodiments, computational predictions of proteasomal cleavage are used to filter or select peptides in the candidate set. One computational method for predicting proteasomal cleavage is described by Nielsen et al. (2005). In some embodiments, peptide mutation rates, glycosylation, cleavage sites, or other criteria can be used to filter peptides as described in Liu et al. (2020a). In some embodiments, peptides can be filtered based upon evolutionary sequence variation above a predetermined threshold. Evolutionary sequence variation can be computed with respect to other species, other pathogens, other pathogen strains, or other related organisms. In some embodiments, a first peptide set is the candidate set.

[0258] As shown in FIGS. 1-2, in some embodiments, the next step of the method includes scoring the target peptides in the candidate set for peptide-HLA binding to all considered HLA alleles as described in Liu et al. (2020a) and Liu et al. (2020b). In some embodiments, a first peptide set is the candidate set after scoring the target peptides. Scoring can be accomplished for human HLA molecules, mouse H-2 molecules, swine SLA molecules, or MHC molecules of any species for which prediction algorithms are available or can be developed. Thus, vaccines targeted at non-human species can be designed with the method. Scoring metrics can include the affinity for a target peptide to an HLA allele in nanomolar, eluted ligand, presentation, and other scores that can be expressed as percentile rank or any other metric. The candidate set may be further filtered to exclude peptides whose predicted binding cores do not contain a particular pathogenic or neoantigen target residue of interest or whose predicted binding cores contain the target residue in an anchor position. The candidate set may also be filtered for target peptides of specific lengths, such as length 9 for MHC class I, for example. In some embodiments, scoring of target peptides is accomplished with experimental data or a combination of experimental data and computational prediction methods. When computational models are unavailable to make peptide-HLA binding predictions for particular (peptide, HLA) pairs, the binding value for such pairs can be defined by the mean, median, minimum, or maximum immunogenicity value taken over supported pairs, a fixed value (such as an indication of no binding), or inferred using other techniques, including a function of the prediction of the most similar (peptide, HLA) pair available in the scoring model.

[0259] In some embodiments, a base set (also referred to as seed set herein) is constructed by selecting peptides from the scored candidate set using individual peptide-HLA binding or immunogenicity criteria (e.g., first peptide set) (FIG. 1). In some embodiments, since a given peptide has multiple peptide-HLA scores, the selection can be based on the peptide-HLA binding score or peptide-HLA immunogenicity metric with the best affinity or highest immunogenicity (e.g., predicted to bind the strongest or activate T cells the most for a given HLA allele). The criteria used for scoring peptide-HLA binding during the scoring procedure can accommodate different goals during the base set selection and vaccine design phases. For example, a target peptide with peptide-HLA binding affinities of 500 nM may be displayed by an individual that is diseased, but at a lower frequency than a target peptide with a 50 nM peptide-HLA binding affinity. During the combinatorial design phase of a vaccine, a more constrained affinity criteria may be used (e.g., when selecting a third peptide set, the Vaccine for Target(s) in FIGS. 1 and 2), such a 50 nM, to increase the probability that a vaccine peptide will be found and displayed by HLA molecules. In some embodiments, a relatively less constrained threshold (e.g., less than about 1000 nM or less than about 500 nM) of peptide-HLA immunogenicity or peptide-HLA binding is used as a first threshold for filtering candidate peptide-HLA scores (the first Peptide Scoring and Score Filtering step in FIGS. 1 and 2) and a relatively more constrained second threshold (e.g., less than about 50 nM) is used for filtering expanded set peptide-HLA scores (the second Peptide Filtering and Scoring step in FIGS. 1 and 2) for their scores for specific HLA alleles. In some embodiments, specific peptide-HLA scores are not used for modified peptides for a given HLA for vaccine design when their unmodified counterpart peptide does not pass the first less constrained threshold. This filtering of peptide-HLA scores is based on the observation that peptides that are not immunogenic enough for vaccine inclusion may be antigenic (meet the first filtering threshold) and thus recognized by T cell clonotypes expanded by a vaccine. A peptide is antigenic when it is recognized by a T cell receptor and results in a response such as CD8+ T cell cytotoxicity or CD4+ cell activation. Derivatives of an antigenic peptide may be strongly immunogenic, included in a vaccine, and thus activate and expand T cells that recognize the antigenic peptide. The expansion of T cells that recognize an unmodified antigenic peptide can provide an immune response that contributes to disease control. In some embodiments, peptides are scored for third peptide set (Vaccine for Target(s) in FIGS. 1 and 2) potential inclusion that have peptide-HLA binding affinities less than about 500 nM. In some embodiments, peptides are selected for the base set that have peptide-HLA binding affinities less than about 1000 nM for at least one HLA allele. Alternatively, predictions of peptide-HLA immunogenicity can be used to qualify target peptides for base set inclusion. In some embodiments, experimental observations of the immunogenicity of peptides in the context of their display by HLA alleles or experimental observation of the binding of peptides to HLA alleles can be used to score peptides for binding to HLA alleles or peptide-HLA immunogenicity.

[0260] In some embodiments, experimental observations of the display of peptides by specific HLA alleles in tumor cells can be used to score peptides for peptide-HLA binding or peptide-HLA immunogenicity. In some embodiments, experimental observations of the display of peptides tumor cells by a specific HLA allele can be used to score peptides for peptide-HLA binding or peptide-HLA immunogenicity for that HLA allele. In some embodiments, experimental observations of the display of peptides tumor cells can be used to score peptides for peptide-HLA binding or peptide-HLA immunogenicity, with the HLA allele(s) for a specific observed peptide selected from the HLA alleles present in the tumor that meet a predicted peptide-HLA binding or immunogenicity threshold. In some embodiments, mass spectrometry is used to experimentally determine the display of peptides by tumor cells as described by Bear et al. (2021) or Wang et al. (2019) and these data are used to score for peptide-HLA binding or peptide-HLA immunogenicity. In some embodiments, mass spectrometry is used to experimentally determine the display of peptides by tumor cells, and these experimental data are used to qualify the inclusion of base set (seed set) peptides for one or more HLA alleles for a vaccine. In some embodiments, mass spectrometry is used to experimentally determine the display of a peptide by tumor cells, and these experimental data are used to exclude peptide-HLA binding scores or peptide-HLA immunogenicity scores for the peptide when the peptide is not observed to be displayed by an HLA allele by mass spectrometry. In some embodiments, mass spectrometry is used to experimentally determine the display of peptides by tumor cells in an individual, and these experimental data are used to qualify the inclusion of base set (seed set) peptides for that individual for one or more HLA alleles. In some embodiments, mass spectrometry is used to experimentally determine the display of a peptide by tumor cells in an individual, and these experimental data are used to exclude peptide-HLA binding scores or peptide-HLA immunogenicity scores for the peptide when the peptide is not observed to be displayed by an HLA allele by mass spectrometry. In some embodiments, computational predictions of the immunogenicity of a peptide in the context of display by HLA alleles can used for scoring such as the methods of Ogishi et al. (2019) or Bulik-Sullivan et al. (2019).

[0261] In some embodiments, a peptide-HLA score or a peptide-HLA immunogenicity score for a first peptide in the base set (seed set) for a given HLA allele is eliminated and not considered during vaccine design if the wild-type peptide corresponding to the first peptide (e.g. the unmutated naturally occurring form for the peptide or a peptide in the respective species within a defined sequence edit distance) has a peptide-HLA score or a peptide-HLA immunogenicity score for the same HLA allele within a defined threshold. The threshold can be based upon the difference of the scores of the first peptide and the wild-type peptide, the ratio of the scores of the first peptide and the wild-type peptide, the score of the wild-type peptide, or other metrics. The defined threshold can be either greater than or less than a specified value. In some embodiments, the threshold is defined so that the wild-type peptide is not predicted to be presented. In some embodiments, when a peptide-HLA score or peptide-HLA immunogenicity score is eliminated for a first peptide during vaccine design, then peptide-HLA scores or peptide-HLA immunogenicity scores for all of its derivatives (e.g., heteroclitic peptide derivatives) for the same HLA allele are also eliminated and not considered during vaccine design.

[0262] In some embodiments, the method further includes running the OptiVax-Robust algorithm as described in Liu et al. (2020a) using the HLA haplotype frequencies of a population on the scored candidate set to construct a base set (also referred to as seed set herein) of target peptides (FIG. 2). In some embodiments, HLA diplotype frequencies can be provided to OptiVax. OptiVax-Robust includes algorithms to eliminate peptide redundancy that arises from the sliding window approach with varying window sizes, but other redundancy elimination measures can be used to enforce minimum edit distance constraints between target peptides in the candidate set. The size of the seed set is determined by a point of diminishing returns of population coverage as a function of the number of target peptides in the seed set. Other criteria can also be used, including a minimum number of vaccine target peptides, maximum number of vaccine target peptides, and desired predicted population coverage. In some embodiments, a predetermined population coverage is less than about 0.4, between about 0.4 and 0.5, between about 0.5 and 0.6, between about 0.6 and 0.7, between about 0.7 and 0.8, between about 0.8 and 0.9, or greater than about 0.9. Another possible criterion is a minimum number of expected peptide-HLA binding hits in each individual. In alternate embodiments, the method further includes running the OptiVax-Unlinked algorithm as described in Liu et al. (2020a) instead of OptiVax-Robust.

[0263] The OptiVax-Robust method uses binary predictions of peptide-HLA immunogenicity, and these binary predictions can be generated as described in Liu et al. (2020b). The OptiVax-Unlinked method uses the probability of target peptide binding to HLA alleles and can be generated as described in Liu et al. (2020a). In some embodiments, OptiVax-Unlinked and EvalVax-Unlinked are used with the probabilities of peptide-HLA immunogenicity. Either method can be used for the purposes described herein, and thus the term “OptiVax” refers to either the Robust or Unlinked method. In some embodiments, the observed probability of peptide-HLA immunogenicity in experimental assays can be used as the probability of peptide-HLA binding in EvalVax-Unlinked and OptiVax-Unlinked. In some embodiments, the HLA haplotype or HLA allele frequencies of a population provided to OptiVax for vaccine design describe the world's population. In alternative embodiments, the HLA haplotype or HLA allele frequencies of a population provided to OptiVax for vaccine design are specific to a geographic region. In alternative embodiments, the HLA haplotype or HLA allele frequencies of a population provided to OptiVax for vaccine design are specific to an ancestry. In alternative embodiments, the HLA haplotype or HLA allele frequencies of a population provided to OptiVax for vaccine design are specific to a race. In alternative embodiments, the HLA haplotype or HLA allele frequencies of a population provided to OptiVax for vaccine design are specific to individuals with risk factors such as genetic indicators of risk, age, exposure to chemicals, alcohol use, chronic inflammation, diet, hormones, immunosuppression, infectious agents, obesity, radiation, sunlight, or tobacco use. In alternative embodiments, the HLA haplotype or HLA allele frequencies of a population provided to OptiVax for vaccine design are specific to individuals that carry certain HLA alleles. In alternative embodiments, the HLA diplotypes provided to OptiVax for vaccine design describe a single individual, and are used to design an individualized vaccine.

[0264] In some embodiments, the base (or seed) set of target peptides (e.g., first peptide set) that results from OptiVax application to the candidate set of target peptides describes a set of unmodified target peptides that represent a possible compact vaccine design (Seed Set in FIG. 2). A base peptide is a target peptide that is included in the base or seed peptide set (e.g., first peptide set). In some embodiments, the seed set (e.g., first peptide set) is based upon filtering candidate peptide scores by predicted or observed affinity or immunogenicity with respect to HLA molecules (Seed Set in FIG. 1). However, to improve the display of the target peptides in a wide range of HLA haplotypes as possible, some embodiments include modifications of the seed (or base) set. In some embodiments, experimental assays can be used to ensure that a modified seed (or base) peptide activates T cells that also recognize the base/seed peptide.

[0265] For a given target peptide, the optimal anchor residue selection may depend upon the HLA allele that is binding to and displaying the target peptide and the class of the HLA allele (MHC class I or class II). A seed peptide set (e.g., first peptide set) can become an expanded set by including anchor residue modified peptides of either MHC class I or II peptides (FIGS. 1-2). Thus, one aspect of vaccine design is considering how to select a limited set of heteroclitic peptides that derive from the same target peptide for vaccine inclusion given that different heteroclitic peptides will have different and potentially overlapping population coverages.

[0266] In some embodiments, all possible anchor modifications for each base set of target peptide are considered. There are typically two anchor residues in peptides bound by MHC class I molecules, typically at positions 2 and 9 for 9-mer peptides. In some embodiments, anchors for 8-mers, 10-mers, and 11-mers are found at positions 2 and n, where n is the last position (8, 10, and 11, respectively). For MHC class I molecules, the last position n is called the “C” position herein for carboxyl terminus. In some embodiments, at each anchor position, 20 possible amino acids are attempted in order to select the best heteroclitic peptides. Thus, for MHC class I binding, 400 (i.e., 20 amino acids by 2 positions=202) minus 1 heteroclitic peptides are generated for each base target peptide. There are typically four anchor residues in peptides bound by MHC class II molecules, typically at positions 1, 4, 6, and 9 of the 9-mer binding core. Thus, for MHC class II binding there are 160,000 (i.e., 20 amino acids by 4 positions=204) minus 1 heteroclitic peptides generated for each base target peptide. In some embodiments, more than two (MHC class I) or four (MHC class II) positions are considered as anchors. Other methods, including Bayesian optimization, can be used to select optimal anchor residues to create heteroclitic peptides from each seed (or base) set peptide. Other methods of selecting optimal anchor residues are presented in “Machine learning optimization of peptides for presentation by class II MHCs” by Dai et al. (2020), incorporated in its entirety herein. In some embodiments, the anchor positions are determined by the HLA allele that presents a peptide, and thus the set of heteroclitic peptides includes for each set of HLA specific anchor positions, all possible anchor modifications.

[0267] In some embodiments, for all of the target peptides in the base/seed set, new peptide sequences with all possible anchor residue modifications (e.g., MHC class I or class II) are created resulting in a new heteroclitic base set (Expanded set in FIGS. 1-2) that includes all of the modifications. In some embodiments, anchor residue modifications of a peptide are not included in the heteroclitic base set if one or more of the peptide's anchor residue positions contains a substitution mutation that distinguishes the peptide from a self-peptide. In some embodiments, anchor residue modifications of a base/seed peptide are only included in the heteroclitic base set for peptide positions that do not contain a substitution mutation that distinguishes the base/seed peptide from a self-peptide. In some embodiments, anchor residue modifications of a peptide are not included in the heteroclitic base set when one or more of the peptide's mutations does not occur between a pair of its adjacent anchor residues. In some embodiments, for all of the target peptides in the base/seed set, new peptide sequences with anchor residue modifications (e.g., MHC class I or class II) at selected anchor locations are created resulting in a new heteroclitic base set (Expanded set in FIGS. 1-2) that includes the selected modifications. In some embodiments, the anchor residue positions used for modifying peptides are selected from anchor residue positions determined by the HLA alleles considered during vaccine evaluation. In some embodiments, the heteroclitic base set (Expanded set in FIGS. 1-2) also includes the original seed (or base) set (Seed Peptide Set in FIGS. 1-2). In some embodiments, the heteroclitic base set includes amino acid substitutions at non-anchor residues. In some embodiments, modifications of base peptide residues is accomplished to alter binding to T cell receptors to improve therapeutic efficacy (Candia, et al. 2016). In some embodiments, the heteroclitic base set includes amino acid substitutions of non-natural amino acid analogs. The heteroclitic base set is scored for HLA affinity, peptide-HLA immunogenicity, or other metrics as described herein (another round of Peptide Scoring and Score Filtering as shown in FIGS. 1-2). In some embodiments, the scoring predictions may be further updated for pairs of heteroclitic peptide and HLA allele, eliminating pairs where a heteroclitic peptide has a seed (or base) peptide from which it was derived that is not predicted to be displayed by the HLA allele at a specified threshold of peptide-HLA binding score or a specified peptide-HLA immunogenicity metric. In some embodiments, the peptide-HLA scores may also be filtered to ensure that predicted binding cores of the heteroclitic peptide displayed by a particular HLA allele align exactly in position with the binding cores of the respective seed (or base) set target peptide for that HLA allele. In some embodiments, the scoring predictions are filtered for an HLA allele to ensure that the heteroclitic peptides considered for that HLA allele are only modified at anchor positions determined by that HLA allele. Scoring produces a metric of peptide-HLA immunogenicity for peptides and HLA alleles that can be either binary, a probability of immunogenicity, or other metric of immunogenicity such as peptide-HLA affinity or percent rank, and can be based on computational predictions, experimental observations, or a combination of both computational predictions and experimental observations. In some embodiments, probabilities of peptide-HLA immunogenicity are utilized by OptiVax-Unlinked. In some embodiments, heteroclitic peptides are included in experimental assays such as MIRA (Klinger et al., 2015) or ELISPOT to determine their peptide-HLA immunogenicity metric with respect to specific HLA alleles. In some embodiments, the methods of Liu et al. (2020b), can be used to incorporate MIRA data for heteroclitic peptides into a model of peptide-HLA immunogenicity. In some embodiments, peptide-HLA immunogenicity metrics of heteroclitic peptides are experimentally determined and their ability to activate T cells that also recognize the corresponding seed (or base) peptide of the heteroclitic peptide is performed as is known in the art to qualify the heteroclitic peptide for vaccine inclusion (e.g., Houghton et al., 2007). In some embodiments, these assays of the immunogenicity and cross-reactivity of heteroclitic peptides are performed when the heteroclitic peptides are displayed by specific HLA alleles.

[0268] In some embodiments, experimental observations of the display of heteroclitic peptides by specific HLA alleles in cells can be used to score peptides for peptide-HLA binding or peptide-HLA immunogenicity. In some embodiments, mass spectrometry is used to experimentally determine the display of heteroclitic peptides by cells as described by Bear et al. (2021) or Wang et al. (2019) and these data are used to score for peptide-HLA binding or peptide-HLA immunogenicity. In some embodiments, mass spectrometry is used to experimentally determine the display of heteroclitic peptides by cells, and these experimental data are used to qualify the inclusion of heteroclitic peptides for inclusion in a vaccine. In some embodiments, mass spectrometry is used to experimentally determine the display of a peptide by tumor cells, and these experimental data are used to exclude peptide-HLA binding scores or peptide-HLA immunogenicity scores for the peptide when the peptide is not observed to be displayed by an HLA allele by mass spectrometry. In some embodiments, mass spectrometry is used to experimentally determine the display of a heteroclitic peptide by cells with an HLA allele found in an individual, and these experimental data are used to qualify the inclusion of the heteroclitic peptide for inclusion in a vaccine for the individual. In some embodiments, mass spectrometry is used to experimentally determine the display of a peptide by tumor cells in an individual, and these experimental data are used to exclude peptide-HLA binding scores or peptide-HLA immunogenicity scores for the peptide when the peptide is not observed to be displayed by an HLA allele by mass spectrometry. In some embodiments, computational predictions of the immunogenicity of a heteroclitic peptide in the context of display by HLA alleles can used for scoring such as the methods of Ogishi et al. (2019) or Bulik-Sullivan et al. (2019).

[0269] In some embodiments, a peptide in the heteroclitic base set is removed if (1) one of its anchor positions for an HLA allele corresponds to the location of a mutation in the base/seed peptide from which it was derived that distinguishes the base/seed peptide from a self-peptide, and (2) if the peptide-HLA binding or peptide-HLA immunogenicity of the self-peptide is stronger than a specified threshold for self-peptide binding or immunogenicity. This eliminates peptides in the heteroclitic base set that may cross-react with self-peptides as a result of sharing TCR facing residues with self-peptides. In some embodiments, the threshold for self-peptide binding is between approximately 500 nM to 1000 nM.

[0270] In some embodiments, redundant peptides in the heteroclitic base set are removed. In some embodiments, a redundant peptide is a first heteroclitic peptide that has peptide-HLA immunogenicity scores or peptide-HLA binding scores that are less immunogenic for all scored HLAs than a second heteroclitic peptide in the heteroclitic base set, where both the first and second heteroclitic peptides are derived from the same base (or seed) peptide. In some embodiments, peptide redundancy is determined by only comparing peptide-HLA immunogenicity scores or peptide-HLA binding scores for HLA alleles where the peptide-HLA immunogenicity scores or peptide-HLA binding scores for both peptides for an HLA allele are more immunogenic than a given threshold (e.g., 50 nM for binding). In some embodiments, a redundant peptide is a first heteroclitic peptide that has an average peptide-HLA immunogenicity score or peptide-HLA binding score that is less immunogenic than the average peptide-HLA immunogenicity score or peptide-HLA binding score of a second heteroclitic peptide in the heteroclitic base set, where both the first and second heteroclitic peptides are derived from the same base (or seed) peptide, and the average scores are computed for HLA alleles where the peptide-HLA immunogenicity scores or peptide-HLA binding scores for both peptides for an HLA allele are more immunogenic than a given threshold (e.g., 50 nM for binding). In some embodiments, a redundant peptide is a first heteroclitic peptide that has a weighted peptide-HLA immunogenicity score or peptide-HLA binding score that is less immunogenic than the weighted peptide-HLA immunogenicity score or peptide-HLA binding score of a second heteroclitic peptide in the heteroclitic base set, where both the first and second heteroclitic peptides are derived from the same base (or seed) peptide, and where the weighting is determined by the frequency of the HLA allele in a human population, and the weighted scores are computed for HLA alleles where the peptide-HLA immunogenicity scores or peptide-HLA binding scores for both peptides for an HLA allele are more immunogenic that a given threshold (e.g., 50 nM for binding).

[0271] In some embodiments, the next step involves scoring the heteroclitic base set (the second peptide set) and filtering the resulting scores to create a second peptide set by comparing the peptide-HLA immunogenicity scores or peptide-HLA binding scores of the peptides for one or more HLA alleles to a threshold. In some embodiments, an affinity criterion of about 50 nM is used to increase the probability that a vaccine peptide will be found and displayed by HLA molecules. In some embodiments, the affinity criteria is more constrained than 50 nM (i.e., <50 nM). In some embodiments, the affinity criteria is more constrained than about 500 nM (i.e., <500 nM). In some embodiments, individual peptide-HLA binding scores or immunogenicity metrics are determined and thus a peptide may be retained as long as it meets the criteria for at least one HLA allele, and only peptide-HLA scores that meet the criteria are considered for vaccine design.

[0272] In some embodiments, the next step involves inputting the second peptide set to OptiVax to select a compact set of vaccine peptides that maximizes predicted vaccine performance (Vaccine Performance Optimization; FIGS. 1-2). In some embodiments, predicted vaccine performance is a function of expected peptide-HLA binding affinity (e.g., a function of the distribution of peptide-HLA binding affinities across all peptide-HLA combinations for a given peptide set, or weighted by the occurrence of the HLA alleles in a population or individual). In some embodiments, predicted vaccine performance is the expected population coverage of a vaccine. In some embodiments, predicted vaccine performance is the expected number peptide-HLA hits produced by a vaccine in a population or individual. In some embodiments, predicted vaccine performance requires a minimum expected number of peptide-HLA hits (e.g., 1, 2, 3, 4, 5, 6, 7, 8, or more) produced by a vaccine. In some embodiments, predicted vaccine performance is a function of population coverage and expected number of peptide-HLA hits desired produced by a vaccine. In some embodiments, predicted vaccine performance is a metric that describes the overall immunogenic properties of a vaccine where all of the peptides in the vaccine are scored for peptide-HLA immunogenicity for two or more HLA alleles (e.g., three or more HLA alleles). In some embodiments, predicted vaccine performance excludes immunogenicity contributions by selected HLA alleles above a maximum number of peptide-HLA hits (e.g., 1, 2, 3, 4, 5, 6, 7, 8, or more). In some embodiments, predicted vaccine performance excludes immunogenicity contributions of individual HLA diplotypes above a maximum number of peptide-HLA hits (e.g., 1, 2, 3, 4, 5, 6, 7, 8, or more). In some embodiments, predicted vaccine performance is the fraction of covered HLA alleles, which is the expected fraction of HLA alleles in each individual that have a minimum number of peptides (e.g., 1, 2, 3, 4, 5, 6, 7, 8, or more) with predicted peptide-HLA immunogenicity produced by a vaccine. In some embodiments, predicted vaccine performance is the expected fraction of HLA alleles in a single individual that have a minimum number of peptides (e.g., 1, 2, 3, 4, 5, 6, 7, 8, or more) with predicted peptide-HLA immunogenicity produced by a vaccine.

[0273] In some embodiments, a vaccine is designed by the iterative selection of peptides from the heteroclitic base set (also referred to as Expanded set as shown in FIGS. 1-2) at progressively less stringent criteria for predicted peptide immunogenicity or display. In some embodiments, a peptide is retained if at least one of its peptide-HLA scores is not eliminated by the thresholds employed. In some embodiments, OptiVax is first used to design a vaccine with a desired vaccine performance with specific peptide qualification criteria (e.g., seed HLA-peptide scores from the candidate set must bind to at least one MHC molecule at 500 nM or stronger, and peptide-HLA scores from the expanded set must bind to at least one MHC molecule at 50 nM or stronger). The vaccine that results from this application of OptiVax is then used as the foundation for vaccine augmentation with less stringent criteria (e.g., seed peptide-HLA scores from the candidate set must bind to at least one MHC molecule at 1000 nM or stronger, and peptide HLA-scores from the expanded set must bind to at least one MHC molecule at 100 nM or stronger) to further improve the desired vaccine performance. Methods for vaccine augmentation are described in Liu et al. (2020b), incorporated by reference in its entirety herein. In some embodiments, multiple rounds of vaccine augmentation may be utilized. In some embodiments, the final augmented vaccine is the one selected.

[0274] In some embodiments, selection of peptide sets to meet a desired predicted vaccine performance can be accomplished by computational algorithms other than OptiVax. In some embodiments, integer linear programming or mixed-integer linear programming is employed for selecting peptide sets instead of OptiVax. One example of an integer programming method for peptide set selection is described by Toussaint et al. (2008), incorporated by reference in its entirety herein. An example solver for mixed-integer linear programming is Python-MIP that can be used in conjunction with Toussaint et al. (2008). A second example of methods for vaccine peptide selection is described in “Maximum n-times Coverage for Vaccine Design” by Liu et al. (2021), incorporated by reference in its entirety herein.

[0275] Predicted vaccine performance refers to a metric. Predicted vaccine performance can be expressed as a single numerical value, a plurality of numerical values, any number of non-numerical values, and a combination thereof. The value or values can be expressed in any mathematical or symbolic term and on any scale (e.g., nominal scale, ordinal scale, interval scale, or ratio scale).

[0276] A seed (or base) peptide and all of the modified peptides that are derived from that seed (or base) peptide comprise a single peptide family. In some embodiments, in the component of vaccine performance that is based on peptide-HLA immunogenicity for a given HLA allele, a maximum number of peptides (e.g., 1, 2, 3, 4, 5, 6, 7, 8, or more) that are in the same peptide family are given computational immunogenicity credit for that HLA allele. This limit on peptide family immunogenicity limits the credit caused by many modified versions of the same base peptide. In some embodiments, the methods described herein are included for running OptiVax with an EvalVax objective function that corresponds to a desired metric of predicted vaccine performance. In some embodiments, population coverage means the proportion of a subject population that presents one or more immunogenic peptides that activate T cells responsive to a seed (or base) target peptide. The metric of population coverage is computed using the HLA haplotype frequency in a given population such as a representative human population. In some embodiments, the metric of population coverage is computed using marginal HLA frequencies in a population. Maximizing population coverage means selecting a peptide set (either a base peptide set, a modified peptide set, or a combination of base and modified peptides; e.g., a first peptide set, second peptide set, or third peptide set) that collectively results in the greatest fraction of the population that has at least a minimum number (e.g., 1, 2, 3, 4, 5, 6, 7, 8, or more) of immunogenic peptide-HLA bindings based on proportions of HLA haplotypes in a given population (e.g., representative human population). In some embodiments, this process includes the OptiVax selection of heteroclitic peptides (as described in this disclosure) that activate T cells that respond to their corresponding seed (or base) peptide and the heteroclitic base peptides to improve population coverage. In some embodiments, the seed (or base) target peptides are always included in the final vaccine design. In some embodiments, peptides are only considered as candidates for a vaccine design (e.g., included in a first, second, and/or third peptide set) if they have been observed to be immunogenic in clinical data, animal models, or tissue culture models. In some embodiments, vaccine peptides are selected to be displayed by a peptide specific set of HLA class I or class II alleles, wherein for at least two peptides in a vaccine all of the peptide specific sets of HLA class I or class II alleles are not identical.

[0277] Although heteroclitic peptides are used as exemplary embodiments in this disclosure, any modified peptide could be used in place of a heteroclitic peptide. A modified peptide is a peptide that has one or more amino acid substitutions of a target base/seed peptide. The amino acid substitution could be located at an anchor position or any other non-anchor position.

[0278] In some embodiments, a candidate vaccine peptide (e.g., a base peptide or a modified peptide) is eliminated from vaccine inclusion if it activates T cells that recognize self-peptides (e.g., this can be achieved at the first and/or second round of Peptide Filtering and Sorting as shown in FIGS. 1-2). In some embodiments, a candidate vaccine peptide (e.g., a base peptide or a modified peptide) is computationally eliminated from vaccine inclusion if its outward facing amino acids when bound by an HLA allele are similar to outward facing self-peptide residues that are presented by the same HLA allele, where similarity can be defined by identity or defined similarity metrics such as BLOSUM matrices (BLOSUM matrices are known in the art). Testing a vaccine peptide for its ability to activate T cells that recognize self-peptides can be experimentally accomplished by the vaccination of animal models followed by ELISPOT or other immunogenicity assay or with human tissue protocols. In both cases, models with HLA alleles that present the vaccine peptide are used. In some embodiments, human primary blood mononuclear cells (PBMCs) are stimulated with a vaccine peptide, the T cells are allowed to grow, and then T cell activation with a self-peptide is assayed as described in Tapia-Calle et al. (2019) or other methods as known in the art. In some embodiments, the vaccine peptide is excluded from vaccine inclusion if the T cells are activated by the self-peptide. In some embodiments, computational predictions of the ability of a peptide to activate T cells that also recognize self-peptides can be utilized. These predictions can be based upon the modeling of the outward facing residues from the peptide-HLA complex and their interactions with other peptide residues. In some embodiments, a candidate vaccine peptide (e.g., a base peptide or a modified peptide) is eliminated from vaccine inclusion or experimentally tested for cross-reactivity if it is predicted to activate T cells that also recognize self-peptides based upon the structural similarity of the peptide-MHC complex of the candidate peptide (e.g., a base peptide or a modified peptide) and the peptide-MHC complex of a self-peptide. One method for the prediction of peptide-MHC structure is described by Park et al. (2013).

[0279] In some embodiments, the peptide-HLA binding score or peptide-HLA immunogenicity metric for a candidate heteroclitic vaccine peptide (e.g., a modified peptide) and HLA allele is eliminated from consideration during vaccine design if the candidate heteroclitic vaccine peptide does not activate T cells that recognize its corresponding base/seed target peptide (second round of Peptide Scoring and Score Filtering, FIGS. 1-2) for the given HLA allele. In some embodiments, a heteroclitic vaccine peptide (e.g., a modified peptide) is eliminated from a vaccine design if the candidate heteroclitic vaccine peptide does not activate T cells that recognize its corresponding base/seed target peptide (second round of Peptide Scoring and Score Filtering, FIGS. 1-2) for a given HLA allele. Testing a candidate heteroclitic peptide (e.g., a modified peptide) for its ability to activate T cells that recognize its corresponding seed (or base) target peptide with respect to the same HLA allele can be experimentally accomplished by the vaccination of animal models followed by ELISPOT or other immunogenicity assay or with human tissue protocols. In both cases, models with HLA alleles that present the heteroclitic peptide are used. In some embodiments, human PBMCs are stimulated with the heteroclitic peptide, the T cells are allowed to grow, and then T cell activation with the seed (or base) target peptide is assayed as described in Tapia-Calle et al. (2019) or using other methods known in the art. In some embodiments, computational predictions of the ability of a heteroclitic peptide to activate T cells that also recognize the corresponding seed (or base) target peptide can be utilized. These predictions can be based upon the modeling of the outward facing residues from the peptide-HLA complex and their interactions with other peptide residues. In some embodiments, the structural similarity of the peptide-HLA complex of a heteroclitic peptide and the peptide-HLA complex of the corresponding seed (or base) target is used to qualify heteroclitic peptides for vaccine inclusion or to require experimental immunogenicity testing before vaccine inclusion.

[0280] TCR Interface Divergence (TCRID) is the Least Root Mean Square Deviation of the difference between a first peptide's TCR facing residues' 3D positions and the corresponding residue positions of a second peptide with respect to a specific HLA allele. In some embodiments, other metrics are used for the TCRID instead of Least Root Mean Square Deviation. In some embodiments, other metrics are used for the TCRID that include position deviations in non-TCR facing residues and MHC residues from the specific HLA allele. In some embodiments, TCRID is used to predict if two peptides when displayed by a given HLA allele will activate the same T cell clonotypes. In some embodiments, FlexPepDock (London et al., 2011, incorporated by reference in its entirety herein) or DINC (Antunes et al., 2018, incorporated by reference in its entirety herein) in conjunction with the crystal structures of HLA molecules can be used to compute TCRID metrics for pairs of peptides given an HLA molecule. In some embodiments, TCRID is computed by (1) determining the 3D peptide-HLA structures for two different peptides bound by a specific HLA allele, (2) aligning the HLA alpha helices of the peptide-HLA structures, and (3) computing the Least Root Mean Square Deviation of the difference between the TCR facing residues of the two peptides with respect to the aligned alpha helix reference frame.

[0281] In some embodiments, the second Peptide Scoring and Score Filtering step in FIGS. 1 and 2 will eliminate the peptide-HLA binding or immunogenicity score for a heteroclitic peptide for a specific HLA allele when the HLA specific TCRID between the heteroclitic peptide and its corresponding base (or seed) peptide from which it was derived is over a first TCRID threshold. In some embodiments, the second Peptide Scoring and Score Filtering step in FIGS. 1 and 2 will eliminate all peptide-HLA binding or immunogenicity scores for a heteroclitic peptide when the HLA specific TCRID between the heteroclitic peptide and its corresponding unmutated self-peptide from which it was derived is under a second TCRID threshold. In some embodiments, the first Peptide Scoring and Score Filtering step in FIGS. 1 and 2 will eliminate all peptide-HLA binding or immunogenicity scores for a candidate peptide when the HLA specific TCRID between the peptide and its corresponding unmutated self-peptide is under a third TCRID threshold. In some embodiments, any of the TCRID thresholds are determined by experimentally observing or computationally predicting the cross-reactivity of TCR molecules to peptide-HLA complexes.

[0282] FIG. 3 shows predicted population coverage for MHC class I vaccines by vaccine size for Influenza A nucleoprotein made by augmentation, starting with 100% conserved peptides (1-3), >98% conserved peptides (4-7), and >90% conserved peptides (8-25). FIG. 4 shows predicted population coverage for MHC class I vaccines by vaccine size for Influenza A nucleoprotein peptides 98-100% conserved and their heteroclitic derivatives. FIG. 5 shows predicted population coverage for MHC class I vaccines by vaccine size for Influenza A nucleoprotein peptides 100% conserved and their heteroclitic derivatives. FIG. 6 shows predicted population coverage for MHC class II vaccines by vaccine size for Influenza A nucleoprotein peptides 95-100% conserved and their heteroclitic derivatives. FIG. 7 shows predicted population coverage for MHC class II vaccines by vaccine size for Influenza A nucleoprotein peptides 100% conserved and their heteroclitic derivatives.

[0283] FIGS. 8-9 (MHC class I), and FIGS. 10-11 (MHC class II) show the predicted population coverage of OptiVax-Robust selected single target-specific vaccines with differing number of peptides designed for the Influenza A virus RNA-directed RNA polymerase catalytic subunit, matrix protein 1, polymerase basic protein 2, polymerase acidic protein, and PA-X protein. FIGS. 8-11 show that as the number of peptides increases for a vaccine, its predicted population coverage increases. The dashed lines in FIGS. 8-11 show the predicted population coverage of vaccines made from all 100% conserved peptide candidates without heteroclitic derivatives for at least 1 (top line), 3 (middle line), and 5 (bottom line) peptide-HLA hits per-individual. An increase in peptide count will also typically cause the average number of peptide-HLA hits in each individual to increase in the population.

[0284] OptiVax can be used to design a vaccine to maximize the fraction/proportion of the population whose HLA molecules are predicted to bind to and display at least p peptides from the vaccine. In some embodiments, this prediction (e.g., scoring) includes experimental immunogenicity data to directly predict at least p peptides will be immunogenic. The number p is input to OptiVax, and OptiVax can be run multiple times with varying values for p to obtain a predicted optimal target peptide set for different peptide counts p. Larger values of p will increase the redundancy of a vaccine at the cost of more peptides to achieve a desired population coverage. In some embodiments, it may not be possible to achieve a given population coverage given a specific heteroclitic base set. In some embodiments, the number p is a function of the desired size of a vaccine.

[0285] The methods described herein can be used to design separate vaccine formulations for MHC class I and class II based immunity.

[0286] In some embodiments, this procedure is used to create a vaccine for an individual. In some embodiments, the target peptides present in the individual are determined by sequencing the individual's tumor RNA or DNA, and identifying mutations that produce foreign peptides. One embodiment of this method is described in U.S. Pat. No. 10,738,355, incorporated in its entirety herein. In some embodiments, peptide sequencing methods are used to identify target peptides in the individual. One embodiment of this is described in U.S. Publication No. 2011/0257890. In some embodiments, the target peptides used for the individual's vaccine are selected when a self-peptide, foreign peptide, pathogen peptide or RNA encoding a self-peptide, foreign peptide, or pathogen peptide is observed in a specimen from the individual is present at a predetermined level. The target peptides in the individual are used to construct a vaccine as disclosed herein. For vaccine design, OptiVax is provided a diplotype comprising the HLA type of the individual. In an alternative embodiment, the HLA type of an individual is separated into multiple diplotypes with frequencies that sum to one, where each diplotype comprises one or more HLA alleles from the individual and a notation that the other allele positions should not be evaluated. The use of multiple diplotypes will cause OptiVax's objective function to increase the chance that immunogenic peptides will be displayed by all of the constructed diplotypes. This achieves the objective of maximizing the number of distinct HLA alleles in the individual that exhibit peptide-HLA immunogenicity and thus improves the allelic coverage of the vaccine in the individual.

[0287] FIG. 12 shows the predicted vaccine performance (predicted number of peptide-HLA hits) of ten example G12V MHC class I vaccines for a single individual with the MHC class I HLA diplotype HLA-A02:03, HLA-A11:01, HLA-B55:02, HLA-B58:01, HLA-C03:02, and HLA-C03:03. OptiVax was used to design ten G12V MHC class I vaccines for this HLA diplotype with peptide counts ranging from 1 to 10. For the results in FIG. 12, OptiVax was run with six synthetic diplotypes, each equally weighted, each with one HLA allele from the individual's HLA diplotype, and the other allele positions marked to not be evaluated.

### MHC Class I Vaccine Design Procedure

[0288] In some embodiments, MHC class I vaccine design procedures consist of the following computational steps.

[0289] In some embodiments, the inputs for the computation are:
[0290] P_{1 . . . n}: Peptide sequence (length n) containing the neoantigen(s) or pathogenic target(s) of interest (e.g., KRAS G12D, KRAS G12V, KRAS G12R, KRAS G12C, KRAS G13D). Pᵢ denotes the amino acid at position i.
[0291] t: Position of target mutation in P, t∈[1, . . . n] (e.g., t=12 for KRAS G12D).
[0292] s: Substitution mutation s∈[true, false] is true if the mutation is a substitution, and false if the mutation is a deletion or insertion or the peptide does not contain a mutation (such as in pathogen targets). When the mutation is a deletion or insertion then t indicates the position immediately before the deletion or insertion.
[0293] τ₁: Threshold for potential presentation of peptides by MHC for peptide-MHC scoring (e.g., 500 nM binding affinity)
[0294] τ₂: Threshold for predicted display of peptides by MHC for peptide-MHC scoring (e.g., 50 nM binding affinity)
[0295] [symbol] : Set of HLA alleles (for HLA-A, HLA-B, HLA-C loci)
[0296] F: [symbol] → [symbol] : Population haplotype frequencies (for OptiVax optimization and coverage evaluation).
[0297] N: Parameter for EvalVax and OptiVax objective function. Specifies minimum number of predicted per-individual hits for population coverage objective to consider the individual covered Default=1 (computes P(n≥1) population coverage).

[0298] In some embodiments, Peptide-HLA Scoring Functions used are:
[0299] ScorePotential: P× [symbol] → [symbol] : Scoring function mapping a (peptide, HLA allele) pair to a prediction of peptide-HLA display. If predicted affinity≤τ₁, then returns 1, else returns 0. Options include MHCflurry, NetMHCpan, PUFFIN, ensembles, or alternative metrics or software may be used, including models calibrated against immunogenicity data.
[0300] SCOREDISPLAY: P× [symbol] → [symbol] : Scoring function mapping a (peptide, HLA allele) pair to a prediction of peptide-HLA display. If predicted affinity≤τ₂, then returns 1, else returns 0. Options include MHCflurry, NetMHCpan, PUFFIN, ensembles, or alternative metrics or software may be used, including models calibrated against immunogenicity data.

[0301] Next, from the seed protein sequence (P), a set [symbol] of windowed native peptides spanning the protein sequence(s) is constructed. P_{j . . . j+(k-1)} only produces set members when the subscripts are within the range of the defined seed protein P. In some embodiments, 8-mers, 9-mers, 10-mers, and 11-mers are produced, but this process can be performed with any desired window lengths and the resulting peptide sets combined. In some embodiments, only 9-mers are produced.

$$𝒫 = {⋃}_{k ∈ [ 8 , … , 11 ]} {𝒫}_{k}$$

$${𝒫}_{k} = \{ {P}_{j … j + ( k - 1 )} \vert j ∈ [ t - ( k - 1 ) , … , t ] , if s then j \neq \{ t - ( k - 1 ) , t - 1 ) \} \}$$

[0302] The second condition j 16 {t−(k−1), t−1} excludes peptides where the mutation at t is in positions P2 or Pk of the windowed k-mer peptide (i.e., the anchor positions) and the mutation is a substitution.

MHC Class I Vaccine Design Procedure with Defined Peptide Set

[symbol]

[0303] Next, each peptide sequence in [symbol] is scored against all HLA alleles in [symbol] for potential presentation using SCOREPOTENTIAL (with threshold τ₁=500 nM) and store results in a [symbol] | [symbol] |×| [symbol] | matrix S:

$$S [ p , h ] = SCOREPOTENTIAL ( p , h ) ∀ p ∈ 𝒫 , h ∈ ℋ$$

[0304] Note that S is a binary matrix where 1 indicates the HLA is predicted to potentially present the peptide, and 0 indicates no potential presentation.
   Define Base Set of Peptides B⊆ [symbol] :

$$B = \{ p ∈ 𝒫 \vert ∃ h s . t . S [ p , h ] = 1 \}$$

[0305] Thus, B contains the native peptides that are predicted to be potentially presented by at least 1 HLA.

Create a Set of all Heteroclitic Peptides B′ Stemming from Peptides in B:

$${B}^{′} = {⋃}_{b ∈ B} ANCHOR - MODIFIED ( b )$$

[0306] where ANCHOR-MODIFIED(b) returns a set of all 399 anchor-modified peptides stemming from b (with all possible modifications to the amino acids at P2 and P9).

[0307] Next, all heteroclitic candidate peptides (e.g., modified peptides) in B′ are scored against all HLA alleles in [symbol] for predicted display using SCOREDISPLAY (with threshold 12=50 nM), and store results in binary |B′|×| [symbol] | matrix S₁′:

$${S}_{1}^{′} [ {b}^{′} , h ] = SCOREDISPLAY ( {b}^{′} , h ) ∀ {b}^{′} ∈ {B}^{′} , h ∈ ℋ$$

[0308] Next, an updated scoring matrix S₂′ is computed for heteroclitic peptides conditioned on the potential presentation of the corresponding base peptides by each HLA:

$${S}_{2}^{′} [ {b}^{′} , h ] = \{ \begin{matrix}{S}_{1}^{′} [ {b}^{′} , h ] , & if S [ b , h ] = 1 \\ 0 , & otherwise\end{matrix} ∀ {b}^{′} ∈ {B}^{′} , h ∈ ℋ$$

[0309] where each heteroclitic peptide b′∈B′ is a mutation of base peptide b∈B. This condition enforces that if h was not predicted to potentially present b, then all heteroclitic peptides b′ derived from b will not be displayed by h (even if h would otherwise be predicted to display b′).

[0310] In some embodiments, OptiVax-Robust is used to design a final peptide set (e.g., third peptide set) from the union of base peptides and heteroclitic peptides B∪B′ (with corresponding scoring matrices S and S₂′ for B and B′, respectively). OptiVax will output m sets [symbol] for s∈[1, . . . , m] where m is the largest vaccine size requested from OptiVax. Let [symbol] denote the compact set of vaccine peptides output by OptiVax containing k peptides. Note that [symbol] not necessarily a superset of [symbol] . In alternate embodiments, OptiVax can be used to augment the base set B with peptides from B′ using scoring matrix S₂′ to have OptiVax return set [symbol] ₖ, and the final vaccine set [symbol] consists of peptides B∪ [symbol] ₖ.

[0311] In some embodiments, this procedure is repeated independently for each target of interest, and the resulting independent vaccine sets can be merged into a combined vaccine as described below.

### MHC Class II Vaccine Design Procedure

[0312] In some embodiments, MHC class II vaccine design procedures consist of the following computational steps.

[0313] In some embodiments, the inputs for the computation are:
[0314] P_{1 . . . n}: Peptide sequence(s) (length n) containing the neoantigen(s) or pathogenic target(s) of interest (e.g., KRAS G12D, KRAS G12V, KRAS G12R, KRAS G12C, KRAS G13D). Pᵢ denotes the amino acid at position i.
[0315] t: Position of target mutation in P, t∈[1, . . . , n] (e.g., t=12 for KRAS G12D).
[0316] s: Substitution mutation s∈[true, false] is true if the mutation is a substitution, and false if the mutation is a deletion or insertion or the peptide does not contain a mutation (such as for pathogen targets). When the mutation is a deletion or insertion then t indicates the position immediately before the deletion or insertion.
[0317] τ₁: Threshold for potential presentation of peptides by MHC for peptide-MHC scoring (e.g., 500 nM binding affinity)
[0318] τ₂: Threshold for predicted display of peptides by MHC for peptide-MHC scoring (e.g., 50 nM binding affinity)
[0319] [symbol] : Set of HLA alleles (for HLA-DR, HLA-DQ, HLA-DP loci)
[0320] F: [symbol] → [symbol] : Population haplotype frequencies (for OptiVax optimization and coverage evaluation).
[0321] N: Parameter for EvalVax and OptiVax objective function. Specifies minimum number of predicted per-individual hits for population coverage objective to consider the individual covered Default=1 (computes P(n≥1) population coverage).

[0322] In some embodiments, Peptide-HLA Scoring Functions used are:
[0323] SCOREPOTENTIAL: P× [symbol] → [symbol] : Scoring function mapping a (peptide, HLA allele) pair to a prediction of display. If predicted affinity≤τ₁, then returns 1, else returns 0. Options include NetMHCHIIpan, PUFFIN, ensembles, or alternative metrics or software may be used, including models calibrated against immunogenicity data.
[0324] SCOREDISPLAY: P× [symbol] → [symbol] : Scoring function mapping a (peptide, HLA allele) pair to a prediction of peptide-HLA display. If predicted affinity≤τ₂, then returns 1, else returns 0. Options include NetMHCHIIpan, PUFFIN, ensembles, or alternative metrics or software may be used, including models calibrated against immunogenicity data.
[0325] FindCore: P× [symbol] →[1, . . . , n]: Function mapping a (peptide, HLA allele) pair to a prediction of the 9-mer binding core. The core may be specified as the offset position (index) into the peptide where the core begins.

[0326] Next, from the seed protein sequence (P), a set [symbol] of peptides spanning the protein sequence are constructed. P_{j . . . j+(k-1)} only produces set members when the subscripts are within the range of the defined seed protein P. Here, we extract all windowed peptides of length 13-25 spanning the target mutation, but this process can be performed using any desired window lengths (e.g., only 15-mers).

$$𝒫 = {⋃}_{k ∈ [ 13 , … , 25 ]} {𝒫}_{k}$$

$${𝒫}_{k} = \{ {P}_{j … j + ( k - 1 )} \vert j ∈ [ t - ( k - 1 ) , … , t ] \}$$

[0327] where [symbol] ₖ contains all sliding windows of length k, which are combined to form [symbol] . Note that here (unlike MHC class I), no peptides are excluded based on binding core or anchor residue positions (for MHC class II, filtering is performed as described in this disclosure).
   MHC Class II Vaccine Design Procedure with Defined Peptide Set

[symbol]

[0328] Next, each peptide sequence in [symbol] is scored against all HLA alleles in [symbol] for potential presentation using SCOREPOTENTIAL (with threshold τ₁=500 nM) and store results in a | [symbol] |×| [symbol] | matrix S₁:

$${S}_{1} [ p , h ] = SCOREPOTENTIAL ( p , h ) ∀ p ∈ 𝒫 , h ∈ ℋ$$

[0329] Note that S₁ is a binary matrix where 1 indicates the HLA is predicted to potentially present the peptide, and 0 indicates no potential presentation.

[0330] For each (peptide, HLA allele) pair (p, h), identify/predict the 9-mer binding core using FINDCORE. The predicted binding core is recorded in a matrix C:

$$C [ p , h ] = F I N D CORE ( p , h ) ∀ p ∈ 𝒫 , h ∈ ℋ$$

[0331] Next, if not(s) then S₂[p, h]=S₁[p, h] otherwise an updated scoring matrix S₂ is computed for native peptides in [symbol] :

$${S}_{2} [ p , h ] = \{ \begin{matrix}{S}_{1} [ p , h ] , & if C [ p , h ] specifies {P}_{t} at non - anchor position inside core \\ 0 , & otherwise\end{matrix}$$

$$∀ p ∈ 𝒫 , h ∈ ℋ$$

[0332] where Pₜ is the target residue of interest (e.g., the mutation site of KRAS G12D). This condition enforces the target residue to fall within the binding core at a non-anchor position for all (peptide, HLA allele) pairs with non-zero scores in S₂ and allows the binding core to vary by allele per peptide (as the binding cores of a particular peptide may differ based on the HLA allele presenting the peptide). Thus, for each pair (p, h), if the predicted binding core C[p, h] specifies the target residue Pₜ at an anchor position (P1, P4, P6, or P9 of the 9-mer core), or if Pₜ is not contained within the binding core, then S₂ [p, h]=0. In an alternate embodiment, Pₜ can be located outside of the core or inside the core in a non-anchor position. In some embodiments, Pₜ can only be located at specific positions inside and/or outside of the core. In some embodiments, the binding core predictions in C are accompanied by prediction confidences. In some embodiments, if the confidence for predicted core C[p, h] is below a desired threshold (e.g., 0.5, 0.6, 0.7, 0.8, or 0.9), then S₂ [p, h]=0.

[0333] Next, OptiVax-Robust is run with peptides [symbol] and scoring matrix S₂ to identify a non-redundant base set of peptides B⊆ [symbol] . (In alternate embodiments, B can be chosen as the entire set [symbol] rather than identifying a non-redundant base set.)

[0334] Next, a set of all heteroclitic peptides B′ is created stemming from peptides in B:

$${B}^{′} = {⋃}_{b ∈ ⋃ B} \{ ANCHOR - MODIFIED ( b , c ) ∀ c \vert ∃ h s . t . {S}_{2} [ b , h ] = 1 \}$$

[0335] where ANCHOR-MODIFIED(b,c) returns a set of all 20⁴−1 anchor-modified peptides stemming from b with all possible modifications to the amino acids at P1, P4, P6, and P9 of the 9-mer binding core c. Thus, for each base peptide b, the heteroclitic set B′ contains all anchor-modified peptides b′ with modifications to all unique cores of b identified for any HLA alleles that potentially present b with a valid core position as indicated by scoring matrix S₂.

[0336] Next, all heteroclitic candidate peptides (e.g., modified peptides) in B′ are scored against all HLA alleles in [symbol] for predicted display using SCOREDISPLAY (with threshold τ₂=50 nM), and store results in binary |B′|×| [symbol] | matrix S₁′:

$${S}_{1}^{′} [ {b}^{′} , h ] = ScoreDisplay ( {b}^{′} , h ) ∀ {b}^{′} ∈ {B}^{′} , h ∈$$

[0337] For each (heteroclitic peptide, HLA allele) pair (b′,h), identify/predict the 9-mer binding core using FINDCORE. The predicted binding core is recorded in a matrix C′:

$${C}^{′} [ {b}^{′} , h ] = FINDCORE ( {b}^{′} , h ) ∀ {b}^{′} ∈ {B}^{′} , h ∈$$

[0338] An updated scoring matrix S₂′ is computed for heteroclitic peptides conditioned on the identified binding cores of a heteroclitic and base peptides occurring at the same offset by a particular HLA:

$${S}_{2}^{′} [ {b}^{′} , h ] = \{ \begin{matrix}{S}_{1}^{′} [ {b}^{′} , h ] , & if {C}^{′} [ {b}^{′} , h ] = C [ b , h ] \\ 0 , & otherwise\end{matrix} ∀ {b}^{′} ∈ {B}^{′} , h ∈$$

[0339] where each heteroclitic peptide b′∈B′ is a mutation of base peptide b∈B. This condition enforces the binding core of the heteroclitic peptide b′ to be at the same relative position as the base peptide b, and, implicitly, enforces that the target residue Pₜ still falls in a non-anchor position within the 9-mer binding core (Step 3).

[0340] An updated scoring matrix S₃′ is computed for heteroclitic peptides conditioned on the potential presentation of the corresponding base peptides by each HLA:

$${S}_{3}^{′} [ {b}^{′} , h ] = \{ \begin{matrix}{S}_{2}^{′} [ {b}^{′} , h ] , & if S [ b , h ] = 1 \\ 0 , & otherwise\end{matrix} ∀ {b}^{′} ∈ {B}^{′} , h ∈$$

[0341] where each heteroclitic peptide b′∈B′ is a mutation of base peptide b∈B. This condition enforces that if h was not predicted to display b, then all heteroclitic peptides b′ derived from b will not be displayed by h (even if h would otherwise be predicted to display b′).

[0342] OptiVax-Robust is used to design a final peptide set (e.g., third peptide set) from the union of base peptides and heteroclitic peptides B∪B′ (with corresponding scoring matrices S₂ and S₃′ for B and B′, respectively). OptiVax will output m sets [symbol] for s∈[1, . . . , m] where m is the largest vaccine size requested from OptiVax. Let [symbol] denote the compact set of vaccine peptides output by OptiVax containing k peptides. Note that [symbol] is not necessarily a superset of [symbol] . (In alternate embodiments, OptiVax can be used to augment the base set B with peptides from B′ using scoring matrix S₂′ to have OptiVax return set [symbol] ₖ, and the final vaccine set [symbol] consists of peptides B∪ [symbol] ₖ.)

[0343] In some embodiments, this procedure is repeated independently for each single target of interest, and the resulting independent vaccine sets can be merged into a combined vaccine as described below.

### MHC Class I or Class II Vaccine Design Method Prioritizing Peptide Conservation

[0344] In some embodiments, peptide sequences that are more conserved across strains, species, or other protein sources of interest are prioritized for vaccine inclusion. In some embodiments, a set of related protein sequences called protein variants are considered for vaccine design. A protein variant is one instance of a family of protein sequences, and protein variants can be sequences from various species, pathogen strains, viral strains, or other variations considered for vaccine design. In some embodiments, each protein variant has an associated probability called a protein variant probability, where the sum of all protein variant probabilities for the supplied set of protein variants is one. In some embodiments, multiple proteins of interest can be considered for the design of a single vaccine using an MHC Class I or Class II vaccine design method prioritizing peptide conservation. In these embodiments, protein variants for all proteins of interest are collectively considered for generating candidate peptides. In some embodiments, the protein variant probabilities across all of the considered multiple proteins sum to one.

[0345] A set of candidate peptides are created from each protein variant using a sliding window method that parses the protein variant into peptide sequences. In some embodiments, for MHC Class I 8-mers, 9-mers, 10-mers, and/or 11-mers are produced, but this process can be performed with any desired window lengths and the resulting peptide sets combined. In some embodiments, for MHC Class I, only 9-mers are produced. In some embodiments, for MHC Class II, all windowed peptides of length 13-25 are produced, but this process can be performed using any desired window lengths (e.g., only 15-mers). In some embodiments, peptides that are predicted to be glycosylated in a given protein variant are removed and not considered for that variant as described in Liu et al. (2020a), which is incorporated by reference herein in its entirety.

[0346] In some embodiments, for each generated peptide sequence (MHC Class I or Class II) conservation is defined as the fraction of input protein variants where the peptide sequence occurs. For example, if a given 9-mer peptide sequence occurs in the peptides generated from 90% of the protein variants provided as input, its conservation is 0.90. In some embodiments, conservation is defined for each generated peptide sequence (MHC Class I or Class II) as the sum of the protein variant frequencies where the peptide sequence occurs. For example, if a given 9-mer peptide sequence occurs in the peptides generated from protein variants with protein variant probabilities of 0.10 and 0.20, its conservation is 0.30. In some embodiments, this functionality is implemented by a ComputeConservation function that computes the sum of the frequencies of the protein variants that contain a peptide sequence. In some embodiments, when sufficient protein variants are not sufficient for computing expected future conservation a method of predicting conservation can be used to implement ComputeConservation, such as the one found in Hie et al. (2021), which is incorporated by reference herein in its entirety.

[0347] In some embodiments, vaccine design considers conservation by prioritizing peptides for vaccine inclusion that are more conserved than others to meet a desired vaccine performance metric. In some embodiments, the vaccine design method attempts to first design a vaccine with candidate peptides that all meet a first conservation threshold, and if the desired vaccine performance is not met, it iteratively adds additional peptides with less stringent conservation to attempt to meet the desired vaccine performance metric. In some embodiments, vaccine design prioritizing conservation proceeds by setting a vaccine design D to be an empty set, and then performing the steps of: (1) selecting candidate peptides in which each peptide passes a conservation threshold to create a candidate peptide set and is not in D, (2) selecting vaccine designs having varying peptide numbers/combinations from this candidate set to optimize a vaccine performance metric using methods disclosed herein for MHC Class I or Class II vaccine design to augment the vaccine design contained in D (one implementation of vaccine augmentation is described in (Liu et al., 2021), incorporated by reference in its entirety herein), (3) selecting the smallest vaccine peptide set design from Step 2 that either meets the desired vaccine performance metric or where adding one more peptide to the selected set does not provide a desired minimum improvement in the vaccine performance metric, (4) if a vaccine peptide set was found in Step 3, adding the vaccine peptide set design from Step 3 to the vaccine design D, and (5) determining whether the vaccine design D meets a desired vaccine performance metric objective, and if so, return vaccine design D as the final vaccine design. If at Step 6, the vaccine design D fails to meet the desired vaccine performance metric objective, the computation continues with the following steps: (6) setting an updated conservation threshold to be lower than the current conservation threshold (less constrained) and (7) repeating the process starting at Step 1 retaining the current vaccine design D and current candidate set until either a desired vaccine performance metric objective is reached at Step 6, or the updated conservation threshold is lower than a minimum desired conservation threshold. If on any iteration, the updated conservation threshold is lower than a minimum desired conservation threshold, the latest version of vaccine design D will be used as the final vaccine design. When the process completes, the final vaccine design D includes all of the peptides that can be used in a vaccine.

[0348] In some embodiments, MHC class I or class II vaccine design procedures consist of the following computational steps.

[0349] In some embodiments, the inputs for the computation are:
[0350] P_{j,1 . . . n}_{ⱼ}: Peptide sequence of protein variant j of length nⱼ. P_{j,i} denotes the amino acid at position i of protein variant j, where j∈[1, . . . a] and a is the number of protein variants
[0351] Oⱼ: Protein variant probability of protein variant Pⱼ
[0352] tⱼ: Position in protein variant Pⱼ of the target mutation t∈[1, . . . n]
[0353] D: The vaccine design, initialized to the empty set Ø
[0354] s: Substitution mutation s∈[true, false] is true if the mutation is a substitution, and false if the mutation is a deletion or insertion or the peptide does not contain a mutation. When the mutation is a deletion or insertion then t indicates the position immediately before the deletion or insertion.
[0355] c₁: Initial conservation level of peptides
[0356] c_{c}: Current conservation threshold
[0357] c₂: Change in conservation level on each iteration
[0358] cₘ: Minimum final conservation
[0359] v: Target vaccine performance metric
[0360] v_{d}: Minimum change in vaccine performance metric to increase vaccine size
[0361] N: Parameter for EvalVax and OptiVax objective function. Specifies minimum number of predicted per-individual hits for population coverage objective to consider the individual covered Default=1 (computes P(n≥1) population coverage).
[0362] COMPUTECONSERVATION: S×X×O→ [symbol] : In some embodiments, computes the fraction of sets Xⱼ that contain sequence S. In some embodiments, sums all the Oⱼ where sequence S appears in Xⱼ

[0363] The protein variant sequences Pⱼ are used to produce windowed peptides that span the protein sequence(s) starting at each location m with a peptide length of k residues. The result is the set Xⱼ that contains all of the peptide sequences in protein variant Pⱼ. P_{j,m . . . m+(k-1)} only produces a sequence when the subscripts are within the range of the defined protein Pⱼ. In some embodiments for MHC Class I, k is chosen to produce 8-mers, 9-mers, 10-mers, and 11-mers, but this process can be performed with any desired window lengths and the resulting peptide sets combined. In some embodiments for MHC Class I, only 9-mers are produced. In some embodiments for MHC Class II, we extract all windowed peptides of length 13-25, but this process can be performed using any desired window lengths (e.g., only 15-mers).

$${X}_{j} = {⋃}_{{t ∈ [ 1 … {n}_{j} ]}_{k ∈ [ \begin{matrix}8 - 11 MHC Class I \\ 13 - 25 MHC Class II\end{matrix} ]}} \{ \begin{matrix}{P}_{j , m…m + ( k - 1 )} \vert m ∈ [ t - ( k - 1 ) , … , t ] , \\ if s and MHC Class I then \\ m \neq \{ t - ( k - 1 ) , t - 1 \}\end{matrix} \}$$

[0364] In some embodiments for MHC Class I, the second condition m≠{t−(k−1), t−1} excludes peptides where the mutation at t is in positions P2 or Pk of the windowed k-mer peptide (i.e., the anchor positions) and the mutation is a substitution and if for MHC Class I design. MHC Class II anchor positions are filtered in the MHC Class II design method.

[0365] Create the set of all peptides B that occur in any input protein variant.

$$B = {⋃}_{j ∈ [ 1 , … a ]} {X}_{j}$$

$$z = \vert B \vert$$

[0366] For each peptide B_{w} in B its conservation metric C_{w} is computed using COMPUTECONSERVATION

$${C}_{w} = COMPUTECONSERVATION [ {B}_{w} , X , O ]$$

[0367] The current conservation threshold is then set to the initial conservation threshold

$${c}_{c} = {c}_{1}$$

[0368] At Step 1, candidate peptides are selected where each peptide passes a conservation threshold to create a candidate peptide set and is not in D. A set of peptide candidates [symbol] is defined such that each candidate peptide meets the current conservation threshold c_{c} and the peptide candidate is not already in D. D is set to empty (0 peptides) on the first iteration of the computational steps.

$$= {⋃}_{w ∈ [ 1 , … , z ]} {B}_{w} where {C}_{w} \geq {c}_{c} and {B}_{w} ∉ D$$

[0369] At Step 2, vaccine designs are selected having varying peptide numbers/combinations from the candidate set to optimize a vaccine performance metric using methods disclosed herein for MHC Class I or Class II vaccine design to augment the vaccine design contained in D. The peptide set [symbol] is provided to “MHC Class I Vaccine Design Procedure with Defined Peptide Set [symbol] for MHC Class I and “MHC Class II Vaccine Design Procedure with Defined Peptide Set [symbol] for MHC Class II. The peptide set [symbol] is provided as the set of candidates to augment the set D. Both the set [symbol] and D are provided to OptiVax which uses D as the fixed starting set and augments D with peptides from the set [symbol] using vaccine augmentation as described in (Liu et al., 2021), incorporated by reference in its entirety herein. OptiVax-Robust is used to augment the set D with peptides from [symbol] using the scoring matrices as defined in “MHC Class I Vaccine Design Procedure with Defined Peptide Set [symbol] for MHC Class I and “MHC Class II Vaccine Design Procedure with Defined Peptide Set [symbol] for MHC Class II, and returns sets [symbol] ₛ where each set [symbol] ₛ is a compact set of vaccine peptides output by OptiVax containing s peptides. In some embodiments, the steps to modify anchor positions are not utilized in the MHC Class I or MHC Class II vaccine design methods and only the base peptides B are utilized for vaccine design. In some embodiments, positions in addition to anchor positions are modified in the MHC Class I or MHC Class II vaccine design methods utilized to create B′.

[0370] At Step 3, the smallest vaccine peptide set design is selected from Step 2 that either meets the desired vaccine performance metric or where adding one more peptide to the selected set does not provide a desired minimum improvement in the vaccine performance metric. A vaccine design [symbol] ₛ is chosen that meets minimum requirements. In some embodiments, the vaccine design [symbol] ₛ is chosen with the value s chosen to be the minimum value of s such that the difference in vaccine performance between D∪ [symbol] ₛ and D∪ [symbol] ₛ₊₁ is less than v_{d}. In some embodiments, the value s is chosen to be the minimum value such that the vaccine performance metric of D∪ [symbol] ₛ meets the final vaccine performance metric v. In some embodiments, [symbol] ₛ₊₁ is not necessarily a superset of [symbol] ₛ.

[0371] At Step 4, if a vaccine peptide set was found in Step 3, it is added to the vaccine peptide set design D. If an acceptable vaccine design [symbol] ₛ was found in Step 4, the vaccine design set D is updated to consist of D∪ [symbol] ₛ

[0372] At Step 5, it is determined whether the vaccine design D meets a desired vaccine performance metric objective. If the vaccine design set D meets the final vaccine performance design metric v, return D as the final design.

[0373] At Step 6, the conservation threshold is updated to be lower than the current conservation threshold (less constrained). If the vaccine design set D does not meet the final vaccine performance design metric v, reduce c_{c}

$${c}_{c} = {c}_{c} - {c}_{2}$$

[0374] At Step 7, repeat the process starting at Step 1 retaining the current vaccine design D and current candidate set until either a desired vaccine performance metric objective is reached at Step 5, or the updated conservation threshold is lower than a minimum desired conservation threshold. If c_{c}<cₘ then return design set D as the final vaccine. If not, return to Step 1 and repeat all subsequent steps.

[0375] In some embodiments, this procedure is repeated independently for each pathogen gene variant or target variant of interest, and the resulting independent vaccine sets can be merged into a combined vaccine. In some embodiments, this procedure is repeated independently for each single influenza protein target of interest, and the resulting independent vaccine sets can be merged into a combined vaccine.

### Methods for Combining Multiple Vaccines

[0376] The above described methods will produce an optimized target peptide set (e.g., third peptide set) for one or more individual targets. In some embodiments, a method is provided for designing separate vaccines for MHC class I and class II based immunity for multiple targets (e.g., two or more targets such as KRAS G12D and KRAS G12V).

[0377] In some embodiments, a method is disclosed for producing a combined peptide vaccine for multiple targets by using a table of presentations for a disease that is based upon empirical data from sources such as the Cancer Genome Atlas (TCGA). In some embodiments, a method is disclosed for producing a combined peptide vaccine for multiple strains of a pathogen (e.g., influenza) that is based upon empirical data of strain prevalence where prevalence is used to represent the probability of the presentation of a given strain. In some embodiments, for a given strain presentation the probabilities of each pathogen protein target are identical and sum to one. In some embodiments, for a given strain presentation the probabilities of each pathogen protein target are vary based upon the observed or predicted immunogenicity of each protein (e.g., based upon the expression of the pathogen protein or its processing).

[0378] FIG. 13 shows one embodiment for factoring disease presentation type probabilities (e.g., pancreatic cancer, colorectal cancer, and skin cancer) by probability, for each disease presentation, of target presented for various mutation targets (e.g., KRAS G12D, KRAS G12V, and KRAS G12R). A presentation is a unique set of targets that are presented by one form of a disease (e.g., distinct type of cancer or cancer indication as shown in FIG. 13). For each presentation, FIG. 13 shows an example of the probability of that presentation, and the probability that a given target is observed. For a given presentation, there can be one or more targets, each having a probability. In some embodiments, the method for multi-target vaccine design will allocate peptide resources for inducing disease immunity based on the presentation and respective target probabilities as shown in FIG. 13, for example. In some embodiments, presentations correspond to the prevalence of targets in different human populations or different risk groups. The probability of a target in a population is computed by summing for each possible presentation the probability of that presentation times the probability of the target in that presentation. FIG. 13 shows weights used for merging individual vaccines for each target (row) into combined vaccines for each disease indication (column). Values indicate the observed fraction of cases containing each target mutation. Data are from The Cancer Genome Atlas (TCGA). For each disease indication, TCGA data are filtered to cases where the Primary Site is the indication.

[0379] In some embodiments, presentations are used to represent different strains of pathogens, where the probability of a presentation is based upon the prevalence of a given pathogen strain. In some embodiments, for a given strain presentation the probabilities of each pathogen protein target are identical and sum to one. In some embodiments, for a given strain presentation the probabilities of each pathogen protein target vary based upon the observed or predicted immunogenicity of each pathogen protein (e.g., based upon the expression of the pathogen protein or its processing).

[0380] In some embodiments, the same vaccine design will be generated for mutations to different proteins when the base peptides generated by the mutations to the different proteins are identical. For example, in some embodiments of base peptide selection the following mutations have identical vaccine designs because they share the same set of base peptides: HRAS Q61K, NRAS Q61K, and KRAS Q61K; HRAS Q61L, NRAS Q61L, and KRAS Q61L; HRAS Q61R, NRAS Q61R, and KRAS Q61R. Referring to FIG. 13, in some embodiments when two mutations have identical individual vaccine designs their presentation specific probabilities are added when weighting the individual vaccine design for inclusion in a combined vaccine as described below (e.g., for Thyroid Cancer NRAS Q61R and HRAS Q61R).

[0381] Referring to FIG. 14, in some embodiments, the method first includes designing an individual peptide vaccine for each target to create a combined vaccine design for multiple targets. This initially results in sets of target-specific vaccine designs. In some embodiments, the marginal predicted vaccine performance of each target-specific vaccine at size k is defined by predicted vaccine performance at size k minus the predicted vaccine performance of the vaccine at size k minus one (see FIGS. 3-11). The composition of a vaccine may change as the number of peptides used in the vaccine increases, and thus for computing contributions to a combined vaccine the marginal predicted vaccine performance of each target-specific vaccine is used instead of a specific set of peptides.

[0382] In some embodiments, the weighted marginal predicted vaccine performance of a target-specific vaccine design for each target specific vaccine size is computed as shown in FIG. 14. For a given target specific vaccine size, its weighted predicted vaccine performance is computed by multiplying its predicted vaccine performance times the probability of the target in the population (e.g., by using values as shown in FIG. 13). The marginal weighted predicted vaccine performance for a target specific vaccine is its weighted coverage at size k minus its coverage a size k minus one (e.g., see FIGS. 3-11). The marginal weighted predicted vaccine performance of a target specific vaccine of size one is its weighted predicted vaccine performance. The marginal weighted predicted vaccine performances for all vaccines are combined into a single list, and the combined list is sorted from largest to least by the weighted marginal predicted vaccine performances of the target specific vaccines as shown in FIG. 14. The combined vaccine of size n is then determined by the first n elements of this list. The peptides for the combined vaccine are determined by the individual peptide target vaccines whose sizes add to n and whose weighted predicted vaccine performances sums to the same sum as the first n elements of the sorted list. This maximizes the predicted vaccine performance of the combined vaccine of size n.

[0383] In some embodiments, the combined multiple target vaccine can be designed on its overall predicted coverage for the disease described depending on the presentation table used (e.g., see FIG. 13), by its predicted coverage for a specific indication, and/or by its predicted coverage for a specific target by adjusting the weighting used for predicted vaccine performance accordingly. Once a desired level of coverage is selected, the peptides of the combined vaccine are determined by the contributions of target-specific designs. For example, if the combined vaccine includes a target-specific vaccine of size k, then the vaccine peptides for this target at size k are used in the combined vaccine.

[0384] As an example of one embodiment, FIG. 13 shows mutations (e.g., KRAS G12D, G12V, and G12R) and their respective probabilities of occurring in an individual with different cancer indications (e.g., pancreatic cancer). The marginal population coverage of each target-specific vaccine at a given vaccine size is the improvement in coverage at that size and the size minus one. The coverage with no peptides is zero. The marginal coverage of each target-specific vaccine is multiplied by the probability of the target in the population as determined by the proportions as shown in FIG. 13 for a selected indication (e.g., pancreatic cancer). These weighted marginal coverages of all target-specific vaccines are sorted to determine the best target-specific compositions, and the resulting list describes the composition of a combined vaccine for the selected indication at each size k by taking the first k elements of the list. At each combined vaccine size, different components of the target-specific vaccines are utilized for the indication illustrated.

### Combined Vaccine Design Procedure

[0385] In some embodiments, the procedure described herein is used to combine individual compact vaccines optimized for different targets into a single optimized combined vaccine.

[0386] In some embodiments, the computational inputs for the procedure are:
[0387] [symbol] : Set of neoantigen or pathogenic targets of interest (e.g., KRAS G12D, KRAS G12V, KRAS G12R)
[0388] [symbol] : Vaccine sets optimized individually for each target. Let [symbol] denote the optimal vaccine set of exactly k peptides for target t∈ [symbol] (e.g., as computed by the procedures describe above). Note that [symbol] may not necessarily be a superset of [symbol] .
[0389] W: [symbol] →[0,1]: Target weighting function mapping each target t∈ [symbol] to a probability or weight of t in a particular presentation of interest (e.g., pancreatic cancer; see FIG. 13 for example).
[0390] POPULATIONCOVERAGE: [symbol] →[0,1]: Function mapping a peptide set into population coverage (e.g., EvalVax). This function may also take as input additional parameters, including HLA haplotype frequencies and a minimum per-individual number of peptide-HLA hits N (here, we compute coverage as P(n≥1) using EvalVax-Robust).

[0391] At Step 1, for each target t (individually) compute optimized vaccines of sizes 1 to m (1 to m peptides; m is the largest vaccine size used for the computation) as the sets [symbol] where k denotes the size of the vaccine. Then, compute the vaccine performance for each vaccine size. For each target t (individually) and vaccine size (peptide count) k, the unweighted population coverage c_{t,k} is computed:

$${c}_{t , k} = PopulationCoverage ( {V}_{t , k} ) ∀ t ∈ , k$$

[0392] In some embodiments, for each target t, c_{t,k} is generally monotonically increasing and concave down for increasing values of k (each additional peptide increases coverage but with decreasing returns).

[0393] At Step 2, vaccine marginal performance is computed and weighted by each target's prevalence weight. For each target t (individually), the marginal coverage m_{t,k} is computed of the k-th peptide added to the vaccine set:

$${m}_{t , k} = \{ \begin{matrix}{c}_{t , k} & if k = 1 \\ {c}_{t , k} - {c}_{t , k - 1} , & otherwise\end{matrix} ∀ t ∈ , k$$

[0394] In some embodiments, for each target t, m_{t,k} should be a monotonically decreasing function in k (by Step 1 above).

[0395] The weighted marginal population coverage \tilde{m}_{t,k} is computed using weights of each target in W:

$${\tilde{m}}_{t , k} = W ( t ) \cdot {m}_{t , k} ∀ t ∈ , k$$

[0396] The weighted marginal population coverage gives the effective marginal coverage of the k-th peptide in the vaccine weighted by the prevalence of the target in the presentation (by multiplication with the probability/weight of the target in the presentation).

[0397] At Step 3, the weighted vaccine performances are merged for all targets to produce combined vaccine designs at each peptide count. The individual vaccines are combined into a combined vaccine via the MergeMulti procedure called on the weighted marginal population coverage lists \tilde{m}ₜ=[\tilde{m}_{t,k}, k∈1, 2, . . . ]. FIG. 15 shows an example Python implementation of the MergeMulti function. This procedure takes as input multiple sorted (descending) lists and merges them into a single sorted (descending) list. Let M indicate the output of MergeMulti where each element Mk contains both the marginal weighted coverage and source (target) of the k-th peptide in the combined vaccine. The combined vaccine contains peptides from different targets. In particular, the combined vaccine with k peptides contains C_{t,k}=Σ_{j≤k} [symbol] {Mₖ from t} peptides from target t. C_{t,k}∈[0, . . . , k] and Σₜ C_{t,k}=k (Ct,k gives the distribution of the k peptides in the combined vaccine across the targets).

[0398] At Step 4, a vaccine with a desired performance is selected. The final vaccine size k can vary based upon the specific population coverage goals of the vaccine. The marginal weighted coverage values of the combined vaccine Mk can be cumulatively summed over k to give the overall effective (target-weighted) population coverage of the combined vaccine containing k peptides as Σ_{j≤K} Mₖ (taking into account both the probabilities/weights of the targets in the presentation and the expected population coverage of peptides based on HLA display).

[0399] At Step 5, the vaccine peptides corresponding to the target coverage is retrieved for the final vaccine size k. The optimal combined vaccine set [symbol] for the final vaccine size k is defined as:

$${\hat{v}}_{k} = {⋃}_{t ∈ 𝒯} {v}_{t , {C}_{t , k}}$$

[0400] Thus, the combined vaccine with k peptides is the combination of the optimal individual (C_{t,k})-peptide vaccines. The final vaccine size k can vary based upon the specific population coverage goals of the vaccine.

### MHC Class I Peptide Sequences

[0401] In some embodiments, a peptide composition (single target or combined multiple target) comprises about 1 to 40 MHC class I peptides with each peptide consisting of 8 or more amino acids. In some embodiments, an MHC class I peptide composition is intended for the influenza nucleoprotein protein target. In some embodiments, an MHC class I peptide composition is intended to prevent influenza. In some embodiments, an MHC class I peptide composition is intended to treat influenza.

[0402] In some embodiments, the amino acid sequence for an MHC class I peptide composition for influenza comprises one or more of the SEQ ID NOs: 1 to 80. In some embodiments, any one of the peptides in the influenza composition comprise an amino acid sequence at least about 80, 81, 82, 83, 84, 85, 86, 87, 88, 89, 90, 91, 92, 93, 94, 95, 96, 97, 98 or 99% identical to SEQ ID NOs: 1 to 80.

[0403] In some embodiments, the amino acid sequence for an MHC class I peptide composition for influenza comprises two or more of the SEQ ID NOs: 1 to 80. In some embodiments, any one of the peptides in the influenza composition comprise an amino acid sequence at least about 80, 81, 82, 83, 84, 85, 86, 87, 88, 89, 90, 91, 92, 93, 94, 95, 96, 97, 98 or 99% identical to SEQ ID NOs: 1 to 80.

[0404] Table 1 shows MHC class I peptide sequences described herein including the respective SEQ ID NO, amino acid sequence corresponding to the SEQ ID NO, protein target (with specific mutation), the seed amino acid sequence (i.e., the amino acid sequence of the wild type protein fragment), the amino acid substitution (if any) for heteroclitic peptides at positions 2 and C (carboxyl terminus), and notes detailing embodiments in which the peptide may be included in a combined peptide composition as described herein. In some embodiments, any combination of peptides listed in Table 1 (SEQ ID NOs: 1 to 80) may be used to create a combined peptide composition having between about 1 and about 40 peptides. In some embodiments, any one of the peptides (peptides 1 to 80; SEQ ID NOs: 1 to 80) in the combined composition comprises an amino acid sequence at least about 80, 81, 82, 83, 84, 85, 86, 87, 88, 89, 90, 91, 92, 93, 94, 95, 96, 97, 98 or 99% identical to any of SEQ ID NOs: 1 to 80.

[0405] In some embodiments, Table 1 describe preferred peptides for compositions of a desired size. In some embodiments, a composition of size n is selected from a desired column of Table 1, and a peptide is included if it is annotated as having a number between 1 and n.

[0406] In some embodiments, any combination of the peptides listed in Table 1 in the “90-100% Conserved Augmentation Vaccine” column (SEQ ID NOs: 50 to 80) may be used to create a combined peptide composition having between about 1 and about 40 peptides. In some embodiments, any one of these peptides in the combined composition comprises an amino acid sequence at least about 80, 81, 82, 83, 84, 85, 86, 87, 88, 89, 90, 91, 92, 93, 94, 95, 96, 97, 98 or 99% identical to the peptides listed in Table 1 in the “90-100% Conserved Augmentation Vaccine” column (SEQ ID NOs: 50 to 80).

[0407] In some embodiments, any combination of the peptides listed in Table 1 in the “98-100% Conserved Heteroclitic Vaccine” column (SEQ ID NO: 1, SEQ ID NOs: 6 to 11, SEQ ID NOs: 13 to 24, SEQ ID NO: 26, SEQ ID NO: 29, SEQ ID NOs: 31 to 32, SEQ ID NOs: 35 to 37, SEQ ID NO: 39, SEQ ID NOs: 42 to 43, SEQ ID NO: 47, and SEQ ID NOs: 77 to 78) may be used to create a combined peptide composition having between about 1 and about 40 peptides. In some embodiments, any one of these peptides in the combined composition comprises an amino acid sequence at least about 80, 81, 82, 83, 84, 85, 86, 87, 88, 89, 90, 91, 92, 93, 94, 95, 96, 97, 98 or 99% identical to the peptides listed in Table 1 in the “98-100% Conserved Heteroclitic Vaccine” column (SEQ ID NO: 1, SEQ ID NOs: 6 to 11, SEQ ID NOs: 13 to 24, SEQ ID NO: 26, SEQ ID NO: 29, SEQ ID NOs: 31 to 32, SEQ ID NOs: 35 to 37, SEQ ID NO: 39, SEQ ID NOs: 42 to 43, SEQ ID NO: 47, and SEQ ID NOs: 77 to 78).

[0408] In some embodiments, any combination of the peptides listed in Table 1 in the “100% Conserved Heteroclitic Vaccine” column (SEQ ID NOs: 1 to 5, SEQ ID NO: 12, SEQ ID NO: 25, SEQ ID NOs: 27 to 49, SEQ ID NO: 75, and SEQ ID NO: 78) may be used to create a combined peptide composition having between about 1 and about 40 peptides. In some embodiments, any one of these peptides in the combined composition comprises an amino acid sequence at least about 80, 81, 82, 83, 84, 85, 86, 87, 88, 89, 90, 91, 92, 93, 94, 95, 96, 97, 98 or 99% identical to the peptides listed in Table 1 in the “100% Conserved Heteroclitic Vaccine” column (SEQ ID NOs: 1 to 5, SEQ ID NO: 12, SEQ ID NO: 25, SEQ ID NOs: 27 to 49, SEQ ID NO: 75, and SEQ ID NO: 78).

[0409] In some embodiments, a peptide composition (single target or combined multiple target) comprises about 1 to 40 MHC class I peptides with each peptide consisting of 8 or more amino acids. In some embodiments, an MHC class I peptide composition is intended one or more influenza protein targets selected from the group consisting of RNA-directed RNA polymerase catalytic subunit, Matrix protein 1, Polymerase basic protein 2, Polymerase acidic protein, and Protein PA-X. In some embodiments, an MHC class I peptide composition is intended to prevent influenza. In some embodiments, an MHC class I peptide composition is intended to treat influenza.

[0410] In some embodiments, the amino acid sequence for an MHC class I peptide composition for influenza comprises one or more of the SEQ ID NOs: 137515 to 137681. In some embodiments, any one of the peptides in the influenza composition comprise an amino acid sequence at least about 80, 81, 82, 83, 84, 85, 86, 87, 88, 89, 90, 91, 92, 93, 94, 95, 96, 97, 98 or 99% identical to SEQ ID NOs: 137515 to 137681.

[0411] In some embodiments, the amino acid sequence for an MHC class I peptide composition for influenza comprises two or more of the SEQ ID NOs: 137515 to 137681. In some embodiments, any one of the peptides in the influenza composition comprise an amino acid sequence at least about 80, 81, 82, 83, 84, 85, 86, 87, 88, 89, 90, 91, 92, 93, 94, 95, 96, 97, 98 or 99% identical to SEQ ID NOs: 137515 to 137681.

[0412] Table 3 shows MHC class I peptide sequences described herein including the respective SEQ ID NO, amino acid sequence corresponding to the SEQ ID NO, the seed amino acid sequence (i.e., the amino acid sequence of the wild type protein fragment), the amino acid substitution (if any) for heteroclitic peptides at positions 2 and C (carboxyl terminus), and notes detailing embodiments in which the peptide may be included in a combined peptide composition as described herein. In some embodiments, any combination of peptides listed in Table 3 (SEQ ID NOs: 137515 to 137681) may be used to create a combined peptide composition having between about 1 and about 40 peptides. In some embodiments, any one of the peptides (peptides 137515 to 137681; SEQ ID NOs: 137515 to 137681) in the combined composition comprises an amino acid sequence at least about 80, 81, 82, 83, 84, 85, 86, 87, 88, 89, 90, 91, 92, 93, 94, 95, 96, 97, 98 or 99% identical to any of SEQ ID NOs: 137515 to 137681.

[0413] In some embodiments, Table 3 describe preferred peptides for compositions of a desired size. In some embodiments, a composition of size n is selected from a desired column of Table 3, and a peptide is included if it is annotated as having a number between 1 and n.

[0414] In some embodiments, any combination of the peptides listed in Table 3 in the “RNA-directed RNA polymerase catalytic subunit vaccine” column (SEQ ID NOs: 137515 to 137549 and SEQ ID NO: 137676) may be used to create a combined peptide composition having between about 1 and about 40 peptides. In some embodiments, any one of these peptides in the combined composition comprises an amino acid sequence at least about 80, 81, 82, 83, 84, 85, 86, 87, 88, 89, 90, 91, 92, 93, 94, 95, 96, 97, 98 or 99% identical to the peptides listed in Table 3 in the “RNA-directed RNA polymerase catalytic subunit vaccine” column (SEQ ID NOs: 137515 to 137549 and SEQ ID NO: 137676).

[0415] In some embodiments, any combination of the peptides listed in Table 3 in the “Matrix protein 1 vaccine” column (SEQ ID NOs: 137642 to 137675) may be used to create a combined peptide composition having between about 1 and about 40 peptides. In some embodiments, any one of these peptides in the combined composition comprises an amino acid sequence at least about 80, 81, 82, 83, 84, 85, 86, 87, 88, 89, 90, 91, 92, 93, 94, 95, 96, 97, 98 or 99% identical to the peptides listed in Table 3 in the “Matrix protein 1 vaccine” column (SEQ ID NOs: 137642 to 137675).

[0416] In some embodiments, any combination of the peptides listed in Table 3 in the “Polymerase basic protein 2 vaccine” column (SEQ ID NOs: 137582 to 137609 and SEQ ID NOs: 137678 to 137679) may be used to create a combined peptide composition having between about 1 and about 40 peptides. In some embodiments, any one of these peptides in the combined composition comprises an amino acid sequence at least about 80, 81, 82, 83, 84, 85, 86, 87, 88, 89, 90, 91, 92, 93, 94, 95, 96, 97, 98 or 99% identical to the peptides listed in Table 3 in the “Polymerase basic protein 2 vaccine” column (SEQ ID NOs: 137582 to 137609 and SEQ ID NOs: 137678 to 137679).

[0417] In some embodiments, any combination of the peptides listed in Table 3 in the “Polymerase acidic protein vaccine” column (SEQ ID NOs: 137610 to 137641 and SEQ ID NOs: 137680 to 137681) may be used to create a combined peptide composition having between about 1 and about 40 peptides. In some embodiments, any one of these peptides in the combined composition comprises an amino acid sequence at least about 80, 81, 82, 83, 84, 85, 86, 87, 88, 89, 90, 91, 92, 93, 94, 95, 96, 97, 98 or 99% identical to the peptides listed in Table 3 in the “Polymerase acidic protein vaccine” column (SEQ ID NOs: 137610 to 137641 and SEQ ID NOs: 137680 to 137681).

[0418] In some embodiments, any combination of the peptides listed in Table 3 in the “Protein PA-X vaccine” column (SEQ ID NOs: 137550 to 137581, SEQ ID NO: 137614, SEQ ID NOs: 137619 to 137620, SEQ ID NO: 137624, SEQ ID NO: 137630, and SEQ ID NO: 137677) may be used to create a combined peptide composition having between about 1 and about 40 peptides. In some embodiments, any one of these peptides in the combined composition comprises an amino acid sequence at least about 80, 81, 82, 83, 84, 85, 86, 87, 88, 89, 90, 91, 92, 93, 94, 95, 96, 97, 98 or 99% identical to the peptides listed in Table 3 in the “Protein PA-X vaccine” column (SEQ ID NOs: 137550 to 137581, SEQ ID NO: 137614, SEQ ID NOs: 137619 to 137620, SEQ ID NO: 137624, SEQ ID NO: 137630, and SEQ ID NO: 137677).

[0419] Additional amino acid sequences of MHC class I composition peptides are provided in Sequence Listings (SEQ ID NOs: 144 to 51225 and SEQ ID NOs: 137831 to 171339). In some embodiments, any combination of MHC class I peptides disclosed herein (SEQ ID NOs: 1 to 80, SEQ ID NOs: 144 to 51225, SEQ ID NOs: 137515 to 137681, and SEQ ID NOs: 137831 to 171339) may be used to create a combined peptide composition having between about 1 and about 40 peptides. In some embodiments, any one of the peptides (SEQ ID NOs: 1 to 80, SEQ ID NOs: 144 to 51225, SEQ ID NOs: 137515 to 137681, and SEQ ID NOs: 137831 to 171339) in the combined composition comprises or contains an amino acid sequence at least about 80, 81, 82, 83, 84, 85, 86, 87, 88, 89, 90, 91, 92, 93, 94, 95, 96, 97, 98 or 99% identical to any of SEQ ID NOs: 1 to 80, SEQ ID NOs: 144 to 51225, SEQ ID NOs: 137515 to 137681, or SEQ ID NOs: 137831 to 171339.

[0420] In some embodiments, any combination of the sequences SEQ ID NO: 1, SEQ ID NO: 137534, SEQ ID NO: 137542, SEQ ID NO: 137548, SEQ ID NO: 137549, SEQ ID NO: 137582, SEQ ID NO: 137589, SEQ ID NO: 137591, SEQ ID NO: 137592, SEQ ID NO: 137593, SEQ ID NO: 137595, SEQ ID NO: 137596, SEQ ID NO: 137602, SEQ ID NO: 137603, SEQ ID NO: 137605, SEQ ID NO: 137609, SEQ ID NO: 137636, SEQ ID NO: 137678, SEQ ID NO: 152444, SEQ ID NO: 158608, SEQ ID NO: 159668, SEQ ID NO: 159836, SEQ ID NO: 160178, SEQ ID NO: 163059, SEQ ID NO: 163359, SEQ ID NO: 165108, SEQ ID NO: 166287, SEQ ID NO: 166381, SEQ ID NO: 169351, and SEQ ID NO: 169445 may be used to create a combined peptide composition having between 1 and 30 peptides.

[0421] In some embodiments, any combination of the sequences SEQ ID NO: 60, SEQ ID NO: 78, SEQ ID NO: 137676, SEQ ID NO: 137678, SEQ ID NO: 137679, SEQ ID NO: 137680, SEQ ID NO: 137681, SEQ ID NO: 138184, SEQ ID NO: 138479, SEQ ID NO: 138507, SEQ ID NO: 139007, SEQ ID NO: 139254, SEQ ID NO: 139774, SEQ ID NO: 139877, SEQ ID NO: 139946, SEQ ID NO: 140100, SEQ ID NO: 140205, SEQ ID NO: 140315, SEQ ID NO: 140540, SEQ ID NO: 141425, SEQ ID NO: 141983, SEQ ID NO: 142800, SEQ ID NO: 144320, SEQ ID NO: 144957, SEQ ID NO: 144986, SEQ ID NO: 145500, SEQ ID NO: 145577, SEQ ID NO: 146730, SEQ ID NO: 147173, and SEQ ID NO: 148426 may be used to create a combined peptide composition having between 1 and 30 peptides.

[0422] In some embodiments, the composition comprising the MHC class I peptides disclosed herein is an immunogenic composition. In some embodiments, the composition is a vaccine.

### MHC Class II Peptide Sequences

[0423] In some embodiments, a peptide composition (single target or combined multiple target) comprises about 1 to 40 MHC class II peptides with each peptide consisting of about 20 amino acids. In some embodiments, an MHC class II peptide composition is intended for the influenza nucleoprotein protein target. In some embodiments, an MHC class II peptide composition is intended to prevent influenza. In some embodiments, an MHC class II peptide composition is intended to treat influenza.

[0424] In some embodiments, the amino acid sequence for an MHC class II peptide composition for influenza comprises one or more of the SEQ ID NOs: 81 to 143. In some embodiments, any one of the peptides in the influenza composition comprise an amino acid sequence at least about 80, 81, 82, 83, 84, 85, 86, 87, 88, 89, 90, 91, 92, 93, 94, 95, 96, 97, 98 or 99% identical to SEQ ID NOs: 81 to 143.

[0425] In some embodiments, the amino acid sequence for an MHC class II peptide composition for influenza comprises two or more of the SEQ ID NOs: 81 to 143. In some embodiments, any one of the peptides in the influenza composition comprise an amino acid sequence at least about 80, 81, 82, 83, 84, 85, 86, 87, 88, 89, 90, 91, 92, 93, 94, 95, 96, 97, 98 or 99% identical to SEQ ID NOs: 81 to 143.

[0426] Table 2 summarizes MHC class II peptide sequences described herein including the respective SEQ ID NO, amino acid sequence corresponding to the SEQ ID NO, the amino acid sequence corresponding to the peptide's binding core, the protein target (with specific mutation), the seed amino acid sequence (i.e., the amino acid sequence of the wild type KRAS fragment), the seed amino acid sequence of the binding core, and the amino acid substitution (if any) for heteroclitic peptides at positions 1, 4, 6, and 9. Table 2 includes peptide sequences comprising SEQ ID NOs: 81 to 143. SEQ ID NOs: 81 to 143 (Table 2) encode for recombinant peptides. In some embodiments, any combination of peptides listed in Table 2 (SEQ ID NOs: 81 to 143) may be used to create a single target (individual) or combined peptide composition having between about 1 and about 40 peptides. In some embodiments, any one of the peptides (peptides 81 to 143; SEQ ID NOs: 81 to 143) in the combined composition comprises an amino acid sequence at least about 80, 81, 82, 83, 84, 85, 86, 87, 88, 89, 90, 91, 92, 93, 94, 95, 96, 97, 98 or 99% identical to any of SEQ ID NOs: 81 to 143.

[0427] In some embodiments, Table 2 describe preferred peptides for compositions of a desired size. In some embodiments, a composition of size n is selected from a desired column of Table 2, and a peptide is included if it is annotated as having a number between 1 and n.

[0428] In some embodiments, any combination of the peptides listed in Table 2 in the “95-100% Conserved Heteroclitic Vaccine” column (SEQ ID NOs: 82 to 112 and SEQ ID NO: 143) may be used to create a combined peptide composition having between about 1 and about 40 peptides. In some embodiments, any one of these peptides in the combined composition comprises an amino acid sequence at least about 80, 81, 82, 83, 84, 85, 86, 87, 88, 89, 90, 91, 92, 93, 94, 95, 96, 97, 98 or 99% identical to the peptides listed in Table 2 in the “95-100% Conserved Heteroclitic Vaccine” column (SEQ ID NOs: 82 to 112 and SEQ ID NO: 143).

[0429] In some embodiments, any combination of the peptides listed in Table 2 in the “100% Conserved Heteroclitic Vaccine” column (SEQ ID NO: 81 and SEQ ID NOs: 113 to 142) may be used to create a combined peptide composition having between about 1 and about 40 peptides. In some embodiments, any one of these peptides in the combined composition comprises an amino acid sequence at least about 80, 81, 82, 83, 84, 85, 86, 87, 88, 89, 90, 91, 92, 93, 94, 95, 96, 97, 98 or 99% identical to the peptides listed in Table 2 in the “100% Conserved Heteroclitic Vaccine” column (SEQ ID NO: 81 and SEQ ID NOs: 113 to 142).

[0430] In some embodiments, a peptide composition (single target or combined multiple target) comprises about 1 to 40 MHC class II peptides with each peptide consisting of about 20 amino acids. In some embodiments, an MHC class II peptide composition is intended one or more influenza protein targets selected from the group consisting of RNA-directed RNA polymerase catalytic subunit, Matrix protein 1, Polymerase basic protein 2, Polymerase acidic protein, and Protein PA-X. In some embodiments, an MHC class II peptide composition is intended to prevent influenza. In some embodiments, an MHC class II peptide composition is intended to treat influenza.

[0431] In some embodiments, the amino acid sequence for an MHC class II peptide composition for influenza comprises one or more of the SEQ ID NOs: 137682 to 137830. In some embodiments, any one of the peptides in the influenza composition comprise an amino acid sequence at least about 80, 81, 82, 83, 84, 85, 86, 87, 88, 89, 90, 91, 92, 93, 94, 95, 96, 97, 98 or 99% identical to SEQ ID NOs: 137682 to 137830.

[0432] In some embodiments, the amino acid sequence for an MHC class II peptide composition for influenza comprises two or more of the SEQ ID NOs: 137682 to 137830. In some embodiments, any one of the peptides in the influenza composition comprise an amino acid sequence at least about 80, 81, 82, 83, 84, 85, 86, 87, 88, 89, 90, 91, 92, 93, 94, 95, 96, 97, 98 or 99% identical to SEQ ID NOs: 137682 to 137830.

[0433] Table 4 summarizes MHC class II peptide sequences described herein including the respective SEQ ID NO, amino acid sequence corresponding to the SEQ ID NO, the amino acid sequence corresponding to the peptide's binding core, the seed amino acid sequence (i.e., the amino acid sequence of the wild type protein fragment), the seed amino acid sequence of the binding core, and the amino acid substitution (if any) for heteroclitic peptides at positions 1, 4, 6, and 9. Table 4 includes peptide sequences comprising SEQ ID NOs: 137682 to 137830. SEQ ID NOs: 137682 to 137830 (Table 4) encode for recombinant peptides. In some embodiments, any combination of peptides listed in Table 4 (SEQ ID NOs: 137682 to 137830) may be used to create a single target (individual) or combined peptide composition having between about 1 and about 40 peptides. In some embodiments, any one of the peptides (peptides 137682 to 137830; SEQ ID NOs: 137682 to 137830) in the combined composition comprises an amino acid sequence at least about 80, 81, 82, 83, 84, 85, 86, 87, 88, 89, 90, 91, 92, 93, 94, 95, 96, 97, 98 or 99% identical to any of SEQ ID NOs: 137682 to 137830.

[0434] In some embodiments, Table 4 describe preferred peptides for compositions of a desired size. In some embodiments, a composition of size n is selected from a desired column of Table 4, and a peptide is included if it is annotated as having a number between 1 and n.

[0435] In some embodiments, any combination of the peptides listed in Table 4 in the “RNA-directed RNA polymerase catalytic subunit vaccine” column (SEQ ID NOs: 137682 to 137712) may be used to create a combined peptide composition having between about 1 and about 40 peptides. In some embodiments, any one of these peptides in the combined composition comprises an amino acid sequence 80, 81, 82, 83, 84, 85, 86, 87, 88, 89, 90, 91, 92, 93, 94, 95, 96, 97, 98 or 99% identical to the peptides listed in Table 4 in the “RNA-directed RNA polymerase catalytic subunit vaccine” column (SEQ ID NOs: 137682 to 137712).

[0436] In some embodiments, any combination of the peptides listed in Table 4 in the “Matrix protein 1 vaccine” column (SEQ ID NOs: 137796 to 137830) may be used to create a combined peptide composition having between about 1 and about 40 peptides. In some embodiments, any one of these peptides in the combined composition comprises an amino acid sequence at least about 80, 81, 82, 83, 84, 85, 86, 87, 88, 89, 90, 91, 92, 93, 94, 95, 96, 97, 98 or 99% identical to the peptides listed in Table 4 in the “Matrix protein 1 vaccine” column (SEQ ID NOs: 137796 to 137830).

[0437] In some embodiments, any combination of the peptides listed in Table 4 in the “Polymerase basic protein 2 vaccine” column (SEQ ID NOs: 137746 to 137763) may be used to create a combined peptide composition having between about 1 and about 40 peptides. In some embodiments, any one of these peptides in the combined composition comprises an amino acid sequence at least about 80, 81, 82, 83, 84, 85, 86, 87, 88, 89, 90, 91, 92, 93, 94, 95, 96, 97, 98 or 99% identical to the peptides listed in Table 4 in the “Polymerase basic protein 2 vaccine” column (SEQ ID NOs: 137746 to 137763).

[0438] In some embodiments, any combination of the peptides listed in Table 4 in the “Polymerase acidic protein vaccine” column (SEQ ID NOs: 137764 to 137795) may be used to create a combined peptide composition having between about 1 and about 40 peptides. In some embodiments, any one of these peptides in the combined composition comprises an amino acid sequence at least about 80, 81, 82, 83, 84, 85, 86, 87, 88, 89, 90, 91, 92, 93, 94, 95, 96, 97, 98 or 99% identical to the peptides listed in Table 4 in the “Polymerase acidic protein vaccine” column (SEQ ID NOs: 137764 to 137795).

[0439] In some embodiments, any combination of the peptides listed in Table 4 in the “Protein PA-X vaccine” column (SEQ ID NOs: 137713 to 137745) may be used to create a combined peptide composition having between about 1 and about 40 peptides. In some embodiments, any one of these peptides in the combined composition comprises an amino acid sequence at least about 80, 81, 82, 83, 84, 85, 86, 87, 88, 89, 90, 91, 92, 93, 94, 95, 96, 97, 98 or 99% identical to the peptides listed in Table 4 in the “Protein PA-X vaccine” column (SEQ ID NOs: 137713 to 137745).

[0440] Additional amino acid sequences of MHC class II composition peptides are provided in Sequence Listings (SEQ ID NOs: 51226 to 137513 and SEQ ID NOs: 171340 to 283765). In some embodiments, any combination of MHC class II peptides disclosed herein (SEQ ID NOs: 81 to 143, SEQ ID NOs: 51226 to 137513, SEQ ID NOs: 137682 to 137830, and SEQ ID NOs: 171340 to 283765) may be used to create a combined peptide composition having between about 1 and about 40 peptides. In some embodiments, any one of the peptides (SEQ ID NOs: 81 to 143, SEQ ID NOs: 51226 to 137513, SEQ ID NOs: 137682 to 137830, and SEQ ID NOs: 171340 to 283765) in the combined composition comprises or contains an amino acid sequence at least about 80, 81, 82, 83, 84, 85, 86, 87, 88, 89, 90, 91, 92, 93, 94, 95, 96, 97, 98 or 99% identical to any of SEQ ID NOs: 81 to 143, SEQ ID NOs: 51226 to 137513, SEQ ID NOs: 137682 to 137830, or SEQ ID NOs: 171340 to 283765.

[0441] In some embodiments, any combination of MHC class I and/or MHC class II peptides disclosed herein (SEQ ID NOs: 1 to 283766) may be used to create a single target (individual) or combined peptide composition having between about 2 and about 40 peptides. In some embodiments, any one of the peptides (peptides 1 to 283766; SEQ ID NOs: 1 to 283766) in the combined composition comprises an amino acid sequence at least about 80, 81, 82, 83, 84, 85, 86, 87, 88, 89, 90, 91, 92, 93, 94, 95, 96, 97, 98 or 99% identical to any of SEQ ID NOs: 1 to 283766.

[0442] In some embodiments, any combination of the sequences SEQ ID NO: 137682, SEQ ID NO: 137684, SEQ ID NO: 137698, SEQ ID NO: 137713, SEQ ID NO: 137747, SEQ ID NO: 137749, SEQ ID NO: 137752, SEQ ID NO: 137756, SEQ ID NO: 137759, SEQ ID NO: 137763, SEQ ID NO: 137776, SEQ ID NO: 222261, SEQ ID NO: 226096, SEQ ID NO: 231115, and SEQ ID NO: 249852 may be used to create a combined peptide composition having between 1 and 15 peptides.

[0443] In some embodiments, any combination of the sequences SEQ ID NO: 51635, SEQ ID NO: 51784, SEQ ID NO: 171443, SEQ ID NO: 172269, SEQ ID NO: 172657, SEQ ID NO: 173054, SEQ ID NO: 173092, SEQ ID NO: 173193, SEQ ID NO: 173199, SEQ ID NO: 173352, SEQ ID NO: 173358, SEQ ID NO: 176560, SEQ ID NO: 177409, SEQ ID NO: 179460, and SEQ ID NO: 180153 may be used to create a combined peptide composition having between 1 and 15 peptides.

[0444] In some embodiments, the composition comprising the MHC class I and/or MHC class II peptides disclosed herein is an immunogenic composition. In some embodiments, the composition is a vaccine.

TABLE 1
Example Composition Peptides for Target: Nucleoprotein (MHC class I)

| | | | | | | 90-100% | 100% | 98-100% | |
|---|---|---|---|---|---|---|---|---|---|
| | | | | | | Conserved | Conserved | Conserved | |
| | Sequence | | | | | Augmentation | Heteroclitic | Heteroclitic | |
| | corresponding | | | Heteroclitic | Heteroclitic | Vaccine | Vaccine | Vaccine | Conservation |
| | to | | Seed | Modification | Modification | (Nucleo- | (Nucleo | (Nucleo- | of |
| SEQ ID NO | SEQ ID | Seed | SEQ ID NO | P2 | C-term | protein) | protein) | protein) | Seed |
| SEQ ID NO: 1 | SVMQGSTLPK | SLMQGSTLPR | SEQ ID NO: 3142 | L2V | R10K | | 1-7, | 3-8, | 1.0 |
| | | | | | | | 10-30 | 15-30 | |
| SEQ ID NO: 2 | LPRRSGAAM | LPRRSGAAG | SEQ ID NO: 51 | — | G9M | | 29-30 | | 1.0 |
| SEQ ID NO: 3 | RQCSLMQGSTF | RMCSLMQGSTL | SEQ ID NO: 2617 | M2Q | L11F | | 29-30 | | 1.0 |
| SEQ ID NO: 4 | STLPRRSGK | STLPRRSGA | SEQ ID NO: 3251 | — | A9K | | 29-30 | | 1.0 |
| SEQ ID NO: 5 | SYMQGSTLPK | SLMQGSTLPR | SEQ ID NO: 3142 | L2Y | R10K | | 30 | | 1.0 |
| SEQ ID NO: 6 | FAVORNLPY | FSVQRNLPF | SEQ ID NO: 73 | S2A | F9Y | | | 1-2, 24-30 | 0.9875 |
| SEQ ID NO: 7 | FAVORNLPM | FSVQRNLPF | SEQ ID NO: 73 | S2A | F9M | | | 3-30 | 0.9875 |
| SEQ ID NO: 8 | FTVQRNLPW | FSVQRNLPF | SEQ ID NO: 73 | S2T | F9W | | | 6-30 | 0.9875 |
| SEQ ID NO: 9 | TYQRTRALI | TYQRTRALV | SEQ ID NO: 3464 | — | V9I | | | 7-8, 25-28 | 0.99375 |
| SEQ ID NO: 10 | TFQRTRALVR | TYQRTRALVR | SEQ ID NO: 3465 | Y2F | — | | | 9-30 | 0.99375 |
| SEQ ID NO: 11 | TYQRTRALW | TYQRTRALV | SEQ ID NO: 3464 | — | V9W | | | 9-30 | 0.99375 |
| SEQ ID NO: 12 | SVMQGSTLPR | SLMQGSTLPR | SEQ ID NO: 3142 | L2V | — | | 28-30 | | 1.0 |
| SEQ ID NO: 13 | EVSYFFGDNL | EGSYFFGDNA | SEQ ID NO: 555 | G2V | A10L | | | 12-30 | 0.98125 |
| SEQ ID NO: 14 | FTVQRNLPY | FSVQRNLPF | SEQ ID NO: 73 | S2T | F9Y | | | 14-30 | 0,9875 |
| SEQ ID NO: 15 | TYQRTRALF | TYQRTRALV | SEQ ID NO: 3464 | — | V9F | | | 17-30 | 0.99375 |
| SEQ ID NO: 16 | TMMDPRMCSL | TGMDPRMCSL | SEQ ID NO: 3337 | G2M | — | | | 18-30 | 0.98125 |
| SEQ ID NO: 17 | FSVQRNLPW | FSVQRNLPF | SEQ ID NO: 73 | — | F9W | | | 20-30 | 0.9875 |
| SEQ ID NO: 18 | MYLSAFDER | MVLSAFDER | SEQ ID NO: 72 | V2Y | — | | | 21-30 | 0.9875 |
| SEQ ID NO: 19 | YQRTRALVK | YQRTRALVR | SEQ ID NO: 3764 | — | R9K | | | 22-28 | 0.99375 |
| SEQ ID NO: 20 | MTLSAFDER | MVLSAFDER | SEQ ID NO: 72 | V2T | — | | | 27-30 | 0.9875 |
| SEQ ID NO: 21 | NTAHKSQLVW | NPAHKSQLVW | SEQ ID NO: 77 | P2T | — | | | 29-30 | 0.98125 |
| SEQ ID NO: 22 | TWQRTRALF | TYQRTRALV | SEQ ID NO: 3464 | Y2W | V9F | | | 29-30 | 0.99375 |
| SEQ ID NO: 23 | RSGMDPRMCK | RTGMDPRMCS | SEQ ID NO: 2841 | T2S | S10K | | | 30 | 0.98125 |
| SEQ ID NO: 24 | FSVQRNLPL | FSVQRNLPF | SEQ ID NO: 73 | — | F9L | | | 13-30 | 0.9875 |
| SEQ ID NO: 25 | RQCSLMQGSTY | RMCSLMQGSTL | SEQ ID NO: 2617 | M2Q | L11Y | | 26-28 | | 1.0 |
| SEQ ID NO: 26 | KMCLPACVY | KSCLPACVY | SEQ ID NO: 80 | S2M | — | | | 10-30 | 0.98125 |
| SEQ ID NO: 27 | SIMQGSTLPK | SLMQGSTLPR | SEQ ID NO: 3142 | L2I | R10K | | 23-30 | | 1.0 |
| SEQ ID NO: 28 | LPRRSGAAL | LPRRSGAAG | SEQ ID NO: 51 | — | G9L | | 24-30 | | 1.0 |
| SEQ ID NO: 29 | GMDPRMCSV | GMDPRMCSL | SEQ ID NO: 956 | — | L9V | | 2-30 | 2-30 | 1.0 |
| SEQ ID NO: 30 | CALMQGSTM | CSLMQGSTL | SEQ ID NO: 424 | S2A | L9M | | 3-30 | | 1.0 |
| SEQ ID NO: 31 | LPRRSGAAV | LPRRSGAAG | SEQ ID NO: 51 | — | G9V | | 4-30 | 4-30 | 1.0 |
| SEQ ID NO: 32 | ILKGKFQTV | ILKGKFQTA | SEQ ID NO: 64 | — | A9V | | 5-30 | 5-30 | 1.0 |
| SEQ ID NO: 33 | CALMQGSTY | CSLMQGSTL | SEQ ID NO: 424 | S2A | L9Y | | 6-30 | | 1.0 |
| SEQ ID NO: 34 | SFMQGSTLPR | SLMQGSTLPR | SEQ ID NO: 3142 | L2F | — | | 7-30 | | 1.0 |
| SEQ ID NO: 35 | SSLPRRSGK | STLPRRSGA | SEQ ID NO: 3251 | T2S | A9K | | 8-30 | 29-30 | 1.0 |
| SEQ ID NO: 36 | GLDPRMCSV | GMDPRMCSL | SEQ ID NO: 956 | M2L | L9V | | 11-30 | 16-30 | 1.0 |
| SEQ ID NO: 37 | LPRRSGAAA | LPRRSGAAG | SEQ ID NO: 51 | — | G9A | | 12-30 | 19-30 | 1.0 |
| SEQ ID NO: 38 | CALMQGSTL | CSLMQGSTL | SEQ ID NO: 424 | S2A | — | | 13-30 | | 1.0 |
| SEQ ID NO: 39 | STMQGSTLPK | SLMQGSTLPR | SEQ ID NO: 3142 | L2T | R10K | | 8-30 | 9-30 | 1.0 |
| SEQ ID NO: 40 | RMCSLMQGSTF | RMCSLMQGSTL | SEQ ID NO: 2617 | — | L11F | | 20-30 | | 1.0 |
| SEQ ID NO: 41 | CALMQGSTF | CSLMQGSTL | SEQ ID NO: 424 | S2A | L9F | | 15-30 | | 1.0 |
| SEQ ID NO: 42 | SVLPRRSGK | STLPRRSGA | SEQ ID NO: 3251 | T2V | A9K | | 16-17, | 11-30 | 1.0 |
| | | | | | | | 27-28 | | |
| SEQ ID NO: 43 | SMMQGSTLPK | SLMQGSTLPR | SEQ ID NO: 3142 | L2M | R10K | | 17-30 | 23-30 | 1.0 |
| SEQ ID NO: 44 | IMKGKFQTI | ILKGKFQTA | SEQ ID NO: 64 | L2M | A9I | | 18-30 | | 1.0 |
| SEQ ID NO: 45 | SMLPRRSGK | STLPRRSGA | SEQ ID NO: 3251 | T2M | A9K | | 18-30 | | 1.0 |
| SEQ ID NO: 46 | IMKGKFQTA | ILKGKFQTA | SEQ ID NO: 64 | L2M | — | | 19-30 | | 1.0 |
| SEQ ID NO: 47 | IMKGKFQTV | ILKGKFQTA | SEQ ID NO: 64 | L2M | A9V | | 14-17, | 26-30 | 1.0 |
| | | | | | | | 25-30 | | |
| SEQ ID NO: 48 | ATERMCNILK | AYERMCNILK | SEQ ID NO: 397 | Y2T | — | | 21-30 | | 1.0 |
| SEQ ID NO: 49 | SSMQGSTLPR | SLMQGSTLPR | SEQ ID NO: 3142 | L2S | — | | 22-30 | | 1.0 |
| SEQ ID NO: 50 | ILRGSVAHK | ILRGSVAHK | SEQ ID NO: 50 | — | — | 16-30 | | | 0.95 |
| SEQ ID NO: 51 | LPRRSGAAG | LPRRSGAAG | SEQ ID NO: 51 | — | — | 17-30 | | | 1.0 |
| SEQ ID NO: 52 | NFWRGENGR | NFWRGENGR | SEQ ID NO: 52 | — | — | 18-30 | | | 0.9875 |
| SEQ ID NO: 53 | FQTAAQRAM | FQTAAQRAM | SEQ ID NO: 53 | — | — | 19-30 | | | 0.91875 |
| SEQ ID NO: 54 | KDPKKTGGPI | KDPKKTGGPI | SEQ ID NO: 54 | — | — | 20-30 | | | 0.95 |
| SEQ ID NO: 55 | STRGVQIAS | STRGVQIAS | SEQ ID NO: 55 | — | — | 21-30 | | | 0.95 |
| SEQ ID NO: 56 | RTRSGGNTN | RTRSGGNTN | SEQ ID NO: 56 | — | — | 25-30 | | | 0.93125 |
| SEQ ID NO: 57 | RMIKRGINDR | RMIKRGINDR | SEQ ID NO: 57 | — | — | 23-30 | | | 0.925 |
| SEQ ID NO: 58 | IQMCTELKL | IQMCTELKL | SEQ ID NO: 58 | — | — | 27-30 | | | 0.94375 |
| SEQ ID NO: 59 | YSLVGIDPF | YSLVGIDPF | SEQ ID NO: 59 | — | — | 15-30 | | | 0.95625 |
| SEQ ID NO: 60 | LMQGSTLPR | LMQGSTLPR | SEQ ID NO: 60 | — | — | 24-30 | | | 1.0 |
| SEQ ID NO: 61 | AMMDQVRESR | AMMDQVRESR | SEQ ID NO: 61 | — | — | 26-30 | | | 0.95625 |
| SEQ ID NO: 62 | MVLSAFDERR | MVLSAFDERR | SEQ ID NO: 62 | — | — | 22-30 | | | 0.9875 |
| SEQ ID NO: 63 | SYFFGDNAEEY | SYFFGDNAEEY | SEQ ID NO: 63 | — | — | 14-15, | | | 0.90625 |
| | | | | | | 18 | | | |
| SEQ ID NO: 64 | ILKGKFQTA | ILKGKFQTA | SEQ ID NO: 64 | — | — | 2-30 | | | 1.0 |
| SEQ ID NO: 65 | IERMVLSAF | IERMVLSAF | SEQ ID NO: 65 | — | — | 13-30 | | | 0.9125 |
| SEQ ID NO: 66 | YFFGDNAEEY | YFFGDNAEEY | SEQ ID NO: 66 | — | — | 12-13, | | | 0.90625 |
| | | | | | | 16-17, | | | |
| | | | | | | 19-30 | | | |
| SEQ ID NO: 67 | RTRALVRTGM | RTRALVRTGM | SEQ ID NO: 67 | — | — | 11-30 | | | 0.975 |
| SEQ ID NO: 68 | FYIQMCTEL | FYIQMCTEL | SEQ ID NO: 68 | — | — | 10-30 | | | 0.95 |
| SEQ ID NO: 69 | LELRSRYWAI | LELRSRYWAI | SEQ ID NO: 69 | — | — | 9-30 | | | 0.90625 |
| SEQ ID NO: 70 | GVFELSDEK | GVFELSDEK | SEQ ID NO: 70 | — | — | 8-30 | | | 0.91875 |
| SEQ ID NO: 71 | TYQRTRAL | TYQRTRAL | SEQ ID NO: 71 | — | — | 7-30 | | | 0.99375 |
| SEQ ID NO: 72 | MVLSAFDER | MVLSAFDER | SEQ ID NO: 72 | — | — | 5-30 | | | 0.9875 |
| SEQ ID NO: 73 | FSVQRNLPF | FSVQRNLPF | SEQ ID NO: 73 | — | — | 4-30 | | | 0.9875 |
| SEQ ID NO: 74 | RMCNILKGK | RMCNILKGK | SEQ ID NO: 74 | — | — | 3-30 | | | 1.0 |
| SEQ ID NO: 75 | YERMCNIL | YERMCNIL | SEQ ID NO: 75 | — | — | 30 | 9-30 | | 1.0 |
| SEQ ID NO: 76 | MCSLMQGSTL | MCSLMQGSTL | SEQ ID NO: 76 | — | — | 28-30 | | | 1.0 |
| SEQ ID NO: 77 | NPAHKSQLVW | NPAHKSQLVW | SEQ ID NO: 77 | — | — | 6-30 | | 8-30 | 0.98125 |
| SEQ ID NO: 78 | LPRRSGAAGA | LPRRSGAAGA | SEQ ID NO: 78 | — | — | 1-30 | 18-30 | 28-30 | 1.0 |
| SEQ ID NO: 79 | RGINDRNFW | RGINDRNFW | SEQ ID NO: 79 | — | — | 14-30 | | | 0.95625 |
| SEQ ID NO: 80 | KSCLPACVY | KSCLPACVY | SEQ ID NO: 80 | — | — | 29-30 | | | 0.98125 |

TABLE 2
Example Composition Peptides for Target: Nucleoprotein (MHC class II)

| | | | | | | Hetero- | Hetero- | Hetero- | Hetero- | 100% | 95-100% | |
|---|---|---|---|---|---|---|---|---|---|---|---|---|
| | Sequence | | | | | clitic | clitic | clitic | clitic | Conserved | Conserved | Conserva- |
| | correspond- | | | | | Modifi- | Modifi- | Modifi- | Modifi- | Hetero- | Hetero- | tion |
| SEQ ID | ing | | | Seed SEQ | Seed | cation | cation | cation | cation | clitic | clitic | of |
| NO | to SEQ ID | Core | Seed | ID NO | Core | P1 | P4 | P6 | P9 | Vaccine | Vaccine | Seed |
| SEQ ID | DPRMFSLMQS | FSLMQ | DPRMCSLM | SEQ ID NO: | CSLMQGS | C1 | - | G6 | L9 | 1-30 | | 1.0 |
| NO: 81 | STVPR | SSTV | QGSTLPR | 51304 | TL | F | | S | V | | | |
| SEQ ID | RSILILRSSVA | ILILRSS | RSALILRGSV | SEQ ID NO: | ALILRGS | A1I | — | G6 | — | | 3-30 | 0.95 |
| NO: 82 | HKSC | VA | AHKSC | 51801 | VA | | | S | | | | |
| SEQ ID | RMCNFLKTKF | FLKTK | RMCNILKGK | SEQ ID NO: | ILKGKFQ | I1F | G4 | — | A9 | | 4-30 | 0.99375 |
| NO: 83 | QTLAQ | FQTL | FQTAAQ | 51769 | TA | | T | | L | | | |
| SEQ ID | RSALIFRGIVT | FRGIVT | RSALILRGSV | SEQ ID NO: | LRGSVAH | LIF | S4I | A6 | S9 | | 5-6, | 0.95 |
| NO: 84 | HKAC | HKA | AHKSC | 51801 | KS | | | T | A | | 16-30 | |
| SEQ ID | RSALIFRGIVN | FRGIV | RSALILRGSV | SEQ ID NO: | LRGSVAH | LIF | S4I | A6 | S9E | | 6, 15- | 0.95 |
| NO: 85 | HKEC | NHKE | AHKSC | 51801 | KS | | | N | | | 30 | |
| SEQ ID | RSALIFRGIVS | FRGIVS | RSALILRGSV | SEQ ID NO: | LRGSVAH | LIF | S4I | A6 | S9 | | 7-30 | 0,95 |
| NO: 86 | HKAC | HKA | AHKSC | 51801 | KS | | | S | A | | | |
| SEQ ID | RSALIFRGIVV | FRGIV | RSALILRGSV | SEQ ID NO: | LRGSVAH | LIF | S4I | A6 | S9 | | 7-30 | 0.95 |
| NO: 87 | HKDC | VHKD | AHKSC | 51801 | KS | | | V | D | | | |
| SEQ ID | TYQRTRALIR | RALIR | TYQRTRALV | SEQ ID NO: | RALVRTG | | V4I | T6 | D9I | | 7, 10, | 0.975 |
| NO: 88 | AGMIPRMCSL | AGMI | RTGMDPRM | 51931 | MD | | | A | | | 14, 22, | |
| | | | CSL | | | | | | | | 24 | |
| SEQ ID | RSAIILWGNV | IILWGN | RSALILRGSV | SEQ ID NO: | LILRGSV | LII | R4 | Se | H9 | | 8-30 | 0.95 |
| NO: 89 | AAKSC | VAA | AHKSC | 51801 | AH | | W | N | A | | | |
| SEQ ID | TYQRTRALIR | RALIR | TYQRTRALV | SEQ ID NO: | RALVRTG | — | V4I | T6 | D9 | | 8-9, | 0.975 |
| NO: 90 | AGMVPRMCS | AGMV | RTGMDPRM | 51931 | MD | | | A | V | | 11-12, | |
| | L | | CSL | | | | | | | | 19-21, | |
| | | | | | | | | | | | 23, 26- | |
| | | | | | | | | | | | 30 | |
| SEQ ID | RSALIIRGMV | IRGMV | RSALILRGSV | SEQ ID NO: | LRGSVAH | LII | S4 | A6 | — | | 9-30 | 0.95 |
| NO: 91 | VHKSC | VHKS | AHKSC | 51801 | KS | | M | V | | | | |
| SEQ ID | TYQRTFALTR | FALTR | TYQRTRALV | SEQ ID NO: | RALVRTG | RI | V4 | T6F | D9 | | 10-30 | 0.975 |
| NO: 92 | FGMVPRMCS | FGMV | RTGMDPRM | 51931 | MD | F | T | | V | | | |
| | L | | CSL | | | | | | | | | |
| SEQ ID | RSAFILVGRV | FILVGR | RSALILRGSV | SEQ ID NO: | LILRGSV | LIF | R4 | S6 | H9 | | 11-30 | 0.95 |
| NO: 93 | ADKSC | VAD | AHKSC | 51801 | AH | | V | R | D | | | |
| SEQ ID | RSFLILRASVY | FLILRA | RSALILRGSV | SEQ ID NO: | ALILRGS | A1 | — | G6 | A9 | | 12-30 | 0,95 |
| NO: 94 | HKSC | SVY | AHKSC | 51801 | VA | F | | A | Y | | | |
| SEQ ID | RSAFILIGTVA | FILIGT | RSALILRGSV | SEQ ID NO: | LILRGSV | LIF | R4I | S6T | — | | 2-30 | 0,95 |
| NO: 95 | HKSC | VAH | AHKSC | 51801 | AH | | | | | | | |
| SEQ ID | RSALIIRGAVA | IRGAV | RSALILRGSV | SEQ ID NO: | LRGSVAH | LII | S4 | | S9I | | 13-30 | 0.95 |
| NO: 96 | HKIC | AHKI | AHKSC | 51801 | KS | | A | | | | | |
| SEQ ID | RMCNFLKMK | FLKMK | RMCNILKGK | SEQ ID NO: | ILKGKFQ | I1F | G4 | — | A9 | | 14-30 | 0.99375 |
| NO: 97 | FQTVAQ | FQTV | FQTAAQ | 51769 | TA | | M | | V | | | |
| SEQ ID | RSAIILMGSV | IILMGS | RSALILRGSV | SEQ ID NO: | LILRGSV | LII | R4 | — | — | | 17-30 | 0.95 |
| NO: 98 | AHKSC | VAH | AHKSC | 51801 | AH | | M | | | | | |
| SEQ ID | RSALIIRGMV | IRGMV | RSALILRGSV | SEQ ID NO: | LRGSVAH | LII | S4 | A6 | SS | | 18-30 | 0.95 |
| NO: 99 | VHKAC | VHKA | AHKSC | 51801 | KS | | M | V | A | | | |
| SEQ ID | RSAFILIGTVA | FILIGT | RSALILRGSV | SEQ ID NO: | LILRGSV | LIF | R4I | S6T | H9 | | 19-30 | 0.95 |
| NO: | RKSC | VAR | AHKSC | 51801 | AH | | | | R | | | |
| 100 | | | | | | | | | | | | |
| SEQ ID | RSLLILRASV | LLILRA | RSALILRGSV | SEQ ID NO: | ALILRGS | A1 | — | G6 | A9 | | 20-30 | 0.95 |
| NO: | MHKSC | SVM | AHKSC | 51801 | VA | L | | A | M | | | |
| 101 | | | | | | | | | | | | |
| SEQ ID | RSALIIRGSVA | IRGSV | RSALILRGSV | SEQ ID NO: | LRGSVAH | LII | — | — | S9 | | 21-30 | 0.95 |
| NO: | HKVC | AHKV | AHKSC | 51801 | KS | | | | V | | | |
| 102 | | | | | | | | | | | | |
| SEQ ID | RMCNFLKAK | FLKAK | RMCNILKGK | SEQ ID NO: | ILKGKFQ | I1F | G4 | — | A9 | | 22-30 | 0.99375 |
| NO: | FQTLAQ | FQTL | FQTAAQ | 51769 | TA | | A | | L | | | |
| 103 | | | | | | | | | | | | |
| SEQ ID | RSALIFRGDV | FRGDV | RSALILRGSV | SEQ ID NO: | LRGSVAH | LIF | S4 | A6 | S9 | | 23-30 | 0.95 |
| NO: | SHKAC | SHKA | AHKSC | 51801 | KS | | D | S | A | | | |
| 104 | | | | | | | | | | | | |
| SEQ ID | RSAIILWGNV | IILWGN | RSALILRGSV | SEQ ID NO: | LILRGSV | LII | R4 | S6 | H9 | | 24-30 | 0.95 |
| NO: | ASKSC | VAS | AHKSC | 51801 | AH | | W | N | S | | | |
| 105 | | | | | | | | | | | | |
| SEQ ID | RSALIIRGFVS | IRGFVS | RSALILRGSV | SEQ ID NO: | LRGSVAH | LII | S4F | A6 | S9 | | 25-30 | 0.95 |
| NO: | HKAC | HKA | AHKSC | 51801 | KS | | | S | A | | | |
| 106 | | | | | | | | | | | | |
| SEQ ID | RSAYILIGRVA | YILIGR | RSALILRGSV | SEQ ID NO: | LILRGSV | L1 | R4I | S6 | — | | 26-30 | 0.95 |
| NO: | HKSC | VAH | AHKSC | 51801 | AH | Y | | R | | | | |
| 107 | | | | | | | | | | | | |
| SEQ ID | RSAFILIGRVA | FILIGR | RSALILRGSV | SEQ ID NO: | LILRGSV | LIF | R4I | S6 | — | | 27-30 | 0.95 |
| NO: | HKSC | VAH | AHKSC | 51801 | AH | | | R | | | | |
| 108 | | | | | | | | | | | | |
| SEQ ID | RSAFILFGSVA | FILFGS | RSALILRGSV | SEQ ID NO: | LILRGSV | LIF | R4 | — | — | | 28-30 | 0.95 |
| NO: | HKSC | VAH | AHKSC | 51801 | AH | | F | | | | | |
| 109 | | | | | | | | | | | | |
| SEQ ID | TYQRTRALIR | RALIR | TYQRTRALV | SEQ ID NO: | RALVRTG | — | V4I | T6 | D9 | | 13, 15- | 0.975 |
| NO: | AGMAPRMCS | AGMA | RTGMDPRM | 51931 | MD | | | A | A | | 18, 25 | |
| 110 | L | | CSL | | | | | | | | | |
| SEQ ID | RSILILRASVF | ILILRA | RSALILRGSV | SEQ ID NO: | ALILRGS | A1I | — | G6 | A9 | | 29-30 | 0.95 |
| NO: | HKSC | SVF | AHKSC | 51801 | VA | | | A | F | | | |
| 111 | | | | | | | | | | | | |
| SEQ ID | RSALIIRGAVA | IRGAV | RSALILRGSV | SEQ ID NO: | LRGSVAH | L1I | S4 | — | S9 | | 1-30 | 0.95 |
| NO: | HKVC | AHKV | AHKSC | 51801 | KS | | A | | V | | | |
| 112 | | | | | | | | | | | | |
| SEQ ID | AYERMCNFL | FLKTK | AYERMCNIL | SEQ ID NO: | ILKGKFQ | I1F | G4 | — | A9 | 29-30 | | 1.0 |
| NO: | KTKFQTL | FQTL | KGKFQTA | 51264 | TA | | T | | L | | | |
| 113 | | | | | | | | | | | | |
| SEQ ID | YERICNILRGK | ICNILR | YERMCNILK | SEQ ID NO: | MCNILKG | M1I | — | K6 | F9 | 2-30 | | 1.0 |
| NO: | AQTA | GKA | GKFQTA | 51952 | KF | | | R | A | | | |
| 114 | | | | | | | | | | | | |
| SEQ ID | MQGSTLIRRG | IRRGG | MQGSTLPRR | SEQ ID NO: | PRRSGAA | P1I | S4 | — | — | 3-4, 8- | | 1.0 |
| NO: | GAAGA | AAGA | SGAAGA | 51656 | GA | | G | | | 30 | | |
| 115 | | | | | | | | | | | | |
| SEQ ID | RMCSLMIGSA | IGSALA | RMCSLMQG | SEQ ID NO: | QGSTLPR | Q1I | T4 | P6 | S9 | 4-30 | | 1.0 |
| NO: | LARRAGAAG | RRA | STLPRRSGA | 51787 | RS | | A | A | A | | | |
| 116 | A | | AGA | | | | | | | | | |
| SEQ ID | MQGSTLFRRG | FRRGG | MQGSTLPRR | SEQ ID NO: | PRRSGAA | PIF | S4 | — | — | 5-7, 9- | | 1.0 |
| NO: | GAAGA | AAGA | SGAAGA | 51656 | GA | | G | | | 30 | | |
| 117 | | | | | | | | | | | | |
| SEQ ID | PRMISLFQAST | ISLFQA | PRMCSLMQ | SEQ ID NO: | CSLMQGS | CII | M4 | G6 | | 5-30 | | 1.0 |
| NO: | LPRR | STL | GSTLPRR | 51704 | TL | | F | A | | | | |
| 118 | | | | | | | | | | | | |
| SEQ ID | MDPRMCSLF | FQGVT | MDPRMCSL | SEQ ID NO: | MQGSTLP | MI | S4 | L6F | R9 | 6, 8, | | 1.0 |
| NO: | QGVTFPRVSG | FPRV | MQGSTLPRR | 51638 | RR | F | V | | V | 26-30 | | |
| 119 | A | | SGA | | | | | | | | | |
| SEQ ID | MCSIMQISSLP | IMQISS | MCSLMQGST | SEQ ID NO: | LMQGSTL | LII | G4I | T6S | R9 | 7-30 | | 1.0 |
| NO: | VRSG | LPV | LPRRSG | 51618 | PR | | | | V | | | |
| 120 | | | | | | | | | | | | |
| SEQ ID | MDPRMCSLF | FQGTT | MDPRMCSL | SEQ ID NO: | MQGSTLP | M1 | S4T | L6F | RS | 7, 9-30 | | 1.0 |
| NO: | QGTTFPRVSG | FPRV | MQGSTLPRR | 51638 | RR | F | | | V | | | |
| 121 | A | | SGA | | | | | | | | | |
| SEQ ID | YERICNMLRG | ICNML | YERMCNILK | SEQ ID NO: | MCNILKG | M1 | I4 | K6 | F9 | 8-30 | | 1.0 |
| NO: | KAQTA | RGKA | GKFQTA | 51952 | KF | I | M | R | A | | | |
| 122 | | | | | | | | | | | | |
| SEQ ID | DPRMCSLMM | MGSAL | DPRMCSLM | SEQ ID NO: | QGSTLPR | Q1 | T4 | P6I | S9 | 10-30 | | 1.0 |
| NO: | GSALIRRAGA | IRRA | QGSTLPRRS | 51309 | RS | M | A | | A | | | |
| 123 | A | | GAA | | | | | | | | | |
| SEQ ID | DPRMFSLFQS | FSLFQS | DPRMCSLM | SEQ ID NO: | CSLMQGS | C1 | M4 | G6 | L9 | 11-30 | | 1.0 |
| NO: | STAPR | STA | QGSTLPR | 51304 | TL | F | F | S | A | | | |
| 124 | | | | | | | | | | | | |
| SEQ ID | YERICNILRGK | ICNILR | YERMCNILK | SEQ ID NO: | MCNILKG | MI | — | K6 | F9 | 12-30 | | 1.0 |
| NO: | VQTA | GKV | GKFQTA | 51952 | KF | I | | R | V | | | |
| 125 | | | | | | | | | | | | |
| SEQ ID | SLMNGSALIR | NGSALI | SLMQGSTLP | SEQ ID NO: | QGSTLPR | Q1 | T4 | P6I | S9 | 13-30 | | 1.0 |
| NO: | RAGAAGA | RRA | RRSGAAGA | 51858 | RS | N | A | | A | | | |
| 126 | | | | | | | | | | | | |
| SEQ ID | DPRMCSLMF | FGSTLF | DPRMCSLM | SEQ ID NO: | QGSTLPR | Q1 | — | P6F | S9 | 30 | | 1.0 |
| NO: | GSTLFRRVGA | RRV | QGSTLPRRS | 51309 | RS | F | | | V | | | |
| 127 | A | | GAA | | | | | | | | | |
| SEQ ID | DPRMISLIQSS | ISLIQSS | DPRMCSLM | SEQ ID NO: | CSLMQGS | C1I | M4 | G6 | L9I | 14-30 | | 1.0 |
| NO: | TIPR | TI | QGSTLPR | 51304 | TL | | I | S | | | | |
| 128 | | | | | | | | | | | | |
| SEQ ID | CSLMIGSALA | IGSALA | CSLMQGSTL | SEQ ID NO: | QGSTLPR | Q1I | T4 | P6 | S9 | 16, 18 | | 1.0 |
| NO: | RRAGAA | RRA | PRRSGAA | 51287 | RS | | A | A | A | | | |
| 129 | | | | | | | | | | | | |
| SEQ ID | PRMISLFQAST | ISLFQA | PRMCSLMQ | SEQ ID NO: | CSLMQGS | C1I | M4 | G6 | L9 | 17-30 | | 1.0 |
| NO: | APRR | STA | GSTLPRR | 51704 | TL | | F | A | A | | | |
| 130 | | | | | | | | | | | | |
| SEQ ID | SLMNGSALIR | NGSALI | SLMQGSTLP | SEQ ID NO: | QGSTLPR | Q1 | T4 | P6I | S9 | 17, 19- | | 1.0 |
| NO: | RAGAA | RRA | RRSGAA | 51856 | RS | N | A | | A | 30 | | |
| 131 | | | | | | | | | | | | |
| SEQ ID | YERICNMLRG | ICNML | YERMCNILK | SEQ ID NO: | MCNILKG | M1 | I4 | K6 | F9 | 18-30 | | 1.0 |
| NO: | KMQTA | RGKM | GKFQTA | 51952 | KF | I | M | R | M | | | |
| 132 | | | | | | | | | | | | |
| SEQ ID | RMCSIMQISA | IMQISA | RMCSLMQG | SEQ ID NO: | LMQGSTL | LII | G4I | T6 | R9 | 19-30 | | 1.0 |
| NO: | LPMRS | LPM | STLPRRS | 51782 | PR | | | A | M | | | |
| 133 | | | | | | | | | | | | |
| SEQ ID | SLMIGSALVR | IGSALV | SLMQGSTLP | SEQ ID NO: | QGSTLPR | Q1I | T4 | P6 | S9 | 20-30 | | 1.0 |
| NO: | RAGAA | RRA | RRSGAA | 51856 | RS | | A | V | A | | | |
| 134 | | | | | | | | | | | | |
| SEQ ID | RMISLFQAST | ISLFQA | RMCSLMQG | SEQ ID NO: | CSLMQGS | C1I | M4 | G6 | — | 21-30 | | 1.0 |
| NO: | LPRRS | STL | STLPRRS | 51782 | TL | | F | A | | | | |
| 135 | | | | | | | | | | | | |
| SEQ ID | YERMCNFLKI | FLKIKF | YERMCNILK | SEQ ID NO: | ILKGKFQ | IIF | G4I | — | A9 | 22-30 | | 1.0 |
| NO: | KFQTL | QTL | GKFQTA | 51952 | TA | | | | L | | | |
| 136 | | | | | | | | | | | | |
| SEQ ID | MDPRMCSLF | FQGLT | MDPRMCSL | SEQ ID NO: | MQGSTLP | M1 | S4L | L6F | R9 | 23-30 | | 1.0 |
| NO: | QGLTFPRVSG | FPRV | MQGSTLPRR | 51638 | RR | F | | | V | | | |
| 137 | A | | SGA | | | | | | | | | |
| SEQ ID | PRMCSLMQM | LMQMS | PRMCSLMQ | SEQ ID NO: | LMQGSTL | — | G4 | T6 | R9 | 24-30 | | 1.0 |
| NO: | SRLPSR | RLPS | GSTLPRR | 51704 | PR | | M | R | S | | | |
| 138 | | | | | | | | | | | | |
| SEQ ID | PRMCSLMQIS | LMQIS | PRMCSLMQ | SEQ ID NO: | LMQGSTL | — | G4I | T6 | R9 | 25-30 | | 1.0 |
| NO: | RLPTR | RLPT | GSTLPRR | 51704 | PR | | | R | T | | | |
| 139 | | | | | | | | | | | | |
| SEQ ID | YERMCNFLK | FLKVK | YERMCNILK | SEQ ID NO: | ILKGKFQ | IIF | G4 | — | A9I | 27-30 | | 1.0 |
| NO: | VKFQTI | FQTI | GKFQTA | 51952 | TA | | V | | | | | |
| 140 | | | | | | | | | | | | |
| SEQ ID | GMDPRMCSL | FQGET | GMDPRMCS | SEQ ID NO: | MQGSTLP | M1 | S4E | L6F | R9I | 28-30 | | 1.0 |
| NO: | FQGETFPRISG | FPRI | LMQGSTLPR | 51407 | RR | F | | | | | | |
| 141 | | | RSG | | | | | | | | | |
| SEQ ID | YERICNMLRG | ICNML | YERMCNILK | SEQ ID NO: | MCNILKG | M1 | I4 | K6 | F9 | 15-30 | | 1.0 |
| NO: | KVQTA | RGKV | GKFQTA | 51952 | KF | I | M | R | V | | | |
| 142 | | | | | | | | | | | | |
| SEQ ID | RSALIIRGSVV | IRGSV | RSALILRGSV | SEQ ID NO: | LRGSVAH | LII | — | A6 | S9 | | 30 | 0.95 |
| NO: | HKVC | VHKV | AHKSC | 51801 | KS | | | V | V | | | |
| 143 | | | | | | | | | | | | |

TABLE 3
Example Composition Peptides for Targets: RNA-directed RNA polymerase catalytic subunit, Matrix protein 1, Polymerase basic protein 2.
Polymerase acidic protein, and Protein PA-X (MHC class I)

| | | | | | | RNA- | | | | |
|---|---|---|---|---|---|---|---|---|---|---|
| | | | | | | directed | | | | |
| | | | | | Hetero- | RNA | | Polymer- | | |
| | | | | Hetero- | clitic | polymer | | ase | Polymer- | |
| | Sequence | | | clitic | Modifi- | ase | Matrix | basic | ase | |
| | correspond- | | | Modifi- | cation | catalytic | protein | protein | acidic | Protein |
| | ing to | | Seed SEQ | cation | C- | subunit | 1 | 2 | protein | PA-X |
| SEQ ID NO | SEQ ID | Seed | ID NO | P2 | term | vaccines | vaccines | vaccines | vaccines | vaccines |
| SEQ ID NO: | MMMGMFNMM | MMMGMFNML | SEQ ID NO: | | L9M | 1 | | | | |
| 137515 | | | 137676 | | | | | | | |
| SEQ ID NO: | FAMELPSFGL | FSMELPSFGV | SEQ ID NO: | S2A | V10L | 10-30 | | | | |
| 137516 | | | 138507 | | | | | | | |
| SEQ ID NO: | FMYTGDPPY | FPYTGDPPY | SEQ ID NO: | P2M | | 11-30 | | | | |
| 137517 | | | 138479 | | | | | | | |
| SEQ ID NO: | MQMGMFNML | MMMGMFNML | SEQ ID NO: | M2Q | | 12-30 | | | | |
| 137518 | | | 137676 | | | | | | | |
| SEQ ID NO: | FAMELPSFGY | FSMELPSFGV | SEQ ID NO: | S2A | V10Y | 13-30 | | | | |
| 137519 | | | 138507 | | | | | | | |
| SEQ ID NO: | MELPSFGVA | MELPSFGVS | SEQ ID NO | — | S9A | 14-30 | | | | |
| 137520 | | | 139708 | | | | | | | |
| SEQ ID NO: | FEYTGDPPF | FPYTGDPPY | SEQ ID NO: | P2E | Y9F | 15 | | | | |
| 137521 | | | 138479 | | | | | | | |
| SEQ ID NO: | NEISTTFPY | NAISTTFPY | SEQ ID NO: | A2E | — | 16 | | | | |
| 137522 | | | 139946 | | | | | | | |
| SEQ ID NO: | FPSSSYRRPA | FPSSSYRRPV | SEQ ID NO: | | V10A | 16-30 | | | | |
| 137523 | | | 138478 | | | | | | | |
| SEQ ID NO: | RVLTLNTMTK | RALTLNTMTK | SEQ ID NO: | A2V | — | 17-18, | | | | |
| 137524 | | | 140315 | | | 25-30 | | | | |
| SEQ ID NO: | NEISTTFPM | NAISTTFPY | SEQ ID NO: | A2E | Y9M | 17-30 | | | | |
| 137525 | | | 139946 | | | | | | | |
| SEQ ID NO: | MMNMLSTVL | MFNMLSTVL | SEQ ID NO: | F2M | — | 18-30 | | | | |
| 137526 | | | 139771 | | | | | | | |
| SEQ ID NO: | RSLTLNTMTK | RALTLNTMTK | SEQ ID NO: | A2S | — | 19-24 | | | | |
| 137527 | | | 140315 | | | | | | | |
| SEQ ID NO: | MRNMLSTVM | MFNMLSTVL | SEQ ID NO: | F2R | L9M | 19-30 | | | | |
| 137528 | | | 139771 | | | | | | | |
| SEQ ID NO: | MAMGMFNMF | MMMGMFNML | SEQ ID NO: | M2A | L9F | 2-30 | | | | |
| 137529 | | | 137676 | | | | | | | |
| SEQ ID NO: | MSMGMFNMM | MMMGMFNML | SEQ ID NO: | M2S | L9M | 20-30 | | | | |
| 137530 | | | 137676 | | | | | | | |
| SEQ ID NO: | MMIGVTVIK | MSIGVTVIK | SEQ ID NO: | S2M | — | 22-30 | | | | |
| 137531 | | | 139877 | | | | | | | |
| SEQ ID NO: | MYMGMFNMM | MMMGMFNML | SEQ ID NO: | M2Y | L9M | 23-24 | | | | |
| 137532 | | | 137676 | | | | | | | |
| SEQ ID NO: | MPRLGKGYML | MARLGKGYMF | SEQ ID NO: | A2P | F10L | 24-30 | | | | |
| 137533 | | | 139678 | | | | | | | |
| SEQ ID NO: | MRNMLSTVL | MFNMLSTVL | SEQ ID NO: | F2R | — | 25-30 | | | | |
| 137534 | | | 139771 | | | | | | | |
| SEQ ID NO: | MYMGMFNMV | MMMGMFNML | SEQ ID NO: | M2Y | L9V | 25-30 | | | | |
| 137535 | | | 137676 | | | | | | | |
| SEQ ID NO: | MAMGMFNML | MMMGMFNML | SEQ ID NO: | M2A | — | 26-30 | | | | |
| 137536 | | | 137676 | | | | | | | |
| SEQ ID NO: | FPYTGDPPM | FPYTGDPPY | SEQ ID NO: | — | Y9M | 27-30 | | | | |
| 137537 | | | 138479 | | | | | | | |
| SEQ ID NO: | MQMGMFNMF | MMMGMFNML | SEQ ID NO: | M2Q | L9F | 28-30 | | | | |
| 137538 | | | 137676 | | | | | | | |
| SEQ ID NO: | MTRLGKGYM | MARLGKGYMF | SEQ ID NO: | A2T | F10W | 29-30 | | | | |
| 137539 | W | | 139678 | | | | | | | |
| SEQ ID NO: | RMLTLNTMTK | RALTLNTMTK | SEQ ID NO: | A2M | — | 3-30 | | | | |
| 137540 | | | 140315 | | | | | | | |
| SEQ ID NO: | NTISTTFPM | NAISTTFPY | SEQ ID NO: | A2T | Y9M | 30 | | | | |
| 137541 | | | 139946 | | | | | | | |
| SEQ ID NO: | NTISTTFPY | NAISTTFPY | SEQ ID NO: | A2T | — | 4-7, | | | | |
| 137542 | | | 139946 | | | 11-30 | | | | |
| SEQ ID NO: | FPYTGDPPI | FPYTGDPPY | SEQ ID NO: | — | Y9I | 5-30 | | | | |
| 137543 | | | 138479 | | | | | | | |
| SEQ ID NO: | TSFFYRYGW | TSFFYRYGF | SEQ ID NO: | — | F9W | 6, | | | | |
| 137544 | | | 141091 | | | 21-30 | | | | |
| SEQ ID NO: | MRNMLSTVY | MFNMLSTVL | SEQ ID NO: | F2R | L9Y | 7-30 | | | | |
| 137545 | | | 139771 | | | | | | | |
| SEQ ID NO: | TTFFYRYGW | TSFFYRYGF | SEQ ID NO: | S2T | F9W | 7-30 | | | | |
| 137546 | | | 141091 | | | | | | | |
| SEQ ID NO: | NVISTTFPY | NAISTTFPY | SEQ ID NO: | A2V | — | 8-10 | | | | |
| 137547 | | | 139946 | | | | | | | |
| SEQ ID NO: | MTIGVTVIR | MSIGVTVIK | SEQ ID NO: | S2T | K9R | 8-30 | | | | |
| 137548 | | | 139877 | | | | | | | |
| SEQ ID NO: | NMISTTFPY | NAISTTFPY | SEQ ID NO: | A2M | — | 9-30 | | | | |
| 137549 | | | 139946 | | | | | | | |
| SEQ ID NO: | FAFTGEEL | FSFTGEEM | SEQ ID NO: | S2A | M8L | | | | | 11-30 |
| 137550 | | | 148186 | | | | | | | |
| SEQ ID NO: | FSFTGEEY | FSFTGEEM | SEQ ID NO: | — | M8Y | | | | | 12-30 |
| 137551 | | | 148186 | | | | | | | |
| SEQ ID NO: | HMFSFTGEEF | HIFSFTGEEM | SEQ ID NO: | I2M | M10F | | | | | 13-14, |
| 137552 | | | 148475 | | | | | | | 22-30 |
| SEQ ID NO: | LMKHRFEV | LLKHRFEI | SEQ ID NO: | L2M | 18V | | | | | 14, 24- |
| 137553 | | | 137677 | | | | | | | 26 |
| SEQ ID NO: | FVFTGEEMV | FSFTGEEMA | SEQ ID NO: | S2V | A9V | | | | | 15, 18- |
| 137554 | | | 148187 | | | | | | | 30 |
| SEQ ID NO: | HLFSFTGEEY | HIFSFTGEEM | SEQ ID NO: | I2L | M10Y | | | | | 15-30 |
| 137555 | | | 148475 | | | | | | | |
| SEQ ID NO: | FVFTGEEMATR | FSFTGEEMATK | SEQ ID NO: | S2V | K11R | | | | | 16-17 |
| 137556 | | | 148188 | | | | | | | |
| SEQ ID NO: | FVFTGEEMI | FSFTGEEMA | SEQ ID NO: | S2V | A9I | | | | | 16-17 |
| 137557 | | | 148187 | | | | | | | |
| SEQ ID NO: | IYSFTGEEI | IFSFTGEEM | SEQ ID NO: | F2Y | M9I | | | | | 17 |
| 137558 | | | 148568 | | | | | | | |
| SEQ ID NO: | ATLKHRFEW | ALLKHRFEI | SEQ ID NO: | L2T | 19W | | | | | 18-30 |
| 137559 | | | 147406 | | | | | | | |
| SEQ ID NO: | FTGEEMATR | FTGEEMATK | SEQ ID NO: | — | K9R | | | | | 18-30 |
| 137560 | | | 148223 | | | | | | | |
| SEQ ID NO: | IFSFTGEEF | IFSFTGEEM | SEQ ID NO: | — | M9F | | | | | 18-30 |
| 137561 | | | 148568 | | | | | | | |
| SEQ ID NO: | AMLKHRFEL | ALLKHRFEI | SEQ ID NO: | L2M | I9L | | | | | 19-30 |
| 137562 | | | 147406 | | | | | | | |
| SEQ ID NO: | FAFTGEEM | FSFTGEEM | SEQ ID NO: | S2A | — | | | | | 2-30 |
| 137563 | | | 148186 | | | | | | | |
| SEQ ID NO: | FSFTGEEL | FSFTGEEM | SEQ ID NO: | — | M8L | | | | | 20-30 |
| 137564 | | | 148186 | | | | | | | |
| SEQ ID NO: | FAYSDFHY | FMYSDFHF | SEQ ID NO: | M2A | F8Y | | | | | 21-30 |
| 137565 | | | 148134 | | | | | | | |
| SEQ ID NO: | FTFTGEEMV | FSFTGEEMA | SEQ ID NO: | S2T | A9V | | | | | 24 |
| 137566 | | | 148187 | | | | | | | |
| SEQ ID NO: | FTFTGEEML | FSFTGEEMA | SEQ ID NO: | S2T | A9L | | | | | 25-26 |
| 137567 | | | 148187 | | | | | | | |
| SEQ ID NO: | FTFTGEEMATK | FSFTGEEMATK | SEQ ID NO: | S2T | — | | | | | 25-30 |
| 137568 | | | 148188 | | | | | | | |
| SEQ ID NO: | IYSFTGEEL | IFSFTGEEM | SEQ ID NO: | F2Y | M9L | | | | | 26 |
| 137569 | | | 148568 | | | | | | | |
| SEQ ID NO: | ATLKHRFEF | ALLKHRFEI | SEQ ID NO: | L2T | I9F | | | | | 27-30 |
| 137570 | | | 147406 | | | | | | | |
| SEQ ID NO: | FSFTGEEMV | FSFTGEEMA | SEQ ID NO: | — | A9V | | | | | 27-30 |
| 137571 | | | 148187 | | | | | | | |
| SEQ ID NO: | IYSFTGEEF | IFSFTGEEM | SEQ ID NO: | F2Y | M9F | | | | | 27-30 |
| 137572 | | | 148568 | | | | | | | |
| SEQ ID NO: | ALLKHRFEL | ALLKHRFEI | SEQ ID NO: | — | I9L | | | | | 28-30 |
| 137573 | | | 147406 | | | | | | | |
| SEQ ID NO: | FTFTGEEY | FSFTGEEM | SEQ ID NO: | S2T | M8Y | | | | | 29-30 |
| 137574 | | | 148186 | | | | | | | |
| SEQ ID NO: | HMFSFTGEEY | HIFSFTGEEM | SEQ ID NO: | I2M | M10Y | | | | | 3-30 |
| 137575 | | | 148475 | | | | | | | |
| SEQ ID NO: | LMKHRFEL | LLKHRFEI | SEQ ID NO: | L2M | I8L | | | | | 30 |
| 137576 | | | 137677 | | | | | | | |
| SEQ ID NO: | LPKHRFEM | LLKHRFEI | SEQ ID NO: | L2P | 18M | | | | | 4-30 |
| 137577 | | | 137677 | | | | | | | |
| SEQ ID NO: | FTFTGEEMI | FSFTGEEMA | SEQ ID NO: | S2T | A9I | | | | | 5-30 |
| 137578 | | | 148187 | | | | | | | |
| SEQ ID NO: | FVGEEMATR | FTGEEMATK | SEQ ID NO: | T2V | K9R | | | | | 7-30 |
| 137579 | | | 148223 | | | | | | | |
| SEQ ID NO: | AVLKHRFEW | ALLKHRFEI | SEQ ID NO: | L2V | I9W | | | | | 8-30 |
| 137580 | | | 147406 | | | | | | | |
| SEQ ID NO: | HYFSFTGEEY | HIFSFTGEEM | SEQ ID NO: | 12Y | M10Y | | | | | 9-30 |
| 137581 | | | 148475 | | | | | | | |
| SEQ ID NO: | MVMKYPITL | MAMKYPITA | SEQ ID NO: | A2V | A9L | | | 1-30 | | |
| 137582 | | | 144957 | | | | | | | |
| SEQ ID NO: | WMMAMKYPM | WMMAMKYPI | SEQ ID NO: | — | 19M | | | 10-30 | | |
| 137583 | | | 147173 | | | | | | | |
| SEQ ID NO: | MSMKYPITM | MAMKYPITA | SEQ ID NO: | A2S | A9M | | | 11-30 | | |
| 137584 | | | 144957 | | | | | | | |
| SEQ ID NO: | MEVVFPNEI | MEVVFPNEV | SEQ ID NO: | — | V9I | | | 12-30 | | |
| 137585 | | | 144986 | | | | | | | |
| SEQ ID NO: | RPNQRLNPV | RANQRLNPM | SEQ ID NO: | A2P | M9V | | | 13-30 | | |
| 137586 | | | 145577 | | | | | | | |
| SEQ ID NO: | KYMMAMKYP | KWMMAMKYPI | SEQ ID NO: | W2Y | I10Y | | | 14-30 | | |
| 137587 | Y | | 144613 | | | | | | | |
| SEQ ID NO: | WQMAMKYPV | WMMAMKYPI | SEQ ID NO: | M2Q | I9V | | | 15-30 | | |
| 137588 | | | 147173 | | | | | | | |
| SEQ ID NO: | KWMMAMKYP | KWMMAMKYPI | SEQ ID NO: | — | I10W | | | 16-30 | | |
| 137589 | W | | 144613 | | | | | | | |
| SEQ ID NO: | MEVVFPNEY | MEVVFPNEV | SEQ ID NO: | — | V9Y | | | 17-30 | | |
| 137590 | | | 144986 | | | | | | | |
| SEQ ID NO: | MMMKYPITM | MAMKYPITA | SEQ ID NO: | A2M | A9M | | | 18-30 | | |
| 137591 | | | 144957 | | | | | | | |
| SEQ ID NO: | RVKWMMAMK | RMKWMMAMK | SEQ ID NO: | M2V | — | | | 2, | | |
| 137592 | | | 145813 | | | | | 19-30 | | |
| SEQ ID NO: | KYMMAMKYPF | KWMMAMKYPI | SEQ ID NO: | W2Y | I10F | | | 20-30 | | |
| 137593 | | | 144613 | | | | | | | |
| SEQ ID NO: | RYKWMMAMK | RMKWMMAMK | SEQ ID NO: | M2Y | — | | | 21-30 | | |
| 137594 | Y | Y | 137678 | | | | | | | |
| SEQ ID NO: | TTVDHMAIL | TTVDHMAII | SEQ ID NO: | — | I9L | | | 22-30 | | |
| 137595 | | | 146730 | | | | | | | |
| SEQ ID NO: | TTVDHMAIY | TTVDHMAII | SEQ ID NO: | — | 19Y | | | 23-30 | | |
| 137596 | | | 146730 | | | | | | | |
| SEQ ID NO: | MAMKYPITV | MAMKYPITA | SEQ ID NO: | — | A9V | | | 25-30 | | |
| 137597 | | | 144957 | | | | | | | |
| SEQ ID NO: | RSKWMMAMK | RMKWMMAMK | SEQ ID NO: | M2S | — | | | 26-30 | | |
| 137598 | | | 145813 | | | | | | | |
| SEQ ID NO: | KWMMAMKYP | KWMMAMKYPI | SEQ ID NO: | — | I10F | | | 27-30 | | |
| 137599 | F | | 144613 | | | | | | | |
| SEQ ID NO: | RPNQRLNPM | RANQRLNPM | SEQ ID NO: | A2P | — | | | 28-30 | | |
| 137600 | | | 145577 | | | | | | | |
| SEQ ID NO: | MSWMMAMKY | MKWMMAMKY | SEQ ID NO: | K2S | — | | | 29-30 | | |
| 137601 | | | 145030 | | | | | | | |
| SEQ ID NO: | KYMMAMKYP | KWMMAMKYPI | SEQ ID NO: | W2Y | I10W | | | 3-30 | | |
| 137602 | W | | 144613 | | | | | | | |
| SEQ ID NO: | RTKWMMAMK | RMKWMMAMK | SEQ ID NO: | M2T | — | | | 3-30 | | |
| 137603 | | | 145813 | | | | | | | |
| SEQ ID NO: | TTVDHMAIM | TTVDHMAII | SEQ ID NO: | — | I9M | | | 30 | | |
| 137604 | | | 146730 | | | | | | | |
| SEQ ID NO: | TVVDHMAIY | TTVDHMAII | SEQ ID NO: | T2V | 19Y | | | 5-30 | | |
| 137605 | | | 146730 | | | | | | | |
| SEQ ID NO: | KVVRGDLNW | KAVRGDLNF | SEQ ID NO: | A2V | F9W | | | 7-30 | | |
| 137606 | | | 144320 | | | | | | | |
| SEQ ID NO: | VTSIDRFLR | VVSIDRFLR | SEQ ID NO: | V2T | — | | | 7-30 | | |
| 137607 | | | 137679 | | | | | | | |
| SEQ ID NO: | TVVDHMAIIK | TTVDHMAIIK | SEQ ID NO: | T2V | — | | | 8-30 | | |
| 137608 | | | 146731 | | | | | | | |
| SEQ ID NO: | RMKWMMAMR | RMKWMMAMK | SEQ ID NO: | — | K9R | | | 9-30 | | |
| 137609 | | | 145813 | | | | | | | |
| SEQ ID NO: | CMINDPWVV | CLINDPWVL | SEQ ID NO: | L2M | L9V | | | | 1-30 | |
| 137610 | | | 147560 | | | | | | | |
| SEQ ID NO: | KYCRTLLAR | KVCRTLLAK | SEQ ID NO: | V2Y | K9R | | | | 11-30 | |
| 137611 | | | 137680 | | | | | | | |
| SEQ ID NO: | LTASWFNSY | LNASWFNSF | SEQ ID NO: | N2T | F9Y | | | | 12-17 | |
| 137612 | | | 149272 | | | | | | | |
| SEQ ID NO: | NSSWFNSFM | NASWFNSFL | SEQ ID NO: | A2S | L9M | | | | 13-30 | |
| 137613 | | | 149589 | | | | | | | |
| SEQ ID NO: | AMLKHRFEV | ALLKHRFEI | SEQ ID NO: | L2M | 19V | | | | 14-30 | 1-30 |
| 137614 | | | 147406 | | | | | | | |
| SEQ ID NO: | KMCRTLLAK | KVCRTLLAK | SEQ ID NO: | V2M | — | | | | 15-30 | |
| 137615 | | | 137680 | | | | | | | |
| SEQ ID NO: | RVLLAKSVW | RTLLAKSVF | SEQ ID NO: | T2V | F9W | | | | 16-30 | |
| 137616 | | | 150283 | | | | | | | |
| SEQ ID NO: | NTSWFNSFL | NASWFNSFL | SEQ ID NO: | A2T | — | | | | 17-30 | |
| 137617 | | | 149589 | | | | | | | |
| SEQ ID NO: | LSASWFNSY | LNASWFNSF | SEQ ID NO: | N2S | F9Y | | | | 18-30 | |
| 137618 | | | 149272 | | | | | | | |
| SEQ ID NO: | LVKHRFEL | LLKHRFEI | SEQ ID NO: | L2V | I8L | | | | 18-30 | 23, 27- |
| 137619 | | | 137677 | | | | | | | 30 |
| SEQ ID NO: | FYYSDFHF | FMYSDFHF | SEQ ID NO: | M2Y | — | | | | 19-30 | 6-30 |
| 137620 | | | 148134 | | | | | | | |
| SEQ ID NO: | NASWFNSFY | NASWFNSFL | SEQ ID NO: | — | L9Y | | | | 20-30 | |
| 137621 | | | 149589 | | | | | | | |
| SEQ ID NO: | RSLLAKSVK | RTLLAKSVF | SEQ ID NO: | T2S | F9K | | | | 21-23 | |
| 137622 | | | 150283 | | | | | | | |
| SEQ ID NO: | LMNASWFNSY | LLNASWFNSF | SEQ ID NO: | L2M | F10Y | | | | 22-30 | |
| 137623 | | | 149216 | | | | | | | |
| SEQ ID NO: | ALLKHRFEV | ALLKHRFEI | SEQ ID NO: | — | I9V | | | | 23-30 | 10-30 |
| 137624 | | | 147406 | | | | | | | |
| SEQ ID NO: | KSCRTLLAK | KVCRTLLAK | SEQ ID NO: | V2S | — | | | | 24-30 | |
| 137625 | | | 137680 | | | | | | | |
| SEQ ID NO: | RILLAKSVK | RTLLAKSVF | SEQ ID NO: | T2I | F9K | | | | 24-30 | |
| 137626 | | | 150283 | | | | | | | |
| SEQ ID NO: | KLCRTLLAK | KVCRTLLAK | SEQ ID NO: | V2L | — | | | | 25-30 | |
| 137627 | | | 137680 | | | | | | | |
| SEQ ID NO: | NVSWFNSFI | NASWFNSFL | SEQ ID NO: | A2V | L9I | | | | 26 | |
| 137628 | | | 149589 | | | | | | | |
| SEQ ID NO: | NLSWFNSFV | NASWFNSFL | SEQ ID NO: | A2L | L9V | | | | 27-30 | |
| 137629 | | | 149589 | | | | | | | |
| SEQ ID NO: | LPKHRFEL | LLKHRFEI | SEQ ID NO: | L2P | I8L | | | | 27-30 | 16-17 |
| 137630 | | | 137677 | | | | | | | |
| SEQ ID NO: | RSLLAKSVW | RTLLAKSVF | SEQ ID NO: | T2S | F9W | | | | 28-30 | |
| 137631 | | | 150283 | | | | | | | |
| SEQ ID NO: | VYLNASWFNSL | VLLNASWFNSF | SEQ ID NO: | L2Y | F11L | | | | 29 | |
| 137632 | | | 150806 | | | | | | | |
| SEQ ID NO: | NASWFNSFM | NASWFNSFL | SEQ ID NO: | — | L9M | | | | 3-30 | |
| 137633 | | | 149589 | | | | | | | |
| SEQ ID NO: | RYLLAKSVK | RTLLAKSVF | SEQ ID NO: | T2Y | F9K | | | | 30 | |
| 137634 | | | 150283 | | | | | | | |
| SEQ ID NO: | VYLNASWFNSF | VLLNASWFNSF | SEQ ID NO: | L2Y | — | | | | 30 | |
| 137635 | | | 150806 | | | | | | | |
| SEQ ID NO: | RTLLAKSVW | RTLLAKSVF | SEQ ID NO: | — | F9W | | | | 4-30 | |
| 137636 | | | 150283 | | | | | | | |
| SEQ ID NO: | PYVLLNASF | PWVLLNASW | SEQ ID NO: | W2Y | W9F | | | | 5-30 | |
| 137637 | | | 149847 | | | | | | | |
| SEQ ID NO: | KTCRTLLAK | KVCRTLLAK | SEQ ID NO: | V2T | — | | | | 6, 10-30 | |
| 137638 | | | 137680 | | | | | | | |
| SEQ ID NO: | LLKHRFEM | LLKHRFEI | SEQ ID NO: | — | I8M | | | | 7-30 | |
| 137639 | | | 137677 | | | | | | | |
| SEQ ID NO: | LMNASWFNSF | LLNASWFNSF | SEQ ID NO: | L2M | — | | | | 7-30 | |
| 137640 | | | 149216 | | | | | | | |
| SEQ ID NO: | LANDPWVLL | LINDPWVLL | SEQ ID NO: | I2A | — | | | | 8-30 | |
| 137641 | | | 149162 | | | | | | | |
| SEQ ID NO: | KARPILSPM | KTRPILSPL | SEQ ID NO: | T2A | L9M | | 1-30 | | | |
| 137642 | | | 141983 | | | | | | | |
| SEQ ID NO: | TEVETYVY | TEVETYVL | SEQ ID NO: | — | L8Y | | 10-30 | | | |
| 137643 | | | 142658 | | | | | | | |
| SEQ ID NO: | KSRPILSPY | KTRPILSPL | SEQ ID NO: | T2S | L9Y | | 11-30 | | | |
| 137644 | | | 141983 | | | | | | | |
| SEQ ID NO: | TEVETYVLA | TEVETYVLS | SEQ ID NO: | — | S9A | | 12-30 | | | |
| 137645 | | | 142659 | | | | | | | |
| SEQ ID NO: | KYRPILSPLTR | KTRPILSPLTK | SEQ ID NO: | T2Y | K11R | | 13-30 | | | |
| 137646 | | | 141985 | | | | | | | |
| SEQ ID NO: | KIRPILSPL | KTRPILSPL | SEQ ID NO: | T2I | — | | 14-30 | | | |
| 137647 | | | 141983 | | | | | | | |
| SEQ ID NO: | WVKTRPIL | WLKTRPIL | SEQ ID NO: | L2V | — | | 15-30 | | | |
| 137648 | | | 142800 | | | | | | | |
| SEQ ID NO: | KMRPILSPLTK | KTRPILSPLTK | SEQ ID NO: | T2M | — | | 16-30 | | | |
| 137649 | | | 141985 | | | | | | | |
| SEQ ID NO: | KTRPILSPW | KTRPILSPL | SEQ ID NO: | — | L9W | | 17-30 | | | |
| 137650 | | | 141983 | | | | | | | |
| SEQ ID NO: | KARPILSPY | KTRPILSPL | SEQ ID NO: | T2A | L9Y | | 18-30 | | | |
| 137651 | | | 141983 | | | | | | | |
| SEQ ID NO: | KORPILSPV | KTRPILSPL | SEQ ID NO: | T2Q | L9V | | 19-30 | | | |
| 137652 | | | 141983 | | | | | | | |
| SEQ ID NO: | KVRPILSPV | KTRPILSPL | SEQ ID NO: | T2V | L9V | | 2-30 | | | |
| 137653 | | | 141983 | | | | | | | |
| SEQ ID NO: | TEVETYVLSY | TEVETYVLSI | SEQ ID NO: | — | 110Y | | 20, 29- | | | |
| 137654 | | | 142660 | | | | 30 | | | |
| SEQ ID NO: | RTRFVQNAF | RRRFVQNAL | SEQ ID NO: | R2T | L9F | | 21-30 | | | |
| 137655 | | | 142502 | | | | | | | |
| SEQ ID NO: | TEVETYVLSF | TEVETYVLSI | SEQ ID NO: | — | I10F | | 21-30 | | | |
| 137656 | | | 142660 | | | | | | | |
| SEQ ID NO: | RYRFVQNAF | RRRFVQNAL | SEQ ID NO: | R2Y | L9F | | 22-29 | | | |
| 137657 | | | 142502 | | | | | | | |
| SEQ ID NO: | TEVETYVF | TEVETYVL | SEQ ID NO: | — | L8F | | 23-30 | | | |
| 137658 | | | 142658 | | | | | | | |
| SEQ ID NO: | KARPILSPL | KTRPILSPL | SEQ ID NO: | T2A | — | | 24-30 | | | |
| 137659 | | | 141983 | | | | | | | |
| SEQ ID NO: | WPKTRPIL | WLKTRPIL | SEQ ID NO: | L2P | — | | 25-29 | | | |
| 137660 | | | 142800 | | | | | | | |
| SEQ ID NO: | KLRPILSPLTK | KTRPILSPLTK | SEQ ID NO: | T2L | — | | 26-30 | | | |
| 137661 | | | 141985 | | | | | | | |
| SEQ ID NO: | KSRPILSPW | KTRPILSPL | SEQ ID NO: | T2S | L9W | | 27-30 | | | |
| 137662 | | | 141983 | | | | | | | |
| SEQ ID NO: | KMRPILSPV | KTRPILSPL | SEQ ID NO: | T2M | L9V | | 28-30 | | | |
| 137663 | | | 141983 | | | | | | | |
| SEQ ID NO: | TEVETYVLSL | TEVETYVLSI | SEQ ID NO: | — | I10L | | 3-30 | | | |
| 137664 | | | 142660 | | | | | | | |
| SEQ ID NO: | RRRFVQNAY | RRRFVQNAL | SEQ ID NO: | — | L9Y | | 30 | | | |
| 137665 | | | 142502 | | | | | | | |
| SEQ ID NO: | RWRFVQNAM | RRRFVQNAL | SEQ ID NO: | R2W | L9M | | 30 | | | |
| 137666 | | | 142502 | | | | | | | |
| SEQ ID NO: | WMKTRPIM | WLKTRPIL | SEQ ID NO: | L2M | L8M | | 30 | | | |
| 137667 | | | 142800 | | | | | | | |
| SEQ ID NO: | TEVETYVLSW | TEVETYVLSI | SEQ ID NO: | — | I10W | | 4-30 | | | |
| 137668 | | | 142660 | | | | | | | |
| SEQ ID NO: | WMKTRPILSPL | WLKTRPILSPL | SEQ ID NO: | L2M | — | | 5-6 | | | |
| 137669 | | | 142801 | | | | | | | |
| SEQ ID NO: | KTRPILSPF | KTRPILSPL | SEQ ID NO: | — | L9F | | 6-30 | | | |
| 137670 | | | 141983 | | | | | | | |
| SEQ ID NO: | KVRPILSPLTK | KTRPILSPLTK | SEQ ID NO: | T2V | — | | 7-30 | | | |
| 137671 | | | 141985 | | | | | | | |
| SEQ ID NO: | WAKTRPIL | WLKTRPIL | SEQ ID NO: | L2A | — | | 7-30 | | | |
| 137672 | | | 142800 | | | | | | | |
| SEQ ID NO: | RRRFVQNAF | RRRFVQNAL | SEQ ID NO: | — | L9F | | 8 | | | |
| 137673 | | | 142502 | | | | | | | |
| SEQ ID NO: | RKRFVQNAF | RRRFVQNAL | SEQ ID NO: | R2K | L9F | | 9-30 | | | |
| 137674 | | | 142502 | | | | | | | |
| SEQ ID NO: | RYRFVQNAI | RRRFVQNAL | SEQ ID NO: | R2Y | L9I | | 9-30 | | | |
| 137675 | | | 142502 | | | | | | | |
| SEQ ID NO: | MMMGMFNML | MMMGMFNML | SEQ ID NO: | — | — | 2-30 | | | | |
| 137676 | | | 137676 | | | | | | | |
| SEQ ID NO: | LLKHRFEI | LLKHRFEI | SEQ ID NO: | — | — | | | | | 15, 18- |
| 137677 | | | 137677 | | | | | | | 30 |
| SEQ ID NO: | RMKWMMAMK | RMKWMMAMK | SEQ ID NO: | — | — | | | 4-30 | | |
| 137678 | Y | Y | 137678 | | | | | | | |
| SEQ ID NO: | VVSIDRFLR | VVSIDRFLR | SEQ ID NO: | — | — | | | 6, 24-30 | | |
| 137679 | | | 137679 | | | | | | | |
| SEQ ID NO: | KVCRTLLAK | KVCRTLLAK | SEQ ID NO: | — | — | | | | 2-30 | |
| 137680 | | | 137680 | | | | | | | |
| SEQ ID NO: | EECLINDPW | EECLINDPW | SEQ ID NO: | — | — | | | | 9-30 | |
| 137681 | | | 137681 | | | | | | | |

TABLE 4
Example Composition Peptides for Targets: RNA-directed RNA polymerase catalytic subunit, Matrix protein 1,Polymerase basic protein 2, Polymerase
acidic protein, and Protein PA-X (MHC class II)

| | | | | | | | | | | RNA- | | Polymer- | | |
|---|---|---|---|---|---|---|---|---|---|---|---|---|---|---|
| | | | | | | | | | | directed | | ase | Poly- | |
| | | | | | | Hetero- | Hetero- | Hetero- | Hetero- | RNA | | basic | mer- | Pro- |
| | Sequence | | | | | clitic | clitic | clitic | clitic | Polymer | Matrix | pro- | ase | tein |
| | correspond- | | | Seed | | Modifi- | Modifi- | Modifi- | Modifi- | catalytic | protein | tein | acidic | PA- |
| SEQ ID | ing to | | | SEQ ID | Seed | cation | cation | cation | cation | subunit | 1 | 2 | protein | X |
| NO | SEQ ID | Core | Seed | NO | Core | P1 | P4 | P6 | P9 | vaccines | vaccines | vaccines | vaccines | vaccines |
| SEQ ID | SPGFMMS | FMMS | SPGMMMG | SEQ ID | MMM | M1 | G4S | F6Y | | 1-30 | | | | |
| NO: | MYNMLST | MYNM | MFNMLST | NO: | GMFN | F | | | | | | | | |
| 137682 | V | L | V | 174276 | ML | | | | | | | | | |
| SEQ ID | SPGMIMGY | IMGYF | SPGMMMG | SEQ ID | MMG | M1 | M4Y | N6P | S9R | 10- | | | | |
| NO: | FPMLRTV | PMLR | MFNMLST | NO: | MFN | I | | | | 11, | | | | |
| 137683 | | | V | 174276 | MLS | | | | | 30 | | | | |
| SEQ ID | GNEFKAHL | FKAHL | GNEKKAK | SEQ ID | KKAK | K1 | K4H | A6F | V9I | 10- | | | | |
| NO: | FNVIRKMM | FNVI | LANVVRK | NO: | LANV | F | | | | 30 | | | | |
| 137684 | TNSQ | | MMTNSQ | 172297 | V | | | | | | | | | |
| SEQ ID | GMMMGM | FNMNS | GMMMGM | SEQ ID | FNML | — | L4N | T6A | G9I | 11- | | | | |
| NO: | FNMNSAVL | AVLI | FNMLSTVL | NO: | STVL | | | | | 30 | | | | |
| 137685 | IVS | | GVS | 172271 | G | | | | | | | | | |
| SEQ ID | SPGFMMS | FMMS | SPGMMMG | SEQ ID | MMM | M1 | G4S | — | L9V | 12- | | | | |
| NO: | MFNMVST | MFNM | MFNMLST | NO: | GMFN | F | | | | 30 | | | | |
| 137686 | V | V | V | 174276 | ML | | | | | | | | | |
| SEQ ID | GNEFKATL | FKATL | GNEKKAK | SEQ ID | KKAK | KI | K4T | A6F | — | 13- | | | | |
| NO: | FNVVRKM | FNVV | LANVVRK | NO: | LANV | F | | | | 14 | | | | |
| 137687 | MTNSQ | | MMTNSQ | 172297 | V | | | | | 17- | | | | |
| | | | | | | | | | | 18, | | | | |
| | | | | | | | | | | 21 | | | | |
| | | | | | | | | | | 23 | | | | |
| | | | | | | | | | | 25- | | | | |
| | | | | | | | | | | 30 | | | | |
| SEQ ID | GMMMGMI | INMYS | GMMMGM | SEQ ID | FNML | F1I | L4Y | T6N | G9A | 14- | | | | |
| NO: | NMYSNVL | NVLA | FNMLSTVL | NO: | STVL | | | | | 30 | | | | |
| 137688 | AVS | | GVS | 172271 | G | | | | | | | | | |
| SEQ ID | GNEKKAKI | IANMV | GNEKKAK | SEQ ID | LANV | LII | V4M | — | M9V | 15, | | | | |
| NO: | ANMVRKM | RKMV | LANVVRK | NO: | VRK | | | | | 20 | | | | |
| 137689 | VTNSQ | | MMTNSQ | 172297 | MM | | | | | 22, | | | | |
| | | | | | | | | | | 24- | | | | |
| | | | | | | | | | | 30 | | | | |
| SEQ ID | GNEFKASL | FKASL | GNEKKAK | SEQ ID | KKAK | K1 | K4S | A6F | V9N | 15- | | | | |
| NO: | FNVNRKM | FNVN | LANVVRK | NO: | LANV | F | | | | 16 | | | | |
| 137690 | MTNSQ | | MMTNSQ | 172297 | V | | | | | 19- | | | | |
| | | | | | | | | | | 20 | | | | |
| | | | | | | | | | | 22- | | | | |
| | | | | | | | | | | 30 | | | | |
| SEQ ID | SPGMIMG | IMGMF | SPGMMMG | SEQ ID | MMG | M1 | | N6R | S9H | 16- | | | | |
| NO: | MFRMLHT | RMLH | MFNMLST | NO: | MFN | I | | | | 19, | | | | |
| 137691 | V | | V | 174276 | MLS | | | | | 21, | | | | |
| | | | | | | | | | | 23- | | | | |
| | | | | | | | | | | 30 | | | | |
| SEQ ID | SPGFMMS | FMMS | SPGMMMG | SEQ ID | MMM | M1 | G4S | F6Y | L9V | 16- | | | | |
| NO: | MYNMVST | MYNM | MFNMLST | NO: | GMFN | F | | | | 30 | | | | |
| 137692 | V | V | V | 174276 | ML | | | | | | | | | |
| SEQ ID | GNEFKASL | FKASL | GNEKKAK | SEQ ID | KKAK | K1 | K4S | A6F | V9I | 17- | | | | |
| NO: | FNVIRKMM | FNVI | LANVVRK | NO: | LANV | F | | | | 18, | | | | |
| 137693 | TNSQ | | MMTNSQ | 172297 | V | | | | | 21- | | | | |
| | | | | | | | | | | 22, | | | | |
| | | | | | | | | | | 24 | | | | |
| SEQ ID | GMMMGM | FNMNS | GMMMGM | SEQ ID | FNML | — | L4N | T6N | G9I | 18- | | | | |
| NO: | FNMNSNVL | NVLI | FNMLSTVL | NO: | STVL | | | | | 30 | | | | |
| 137694 | IVS | | GVS | 172271 | G | | | | | | | | | |
| SEQ ID | GNEFKATL | FKATL | GNEKKAK | SEQ ID | KKAK | K1 | K4T | A6F | V9L | 19- | | | | |
| NO: | FNVLRKM | FNVL | LANVVRK | NO: | LANV | F | | | | 20, | | | | |
| 137695 | MTNSQ | | MMTNSQ | 172297 | V | | | | | 22- | | | | |
| | | | | | | | | | | 30 | | | | |
| SEQ ID | GNEFKASL | FKASL | GNEKKAK | SEQ ID | KKAK | KI | K4S | A6F | — | 2-30 | | | | |
| NO: | FNVVRKM | FNVV | LANVVRK | NO: | LANV | F | | | | | | | | |
| 137696 | MTNSQ | | MMTNSQ | 172297 | V | | | | | | | | | |
| SEQ ID | GMMMGM | FNMAS | GMMMGM | SEQ ID | FNML | | L4A | T6S | G9H | 20- | | | | |
| NO: | FNMASSVL | SVLH | FNMLSTVL | NO: | STVL | | | | | 30 | | | | |
| 137697 | HVS | | GVS | 172271 | G | | | | | | | | | |
| SEQ ID | SPGFMMH | FMMH | SPGMMMG | SEQ ID | MMM | M1 | G4H | — | L9V | 21- | | | | |
| NO: | MFNMVST | MFNM | MFNMLST | NO: | GMFN | F | | | | 30 | | | | |
| 137698 | V | V | V | 174276 | ML | | | | | | | | | |
| SEQ ID | GMMMGM | FNMNS | GMMMGM | SEQ ID | FNML | — | L4N | T6S | G9I | 23- | | | | |
| NO: | FNMNSSVL | SVLI | FNMLSTVL | NO: | STVL | | | | | 30 | | | | |
| 137699 | IVS | | GVS | 172271 | G | | | | | | | | | |
| SEQ ID | GMMMGM | FNMAS | GMMMGM | SEQ ID | FNML | — | L4A | T6P | G9A | 25- | | | | |
| NO: | FNMASPVL | PVLA | FNMLSTVL | NO: | STVL | | | | | 30 | | | | |
| 137700 | AVS | | GVS | 172271 | G | | | | | | | | | |
| SEQ ID | GMMMGMI | INMQS | GMMMGM | SEQ ID | FNML | FII | L4Q | T6N | G9A | 26- | | | | |
| NO: | NMQSNVL | | FNMLSTVL | NO: | STVL | | | | | | | | | |
| 137701 | AVS | NVLA | GVS | 172271 | G | | | | | 30 | | | | |
| SEQ ID | SPGMIMG | IMGMF | SPGMMMG | SEQ ID | MMG | M1 | — | N6R | S9R | 27- | | | | |
| NO: | MFRMLRT | RMLR | MFNMLST | NO: | MFN | I | | | | 30 | | | | |
| 137702 | V | | V | 174276 | MLS | | | | | | | | | |
| SEQ ID | GNEKKAKI | IANIVR | GNEKKAK | SEQ ID | LANV | L1I | V4I | — | M9V | 28- | | | | |
| NO: | ANIVRKMV | KMV | LANVVRK | NO: | VRK | | | | | 30 | | | | |
| 137703 | TNSQ | | MMTNSQ | 172297 | MM | | | | | | | | | |
| SEQ ID | GMMMGMI | INMMS | GMMMGM | SEQ ID | FNML | F1I | L4M | T6A | G9R | 29- | | | | |
| NO: | NMMSAVL | AVLR | FNMLSTVL | NO: | STVL | | | | | 30 | | | | |
| 137704 | RVS | | GVS | 172271 | G | | | | | | | | | |
| SEQ ID | GNEKKAKI | IANIVR | GNEKKAK | SEQ ID | LANV | L1I | V4I | — | M9A | 3-30 | | | | |
| NO: | ANIVRKMA | KMA | LANVVRK | NO: | VRK | | | | | | | | | |
| 137705 | TNSQ | | MMTNSQ | 172297 | MM | | | | | | | | | |
| SEQ ID | GMMMGM | FNMNS | GMMMGM | SEQ ID | FNML | — | L4N | T6N | G9V | 4-30 | | | | |
| NO: | FNMNSNVL | NVLV | FNMLSTVL | NO: | STVL | | | | | | | | | |
| 137706 | VVS | | GVS | 172271 | G | | | | | | | | | |
| SEQ ID | SPGMIMGA | IMGAF | SPGMMMG | SEQ ID | MMG | M1 | M4A | N6P | S9A | 5, | | | | |
| NO: | FPMLATV | PMLA | MFNMLST | NO: | MFN | I | | | | 19-30 | | | | |
| 137707 | | | V | 174276 | MLS | | | | | | | | | |
| SEQ ID | GMMMGMI | INMMS | GMMMGM | SEQ ID | FNML | F1I | L4M | T6S | G9R | 6-30 | | | | |
| NO: | NMMSSVL | SVLR | FNMLSTVL | NO: | STVL | | | | | | | | | |
| 137708 | RVS | | GVS | 172271 | G | | | | | | | | | |
| SEQ ID | SPGFMMH | FMMH | SPGMMMG | SEQ ID | MMM | M1 | G4H | — | | 6-30 | | | | |
| NO: | MFNMLST | MFNM | MFNMLST | NO: | GMFN | F | | | | | | | | |
| 137709 | V | L | V | 174276 | ML | | | | | | | | | |
| SEQ ID | SPGRMMF | RMMF | SPGMMMG | SEQ ID | MMM | M1 | G4F | F6A | L9F | 7-30 | | | | |
| NO: | MANMFST | MANM | MFNMLST | NO: | GMFN | R | | | | | | | | |
| 137710 | V | F | V | 174276 | ML | | | | | | | | | |
| SEQ ID | GMMMGM | FNMM | GMMMGM | SEQ ID | FNML | — | L4M | T6S | G9H | 8-30 | | | | |
| NO: | FNMMSSVL | SSVLH | FNMLSTVL | NO: | STVL | | | | | | | | | |
| 137711 | HVS | | GVS | 172271 | G | | | | | | | | | |
| SEQ ID | SPGMNMG | NMGSF | SPGMMMG | SEQ ID | MMG | M1 | M4S | N6A | S9A | 9, | | | | |
| NO: | SFAMLATV | AMLA | MFNMLST | NO: | MFN | N | | | | 12-30 | | | | |
| 137712 | | | V | 174276 | MLS | | | | | | | | | |
| SEQ ID | HIHFFSFTA | FFSFTA | HIHIFSFTG | SEQ ID | IFSFT | IIF | — | G6A | M9L | | | | | 1-30 |
| NO: | EELATK | EEL | EEMATK | NO: | GEEM | | | | | | | | | |
| 137713 | | | | 180040 | | | | | | | | | | |
| SEQ ID | HIHFFSTTF | FFSTTF | HIHIFSFTG | SEQ ID | IFSFT | IIF | F4T | G6F | — | | | | | 10, |
| NO: | EEMATK | EEM | EEMATK | NO: | GEEM | | | | | | | | | 12- |
| 137714 | | | | 180040 | | | | | | | | | | 30 |
| SEQ ID | HIHFFSSTF | FFSSTF | HIHIFSFTG | SEQ ID | IFSFT | I1F | F4S | G6F | M9L | | | | | 11 |
| NO: | EELATK | EEL | EEMATK | NO: | GEEM | | | | | | | | | 15- |
| 137715 | | | | 180040 | | | | | | | | | | 30 |
| SEQ ID | HIHFFSITIE | FFSITIE | HIHIFSFTG | SEQ ID | IFSFT | I1F | F4I | G6I | M9F | | | | | 12- |
| NO: | EFATK | EF | EEMATK | NO: | GEEM | | | | | | | | | 30 |
| 137716 | | | | 180040 | | | | | | | | | | |
| SEQ ID | HIHIFSFTG | FSFTGF | HIHIFSFTG | SEQ ID | FSFT | — | — | E6F | A9I | | | | | 13- |
| NO: | FEMITK | EMI | EEMATK | NO: | GEEM | | | | | | | | | 30 |
| 137717 | | | | 180040 | A | | | | | | | | | |
| SEQ ID | HIHIVSFAG | VSFAG | HIHIFSFTG | SEQ ID | FSFT | F1 | T4A | E6A | A9M | | | | | 14- |
| NO: | AEMMTK | AEMM | EEMATK | NO: | GEEM | V | | | | | | | | 30 |
| 137718 | | | | 180040 | A | | | | | | | | | |
| SEQ ID | HIHIFSMTI | IFSMTI | HIHIFSFTG | SEQ ID | IFSFT | — | F4M | G6I | M9A | | | | | 16- |
| NO: | EEAATK | EEA | EEMATK | NO: | GEEM | | | | | | | | | 30 |
| 137719 | | | | 180040 | | | | | | | | | | |
| SEQ ID | HIHFFSITIE | FFSITIE | HIHIFSFTG | SEQ ID | IFSFT | I1F | F4I | G6I | M9E | | | | | 17- |
| NO: | EEATK | EE | EEMATK | NO: | GEEM | | | | | | | | | 18, |
| 137720 | | | | 180040 | | | | | | | | | | 20- |
| | | | | | | | | | | | | | | 30 |
| SEQ ID | HIHIFSFTA | IFSFTA | HIHIFSFTG | SEQ ID | IFSFT | — | — | G6A | M9V | | | | | 18, |
| NO: | EEVATK | EEV | EEMATK | NO: | GEEM | | | | | | | | | 20- |
| 137721 | | | | 180040 | | | | | | | | | | 30 |
| SEQ ID | HIHFFSITV | FFSITV | HIHIFSFTG | SEQ ID | IFSFT | IIF | F4I | G6V | M9L | | | | | 19 |
| NO: | EELATK | EEL | EEMATK | NO: | GEEM | | | | | | | | | |
| 137722 | | | | 180040 | | | | | | | | | | |
| SEQ ID | HIHIFSFTA | IFSFTA | HIHIFSFTG | SEQ ID | IFSFT | — | — | G6A | M9A | | | | | 19, |
| NO: | EEAATK | EEA | EEMATK | NO: | GEEM | | | | | | | | | 25 |
| 137723 | | | | 180040 | | | | | | | | | | |
| SEQ ID | HIHIISFTG | ISFTGN | HIHIFSFTG | SEQ ID | FSFT | F1I | — | E6N | A9I | | | | | 19- |
| NO: | NEMITK | EMI | EEMATK | NO: | GEEM | | | | | | | | | 30 |
| 137724 | | | | 180040 | A | | | | | | | | | |
| SEQ ID | HIHFFSFTS | FFSFTS | HIHIFSFTG | SEQ ID | IFSFT | IIF | — | G6S | M9V | | | | | 2, |
| NO: | EEVATK | EEV | EEMATK | NO: | GEEM | | | | | | | | | 4-5, |
| 137725 | | | | 180040 | | | | | | | | | | 7-30 |
| SEQ ID | HIHFFSSTF | FFSSTF | HIHIFSFTG | SEQ ID | IFSFT | IIF | F4S | G6F | M9F | | | | | 20- |
| NO: | EEFATK | EEF | EEMATK | NO: | GEEM | | | | | | | | | 30 |
| 137726 | | | | 180040 | | | | | | | | | | |
| SEQ ID | HIHFFSYTS | FFSYTS | HIHIFSFTG | SEQ ID | IFSFT | IIF | F4Y | G6S | M9L | | | | | 21- |
| NO: | EELATK | EEL | EEMATK | NO: | GEEM | | | | | | | | | 30 |
| 137727 | | | | 180040 | | | | | | | | | | |
| SEQ ID | HIHFFSITA | FFSITA | HIHIFSFTG | SEQ ID | IFSFT | IIF | F4I | G6A | M9A | | | | | 22- |
| NO: | | | | NO: | | | | | | | | | | |
| 137728 | EEAATK | EEA | EEMATK | 180040 | GEEM | | | | | | | | | 23 |
| SEQ ID | HIHIFSITAE | IFSITA | HIHIFSFTG | SEQ ID | IFSFT | — | F4I | G6A | M9L | | | | | 23- |
| NO: | ELATK | EEL | EEMATK | NO: | GEEM | | | | | | | | | 30 |
| 137729 | | | | 180040 | | | | | | | | | | |
| SEQ ID | HIHIFSFTA | IFSFTA | HIHIFSFTG | SEQ ID | IFSFT | — | — | G6A | M9L | | | | | 24, |
| NO: | EELATK | EEL | EEMATK | NO: | GEEM | | | | | | | | | 26- |
| 137730 | | | | 180040 | | | | | | | | | | 30 |
| SEQ ID | HIHFFSMTS | FFSMT | HIHIFSFTG | SEQ ID | IFSFT | I1F | F4M | G6S | M9L | | | | | 24- |
| NO: | EELATK | SEEL | EEMATK | NO: | GEEM | | | | | | | | | 30 |
| 137731 | | | | 180040 | | | | | | | | | | |
| SEQ ID | HIHFFSHTF | FFSHTF | HIHIFSFTG | SEQ ID | IFSFT | IIF | F4H | G6F | M9L | | | | | 25- |
| NO: | EELATK | EEL | EEMATK | NO: | GEEM | | | | | | | | | 30 |
| 137732 | | | | 180040 | | | | | | | | | | |
| SEQ ID | HIHFFSFTS | FFSFTS | HIHIFSFTG | SEQ ID | IFSFT | I1F | — | G6S | M9I | | | | | 26- |
| NO: | | | | NO: | | | | | | | | | | |
| 137733 | EELATK | EEI | EEMATK | 180040 | GEEM | | | | | | | | | 30 |
| SEQ ID | HIHIFSITRE | IFSITR | HIHIFSFTG | SEQ ID | IFSFT | — | F4I | G6R | M9R | | | | | 27- |
| NO: | ERATK | EER | EEMATK | NO: | GEEM | | | | | | | | | 30 |
| 137734 | | | | 180040 | | | | | | | | | | |
| SEQ ID | HIHFFSATS | FFSATS | HIHIFSFTG | SEQ ID | IFSFT | I1F | F4A | G6S | M9A | | | | | 28- |
| NO: | EEAATK | EEA | EEMATK | NO: | GEEM | | | | | | | | | 30 |
| 137735 | | | | 180040 | | | | | | | | | | |
| SEQ ID | HIHFFSATI | FFSATI | HIHIFSFTG | SEQ ID | IFSFT | I1F | F4A | G6I | M9A | | | | | 29- |
| NO: | | | | NO: | | | | | | | | | | |
| 137736 | EEAATK | EEA | EEMATK | 180040 | GEEM | | | | | | | | | 30 |
| SEQ ID | HIHFFSFTS | FFSFTS | HIHIFSFTG | SEQ ID | IFSFT | I1F | — | G6S | M9L | | | | | 3, 9, |
| NO: | EELATK | EEL | EEMATK | NO: | GEEM | | | | | | | | | 11- |
| 137737 | | | | 180040 | | | | | | | | | | 30 |
| SEQ ID | HIHIFSFIG | FSFIGA | HIHIFSFTG | SEQ ID | FSFT | — | T4I | E6A | A9L | | | | | 3-30 |
| NO: | AEMLTK | EML | EEMATK | NO: | GEEM | | | | | | | | | |
| 137738 | | | | 180040 | A | | | | | | | | | |
| SEQ ID | HIHLFSITT | LFSITT | HIHIFSFTG | SEQ ID | IFSFT | I1L | F4I | G6T | M9S | | | | | 30 |
| NO: | | | | NO: | | | | | | | | | | |
| 137739 | EESATK | EES | EEMATK | 180040 | GEEM | | | | | | | | | |
| SEQ ID | HIHFFSITF | FFSITF | HIHIFSFTG | SEQ ID | IFSFT | IIF | F4I | G6F | M9V | | | | | 4-30 |
| NO: | EEVATK | EEV | EEMATK | NO: | GEEM | | | | | | | | | |
| 137740 | | | | 180040 | | | | | | | | | | |
| SEQ ID | HIHIFSLTS | IFSLTS | HIHIFSFTG | SEQ ID | IFSFT | — | F4L | G6S | M9A | | | | | 5-30 |
| NO: | EEAATK | EEA | EEMATK | NO: | GEEM | | | | | | | | | |
| 137741 | | | | 180040 | | | | | | | | | | |
| SEQ ID | HIHIFSFTD | IFSFTD | HIHIFSFTG | SEQ ID | IFSFT | — | — | G6D | M9L | | | | | 6-30 |
| NO: | EELATK | EEL | EEMATK | NO: | GEEM | | | | | | | | | |
| 137742 | | | | 180040 | | | | | | | | | | |
| SEQ ID | HIHFFSFTN | FFSFTN | HIHIFSFTG | SEQ ID | IFSFT | I1F | — | G6N | M9L | | | | | 6-8, |
| NO: | EELATK | EEL | EEMATK | NO: | GEEM | | | | | | | | | 10- |
| 137743 | | | | 180040 | | | | | | | | | | 30 |
| SEQ ID | HIHIFSFTG | FSFTG | HIHIFSFTG | SEQ ID | FSFT | — | — | E6A | A9L | | | | | 8-30 |
| NO: | AEMLTK | AEML | EEMATK | NO: | GEEM | | | | | | | | | |
| 137744 | | | | 180040 | A | | | | | | | | | |
| SEQ ID | HIHIFSITAE | IFSITA | HIHIFSFTG | SEQ ID | IFSFT | — | F4I | G6A | M9I | | | | | 9-30 |
| NO: | | | | NO: | | | | | | | | | | |
| 137745 | ELATK | EEI | EEMATK | 180040 | GEEM | | | | | | | | | |
| SEQ ID | LRMKFMM | FMMS | LRMKWM | SEQ ID | WMM | W1 | A4S | K6A | — | | | 1-17 | | |
| NO: | SMAYPITA | MAYPI | MAMKYPI | NO: | AMK | F | | | | | | | | |
| 137746 | | | TA | 177409 | YPI | | | | | | | | | |
| SEQ ID | LRIKWLMS | IKWLM | LRMKWM | SEQ ID | MKW | M1 | M4L | A6S | Y9H | | | 10-17 | | |
| NO: | MKHPITA | SMKH | MAMKYPI | NO: | MMA | I | | | | | | | | |
| 137747 | | | TA | 177409 | MKY | | | | | | | | | |
| SEQ ID | LRMKFMM | FMMD | LRMKWM | SEQ ID | WMM | W1 | A4D | K6A | — | | | 11-17 | | |
| NO: | DMAYPITA | MAYPI | MAMKYPI | NO: | AMK | F | | | | | | | | |
| 137748 | | | TA | 177409 | YPI | | | | | | | | | |
| SEQ ID | LRIKWIMA | IKWIM | LRMKWM | SEQ ID | MKW | M1 | M4I | | — | | | 12 | | |
| NO: | MKYPITA | AMKY | MAMKYPI | NO: | MMA | I | | | | | | 16 | | |
| 137749 | | | TA | 177409 | MKY | | | | | | | | | |
| SEQ ID | LRIKWMM | IKWM | LRMKWM | SEQ ID | MKW | M1 | — | | — | | | 13- | | |
| NO: | AMKYPITA | MAMK | MAMKYPI | NO: | MMA | I | | | | | | 15, | | |
| 137750 | | Y | TA | 177409 | MKY | | | | | | | 17 | | |
| SEQ ID | LRFKWSMF | FKWS | LRMKWM | SEQ ID | MKW | M1 | M4S | A6F | Y9V | | | 13-17 | | |
| NO: | MKVPITA | MFMK | MAMKYPI | NO: | MMA | F | | | | | | | | |
| 137751 | | V | TA | 177409 | MKY | | | | | | | | | |
| SEQ ID | LRMKFMM | FMMT | LRMKWM | SEQ ID | WMM | W1 | A4T | K6A | I9L | | | 15-17 | | |
| NO: | TMAYPLTA | MAYPL | MAMKYPI | NO: | AMK | F | | | | | | | | |
| 137752 | | | TA | 177409 | YPI | | | | | | | | | |
| SEQ ID | LRIKWMM | IKWM | LRMKWM | SEQ ID | MKW | M1 | — | | Y9M | | | 16-17 | | |
| NO: | AMKMPITA | MAMK | MAMKYPI | NO: | MMA | I | | | | | | | | |
| 137753 | | M | TA | 177409 | MKY | | | | | | | | | |
| SEQ ID | LRFKWAM | FKWA | LRMKWM | SEQ ID | MKW | M1 | M4A | — | Y9V | | | 17 | | |
| NO: | AMKVPITA | MAMK | MAMKYPI | NO: | MMA | F | | | | | | | | |
| 137754 | | V | TA | 177409 | MKY | | | | | | | | | |
| SEQ ID | ERELFRKT | FRKTR | ERELVRKT | SEQ ID | VRKT | V1 | — | — | V9L | | | 2-4, | | |
| NO: | RFLPL | FLPL | RFLPV | NO: | RFLP | F | | | | | | 6-17 | | |
| 137755 | | | | 176560 | V | | | | | | | | | |
| SEQ ID | LRIKWMM | IKWM | LRMKWM | SEQ ID | MKW | M. | — | A6S | — | | | 3-17 | | |
| NO: | SMKYPITA | MSMK | MAMKYPI | NO: | MMA | I | | | | | | | | |
| 137756 | | Y | TA | 177409 | MKY | | | | | | | | | |
| SEQ ID | LRMKIMM | IMMSM | LRMKWM | SEQ ID | WMM | W1 | A4S | — | 19Y | | | 4-17 | | |
| NO: | SMKYPYTA | KYPY | MAMKYPI | NO: | AMK | I | | | | | | | | |
| 137757 | | | TA | 177409 | YPI | | | | | | | | | |
| SEQ ID | ERELFRKT | FRKTR | ERELVRKT | SEQ ID | VRKT | V1 | — | — | V9I | | | 5, 8, | | |
| NO: | RFLPI | FLPI | RFLPV | NO: | RFLP | F | | | | | | 10-17 | | |
| 137758 | | | | 176560 | V | | | | | | | | | |
| SEQ ID | LRMKFMM | FMMS | LRMKWM | SEQ ID | WMM | W1 | A4S | K6A | I9L | | | 5-17 | | |
| NO: | SMAYPLTA | MAYPL | MAMKYPI | NO: | AMK | F | | | | | | | | |
| 137759 | | | TA | 177409 | YPI | | | | | | | | | |
| SEQ ID | LRFKWNM | FKWN | LRMKWM | SEQ ID | MKW | M1 | M4N | A6F | Y9V | | | 6-17 | | |
| NO: | FMKVPITA | MFMK | MAMKYPI | NO: | MMA | F | | | | | | | | |
| 137760 | | V | TA | 177409 | MKY | | | | | | | | | |
| SEQ ID | LRMKFMM | FMMS | LRMKWM | SEQ ID | WMM | W1 | A4S | K6A | 19A | | | 7-17 | | |
| NO: | SMAYPATA | MAYP | MAMKYPI | NO: | AMK | F | | | | | | | | |
| 137761 | | A | TA | 177409 | YPI | | | | | | | | | |
| SEQ ID | ERELFRKS | FRKSR | ERELVRKT | SEQ ID | VRKT | V1 | T4S | — | V9L | | | 9, 14- | | |
| NO: | RFLPL | FLPL | RFLPV | NO: | RFLP | F | | | | | | 17 | | |
| 137762 | | | | 176560 | V | | | | | | | | | |
| SEQ ID | LRMKIMM | IMMN | LRMKWM | SEQ ID | WMM | W1 | A4N | K6A | I9F | | | 9-17 | | |
| NO: | NMAYPFTA | MAYPF | MAMKYPI | NO: | AMK | I | | | | | | | | |
| 137763 | | | TA | 177409 | YPI | | | | | | | | | |
| SEQ ID | EECFINTPF | FINTPF | EECLINDP | SEQ ID | LINDP | LIF | D4T | W6F | L9V | | | | 1- | |
| NO: | VLVNAS | VLV | WVLLNAS | NO: | WVLL | | | | | | | | 30 | |
| 137764 | | | | 179544 | | | | | | | | | | |
| SEQ ID | DPWVLFN | FNATW | DPWVLLN | SEQ ID | LNAS | LIF | S4T | — | F9L | | | | 10- | |
| NO: | ATWFNSLL | FNSL | ASWFNSFL | NO: | WFNS | | | | | | | | 30 | |
| 137765 | | | | 179460 | F | | | | | | | | | |
| SEQ ID | SIFKVARPL | FKVAR | SIGKVCRT | SEQ ID | GKVC | G1 | C4A | T6P | A9S | | | | 11- | |
| NO: | LSKSVF | PLLS | LLAKSVF | NO: | RTLL | F | | | | | | | 30 | |
| 137766 | | | | 181417 | A | | | | | | | | | |
| SEQ ID | SIGKVIRTL | IRTLLS | SIGKVCRT | SEQ ID | CRTL | CII | — | A6S | — | | | | 12- | |
| NO: | LSKSVF | KSV | LLAKSVF | NO: | LAKS | | | | | | | | 30 | |
| 137767 | | | | 181417 | V | | | | | | | | | |
| SEQ ID | SIGKVFRT | FRTAL | SIGKVCRT | SEQ ID | CRTL | C1 | L4A | A6F | V9I | | | | 13- | |
| NO: | ALFKSIF | FKSI | LLAKSVF | NO: | LAKS | F | | | | | | | 30 | |
| 137768 | | | | 181417 | V | | | | | | | | | |
| SEQ ID | DPFVLANN | FVLAN | DPWVLLN | SEQ ID | WVLL | W1 | L4A | A6N | F9I | | | | 14 | |
| NO: | SWINSFL | NSWI | ASWFNSFL | NO: | NASW | F | | | | | | | | |
| 137769 | | | | 179460 | F | | | | | | | | | |
| SEQ ID | DPFVLINAS | FVLIN | DPWVLLN | SEQ ID | WVLL | W1 | L4I | — | F9V | | | | 15- | |
| NO: | WVNSFL | ASWV | ASWFNSFL | NO: | NASW | F | | | | | | | 30 | |
| 137770 | | | | 179460 | F | | | | | | | | | |
| SEQ ID | EECFINNPF | FINNPF | EECLINDP | SEQ ID | LINDP | LIF | D4N | W6F | — | | | | 15- | |
| NO: | VLLNAS | VLL | WVLLNAS | NO: | WVLL | | | | | | | | 30 | |
| 137771 | | | | 179544 | | | | | | | | | | |
| SEQ ID | SIFKVIRSL | FKVIRS | SIGKVCRT | SEQ ID | GKVC | G1 | C4I | T6S | A9T | | | | 16- | |
| NO: | LTKSVF | LLT | LLAKSVF | NO: | RTLL | F | | | | | | | 30 | |
| 137772 | | | | 181417 | A | | | | | | | | | |
| SEQ ID | EECFINDPI | FINDPI | EECLINDP | SEQ ID | LINDP | LIF | — | W6I | L9Y | | | | 17- | |
| NO: | VLYNAS | VLY | WVLLNAS | NO: | WVLL | | | | | | | | 30 | |
| 137773 | | | | 179544 | | | | | | | | | | |
| SEQ ID | DPWVLINA | INAFW | DPWVLLN | SEQ ID | LNAS | LII | S4F | F6D | F9V | | | | 18- | |
| NO: | FWDNSVL | DNSV | ASWFNSFL | NO: | WFNS | | | | | | | | 30 | |
| 137774 | | | | 179460 | F | | | | | | | | | |
| SEQ ID | SIGKVFRTS | FRTSLF | SIGKVCRT | SEQ ID | CRTL | C1 | L4S | A6F | V9L | | | | 19, | |
| NO: | LFKSLF | KSL | LLAKSVF | NO: | LAKS | F | | | | | | | 27- | |
| 137775 | | | | 181417 | V | | | | | | | | 30 | |
| SEQ ID | SIGKVFRT | FRTAL | SIGKVCRT | SEQ ID | CRTL | CI | L4A | A6F | — | | | | 2, | |
| NO: | ALFKSVF | FKSV | LLAKSVF | NO: | LAKS | F | | | | | | | 9- | |
| 137776 | | | | 181417 | V | | | | | | | | 30 | |
| SEQ ID | EECLINFPA | LINFPA | EECLINDP | SEQ ID | LINDP | — | D4F | W6A | L9Y | | | | 20- | |
| NO: | VLYNAS | VLY | WVLLNAS | NO: | WVLL | | | | | | | | 26, | |
| 137777 | | | | 179544 | | | | | | | | | 30 | |
| SEQ ID | DPWVLFN | FNAEW | DPWVLLN | SEQ ID | LNAS | LIF | S4E | — | F9L | | | | 21- | |
| NO: | AEWFNSLL | FNSL | ASWFNSFL | NO: | WFNS | | | | | | | | 30 | |
| 137778 | | | | 179460 | F | | | | | | | | | |
| SEQ ID | DPFVLMNS | FVLMN | DPWVLLN | SEQ ID | WVLL | W1 | L4M | A6S | F9L | | | | 22- | |
| NO: | SWLNSFL | SSWL | ASWFNSFL | NO: | NASW | F | | | | | | | 30 | |
| 137779 | | | | 179460 | F | | | | | | | | | |
| SEQ ID | SIYKVARS | YKVAR | SIGKVCRT | SEQ ID | GKVC | G1 | C4A | T6S | A9G | | | | 23- | |
| NO: | LLGKSVF | SLLG | LLAKSVF | NO: | RTLL | Y | | | | | | | 30 | |
| 137780 | | | | 181417 | A | | | | | | | | | |
| SEQ ID | DPWMLLS | MLLSA | DPWVLLN | SEQ ID | VLLN | V1 | N4S | S6R | N9R | | | | 24- | |
| NO: | ARWFRSFL | RWFR | ASWFNSFL | NO: | ASWF | M | | | | | | | 30 | |
| 137781 | | | | 179460 | N | | | | | | | | | |
| SEQ ID | SIGKVFRTT | FRTTL | SIGKVCRT | SEQ ID | CRTL | C1 | L4T | A6F | V9R | | | | 25- | |
| NO: | LFKSRF | FKSR | LLAKSVF | NO: | LAKS | F | | | | | | | 26, | |
| 137782 | | | | 181417 | V | | | | | | | | 29- | |
| | | | | | | | | | | | | | 30 | |
| SEQ ID | EECIINTPF | IINTPF | EECLINDP | SEQ ID | LINDP | L1I | D4T | W6F | L9V | | | | 26- | |
| NO: | VLVNAS | VLV | WVLLNAS | NO: | WVLL | | | | | | | | 30 | |
| 137783 | | | | 179544 | | | | | | | | | | |
| SEQ ID | EECLINMP | LINMP | EECLINDP | SEQ ID | LINDP | — | D4M | W6L | L9I | | | | 27- | |
| NO: | LVLINAS | LVLI | WVLLNAS | NO: | WVLL | | | | | | | | 29 | |
| 137784 | | | | 179544 | | | | | | | | | | |
| SEQ ID | DPFVLLNS | FVLLN | DPWVLLN | SEQ ID | WVLL | W1 | — | A6S | F9L | | | | 27- | |
| NO: | SWLNSFL | SSWL | ASWFNSFL | NO: | NASW | F | | | | | | | 30 | |
| 137785 | | | | 179460 | F | | | | | | | | | |
| SEQ ID | SIYKVLRN | YKVLR | SIGKVCRT | SEQ ID | GKVC | G1 | C4L | T6N | A9S | | | | 28- | |
| NO: | LLSKSVF | NLLS | LLAKSVF | NO: | RTLL | Y | | | | | | | 30 | |
| 137786 | | | | 181417 | A | | | | | | | | | |
| SEQ ID | DPFVLFNA | FVLFN | DPWVLLN | SEQ ID | WVLL | W1 | L4F | — | F9V | | | | 3- | |
| NO: | SWVNSFL | ASWV | ASWFNSFL | NO: | NASW | F | | | | | | | 30 | |
| 137787 | | | | 179460 | F | | | | | | | | | |
| SEQ ID | SIFKVMRT | FKVMR | SIGKVCRT | SEQ ID | GKVC | G1 | C4M | — | A9S | | | | 3- | |
| NO: | LLSKSVF | TLLS | LLAKSVF | NO: | RTLL | F | | | | | | | 30 | |
| 137788 | | | | 181417 | A | | | | | | | | | |
| SEQ ID | SLGKFCRT | LGKFC | SIGKVCRT | SEQ ID | IGKV | I1L | V4F | — | L9R | | | | 30 | |
| NO: | LRAKSVF | RTLR | LLAKSVF | NO: | CRTL | | | | | | | | | |
| 137789 | | | | 181417 | L | | | | | | | | | |
| SEQ ID | EECIINDPL | IINDPL | EECLINDP | SEQ ID | LINDP | LII | — | W6L | L9F | | | | 4- | |
| NO: | VLFNAS | VLF | WVLLNAS | NO: | WVLL | | | | | | | | 30 | |
| 137790 | | | | 179544 | | | | | | | | | | |
| SEQ ID | SIGKVIRTL | IRTLLA | SIGKVCRT | SEQ ID | CRTL | C1I | — | — | V9F | | | | 5- | |
| NO: | LAKSFF | KSF | LLAKSVF | NO: | LAKS | | | | | | | | 30 | |
| 137791 | | | | 181417 | V | | | | | | | | | |
| SEQ ID | SIGKVFRT | FRTHL | SIGKVCRT | SEQ ID | CRTL | C1 | L4H | A6F | V9L | | | | 6-8, | |
| NO: | HLFKSLF | FKSL | LLAKSVF | NO: | LAKS | F | | | | | | | 20- | |
| 137792 | | | | 181417 | V | | | | | | | | 30 | |
| SEQ ID | SIGKFCRTL | IGKFC | SIGKVCRT | SEQ ID | IGKV | — | V4F | — | L9R | | | | 7- | |
| NO: | RAKSVF | RTLR | LLAKSVF | NO: | CRTL | | | | | | | | 30 | |
| 137793 | | | | 181417 | L | | | | | | | | | |
| SEQ ID | SIGKNCRA | NCRAL | SIGKVCRT | SEQ ID | VCRT | VI | T4A | L6I | S9A | | | | 8- | |
| NO: | LIAKAVF | IAKA | LLAKSVF | NO: | LLAK | N | | | | | | | 30 | |
| 137794 | | | | 181417 | S | | | | | | | | | |
| SEQ ID | DPFVLINRS | FVLIN | DPWVLLN | SEQ ID | WVLL | W1 | L4I | A6R | F9D | | | | 9- | |
| NO: | WDNSFL | RSWD | ASWFNSFL | NO: | NASW | F | | | | | | | 30 | |
| 137795 | | | | 179460 | F | | | | | | | | | |
| SEQ ID | EFLKARSIL | FLKAR | EWLKTRPI | SEQ ID | WLKT | W1 | T4A | P6S | S9A | | 1, | | | |
| NO: | APLTKG | SILA | LSPLTKG | NO: | RPILS | F | | | | | 8- | | | |
| 137796 | | | | 175205 | | | | | | | 30 | | | |
| SEQ ID | EWFKTIPR | FKTIPR | EWLKTRPI | SEQ ID | LKTR | LIF | R4I | I6R | P9S | | 10 | | | |
| NO: | LSSLTKG | LSS | LSPLTKG | NO: | PILSP | | | | | | 14- | | | |
| 137797 | | | | 175205 | | | | | | | 30 | | | |
| SEQ ID | EWFKTLPR | FKTLP | EWLKTRPI | SEQ ID | LKTR | LIF | R4L | I6R | P9A | | 11- | | | |
| NO: | LSALTKG | RLSA | LSPLTKG | NO: | PIL SP | | | | | | 30 | | | |
| 137798 | | | | 175205 | | | | | | | | | | |
| SEQ ID | EWLKIRPF | IRPFLA | EWLKTRPI | SEQ ID | TRPIL | T1I | I4F | S6A | T9A | | 11- | | | |
| NO: | LAPLAKG | PLA | LSPLTKG | NO: | SPLT | | | | | | 30 | | | |
| 137799 | | | | 175205 | | | | | | | | | | |
| SEQ ID | EYLKMRVI | YLKM | EWLKTRPI | SEQ ID | WLKT | W1 | T4M | P6V | S9E | | 11- | | | |
| NO: | LEPLTKG | RVILE | LSPLTKG | NO: | RPILS | Y | | | | | 30 | | | |
| 137800 | | | | 175205 | | | | | | | | | | |
| SEQ ID | EWLKIRPA | IRPALI | EWLKTRPI | SEQ ID | TRPIL | T1I | I4A | S6I | T9S | | 12 | | | |
| NO: | LIPLSKG | PLS | LSPLTKG | NO: | SPLT | | | | | | 29 | | | |
| 137801 | | | | 175205 | | | | | | | | | | |
| SEQ ID | EWLKIRPA | IRPAL | EWLKTRPI | SEQ ID | TRPIL | T1I | I4A | S6V | T9S | | 13- | | | |
| NO: | LVPLSKG | VPLS | LSPLTKG | NO: | SPLT | | | | | | 15 | | | |
| 137802 | | | | 175205 | | | | | | | 30 | | | |
| SEQ ID | EFLKMRTI | FLKMR | EWLKTRPI | SEQ ID | WLKT | W1 | T4M | P6T | S9V | | 13- | | | |
| NO: | LVPLTKG | TILV | LSPLTKG | NO: | RPILS | F | | | | | 30 | | | |
| 137803 | | | | 175205 | | | | | | | | | | |
| SEQ ID | EFLKARTIL | FLKAR | EWLKTRPI | SEQ ID | WLKT | W1 | T4A | P6T | S9A | | 15- | | | |
| NO: | APLTKG | TILA | LSPLTKG | NO: | RPILS | F | | | | | 30 | | | |
| 137804 | | | | 175205 | | | | | | | | | | |
| SEQ ID | EWLKIRPA | IRPALI | EWLKTRPI | SEQ ID | TRPIL | T1I | I4A | S6I | T9A | | 16- | | | |
| NO: | LIPLAKG | PLA | LSPLTKG | NO: | SPLT | | | | | | 30 | | | |
| 137805 | | | | 175205 | | | | | | | | | | |
| SEQ ID | EFLKMRTI | FLKMR | EWLKTRPI | SEQ ID | WLKT | W1 | T4M | P6T | S9Q | | 17- | | | |
| NO: | LQPLTKG | TILQ | LSPLTKG | NO: | RPILS | F | | | | | 19, | | | |
| 137806 | | | | 175205 | | | | | | | 24 | | | |
| SEQ ID | EWLKVRP | VRPAL | EWLKTRPI | SEQ ID | TRPIL | TI | I4A | S6I | T9A | | 18- | | | |
| NO: | ALIPLAKG | IPLA | LSPLTKG | NO: | SPLT | V | | | | | 30 | | | |
| 137807 | | | | 175205 | | | | | | | | | | |
| SEQ ID | EYLKARSI | YLKAR | EWLKTRPI | SEQ ID | WLKT | W1 | T4A | P6S | — | | 19- | | | |
| NO: | LSPLTKG | SILS | LSPLTKG | NO: | RPILS | Y | | | | | 30 | | | |
| 137808 | | | | 175205 | | | | | | | | | | |
| SEQ ID | EYLKARAI | YLKAR | EWLKTRPI | SEQ ID | WLKT | W1 | T4A | P6A | — | | 2, | | | |
| NO: | LSPLTKG | AILS | LSPLTKG | NO: | RPILS | Y | | | | | 5- | | | |
| 137809 | | | | 175205 | | | | | | | 30 | | | |
| SEQ ID | EFLKVRTIL | FLKVR | EWLKTRPI | SEQ ID | WLKT | W1 | T4V | P6T | S9A | | 2- | | | |
| NO: | APLTKG | TILA | LSPLTKG | NO: | RPILS | F | | | | | 30 | | | |
| 137810 | | | | 175205 | | | | | | | | | | |
| SEQ ID | EFLKIRSIL | FLKIRS | EWLKTRPI | SEQ ID | WLKT | W1 | T4I | P6S | S9G | | 20- | | | |
| NO: | GPLTKG | ILG | LSPLTKG | NO: | RPILS | F | | | | | 30 | | | |
| 137811 | | | | 175205 | | | | | | | | | | |
| SEQ ID | EWIKTMPR | IKTMP | EWLKTRPI | SEQ ID | LKTR | LII | R4M | I6R | P9V | | 20- | | | |
| NO: | LSVLTKG | RLSV | LSPLTKG | NO: | PILSP | | | | | | 30 | | | |
| 137812 | | | | 175205 | | | | | | | | | | |
| SEQ ID | EWLKFRP | FRPML | EWLKTRPI | SEQ ID | TRPIL | TIF | I4M | S6A | T9L | | 21- | | | |
| NO: | MLAPLLKG | APLL | LSPLTKG | NO: | SPLT | | | | | | 30 | | | |
| 137813 | | | | 175205 | | | | | | | | | | |
| SEQ ID | EFLKLRSIL | FLKLR | EWLKTRPI | SEQ ID | WLKT | W1 | T4L | P6S | S9A | | 22- | | | |
| NO: | APLTKG | SILA | LSPLTKG | NO: | RPILS | F | | | | | 23 | | | |
| 137814 | | | | 175205 | | | | | | | 25- | | | |
| | | | | | | | | | | | 30 | | | |
| SEQ ID | EWLKIRPA | IRPAL | EWLKTRPI | SEQ ID | TRPIL | T1I | I4A | S6V | T9A | | 23- | | | |
| NO: | LVPLAKG | VPLA | LSPLTKG | NO: | SPLT | | | | | | 30 | | | |
| 137815 | | | | 175205 | | | | | | | | | | |
| SEQ ID | EWFKTIPK | FKTIPK | EWLKTRPI | SEQ ID | LKTR | LIF | R4I | I6K | P9V | | 24, | | | |
| NO: | LSVLTKG | LSV | LSPLTKG | NO: | PILSP | | | | | | 30 | | | |
| 137816 | | | | 175205 | | | | | | | | | | |
| SEQ ID | EFLKMRSI | FLKMR | EWLKTRPI | SEQ ID | WLKT | W1 | T4M | P6S | S9V | | 25- | | | |
| NO: | LVPLTKG | SILV | LSPLTKG | NO: | RPILS | F | | | | | 30 | | | |
| 137817 | | | | 175205 | | | | | | | | | | |
| SEQ ID | EWFKTIPR | FKTIPR | EWLKTRPI | SEQ ID | LKTR | LIF | R4I | 16R | P9V | | 25- | | | |
| NO: | LSVLTKG | LSV | LSPLTKG | NO: | PILSP | | | | | | 30 | | | |
| 137818 | | | | 175205 | | | | | | | | | | |
| SEQ ID | EWLKIRPA | IRPALS | EWLKTRPI | SEQ ID | TRPIL | T1I | I4A | — | T9I | | 26, | | | |
| NO: | LSPLIKG | PLI | LSPLTKG | NO: | SPLT | | | | | | 28- | | | |
| 137819 | | | | 175205 | | | | | | | 29 | | | |
| SEQ ID | EWLKIRPM | IRPML | EWLKTRPI | SEQ ID | TRPIL | T1I | I4M | S6A | T9V | | 27, | | | |
| NO: | LAPLVKG | APLV | LSPLTKG | NO: | SPLT | | | | | | 30 | | | |
| 137820 | | | | 175205 | | | | | | | | | | |
| SEQ ID | EFLKMRTI | FLKMR | EWLKTRPI | SEQ ID | WLKT | W1 | T4M | P6T | S9G | | 27- | | | |
| NO: | LGPLTKG | TILG | LSPLTKG | NO: | RPILS | F | | | | | 30 | | | |
| 137821 | | | | 175205 | | | | | | | | | | |
| SEQ ID | EWIKTIPSL | IKTIPS | EWLKTRPI | SEQ ID | LKTR | LII | R4I | I6S | P9A | | 28- | | | |
| NO: | SALTKG | LSA | LSPLTKG | NO: | PILSP | | | | | | 30 | | | |
| 137822 | | | | 175205 | | | | | | | | | | |
| SEQ ID | EWIKTIPRL | IKTIPR | EWLKTRPI | SEQ ID | LKTR | L1I | R4I | I6R | P9A | | 3- | | | |
| NO: | SALTKG | LSA | LSPLTKG | NO: | PILSP | | | | | | 30 | | | |
| 137823 | | | | 175205 | | | | | | | | | | |
| SEQ ID | EILKARAIL | ILKAR | EWLKTRPI | SEQ ID | WLKT | W1 | T4A | P6A | S9V | | 3-4 | | | |
| NO: | VPLTKG | AILV | LSPLTKG | NO: | RPILS | I | | | | | | | | |
| 137824 | | | | 175205 | | | | | | | | | | |
| SEQ ID | EWLKIRPM | IRPML | EWLKTRPI | SEQ ID | TRPIL | T1I | I4M | — | T9A | | 4- | | | |
| NO: | LSPLAKG | SPLA | LSPLTKG | NO: | SPLT | | | | | | 30 | | | |
| 137825 | | | | 175205 | | | | | | | | | | |
| SEQ ID | EWLKIRPA | IRPAL | EWLKTRPI | SEQ ID | TRPIL | T1I | I4A | S6A | T9A | | 5- | | | |
| NO: | LAPLAKG | APLA | LSPLTKG | NO: | SPLT | | | | | | 30 | | | |
| 137826 | | | | 175205 | | | | | | | | | | |
| SEQ ID | EWIKTFPA | IKTFPA | EWLKTRPI | SEQ ID | LKTR | LII | R4F | I6A | P9L | | 6, | | | |
| NO: | LSLLTKG | LSL | LSPLTKG | NO: | PILSP | | | | | | 8- | | | |
| 137827 | | | | 175205 | | | | | | | 30 | | | |
| SEQ ID | EWIKTIPFL | IKTIPF | EWLKTRPI | SEQ ID | LKTR | LII | R4I | I6F | P9R | | 7 | | | |
| NO: | | | | NO: | | | | | | | | | | |
| 137828 | SRLTKG | LSR | LSPLTKG | 175205 | PILSP | | | | | | | | | |
| SEQ ID | EFLKIRKIL | FLKIR | EWLKTRPI | SEQ ID | WLKT | W1 | T4I | P6K | — | | 7- | | | |
| NO: | SPLTKG | KILS | LSPLTKG | NO: | RPILS | F | | | | | 30 | | | |
| 137829 | | | | 175205 | | | | | | | | | | |
| SEQ ID | EWLKFRPA | FRPAL | EWLKTRPI | SEQ ID | TRPIL | TIF | I4A | — | T9A | | 9- | | | |
| NO: | LSPLAKG | SPLA | LSPLTKG | NO: | SPLT | | | | | | 10 | | | |
| 137830 | | | | 175205 | | | | | | | 16- | | | |
| | | | | | | | | | | | 30 | | | |

mRNA and DNA Compositions

[0445] In some embodiments, composition peptides are encoded as mRNA or DNA molecules and are administered for expression in vivo as is known in the art. One example of the delivery of compositions by mRNA is found in Kranz et al. (2016), incorporated herein by reference. In some embodiments, composition peptides are encoded in more than one mRNA or DNA molecule as is found in Sahin et. al. (2017). In one embodiment, a construct comprises 20 peptides, including a ten-peptide MHC class I combined influenza composition (target: influenza nucleoprotein) and a ten-peptide MHC class II combined influenza composition (target: influenza nucleoprotein), as optimized by the procedure described herein. Peptides are prepended with a secretion signal sequence at the N-terminus and followed by an MHC class I trafficking signal (MITD) (See Kreiter et al., 2008; Sahin et al., 2017; U.S. Pat. No. 8,637,006, incorporated by reference in their entireties herein). The MITD has been shown to route antigens to pathways for HLA class I and class II presentation (Kreiter et al., 2008). Here we combine all peptides of each MHC class into a single construct using non-immunogenic glycine/serine linkers from Sahin et al. (2017), though it is also plausible to construct individual constructs containing single peptides with the same secretion and MITD signals as demonstrated by Kreiter et al. (2008).

[0446] In some embodiments, the amino acid sequence encoded by the mRNA composition comprises SEQ ID NO: 137514. Underlined amino acids correspond to the signal peptide (or leader) sequence. Bolded amino acids correspond to MHC class I (8-11 amino acids in length; 10 peptides) and MHC class II (13-25 amino acids in length; 10 peptides) peptide sequences. Italicized amino acids correspond to the trafficking signal. In alternate embodiments, any number and variation of peptide sequences disclosed herein can be included in an mRNA composition comprising the signal peptide sequence and the trafficking signal as shown in SEQ ID NO: 137514 below.

(SEQ ID NO: 137514)
MRVTAPRTLILLLSGALALTETWAGSGGSGGGGSGGCALMQGSTM
GGSGGGGSGGCALMQGSTYGGSGGGGSGGGMDPRMCSVGGSGGGG
SGGILKGKFQTVGGSGGGGSGGLPRRSGAAVGGSGGGGSGGSFMQ
GSTLPRGGSGGGGSGGSSLPRRSGKGGSGGGGSGGSTMQGSTLPK
GGSGGGGSGGSVMQGSTLPKGGSGGGGSGGYERMCNILGGSGGGG
SGGDPRMCSLMMGSALIRRAGAAGGSGGGGSGGDPRMFSLMQSST
VPRGGSGGGGSGGMCSIMQISSLPVRSGGGSGGGGSGGMDPRMCS
LFQGTTFPRVSGAGGSGGGGSGGMQGSTLFRRGGAAGAGGSGGGG
SGGMQGSTLIRRGGAAGAGGSGGGGSGGPRMISLFQASTLPRRGG
SGGGGSGGRMCSLMIGSALARRAGAAGAGGSGGGGSGGYERICNI
LRGKAQTAGGSGGGGSGGYERICNMLRGKAQTAGGSLGGGGSGIV
GIVAGLAVLAVVVIGAVVATVMCRRKSSGGKGGSYSQAASSDSAQ
GSDVSLTA.

[0447] In some embodiments, the composition is an mRNA composition comprising a nucleic acids sequence encoding the amino acid sequence consisting of SEQ ID NO: 137514. In some embodiments, the nucleic acid sequence of the mRNA composition encodes for an amino acid sequence at least about 80, 81, 82, 83, 84, 85, 86, 87, 88, 89, 90, 91, 92, 93, 94, 95, 96, 97, 98 or 99% identical to SEQ ID NO: 137514.

[0448] In some embodiments, the composition is a DNA composition comprising a nucleic acids sequence encoding the amino acid sequence consisting of SEQ ID NO: 137514. In some embodiments, the nucleic acid sequence of the DNA composition encodes for an amino acid sequence at least about 80, 81, 82, 83, 84, 85, 86, 87, 88, 89, 90, 91, 92, 93, 94, 95, 96, 97, 98 or 99% identical to SEQ ID NO: 137514.

[0449] In another embodiment, a construct comprises 20 peptides, including a ten-peptide MHC class I combined influenza composition (target: influenza RNA-directed RNA polymerase catalytic subunit) and a ten-peptide MHC class II combined influenza composition (target: influenza RNA-directed RNA polymerase catalytic subunit), as optimized by the procedure described herein. In some embodiments, the amino acid sequence encoded by the mRNA composition comprises SEQ ID NO: 283766. Underlined amino acids correspond to the signal peptide (or leader) sequence. Bolded amino acids correspond to MHC class 1(8-11 amino acids in length; 10 peptides) and MHC class 11(13-25 amino acids in length; 10 peptides) peptide sequences. Italicized amino acids correspond to the trafficking signal. In alternate embodiments, any number and variation of peptide sequences disclosed herein can be included in an mRNA composition comprising the signal peptide sequence and the trafficking signal as shown in SEQ ID NO: 283766 below.

(SEQ ID NO: 283766)
MRVTAPRTLILLLSGALALTETWAGSGGSGGGGSGGFAMELPSFG
LGGSGGGGSGGFPYTGDPPIGGSGGGGSGGMAMGMFNMFGGSGGG
GSGGMMMGMFNMLGGSGGGGSGGMRNMLSTVYGGSGGGGSGGMTI
GVTVIRGGSGGGGSGGNMISTTFPYGGSGGGGSGGNVISTTFPYG
GSGGGGSGGRMLTLNTMTKGGSGGGGSGGTTFFYRYGWGGSGGGG
SGGGMMMGMFNMMSSVLHVSGGSGGGGSGGGMMMGMFNMNSNVLV
VSGGSGGGGSGGGMMMGMINMMSSVLRVSGGSGGGGSGGGNEFKA
HLFNVIRKMMTNSQGGSGGGGSGGGNEFKASLFNVVRKMMTNSQG
GSGGGGSGGGNEKKAKIANIVRKMATNSQGGSGGGGSGGSPGFMM
HMFNMLSTVGGSGGGGSGGSPGFMMSMYNMLSTVGGSGGGGSGGS
PGMIMGYFPMLRTVGGSGGGGSGGSPGRMMFMANMFSTVGGSLGG
GGSGIVGIVAGLAVLAVVVIGAVVATVMCRRKSSGGKGGSYSQAA
SSDSAQGSDVSLTA.

[0450] In some embodiments, the composition is an mRNA composition comprising a nucleic acids sequence encoding the amino acid sequence consisting of SEQ ID NO: 283766. In some embodiments, the nucleic acid sequence of the mRNA composition encodes for an amino acid sequence at least about 80, 81, 82, 83, 84, 85, 86, 87, 88, 89, 90, 91, 92, 93, 94, 95, 96, 97, 98 or 99% identical to SEQ ID NO: 283766.

[0451] In some embodiments, the composition is a DNA composition comprising a nucleic acids sequence encoding the amino acid sequence consisting of SEQ ID NO: 283766. In some embodiments, the nucleic acid sequence of the DNA composition encodes for an amino acid sequence at least about 80, 81, 82, 83, 84, 85, 86, 87, 88, 89, 90, 91, 92, 93, 94, 95, 96, 97, 98 or 99% identical to SEQ ID NO: 283766.

[0452] In some embodiments, one or more MHC class I and/or MHC class II peptides disclosed herein (SEQ ID NO: 1 to 283766) can be encoded in one or more mRNA or DNA molecules and administered for expression in vivo. In some embodiments, between about 2 and about 40 peptide sequences are encoded in one or more mRNA constructs. In some embodiments, between about 2 and about 40 peptide sequences are encoded in one or more DNA constructs (i.e., nucleic acids encoding the amino acids sequences comprising on or more of SEQ ID NOs: 1 to 283766). In some embodiments, the amino acid sequence of the mRNA composition or the nucleic acid sequence of the DNA composition encodes for an amino acid sequence at least about 80, 81, 82, 83, 84, 85, 86, 87, 88, 89, 90, 91, 92, 93, 94, 95, 96, 97, 98 or 99% identical to any of SEQ ID NOs: 1 to 283766.

[0453] In some embodiments, mRNA encoded composition peptides are used as the payload of a self-amplifying RNA vaccine. In one embodiment, the mRNA sequence encoding the composition peptides replaces one or more structural proteins of an infectious alphavirus particle as described in Geall et al. (2012) that is incorporated herein by reference. As is described by Geall et al. (2012), self-amplifying RNA composition can increase the efficiency of antigen production in vivo.

[0454] In some embodiments, the composition comprising the nucleic acids sequence described herein is an immunogenic composition. In some embodiments, the composition is a vaccine.

### Non-Limiting Embodiments of the Subject Matter

[0455] In one aspect, the invention provides for nucleic acid sequences encoding one or more amino acid sequences selected from the group consisting of SEQ ID NOs: 1 to 80.

[0456] In some embodiments, the nucleic acid sequences encode two or more amino acid sequences selected from the group consisting of SEQ ID NOs: 1 to 80.

[0457] In another aspect, the invention provides for a composition comprising nucleic acid sequences encoding one or more amino acid sequences selected from the group consisting of SEQ ID NOs: 1 to 80.

[0458] In some embodiments, the composition is administered to a subject. In some embodiments, the composition comprises nucleic acid sequences encoding two or more amino acid sequences selected from the group consisting of SEQ ID NOs: 1 to 80. In some embodiments, the nucleic acid sequences are administered in a construct for expression in vivo. In some embodiments, the in vivo administration of the nucleic acid sequences produce one or more peptides that is displayed by an HLA class I molecule. In some embodiments, the one or more peptides is a modified or unmodified fragment of the influenza nucleoprotein protein. In some embodiments, the composition is administered in an effective amount to a subject to prevent influenza. In some embodiments, the composition is administered in an effective amount to a subject to treat influenza.

[0459] In some embodiments, the composition comprises nucleic acid sequences encoding at least three amino acid sequences selected from the group consisting of SEQ ID NOs: 1 to 80.

[0460] In another aspect, the invention provides for a peptide composition comprising one or more peptides, in which each peptide comprises an amino acid sequence selected from the group consisting of SEQ ID NOs: 1 to 80.

[0461] In some embodiments, the peptide composition comprises two or more peptides, in which each peptide comprises an amino acid sequence selected from the group consisting of SEQ ID NOs: 1 to 80. In some embodiments, the composition is administered to a subject.

[0462] In some embodiments, the peptide composition comprises three or more peptides, in which each peptide comprises an amino acid sequence selected from the group consisting of SEQ ID NOs: 1 to 80.

[0463] In another aspect, the invention provides for a composition comprising nucleic acid sequences encoding one or more amino acid sequences selected from the group consisting of SEQ ID NOs: 1 to 49.

[0464] In some embodiments, the composition is administered to a subject. In some embodiments, the composition comprises nucleic acid sequences encoding two or more amino acid sequences selected from the group consisting of SEQ ID NOs: 1 to 49. In some embodiments, the nucleic acid sequences are administered in a construct for expression in vivo. In some embodiments, the in vivo administration of the nucleic acid sequences produce one or more peptides that is displayed by an HLA class I molecule. In some embodiments, the one or more peptides is a modified or unmodified fragment of the influenza nucleoprotein protein. In some embodiments, the composition is administered in an effective amount to a subject to prevent influenza. In some embodiments, the composition is administered in an effective amount to a subject to treat influenza.

[0465] In some embodiments, the composition comprises nucleic acid sequences encoding at least three amino acid sequences selected from the group consisting of SEQ ID NOs: 1 to 49.

[0466] In another aspect, the invention provides for a method of treating or preventing influenza by administering to a subject a composition comprising nucleic acid sequences encoding one or more amino acid sequences selected from the group consisting of SEQ ID NOs: 1 to 49.

[0467] In some embodiments, the composition comprises nucleic acid sequences encoding two or more amino acid sequences selected from the group consisting of SEQ ID NOs: 1 to 49.

[0468] In another aspect, the invention provides for a peptide composition comprising one or more peptides, in which each peptide comprises an amino acid sequence selected from the group consisting of SEQ ID NOs: 1 to 49.

[0469] In some embodiments, the peptide composition comprises two or more peptides, in which each peptide comprises an amino acid sequence selected from the group consisting of SEQ ID NOs: 1 to 49. In some embodiments a peptide in the peptide composition is displayed by an HLA class I molecule. In some embodiments, a peptide in the peptide composition is a modified or unmodified fragment of the influenza nucleoprotein protein. In some embodiments, the peptide composition is administered in an effective amount to a subject to prevent influenza. In some embodiments, the peptide composition is administered in an effective amount to a subject to treat influenza.

[0470] In some embodiments, the peptide composition comprises three or more peptides, in which each peptide comprises an amino acid sequence selected from the group consisting of SEQ ID NOs: 1 to 49.

[0471] In another aspect, the invention provides for a method of treating or preventing influenza in a subject comprising administering to the subject a peptide composition comprising one or more peptides, in which each peptide comprises an amino acid sequence selected from the group consisting of SEQ ID NOs: 1 to 49.

[0472] In some embodiments, the peptide composition comprises two or more peptides, in which each peptide comprises an amino acid sequence selected from the group consisting of SEQ ID NOs: 1 to 49.

[0473] In another aspect, the invention provides for nucleic acid sequences encoding one or more amino acid sequences selected from the group consisting of SEQ ID NOs: 81 to 143.

[0474] In some embodiments, the nucleic acid sequences encode two or more amino acid sequences selected from the group consisting of SEQ ID NOs: 81 to 143.

[0475] In another aspect, the invention provides for a composition comprising nucleic acid sequences encoding one or more amino acid sequences selected from the group consisting of SEQ ID NOs: 81 to 143.

[0476] In some embodiments, the composition comprises nucleic acid sequences encoding two or more amino acid sequences selected from the group consisting of SEQ ID NOs: 81 to 143. In some embodiments, the nucleic acid sequences are administered in a construct for expression in vivo. In some embodiments, the in vivo administration of the nucleic acid sequences produce one or more peptides that is displayed by an HLA class II molecule. In some embodiments, the one or more peptides is a modified or unmodified fragment of the influenza nucleoprotein protein. In some embodiments, the composition is administered in an effective amount to a subject to prevent influenza. In some embodiments, the composition is administered in an effective amount to a subject to treat influenza. In some embodiments, the composition comprises nucleic acid sequences encoding at least three amino acid sequences selected from the group consisting of SEQ ID NOs: 81 to 143.

[0477] In another aspect, the invention provides for a method of treating or preventing influenza by administering to a subject a composition comprising nucleic acid sequences encoding one or more amino acid sequences selected from the group consisting of SEQ ID NOs: 81 to 143.

[0478] In some embodiments, the composition comprises nucleic acid sequences encoding two or more amino acid sequences selected from the group consisting of SEQ ID NOs: 81 to 143.

[0479] In another aspect, the invention provides for a peptide composition comprising one or more peptides, in which each peptide comprises an amino acid sequence selected from the group consisting of SEQ ID NOs: 81 to 143.

[0480] In some embodiments, the peptide composition comprises two or more peptides, in which each peptide comprises an amino acid sequence selected from the group consisting of SEQ ID NOs: 81 to 143. In some embodiments a peptide in the peptide composition is displayed by an HLA class II molecule. In some embodiments, a peptide in the peptide composition is a modified or unmodified fragment of the influenza nucleoprotein protein. In some embodiments, the peptide composition is administered in an effective amount to a subject to prevent influenza. In some embodiments, the peptide composition is administered in an effective amount to a subject to treat influenza.

[0481] In another aspect, the invention provides for a method of treating or preventing influenza in a subject comprising administering to the subject a peptide composition comprising one or more peptides, in which each peptide comprises an amino acid sequence selected from the group consisting of SEQ ID NOs: 81 to 143.

[0482] In some embodiments, the peptide composition comprises two or more peptides, in which each peptide comprises an amino acid sequence selected from the group consisting of SEQ ID NOs: 81 to 143.

[0483] In one aspect, the invention provides for nucleic acid sequences encoding one or more amino acid sequences selected from the group consisting of SEQ ID NOs: 137515 to 137681.

[0484] In some embodiments, the nucleic acid sequences encode two or more amino acid sequences selected from the group consisting of SEQ ID NOs: 137515 to 137681.

[0485] In another aspect, the invention provides for a composition comprising nucleic acid sequences encoding one or more amino acid sequences selected from the group consisting of SEQ ID NOs: 137515 to 137681.

[0486] In some embodiments, the composition is administered to a subject. In some embodiments, the composition comprises nucleic acid sequences encoding two or more amino acid sequences selected from the group consisting of SEQ ID NOs: 137515 to 137681. In some embodiments, the nucleic acid sequences are administered in a construct for expression in vivo. In some embodiments, the in vivo administration of the nucleic acid sequences produce one or more peptides that is displayed by an HLA class I molecule. In some embodiments, the nucleic acid sequences are configured to allow expression of at least two peptides encoded by the nucleic acid sequences that are each displayed by a peptide specific set of HLA class I alleles, wherein all of the peptide specific sets of HLA class I alleles are not identical. In some embodiments, each of the one or more peptides is a modified or unmodified fragment of a protein selected from the group consisting of RNA-directed RNA polymerase catalytic subunit, Matrix protein 1, Polymerase basic protein 2, Polymerase acidic protein, and Protein PA-X. In some embodiments, the composition is administered in an effective amount to a subject to prevent influenza. In some embodiments, the composition is administered in an effective amount to a subject to treat influenza.

[0487] In some embodiments, the composition comprises nucleic acid sequences encoding at least three amino acid sequences selected from the group consisting of SEQ ID NOs: 137515 to 137681.

[0488] In another aspect, the invention provides for a peptide composition comprising one or more peptides, in which each peptide comprises an amino acid sequence selected from the group consisting of SEQ ID NOs: 137515 to 137681.

[0489] In some embodiments, the peptide composition comprises two or more peptides, in which each peptide comprises an amino acid sequence selected from the group consisting of SEQ ID NOs: 137515 to 137681. In some embodiments, the composition is administered to a subject.

[0490] In some embodiments, the peptide composition comprises three or more peptides, in which each peptide comprises an amino acid sequence selected from the group consisting of SEQ ID NOs: 137515 to 137681.

[0491] In another aspect, the invention provides for a composition comprising nucleic acid sequences encoding one or more amino acid sequences selected from the group consisting of SEQ ID NOs: 137515 to 137675.

[0492] In some embodiments, the composition is administered to a subject. In some embodiments, the composition comprises nucleic acid sequences encoding two or more amino acid sequences selected from the group consisting of SEQ ID NOs: 137515 to 137675. In some embodiments, the nucleic acid sequences are administered in a construct for expression in vivo. In some embodiments, the in vivo administration of the nucleic acid sequences produce one or more peptides that is displayed by an HLA class I molecule. In some embodiments, the nucleic acid sequences are configured to allow expression of at least two peptides encoded by the nucleic acid sequences that are each displayed by a peptide specific set of HLA class I alleles, wherein all of the peptide specific sets of HLA class I alleles are not identical. In some embodiments, each of the one or more peptides is a modified or unmodified fragment of a protein selected from the group consisting of RNA-directed RNA polymerase catalytic subunit, Matrix protein 1, Polymerase basic protein 2, Polymerase acidic protein, and Protein PA-X. In some embodiments, the composition is administered in an effective amount to a subject to prevent influenza. In some embodiments, the composition is administered in an effective amount to a subject to treat influenza.

[0493] In some embodiments, the composition comprises nucleic acid sequences encoding at least three amino acid sequences selected from the group consisting of SEQ ID NOs: 137515 to 137675.

[0494] In another aspect, the invention provides for a method of treating or preventing influenza by administering to a subject a composition comprising nucleic acid sequences encoding one or more amino acid sequences selected from the group consisting of SEQ ID NOs: 137515 to 137675.

[0495] In some embodiments, the composition comprises nucleic acid sequences encoding two or more amino acid sequences selected from the group consisting of SEQ ID NOs: 137515 to 137675.

[0496] In another aspect, the invention provides for a peptide composition comprising one or more peptides, in which each peptide comprises an amino acid sequence selected from the group consisting of SEQ ID NOs: 137515 to 137675.

[0497] In some embodiments, the peptide composition comprises two or more peptides, in which each peptide comprises an amino acid sequence selected from the group consisting of SEQ ID NOs: 137515 to 137675. In some embodiments a peptide in the peptide composition is displayed by an HLA class I molecule. In some embodiments, the at least two peptides are each capable of being displayed by a peptide specific set of HLA class I alleles, wherein all of the peptide specific sets of HLA class I alleles are not identical. In some embodiments, a peptide in the peptide composition is a modified or unmodified fragment of a protein selected from the group consisting of RNA-directed RNA polymerase catalytic subunit, Matrix protein 1, Polymerase basic protein 2, Polymerase acidic protein, and Protein PA-X. In some embodiments, the peptide composition is administered in an effective amount to a subject to prevent influenza. In some embodiments, the peptide composition is administered in an effective amount to a subject to treat influenza.

[0498] In some embodiments, the peptide composition comprises three or more peptides, in which each peptide comprises an amino acid sequence selected from the group consisting of SEQ ID NOs: 137515 to 137675.

[0499] In another aspect, the invention provides for a method of treating or preventing influenza in a subject comprising administering to the subject a peptide composition comprising one or more peptides, in which each peptide comprises an amino acid sequence selected from the group consisting of SEQ ID NOs: 137515 to 137675.

[0500] In some embodiments, the peptide composition comprises two or more peptides, in which each peptide comprises an amino acid sequence selected from the group consisting of SEQ ID NOs: 137515 to 137675.

[0501] In another aspect, the invention provides for nucleic acid sequences encoding one or more amino acid sequences selected from the group consisting of SEQ ID NOs: 137682 to 137830.

[0502] In some embodiments, the nucleic acid sequences encode two or more amino acid sequences selected from the group consisting of SEQ ID NOs: 137682 to 137830.

[0503] In another aspect, the invention provides for a composition comprising nucleic acid sequences encoding one or more amino acid sequences selected from the group consisting of SEQ ID NOs: 137682 to 137830.

[0504] In some embodiments, the composition comprises nucleic acid sequences encoding two or more amino acid sequences selected from the group consisting of SEQ ID NOs: 137682 to 137830. In some embodiments, the nucleic acid sequences are administered in a construct for expression in vivo. In some embodiments, the in vivo administration of the nucleic acid sequences produce one or more peptides that is displayed by an HLA class II molecule. In some embodiments, the nucleic acid sequences are configured to allow expression of at least two peptides encoded by the nucleic acid sequences that are each displayed by a peptide specific set of HLA class II alleles, wherein all of the peptide specific sets of HLA class II alleles are not identical. In some embodiments, each of the one or more peptides is a modified or unmodified fragment of a protein selected from the group consisting of RNA-directed RNA polymerase catalytic subunit, Matrix protein 1, Polymerase basic protein 2, Polymerase acidic protein, and Protein PA-X. In some embodiments, the composition is administered in an effective amount to a subject to prevent influenza. In some embodiments, the composition is administered in an effective amount to a subject to treat influenza. In some embodiments, the composition comprises nucleic acid sequences encoding at least three amino acid sequences selected from the group consisting of SEQ ID NOs: 137682 to 137830.

[0505] In another aspect, the invention provides for a method of treating or preventing influenza by administering to a subject a composition comprising nucleic acid sequences encoding one or more amino acid sequences selected from the group consisting of SEQ ID NOs: 137682 to 137830.

[0506] In some embodiments, the composition comprises nucleic acid sequences encoding two or more amino acid sequences selected from the group consisting of SEQ ID NOs: 137682 to 137830.

[0507] In another aspect, the invention provides for a peptide composition comprising one or more peptides, in which each peptide comprises an amino acid sequence selected from the group consisting of SEQ ID NOs: 137682 to 137830.

[0508] In some embodiments, the peptide composition comprises two or more peptides, in which each peptide comprises an amino acid sequence selected from the group consisting of SEQ ID NOs: 137682 to 137830. In some embodiments a peptide in the peptide composition is displayed by an HLA class II molecule. In some embodiments, the at least two peptides are each capable of being displayed by a peptide specific set of HLA class II alleles, wherein all of the peptide specific sets of HLA class II alleles are not identical. In some embodiments, a peptide in the peptide composition is a modified or unmodified fragment of a protein selected from the group consisting of RNA-directed RNA polymerase catalytic subunit, Matrix protein 1, Polymerase basic protein 2, Polymerase acidic protein, and Protein PA-X. In some embodiments, the peptide composition is administered in an effective amount to a subject to prevent influenza. In some embodiments, the peptide composition is administered in an effective amount to a subject to treat influenza.

[0509] In another aspect, the invention provides for a method of treating or preventing influenza in a subject comprising administering to the subject a peptide composition comprising one or more peptides, in which each peptide comprises an amino acid sequence selected from the group consisting of SEQ ID NOs: 137682 to 137830.

[0510] In some embodiments, the peptide composition comprises two or more peptides, in which each peptide comprises an amino acid sequence selected from the group consisting of SEQ ID NOs: 137682 to 137830.

[0511] In another aspect, the invention provides for nucleic acid sequences encoding one or more amino acid sequences selected from the group consisting of SEQ ID NOs: 137515 to 137549 and SEQ ID NO: 137676.

[0512] In some embodiments, the nucleic acid sequences encode two or more amino acid sequences selected from the group consisting of SEQ ID NOs: 137515 to 137549 and SEQ ID NO: 137676.

[0513] In another aspect, the invention provides for a composition comprising nucleic acid sequences encoding one or more amino acid sequences selected from the group consisting of SEQ ID NOs: 137515 to 137549 and SEQ ID NO: 137676.

[0514] In some embodiments, the composition is administered to a subject. In some embodiments, the composition comprises nucleic acid sequences encoding two or more amino acid sequences selected from the group consisting of SEQ ID NOs: 137515 to 137549 and SEQ ID NO: 137676. In some embodiments, the nucleic acid sequences are administered in a construct for expression in vivo. In some embodiments, the in vivo administration of the nucleic acid sequences produce one or more peptides that is displayed by an HLA class I molecule. In some embodiments, the nucleic acid sequences are configured to allow expression of at least two peptides encoded by the nucleic acid sequences that are each displayed by a peptide specific set of HLA class I alleles, wherein all of the peptide specific sets of HLA class I alleles are not identical. In some embodiments, each of the one or more peptides is a modified or unmodified fragment of the influenza RNA-directed RNA polymerase catalytic subunit. In some embodiments, the composition is administered in an effective amount to a subject to prevent influenza. In some embodiments, the composition is administered in an effective amount to a subject to treat influenza.

[0515] In some embodiments, the composition comprises nucleic acid sequences encoding at least three amino acid sequences selected from the group consisting of SEQ ID NOs: 137515 to 137549 and SEQ ID NO: 137676.

[0516] In another aspect, the invention provides for a peptide composition comprising one or more peptides, in which each peptide comprises an amino acid sequence selected from the group consisting of SEQ ID NOs: 137515 to 137549 and SEQ ID NO: 137676.

[0517] In some embodiments, the peptide composition comprises two or more peptides, in which each peptide comprises an amino acid sequence selected from the group consisting of SEQ ID NOs: 137515 to 137549 and SEQ ID NO: 137676. In some embodiments, the composition is administered to a subject.

[0518] In some embodiments, the peptide composition comprises three or more peptides, in which each peptide comprises an amino acid sequence selected from the group consisting of SEQ ID NOs: 137515 to 137549 and SEQ ID NO: 137676.

[0519] In another aspect, the invention provides for a composition comprising nucleic acid sequences encoding one or more amino acid sequences selected from the group consisting of SEQ ID NOs: 137515 to 137549.

[0520] In some embodiments, the composition is administered to a subject. In some embodiments, the composition comprises nucleic acid sequences encoding two or more amino acid sequences selected from the group consisting of SEQ ID NOs: 137515 to 137549. In some embodiments, the nucleic acid sequences are administered in a construct for expression in vivo. In some embodiments, the in vivo administration of the nucleic acid sequences produce one or more peptides that is displayed by an HLA class I molecule. In some embodiments, the nucleic acid sequences are configured to allow expression of at least two peptides encoded by the nucleic acid sequences that are each displayed by a peptide specific set of HLA class I alleles, wherein all of the peptide specific sets of HLA class I alleles are not identical. In some embodiments, each of the one or more peptides is a modified or unmodified fragment of the influenza RNA-directed RNA polymerase catalytic subunit. In some embodiments, the composition is administered in an effective amount to a subject to prevent influenza. In some embodiments, the composition is administered in an effective amount to a subject to treat influenza.

[0521] In some embodiments, the composition comprises nucleic acid sequences encoding at least three amino acid sequences selected from the group consisting of SEQ ID NOs: 137515 to 137549.

[0522] In another aspect, the invention provides for a method of treating or preventing influenza by administering to a subject a composition comprising nucleic acid sequences encoding one or more amino acid sequences selected from the group consisting of SEQ ID NOs: 137515 to 137549.

[0523] In some embodiments, the composition comprises nucleic acid sequences encoding two or more amino acid sequences selected from the group consisting of SEQ ID NOs: 137515 to 137549.

[0524] In another aspect, the invention provides for a peptide composition comprising one or more peptides, in which each peptide comprises an amino acid sequence selected from the group consisting of SEQ ID NOs: 137515 to 137549.

[0525] In some embodiments, the peptide composition comprises two or more peptides, in which each peptide comprises an amino acid sequence selected from the group consisting of SEQ ID NOs: 137515 to 137549. In some embodiments a peptide in the peptide composition is displayed by an HLA class I molecule. In some embodiments, the at least two peptides are each capable of being displayed by a peptide specific set of HLA class I alleles, wherein all of the peptide specific sets of HLA class I alleles are not identical. In some embodiments, a peptide in the peptide composition is a modified or unmodified fragment of the influenza RNA-directed RNA polymerase catalytic subunit. In some embodiments, the peptide composition is administered in an effective amount to a subject to prevent influenza. In some embodiments, the peptide composition is administered in an effective amount to a subject to treat influenza.

[0526] In some embodiments, the peptide composition comprises three or more peptides, in which each peptide comprises an amino acid sequence selected from the group consisting of SEQ ID NOs: 137515 to 137549.

[0527] In another aspect, the invention provides for a method of treating or preventing influenza in a subject comprising administering to the subject a peptide composition comprising one or more peptides, in which each peptide comprises an amino acid sequence selected from the group consisting of SEQ ID NOs: 137515 to 137549.

[0528] In some embodiments, the peptide composition comprises two or more peptides, in which each peptide comprises an amino acid sequence selected from the group consisting of SEQ ID NOs: 137515 to 137549.

[0529] In another aspect, the invention provides for nucleic acid sequences encoding one or more amino acid sequences selected from the group consisting of SEQ ID NOs: 137682 to 137712.

[0530] In some embodiments, the nucleic acid sequences encode two or more amino acid sequences selected from the group consisting of SEQ ID NOs: 137682 to 137712.

[0531] In another aspect, the invention provides for a composition comprising nucleic acid sequences encoding one or more amino acid sequences selected from the group consisting of SEQ ID NOs: 137682 to 137712.

[0532] In some embodiments, the composition comprises nucleic acid sequences encoding two or more amino acid sequences selected from the group consisting of SEQ ID NOs: 137682 to 137712. In some embodiments, the nucleic acid sequences are administered in a construct for expression in vivo. In some embodiments, the in vivo administration of the nucleic acid sequences produce one or more peptides that is displayed by an HLA class II molecule. In some embodiments, the nucleic acid sequences are configured to allow expression of at least two peptides encoded by the nucleic acid sequences that are each displayed by a peptide specific set of HLA class II alleles, wherein all of the peptide specific sets of HLA class II alleles are not identical. In some embodiments, each of the one or more peptides is a modified or unmodified fragment of the influenza RNA-directed RNA polymerase catalytic subunit. In some embodiments, the composition is administered in an effective amount to a subject to prevent influenza. In some embodiments, the composition is administered in an effective amount to a subject to treat influenza. In some embodiments, the composition comprises nucleic acid sequences encoding at least three amino acid sequences selected from the group consisting of SEQ ID NOs: 137682 to 137712.

[0533] In another aspect, the invention provides for a method of treating or preventing influenza by administering to a subject a composition comprising nucleic acid sequences encoding one or more amino acid sequences selected from the group consisting of SEQ ID NOs: 137682 to 137712.

[0534] In some embodiments, the composition comprises nucleic acid sequences encoding two or more amino acid sequences selected from the group consisting of SEQ ID NOs: 137682 to 137712.

[0535] In another aspect, the invention provides for a peptide composition comprising one or more peptides, in which each peptide comprises an amino acid sequence selected from the group consisting of SEQ ID NOs: 137682 to 137712.

[0536] In some embodiments, the peptide composition comprises two or more peptides, in which each peptide comprises an amino acid sequence selected from the group consisting of SEQ ID NOs: 137682 to 137712. In some embodiments a peptide in the peptide composition is displayed by an HLA class II molecule. In some embodiments, the at least two peptides are each capable of being displayed by a peptide specific set of HLA class II alleles, wherein all of the peptide specific sets of HLA class II alleles are not identical. In some embodiments, a peptide in the peptide composition is a modified or unmodified fragment of the influenza RNA-directed RNA polymerase catalytic subunit. In some embodiments, the peptide composition is administered in an effective amount to a subject to prevent influenza. In some embodiments, the peptide composition is administered in an effective amount to a subject to treat influenza.

[0537] In another aspect, the invention provides for a method of treating or preventing influenza in a subject comprising administering to the subject a peptide composition comprising one or more peptides, in which each peptide comprises an amino acid sequence selected from the group consisting of SEQ ID NOs: 137682 to 137712.

[0538] In some embodiments, the peptide composition comprises two or more peptides, in which each peptide comprises an amino acid sequence selected from the group consisting of SEQ ID NOs: 137682 to 137712.

[0539] In another aspect, the invention provides for nucleic acid sequences encoding one or more amino acid sequences selected from the group consisting of SEQ ID NOs: 137642 to 137675.

[0540] In some embodiments, the nucleic acid sequences encode two or more amino acid sequences selected from the group consisting of SEQ ID NOs: 137642 to 137675.

[0541] In another aspect, the invention provides for a composition comprising nucleic acid sequences encoding one or more amino acid sequences selected from the group consisting of SEQ ID NOs: 137642 to 137675.

[0542] In some embodiments, the composition is administered to a subject. In some embodiments, the composition comprises nucleic acid sequences encoding two or more amino acid sequences selected from the group consisting of SEQ ID NOs: 137642 to 137675. In some embodiments, the nucleic acid sequences are administered in a construct for expression in vivo. In some embodiments, the in vivo administration of the nucleic acid sequences produce one or more peptides that is displayed by an HLA class I molecule. In some embodiments, the nucleic acid sequences are configured to allow expression of at least two peptides encoded by the nucleic acid sequences that are each displayed by a peptide specific set of HLA class I alleles, wherein all of the peptide specific sets of HLA class I alleles are not identical. In some embodiments, each of the one or more peptides is a modified or unmodified fragment of the influenza Matrix protein 1. In some embodiments, the composition is administered in an effective amount to a subject to prevent influenza. In some embodiments, the composition is administered in an effective amount to a subject to treat influenza.

[0543] In some embodiments, the composition comprises nucleic acid sequences encoding at least three amino acid sequences selected from the group consisting of SEQ ID NOs: 137642 to 137675.

[0544] In another aspect, the invention provides for a peptide composition comprising one or more peptides, in which each peptide comprises an amino acid sequence selected from the group consisting of SEQ ID NOs: 137642 to 137675.

[0545] In some embodiments, the peptide composition comprises two or more peptides, in which each peptide comprises an amino acid sequence selected from the group consisting of SEQ ID NOs: 137642 to 137675. In some embodiments, the composition is administered to a subject.

[0546] In some embodiments, the peptide composition comprises three or more peptides, in which each peptide comprises an amino acid sequence selected from the group consisting of SEQ ID NOs: 137642 to 137675.

[0547] In another aspect, the invention provides for a composition comprising nucleic acid sequences encoding one or more amino acid sequences selected from the group consisting of SEQ ID NOs: 137642 to 137675.

[0548] In some embodiments, the composition is administered to a subject. In some embodiments, the composition comprises nucleic acid sequences encoding two or more amino acid sequences selected from the group consisting of SEQ ID NOs: 137642 to 137675. In some embodiments, the nucleic acid sequences are administered in a construct for expression in vivo. In some embodiments, the in vivo administration of the nucleic acid sequences produce one or more peptides that is displayed by an HLA class I molecule. In some embodiments, the nucleic acid sequences are configured to allow expression of at least two peptides encoded by the nucleic acid sequences that are each displayed by a peptide specific set of HLA class I alleles, wherein all of the peptide specific sets of HLA class I alleles are not identical. In some embodiments, each of the one or more peptides is a modified or unmodified fragment of the influenza Matrix protein 1. In some embodiments, the composition is administered in an effective amount to a subject to prevent influenza. In some embodiments, the composition is administered in an effective amount to a subject to treat influenza.

[0549] In some embodiments, the composition comprises nucleic acid sequences encoding at least three amino acid sequences selected from the group consisting of SEQ ID NOs: 137642 to 137675.

[0550] In another aspect, the invention provides for a method of treating or preventing influenza by administering to a subject a composition comprising nucleic acid sequences encoding one or more amino acid sequences selected from the group consisting of SEQ ID NOs: 137642 to 137675.

[0551] In some embodiments, the composition comprises nucleic acid sequences encoding two or more amino acid sequences selected from the group consisting of SEQ ID NOs: 137642 to 137675.

[0552] In another aspect, the invention provides for a peptide composition comprising one or more peptides, in which each peptide comprises an amino acid sequence selected from the group consisting of SEQ ID NOs: 137642 to 137675.

[0553] In some embodiments, the peptide composition comprises two or more peptides, in which each peptide comprises an amino acid sequence selected from the group consisting of SEQ ID NOs: 137642 to 137675. In some embodiments a peptide in the peptide composition is displayed by an HLA class I molecule. In some embodiments, the at least two peptides are each capable of being displayed by a peptide specific set of HLA class I alleles, wherein all of the peptide specific sets of HLA class I alleles are not identical. In some embodiments, a peptide in the peptide composition is a modified or unmodified fragment of the influenza Matrix protein 1. In some embodiments, the peptide composition is administered in an effective amount to a subject to prevent influenza. In some embodiments, the peptide composition is administered in an effective amount to a subject to treat influenza.

[0554] In some embodiments, the peptide composition comprises three or more peptides, in which each peptide comprises an amino acid sequence selected from the group consisting of SEQ ID NOs: 137642 to 137675.

[0555] In another aspect, the invention provides for a method of treating or preventing influenza in a subject comprising administering to the subject a peptide composition comprising one or more peptides, in which each peptide comprises an amino acid sequence selected from the group consisting of SEQ ID NOs: 137642 to 137675.

[0556] In some embodiments, the peptide composition comprises two or more peptides, in which each peptide comprises an amino acid sequence selected from the group consisting of SEQ ID NOs: 137642 to 137675.

[0557] In another aspect, the invention provides for nucleic acid sequences encoding one or more amino acid sequences selected from the group consisting of SEQ ID NOs: 137796 to 137830.

[0558] In some embodiments, the nucleic acid sequences encode two or more amino acid sequences selected from the group consisting of SEQ ID NOs: 137796 to 137830.

[0559] In another aspect, the invention provides for a composition comprising nucleic acid sequences encoding one or more amino acid sequences selected from the group consisting of SEQ ID NOs: 137796 to 137830.

[0560] In some embodiments, the composition comprises nucleic acid sequences encoding two or more amino acid sequences selected from the group consisting of SEQ ID NOs: 137796 to 137830. In some embodiments, the nucleic acid sequences are administered in a construct for expression in vivo. In some embodiments, the in vivo administration of the nucleic acid sequences produce one or more peptides that is displayed by an HLA class II molecule. In some embodiments, the nucleic acid sequences are configured to allow expression of at least two peptides encoded by the nucleic acid sequences that are each displayed by a peptide specific set of HLA class II alleles, wherein all of the peptide specific sets of HLA class II alleles are not identical. In some embodiments, each of the one or more peptides is a modified or unmodified fragment of the influenza Matrix protein 1. In some embodiments, the composition is administered in an effective amount to a subject to prevent influenza. In some embodiments, the composition is administered in an effective amount to a subject to treat influenza. In some embodiments, the composition comprises nucleic acid sequences encoding at least three amino acid sequences selected from the group consisting of SEQ ID NOs: 137796 to 137830.

[0561] In another aspect, the invention provides for a method of treating or preventing influenza by administering to a subject a composition comprising nucleic acid sequences encoding one or more amino acid sequences selected from the group consisting of SEQ ID NOs: 137796 to 137830.

[0562] In some embodiments, the composition comprises nucleic acid sequences encoding two or more amino acid sequences selected from the group consisting of SEQ ID NOs: 137796 to 137830.

[0563] In another aspect, the invention provides for a peptide composition comprising one or more peptides, in which each peptide comprises an amino acid sequence selected from the group consisting of SEQ ID NOs: 137796 to 137830.

[0564] In some embodiments, the peptide composition comprises two or more peptides, in which each peptide comprises an amino acid sequence selected from the group consisting of SEQ ID NOs: 137796 to 137830. In some embodiments a peptide in the peptide composition is displayed by an HLA class II molecule. In some embodiments, the at least two peptides are each capable of being displayed by a peptide specific set of HLA class II alleles, wherein all of the peptide specific sets of HLA class II alleles are not identical. In some embodiments, a peptide in the peptide composition is a modified or unmodified fragment of the influenza Matrix protein 1. In some embodiments, the peptide composition is administered in an effective amount to a subject to prevent influenza. In some embodiments, the peptide composition is administered in an effective amount to a subject to treat influenza.

[0565] In another aspect, the invention provides for a method of treating or preventing influenza in a subject comprising administering to the subject a peptide composition comprising one or more peptides, in which each peptide comprises an amino acid sequence selected from the group consisting of SEQ ID NOs: 137796 to 137830.

[0566] In some embodiments, the peptide composition comprises two or more peptides, in which each peptide comprises an amino acid sequence selected from the group consisting of SEQ ID NOs: 137796 to 137830.

[0567] In another aspect, the invention provides for nucleic acid sequences encoding one or more amino acid sequences selected from the group consisting of SEQ ID NOs: 137582 to 137609 and SEQ ID NOs: 137678 to 137679.

[0568] In some embodiments, the nucleic acid sequences encode two or more amino acid sequences selected from the group consisting of SEQ ID NOs: 137582 to 137609 and SEQ ID NOs: 137678 to 137679.

[0569] In another aspect, the invention provides for a composition comprising nucleic acid sequences encoding one or more amino acid sequences selected from the group consisting of SEQ ID NOs: 137582 to 137609 and SEQ ID NOs: 137678 to 137679.

[0570] In some embodiments, the composition is administered to a subject. In some embodiments, the composition comprises nucleic acid sequences encoding two or more amino acid sequences selected from the group consisting of SEQ ID NOs: 137582 to 137609 and SEQ ID NOs: 137678 to 137679. In some embodiments, the nucleic acid sequences are administered in a construct for expression in vivo. In some embodiments, the in vivo administration of the nucleic acid sequences produce one or more peptides that is displayed by an HLA class I molecule. In some embodiments, the nucleic acid sequences are configured to allow expression of at least two peptides encoded by the nucleic acid sequences that are each displayed by a peptide specific set of HLA class I alleles, wherein all of the peptide specific sets of HLA class I alleles are not identical. In some embodiments, each of the one or more peptides is a modified or unmodified fragment of the influenza Polymerase basic protein 2. In some embodiments, the composition is administered in an effective amount to a subject to prevent influenza. In some embodiments, the composition is administered in an effective amount to a subject to treat influenza.

[0571] In some embodiments, the composition comprises nucleic acid sequences encoding at least three amino acid sequences selected from the group consisting of SEQ ID NOs: 137582 to 137609 and SEQ ID NOs: 137678 to 137679.

[0572] In another aspect, the invention provides for a peptide composition comprising one or more peptides, in which each peptide comprises an amino acid sequence selected from the group consisting of SEQ ID NOs: 137582 to 137609 and SEQ ID NOs: 137678 to 137679.

[0573] In some embodiments, the peptide composition comprises two or more peptides, in which each peptide comprises an amino acid sequence selected from the group consisting of SEQ ID NOs: 137582 to 137609 and SEQ ID NOs: 137678 to 137679. In some embodiments, the composition is administered to a subject.

[0574] In some embodiments, the peptide composition comprises three or more peptides, in which each peptide comprises an amino acid sequence selected from the group consisting of SEQ ID NOs: 137582 to 137609 and SEQ ID NOs: 137678 to 137679.

[0575] In another aspect, the invention provides for a composition comprising nucleic acid sequences encoding one or more amino acid sequences selected from the group consisting of SEQ ID NOs: 137582 to 137609.

[0576] In some embodiments, the composition is administered to a subject. In some embodiments, the composition comprises nucleic acid sequences encoding two or more amino acid sequences selected from the group consisting of SEQ ID NOs: 137582 to 137609. In some embodiments, the nucleic acid sequences are administered in a construct for expression in vivo. In some embodiments, the in vivo administration of the nucleic acid sequences produce one or more peptides that is displayed by an HLA class I molecule. In some embodiments, the nucleic acid sequences are configured to allow expression of at least two peptides encoded by the nucleic acid sequences that are each displayed by a peptide specific set of HLA class I alleles, wherein all of the peptide specific sets of HLA class I alleles are not identical. In some embodiments, each of the one or more peptides is a modified or unmodified fragment of the influenza Polymerase basic protein 2. In some embodiments, the composition is administered in an effective amount to a subject to prevent influenza. In some embodiments, the composition is administered in an effective amount to a subject to treat influenza.

[0577] In some embodiments, the composition comprises nucleic acid sequences encoding at least three amino acid sequences selected from the group consisting of SEQ ID NOs: 137582 to 137609.

[0578] In another aspect, the invention provides for a method of treating or preventing influenza by administering to a subject a composition comprising nucleic acid sequences encoding one or more amino acid sequences selected from the group consisting of SEQ ID NOs: 137582 to 137609.

[0579] In some embodiments, the composition comprises nucleic acid sequences encoding two or more amino acid sequences selected from the group consisting of SEQ ID NOs: 137582 to 137609.

[0580] In another aspect, the invention provides for a peptide composition comprising one or more peptides, in which each peptide comprises an amino acid sequence selected from the group consisting of SEQ ID NOs: 137582 to 137609.

[0581] In some embodiments, the peptide composition comprises two or more peptides, in which each peptide comprises an amino acid sequence selected from the group consisting of SEQ ID NOs: 137582 to 137609. In some embodiments a peptide in the peptide composition is displayed by an HLA class I molecule. In some embodiments, the at least two peptides are each capable of being displayed by a peptide specific set of HLA class I alleles, wherein all of the peptide specific sets of HLA class I alleles are not identical. In some embodiments, a peptide in the peptide composition is a modified or unmodified fragment of the influenza Polymerase basic protein 2. In some embodiments, the peptide composition is administered in an effective amount to a subject to prevent influenza. In some embodiments, the peptide composition is administered in an effective amount to a subject to treat influenza.

[0582] In some embodiments, the peptide composition comprises three or more peptides, in which each peptide comprises an amino acid sequence selected from the group consisting of SEQ ID NOs: 137582 to 137609.

[0583] In another aspect, the invention provides for a method of treating or preventing influenza in a subject comprising administering to the subject a peptide composition comprising one or more peptides, in which each peptide comprises an amino acid sequence selected from the group consisting of SEQ ID NOs: 137582 to 137609.

[0584] In some embodiments, the peptide composition comprises two or more peptides, in which each peptide comprises an amino acid sequence selected from the group consisting of SEQ ID NOs: 137582 to 137609.

[0585] In another aspect, the invention provides for nucleic acid sequences encoding one or more amino acid sequences selected from the group consisting of SEQ ID NOs: 137746 to 137763.

[0586] In some embodiments, the nucleic acid sequences encode two or more amino acid sequences selected from the group consisting of SEQ ID NOs: 137746 to 137763.

[0587] In another aspect, the invention provides for a composition comprising nucleic acid sequences encoding one or more amino acid sequences selected from the group consisting of SEQ ID NOs: 137746 to 137763.

[0588] In some embodiments, the composition comprises nucleic acid sequences encoding two or more amino acid sequences selected from the group consisting of SEQ ID NOs: 137746 to 137763. In some embodiments, the nucleic acid sequences are administered in a construct for expression in vivo. In some embodiments, the in vivo administration of the nucleic acid sequences produce one or more peptides that is displayed by an HLA class II molecule. In some embodiments, the nucleic acid sequences are configured to allow expression of at least two peptides encoded by the nucleic acid sequences that are each displayed by a peptide specific set of HLA class II alleles, wherein all of the peptide specific sets of HLA class II alleles are not identical. In some embodiments, each of the one or more peptides is a modified or unmodified fragment of the influenza Polymerase basic protein 2. In some embodiments, the composition is administered in an effective amount to a subject to prevent influenza. In some embodiments, the composition is administered in an effective amount to a subject to treat influenza. In some embodiments, the composition comprises nucleic acid sequences encoding at least three amino acid sequences selected from the group consisting of SEQ ID NOs: 137746 to 137763.

[0589] In another aspect, the invention provides for a method of treating or preventing influenza by administering to a subject a composition comprising nucleic acid sequences encoding one or more amino acid sequences selected from the group consisting of SEQ ID NOs: 137746 to 137763.

[0590] In some embodiments, the composition comprises nucleic acid sequences encoding two or more amino acid sequences selected from the group consisting of SEQ ID NOs: 137746 to 137763.

[0591] In another aspect, the invention provides for a peptide composition comprising one or more peptides, in which each peptide comprises an amino acid sequence selected from the group consisting of SEQ ID NOs: 137746 to 137763.

[0592] In some embodiments, the peptide composition comprises two or more peptides, in which each peptide comprises an amino acid sequence selected from the group consisting of SEQ ID NOs: 137746 to 137763. In some embodiments a peptide in the peptide composition is displayed by an HLA class II molecule. In some embodiments, the at least two peptides are each capable of being displayed by a peptide specific set of HLA class II alleles, wherein all of the peptide specific sets of HLA class II alleles are not identical. In some embodiments, a peptide in the peptide composition is a modified or unmodified fragment of the influenza Polymerase basic protein 2. In some embodiments, the peptide composition is administered in an effective amount to a subject to prevent influenza. In some embodiments, the peptide composition is administered in an effective amount to a subject to treat influenza.

[0593] In another aspect, the invention provides for a method of treating or preventing influenza in a subject comprising administering to the subject a peptide composition comprising one or more peptides, in which each peptide comprises an amino acid sequence selected from the group consisting of SEQ ID NOs: 137746 to 137763.

[0594] In some embodiments, the peptide composition comprises two or more peptides, in which each peptide comprises an amino acid sequence selected from the group consisting of SEQ ID NOs: 137746 to 137763.

[0595] In another aspect, the invention provides for nucleic acid sequences encoding one or more amino acid sequences selected from the group consisting of SEQ ID NOs: 137610 to 137641 and SEQ ID NOs: 137680 to 137681.

[0596] In some embodiments, the nucleic acid sequences encode two or more amino acid sequences selected from the group consisting of SEQ ID NOs: 137610 to 137641 and SEQ ID NOs: 137680 to 137681.

[0597] In another aspect, the invention provides for a composition comprising nucleic acid sequences encoding one or more amino acid sequences selected from the group consisting of SEQ ID NOs: 137610 to 137641 and SEQ ID NOs: 137680 to 137681.

[0598] In some embodiments, the composition is administered to a subject. In some embodiments, the composition comprises nucleic acid sequences encoding two or more amino acid sequences selected from the group consisting of SEQ ID NOs: 137610 to 137641 and SEQ ID NOs: 137680 to 137681. In some embodiments, the nucleic acid sequences are administered in a construct for expression in vivo. In some embodiments, the in vivo administration of the nucleic acid sequences produce one or more peptides that is displayed by an HLA class I molecule. In some embodiments, the nucleic acid sequences are configured to allow expression of at least two peptides encoded by the nucleic acid sequences that are each displayed by a peptide specific set of HLA class I alleles, wherein all of the peptide specific sets of HLA class I alleles are not identical. In some embodiments, each of the one or more peptides is a modified or unmodified fragment of the influenza Polymerase acidic protein. In some embodiments, the composition is administered in an effective amount to a subject to prevent influenza. In some embodiments, the composition is administered in an effective amount to a subject to treat influenza.

[0599] In some embodiments, the composition comprises nucleic acid sequences encoding at least three amino acid sequences selected from the group consisting of SEQ ID NOs: 137610 to 137641 and SEQ ID NOs: 137680 to 137681.

[0600] In another aspect, the invention provides for a peptide composition comprising one or more peptides, in which each peptide comprises an amino acid sequence selected from the group consisting of SEQ ID NOs: 137610 to 137641 and SEQ ID NOs: 137680 to 137681.

[0601] In some embodiments, the peptide composition comprises two or more peptides, in which each peptide comprises an amino acid sequence selected from the group consisting of SEQ ID NOs: 137610 to 137641 and SEQ ID NOs: 137680 to 137681. In some embodiments, the composition is administered to a subject.

[0602] In some embodiments, the peptide composition comprises three or more peptides, in which each peptide comprises an amino acid sequence selected from the group consisting of SEQ ID NOs: 137610 to 137641 and SEQ ID NOs: 137680 to 137681.

[0603] In another aspect, the invention provides for a composition comprising nucleic acid sequences encoding one or more amino acid sequences selected from the group consisting of SEQ ID NOs: 137610 to 137641.

[0604] In some embodiments, the composition is administered to a subject. In some embodiments, the composition comprises nucleic acid sequences encoding two or more amino acid sequences selected from the group consisting of SEQ ID NOs: 137610 to 137641. In some embodiments, the nucleic acid sequences are administered in a construct for expression in vivo. In some embodiments, the in vivo administration of the nucleic acid sequences produce one or more peptides that is displayed by an HLA class I molecule. In some embodiments, the nucleic acid sequences are configured to allow expression of at least two peptides encoded by the nucleic acid sequences that are each displayed by a peptide specific set of HLA class I alleles, wherein all of the peptide specific sets of HLA class I alleles are not identical. In some embodiments, each of the one or more peptides is a modified or unmodified fragment of the influenza Polymerase acidic protein. In some embodiments, the composition is administered in an effective amount to a subject to prevent influenza. In some embodiments, the composition is administered in an effective amount to a subject to treat influenza.

[0605] In some embodiments, the composition comprises nucleic acid sequences encoding at least three amino acid sequences selected from the group consisting of SEQ ID NOs: 137610 to 137641.

[0606] In another aspect, the invention provides for a method of treating or preventing influenza by administering to a subject a composition comprising nucleic acid sequences encoding one or more amino acid sequences selected from the group consisting of SEQ ID NOs: 137610 to 137641.

[0607] In some embodiments, the composition comprises nucleic acid sequences encoding two or more amino acid sequences selected from the group consisting of SEQ ID NOs: 137610 to 137641.

[0608] In another aspect, the invention provides for a peptide composition comprising one or more peptides, in which each peptide comprises an amino acid sequence selected from the group consisting of SEQ ID NOs: 137610 to 137641.

[0609] In some embodiments, the peptide composition comprises two or more peptides, in which each peptide comprises an amino acid sequence selected from the group consisting of SEQ ID NOs: 137610 to 137641. In some embodiments a peptide in the peptide composition is displayed by an HLA class I molecule. In some embodiments, the at least two peptides are each capable of being displayed by a peptide specific set of HLA class I alleles, wherein all of the peptide specific sets of HLA class I alleles are not identical. In some embodiments, a peptide in the peptide composition is a modified or unmodified fragment of the influenza Polymerase acidic protein. In some embodiments, the peptide composition is administered in an effective amount to a subject to prevent influenza. In some embodiments, the peptide composition is administered in an effective amount to a subject to treat influenza.

[0610] In some embodiments, the peptide composition comprises three or more peptides, in which each peptide comprises an amino acid sequence selected from the group consisting of SEQ ID NOs: 137610 to 137641.

[0611] In another aspect, the invention provides for a method of treating or preventing influenza in a subject comprising administering to the subject a peptide composition comprising one or more peptides, in which each peptide comprises an amino acid sequence selected from the group consisting of SEQ ID NOs: 137610 to 137641.

[0612] In some embodiments, the peptide composition comprises two or more peptides, in which each peptide comprises an amino acid sequence selected from the group consisting of SEQ ID NOs: 137610 to 137641.

[0613] In another aspect, the invention provides for nucleic acid sequences encoding one or more amino acid sequences selected from the group consisting of SEQ ID NOs: 137764 to 137795.

[0614] In some embodiments, the nucleic acid sequences encode two or more amino acid sequences selected from the group consisting of SEQ ID NOs: 137764 to 137795.

[0615] In another aspect, the invention provides for a composition comprising nucleic acid sequences encoding one or more amino acid sequences selected from the group consisting of SEQ ID NOs: 137764 to 137795.

[0616] In some embodiments, the composition comprises nucleic acid sequences encoding two or more amino acid sequences selected from the group consisting of SEQ ID NOs: 137764 to 137795. In some embodiments, the nucleic acid sequences are administered in a construct for expression in vivo. In some embodiments, the in vivo administration of the nucleic acid sequences produce one or more peptides that is displayed by an HLA class II molecule. In some embodiments, the nucleic acid sequences are configured to allow expression of at least two peptides encoded by the nucleic acid sequences that are each displayed by a peptide specific set of HLA class II alleles, wherein all of the peptide specific sets of HLA class II alleles are not identical. In some embodiments, each of the one or more peptides is a modified or unmodified fragment of the influenza Polymerase acidic protein. In some embodiments, the composition is administered in an effective amount to a subject to prevent influenza. In some embodiments, the composition is administered in an effective amount to a subject to treat influenza. In some embodiments, the composition comprises nucleic acid sequences encoding at least three amino acid sequences selected from the group consisting of SEQ ID NOs: 137764 to 137795.

[0617] In another aspect, the invention provides for a method of treating or preventing influenza by administering to a subject a composition comprising nucleic acid sequences encoding one or more amino acid sequences selected from the group consisting of SEQ ID NOs: 137764 to 137795.

[0618] In some embodiments, the composition comprises nucleic acid sequences encoding two or more amino acid sequences selected from the group consisting of SEQ ID NOs: 137764 to 137795.

[0619] In another aspect, the invention provides for a peptide composition comprising one or more peptides, in which each peptide comprises an amino acid sequence selected from the group consisting of SEQ ID NOs: 137764 to 137795.

[0620] In some embodiments, the peptide composition comprises two or more peptides, in which each peptide comprises an amino acid sequence selected from the group consisting of SEQ ID NOs: 137764 to 137795. In some embodiments a peptide in the peptide composition is displayed by an HLA class II molecule. In some embodiments, the at least two peptides are each capable of being displayed by a peptide specific set of HLA class II alleles, wherein all of the peptide specific sets of HLA class II alleles are not identical. In some embodiments, a peptide in the peptide composition is a modified or unmodified fragment of the influenza Polymerase acidic protein. In some embodiments, the peptide composition is administered in an effective amount to a subject to prevent influenza. In some embodiments, the peptide composition is administered in an effective amount to a subject to treat influenza.

[0621] In another aspect, the invention provides for a method of treating or preventing influenza in a subject comprising administering to the subject a peptide composition comprising one or more peptides, in which each peptide comprises an amino acid sequence selected from the group consisting of SEQ ID NOs: 137764 to 137795.

[0622] In some embodiments, the peptide composition comprises two or more peptides, in which each peptide comprises an amino acid sequence selected from the group consisting of SEQ ID NOs: 137764 to 137795.

[0623] In another aspect, the invention provides for nucleic acid sequences encoding one or more amino acid sequences selected from the group consisting of SEQ ID NOs: 137550 to 137581, SEQ ID NO: 137614, SEQ ID NOs: 137619 to 137620, SEQ ID NO: 137624, SEQ ID NO: 137630, and SEQ ID NO: 137677.

[0624] In some embodiments, the nucleic acid sequences encode two or more amino acid sequences selected from the group consisting of SEQ ID NOs: 137550 to 137581, SEQ ID NO: 137614, SEQ ID NOs: 137619 to 137620, SEQ ID NO: 137624, SEQ ID NO: 137630, and SEQ ID NO: 137677.

[0625] In another aspect, the invention provides for a composition comprising nucleic acid sequences encoding one or more amino acid sequences selected from the group consisting of SEQ ID NOs: 137550 to 137581, SEQ ID NO: 137614, SEQ ID NOs: 137619 to 137620, SEQ ID NO: 137624, SEQ ID NO: 137630, and SEQ ID NO: 137677.

[0626] In some embodiments, the composition is administered to a subject. In some embodiments, the composition comprises nucleic acid sequences encoding two or more amino acid sequences selected from the group consisting of SEQ ID NOs: 137550 to 137581, SEQ ID NO: 137614, SEQ ID NOs: 137619 to 137620, SEQ ID NO: 137624, SEQ ID NO: 137630, and SEQ ID NO: 137677. In some embodiments, the nucleic acid sequences are administered in a construct for expression in vivo. In some embodiments, the in vivo administration of the nucleic acid sequences produce one or more peptides that is displayed by an HLA class I molecule. In some embodiments, the nucleic acid sequences are configured to allow expression of at least two peptides encoded by the nucleic acid sequences that are each displayed by a peptide specific set of HLA class I alleles, wherein all of the peptide specific sets of HLA class I alleles are not identical. In some embodiments, each of the one or more peptides is a modified or unmodified fragment of the influenza Protein PA-X. In some embodiments, the composition is administered in an effective amount to a subject to prevent influenza. In some embodiments, the composition is administered in an effective amount to a subject to treat influenza.

[0627] In some embodiments, the composition comprises nucleic acid sequences encoding at least three amino acid sequences selected from the group consisting of SEQ ID NOs: 137550 to 137581, SEQ ID NO: 137614, SEQ ID NOs: 137619 to 137620, SEQ ID NO: 137624, SEQ ID NO: 137630, and SEQ ID NO: 137677.

[0628] In another aspect, the invention provides for a peptide composition comprising one or more peptides, in which each peptide comprises an amino acid sequence selected from the group consisting of SEQ ID NOs: 137550 to 137581, SEQ ID NO: 137614, SEQ ID NOs: 137619 to 137620, SEQ ID NO: 137624, SEQ ID NO: 137630, and SEQ ID NO: 137677.

[0629] In some embodiments, the peptide composition comprises two or more peptides, in which each peptide comprises an amino acid sequence selected from the group consisting of SEQ ID NOs: 137550 to 137581, SEQ ID NO: 137614, SEQ ID NOs: 137619 to 137620, SEQ ID NO: 137624, SEQ ID NO: 137630, and SEQ ID NO: 137677. In some embodiments, the composition is administered to a subject.

[0630] In some embodiments, the peptide composition comprises three or more peptides, in which each peptide comprises an amino acid sequence selected from the group consisting of SEQ ID NOs: 137550 to 137581, SEQ ID NO: 137614, SEQ ID NOs: 137619 to 137620, SEQ ID NO: 137624, SEQ ID NO: 137630, and SEQ ID NO: 137677.

[0631] In another aspect, the invention provides for a composition comprising nucleic acid sequences encoding one or more amino acid sequences selected from the group consisting of SEQ ID NOs: 137550 to 137581, SEQ ID NO: 137614, SEQ ID NOs: 137619 to 137620, SEQ ID NO: 137624, and SEQ ID NO: 137630.

[0632] In some embodiments, the composition is administered to a subject. In some embodiments, the composition comprises nucleic acid sequences encoding two or more amino acid sequences selected from the group consisting of SEQ ID NOs: 137550 to 137581, SEQ ID NO: 137614, SEQ ID NOs: 137619 to 137620, SEQ ID NO: 137624, and SEQ ID NO: 137630. In some embodiments, the nucleic acid sequences are administered in a construct for expression in vivo. In some embodiments, the in vivo administration of the nucleic acid sequences produce one or more peptides that is displayed by an HLA class I molecule. In some embodiments, the nucleic acid sequences are configured to allow expression of at least two peptides encoded by the nucleic acid sequences that are each displayed by a peptide specific set of HLA class I alleles, wherein all of the peptide specific sets of HLA class I alleles are not identical. In some embodiments, each of the one or more peptides is a modified or unmodified fragment of the influenza Protein PA-X. In some embodiments, the composition is administered in an effective amount to a subject to prevent influenza. In some embodiments, the composition is administered in an effective amount to a subject to treat influenza.

[0633] In some embodiments, the composition comprises nucleic acid sequences encoding at least three amino acid sequences selected from the group consisting of SEQ ID NOs: 137550 to 137581, SEQ ID NO: 137614, SEQ ID NOs: 137619 to 137620, SEQ ID NO: 137624, and SEQ ID NO: 137630.

[0634] In another aspect, the invention provides for a method of treating or preventing influenza by administering to a subject a composition comprising nucleic acid sequences encoding one or more amino acid sequences selected from the group consisting of SEQ ID NOs: 137550 to 137581, SEQ ID NO: 137614, SEQ ID NOs: 137619 to 137620, SEQ ID NO: 137624, and SEQ ID NO: 137630.

[0635] In some embodiments, the composition comprises nucleic acid sequences encoding two or more amino acid sequences selected from the group consisting of SEQ ID NOs: 137550 to 137581, SEQ ID NO: 137614, SEQ ID NOs: 137619 to 137620, SEQ ID NO: 137624, and SEQ ID NO: 137630.

[0636] In another aspect, the invention provides for a peptide composition comprising one or more peptides, in which each peptide comprises an amino acid sequence selected from the group consisting of SEQ ID NOs: 137550 to 137581, SEQ ID NO: 137614, SEQ ID NOs: 137619 to 137620, SEQ ID NO: 137624, and SEQ ID NO: 137630.

[0637] In some embodiments, the peptide composition comprises two or more peptides, in which each peptide comprises an amino acid sequence selected from the group consisting of SEQ ID NOs: 137550 to 137581, SEQ ID NO: 137614, SEQ ID NOs: 137619 to 137620, SEQ ID NO: 137624, and SEQ ID NO: 137630. In some embodiments a peptide in the peptide composition is displayed by an HLA class I molecule. In some embodiments, the at least two peptides are each capable of being displayed by a peptide specific set of HLA class I alleles, wherein all of the peptide specific sets of HLA class I alleles are not identical. In some embodiments, a peptide in the peptide composition is a modified or unmodified fragment of the influenza Protein PA-X. In some embodiments, the peptide composition is administered in an effective amount to a subject to prevent influenza. In some embodiments, the peptide composition is administered in an effective amount to a subject to treat influenza.

[0638] In some embodiments, the peptide composition comprises three or more peptides, in which each peptide comprises an amino acid sequence selected from the group consisting of SEQ ID NOs: 137550 to 137581, SEQ ID NO: 137614, SEQ ID NOs: 137619 to 137620, SEQ ID NO: 137624, and SEQ ID NO: 137630.

[0639] In another aspect, the invention provides for a method of treating or preventing influenza in a subject comprising administering to the subject a peptide composition comprising one or more peptides, in which each peptide comprises an amino acid sequence selected from the group consisting of SEQ ID NOs: 137550 to 137581, SEQ ID NO: 137614, SEQ ID NOs: 137619 to 137620, SEQ ID NO: 137624, and SEQ ID NO: 137630.

[0640] In some embodiments, the peptide composition comprises two or more peptides, in which each peptide comprises an amino acid sequence selected from the group consisting of SEQ ID NOs: 137550 to 137581, SEQ ID NO: 137614, SEQ ID NOs: 137619 to 137620, SEQ ID NO: 137624, and SEQ ID NO: 137630.

[0641] In another aspect, the invention provides for nucleic acid sequences encoding one or more amino acid sequences selected from the group consisting of SEQ ID NOs: 137713 to 137745.

[0642] In some embodiments, the nucleic acid sequences encode two or more amino acid sequences selected from the group consisting of SEQ ID NOs: 137713 to 137745.

[0643] In another aspect, the invention provides for a composition comprising nucleic acid sequences encoding one or more amino acid sequences selected from the group consisting of SEQ ID NOs: 137713 to 137745.

[0644] In some embodiments, the composition comprises nucleic acid sequences encoding two or more amino acid sequences selected from the group consisting of SEQ ID NOs: 137713 to 137745. In some embodiments, the nucleic acid sequences are administered in a construct for expression in vivo. In some embodiments, the in vivo administration of the nucleic acid sequences produce one or more peptides that is displayed by an HLA class II molecule. In some embodiments, the nucleic acid sequences are configured to allow expression of at least two peptides encoded by the nucleic acid sequences that are each displayed by a peptide specific set of HLA class II alleles, wherein all of the peptide specific sets of HLA class II alleles are not identical. In some embodiments, each of the one or more peptides is a modified or unmodified fragment of the influenza Protein PA-X. In some embodiments, the composition is administered in an effective amount to a subject to prevent influenza. In some embodiments, the composition is administered in an effective amount to a subject to treat influenza. In some embodiments, the composition comprises nucleic acid sequences encoding at least three amino acid sequences selected from the group consisting of SEQ ID NOs: 137713 to 137745.

[0645] In another aspect, the invention provides for a method of treating or preventing influenza by administering to a subject a composition comprising nucleic acid sequences encoding one or more amino acid sequences selected from the group consisting of SEQ ID NOs: 137713 to 137745.

[0646] In some embodiments, the composition comprises nucleic acid sequences encoding two or more amino acid sequences selected from the group consisting of SEQ ID NOs: 137713 to 137745.

[0647] In another aspect, the invention provides for a peptide composition comprising one or more peptides, in which each peptide comprises an amino acid sequence selected from the group consisting of SEQ ID NOs: 137713 to 137745.

[0648] In some embodiments, the peptide composition comprises two or more peptides, in which each peptide comprises an amino acid sequence selected from the group consisting of SEQ ID NOs: 137713 to 137745. In some embodiments a peptide in the peptide composition is displayed by an HLA class II molecule. In some embodiments, the at least two peptides are each capable of being displayed by a peptide specific set of HLA class II alleles, wherein all of the peptide specific sets of HLA class II alleles are not identical. In some embodiments, a peptide in the peptide composition is a modified or unmodified fragment of the influenza Protein PA-X. In some embodiments, the peptide composition is administered in an effective amount to a subject to prevent influenza. In some embodiments, the peptide composition is administered in an effective amount to a subject to treat influenza.

[0649] In another aspect, the invention provides for a method of treating or preventing influenza in a subject comprising administering to the subject a peptide composition comprising one or more peptides, in which each peptide comprises an amino acid sequence selected from the group consisting of SEQ ID NOs: 137713 to 137745.

[0650] In some embodiments, the peptide composition comprises two or more peptides, in which each peptide comprises an amino acid sequence selected from the group consisting of SEQ ID NOs: 137713 to 137745.

[0651] In some embodiments, the compositions, including peptide compositions, of the invention are immunogenic compositions. To this end, the invention provides for a method of inducing an immunogenic response in a subject comprising administering to the subject a composition of the invention.

[0652] In some embodiments, compositions, including peptide compositions, of the invention are vaccines.

### Compositions

[0653] In some embodiments, the nucleic acid sequences of this disclosure are administered in a composition. In some embodiments, the nucleic acid sequences of this disclosure are administered in a pharmaceutical composition that includes a pharmaceutically acceptable carrier. In some embodiments, the pharmaceutical composition is in the form of a spray, aerosol, gel, solution, emulsion, lipid nanoparticle, nanoparticle, or suspension. In some embodiments, the composition or pharmaceutical composition is in the form of a cationic nanoemulsion, one example of which is described by Brito et al. (2014) that is incorporated herein by reference.

[0654] In some embodiments, the one or more peptides of this disclosure are administered in a composition. In some embodiments, the one or more peptides of this disclosure are administered in a pharmaceutical composition that includes a pharmaceutically acceptable carrier. In some embodiments, the composition or pharmaceutical composition is comprised of the third peptide set, as described in this disclosure. In some embodiments, the pharmaceutical composition is in the form of a spray, aerosol, gel, solution, emulsion, lipid nanoparticle, nanoparticle, or suspension. In some embodiments, the composition pharmaceutical composition is in the form of a cationic nanoemulsion, one example of which is described by Brito et al. (2014) that is incorporated herein by reference.

[0655] The composition is preferably administered to a subject with a pharmaceutically acceptable carrier, i.e., as a pharmaceutical composition. Typically, in some embodiments, an appropriate amount of a pharmaceutically acceptable salt is used in the formulation, which in some embodiments can render the formulation isotonic.

[0656] In certain embodiments, nucleic acid sequences are provided as an immunogenic composition comprising any one of the nucleic acid sequences described herein and a pharmaceutically acceptable carrier.

[0657] In certain embodiments, the peptides are provided as an immunogenic composition comprising any one of the peptides described herein and a pharmaceutically acceptable carrier. In certain embodiments, the immunogenic composition further comprises an adjuvant. In certain embodiments, the peptides are conjugated with other molecules to increase their effectiveness as is known by those practiced in the art. For example, peptides can be coupled to antibodies that recognize cell surface proteins on antigen presenting cells to enhance vaccine effectiveness. One such method for increasing the effectiveness of peptide delivery is described in Woodham, et al. (2018). In certain embodiments for the treatment of autoimmune disorders, the peptides are delivered with a composition and protocol designed to induce tolerance as is known in the art. Example methods for using peptides for immune tolerization are described in Alhadj et al. (2017) and Gibson et al. (2015).

[0658] In some embodiments, the pharmaceutically acceptable carrier is selected from the group consisting of saline, Ringer's solution, dextrose solution, and a combination thereof. Other suitable pharmaceutically acceptable carriers known in the art are contemplated. Suitable carriers and their formulations are described in Remington's Pharmaceutical Sciences, 2005, Mack Publishing Co. The pH of the solution is preferably from about 5 to about 8, and more preferably from about 7 to about 7.5. The formulation may also comprise a lyophilized powder. Further carriers include sustained release preparations such as semipermeable matrices of solid hydrophobic polymers, which matrices are in the form of shaped articles, e.g., films, liposomes or microparticles. It will be apparent to those persons skilled in the art that certain carriers may be more preferable depending upon, for instance, the route of administration and concentration of peptides being administered.

[0659] The phrase pharmaceutically acceptable carrier as used herein means a pharmaceutically acceptable material, composition or vehicle, such as a liquid or solid filler, diluent, excipient, solvent or encapsulating material, involved in carrying or transporting the subject pharmaceutical agent from one organ, or portion of the body, to another organ, or portion of the body. Each carrier is acceptable in the sense of being compatible with the other ingredients of the formulation and not injurious to the patient. Some examples of materials which can serve as pharmaceutically acceptable carriers include: sugars, such as lactose, glucose and sucrose; starches, such as corn starch and potato starch; cellulose, and its derivatives, such as sodium carboxymethyl cellulose, ethyl cellulose and cellulose acetate; powdered tragacanth; malt; gelatin; talc; excipients, such as cocoa butter and suppository waxes; oils, such as peanut oil, cottonseed oil, safflower oil, sesame oil, olive oil, corn oil and soybean oil; glycols, such as butylene glycol; polyols, such as glycerin, sorbitol, mannitol and polyethylene glycol; esters, such as ethyl oleate and ethyl laurate; agar; buffering agents, such as magnesium hydroxide and aluminum hydroxide; alginic acid; pyrogen-free water; isotonic saline; Ringer's solution; ethyl alcohol; phosphate buffer solutions; and other non-toxic compatible substances employed in pharmaceutical formulations. The term carrier denotes an organic or inorganic ingredient, natural or synthetic, with which the active ingredient is combined to facilitate the application. The components of the pharmaceutical compositions also are capable of being comingled with the compounds of the present invention, and with each other, in a manner such that there is no interaction which would substantially impair the desired pharmaceutical efficiency. The composition may also include additional agents such as an isotonicity agent, a preservative, a surfactant, and, a divalent cation, preferably, zinc.

[0660] The composition can also include an excipient, or an agent for stabilization of a peptide composition, such as a buffer, a reducing agent, a bulk protein, amino acids (such as e.g., glycine or praline) or a carbohydrate. Bulk proteins useful in formulating peptide compositions include albumin. Typical carbohydrates useful in formulating peptides include but are not limited to sucrose, mannitol, lactose, trehalose, or glucose.

[0661] Surfactants may also be used to prevent soluble and insoluble aggregation and/or precipitation of peptides or proteins included in the composition. Suitable surfactants include but are not limited to sorbitan trioleate, soya lecithin, and oleic acid. In certain cases, solution aerosols are preferred using solvents such as ethanol. Thus, formulations including peptides can also include a surfactant that can reduce or prevent surface-induced aggregation of peptides by atomization of the solution in forming an aerosol. Various conventional surfactants can be employed, such as polyoxyethylene fatty acid esters and alcohols, and polyoxyethylene sorbitol fatty acid esters. Amounts will generally range between 0.001% and 4% by weight of the formulation. In some embodiments, surfactants used with the present disclosure are polyoxyethylene sorbitan mono-oleate, polysorbate 80, polysorbate 20. Additional agents known in the art can also be included in the composition.

[0662] In some embodiments, the compositions and dosage forms further comprise one or more compounds that reduce the rate by which an active ingredient will decay, or the composition will change in character. So called stabilizers or preservatives may include, but are not limited to, amino acids, antioxidants, pH buffers, or salt buffers. Nonlimiting examples of antioxidants include butylated hydroxy anisole (BHA), ascorbic acid and derivatives thereof, tocopherol and derivatives thereof, butylated hydroxy anisole and cysteine. Nonlimiting examples of preservatives include parabens, such as methyl or propyl p-hydroxybenzoate and benzalkonium chloride. Additional nonlimiting examples of amino acids include glycine or proline.

[0663] The present invention also teaches the stabilization (preventing or minimizing thermally or mechanically induced soluble or insoluble aggregation and/or precipitation of an inhibitor protein) of liquid solutions containing peptides at neutral pH or less than neutral pH by the use of amino acids including proline or glycine, with or without divalent cations resulting in clear or nearly clear solutions that are stable at room temperature or preferred for pharmaceutical administration.

[0664] In one embodiment, the composition is of single unit or multiple unit dosage forms. Compositions of single unit or multiple unit dosage forms of the invention comprise a prophylactically or therapeutically effective amount of one or more compositions (e.g., a compound of the invention, or other prophylactic or therapeutic agent), typically, one or more vehicles, carriers, or excipients, stabilizing agents, and/or preservatives. Preferably, the vehicles, carriers, excipients, stabilizing agents and preservatives are pharmaceutically acceptable.

[0665] In some embodiments, the compositions and dosage forms comprise anhydrous compositions and dosage forms. Anhydrous compositions and dosage forms of the invention can be prepared using anhydrous or low moisture containing ingredients and low moisture or low humidity conditions. Compositions and dosage forms that comprise lactose and at least one active ingredient that comprise a primary or secondary amine are preferably anhydrous if substantial contact with moisture and/or humidity during manufacturing, packaging, and/or storage is expected. An anhydrous composition should be prepared and stored such that its anhydrous nature is maintained. Accordingly, anhydrous compositions are preferably packaged using materials known to prevent exposure to water such that they can be included in suitable formulary kits. Examples of suitable packaging include, but are not limited to, hermetically sealed foils, plastics, unit dose containers (e.g., vials), blister packs, and strip packs.

[0666] Suitable vehicles are well known to those skilled in the art of pharmacy, and non-limiting examples of suitable vehicles include glucose, sucrose, starch, lactose, gelatin, rice, silica gel, glycerol, talc, sodium chloride, dried skim milk, propylene glycol, water, sodium stearate, ethanol, and similar substances well known in the art. Saline solutions and aqueous dextrose and glycerol solutions can also be employed as liquid vehicles. Whether a particular vehicle is suitable for incorporation into a composition or dosage form depends on a variety of factors well known in the art including, but not limited to, the way in which the dosage form will be administered to a patient and the specific active ingredients in the dosage form. Pharmaceutical vehicles can be sterile liquids, such as water and oils, including those of petroleum, animal, vegetable or synthetic origin, such as peanut oil, soybean oil, mineral oil, sesame oil and the like.

[0667] The invention also provides that a composition can be packaged in a hermetically sealed container such as an ampoule or sachette indicating the quantity. In one embodiment, the composition can be supplied as a dry sterilized lyophilized powder in a delivery device suitable for administration to the lower airways of a patient. The compositions can, if desired, be presented in a pack or dispenser device that can contain one or more unit dosage forms containing the active ingredient. The pack can for example comprise metal or plastic foil, such as a blister pack. The pack or dispenser device can be accompanied by instructions for administration.

[0668] Methods of preparing these formulations or compositions include the step of bringing into association a compound of the present invention with the carrier and, optionally, one or more accessory ingredients. In general, the formulations are prepared by uniformly and intimately bringing into association a compound of the present invention with liquid carriers, or finely divided solid carriers, or both, and then, if necessary, shaping the product.

[0669] Formulations of the invention suitable for administration may be in the form of powders, granules, or as a solution or a suspension in an aqueous or non-aqueous liquid, or as an oil-in-water or water-in-oil liquid emulsion, or as an elixir or syrup, or as pastilles (using an inert base, such as gelatin and glycerin, or sucrose and acacia) and/or as mouthwashes and the like, each containing a predetermined amount of a compound of the present invention (e.g., peptides) as an active ingredient.

[0670] A liquid composition herein can be used as such with a delivery device, or they can be used for the preparation of pharmaceutically acceptable formulations comprising peptides that are prepared for example by the method of spray drying. The methods of spray freeze-drying peptides/proteins for pharmaceutical administration disclosed in Maa et al. (2021) are incorporated herein. In another embodiment, the liquid solutions herein are freeze spray dried and the spray-dried product is collected as a dispersible peptide-containing powder that is therapeutically effective when administered to an individual.

[0671] The compounds and compositions of the present invention can be employed in combination therapies, that is, the compounds and compositions can be administered concurrently with, prior to, or subsequent to, one or more other desired therapeutics or medical procedures (e.g., peptide vaccine can be used in combination therapy with another treatment such as chemotherapy, radiation, pharmaceutical agents, and/or another treatment). The particular combination of therapies (therapeutics or procedures) to employ in a combination regimen will take into account compatibility of the desired therapeutics and/or procedures and the desired therapeutic effect to be achieved. It will also be appreciated that the therapies employed may achieve a desired effect for the same disorder (for example, the compound of the present invention may be administered concurrently with another therapeutic or prophylactic).

[0672] The invention also provides a pharmaceutical pack or kit comprising one or more containers filled with one or more of the ingredients of the compositions of the invention. Optionally associated with such container(s) can be a notice in the form prescribed by a governmental agency regulating the manufacture, use or sale of pharmaceuticals or biological products, which notice reflects approval by the agency of manufacture, use or sale for human administration.

[0673] The current invention provides for dosage forms comprising nucleic acid sequences or peptides suitable for treating influenza infection. The dosage forms can be formulated, e.g., as sprays, aerosols, nanoparticles, liposomes, or other forms known to one of skill in the art. See, e.g., Remington's Pharmaceutical Sciences; Remington: The Science and Practice of Pharmacy supra; Pharmaceutical Dosage Forms and Drug Delivery Systems by Howard C., Ansel et al., Lippincott Williams & Wilkins; 7th edition (Oct. 1, 1999).

[0674] Generally, a dosage form used in the acute treatment of a disease may contain larger amounts of one or more of the active ingredients it comprises than a dosage form used in the chronic treatment of the same disease. In addition, the prophylactically and therapeutically effective dosage form may vary among different conditions. For example, a therapeutically effective dosage form may contain peptides that has an appropriate immunogenic action when intending to treat influenza infection. On the other hand, a different effective dosage may contain nucleic acid sequences or peptides that has an appropriate immunogenic action when intending to use the peptides of the invention as a prophylactic (e.g., vaccine) against influenza infection. These and other ways in which specific dosage forms encompassed by this invention will vary from one another and will be readily apparent to those skilled in the art. See, e.g., Remington's Pharmaceutical Sciences, 2005, Mack Publishing Co.; Remington: The Science and Practice of Pharmacy by Gennaro, Lippincott Williams & Wilkins; 20th edition (2003); Pharmaceutical Dosage Forms and Drug Delivery Systems by Howard C. Ansel et al., Lippincott Williams & Wilkins; 7th edition (Oct. 1, 1999); and Encyclopedia of Pharmaceutical Technology, edited by Swarbrick, J. & J. C. Boylan, Marcel Dekker, Inc., New York, 1988, which are incorporated herein by reference in their entirety.

[0675] The pH of a composition or dosage form may also be adjusted to improve delivery and/or stability of one or more active ingredients. Similarly, the polarity of a solvent carrier, its ionic strength, or tonicity can be adjusted to improve delivery. Compounds such as stearates can also be added to compositions or dosage forms to alter advantageously the hydrophilicity or lipophilicity of one or more active ingredients to improve delivery. In this regard, stearates can also serve as a lipid vehicle for the formulation, as an emulsifying agent or surfactant, and as a delivery enhancing or penetration-enhancing agent. Different salts, hydrates, or solvates of the active ingredients can be used to adjust further the properties of the resulting composition.

[0676] Compositions can be formulated with appropriate carriers and adjuvants using techniques to yield compositions suitable for immunization. The compositions can include an adjuvant, such as, for example but not limited to, alum, poly IC, MF-59, squalene-based adjuvants, or liposomal based adjuvants suitable for immunization.

[0677] In some embodiments, the compositions and methods comprise any suitable agent or immune modulation which could modulate mechanisms of host immune tolerance and release of the induced antibodies. In certain embodiments, an immunomodulatory agent is administered in at time and in an amount sufficient for transient modulation of the subject's immune response so as to induce an immune response.

### Expression Systems

[0678] In certain aspects, the invention provides culturing a cell line that expresses any one of the peptides of the invention in a culture medium comprising any of the peptides described herein.

[0679] Various expression systems for producing recombinant proteins/peptides are known in the art, and include, prokaryotic (e.g., bacteria), plant, insect, yeast, and mammalian expression systems. Suitable cell lines, can be transformed, transduced, or transfected with nucleic acids containing coding sequences for the peptides of the invention in order to produce the molecule of interest. Expression vectors containing such a nucleic acid sequence, which can be linked to at least one regulatory sequence in a manner that allows expression of the nucleotide sequence in a host cell, can be introduced via methods known in the art. Practitioners in the art understand that designing an expression vector can depend on factors, such as the choice of host cell to be transfected and/or the type and/or amount of desired protein to be expressed. Enhancer regions, which are those sequences found upstream or downstream of the promoter region in non-coding DNA regions, are also known in the art to be important in optimizing expression. If needed, origins of replication from viral sources can be employed, such as if a prokaryotic host is utilized for introduction of plasmid DNA. However, in eukaryotic organisms, chromosome integration is a common mechanism for DNA replication. For stable transfection of mammalian cells, a small fraction of cells can integrate introduced DNA into their genomes. The expression vector and transfection method utilized can be factors that contribute to a successful integration event. For stable amplification and expression of a desired protein, a vector containing DNA encoding a protein of interest is stably integrated into the genome of eukaryotic cells (for example mammalian cells), resulting in the stable expression of transfected genes. A gene that encodes a selectable marker (for example, resistance to antibiotics or drugs) can be introduced into host cells along with the gene of interest in order to identify and select clones that stably express a gene encoding a protein of interest. Cells containing the gene of interest can be identified by drug selection wherein cells that have incorporated the selectable marker gene will survive in the presence of the drug. Cells that have not incorporated the gene for the selectable marker die. Surviving cells can then be screened for the production of the desired protein molecule.

[0680] A host cell strain, which modulates the expression of the inserted sequences, or modifies and processes the nucleic acid in a specific fashion desired also may be chosen. Such modifications (for example, glycosylation and other post-translational modifications) and processing (for example, cleavage) of peptide/protein products may be important for the function of the peptide/protein. Different host cell strains have characteristic and specific mechanisms for the post-translational processing and modification of proteins and gene products. As such, appropriate host systems or cell lines can be chosen to ensure the correct modification and processing of the target protein expressed. Thus, eukaryotic host cells possessing the cellular machinery for proper processing of the primary transcript, glycosylation, and phosphorylation of the gene product may be used.

[0681] Various culturing parameters can be used with respect to the host cell being cultured. Appropriate culture conditions for mammalian cells are well known in the art (Cleveland W L, et al., 1983) or can be determined by the skilled artisan (see, for example, Animal Cell Culture: A Practical Approach 2nd Ed., Rickwood, D. and Hames, B. D., eds. (Oxford University Press: New York, 1992)). Cell culturing conditions can vary according to the type of host cell selected. Commercially available medium can be utilized.

[0682] Peptides of the invention can be purified from any human or non-human cell which expresses the peptide, including those which have been transfected with expression constructs that express peptides of the invention. For protein recovery, isolation and/or purification, the cell culture medium or cell lysate is centrifuged to remove particulate cells and cell debris. The desired peptide molecule is isolated or purified away from contaminating soluble proteins and peptides by suitable purification techniques. Non-limiting purification methods for proteins include: size exclusion chromatography; affinity chromatography; ion exchange chromatography; ethanol precipitation; reverse phase HPLC; chromatography on a resin, such as silica, or cation exchange resin, e.g., DEAE; chromatofocusing; SDS-PAGE; ammonium sulfate precipitation; gel filtration using, e.g., Sephadex G-75, Sepharose; protein A sepharose chromatography for removal of immunoglobulin contaminants; and the like. Other additives, such as protease inhibitors (e.g., PMSF or proteinase K) can be used to inhibit proteolytic degradation during purification. Purification procedures that can select for carbohydrates can also be used, e.g., ion-exchange soft gel chromatography, or HPLC using cation- or anionexchange resins, in which the more acidic fraction(s) is/are collected.

### Methods of Treatment

[0683] In one embodiment, the subject matter disclosed herein relates to a preventive medical treatment started after following diagnosis of influenza infection in order to prevent the infection from worsening or to cure the infection. In one embodiment, the subject matter disclosed herein relates to prophylaxis of subjects who are believed to be at risk for influenza infection or have previously been diagnosed with influenza infection. In one embodiment, said subjects can be administered a composition of the invention. The invention contemplates using any of the nucleic acid sequences or peptides produced by the systems and methods described herein. In one embodiment, the compositions described herein can be administered subcutaneously via syringe or any other suitable method know in the art.

[0684] The compound(s) or combination of compounds disclosed herein, or compositions may be administered to a cell, mammal, or human by any suitable means. Non-limiting examples of methods of administration include, among others, (a) administration though oral pathways, which includes administration in capsule, tablet, granule, spray, syrup, or other such forms; (b) administration through non-oral pathways such as intraocular, intranasal, intraauricular, rectal, vaginal, intraurethral, transmucosal, buccal, or transdermal, which includes administration as an aqueous suspension, an oily preparation or the like or as a drip, spray, suppository, salve, ointment or the like; (c) administration via injection, including subcutaneously, intraperitoneally, intravenously, intramuscularly, intradermally, intraorbitally, intracapsularly, intraspinally, intrasternally, or the like, including infusion pump delivery; (d) administration locally such as by injection directly in the renal or cardiac area, e.g., by depot implantation; (e) administration topically; as deemed appropriate by those of skill in the art for bringing the compound or combination of compounds disclosed herein into contact with living tissue; (f) administration via inhalation, including through aerosolized, nebulized, and powdered formulations; and (g) administration through implantation.

[0685] As will be readily apparent to one skilled in the art, the effective in vivo dose to be administered and the particular mode of administration will vary depending upon the age, weight and species treated, and the specific use for which the compound or combination of compounds disclosed herein are employed. The determination of effective dose levels, that is the dose levels necessary to achieve the desired result, can be accomplished by one skilled in the art using routine pharmacological methods. Typically, human clinical applications of products are commenced at lower dose levels, with dose level being increased until the desired effect is achieved. Alternatively, acceptable in vitro studies can be used to establish useful doses and routes of administration of the compositions identified by the present methods using established pharmacological methods. Effective animal doses from in vivo studies can be converted to appropriate human doses using conversion methods known in the art (e.g., see Nair A B, Jacob S. A simple practice guide for dose conversion between animals and human. Journal of basic and clinical pharmacy. 2016 March; 7(2):27.)

### Methods of Prevention

[0686] In some embodiments, the peptides prepared using methods of the invention can be used as a vaccine to promote an immune response against influenza infection. In some embodiments, the invention provides compositions and methods for induction of immune response, for example induction of antibodies to influenza antigens. In some embodiments, the antibodies are broadly neutralizing antibodies. In some embodiments, the invention provides compositions and methods for induction of immune response, for example induction of a T cell response to influenza antigens. In some embodiments, the compositions prepared using methods of the invention can be used as a vaccine to promote an immune response against a pathogen. In some embodiments, the nucleic acid sequences or peptides prepared using methods of the invention can be used to promote immune tolerance as an autoimmune disease therapeutic.

[0687] In some embodiments, the peptides prepared using methods of the invention can be combined with additional therapeutic components. In some embodiments, the combination can be encoded in one or more nucleic acids that encode the peptides produced with the methods described herein and additional therapeutic components (e.g., peptides or proteins) that are known in the art. In some embodiments, the combination is created by adding the peptides or proteins that encode the additional therapeutic components of the peptides that result from the methods described here for combined formulation and packaging. An example of the combination of components is the creation of influenza vaccines that contain components of four different strains of influenza known as quadrivalent vaccines. In some embodiments, peptide components to invoke an adaptative immune response can be added to such combined vaccines (e.g., influenza) by using one or more nucleic acids to encode the components and packaging the nucleic acids in a mRNA-LNP or DNA formulation, or separately formulating different components as mRNA-LNP or DNA and then combining them for packaging or immediately before administration to a person. In some embodiments, influenza or other vaccines that encode one or more protein fragments to produce an antibody response can be combined with a peptide vaccine using the methods described herein to produce a cellular immune response.

[0688] The compositions, systems, and methods disclosed herein are not to be limited in scope to the specific embodiments described herein. Indeed, various modifications of the compositions, systems, and methods in addition to those described will become apparent to those of skill in the art from the foregoing description.

### REFERENCES

[0689] 1. Alhadj A. M., et al., Metabolic and immune effects of immunotherapy with proinsulin peptide in human new-onset type 1 diabetes, Sci. Transl. Med., 2017, 9(402): eaaf7779.
[0690] 2. Alvarez B., et al., MHC Peptidome Deconvolution for Accurate MHC Binding Motif Characterization and Improved T-cell Epitope Predictions, Mol. Cell. Proteomics, 2019, 18(12): 2459-2477.
[0691] 3. Antunes D. A., et al., General prediction of peptide-mhc binding modes using incremental docking: a proof of concept, Sci. Rep., 2018, 8(1): 4327-4339.
[0692] 4. Bear A. S., et al., Biochemical and functional characterization of mutant KRAS epitopes validates this oncoprotein for immunological targeting, Nat. Commun., 2021, 12(1): 4365-4380.
[0693] 5. Brito L. A., et al., A cationic nanoemulsion for the delivery of next-generation RNA vaccines, Mol. Ther., 2014, 22(12): 2118-2129.
[0694] 6. Bulik-Sullivan B., et al., Deep learning using tumor HLA peptide mass spectrometry datasets improves neoantigen identification, Nat. Biotechnol., 2018, 37: 55-63.
[0695] 7. Candia M., et al., On peptides and altered peptide ligands: from origin, mode of action and design to clinical application (immunotherapy), Int. Arch. Allergy Immunol., 2016, 170(4): 211-233.
[0696] 8. Chicz R. M., et al., Predominant naturally processed peptides bound to HLA-DR1 are derived from MHC-related molecules and are heterogeneous in size, Nature, 1992, 358(6389): 764-768.
[0697] 9. Cleveland W. L., et al., Routine large-scale production of monoclonal antibodies in a protein-free culture medium, J. Immunol. Methods, 1983, 56(2): 221-234.
[0698] 10. Croft N. P., et al., Most viral peptides displayed by class I MHC on infected cells are immunogenic, Proc. Natl. Acad. Sci. U.S.A., 2019, 116(8): 3112-3117.
[0699] 11. Dai Z., et al., Machine learning optimization of peptides for presentation by class II MHCs, bioRxiv, 2020.
[0700] 12. Geall A. J., et al., Nonviral delivery of self-amplifying RNA vaccines, Proc. Natl. Acad. Sci. USA., 2012, 109(36):14604-14609.
[0701] 13. Gibson V. B., et al., Proinsulin multi-peptide immunotherapy induces antigen-specific regulatory T cells and limits autoimmunity in a humanized model, Clin. Exp. Immunol., 2015, 182(3): 251-260.
[0702] 14. Hie B., et al., Learning the language of viral evolution and escape, Science, 2021, 371(6526): 284-288.
[0703] 15. Houghton C. S., Immunological validation of the EpitOptimizer program for streamlined design of heteroclitic epitopes, Vaccine, 2007, 25(29): 5330-5342.
[0704] 16. Klinger M., et al., Multiplex identification of antigen-specific T cell receptors using a combination of immune assays and immune receptor sequencing, PLoS One, 2015, 10(10): e0141561.
[0705] 17. Kranz L. M., et al., Systemic RNA delivery to dendritic cells exploits antiviral defence for cancer immunotherapy, Nature, 2016, 534(7607): 396-401.
[0706] 18. Kreiter, S., et al., Increased antigen presentation efficiency by coupling antigens to MHC class I trafficking signals, J. Immunol., 2008, 180(1): 309-318.
[0707] 19. Liu G., et al., Computationally optimized SARS-CoV-2 MHC class I and II vaccine formulations predicted to target human haplotype distributions, Cell Syst., 2020a, 11(2): 131-144.
[0708] 20. Liu G., et al., Predicted cellular immunity population coverage gaps for sars-cov-2 subunit vaccines and their augmentation by compact peptide sets, Cell Syst., 2020b, 12(1): P102-P107.
[0709] 21. Liu G., et al., Maximum n-times Coverage for Vaccine Design, https://arxiv.org/abs/2101.10902v3, 2021.
[0710] 22. London N., et al., Rosetta FlexPepDock web server—high resolution modeling of peptide-protein interactions, Nucleic Acids Res., 2011, 39: W249-253.
[0711] 23. Maa Y. F. & Prestrelski S. J., Biopharmaceutical powders: particle formation and formulation considerations, Curr. Pharm. Biotechnol., 2000, 1(3) 283-302.
[0712] 24. Ng A. W. R., et al., In silico-guided sequence modifications of K-ras epitopes improve immunological outcome against G12V and G13D mutant KRAS antigens, PeerJ, 2018, 6:e5056.
[0713] 25. Nielsen M., et al., The role of the proteasome in generating cytotoxic T-cell epitopes: insights obtained from improved predictions of proteasomal cleavage, Immunogenetics, 2005, 57(1-2): 33-41.
[0714] 26. Nielsen M., et al., Quantitative predictions of peptide binding to any HLA-DR molecule of known sequence: NetMHCIIpan. PLoS Comput. Biol., 2008, 4(7): e1000107.
[0715] 27. Nielsen M., et al., An artificial neural network-based alignment algorithm for MHC class II peptide binding prediction, BMC Bioinformatics, 2009, 10: 296.
[0716] 28. Nielsen M, et al., NNAlign: a platform to construct and evaluate artificial neural network models of receptor-ligand interactions, Nucleic Acids Res., 2017, 45(W1): W344-W349.
[0717] 29. O'Donnell T. J., et al., MHCflurry: open-source class I MHC binding affinity prediction, Cell Syst., 2018, 7(1): 129-132.
[0718] 30. O'Donnell T. J., et al., MHCflurry 2.0: Improved pan-allele prediction of MHC class I-presented peptides by incorporating antigen processing. Cell Syst., 2020, 11(1): 42-48.
[0719] 31. Ogishi M., et al., Quantitative prediction of the landscape of t cell epitope immunogenicity in sequence space, Front. Immunol., 2019, 10: 827.
[0720] 32. Park M. S., et al., Accurate structure prediction of peptide-MHC complexes for identifying highly immunogenic antigens, Mol. Immunol., 2013, 56(1-2): 81-90.
[0721] 33. Reynisson B., et al., NetMHCpan-4.1 and NetMHCIIpan-4.0: improved predictions of MHC antigen presentation by concurrent motif deconvolution and integration of MS MHC eluted ligand data, Nucleic Acids Res., 2020, 48(W1):W449-W454.
[0722] 34. Rist M. J., et al., HLA peptide length preferences control CD8+ T cell responses, J. Immunol., 2013, 191(2): 561-571.
[0723] 35. Sahin U., et al., Personalized RNA mutanome vaccines mobilize poly-specific therapeutic immunity against cancer, Nature, 2017, 547(7662): 222-226.
[0724] 36. Slota M., et al., ELISpot for measuring human immune responses to vaccines, Expert Rev. Vaccines, 2011, 10(3): 299-306.
[0725] 37. Tapia-Calle G., et al., A PBMC-based system to assess human t cell responses to influenza vaccine candidates in vitro, Vaccines (Basel), 2019, 7(4): 181.
[0726] 38. Toussaint N. C., et al., A mathematical framework for the selection of an optimal set of peptides for epitope-based vaccines. PLoS Comput. Biol., 2008, 4(12): e1000246.
[0727] 39. Trolle T., et al., The length distribution of class I-restricted T cell epitopes is determined by both peptide supply and MHC allele-specific binding preference, J Immunol., 2016, 196(4): 1480-1487.
[0728] 40. Vita R., et al., The Immune Epitope Database (IEDB): 2018 update, Nucleic Acids Res., 2019, 47(D1): D339-D343.
[0729] 41. Woodham A. W., et al., Nanobody-antigen conjugates elicit hpv-specific antitumor immune responses, Cancer Immunol. Res., 2018, 6(7): 870-880.
[0730] 42. Zirlik, K. M., et al., Cytotoxic T cells generated against heteroclitic peptides kill primary tumor cells independent of the binding affinity of the native tumor antigen peptide, Blood, 2006, 108(12): 3865-3870.

1. A composition comprising nucleic acid sequences encoding at least two amino acid sequences selected from the group consisting of SEQ ID NOs: 1 to 8, SEQ ID NOs: 10 to 11, SEQ ID NOs: 13 to 14, SEQ ID NOs: 16 to 18, SEQ ID NO: 20, SEQ ID NOs: 22 to 23, SEQ ID NOs: 25 to 28, SEQ ID NO: 30, SEQ ID NOs: 33 to 36, SEQ ID NOs: 38 to 39, SEQ ID NOs: 41 to 48, SEQ ID NOs: 81 to 115, SEQ ID NOs: 117 to 125, and SEQ ID NOs: 127 to 143.

2. The composition of claim 1, wherein the nucleic acid sequences are encoded in a construct, and wherein the construct allows for in vivo expression of the sequences.

3. The composition of claim 2, comprising nucleic acid sequences encoding at least two amino acid sequences selected from the group consisting of SEQ ID NOs: 1 to 8, SEQ ID NOs: 10 to 11, SEQ ID NOs: 13 to 14, SEQ ID NOs: 16 to 18, SEQ ID NO: 20, SEQ ID NOs: 22 to 23, SEQ ID NOs: 25 to 28, SEQ ID NO: 30, SEQ ID NOs: 33 to 36, SEQ ID NOs: 38 to 39, and SEQ ID NOs: 41 to 48, wherein the construct allows for in vivo expression of one or more peptides encoded by the nucleic acid sequences that is displayed by an HLA class I molecule.

4. The composition of claim 3, wherein the construct allows for in vivo expression of at least two peptides encoded by the nucleic acid sequences that are each displayed by a peptide specific set of HLA class I alleles, and wherein all of the peptide specific sets of HLA class I alleles are not identical.

5. The composition of claim 1, wherein each of the at least two amino sequences comprises a heteroclitic modification of a fragment of an influenza nucleoprotein protein.

6. A method of promoting an immune response against influenza or treating influenza in the subject, the method comprising administering an effective amount of the composition of claim 1 to the subject.

7. The composition of claim 1, wherein the nucleic acid sequences encode at least three amino acid sequences selected from the group consisting of SEQ ID NOs: 1 to 8, SEQ ID NOs: 10 to 11, SEQ ID NOs: 13 to 14, SEQ ID NOs: 16 to 18, SEQ ID NO: 20, SEQ ID NOs: 22 to 23, SEQ ID NOs: 25 to 28, SEQ ID NO: 30, SEQ ID NOs: 33 to 36, SEQ ID NOs: 38 to 39, and SEQ ID NOs: 41 to 48.

8-9. (canceled)

10. The composition of claim 2, comprising nucleic acid sequences encoding at least two amino acid sequences selected from the group consisting of SEQ ID NOs: 81 to 115, SEQ ID NOs: 117 to 125, and SEQ ID NOs: 127 to 143, wherein the construct allows for in vivo expression of one or more peptides encoded by the nucleic acid sequences that is displayed by an HLA class II molecule.

11. The composition of claim 10, wherein the construct allows for in vivo expression of at least two peptides encoded by the nucleic acid sequences that are each displayed by a peptide specific set of HLA class II alleles, and wherein all of the peptide specific sets of HLA class II alleles are not identical.

12-13. (canceled)

14. The composition of claim 1, wherein the nucleic acid sequences encode at least three amino acid sequences selected from the group consisting of SEQ ID NOs: 81 to 115, SEQ ID NOs: 117 to 125, and SEQ ID NOs: 127 to 143.

15. A composition comprising nucleic acid sequences encoding at least two amino acid sequences selected from the group consisting of SEQ ID NOs: 137516 to 137519, SEQ ID NOs: 137521 to 137522, SEQ ID NOs: 137525 to 137526, SEQ ID NOs: 137528 to 137541, SEQ ID NOs: 137543 to 137546, SEQ ID NOs: 137548 to 137554, SEQ ID NOs: 137556 to 137559, SEQ ID NOs: 137561 to 137563, SEQ ID NOs: 137565 to 137567, SEQ ID NOs: 137569 to 137570, SEQ ID NO: 137572, SEQ ID NO: 137574, SEQ ID NOs: 137576 to 137580, SEQ ID NO: 137582, SEQ ID NO: 137584, SEQ ID NOs: 137586 to 137591, SEQ ID NOs: 137593 to 137594, SEQ ID NOs: 137596 to 137598, SEQ ID NOs: 137600 to 137602, SEQ ID NOs: 137605 to 137608, SEQ ID NOs: 137610 to 137614, SEQ ID NO: 137616, SEQ ID NOs: 137618 to 137623, SEQ ID NOs: 137625 to 137626, SEQ ID NOs: 137628 to 137632, SEQ ID NOs: 137634 to 137638, SEQ ID NOs: 137640 to 137644, SEQ ID NOs: 137646 to 137647, SEQ ID NOs: 137649 to 137655, SEQ ID NO: 137657, SEQ ID NOs: 137661 to 137663, SEQ ID NOs: 137665 to 137675, SEQ ID NOs: 137682 to 137749 and SEQ ID NOs: 137751 to 137830.

16. The composition of claim 15, wherein the nucleic acid sequences are encoded in a construct, and wherein the construct allows for in vivo expression of the sequences.

17. The composition of claim 16, comprising nucleic acid sequences encoding at least two amino acid sequences selected from the group consisting of SEQ ID NOs: 137516 to 137519, SEQ ID NOs: 137521 to 137522, SEQ ID NOs: 137525 to 137526, SEQ ID NOs: 137528 to 137541, SEQ ID NOs: 137543 to 137546, SEQ ID NOs: 137548 to 137554, SEQ ID NOs: 137556 to 137559, SEQ ID NOs: 137561 to 137563, SEQ ID NOs: 137565 to 137567, SEQ ID NOs: 137569 to 137570, SEQ ID NO: 137572, SEQ ID NO: 137574, SEQ ID NOs: 137576 to 137580, SEQ ID NO: 137582, SEQ ID NO: 137584, SEQ ID NOs: 137586 to 137591, SEQ ID NOs: 137593 to 137594, SEQ ID NOs: 137596 to 137598, SEQ ID NOs: 137600 to 137602, SEQ ID NOs: 137605 to 137608, SEQ ID NOs: 137610 to 137614, SEQ ID NO: 137616, SEQ ID NOs: 137618 to 137623, SEQ ID NOs: 137625 to 137626, SEQ ID NOs: 137628 to 137632, SEQ ID NOs: 137634 to 137638, SEQ ID NOs: 137640 to 137644, SEQ ID NOs: 137646 to 137647, SEQ ID NOs: 137649 to 137655, SEQ ID NO: 137657, SEQ ID NOs: 137661 to 137663, and SEQ ID NOs: 137665 to 137675, wherein the construct allows for in vivo expression of one or more peptides encoded by the nucleic acid sequences that is displayed by an HLA class I molecule.

18. The composition of claim 17, wherein the construct allows for in vivo expression of at least two peptides encoded by the nucleic acid sequences that are each displayed by a peptide specific set of HLA class I alleles, and wherein all of the peptide specific sets of HLA class I alleles are not identical.

19. The composition of claim 15, wherein each of the at least two amino sequences comprises a heteroclitic modification of a fragment of a protein selected from the group consisting of RNA-directed RNA polymerase catalytic subunit, Matrix protein 1, Polymerase basic protein 2, Polymerase acidic protein, and Protein PA-X.

20. A method of promoting an immune response against influenza or treating influenza in the subject, the method comprising administering an effective amount of the composition of claim 15 to the subject.

21. The composition of claim 15, wherein the nucleic acid sequences encode at least three amino acid sequences selected from the group consisting of SEQ ID NOs: 137516 to 137519, SEQ ID NOs: 137521 to 137522, SEQ ID NOs: 137525 to 137526, SEQ ID NOs: 137528 to 137541, SEQ ID NOs: 137543 to 137546, SEQ ID NOs: 137548 to 137554, SEQ ID NOs: 137556 to 137559, SEQ ID NOs: 137561 to 137563, SEQ ID NOs: 137565 to 137567, SEQ ID NOs: 137569 to 137570, SEQ ID NO: 137572, SEQ ID NO: 137574, SEQ ID NOs: 137576 to 137580, SEQ ID NO: 137582, SEQ ID NO: 137584, SEQ ID NOs: 137586 to 137591, SEQ ID NOs: 137593 to 137594, SEQ ID NOs: 137596 to 137598, SEQ ID NOs: 137600 to 137602, SEQ ID NOs: 137605 to 137608, SEQ ID NOs: 137610 to 137614, SEQ ID NO: 137616, SEQ ID NOs: 137618 to 137623, SEQ ID NOs: 137625 to 137626, SEQ ID NOs: 137628 to 137632, SEQ ID NOs: 137634 to 137638, SEQ ID NOs: 137640 to 137644, SEQ ID NOs: 137646 to 137647, SEQ ID NOs: 137649 to 137655, SEQ ID NO: 137657, SEQ ID NOs: 137661 to 137663, and SEQ ID NOs: 137665 to 137675.

22-23. (canceled)

24. The composition of claim 15, comprising nucleic acid sequences encoding at least two amino acid sequences selected from the group consisting of SEQ ID NOs: 137682 to 137749 and SEQ ID NOs: 137751 to 137830, wherein the construct allows for in vivo expression of one or more peptides encoded by the nucleic acid sequences that is displayed by an HLA class II molecule.

25. The composition of claim 24, wherein the construct allows for in vivo expression of at least two peptides encoded by the nucleic acid sequences that are each displayed by a peptide specific set of HLA class II alleles, and wherein all of the peptide specific sets of HLA class II alleles are not identical.

26-27. (canceled)

28. The composition of claim 15, wherein the nucleic acid sequences encode at least three amino acid sequences selected from the group consisting of SEQ ID NOs: 137682 to 137749 and SEQ ID NOs: 137751 to 137830.

The application's sequence listing, which the Patent Office published only in electronic form, follows.

SEQUENCE LISTING (283766 sequences)

SEQ ID NO: 1 - protein, 10 aa, Artificial Sequence
  Description of Artificial Sequence: Synthetic peptide
  Seed: SLMQGSTLPR
SVMQGSTLPK

SEQ ID NO: 2 - protein, 9 aa, Artificial Sequence
  Description of Artificial Sequence: Synthetic peptide
  Seed: LPRRSGAAG
LPRRSGAAM

SEQ ID NO: 3 - protein, 11 aa, Artificial Sequence
  Description of Artificial Sequence: Synthetic peptide
  Seed: RMCSLMQGSTL
RQCSLMQGSTF

SEQ ID NO: 4 - protein, 9 aa, Artificial Sequence
  Description of Artificial Sequence: Synthetic peptide
  Seed: STLPRRSGA
STLPRRSGK

SEQ ID NO: 5 - protein, 10 aa, Artificial Sequence
  Description of Artificial Sequence: Synthetic peptide
  Seed: SLMQGSTLPR
SYMQGSTLPK

SEQ ID NO: 6 - protein, 9 aa, Artificial Sequence
  Description of Artificial Sequence: Synthetic peptide
  Seed: FSVQRNLPF
FAVQRNLPY

SEQ ID NO: 7 - protein, 9 aa, Artificial Sequence
  Description of Artificial Sequence: Synthetic peptide
  Seed: FSVQRNLPF
FAVQRNLPM

SEQ ID NO: 8 - protein, 9 aa, Artificial Sequence
  Description of Artificial Sequence: Synthetic peptide
  Seed: FSVQRNLPF
FTVQRNLPW

SEQ ID NO: 9 - protein, 9 aa, Artificial Sequence
  Description of Artificial Sequence: Synthetic peptide
  Seed: TYQRTRALV
TYQRTRALI

SEQ ID NO: 10 - protein, 10 aa, Artificial Sequence
  Description of Artificial Sequence: Synthetic peptide
  Seed: TYQRTRALVR
TFQRTRALVR

SEQ ID NO: 11 - protein, 9 aa, Artificial Sequence
  Description of Artificial Sequence: Synthetic peptide
  Seed: TYQRTRALV
TYQRTRALW

SEQ ID NO: 12 - protein, 10 aa, Artificial Sequence
  Description of Artificial Sequence: Synthetic peptide
  Seed: SLMQGSTLPR
SVMQGSTLPR

SEQ ID NO: 13 - protein, 10 aa, Artificial Sequence
  Description of Artificial Sequence: Synthetic peptide
  Seed: EGSYFFGDNA
EVSYFFGDNL

SEQ ID NO: 14 - protein, 9 aa, Artificial Sequence
  Description of Artificial Sequence: Synthetic peptide
  Seed: FSVQRNLPF
FTVQRNLPY

SEQ ID NO: 15 - protein, 9 aa, Artificial Sequence
  Description of Artificial Sequence: Synthetic peptide
  Seed: TYQRTRALV
TYQRTRALF

SEQ ID NO: 16 - protein, 10 aa, Artificial Sequence
  Description of Artificial Sequence: Synthetic peptide
  Seed: TGMDPRMCSL
TMMDPRMCSL

SEQ ID NO: 17 - protein, 9 aa, Artificial Sequence
  Description of Artificial Sequence: Synthetic peptide
  Seed: FSVQRNLPF
FSVQRNLPW

SEQ ID NO: 18 - protein, 9 aa, Artificial Sequence
  Description of Artificial Sequence: Synthetic peptide
  Seed: MVLSAFDER
MYLSAFDER

SEQ ID NO: 19 - protein, 9 aa, Artificial Sequence
  Description of Artificial Sequence: Synthetic peptide
  Seed: YQRTRALVR
YQRTRALVK

SEQ ID NO: 20 - protein, 9 aa, Artificial Sequence
  Description of Artificial Sequence: Synthetic peptide
  Seed: MVLSAFDER
MTLSAFDER

SEQ ID NO: 21 - protein, 10 aa, Artificial Sequence
  Description of Artificial Sequence: Synthetic peptide
  Seed: NPAHKSQLVW
NTAHKSQLVW

SEQ ID NO: 22 - protein, 9 aa, Artificial Sequence
  Description of Artificial Sequence: Synthetic peptide
  Seed: TYQRTRALV
TWQRTRALF

SEQ ID NO: 23 - protein, 10 aa, Artificial Sequence
  Description of Artificial Sequence: Synthetic peptide
  Seed: RTGMDPRMCS
RSGMDPRMCK

SEQ ID NO: 24 - protein, 9 aa, Artificial Sequence
  Description of Artificial Sequence: Synthetic peptide
  Seed: FSVQRNLPF
FSVQRNLPL

SEQ ID NO: 25 - protein, 11 aa, Artificial Sequence
  Description of Artificial Sequence: Synthetic peptide
  Seed: RMCSLMQGSTL
RQCSLMQGSTY

SEQ ID NO: 26 - protein, 9 aa, Artificial Sequence
  Description of Artificial Sequence: Synthetic peptide
  Seed: KSCLPACVY
KMCLPACVY

SEQ ID NO: 27 - protein, 10 aa, Artificial Sequence
  Description of Artificial Sequence: Synthetic peptide
  Seed: SLMQGSTLPR
SIMQGSTLPK

SEQ ID NO: 28 - protein, 9 aa, Artificial Sequence
  Description of Artificial Sequence: Synthetic peptide
  Seed: LPRRSGAAG
LPRRSGAAL

SEQ ID NO: 29 - protein, 9 aa, Artificial Sequence
  Description of Artificial Sequence: Synthetic peptide
  Seed: GMDPRMCSL
GMDPRMCSV

SEQ ID NO: 30 - protein, 9 aa, Artificial Sequence
  Description of Artificial Sequence: Synthetic peptide
  Seed: CSLMQGSTL
CALMQGSTM

SEQ ID NO: 31 - protein, 9 aa, Artificial Sequence
  Description of Artificial Sequence: Synthetic peptide
  Seed: LPRRSGAAG
LPRRSGAAV

SEQ ID NO: 32 - protein, 9 aa, Artificial Sequence
  Description of Artificial Sequence: Synthetic peptide
  Seed: ILKGKFQTA
ILKGKFQTV

SEQ ID NO: 33 - protein, 9 aa, Artificial Sequence
  Description of Artificial Sequence: Synthetic peptide
  Seed: CSLMQGSTL
CALMQGSTY

SEQ ID NO: 34 - protein, 10 aa, Artificial Sequence
  Description of Artificial Sequence: Synthetic peptide
  Seed: SLMQGSTLPR
SFMQGSTLPR

SEQ ID NO: 35 - protein, 9 aa, Artificial Sequence
  Description of Artificial Sequence: Synthetic peptide
  Seed: STLPRRSGA
SSLPRRSGK

SEQ ID NO: 36 - protein, 9 aa, Artificial Sequence
  Description of Artificial Sequence: Synthetic peptide
  Seed: GMDPRMCSL
GLDPRMCSV

SEQ ID NO: 37 - protein, 9 aa, Artificial Sequence
  Description of Artificial Sequence: Synthetic peptide
  Seed: LPRRSGAAG
LPRRSGAAA

SEQ ID NO: 38 - protein, 9 aa, Artificial Sequence
  Description of Artificial Sequence: Synthetic peptide
  Seed: CSLMQGSTL
CALMQGSTL

SEQ ID NO: 39 - protein, 10 aa, Artificial Sequence
  Description of Artificial Sequence: Synthetic peptide
  Seed: SLMQGSTLPR
STMQGSTLPK

SEQ ID NO: 40 - protein, 11 aa, Artificial Sequence
  Description of Artificial Sequence: Synthetic peptide
  Seed: RMCSLMQGSTL
RMCSLMQGSTF

SEQ ID NO: 41 - protein, 9 aa, Artificial Sequence
  Description of Artificial Sequence: Synthetic peptide
  Seed: CSLMQGSTL
CALMQGSTF

SEQ ID NO: 42 - protein, 9 aa, Artificial Sequence
  Description of Artificial Sequence: Synthetic peptide
  Seed: STLPRRSGA
SVLPRRSGK

SEQ ID NO: 43 - protein, 10 aa, Artificial Sequence
  Description of Artificial Sequence: Synthetic peptide
  Seed: SLMQGSTLPR
SMMQGSTLPK

SEQ ID NO: 44 - protein, 9 aa, Artificial Sequence
  Description of Artificial Sequence: Synthetic peptide
  Seed: ILKGKFQTA
IMKGKFQTI

SEQ ID NO: 45 - protein, 9 aa, Artificial Sequence
  Description of Artificial Sequence: Synthetic peptide
  Seed: STLPRRSGA
SMLPRRSGK

SEQ ID NO: 46 - protein, 9 aa, Artificial Sequence
  Description of Artificial Sequence: Synthetic peptide
  Seed: ILKGKFQTA
IMKGKFQTA

SEQ ID NO: 47 - protein, 9 aa, Artificial Sequence
  Description of Artificial Sequence: Synthetic peptide
  Seed: ILKGKFQTA
IMKGKFQTV

SEQ ID NO: 48 - protein, 10 aa, Artificial Sequence
  Description of Artificial Sequence: Synthetic peptide
  Seed: AYERMCNILK
ATERMCNILK

SEQ ID NO: 49 - protein, 10 aa, Artificial Sequence
  Description of Artificial Sequence: Synthetic peptide
  Seed: SLMQGSTLPR
SSMQGSTLPR

SEQ ID NO: 50 - protein, 9 aa, Influenza A virus
ILRGSVAHK

SEQ ID NO: 51 - protein, 9 aa, Influenza A virus
LPRRSGAAG

SEQ ID NO: 52 - protein, 9 aa, Influenza A virus
NFWRGENGR

SEQ ID NO: 53 - protein, 9 aa, Influenza A virus
FQTAAQRAM

SEQ ID NO: 54 - protein, 10 aa, Influenza A virus
KDPKKTGGPI

SEQ ID NO: 55 - protein, 9 aa, Influenza A virus
STRGVQIAS

SEQ ID NO: 56 - protein, 9 aa, Influenza A virus
RTRSGGNTN

SEQ ID NO: 57 - protein, 10 aa, Influenza A virus
RMIKRGINDR

SEQ ID NO: 58 - protein, 9 aa, Influenza A virus
IQMCTELKL

SEQ ID NO: 59 - protein, 9 aa, Influenza A virus
YSLVGIDPF

SEQ ID NO: 60 - protein, 9 aa, Influenza A virus
LMQGSTLPR

SEQ ID NO: 61 - protein, 10 aa, Influenza A virus
AMMDQVRESR

SEQ ID NO: 62 - protein, 10 aa, Influenza A virus
MVLSAFDERR

SEQ ID NO: 63 - protein, 11 aa, Influenza A virus
SYFFGDNAEEY

SEQ ID NO: 64 - protein, 9 aa, Influenza A virus
ILKGKFQTA

SEQ ID NO: 65 - protein, 9 aa, Influenza A virus
IERMVLSAF

SEQ ID NO: 66 - protein, 10 aa, Influenza A virus
YFFGDNAEEY

SEQ ID NO: 67 - protein, 10 aa, Influenza A virus
RTRALVRTGM

SEQ ID NO: 68 - protein, 9 aa, Influenza A virus
FYIQMCTEL

SEQ ID NO: 69 - protein, 10 aa, Influenza A virus
LELRSRYWAI

SEQ ID NO: 70 - protein, 9 aa, Influenza A virus
GVFELSDEK

SEQ ID NO: 71 - protein, 8 aa, Influenza A virus
TYQRTRAL

SEQ ID NO: 72 - protein, 9 aa, Influenza A virus
MVLSAFDER

SEQ ID NO: 73 - protein, 9 aa, Influenza A virus
FSVQRNLPF

SEQ ID NO: 74 - protein, 9 aa, Influenza A virus
RMCNILKGK

SEQ ID NO: 75 - protein, 8 aa, Influenza A virus
YERMCNIL

SEQ ID NO: 76 - protein, 10 aa, Influenza A virus
MCSLMQGSTL

SEQ ID NO: 77 - protein, 10 aa, Influenza A virus
NPAHKSQLVW

SEQ ID NO: 78 - protein, 10 aa, Influenza A virus
LPRRSGAAGA

SEQ ID NO: 79 - protein, 9 aa, Influenza A virus
RGINDRNFW

SEQ ID NO: 80 - protein, 9 aa, Influenza A virus
KSCLPACVY

SEQ ID NO: 81 - protein, 15 aa, Artificial Sequence
  Description of Artificial Sequence: Synthetic peptide
  Seed: DPRMCSLMQGSTLPR
DPRMFSLMQSSTVPR

SEQ ID NO: 82 - protein, 15 aa, Artificial Sequence
  Description of Artificial Sequence: Synthetic peptide
  Seed: RSALILRGSVAHKSC
RSILILRSSVAHKSC

SEQ ID NO: 83 - protein, 15 aa, Artificial Sequence
  Description of Artificial Sequence: Synthetic peptide
  Seed: RMCNILKGKFQTAAQ
RMCNFLKTKFQTLAQ

SEQ ID NO: 84 - protein, 15 aa, Artificial Sequence
  Description of Artificial Sequence: Synthetic peptide
  Seed: RSALILRGSVAHKSC
RSALIFRGIVTHKAC

SEQ ID NO: 85 - protein, 15 aa, Artificial Sequence
  Description of Artificial Sequence: Synthetic peptide
  Seed: RSALILRGSVAHKSC
RSALIFRGIVNHKEC

SEQ ID NO: 86 - protein, 15 aa, Artificial Sequence
  Description of Artificial Sequence: Synthetic peptide
  Seed: RSALILRGSVAHKSC
RSALIFRGIVSHKAC

SEQ ID NO: 87 - protein, 15 aa, Artificial Sequence
  Description of Artificial Sequence: Synthetic peptide
  Seed: RSALILRGSVAHKSC
RSALIFRGIVVHKDC

SEQ ID NO: 88 - protein, 20 aa, Artificial Sequence
  Description of Artificial Sequence: Synthetic peptide
  Seed: TYQRTRALVRTGMDPRMCSL
TYQRTRALIRAGMIPRMCSL

SEQ ID NO: 89 - protein, 15 aa, Artificial Sequence
  Description of Artificial Sequence: Synthetic peptide
  Seed: RSALILRGSVAHKSC
RSAIILWGNVAAKSC

SEQ ID NO: 90 - protein, 20 aa, Artificial Sequence
  Description of Artificial Sequence: Synthetic peptide
  Seed: TYQRTRALVRTGMDPRMCSL
TYQRTRALIRAGMVPRMCSL

SEQ ID NO: 91 - protein, 15 aa, Artificial Sequence
  Description of Artificial Sequence: Synthetic peptide
  Seed: RSALILRGSVAHKSC
RSALIIRGMVVHKSC

SEQ ID NO: 92 - protein, 20 aa, Artificial Sequence
  Description of Artificial Sequence: Synthetic peptide
  Seed: TYQRTRALVRTGMDPRMCSL
TYQRTFALTRFGMVPRMCSL

SEQ ID NO: 93 - protein, 15 aa, Artificial Sequence
  Description of Artificial Sequence: Synthetic peptide
  Seed: RSALILRGSVAHKSC
RSAFILVGRVADKSC

SEQ ID NO: 94 - protein, 15 aa, Artificial Sequence
  Description of Artificial Sequence: Synthetic peptide
  Seed: RSALILRGSVAHKSC
RSFLILRASVYHKSC

SEQ ID NO: 95 - protein, 15 aa, Artificial Sequence
  Description of Artificial Sequence: Synthetic peptide
  Seed: RSALILRGSVAHKSC
RSAFILIGTVAHKSC

SEQ ID NO: 96 - protein, 15 aa, Artificial Sequence
  Description of Artificial Sequence: Synthetic peptide
  Seed: RSALILRGSVAHKSC
RSALIIRGAVAHKIC

SEQ ID NO: 97 - protein, 15 aa, Artificial Sequence
  Description of Artificial Sequence: Synthetic peptide
  Seed: RMCNILKGKFQTAAQ
RMCNFLKMKFQTVAQ

SEQ ID NO: 98 - protein, 15 aa, Artificial Sequence
  Description of Artificial Sequence: Synthetic peptide
  Seed: RSALILRGSVAHKSC
RSAIILMGSVAHKSC

SEQ ID NO: 99 - protein, 15 aa, Artificial Sequence
  Description of Artificial Sequence: Synthetic peptide
  Seed: RSALILRGSVAHKSC
RSALIIRGMVVHKAC

SEQ ID NO: 100 - protein, 15 aa, Artificial Sequence
  Description of Artificial Sequence: Synthetic peptide
  Seed: RSALILRGSVAHKSC
RSAFILIGTVARKSC

SEQ ID NO: 101 - protein, 15 aa, Artificial Sequence
  Description of Artificial Sequence: Synthetic peptide
  Seed: RSALILRGSVAHKSC
RSLLILRASVMHKSC

SEQ ID NO: 102 - protein, 15 aa, Artificial Sequence
  Description of Artificial Sequence: Synthetic peptide
  Seed: RSALILRGSVAHKSC
RSALIIRGSVAHKVC

SEQ ID NO: 103 - protein, 15 aa, Artificial Sequence
  Description of Artificial Sequence: Synthetic peptide
  Seed: RMCNILKGKFQTAAQ
RMCNFLKAKFQTLAQ

SEQ ID NO: 104 - protein, 15 aa, Artificial Sequence
  Description of Artificial Sequence: Synthetic peptide
  Seed: RSALILRGSVAHKSC
RSALIFRGDVSHKAC

SEQ ID NO: 105 - protein, 15 aa, Artificial Sequence
  Description of Artificial Sequence: Synthetic peptide
  Seed: RSALILRGSVAHKSC
RSAIILWGNVASKSC

SEQ ID NO: 106 - protein, 15 aa, Artificial Sequence
  Description of Artificial Sequence: Synthetic peptide
  Seed: RSALILRGSVAHKSC
RSALIIRGFVSHKAC

SEQ ID NO: 107 - protein, 15 aa, Artificial Sequence
  Description of Artificial Sequence: Synthetic peptide
  Seed: RSALILRGSVAHKSC
RSAYILIGRVAHKSC

SEQ ID NO: 108 - protein, 15 aa, Artificial Sequence
  Description of Artificial Sequence: Synthetic peptide
  Seed: RSALILRGSVAHKSC
RSAFILIGRVAHKSC

SEQ ID NO: 109 - protein, 15 aa, Artificial Sequence
  Description of Artificial Sequence: Synthetic peptide
  Seed: RSALILRGSVAHKSC
RSAFILFGSVAHKSC

SEQ ID NO: 110 - protein, 20 aa, Artificial Sequence
  Description of Artificial Sequence: Synthetic peptide
  Seed: TYQRTRALVRTGMDPRMCSL
TYQRTRALIRAGMAPRMCSL

SEQ ID NO: 111 - protein, 15 aa, Artificial Sequence
  Description of Artificial Sequence: Synthetic peptide
  Seed: RSALILRGSVAHKSC
RSILILRASVFHKSC

SEQ ID NO: 112 - protein, 15 aa, Artificial Sequence
  Description of Artificial Sequence: Synthetic peptide
  Seed: RSALILRGSVAHKSC
RSALIIRGAVAHKVC

SEQ ID NO: 113 - protein, 16 aa, Artificial Sequence
  Description of Artificial Sequence: Synthetic peptide
  Seed: AYERMCNILKGKFQTA
AYERMCNFLKTKFQTL

SEQ ID NO: 114 - protein, 15 aa, Artificial Sequence
  Description of Artificial Sequence: Synthetic peptide
  Seed: YERMCNILKGKFQTA
YERICNILRGKAQTA

SEQ ID NO: 115 - protein, 15 aa, Artificial Sequence
  Description of Artificial Sequence: Synthetic peptide
  Seed: MQGSTLPRRSGAAGA
MQGSTLIRRGGAAGA

SEQ ID NO: 116 - protein, 20 aa, Artificial Sequence
  Description of Artificial Sequence: Synthetic peptide
  Seed: RMCSLMQGSTLPRRSGAAGA
RMCSLMIGSALARRAGAAGA

SEQ ID NO: 117 - protein, 15 aa, Artificial Sequence
  Description of Artificial Sequence: Synthetic peptide
  Seed: MQGSTLPRRSGAAGA
MQGSTLFRRGGAAGA

SEQ ID NO: 118 - protein, 15 aa, Artificial Sequence
  Description of Artificial Sequence: Synthetic peptide
  Seed: PRMCSLMQGSTLPRR
PRMISLFQASTLPRR

SEQ ID NO: 119 - protein, 20 aa, Artificial Sequence
  Description of Artificial Sequence: Synthetic peptide
  Seed: MDPRMCSLMQGSTLPRRSGA
MDPRMCSLFQGVTFPRVSGA

SEQ ID NO: 120 - protein, 15 aa, Artificial Sequence
  Description of Artificial Sequence: Synthetic peptide
  Seed: MCSLMQGSTLPRRSG
MCSIMQISSLPVRSG

SEQ ID NO: 121 - protein, 20 aa, Artificial Sequence
  Description of Artificial Sequence: Synthetic peptide
  Seed: MDPRMCSLMQGSTLPRRSGA
MDPRMCSLFQGTTFPRVSGA

SEQ ID NO: 122 - protein, 15 aa, Artificial Sequence
  Description of Artificial Sequence: Synthetic peptide
  Seed: YERMCNILKGKFQTA
YERICNMLRGKAQTA

SEQ ID NO: 123 - protein, 20 aa, Artificial Sequence
  Description of Artificial Sequence: Synthetic peptide
  Seed: DPRMCSLMQGSTLPRRSGAA
DPRMCSLMMGSALIRRAGAA

SEQ ID NO: 124 - protein, 15 aa, Artificial Sequence
  Description of Artificial Sequence: Synthetic peptide
  Seed: DPRMCSLMQGSTLPR
DPRMFSLFQSSTAPR

SEQ ID NO: 125 - protein, 15 aa, Artificial Sequence
  Description of Artificial Sequence: Synthetic peptide
  Seed: YERMCNILKGKFQTA
YERICNILRGKVQTA

SEQ ID NO: 126 - protein, 17 aa, Artificial Sequence
  Description of Artificial Sequence: Synthetic peptide
  Seed: SLMQGSTLPRRSGAAGA
SLMNGSALIRRAGAAGA

SEQ ID NO: 127 - protein, 20 aa, Artificial Sequence
  Description of Artificial Sequence: Synthetic peptide
  Seed: DPRMCSLMQGSTLPRRSGAA
DPRMCSLMFGSTLFRRVGAA

SEQ ID NO: 128 - protein, 15 aa, Artificial Sequence
  Description of Artificial Sequence: Synthetic peptide
  Seed: DPRMCSLMQGSTLPR
DPRMISLIQSSTIPR

SEQ ID NO: 129 - protein, 16 aa, Artificial Sequence
  Description of Artificial Sequence: Synthetic peptide
  Seed: CSLMQGSTLPRRSGAA
CSLMIGSALARRAGAA

SEQ ID NO: 130 - protein, 15 aa, Artificial Sequence
  Description of Artificial Sequence: Synthetic peptide
  Seed: PRMCSLMQGSTLPRR
PRMISLFQASTAPRR

SEQ ID NO: 131 - protein, 15 aa, Artificial Sequence
  Description of Artificial Sequence: Synthetic peptide
  Seed: SLMQGSTLPRRSGAA
SLMNGSALIRRAGAA

SEQ ID NO: 132 - protein, 15 aa, Artificial Sequence
  Description of Artificial Sequence: Synthetic peptide
  Seed: YERMCNILKGKFQTA
YERICNMLRGKMQTA

SEQ ID NO: 133 - protein, 15 aa, Artificial Sequence
  Description of Artificial Sequence: Synthetic peptide
  Seed: RMCSLMQGSTLPRRS
RMCSIMQISALPMRS

SEQ ID NO: 134 - protein, 15 aa, Artificial Sequence
  Description of Artificial Sequence: Synthetic peptide
  Seed: SLMQGSTLPRRSGAA
SLMIGSALVRRAGAA

SEQ ID NO: 135 - protein, 15 aa, Artificial Sequence
  Description of Artificial Sequence: Synthetic peptide
  Seed: RMCSLMQGSTLPRRS
RMISLFQASTLPRRS

SEQ ID NO: 136 - protein, 15 aa, Artificial Sequence
  Description of Artificial Sequence: Synthetic peptide
  Seed: YERMCNILKGKFQTA
YERMCNFLKIKFQTL

SEQ ID NO: 137 - protein, 20 aa, Artificial Sequence
  Description of Artificial Sequence: Synthetic peptide
  Seed: MDPRMCSLMQGSTLPRRSGA
MDPRMCSLFQGLTFPRVSGA

SEQ ID NO: 138 - protein, 15 aa, Artificial Sequence
  Description of Artificial Sequence: Synthetic peptide
  Seed: PRMCSLMQGSTLPRR
PRMCSLMQMSRLPSR

SEQ ID NO: 139 - protein, 15 aa, Artificial Sequence
  Description of Artificial Sequence: Synthetic peptide
  Seed: PRMCSLMQGSTLPRR
PRMCSLMQISRLPTR

SEQ ID NO: 140 - protein, 15 aa, Artificial Sequence
  Description of Artificial Sequence: Synthetic peptide
  Seed: YERMCNILKGKFQTA
YERMCNFLKVKFQTI

SEQ ID NO: 141 - protein, 20 aa, Artificial Sequence
  Description of Artificial Sequence: Synthetic peptide
  Seed: GMDPRMCSLMQGSTLPRRSG
GMDPRMCSLFQGETFPRISG

SEQ ID NO: 142 - protein, 15 aa, Artificial Sequence
  Description of Artificial Sequence: Synthetic peptide
  Seed: YERMCNILKGKFQTA
YERICNMLRGKVQTA

SEQ ID NO: 143 - protein, 15 aa, Artificial Sequence
  Description of Artificial Sequence: Synthetic peptide
  Seed: RSALILRGSVAHKSC
RSALIIRGSVVHKVC

SEQ ID NO: 144 - protein, 9 aa, Influenza A virus
AAAGLTHLM

SEQ ID NO: 145 - protein, 11 aa, Influenza A virus
AAAGLTHLMIW

SEQ ID NO: 146 - protein, 11 aa, Influenza A virus
AAFEDLRISGF

SEQ ID NO: 147 - protein, 9 aa, Influenza A virus
AAFEDLRLF

SEQ ID NO: 148 - protein, 11 aa, Influenza A virus
AAFEDLRLFSF

SEQ ID NO: 149 - protein, 9 aa, Influenza A virus
AAFEDLRLL

SEQ ID NO: 150 - protein, 11 aa, Influenza A virus
AAFEDLRLLSF

SEQ ID NO: 151 - protein, 11 aa, Influenza A virus
AAFEDLRLSSF

SEQ ID NO: 152 - protein, 9 aa, Influenza A virus
AAFEDLRVL

SEQ ID NO: 153 - protein, 11 aa, Influenza A virus
AAFEDLRVLNF

SEQ ID NO: 154 - protein, 11 aa, Influenza A virus
AAFEDLRVLSF

SEQ ID NO: 155 - protein, 11 aa, Influenza A virus
AAFEDLRVSGF

SEQ ID NO: 156 - protein, 11 aa, Influenza A virus
AAFEDLRVSNF

SEQ ID NO: 157 - protein, 11 aa, Influenza A virus
AAFEDLRVSSF

SEQ ID NO: 158 - protein, 10 aa, Influenza A virus
AAFIGDNEGR

SEQ ID NO: 159 - protein, 10 aa, Influenza A virus
AAFIGNNEGR

SEQ ID NO: 160 - protein, 10 aa, Influenza A virus
AAFIGNTEGR

SEQ ID NO: 161 - protein, 10 aa, Influenza A virus
AAFKGNTEGR

SEQ ID NO: 162 - protein, 10 aa, Influenza A virus
AAFNGNTEGR

SEQ ID NO: 163 - protein, 10 aa, Influenza A virus
AAFSGNNEGR

SEQ ID NO: 164 - protein, 10 aa, Influenza A virus
AAFSGNTEGR

SEQ ID NO: 165 - protein, 10 aa, Influenza A virus
AAFTGNAEGR

SEQ ID NO: 166 - protein, 10 aa, Influenza A virus
AAFTGNNEGR

SEQ ID NO: 167 - protein, 10 aa, Influenza A virus
AAFTGNPEGR

SEQ ID NO: 168 - protein, 10 aa, Influenza A virus
AAFTGNTEGR

SEQ ID NO: 169 - protein, 9 aa, Influenza A virus
AAFTGNTER

SEQ ID NO: 170 - protein, 10 aa, Influenza A virus
AAFTGNTERR

SEQ ID NO: 171 - protein, 10 aa, Influenza A virus
AAFVGNNEGR

SEQ ID NO: 172 - protein, 10 aa, Influenza A virus
AAFVGNTEGR

SEQ ID NO: 173 - protein, 10 aa, Influenza A virus
AAGLTHLMIW

SEQ ID NO: 174 - protein, 9 aa, Influenza A virus
AAIKGVGTM

SEQ ID NO: 175 - protein, 10 aa, Influenza A virus
AAIKGVGTMV

SEQ ID NO: 176 - protein, 9 aa, Influenza A virus
AANPIVPSF

SEQ ID NO: 177 - protein, 10 aa, Influenza A virus
AAQRAIMDQV

SEQ ID NO: 178 - protein, 9 aa, Influenza A virus
AASPIVPSF

SEQ ID NO: 179 - protein, 9 aa, Influenza A virus
AAVKGIGTM

SEQ ID NO: 180 - protein, 9 aa, Influenza A virus
AAVKGVGTI

SEQ ID NO: 181 - protein, 9 aa, Influenza A virus
AAVKGVGTM

SEQ ID NO: 182 - protein, 9 aa, Influenza A virus
AAVKGVGTV

SEQ ID NO: 183 - protein, 10 aa, Influenza A virus
ADQISVQPTF

SEQ ID NO: 184 - protein, 8 aa, Influenza A virus
AEFEDLIF

SEQ ID NO: 185 - protein, 9 aa, Influenza A virus
AEFEDLIFL

SEQ ID NO: 186 - protein, 10 aa, Influenza A virus
AEFEDLIFLA

SEQ ID NO: 187 - protein, 8 aa, Influenza A virus
AEFEDLTF

SEQ ID NO: 188 - protein, 9 aa, Influenza A virus
AEFEDLTFL

SEQ ID NO: 189 - protein, 10 aa, Influenza A virus
AEFEDLTFLA

SEQ ID NO: 190 - protein, 10 aa, Influenza A virus
AEGRTSDMRA

SEQ ID NO: 191 - protein, 8 aa, Influenza A virus
AEIEDLIF

SEQ ID NO: 192 - protein, 9 aa, Influenza A virus
AEIEDLIFL

SEQ ID NO: 193 - protein, 10 aa, Influenza A virus
AEIEDLIFLA

SEQ ID NO: 194 - protein, 10 aa, Influenza A virus
AEIEDLIFLT

SEQ ID NO: 195 - protein, 9 aa, Influenza A virus
AEIEDLIFS

SEQ ID NO: 196 - protein, 10 aa, Influenza A virus
AEIEDLIFSA

SEQ ID NO: 197 - protein, 8 aa, Influenza A virus
AEIEDLTF

SEQ ID NO: 198 - protein, 9 aa, Influenza A virus
AEIEDLTFL

SEQ ID NO: 199 - protein, 10 aa, Influenza A virus
AEIEDLTFLA

SEQ ID NO: 200 - protein, 9 aa, Influenza A virus
AEIIKMMES

SEQ ID NO: 201 - protein, 10 aa, Influenza A virus
AEIIKMMESA

SEQ ID NO: 202 - protein, 9 aa, Influenza A virus
AEIIRLMEG

SEQ ID NO: 203 - protein, 10 aa, Influenza A virus
AEIIRLMEGA

SEQ ID NO: 204 - protein, 10 aa, Influenza A virus
AEIIRMMEDA

SEQ ID NO: 205 - protein, 9 aa, Influenza A virus
AEIIRMMEG

SEQ ID NO: 206 - protein, 10 aa, Influenza A virus
AEIIRMMEGA

SEQ ID NO: 207 - protein, 10 aa, Influenza A virus
AEIIRMMENA

SEQ ID NO: 208 - protein, 9 aa, Influenza A virus
AEIIRMMES

SEQ ID NO: 209 - protein, 10 aa, Influenza A virus
AEIIRMMESA

SEQ ID NO: 210 - protein, 9 aa, Influenza A virus
AEIIRVMES

SEQ ID NO: 211 - protein, 10 aa, Influenza A virus
AEIIRVMESA

SEQ ID NO: 212 - protein, 9 aa, Influenza A virus
AEVEDLIFL

SEQ ID NO: 213 - protein, 10 aa, Influenza A virus
AEVEDLIFLA

SEQ ID NO: 214 - protein, 8 aa, Influenza A virus
AEYEDLIF

SEQ ID NO: 215 - protein, 9 aa, Influenza A virus
AEYEDLIFL

SEQ ID NO: 216 - protein, 10 aa, Influenza A virus
AEYEDLIFLA

SEQ ID NO: 217 - protein, 9 aa, Influenza A virus
AFDERRNKY

SEQ ID NO: 218 - protein, 9 aa, Influenza A virus
AFDERRNRY

SEQ ID NO: 219 - protein, 10 aa, Influenza A virus
AFEDLRISGF

SEQ ID NO: 220 - protein, 10 aa, Influenza A virus
AFEDLRLFSF

SEQ ID NO: 221 - protein, 10 aa, Influenza A virus
AFEDLRLLSF

SEQ ID NO: 222 - protein, 10 aa, Influenza A virus
AFEDLRLSSF

SEQ ID NO: 223 - protein, 10 aa, Influenza A virus
AFEDLRVLNF

SEQ ID NO: 224 - protein, 10 aa, Influenza A virus
AFEDLRVLSF

SEQ ID NO: 225 - protein, 10 aa, Influenza A virus
AFEDLRVSGF

SEQ ID NO: 226 - protein, 10 aa, Influenza A virus
AFEDLRVSSF

SEQ ID NO: 227 - protein, 9 aa, Influenza A virus
AFEERRNKY

SEQ ID NO: 228 - protein, 9 aa, Influenza A virus
AFEKEGYSL

SEQ ID NO: 229 - protein, 10 aa, Influenza A virus
AFEKEGYSLV

SEQ ID NO: 230 - protein, 9 aa, Influenza A virus
AFIGDNEGR

SEQ ID NO: 231 - protein, 9 aa, Influenza A virus
AFIGNNEGR

SEQ ID NO: 232 - protein, 9 aa, Influenza A virus
AFIGNTEGR

SEQ ID NO: 233 - protein, 9 aa, Influenza A virus
AFKGNTEGR

SEQ ID NO: 234 - protein, 9 aa, Influenza A virus
AFNGNTEGR

SEQ ID NO: 235 - protein, 9 aa, Influenza A virus
AFSGNNEGR

SEQ ID NO: 236 - protein, 9 aa, Influenza A virus
AFSGNTEGR

SEQ ID NO: 237 - protein, 10 aa, Influenza A virus
AFSVQKNLPF

SEQ ID NO: 238 - protein, 10 aa, Influenza A virus
AFSVQRNLPF

SEQ ID NO: 239 - protein, 9 aa, Influenza A virus
AFTGNNEGR

SEQ ID NO: 240 - protein, 9 aa, Influenza A virus
AFTGNTEGR

SEQ ID NO: 241 - protein, 9 aa, Influenza A virus
AFTGNTERR

SEQ ID NO: 242 - protein, 9 aa, Influenza A virus
AFVGNNEGR

SEQ ID NO: 243 - protein, 9 aa, Influenza A virus
AFVGNTEGR

SEQ ID NO: 244 - protein, 10 aa, Influenza A virus
AGHISVQPTF

SEQ ID NO: 245 - protein, 9 aa, Influenza A virus
AGLTHIMIW

SEQ ID NO: 246 - protein, 9 aa, Influenza A virus
AGLTHLMIW

SEQ ID NO: 247 - protein, 9 aa, Influenza A virus
AGLTHMMIW

SEQ ID NO: 248 - protein, 10 aa, Influenza A virus
AGMDPRMCSL

SEQ ID NO: 249 - protein, 10 aa, Influenza A virus
AGQISIQPTF

SEQ ID NO: 250 - protein, 10 aa, Influenza A virus
AGQISTQPTF

SEQ ID NO: 251 - protein, 10 aa, Influenza A virus
AGQISVQPAF

SEQ ID NO: 252 - protein, 10 aa, Influenza A virus
AGQISVQPTF

SEQ ID NO: 253 - protein, 10 aa, Influenza A virus
AGQVSVQPSF

SEQ ID NO: 254 - protein, 10 aa, Influenza A virus
AGQVSVQPTF

SEQ ID NO: 255 - protein, 11 aa, Influenza A virus
AHKSCLPACVY

SEQ ID NO: 256 - protein, 11 aa, Influenza A virus
AHKSCLPTCVY

SEQ ID NO: 257 - protein, 10 aa, Influenza A virus
AHVRTGMDPR

SEQ ID NO: 258 - protein, 9 aa, Influenza A virus
AIDSNTLEL

SEQ ID NO: 259 - protein, 10 aa, Influenza A virus
AIDSNTLELR

SEQ ID NO: 260 - protein, 9 aa, Influenza A virus
AIDSSTLEL

SEQ ID NO: 261 - protein, 10 aa, Influenza A virus
AIDSSTLELR

SEQ ID NO: 262 - protein, 9 aa, Influenza A virus
AIKGVGTMV

SEQ ID NO: 263 - protein, 10 aa, Influenza A virus
AIKGVGTMVM

SEQ ID NO: 264 - protein, 10 aa, Influenza A virus
AIMDQVRESR

SEQ ID NO: 265 - protein, 9 aa, Influenza A virus
AIVSSTLEL

SEQ ID NO: 266 - protein, 10 aa, Influenza A virus
AIVSSTLELR

SEQ ID NO: 267 - protein, 9 aa, Influenza A virus
ALILRGAVA

SEQ ID NO: 268 - protein, 11 aa, Influenza A virus
ALILRGAVAHK

SEQ ID NO: 269 - protein, 9 aa, Influenza A virus
ALILRGSVA

SEQ ID NO: 270 - protein, 11 aa, Influenza A virus
ALILRGSVAHK

SEQ ID NO: 271 - protein, 9 aa, Influenza A virus
ALQGTKRSY

SEQ ID NO: 272 - protein, 9 aa, Influenza A virus
ALVLRGSVA

SEQ ID NO: 273 - protein, 11 aa, Influenza A virus
ALVLRGSVAHK

SEQ ID NO: 274 - protein, 10 aa, Influenza A virus
ALVRAGMDPR

SEQ ID NO: 275 - protein, 10 aa, Influenza A virus
ALVRTGMDPR

SEQ ID NO: 276 - protein, 9 aa, Influenza A virus
AMDSNTLEL

SEQ ID NO: 277 - protein, 10 aa, Influenza A virus
AMDSNTLELR

SEQ ID NO: 278 - protein, 9 aa, Influenza A virus
AMDSSTLEL

SEQ ID NO: 279 - protein, 10 aa, Influenza A virus
AMDSSTLELR

SEQ ID NO: 280 - protein, 9 aa, Influenza A virus
AMDSTTLEL

SEQ ID NO: 281 - protein, 10 aa, Influenza A virus
AMDSTTLELR

SEQ ID NO: 282 - protein, 9 aa, Influenza A virus
AMELIGMIK

SEQ ID NO: 283 - protein, 10 aa, Influenza A virus
AMELIGMIKR

SEQ ID NO: 284 - protein, 9 aa, Influenza A virus
AMELIRMIK

SEQ ID NO: 285 - protein, 10 aa, Influenza A virus
AMELIRMIKR

SEQ ID NO: 286 - protein, 9 aa, Influenza A virus
AMESSTLEL

SEQ ID NO: 287 - protein, 10 aa, Influenza A virus
AMESSTLELR

SEQ ID NO: 288 - protein, 9 aa, Influenza A virus
AMMDQVREG

SEQ ID NO: 289 - protein, 10 aa, Influenza A virus
AMMDQVREGR

SEQ ID NO: 290 - protein, 9 aa, Influenza A virus
AMMDQVRES

SEQ ID NO: 291 - protein, 9 aa, Influenza A virus
AMVDQVRES

SEQ ID NO: 292 - protein, 10 aa, Influenza A virus
AMVDQVRESR

SEQ ID NO: 293 - protein, 10 aa, Influenza A virus
ANDIRASVGR

SEQ ID NO: 294 - protein, 10 aa, Influenza A virus
ANEIRASVGR

SEQ ID NO: 295 - protein, 10 aa, Influenza A virus
ANPIVPSFDM

SEQ ID NO: 296 - protein, 8 aa, Influenza A virus
APAGLTHL

SEQ ID NO: 297 - protein, 9 aa, Influenza A virus
APAGLTHLM

SEQ ID NO: 298 - protein, 10 aa, Influenza A virus
APAGLTHLMI

SEQ ID NO: 299 - protein, 11 aa, Influenza A virus
APAGLTHLMIW

SEQ ID NO: 300 - protein, 8 aa, Influenza A virus
APRGQLST

SEQ ID NO: 301 - protein, 11 aa, Influenza A virus
APRGQLSTRGV

SEQ ID NO: 302 - protein, 9 aa, Influenza A virus
AQKAMMDQV

SEQ ID NO: 303 - protein, 10 aa, Influenza A virus
AQKAMMDQVR

SEQ ID NO: 304 - protein, 9 aa, Influenza A virus
AQRAIMDQV

SEQ ID NO: 305 - protein, 10 aa, Influenza A virus
AQRAIMDQVR

SEQ ID NO: 306 - protein, 9 aa, Influenza A virus
AQRAMMDQV

SEQ ID NO: 307 - protein, 10 aa, Influenza A virus
AQRAMMDQVR

SEQ ID NO: 308 - protein, 9 aa, Influenza A virus
AQRAMVDQV

SEQ ID NO: 309 - protein, 10 aa, Influenza A virus
AQRAMVDQVR

SEQ ID NO: 310 - protein, 9 aa, Influenza A virus
ARSALILRG

SEQ ID NO: 311 - protein, 10 aa, Influenza A virus
ARSALILRGA

SEQ ID NO: 312 - protein, 11 aa, Influenza A virus
ARSALILRGAV

SEQ ID NO: 313 - protein, 11 aa, Influenza A virus
ARSALILRGSV

SEQ ID NO: 314 - protein, 9 aa, Influenza A virus
ARSALVLRG

SEQ ID NO: 315 - protein, 11 aa, Influenza A virus
ARSALVLRGSV

SEQ ID NO: 316 - protein, 9 aa, Influenza A virus
ARVLPRGQL

SEQ ID NO: 317 - protein, 9 aa, Influenza A virus
ARVVPRGQL

SEQ ID NO: 318 - protein, 9 aa, Influenza A virus
ASFQGRGVF

SEQ ID NO: 319 - protein, 11 aa, Influenza A virus
ASFQGRGVFEL

SEQ ID NO: 320 - protein, 9 aa, Influenza A virus
ASNENMDAI

SEQ ID NO: 321 - protein, 9 aa, Influenza A virus
ASNENMDAM

SEQ ID NO: 322 - protein, 9 aa, Influenza A virus
ASNENMDTM

SEQ ID NO: 323 - protein, 9 aa, Influenza A virus
ASNENMEAI

SEQ ID NO: 324 - protein, 9 aa, Influenza A virus
ASNENMEAM

SEQ ID NO: 325 - protein, 9 aa, Influenza A virus
ASNENMETI

SEQ ID NO: 326 - protein, 9 aa, Influenza A virus
ASNENMETM

SEQ ID NO: 327 - protein, 9 aa, Influenza A virus
ASNENVEAM

SEQ ID NO: 328 - protein, 9 aa, Influenza A virus
ASNENVETM

SEQ ID NO: 329 - protein, 10 aa, Influenza A virus
ASPIVPSFDM

SEQ ID NO: 330 - protein, 9 aa, Influenza A virus
ASQGTKRPY

SEQ ID NO: 331 - protein, 9 aa, Influenza A virus
ASQGTKRSY

SEQ ID NO: 332 - protein, 9 aa, Influenza A virus
ASQGTTRSY

SEQ ID NO: 333 - protein, 11 aa, Influenza A virus
ASQRAMMDQVR

SEQ ID NO: 334 - protein, 10 aa, Influenza A virus
ASVGRMVSGI

SEQ ID NO: 335 - protein, 9 aa, Influenza A virus
ATAGLTHIM

SEQ ID NO: 336 - protein, 10 aa, Influenza A virus
ATAGLTHIMI

SEQ ID NO: 337 - protein, 11 aa, Influenza A virus
ATAGLTHIMIW

SEQ ID NO: 338 - protein, 9 aa, Influenza A virus
ATAGLTHLM

SEQ ID NO: 339 - protein, 10 aa, Influenza A virus
ATAGLTHLMI

SEQ ID NO: 340 - protein, 11 aa, Influenza A virus
ATAGLTHLMIW

SEQ ID NO: 341 - protein, 9 aa, Influenza A virus
ATAGLTHMM

SEQ ID NO: 342 - protein, 10 aa, Influenza A virus
ATAGLTHMMI

SEQ ID NO: 343 - protein, 11 aa, Influenza A virus
ATAGLTHMMIW

SEQ ID NO: 344 - protein, 10 aa, Influenza A virus
ATEIRASVGK

SEQ ID NO: 345 - protein, 10 aa, Influenza A virus
ATEIRASVGR

SEQ ID NO: 346 - protein, 10 aa, Influenza A virus
ATEIRSSVGR

SEQ ID NO: 347 - protein, 11 aa, Influenza A virus
ATIMAAFTGNA

SEQ ID NO: 348 - protein, 9 aa, Influenza A virus
ATKGTKRSY

SEQ ID NO: 349 - protein, 9 aa, Influenza A virus
ATNPIVPSF

SEQ ID NO: 350 - protein, 9 aa, Influenza A virus
ATNPIVPSL

SEQ ID NO: 351 - protein, 9 aa, Influenza A virus
ATNPVVPSF

SEQ ID NO: 352 - protein, 9 aa, Influenza A virus
ATQGTKRSY

SEQ ID NO: 353 - protein, 9 aa, Influenza A virus
ATRGLTHMM

SEQ ID NO: 354 - protein, 10 aa, Influenza A virus
ATRGLTHMMI

SEQ ID NO: 355 - protein, 11 aa, Influenza A virus
ATRGLTHMMIW

SEQ ID NO: 356 - protein, 9 aa, Influenza A virus
ATRGVQIAS

SEQ ID NO: 357 - protein, 9 aa, Influenza A virus
ATSPIVPSF

SEQ ID NO: 358 - protein, 9 aa, Influenza A virus
ATSPIVPSL

SEQ ID NO: 359 - protein, 11 aa, Influenza A virus
ATSPIVPSLDM

SEQ ID NO: 360 - protein, 9 aa, Influenza A virus
ATVKGVGTM

SEQ ID NO: 361 - protein, 10 aa, Influenza A virus
ATVKGVGTMV

SEQ ID NO: 362 - protein, 11 aa, Influenza A virus
ATVKGVGTMVM

SEQ ID NO: 363 - protein, 9 aa, Influenza A virus
ATYQRTRAH

SEQ ID NO: 364 - protein, 10 aa, Influenza A virus
ATYQRTRAHV

SEQ ID NO: 365 - protein, 11 aa, Influenza A virus
ATYQRTRAHVR

SEQ ID NO: 366 - protein, 9 aa, Influenza A virus
ATYQRTRAL

SEQ ID NO: 367 - protein, 10 aa, Influenza A virus
ATYQRTRALV

SEQ ID NO: 368 - protein, 11 aa, Influenza A virus
ATYQRTRALVR

SEQ ID NO: 369 - protein, 10 aa, Influenza A virus
AVAGGYDFER

SEQ ID NO: 370 - protein, 10 aa, Influenza A virus
AVAHKSCLPA

SEQ ID NO: 371 - protein, 10 aa, Influenza A virus
AVASGHDFER

SEQ ID NO: 372 - protein, 8 aa, Influenza A virus
AVASGYAF

SEQ ID NO: 373 - protein, 10 aa, Influenza A virus
AVASGYAFEK

SEQ ID NO: 374 - protein, 10 aa, Influenza A virus
AVASGYDFEK

SEQ ID NO: 375 - protein, 10 aa, Influenza A virus
AVASGYDFER

SEQ ID NO: 376 - protein, 10 aa, Influenza A virus
AVASGYEFEK

SEQ ID NO: 377 - protein, 10 aa, Influenza A virus
AVASGYEFER

SEQ ID NO: 378 - protein, 10 aa, Influenza A virus
AVASGYNFEK

SEQ ID NO: 379 - protein, 9 aa, Influenza A virus
AVKGIGTMV

SEQ ID NO: 380 - protein, 10 aa, Influenza A virus
AVKGIGTMVM

SEQ ID NO: 381 - protein, 9 aa, Influenza A virus
AVKGVGTIA

SEQ ID NO: 382 - protein, 10 aa, Influenza A virus
AVKGVGTIAM

SEQ ID NO: 383 - protein, 9 aa, Influenza A virus
AVKGVGTIV

SEQ ID NO: 384 - protein, 10 aa, Influenza A virus
AVKGVGTIVM

SEQ ID NO: 385 - protein, 9 aa, Influenza A virus
AVKGVGTMI

SEQ ID NO: 386 - protein, 10 aa, Influenza A virus
AVKGVGTMNM

SEQ ID NO: 387 - protein, 9 aa, Influenza A virus
AVKGVGTMV

SEQ ID NO: 388 - protein, 10 aa, Influenza A virus
AVKGVGTMVL

SEQ ID NO: 389 - protein, 10 aa, Influenza A virus
AVKGVGTMVM

SEQ ID NO: 390 - protein, 9 aa, Influenza A virus
AVKGVGTVV

SEQ ID NO: 391 - protein, 10 aa, Influenza A virus
AVKGVGTVVM

SEQ ID NO: 392 - protein, 10 aa, Influenza A virus
AVSSGYDFEK

SEQ ID NO: 393 - protein, 10 aa, Influenza A virus
AVSSGYNFEK

SEQ ID NO: 394 - protein, 9 aa, Influenza A virus
AWMACHSAA

SEQ ID NO: 395 - protein, 10 aa, Influenza A virus
AWMACHSAAF

SEQ ID NO: 396 - protein, 9 aa, Influenza A virus
AYERMCNIL

SEQ ID NO: 397 - protein, 10 aa, Influenza A virus
AYERMCNILK

SEQ ID NO: 398 - protein, 9 aa, Influenza A virus
CHSAAFEDL

SEQ ID NO: 399 - protein, 10 aa, Influenza A virus
CHSAAFEDLR

SEQ ID NO: 400 - protein, 9 aa, Influenza A virus
CHSPAFEDL

SEQ ID NO: 401 - protein, 9 aa, Influenza A virus
CLPACVHGL

SEQ ID NO: 402 - protein, 10 aa, Influenza A virus
CLPACVHGLA

SEQ ID NO: 403 - protein, 11 aa, Influenza A virus
CLPACVHGLAV

SEQ ID NO: 404 - protein, 9 aa, Influenza A virus
CLPACVNGL

SEQ ID NO: 405 - protein, 10 aa, Influenza A virus
CLPACVNGLA

SEQ ID NO: 406 - protein, 11 aa, Influenza A virus
CLPACVNGLAV

SEQ ID NO: 407 - protein, 9 aa, Influenza A virus
CLPACVYGL

SEQ ID NO: 408 - protein, 10 aa, Influenza A virus
CLPACVYGLA

SEQ ID NO: 409 - protein, 11 aa, Influenza A virus
CLPACVYGLAV

SEQ ID NO: 410 - protein, 10 aa, Influenza A virus
CLPACVYGLI

SEQ ID NO: 411 - protein, 11 aa, Influenza A virus
CLPACVYGLIV

SEQ ID NO: 412 - protein, 11 aa, Influenza A virus
CLPACVYGLSV

SEQ ID NO: 413 - protein, 11 aa, Influenza A virus
CLPACVYGLTV

SEQ ID NO: 414 - protein, 10 aa, Influenza A virus
CLPACVYGLV

SEQ ID NO: 415 - protein, 11 aa, Influenza A virus
CLPACVYGLVV

SEQ ID NO: 416 - protein, 10 aa, Influenza A virus
CLPACVYGPA

SEQ ID NO: 417 - protein, 11 aa, Influenza A virus
CLPACVYGPAV

SEQ ID NO: 418 - protein, 9 aa, Influenza A virus
CLPTCVYGL

SEQ ID NO: 419 - protein, 10 aa, Influenza A virus
CLPTCVYGLA

SEQ ID NO: 420 - protein, 11 aa, Influenza A virus
CLPTCVYGLAV

SEQ ID NO: 421 - protein, 10 aa, Influenza A virus
CNSAAFEDLR

SEQ ID NO: 422 - protein, 9 aa, Influenza A virus
CPRGKLSTR

SEQ ID NO: 423 - protein, 11 aa, Influenza A virus
CPRGKLSTRGV

SEQ ID NO: 424 - protein, 9 aa, Influenza A virus
CSLMQGSTL

SEQ ID NO: 425 - protein, 11 aa, Influenza A virus
CSLMQGSTLPR

SEQ ID NO: 426 - protein, 9 aa, Influenza A virus
CTEFKLSDY

SEQ ID NO: 427 - protein, 9 aa, Influenza A virus
CTEIKLSDY

SEQ ID NO: 428 - protein, 9 aa, Influenza A virus
CTELKLNDY

SEQ ID NO: 429 - protein, 9 aa, Influenza A virus
CTELKLSDY

SEQ ID NO: 430 - protein, 9 aa, Influenza A virus
CTELQLSDY

SEQ ID NO: 431 - protein, 9 aa, Influenza A virus
CTLELRSRY

SEQ ID NO: 432 - protein, 10 aa, Influenza A virus
CTLELRSRYW

SEQ ID NO: 433 - protein, 11 aa, Influenza A virus
CVYGLAVAGGY

SEQ ID NO: 434 - protein, 11 aa, Influenza A virus
CVYGLSVASGY

SEQ ID NO: 435 - protein, 11 aa, Influenza A virus
CVYGLTVASGY

SEQ ID NO: 436 - protein, 11 aa, Influenza A virus
CVYGPAVASGY

SEQ ID NO: 437 - protein, 11 aa, Influenza A virus
CVYGPAVSSGY

SEQ ID NO: 438 - protein, 11 aa, Influenza A virus
DAIDSSTLELR

SEQ ID NO: 439 - protein, 11 aa, Influenza A virus
DAIVSSTLELR

SEQ ID NO: 440 - protein, 9 aa, Influenza A virus
DAKPEEVSF

SEQ ID NO: 441 - protein, 10 aa, Influenza A virus
DAKPEEVSFR

SEQ ID NO: 442 - protein, 11 aa, Influenza A virus
DAMESSTLELR

SEQ ID NO: 443 - protein, 10 aa, Influenza A virus
DAPAGLTHLM

SEQ ID NO: 444 - protein, 10 aa, Influenza A virus
DATAGLTHIM

SEQ ID NO: 445 - protein, 10 aa, Influenza A virus
DATAGLTHLM

SEQ ID NO: 446 - protein, 9 aa, Influenza A virus
DATAGLTHM

SEQ ID NO: 447 - protein, 10 aa, Influenza A virus
DATAGLTHMM

SEQ ID NO: 448 - protein, 9 aa, Influenza A virus
DATEIRASV

SEQ ID NO: 449 - protein, 11 aa, Influenza A virus
DATEIRASVGR

SEQ ID NO: 450 - protein, 10 aa, Influenza A virus
DATYQRTRAL

SEQ ID NO: 451 - protein, 9 aa, Influenza A virus
DEKAASPIV

SEQ ID NO: 452 - protein, 9 aa, Influenza A virus
DEKATNPVV

SEQ ID NO: 453 - protein, 9 aa, Influenza A virus
DEKATSPIV

SEQ ID NO: 454 - protein, 9 aa, Influenza A virus
DENATNPIV

SEQ ID NO: 455 - protein, 9 aa, Influenza A virus
DERAANPIV

SEQ ID NO: 456 - protein, 10 aa, Influenza A virus
DGKWMRKLVL

SEQ ID NO: 457 - protein, 10 aa, Influenza A virus
DGRWMRELVL

SEQ ID NO: 458 - protein, 11 aa, Influenza A virus
DGRWMRELVLY

SEQ ID NO: 459 - protein, 9 aa, Influenza A virus
DKATIMAAF

SEQ ID NO: 460 - protein, 9 aa, Influenza A virus
DKSTIMAAF

SEQ ID NO: 461 - protein, 9 aa, Influenza A virus
DKSTVMAAF

SEQ ID NO: 462 - protein, 9 aa, Influenza A virus
DLRISGFIR

SEQ ID NO: 463 - protein, 9 aa, Influenza A virus
DLRLFSFIR

SEQ ID NO: 464 - protein, 9 aa, Influenza A virus
DLRLLSFIR

SEQ ID NO: 465 - protein, 9 aa, Influenza A virus
DLRLSSFIR

SEQ ID NO: 466 - protein, 9 aa, Influenza A virus
DLRVLNFIR

SEQ ID NO: 467 - protein, 9 aa, Influenza A virus
DLRVLSFIK

SEQ ID NO: 468 - protein, 9 aa, Influenza A virus
DLRVLSFIR

SEQ ID NO: 469 - protein, 9 aa, Influenza A virus
DLRVSGFIR

SEQ ID NO: 470 - protein, 11 aa, Influenza A virus
DLRVSGFIRGK

SEQ ID NO: 471 - protein, 9 aa, Influenza A virus
DLRVSNFIR

SEQ ID NO: 472 - protein, 9 aa, Influenza A virus
DLRVSSFIR

SEQ ID NO: 473 - protein, 11 aa, Influenza A virus
DLRVSSFIRGK

SEQ ID NO: 474 - protein, 10 aa, Influenza A virus
DLSFQGRGVF

SEQ ID NO: 475 - protein, 10 aa, Influenza A virus
DLTFLARSAL

SEQ ID NO: 476 - protein, 9 aa, Influenza A virus
DMNNEGSYF

SEQ ID NO: 477 - protein, 10 aa, Influenza A virus
DMRAEIIRLM

SEQ ID NO: 478 - protein, 9 aa, Influenza A virus
DMSKEGSYF

SEQ ID NO: 479 - protein, 9 aa, Influenza A virus
DMSNEGSYF

SEQ ID NO: 480 - protein, 10 aa, Influenza A virus
DMSNEGSYFF

SEQ ID NO: 481 - protein, 9 aa, Influenza A virus
DPKKTGGPI

SEQ ID NO: 482 - protein, 9 aa, Influenza A virus
DPKRTGGPI

SEQ ID NO: 483 - protein, 9 aa, Influenza A virus
DQISVQPTF

SEQ ID NO: 484 - protein, 10 aa, Influenza A virus
DRKWMRELVL

SEQ ID NO: 485 - protein, 11 aa, Influenza A virus
DRNFWRGDNGR

SEQ ID NO: 486 - protein, 11 aa, Influenza A virus
DRNFWRGENER

SEQ ID NO: 487 - protein, 11 aa, Influenza A virus
DRNFWRGENGR

SEQ ID NO: 488 - protein, 9 aa, Influenza A virus
DRSTIMAAF

SEQ ID NO: 489 - protein, 10 aa, Influenza A virus
DSCTLELRSR

SEQ ID NO: 490 - protein, 10 aa, Influenza A virus
DSITLELRSK

SEQ ID NO: 491 - protein, 11 aa, Influenza A virus
DSIVSSTLELR

SEQ ID NO: 492 - protein, 10 aa, Influenza A virus
DSNTLELRSR

SEQ ID NO: 493 - protein, 10 aa, Influenza A virus
DSRTLELRSR

SEQ ID NO: 494 - protein, 10 aa, Influenza A virus
DSSTLELRSK

SEQ ID NO: 495 - protein, 10 aa, Influenza A virus
DSSTLELRSR

SEQ ID NO: 496 - protein, 10 aa, Influenza A virus
DSTTLELRSR

SEQ ID NO: 497 - protein, 10 aa, Influenza A virus
DTMDSNTLEL

SEQ ID NO: 498 - protein, 11 aa, Influenza A virus
DTMDSNTLELR

SEQ ID NO: 499 - protein, 10 aa, Influenza A virus
DTMESSTLEL

SEQ ID NO: 500 - protein, 11 aa, Influenza A virus
DTMESSTLELR

SEQ ID NO: 501 - protein, 10 aa, Influenza A virus
DTMGSSTLEL

SEQ ID NO: 502 - protein, 11 aa, Influenza A virus
DTMGSSTLELR

SEQ ID NO: 503 - protein, 10 aa, Influenza A virus
DTMVSSTLEL

SEQ ID NO: 504 - protein, 11 aa, Influenza A virus
DTMVSSTLELR

SEQ ID NO: 505 - protein, 9 aa, Influenza A virus
DTTAGLTHM

SEQ ID NO: 506 - protein, 10 aa, Influenza A virus
DTTAGLTHMM

SEQ ID NO: 507 - protein, 9 aa, Influenza A virus
DVSFQGRGV

SEQ ID NO: 508 - protein, 10 aa, Influenza A virus
DVSFQGRGVF

SEQ ID NO: 509 - protein, 10 aa, Influenza A virus
EAIDSNTLEL

SEQ ID NO: 510 - protein, 11 aa, Influenza A virus
EAIDSNTLELR

SEQ ID NO: 511 - protein, 10 aa, Influenza A virus
EAMDSNTLEL

SEQ ID NO: 512 - protein, 11 aa, Influenza A virus
EAMDSNTLELR

SEQ ID NO: 513 - protein, 10 aa, Influenza A virus
EAMDSSTLEL

SEQ ID NO: 514 - protein, 11 aa, Influenza A virus
EAMDSSTLELR

SEQ ID NO: 515 - protein, 10 aa, Influenza A virus
EAMDSTTLEL

SEQ ID NO: 516 - protein, 11 aa, Influenza A virus
EAMDSTTLELR

SEQ ID NO: 517 - protein, 10 aa, Influenza A virus
EAMESSTLEL

SEQ ID NO: 518 - protein, 11 aa, Influenza A virus
EAMESSTLELR

SEQ ID NO: 519 - protein, 11 aa, Influenza A virus
EDATAGLTHLM

SEQ ID NO: 520 - protein, 11 aa, Influenza A virus
EDATAGLTHMM

SEQ ID NO: 521 - protein, 10 aa, Influenza A virus
EDLRISGFIR

SEQ ID NO: 522 - protein, 10 aa, Influenza A virus
EDLRLFSFIR

SEQ ID NO: 523 - protein, 10 aa, Influenza A virus
EDLRLLSFIR

SEQ ID NO: 524 - protein, 10 aa, Influenza A virus
EDLRLSSFIR

SEQ ID NO: 525 - protein, 10 aa, Influenza A virus
EDLRVLNFIR

SEQ ID NO: 526 - protein, 10 aa, Influenza A virus
EDLRVLSFIR

SEQ ID NO: 527 - protein, 10 aa, Influenza A virus
EDLRVSGFIR

SEQ ID NO: 528 - protein, 10 aa, Influenza A virus
EDLRVSNFIR

SEQ ID NO: 529 - protein, 10 aa, Influenza A virus
EDLRVSSFIR

SEQ ID NO: 530 - protein, 11 aa, Influenza A virus
EDLTFLARSAL

SEQ ID NO: 531 - protein, 11 aa, Influenza A virus
EDTTAGLTHMM

SEQ ID NO: 532 - protein, 10 aa, Influenza A virus
EEIMRIWRQA

SEQ ID NO: 533 - protein, 9 aa, Influenza A virus
EEIRRIWRH

SEQ ID NO: 534 - protein, 10 aa, Influenza A virus
EEIRRIWRHA

SEQ ID NO: 535 - protein, 10 aa, Influenza A virus
EEIRRIWRQA

SEQ ID NO: 536 - protein, 10 aa, Influenza A virus
EEIRRIWRQR

SEQ ID NO: 537 - protein, 10 aa, Influenza A virus
EEIRRTWRQA

SEQ ID NO: 538 - protein, 10 aa, Influenza A virus
EEIRRVWRQA

SEQ ID NO: 539 - protein, 10 aa, Influenza A virus
EEISRIWRQA

SEQ ID NO: 540 - protein, 10 aa, Influenza A virus
EELRRIWRQA

SEQ ID NO: 541 - protein, 10 aa, Influenza A virus
EEMRRIWRQA

SEQ ID NO: 542 - protein, 10 aa, Influenza A virus
EEMSFQGRGV

SEQ ID NO: 543 - protein, 11 aa, Influenza A virus
EEMSFQGRGVF

SEQ ID NO: 544 - protein, 10 aa, Influenza A virus
EEMSFRGRGV

SEQ ID NO: 545 - protein, 11 aa, Influenza A virus
EEMSFRGRGVF

SEQ ID NO: 546 - protein, 10 aa, Influenza A virus
EEVRRIWRQA

SEQ ID NO: 547 - protein, 11 aa, Influenza A virus
EEVSFQGRGVF

SEQ ID NO: 548 - protein, 10 aa, Influenza A virus
EFEDLIFLAR

SEQ ID NO: 549 - protein, 10 aa, Influenza A virus
EFEDLTFLAR

SEQ ID NO: 550 - protein, 10 aa, Influenza A virus
EFKLSDYEGR

SEQ ID NO: 551 - protein, 11 aa, Influenza A virus
EGAKPEEMSFR

SEQ ID NO: 552 - protein, 11 aa, Influenza A virus
EGAKPEEVSFR

SEQ ID NO: 553 - protein, 11 aa, Influenza A virus
EGRTSDMRAEI

SEQ ID NO: 554 - protein, 11 aa, Influenza A virus
EGRTSDMRTEV

SEQ ID NO: 555 - protein, 10 aa, Influenza A virus
EGSYFFGDNA

SEQ ID NO: 556 - protein, 10 aa, Influenza A virus
EGSYFFGDSA

SEQ ID NO: 557 - protein, 9 aa, Influenza A virus
EIEDLIFLA

SEQ ID NO: 558 - protein, 10 aa, Influenza A virus
EIEDLIFLAR

SEQ ID NO: 559 - protein, 10 aa, Influenza A virus
EIEDLIFLTR

SEQ ID NO: 560 - protein, 9 aa, Influenza A virus
EIEDLIFSA

SEQ ID NO: 561 - protein, 10 aa, Influenza A virus
EIEDLIFSAR

SEQ ID NO: 562 - protein, 9 aa, Influenza A virus
EIEDLTFLA

SEQ ID NO: 563 - protein, 10 aa, Influenza A virus
EIEDLTFLAR

SEQ ID NO: 564 - protein, 9 aa, Influenza A virus
EIIKMMENA

SEQ ID NO: 565 - protein, 10 aa, Influenza A virus
EIIKMMENAR

SEQ ID NO: 566 - protein, 9 aa, Influenza A virus
EIIKMMESA

SEQ ID NO: 567 - protein, 10 aa, Influenza A virus
EIIKMMESAR

SEQ ID NO: 568 - protein, 9 aa, Influenza A virus
EIIRIMESA

SEQ ID NO: 569 - protein, 10 aa, Influenza A virus
EIIRIMESAR

SEQ ID NO: 570 - protein, 9 aa, Influenza A virus
EIIRLMEGA

SEQ ID NO: 571 - protein, 10 aa, Influenza A virus
EIIRLMEGAK

SEQ ID NO: 572 - protein, 9 aa, Influenza A virus
EIIRLMESA

SEQ ID NO: 573 - protein, 10 aa, Influenza A virus
EIIRLMESAR

SEQ ID NO: 574 - protein, 10 aa, Influenza A virus
EIIRMMEDAK

SEQ ID NO: 575 - protein, 9 aa, Influenza A virus
EIIRMMEGA

SEQ ID NO: 576 - protein, 10 aa, Influenza A virus
EIIRMMEGAK

SEQ ID NO: 577 - protein, 9 aa, Influenza A virus
EIIRMMENA

SEQ ID NO: 578 - protein, 10 aa, Influenza A virus
EIIRMMENAK

SEQ ID NO: 579 - protein, 10 aa, Influenza A virus
EIIRMMENAR

SEQ ID NO: 580 - protein, 10 aa, Influenza A virus
EIIRMMENSR

SEQ ID NO: 581 - protein, 9 aa, Influenza A virus
EIIRMMESA

SEQ ID NO: 582 - protein, 10 aa, Influenza A virus
EIIRMMESAK

SEQ ID NO: 583 - protein, 10 aa, Influenza A virus
EIIRMMESAR

SEQ ID NO: 584 - protein, 10 aa, Influenza A virus
EIIRMMESSR

SEQ ID NO: 585 - protein, 9 aa, Influenza A virus
EIIRVMESA

SEQ ID NO: 586 - protein, 10 aa, Influenza A virus
EIIRVMESAK

SEQ ID NO: 587 - protein, 10 aa, Influenza A virus
EIKLSDYEGR

SEQ ID NO: 588 - protein, 9 aa, Influenza A virus
EIMRIWRQA

SEQ ID NO: 589 - protein, 9 aa, Influenza A virus
EIRASVGGM

SEQ ID NO: 590 - protein, 10 aa, Influenza A virus
EIRASVGGMV

SEQ ID NO: 591 - protein, 9 aa, Influenza A virus
EIRASVGKM

SEQ ID NO: 592 - protein, 10 aa, Influenza A virus
EIRASVGKMV

SEQ ID NO: 593 - protein, 9 aa, Influenza A virus
EIRASVGRM

SEQ ID NO: 594 - protein, 10 aa, Influenza A virus
EIRASVGRMV

SEQ ID NO: 595 - protein, 9 aa, Influenza A virus
EIRRIWRQR

SEQ ID NO: 596 - protein, 9 aa, Influenza A virus
EIRSSVGRM

SEQ ID NO: 597 - protein, 9 aa, Influenza A virus
EISRIWRQA

SEQ ID NO: 598 - protein, 9 aa, Influenza A virus
EKATIMAAF

SEQ ID NO: 599 - protein, 11 aa, Influenza A virus
EKATNPIVPSF

SEQ ID NO: 600 - protein, 11 aa, Influenza A virus
EKATNPVVPSF

SEQ ID NO: 601 - protein, 11 aa, Influenza A virus
EKATSPIVPSF

SEQ ID NO: 602 - protein, 11 aa, Influenza A virus
EKATSPIVPSL

SEQ ID NO: 603 - protein, 11 aa, Influenza A virus
EKMVLSAFDER

SEQ ID NO: 604 - protein, 9 aa, Influenza A virus
EKSTVMAAF

SEQ ID NO: 605 - protein, 10 aa, Influenza A virus
ELIGMIKRGI

SEQ ID NO: 606 - protein, 10 aa, Influenza A virus
ELIRMIKRGV

SEQ ID NO: 607 - protein, 10 aa, Influenza A virus
ELKLGDHEGR

SEQ ID NO: 608 - protein, 10 aa, Influenza A virus
ELKLNDHEGR

SEQ ID NO: 609 - protein, 10 aa, Influenza A virus
ELKLNDYEGR

SEQ ID NO: 610 - protein, 10 aa, Influenza A virus
ELKLSDHEGR

SEQ ID NO: 611 - protein, 10 aa, Influenza A virus
ELKLSDNEGR

SEQ ID NO: 612 - protein, 10 aa, Influenza A virus
ELKLSDQEGR

SEQ ID NO: 613 - protein, 10 aa, Influenza A virus
ELKLSDYEGR

SEQ ID NO: 614 - protein, 10 aa, Influenza A virus
ELQLSDYEGR

SEQ ID NO: 615 - protein, 9 aa, Influenza A virus
ELRSKYWAI

SEQ ID NO: 616 - protein, 10 aa, Influenza A virus
ELRSKYWAIR

SEQ ID NO: 617 - protein, 9 aa, Influenza A virus
ELRSRYRAI

SEQ ID NO: 618 - protein, 10 aa, Influenza A virus
ELRSRYRAIR

SEQ ID NO: 619 - protein, 9 aa, Influenza A virus
ELRSRYWAI

SEQ ID NO: 620 - protein, 10 aa, Influenza A virus
ELRSRYWAIK

SEQ ID NO: 621 - protein, 10 aa, Influenza A virus
ELRSRYWAIR

SEQ ID NO: 622 - protein, 11 aa, Influenza A virus
ELSDEKATNPV

SEQ ID NO: 623 - protein, 11 aa, Influenza A virus
ELVLYDKEELR

SEQ ID NO: 624 - protein, 10 aa, Influenza A virus
EMSFQGRGVF

SEQ ID NO: 625 - protein, 10 aa, Influenza A virus
EMSFRGRGVF

SEQ ID NO: 626 - protein, 10 aa, Influenza A virus
ENAAAGLTHL

SEQ ID NO: 627 - protein, 11 aa, Influenza A virus
ENAKPEEVSFR

SEQ ID NO: 628 - protein, 9 aa, Influenza A virus
ENMETMDSI

SEQ ID NO: 629 - protein, 9 aa, Influenza A virus
ENMETMDSR

SEQ ID NO: 630 - protein, 11 aa, Influenza A virus
ENSAHKSQLVW

SEQ ID NO: 631 - protein, 9 aa, Influenza A virus
EQMETDGER

SEQ ID NO: 632 - protein, 9 aa, Influenza A virus
EQMETGGER

SEQ ID NO: 633 - protein, 11 aa, Influenza A virus
ERAANPIVPSF

SEQ ID NO: 634 - protein, 8 aa, Influenza A virus
ERATIMAA

SEQ ID NO: 635 - protein, 9 aa, Influenza A virus
ERATIMAAF

SEQ ID NO: 636 - protein, 10 aa, Influenza A virus
ERATIMAAFI

SEQ ID NO: 637 - protein, 11 aa, Influenza A virus
ERATNPIVPSF

SEQ ID NO: 638 - protein, 9 aa, Influenza A virus
ERATVMAAF

SEQ ID NO: 639 - protein, 10 aa, Influenza A virus
ERATVMAAFI

SEQ ID NO: 640 - protein, 10 aa, Influenza A virus
ERATVMAAFV

SEQ ID NO: 641 - protein, 10 aa, Influenza A virus
ERMCNILKGK

SEQ ID NO: 642 - protein, 8 aa, Influenza A virus
ERMILSAF

SEQ ID NO: 643 - protein, 11 aa, Influenza A virus
ERMILSAFDER

SEQ ID NO: 644 - protein, 8 aa, Influenza A virus
ERMVLSAF

SEQ ID NO: 645 - protein, 11 aa, Influenza A virus
ERMVLSAFDER

SEQ ID NO: 646 - protein, 11 aa, Influenza A virus
ERMVLSAFEER

SEQ ID NO: 647 - protein, 10 aa, Influenza A virus
ERRTRIAYER

SEQ ID NO: 648 - protein, 9 aa, Influenza A virus
ERSTIMAAF

SEQ ID NO: 649 - protein, 9 aa, Influenza A virus
ERVTIMAAF

SEQ ID NO: 650 - protein, 10 aa, Influenza A virus
ERVTIMAAFK

SEQ ID NO: 651 - protein, 10 aa, Influenza A virus
ESRNPGNAEV

SEQ ID NO: 652 - protein, 10 aa, Influenza A virus
ESRSPGNAEI

SEQ ID NO: 653 - protein, 10 aa, Influenza A virus
ESSTLELRSK

SEQ ID NO: 654 - protein, 10 aa, Influenza A virus
ESSTLELRSR

SEQ ID NO: 655 - protein, 10 aa, Influenza A virus
ETIDSNTLEL

SEQ ID NO: 656 - protein, 11 aa, Influenza A virus
ETIDSNTLELR

SEQ ID NO: 657 - protein, 10 aa, Influenza A virus
ETIDSSTLEL

SEQ ID NO: 658 - protein, 11 aa, Influenza A virus
ETIDSSTLELR

SEQ ID NO: 659 - protein, 10 aa, Influenza A virus
ETMDSCTLEL

SEQ ID NO: 660 - protein, 11 aa, Influenza A virus
ETMDSCTLELR

SEQ ID NO: 661 - protein, 9 aa, Influenza A virus
ETMDSITLE

SEQ ID NO: 662 - protein, 10 aa, Influenza A virus
ETMDSITLEL

SEQ ID NO: 663 - protein, 11 aa, Influenza A virus
ETMDSITLELR

SEQ ID NO: 664 - protein, 9 aa, Influenza A virus
ETMDSNTLE

SEQ ID NO: 665 - protein, 10 aa, Influenza A virus
ETMDSNTLEL

SEQ ID NO: 666 - protein, 11 aa, Influenza A virus
ETMDSNTLELR

SEQ ID NO: 667 - protein, 9 aa, Influenza A virus
ETMDSRTLE

SEQ ID NO: 668 - protein, 10 aa, Influenza A virus
ETMDSRTLEL

SEQ ID NO: 669 - protein, 11 aa, Influenza A virus
ETMDSRTLELR

SEQ ID NO: 670 - protein, 9 aa, Influenza A virus
ETMDSSTLE

SEQ ID NO: 671 - protein, 10 aa, Influenza A virus
ETMDSSTLEL

SEQ ID NO: 672 - protein, 11 aa, Influenza A virus
ETMDSSTLELR

SEQ ID NO: 673 - protein, 9 aa, Influenza A virus
ETMDSTTLE

SEQ ID NO: 674 - protein, 10 aa, Influenza A virus
ETMDSTTLEL

SEQ ID NO: 675 - protein, 11 aa, Influenza A virus
ETMDSTTLELR

SEQ ID NO: 676 - protein, 9 aa, Influenza A virus
ETMESSTLE

SEQ ID NO: 677 - protein, 10 aa, Influenza A virus
ETMESSTLEL

SEQ ID NO: 678 - protein, 11 aa, Influenza A virus
ETMESSTLELR

SEQ ID NO: 679 - protein, 9 aa, Influenza A virus
ETMGSSTLE

SEQ ID NO: 680 - protein, 10 aa, Influenza A virus
ETMGSSTLEL

SEQ ID NO: 681 - protein, 11 aa, Influenza A virus
ETMGSSTLELR

SEQ ID NO: 682 - protein, 9 aa, Influenza A virus
ETMNSSTLE

SEQ ID NO: 683 - protein, 10 aa, Influenza A virus
ETMNSSTLEL

SEQ ID NO: 684 - protein, 11 aa, Influenza A virus
ETMNSSTLELR

SEQ ID NO: 685 - protein, 9 aa, Influenza A virus
ETMSSSTLE

SEQ ID NO: 686 - protein, 10 aa, Influenza A virus
ETMSSSTLEL

SEQ ID NO: 687 - protein, 11 aa, Influenza A virus
ETMSSSTLELR

SEQ ID NO: 688 - protein, 9 aa, Influenza A virus
EVEDLIFLA

SEQ ID NO: 689 - protein, 10 aa, Influenza A virus
EVEDLIFLAR

SEQ ID NO: 690 - protein, 9 aa, Influenza A virus
EVIRMMESA

SEQ ID NO: 691 - protein, 10 aa, Influenza A virus
EVIRMMESAK

SEQ ID NO: 692 - protein, 9 aa, Influenza A virus
EVRRIWRQA

SEQ ID NO: 693 - protein, 9 aa, Influenza A virus
EVSFQGRGV

SEQ ID NO: 694 - protein, 10 aa, Influenza A virus
EVSFQGRGVF

SEQ ID NO: 695 - protein, 9 aa, Influenza A virus
EVSFRGRGV

SEQ ID NO: 696 - protein, 10 aa, Influenza A virus
EVSFRGRGVF

SEQ ID NO: 697 - protein, 10 aa, Influenza A virus
EYATAGLTHI

SEQ ID NO: 698 - protein, 10 aa, Influenza A virus
EYEDLIFLAR

SEQ ID NO: 699 - protein, 10 aa, Influenza A virus
FDKATIMAAF

SEQ ID NO: 700 - protein, 10 aa, Influenza A virus
FDKPTIMAAF

SEQ ID NO: 701 - protein, 10 aa, Influenza A virus
FDKSTIMAAF

SEQ ID NO: 702 - protein, 10 aa, Influenza A virus
FDKSTVMAAF

SEQ ID NO: 703 - protein, 10 aa, Influenza A virus
FDKTTIMAAF

SEQ ID NO: 704 - protein, 10 aa, Influenza A virus
FDMNNEGSYF

SEQ ID NO: 705 - protein, 10 aa, Influenza A virus
FDMSKEGSYF

SEQ ID NO: 706 - protein, 10 aa, Influenza A virus
FDMSNEGSYF

SEQ ID NO: 707 - protein, 11 aa, Influenza A virus
FDMSNEGSYFF

SEQ ID NO: 708 - protein, 10 aa, Influenza A virus
FDRPTIMAAF

SEQ ID NO: 709 - protein, 10 aa, Influenza A virus
FDRSTIMAAF

SEQ ID NO: 710 - protein, 10 aa, Influenza A virus
FDRTTIMAAF

SEQ ID NO: 711 - protein, 10 aa, Influenza A virus
FDRTTVMAAF

SEQ ID NO: 712 - protein, 8 aa, Influenza A virus
FEDLIFLA

SEQ ID NO: 713 - protein, 11 aa, Influenza A virus
FEDLIFLARSA

SEQ ID NO: 714 - protein, 9 aa, Influenza A virus
FEDLRISGF

SEQ ID NO: 715 - protein, 10 aa, Influenza A virus
FEDLRISGFI

SEQ ID NO: 716 - protein, 9 aa, Influenza A virus
FEDLRLFSF

SEQ ID NO: 717 - protein, 10 aa, Influenza A virus
FEDLRLFSFI

SEQ ID NO: 718 - protein, 9 aa, Influenza A virus
FEDLRLLSF

SEQ ID NO: 719 - protein, 10 aa, Influenza A virus
FEDLRLLSFI

SEQ ID NO: 720 - protein, 9 aa, Influenza A virus
FEDLRLSSF

SEQ ID NO: 721 - protein, 10 aa, Influenza A virus
FEDLRLSSFI

SEQ ID NO: 722 - protein, 9 aa, Influenza A virus
FEDLRVLNF

SEQ ID NO: 723 - protein, 10 aa, Influenza A virus
FEDLRVLNFI

SEQ ID NO: 724 - protein, 9 aa, Influenza A virus
FEDLRVLSF

SEQ ID NO: 725 - protein, 10 aa, Influenza A virus
FEDLRVLSFI

SEQ ID NO: 726 - protein, 9 aa, Influenza A virus
FEDLRVSGF

SEQ ID NO: 727 - protein, 10 aa, Influenza A virus
FEDLRVSGFI

SEQ ID NO: 728 - protein, 9 aa, Influenza A virus
FEDLRVSNF

SEQ ID NO: 729 - protein, 10 aa, Influenza A virus
FEDLRVSNFI

SEQ ID NO: 730 - protein, 11 aa, Influenza A virus
FEDLRVSNFIR

SEQ ID NO: 731 - protein, 9 aa, Influenza A virus
FEDLRVSSF

SEQ ID NO: 732 - protein, 10 aa, Influenza A virus
FEDLRVSSFI

SEQ ID NO: 733 - protein, 11 aa, Influenza A virus
FEDLRVSSFIR

SEQ ID NO: 734 - protein, 8 aa, Influenza A virus
FEDLTFLA

SEQ ID NO: 735 - protein, 11 aa, Influenza A virus
FEDLTFLARSA

SEQ ID NO: 736 - protein, 9 aa, Influenza A virus
FEERRNKYL

SEQ ID NO: 737 - protein, 9 aa, Influenza A virus
FEFSDERAA

SEQ ID NO: 738 - protein, 8 aa, Influenza A virus
FEKATIMA

SEQ ID NO: 739 - protein, 9 aa, Influenza A virus
FEKATIMAA

SEQ ID NO: 740 - protein, 10 aa, Influenza A virus
FEKATIMAAF

SEQ ID NO: 741 - protein, 8 aa, Influenza A virus
FEKEGYSL

SEQ ID NO: 742 - protein, 9 aa, Influenza A virus
FEKEGYSLV

SEQ ID NO: 743 - protein, 8 aa, Influenza A virus
FEKSTVMA

SEQ ID NO: 744 - protein, 9 aa, Influenza A virus
FEKSTVMAA

SEQ ID NO: 745 - protein, 10 aa, Influenza A virus
FEKSTVMAAF

SEQ ID NO: 746 - protein, 9 aa, Influenza A virus
FELSDEKAA

SEQ ID NO: 747 - protein, 9 aa, Influenza A virus
FELSDERAA

SEQ ID NO: 748 - protein, 8 aa, Influenza A virus
FERATIMA

SEQ ID NO: 749 - protein, 9 aa, Influenza A virus
FERATIMAA

SEQ ID NO: 750 - protein, 10 aa, Influenza A virus
FERATIMAAF

SEQ ID NO: 751 - protein, 11 aa, Influenza A virus
FERATIMAAFI

SEQ ID NO: 752 - protein, 8 aa, Influenza A virus
FERATVMA

SEQ ID NO: 753 - protein, 9 aa, Influenza A virus
FERATVMAA

SEQ ID NO: 754 - protein, 10 aa, Influenza A virus
FERATVMAAF

SEQ ID NO: 755 - protein, 11 aa, Influenza A virus
FERATVMAAFI

SEQ ID NO: 756 - protein, 8 aa, Influenza A virus
FEREGYSL

SEQ ID NO: 757 - protein, 9 aa, Influenza A virus
FEREGYSLI

SEQ ID NO: 758 - protein, 9 aa, Influenza A virus
FEREGYSLV

SEQ ID NO: 759 - protein, 8 aa, Influenza A virus
FERSTIMA

SEQ ID NO: 760 - protein, 9 aa, Influenza A virus
FERSTIMAA

SEQ ID NO: 761 - protein, 10 aa, Influenza A virus
FERSTIMAAF

SEQ ID NO: 762 - protein, 8 aa, Influenza A virus
FERTTIMA

SEQ ID NO: 763 - protein, 9 aa, Influenza A virus
FERTTIMAA

SEQ ID NO: 764 - protein, 10 aa, Influenza A virus
FERTTIMAAF

SEQ ID NO: 765 - protein, 8 aa, Influenza A virus
FERVTIMA

SEQ ID NO: 766 - protein, 9 aa, Influenza A virus
FERVTIMAA

SEQ ID NO: 767 - protein, 10 aa, Influenza A virus
FERVTIMAAF

SEQ ID NO: 768 - protein, 11 aa, Influenza A virus
FERVTIMAAFK

SEQ ID NO: 769 - protein, 9 aa, Influenza A virus
FFGDNAEDY

SEQ ID NO: 770 - protein, 9 aa, Influenza A virus
FFGDNAEEF

SEQ ID NO: 771 - protein, 9 aa, Influenza A virus
FFGDNAEEY

SEQ ID NO: 772 - protein, 9 aa, Influenza A virus
FFGDSAEEY

SEQ ID NO: 773 - protein, 10 aa, Influenza A virus
FIKGTKVLPR

SEQ ID NO: 774 - protein, 10 aa, Influenza A virus
FIKGTKVVPR

SEQ ID NO: 775 - protein, 10 aa, Influenza A virus
FIRGAKVVPR

SEQ ID NO: 776 - protein, 8 aa, Influenza A virus
FIRGARVL

SEQ ID NO: 777 - protein, 10 aa, Influenza A virus
FIRGARVLPR

SEQ ID NO: 778 - protein, 10 aa, Influenza A virus
FIRGARVVPR

SEQ ID NO: 779 - protein, 8 aa, Influenza A virus
FIRGKKVI

SEQ ID NO: 780 - protein, 10 aa, Influenza A virus
FIRGKKVIPR

SEQ ID NO: 781 - protein, 8 aa, Influenza A virus
FIRGKKVV

SEQ ID NO: 782 - protein, 10 aa, Influenza A virus
FIRGKKVVPR

SEQ ID NO: 783 - protein, 8 aa, Influenza A virus
FIRGKRVV

SEQ ID NO: 784 - protein, 10 aa, Influenza A virus
FIRGKRVVPR

SEQ ID NO: 785 - protein, 10 aa, Influenza A virus
FIRGTKVCPR

SEQ ID NO: 786 - protein, 10 aa, Influenza A virus
FIRGTKVFPR

SEQ ID NO: 787 - protein, 10 aa, Influenza A virus
FIRGTKVIPR

SEQ ID NO: 788 - protein, 10 aa, Influenza A virus
FIRGTKVSPR

SEQ ID NO: 789 - protein, 10 aa, Influenza A virus
FIRGTKVVPR

SEQ ID NO: 790 - protein, 10 aa, Influenza A virus
FIRGTRIVPR

SEQ ID NO: 791 - protein, 10 aa, Influenza A virus
FIRGTRLVPR

SEQ ID NO: 792 - protein, 10 aa, Influenza A virus
FIRGTRMVPR

SEQ ID NO: 793 - protein, 10 aa, Influenza A virus
FIRGTRVAPR

SEQ ID NO: 794 - protein, 10 aa, Influenza A virus
FIRGTRVIPR

SEQ ID NO: 795 - protein, 8 aa, Influenza A virus
FIRGTRVL

SEQ ID NO: 796 - protein, 10 aa, Influenza A virus
FIRGTRVLPR

SEQ ID NO: 797 - protein, 10 aa, Influenza A virus
FIRGTRVVPR

SEQ ID NO: 798 - protein, 10 aa, Influenza A virus
FKLLQNSHVY

SEQ ID NO: 799 - protein, 9 aa, Influenza A virus
FKLLQNSQI

SEQ ID NO: 800 - protein, 10 aa, Influenza A virus
FKLLQNSQIF

SEQ ID NO: 801 - protein, 10 aa, Influenza A virus
FKLLQNSQVF

SEQ ID NO: 802 - protein, 10 aa, Influenza A virus
FKLLQNSQVY

SEQ ID NO: 803 - protein, 10 aa, Influenza A virus
FKLLQTSQVY

SEQ ID NO: 804 - protein, 10 aa, Influenza A virus
FKLSDYEGRL

SEQ ID NO: 805 - protein, 8 aa, Influenza A virus
FLARSALI

SEQ ID NO: 806 - protein, 9 aa, Influenza A virus
FLARSALIL

SEQ ID NO: 807 - protein, 10 aa, Influenza A virus
FLARSALILR

SEQ ID NO: 808 - protein, 8 aa, Influenza A virus
FLARSALV

SEQ ID NO: 809 - protein, 9 aa, Influenza A virus
FLARSALVL

SEQ ID NO: 810 - protein, 10 aa, Influenza A virus
FLARSALVLR

SEQ ID NO: 811 - protein, 8 aa, Influenza A virus
FLTRSALI

SEQ ID NO: 812 - protein, 9 aa, Influenza A virus
FLTRSALIL

SEQ ID NO: 813 - protein, 10 aa, Influenza A virus
FLTRSALILR

SEQ ID NO: 814 - protein, 8 aa, Influenza A virus
FPRGKLST

SEQ ID NO: 815 - protein, 9 aa, Influenza A virus
FPRGKLSTR

SEQ ID NO: 816 - protein, 10 aa, Influenza A virus
FPRGKLSTRG

SEQ ID NO: 817 - protein, 11 aa, Influenza A virus
FPRGKLSTRGV

SEQ ID NO: 818 - protein, 9 aa, Influenza A virus
FQGRGVFEF

SEQ ID NO: 819 - protein, 9 aa, Influenza A virus
FQGRGVFEL

SEQ ID NO: 820 - protein, 9 aa, Influenza A virus
FQIASNENM

SEQ ID NO: 821 - protein, 11 aa, Influenza A virus
FQIASNENMEA

SEQ ID NO: 822 - protein, 9 aa, Influenza A virus
FQTAAQKAM

SEQ ID NO: 823 - protein, 10 aa, Influenza A virus
FQTAAQKAMM

SEQ ID NO: 824 - protein, 9 aa, Influenza A virus
FQTAAQRAI

SEQ ID NO: 825 - protein, 10 aa, Influenza A virus
FQTAAQRAIM

SEQ ID NO: 826 - protein, 10 aa, Influenza A virus
FQTAAQRAMM

SEQ ID NO: 827 - protein, 10 aa, Influenza A virus
FQTAAQRAMV

SEQ ID NO: 828 - protein, 9 aa, Influenza A virus
FQTASQRAM

SEQ ID NO: 829 - protein, 10 aa, Influenza A virus
FQTASQRAMM

SEQ ID NO: 830 - protein, 9 aa, Influenza A virus
FRGRGVFEL

SEQ ID NO: 831 - protein, 9 aa, Influenza A virus
FRLLQNSQI

SEQ ID NO: 832 - protein, 10 aa, Influenza A virus
FRLLQNSQIF

SEQ ID NO: 833 - protein, 9 aa, Influenza A virus
FRLLQNSQV

SEQ ID NO: 834 - protein, 10 aa, Influenza A virus
FRLLQNSQVF

SEQ ID NO: 835 - protein, 10 aa, Influenza A virus
FRLLQNSQVL

SEQ ID NO: 836 - protein, 10 aa, Influenza A virus
FRLLQNSQVY

SEQ ID NO: 837 - protein, 9 aa, Influenza A virus
FRMLQNSQV

SEQ ID NO: 838 - protein, 10 aa, Influenza A virus
FRMLQNSQVF

SEQ ID NO: 839 - protein, 8 aa, Influenza A virus
FSARSALI

SEQ ID NO: 840 - protein, 9 aa, Influenza A virus
FSARSALIL

SEQ ID NO: 841 - protein, 10 aa, Influenza A virus
FSARSALILR

SEQ ID NO: 842 - protein, 10 aa, Influenza A virus
FSDERAANPI

SEQ ID NO: 843 - protein, 9 aa, Influenza A virus
FSFIRGTKV

SEQ ID NO: 844 - protein, 9 aa, Influenza A virus
FSVQKNLPF

SEQ ID NO: 845 - protein, 9 aa, Influenza A virus
FSVQRKLPF

SEQ ID NO: 846 - protein, 11 aa, Influenza A virus
FSVQRKLPFER

SEQ ID NO: 847 - protein, 11 aa, Influenza A virus
FSVQRNLPFDR

SEQ ID NO: 848 - protein, 11 aa, Influenza A virus
FSVQRNLPFEK

SEQ ID NO: 849 - protein, 11 aa, Influenza A virus
FSVQRNLPFER

SEQ ID NO: 850 - protein, 9 aa, Influenza A virus
FWRGENGRL

SEQ ID NO: 851 - protein, 9 aa, Influenza A virus
FYIQMCTEF

SEQ ID NO: 852 - protein, 10 aa, Influenza A virus
FYIQMCTEFK

SEQ ID NO: 853 - protein, 11 aa, Influenza A virus
FYIQMCTEFKL

SEQ ID NO: 854 - protein, 9 aa, Influenza A virus
FYIQMCTEI

SEQ ID NO: 855 - protein, 10 aa, Influenza A virus
FYIQMCTEIK

SEQ ID NO: 856 - protein, 11 aa, Influenza A virus
FYIQMCTEIKL

SEQ ID NO: 857 - protein, 10 aa, Influenza A virus
FYIQMCTELK

SEQ ID NO: 858 - protein, 11 aa, Influenza A virus
FYIQMCTELKL

SEQ ID NO: 859 - protein, 11 aa, Influenza A virus
FYIQMCTELQL

SEQ ID NO: 860 - protein, 9 aa, Influenza A virus
FYVQMCTEL

SEQ ID NO: 861 - protein, 10 aa, Influenza A virus
FYVQMCTELK

SEQ ID NO: 862 - protein, 11 aa, Influenza A virus
FYVQMCTELKL

SEQ ID NO: 863 - protein, 10 aa, Influenza A virus
GAAGATVKGV

SEQ ID NO: 864 - protein, 9 aa, Influenza A virus
GAKPEEMSF

SEQ ID NO: 865 - protein, 10 aa, Influenza A virus
GAKPEEMSFR

SEQ ID NO: 866 - protein, 9 aa, Influenza A virus
GAKPEEVSF

SEQ ID NO: 867 - protein, 10 aa, Influenza A virus
GAKPEEVSFR

SEQ ID NO: 868 - protein, 9 aa, Influenza A virus
GAVAHKSCL

SEQ ID NO: 869 - protein, 9 aa, Influenza A virus
GAYERMCNI

SEQ ID NO: 870 - protein, 11 aa, Influenza A virus
GAYERMCNILK

SEQ ID NO: 871 - protein, 11 aa, Influenza A virus
GEDAPAGLTHL

SEQ ID NO: 872 - protein, 11 aa, Influenza A virus
GEDATAGLTHL

SEQ ID NO: 873 - protein, 10 aa, Influenza A virus
GEIRRIWRQA

SEQ ID NO: 874 - protein, 8 aa, Influenza A virus
GENAAAGL

SEQ ID NO: 875 - protein, 9 aa, Influenza A virus
GENAAAGLT

SEQ ID NO: 876 - protein, 11 aa, Influenza A virus
GENAAAGLTHL

SEQ ID NO: 877 - protein, 9 aa, Influenza A virus
GENERRTRI

SEQ ID NO: 878 - protein, 10 aa, Influenza A virus
GENERRTRIA

SEQ ID NO: 879 - protein, 9 aa, Influenza A virus
GENGRLTRI

SEQ ID NO: 880 - protein, 10 aa, Influenza A virus
GENGRLTRIA

SEQ ID NO: 881 - protein, 9 aa, Influenza A virus
GENGRRTKI

SEQ ID NO: 882 - protein, 9 aa, Influenza A virus
GENGRRTRI

SEQ ID NO: 883 - protein, 9 aa, Influenza A virus
GENGRRTRV

SEQ ID NO: 884 - protein, 10 aa, Influenza A virus
GENGRRTRVA

SEQ ID NO: 885 - protein, 9 aa, Influenza A virus
GERPNATEI

SEQ ID NO: 886 - protein, 9 aa, Influenza A virus
GERQDATEI

SEQ ID NO: 887 - protein, 9 aa, Influenza A virus
GERQNANDI

SEQ ID NO: 888 - protein, 9 aa, Influenza A virus
GERQNANEI

SEQ ID NO: 889 - protein, 9 aa, Influenza A virus
GERQNATEI

SEQ ID NO: 890 - protein, 9 aa, Influenza A virus
GERQNTTEI

SEQ ID NO: 891 - protein, 8 aa, Influenza A virus
GEYATAGL

SEQ ID NO: 892 - protein, 9 aa, Influenza A virus
GEYATAGLT

SEQ ID NO: 893 - protein, 11 aa, Influenza A virus
GEYATAGLTHI

SEQ ID NO: 894 - protein, 11 aa, Influenza A virus
GFIRGKKVIPR

SEQ ID NO: 895 - protein, 11 aa, Influenza A virus
GFIRGKKVVPR

SEQ ID NO: 896 - protein, 11 aa, Influenza A virus
GFIRGKRVVPR

SEQ ID NO: 897 - protein, 10 aa, Influenza A virus
GFQIASNENM

SEQ ID NO: 898 - protein, 9 aa, Influenza A virus
GGMVGGIGR

SEQ ID NO: 899 - protein, 10 aa, Influenza A virus
GGMVGGIGRF

SEQ ID NO: 900 - protein, 11 aa, Influenza A virus
GGPIYKRVGGK

SEQ ID NO: 901 - protein, 11 aa, Influenza A virus
GGPIYKRVNGK

SEQ ID NO: 902 - protein, 11 aa, Influenza A virus
GGPIYRRVGGK

SEQ ID NO: 903 - protein, 11 aa, Influenza A virus
GGPIYRRVNGK

SEQ ID NO: 904 - protein, 10 aa, Influenza A virus
GGRWMRELVL

SEQ ID NO: 905 - protein, 11 aa, Influenza A virus
GGRWMRELVLY

SEQ ID NO: 906 - protein, 10 aa, Influenza A virus
GGYDFEREGY

SEQ ID NO: 907 - protein, 9 aa, Influenza A virus
GHISVQPTF

SEQ ID NO: 908 - protein, 9 aa, Influenza A virus
GIGTMVMEL

SEQ ID NO: 909 - protein, 9 aa, Influenza A virus
GINDRNFWR

SEQ ID NO: 910 - protein, 10 aa, Influenza A virus
GIQIASNENM

SEQ ID NO: 911 - protein, 11 aa, Influenza A virus
GKDPKKTGGPI

SEQ ID NO: 912 - protein, 11 aa, Influenza A virus
GKDPKRTGGPI

SEQ ID NO: 913 - protein, 11 aa, Influenza A virus
GKFQTAAQKAM

SEQ ID NO: 914 - protein, 11 aa, Influenza A virus
GKFQTAAQRAM

SEQ ID NO: 915 - protein, 11 aa, Influenza A virus
GKFQTASQRAM

SEQ ID NO: 916 - protein, 10 aa, Influenza A virus
GKMIDGIGRF

SEQ ID NO: 917 - protein, 11 aa, Influenza A virus
GKMIDGIGRFY

SEQ ID NO: 918 - protein, 10 aa, Influenza A virus
GKMIGGIGRF

SEQ ID NO: 919 - protein, 11 aa, Influenza A virus
GKMIGGIGRFY

SEQ ID NO: 920 - protein, 10 aa, Influenza A virus
GKMINGIGRF

SEQ ID NO: 921 - protein, 11 aa, Influenza A virus
GKMINGIGRFY

SEQ ID NO: 922 - protein, 10 aa, Influenza A virus
GKMISGIGRF

SEQ ID NO: 923 - protein, 11 aa, Influenza A virus
GKMISGIGRFY

SEQ ID NO: 924 - protein, 10 aa, Influenza A virus
GKMVDGIGRF

SEQ ID NO: 925 - protein, 11 aa, Influenza A virus
GKMVDGIGRFY

SEQ ID NO: 926 - protein, 10 aa, Influenza A virus
GKMVGGIGRF

SEQ ID NO: 927 - protein, 11 aa, Influenza A virus
GKMVGGIGRFY

SEQ ID NO: 928 - protein, 9 aa, Influenza A virus
GKWIRELIL

SEQ ID NO: 929 - protein, 10 aa, Influenza A virus
GKWIRELILY

SEQ ID NO: 930 - protein, 9 aa, Influenza A virus
GKWIRELVL

SEQ ID NO: 931 - protein, 10 aa, Influenza A virus
GKWIRELVLY

SEQ ID NO: 932 - protein, 9 aa, Influenza A virus
GKWMRELIL

SEQ ID NO: 933 - protein, 10 aa, Influenza A virus
GKWMRELILY

SEQ ID NO: 934 - protein, 9 aa, Influenza A virus
GKWMRELTL

SEQ ID NO: 935 - protein, 10 aa, Influenza A virus
GKWMRELTLY

SEQ ID NO: 936 - protein, 9 aa, Influenza A virus
GKWMRELVL

SEQ ID NO: 937 - protein, 10 aa, Influenza A virus
GKWMRELVLY

SEQ ID NO: 938 - protein, 9 aa, Influenza A virus
GKWMRKLVL

SEQ ID NO: 939 - protein, 10 aa, Influenza A virus
GKWMRKLVLY

SEQ ID NO: 940 - protein, 9 aa, Influenza A virus
GKWTRELIL

SEQ ID NO: 941 - protein, 10 aa, Influenza A virus
GKWTRELILY

SEQ ID NO: 942 - protein, 9 aa, Influenza A virus
GKWVRELIL

SEQ ID NO: 943 - protein, 10 aa, Influenza A virus
GKWVRELILY

SEQ ID NO: 944 - protein, 9 aa, Influenza A virus
GKWVRELTL

SEQ ID NO: 945 - protein, 10 aa, Influenza A virus
GKWVRELTLY

SEQ ID NO: 946 - protein, 9 aa, Influenza A virus
GKWVRELVL

SEQ ID NO: 947 - protein, 10 aa, Influenza A virus
GKWVRELVLY

SEQ ID NO: 948 - protein, 10 aa, Influenza A virus
GLAVAGGYDF

SEQ ID NO: 949 - protein, 10 aa, Influenza A virus
GLAVASGHDF

SEQ ID NO: 950 - protein, 10 aa, Influenza A virus
GLAVASGYDF

SEQ ID NO: 951 - protein, 10 aa, Influenza A virus
GLAVASGYEF

SEQ ID NO: 952 - protein, 10 aa, Influenza A virus
GLIVASGYDF

SEQ ID NO: 953 - protein, 10 aa, Influenza A virus
GLSVASGYDF

SEQ ID NO: 954 - protein, 10 aa, Influenza A virus
GLTVASGYDF

SEQ ID NO: 955 - protein, 10 aa, Influenza A virus
GLVVASGYDF

SEQ ID NO: 956 - protein, 9 aa, Influenza A virus
GMDPRMCSL

SEQ ID NO: 957 - protein, 10 aa, Influenza A virus
GMDPRMCSLM

SEQ ID NO: 958 - protein, 10 aa, Influenza A virus
GMIKRGINDR

SEQ ID NO: 959 - protein, 9 aa, Influenza A virus
GMVGGIGRF

SEQ ID NO: 960 - protein, 10 aa, Influenza A virus
GMVGGIGRFY

SEQ ID NO: 961 - protein, 11 aa, Influenza A virus
GMVGGIGRFYI

SEQ ID NO: 962 - protein, 11 aa, Influenza A virus
GNAEFEDLIFL

SEQ ID NO: 963 - protein, 11 aa, Influenza A virus
GNAEFEDLTFL

SEQ ID NO: 964 - protein, 11 aa, Influenza A virus
GNAEIEDLIFL

SEQ ID NO: 965 - protein, 11 aa, Influenza A virus
GNAEIEDLTFL

SEQ ID NO: 966 - protein, 11 aa, Influenza A virus
GNAEVEDLIFL

SEQ ID NO: 967 - protein, 11 aa, Influenza A virus
GNAEYEDLIFL

SEQ ID NO: 968 - protein, 10 aa, Influenza A virus
GNPEGRTSDM

SEQ ID NO: 969 - protein, 9 aa, Influenza A virus
GPAVASGYA

SEQ ID NO: 970 - protein, 10 aa, Influenza A virus
GPAVASGYAF

SEQ ID NO: 971 - protein, 10 aa, Influenza A virus
GPAVASGYDF

SEQ ID NO: 972 - protein, 10 aa, Influenza A virus
GPAVASGYEF

SEQ ID NO: 973 - protein, 10 aa, Influenza A virus
GPAVASGYNF

SEQ ID NO: 974 - protein, 10 aa, Influenza A virus
GPAVSSGYDF

SEQ ID NO: 975 - protein, 10 aa, Influenza A virus
GPAVSSGYNF

SEQ ID NO: 976 - protein, 10 aa, Influenza A virus
GPIYKRIDGK

SEQ ID NO: 977 - protein, 10 aa, Influenza A virus
GPIYKRVDGK

SEQ ID NO: 978 - protein, 10 aa, Influenza A virus
GPIYKRVDRK

SEQ ID NO: 979 - protein, 10 aa, Influenza A virus
GPIYKRVGGK

SEQ ID NO: 980 - protein, 10 aa, Influenza A virus
GPIYKRVNGK

SEQ ID NO: 981 - protein, 10 aa, Influenza A virus
GPIYRKIDGK

SEQ ID NO: 982 - protein, 10 aa, Influenza A virus
GPIYRRIDGK

SEQ ID NO: 983 - protein, 10 aa, Influenza A virus
GPIYRRREGK

SEQ ID NO: 984 - protein, 10 aa, Influenza A virus
GPIYRRRNGK

SEQ ID NO: 985 - protein, 10 aa, Influenza A virus
GPIYRRVDGK

SEQ ID NO: 986 - protein, 10 aa, Influenza A virus
GPIYRRVGGK

SEQ ID NO: 987 - protein, 10 aa, Influenza A virus
GPIYRRVNGK

SEQ ID NO: 988 - protein, 9 aa, Influenza A virus
GQISIQPTF

SEQ ID NO: 989 - protein, 10 aa, Influenza A virus
GQISIQPTFS

SEQ ID NO: 990 - protein, 11 aa, Influenza A virus
GQISIQPTFSV

SEQ ID NO: 991 - protein, 9 aa, Influenza A virus
GQISTQPTF

SEQ ID NO: 992 - protein, 10 aa, Influenza A virus
GQISTQPTFS

SEQ ID NO: 993 - protein, 11 aa, Influenza A virus
GQISTQPTFSV

SEQ ID NO: 994 - protein, 9 aa, Influenza A virus
GQISVQPAF

SEQ ID NO: 995 - protein, 10 aa, Influenza A virus
GQISVQPAFS

SEQ ID NO: 996 - protein, 11 aa, Influenza A virus
GQISVQPAFSV

SEQ ID NO: 997 - protein, 9 aa, Influenza A virus
GQISVQPTF

SEQ ID NO: 998 - protein, 10 aa, Influenza A virus
GQISVQPTFS

SEQ ID NO: 999 - protein, 11 aa, Influenza A virus
GQISVQPTFSV

SEQ ID NO: 1000 - protein, 10 aa, Influenza A virus
GQLATRGVQI

SEQ ID NO: 1001 - protein, 8 aa, Influenza A virus
GQLSTRGF

SEQ ID NO: 1002 - protein, 10 aa, Influenza A virus
GQLSTRGFQI

SEQ ID NO: 1003 - protein, 10 aa, Influenza A virus
GQMSTRGVQI

SEQ ID NO: 1004 - protein, 9 aa, Influenza A virus
GQVSVQPSF

SEQ ID NO: 1005 - protein, 11 aa, Influenza A virus
GQVSVQPSFSV

SEQ ID NO: 1006 - protein, 9 aa, Influenza A virus
GQVSVQPTF

SEQ ID NO: 1007 - protein, 11 aa, Influenza A virus
GQVSVQPTFSV

SEQ ID NO: 1008 - protein, 11 aa, Influenza A virus
GRDPKKTGGPI

SEQ ID NO: 1009 - protein, 9 aa, Influenza A virus
GRFYIQMCT

SEQ ID NO: 1010 - protein, 11 aa, Influenza A virus
GRFYIQMCTEF

SEQ ID NO: 1011 - protein, 11 aa, Influenza A virus
GRFYIQMCTEI

SEQ ID NO: 1012 - protein, 11 aa, Influenza A virus
GRFYIQMCTEL

SEQ ID NO: 1013 - protein, 9 aa, Influenza A virus
GRFYVQMCT

SEQ ID NO: 1014 - protein, 11 aa, Influenza A virus
GRFYVQMCTEL

SEQ ID NO: 1015 - protein, 11 aa, Influenza A virus
GRGVFEFSDER

SEQ ID NO: 1016 - protein, 10 aa, Influenza A virus
GRISDMRTEI

SEQ ID NO: 1017 - protein, 10 aa, Influenza A virus
GRKTRIAYER

SEQ ID NO: 1018 - protein, 10 aa, Influenza A virus
GRLIQNSITI

SEQ ID NO: 1019 - protein, 10 aa, Influenza A virus
GRLIQNSITM

SEQ ID NO: 1020 - protein, 8 aa, Influenza A virus
GRLIQNSL

SEQ ID NO: 1021 - protein, 10 aa, Influenza A virus
GRLIQNSLTI

SEQ ID NO: 1022 - protein, 10 aa, Influenza A virus
GRLIQNSLTV

SEQ ID NO: 1023 - protein, 10 aa, Influenza A virus
GRLIQNSMTI

SEQ ID NO: 1024 - protein, 10 aa, Influenza A virus
GRLSTRGIQI

SEQ ID NO: 1025 - protein, 10 aa, Influenza A virus
GRLSTRGVQI

SEQ ID NO: 1026 - protein, 10 aa, Influenza A virus
GRLTRIAYER

SEQ ID NO: 1027 - protein, 11 aa, Influenza A virus
GRLTRIAYERM

SEQ ID NO: 1028 - protein, 9 aa, Influenza A virus
GRMIDGIGR

SEQ ID NO: 1029 - protein, 10 aa, Influenza A virus
GRMIDGIGRF

SEQ ID NO: 1030 - protein, 11 aa, Influenza A virus
GRMIDGIGRFY

SEQ ID NO: 1031 - protein, 9 aa, Influenza A virus
GRMIGGIGR

SEQ ID NO: 1032 - protein, 10 aa, Influenza A virus
GRMIGGIGRF

SEQ ID NO: 1033 - protein, 11 aa, Influenza A virus
GRMIGGIGRFY

SEQ ID NO: 1034 - protein, 9 aa, Influenza A virus
GRMVGGIGR

SEQ ID NO: 1035 - protein, 10 aa, Influenza A virus
GRMVGGIGRF

SEQ ID NO: 1036 - protein, 11 aa, Influenza A virus
GRMVGGIGRFY

SEQ ID NO: 1037 - protein, 9 aa, Influenza A virus
GRMVSGIGR

SEQ ID NO: 1038 - protein, 10 aa, Influenza A virus
GRMVSGIGRF

SEQ ID NO: 1039 - protein, 11 aa, Influenza A virus
GRMVSGIGRFY

SEQ ID NO: 1040 - protein, 9 aa, Influenza A virus
GRNPGNAEI

SEQ ID NO: 1041 - protein, 10 aa, Influenza A virus
GRRTKIAYER

SEQ ID NO: 1042 - protein, 10 aa, Influenza A virus
GRRTRIAYER

SEQ ID NO: 1043 - protein, 10 aa, Influenza A virus
GRRTRTAYER

SEQ ID NO: 1044 - protein, 10 aa, Influenza A virus
GRRTRVAYER

SEQ ID NO: 1045 - protein, 10 aa, Influenza A virus
GRTSDMRAEI

SEQ ID NO: 1046 - protein, 10 aa, Influenza A virus
GRTSDMRIEI

SEQ ID NO: 1047 - protein, 10 aa, Influenza A virus
GRTSDMRTEI

SEQ ID NO: 1048 - protein, 8 aa, Influenza A virus
GRWMRELV

SEQ ID NO: 1049 - protein, 9 aa, Influenza A virus
GRWMRELVL

SEQ ID NO: 1050 - protein, 10 aa, Influenza A virus
GRWMRELVLY

SEQ ID NO: 1051 - protein, 11 aa, Influenza A virus
GRWMRELVLYD

SEQ ID NO: 1052 - protein, 10 aa, Influenza A virus
GSSTLELRSR

SEQ ID NO: 1053 - protein, 11 aa, Influenza A virus
GSSTLELRSRY

SEQ ID NO: 1054 - protein, 10 aa, Influenza A virus
GTIAMELIGM

SEQ ID NO: 1055 - protein, 9 aa, Influenza A virus
GTIAMELIR

SEQ ID NO: 1056 - protein, 10 aa, Influenza A virus
GTIAMELIRM

SEQ ID NO: 1057 - protein, 9 aa, Influenza A virus
GTIVMELIR

SEQ ID NO: 1058 - protein, 9 aa, Influenza A virus
GTKRPYEQM

SEQ ID NO: 1059 - protein, 9 aa, Influenza A virus
GTKRSYEQM

SEQ ID NO: 1060 - protein, 9 aa, Influenza A virus
GTKVCPRGK

SEQ ID NO: 1061 - protein, 9 aa, Influenza A virus
GTKVFPRGK

SEQ ID NO: 1062 - protein, 9 aa, Influenza A virus
GTKVIPRGK

SEQ ID NO: 1063 - protein, 9 aa, Influenza A virus
GTKVLPRGK

SEQ ID NO: 1064 - protein, 9 aa, Influenza A virus
GTKVSPRGK

SEQ ID NO: 1065 - protein, 9 aa, Influenza A virus
GTKVVPRGK

SEQ ID NO: 1066 - protein, 9 aa, Influenza A virus
GTKVVPRGR

SEQ ID NO: 1067 - protein, 9 aa, Influenza A virus
GTMIMELIR

SEQ ID NO: 1068 - protein, 9 aa, Influenza A virus
GTMNMELIR

SEQ ID NO: 1069 - protein, 10 aa, Influenza A virus
GTMNMELIRM

SEQ ID NO: 1070 - protein, 9 aa, Influenza A virus
GTMVLELIR

SEQ ID NO: 1071 - protein, 10 aa, Influenza A virus
GTMVLELIRI

SEQ ID NO: 1072 - protein, 10 aa, Influenza A virus
GTMVMELIQM

SEQ ID NO: 1073 - protein, 11 aa, Influenza A virus
GTMVMELIQMI

SEQ ID NO: 1074 - protein, 9 aa, Influenza A virus
GTMVMELIR

SEQ ID NO: 1075 - protein, 11 aa, Influenza A virus
GTMVMELIRMV

SEQ ID NO: 1076 - protein, 9 aa, Influenza A virus
GTMVMELVR

SEQ ID NO: 1077 - protein, 10 aa, Influenza A virus
GTMVMELVRM

SEQ ID NO: 1078 - protein, 10 aa, Influenza A virus
GTRIVPRGQL

SEQ ID NO: 1079 - protein, 10 aa, Influenza A virus
GTRLVPRGQL

SEQ ID NO: 1080 - protein, 9 aa, Influenza A virus
GTRMVPRGK

SEQ ID NO: 1081 - protein, 10 aa, Influenza A virus
GTRMVPRGKL

SEQ ID NO: 1082 - protein, 10 aa, Influenza A virus
GTRVAPRGQL

SEQ ID NO: 1083 - protein, 9 aa, Influenza A virus
GTRVLPRGK

SEQ ID NO: 1084 - protein, 9 aa, Influenza A virus
GTRVVPRGK

SEQ ID NO: 1085 - protein, 9 aa, Influenza A virus
GTTRSYEQM

SEQ ID NO: 1086 - protein, 9 aa, Influenza A virus
GTVVMELIR

SEQ ID NO: 1087 - protein, 9 aa, Influenza A virus
GVFEFSDER

SEQ ID NO: 1088 - protein, 10 aa, Influenza A virus
GVFEFSDERA

SEQ ID NO: 1089 - protein, 9 aa, Influenza A virus
GVFELSDER

SEQ ID NO: 1090 - protein, 9 aa, Influenza A virus
GVGTIAMEL

SEQ ID NO: 1091 - protein, 9 aa, Influenza A virus
GVGTIVMEL

SEQ ID NO: 1092 - protein, 9 aa, Influenza A virus
GVGTMIMEL

SEQ ID NO: 1093 - protein, 11 aa, Influenza A virus
GVGTMNMELIR

SEQ ID NO: 1094 - protein, 9 aa, Influenza A virus
GVGTMVLEL

SEQ ID NO: 1095 - protein, 11 aa, Influenza A virus
GVGTMVLELIR

SEQ ID NO: 1096 - protein, 9 aa, Influenza A virus
GVGTMVMEL

SEQ ID NO: 1097 - protein, 10 aa, Influenza A virus
GVGTMVMELV

SEQ ID NO: 1098 - protein, 11 aa, Influenza A virus
GVGTMVMELVR

SEQ ID NO: 1099 - protein, 9 aa, Influenza A virus
GVGTVVMEL

SEQ ID NO: 1100 - protein, 9 aa, Influenza A virus
GVNDRNFWR

SEQ ID NO: 1101 - protein, 10 aa, Influenza A virus
GVQIASNENV

SEQ ID NO: 1102 - protein, 11 aa, Influenza A virus
GYAFEKEGYSL

SEQ ID NO: 1103 - protein, 11 aa, Influenza A virus
GYEFEKEGYSL

SEQ ID NO: 1104 - protein, 11 aa, Influenza A virus
GYEFEREGYSL

SEQ ID NO: 1105 - protein, 11 aa, Influenza A virus
GYNFEKEGYSL

SEQ ID NO: 1106 - protein, 10 aa, Influenza A virus
GYSLIGIDPF

SEQ ID NO: 1107 - protein, 11 aa, Influenza A virus
GYSLIGIDPFK

SEQ ID NO: 1108 - protein, 10 aa, Influenza A virus
GYSLVGIDPF

SEQ ID NO: 1109 - protein, 11 aa, Influenza A virus
GYSLVGIDPFR

SEQ ID NO: 1110 - protein, 10 aa, Influenza A virus
GYSLVGIDSF

SEQ ID NO: 1111 - protein, 11 aa, Influenza A virus
GYSLVGIDSFR

SEQ ID NO: 1112 - protein, 10 aa, Influenza A virus
GYSLVGIEPF

SEQ ID NO: 1113 - protein, 10 aa, Influenza A virus
GYSLVGVDPF

SEQ ID NO: 1114 - protein, 11 aa, Influenza A virus
GYSLVGVDPFK

SEQ ID NO: 1115 - protein, 10 aa, Influenza A virus
HDFEREGYSL

SEQ ID NO: 1116 - protein, 10 aa, Influenza A virus
HEGRLIQNSI

SEQ ID NO: 1117 - protein, 9 aa, Influenza A virus
HGLAVASGY

SEQ ID NO: 1118 - protein, 9 aa, Influenza A virus
HIMIWHSNL

SEQ ID NO: 1119 - protein, 10 aa, Influenza A virus
HISVQPTFSV

SEQ ID NO: 1120 - protein, 10 aa, Influenza A virus
HKSCLPACVY

SEQ ID NO: 1121 - protein, 10 aa, Influenza A virus
HKSCLPTCVY

SEQ ID NO: 1122 - protein, 9 aa, Influenza A virus
HKSQLAWMA

SEQ ID NO: 1123 - protein, 9 aa, Influenza A virus
HKSQLVWMA

SEQ ID NO: 1124 - protein, 9 aa, Influenza A virus
HLMIWHSNL

SEQ ID NO: 1125 - protein, 9 aa, Influenza A virus
HMMIWHSNL

SEQ ID NO: 1126 - protein, 10 aa, Influenza A virus
HRASAGQISV

SEQ ID NO: 1127 - protein, 9 aa, Influenza A virus
HSAAFEDLR

SEQ ID NO: 1128 - protein, 10 aa, Influenza A virus
HSAAFEDLRI

SEQ ID NO: 1129 - protein, 10 aa, Influenza A virus
HSAAFEDLRL

SEQ ID NO: 1130 - protein, 11 aa, Influenza A virus
HSAAFEDLRLF

SEQ ID NO: 1131 - protein, 11 aa, Influenza A virus
HSAAFEDLRLL

SEQ ID NO: 1132 - protein, 10 aa, Influenza A virus
HSAAFEDLRV

SEQ ID NO: 1133 - protein, 11 aa, Influenza A virus
HSAAFEDLRVL

SEQ ID NO: 1134 - protein, 9 aa, Influenza A virus
HSNLNDATY

SEQ ID NO: 1135 - protein, 11 aa, Influenza A virus
HSNLNDATYQR

SEQ ID NO: 1136 - protein, 9 aa, Influenza A virus
HSNLNDSTY

SEQ ID NO: 1137 - protein, 11 aa, Influenza A virus
HSNLNDSTYQR

SEQ ID NO: 1138 - protein, 9 aa, Influenza A virus
HSNLNDTTY

SEQ ID NO: 1139 - protein, 11 aa, Influenza A virus
HSNLNDTTYQR

SEQ ID NO: 1140 - protein, 9 aa, Influenza A virus
HSPAFEDLR

SEQ ID NO: 1141 - protein, 9 aa, Influenza A virus
HVRTGMDPR

SEQ ID NO: 1142 - protein, 8 aa, Influenza A virus
IAMELIGM

SEQ ID NO: 1143 - protein, 9 aa, Influenza A virus
IAMELIGMI

SEQ ID NO: 1144 - protein, 10 aa, Influenza A virus
IAMELIGMIK

SEQ ID NO: 1145 - protein, 11 aa, Influenza A virus
IAMELIGMIKR

SEQ ID NO: 1146 - protein, 8 aa, Influenza A virus
IAMELIRM

SEQ ID NO: 1147 - protein, 9 aa, Influenza A virus
IAMELIRMI

SEQ ID NO: 1148 - protein, 10 aa, Influenza A virus
IAMELIRMIK

SEQ ID NO: 1149 - protein, 11 aa, Influenza A virus
IAMELIRMIKR

SEQ ID NO: 1150 - protein, 10 aa, Influenza A virus
IASNENMDAM

SEQ ID NO: 1151 - protein, 10 aa, Influenza A virus
IASNENMDTM

SEQ ID NO: 1152 - protein, 10 aa, Influenza A virus
IASNENMEAM

SEQ ID NO: 1153 - protein, 10 aa, Influenza A virus
IASNENMETM

SEQ ID NO: 1154 - protein, 10 aa, Influenza A virus
IASNENVEAM

SEQ ID NO: 1155 - protein, 10 aa, Influenza A virus
IASNENVETM

SEQ ID NO: 1156 - protein, 9 aa, Influenza A virus
IAYERMCNI

SEQ ID NO: 1157 - protein, 10 aa, Influenza A virus
IAYERMCNIL

SEQ ID NO: 1158 - protein, 11 aa, Influenza A virus
IAYERMCNILK

SEQ ID NO: 1159 - protein, 8 aa, Influenza A virus
IEDLIFLA

SEQ ID NO: 1160 - protein, 11 aa, Influenza A virus
IEDLIFLARSA

SEQ ID NO: 1161 - protein, 11 aa, Influenza A virus
IEDLIFLTRSA

SEQ ID NO: 1162 - protein, 8 aa, Influenza A virus
IEDLIFSA

SEQ ID NO: 1163 - protein, 11 aa, Influenza A virus
IEDLIFSARSA

SEQ ID NO: 1164 - protein, 8 aa, Influenza A virus
IEDLTFLA

SEQ ID NO: 1165 - protein, 11 aa, Influenza A virus
IEDLTFLARSA

SEQ ID NO: 1166 - protein, 10 aa, Influenza A virus
IEIIRMMESA

SEQ ID NO: 1167 - protein, 8 aa, Influenza A virus
IEKMVLSA

SEQ ID NO: 1168 - protein, 9 aa, Influenza A virus
IEKMVLSAF

SEQ ID NO: 1169 - protein, 8 aa, Influenza A virus
IERMILSA

SEQ ID NO: 1170 - protein, 9 aa, Influenza A virus
IERMILSAF

SEQ ID NO: 1171 - protein, 8 aa, Influenza A virus
IERMVLSA

SEQ ID NO: 1172 - protein, 8 aa, Influenza A virus
IFLARSAL

SEQ ID NO: 1173 - protein, 9 aa, Influenza A virus
IFLARSALI

SEQ ID NO: 1174 - protein, 10 aa, Influenza A virus
IFLARSALIL

SEQ ID NO: 1175 - protein, 11 aa, Influenza A virus
IFLARSALILR

SEQ ID NO: 1176 - protein, 9 aa, Influenza A virus
IFLARSALV

SEQ ID NO: 1177 - protein, 10 aa, Influenza A virus
IFLARSALVL

SEQ ID NO: 1178 - protein, 11 aa, Influenza A virus
IFLARSALVLR

SEQ ID NO: 1179 - protein, 8 aa, Influenza A virus
IFLTRSAL

SEQ ID NO: 1180 - protein, 9 aa, Influenza A virus
IFLTRSALI

SEQ ID NO: 1181 - protein, 10 aa, Influenza A virus
IFLTRSALIL

SEQ ID NO: 1182 - protein, 11 aa, Influenza A virus
IFLTRSALILR

SEQ ID NO: 1183 - protein, 8 aa, Influenza A virus
IFSARSAL

SEQ ID NO: 1184 - protein, 9 aa, Influenza A virus
IFSARSALI

SEQ ID NO: 1185 - protein, 10 aa, Influenza A virus
IFSARSALIL

SEQ ID NO: 1186 - protein, 11 aa, Influenza A virus
IFSARSALILR

SEQ ID NO: 1187 - protein, 8 aa, Influenza A virus
IFSLIRPK

SEQ ID NO: 1188 - protein, 10 aa, Influenza A virus
IGTMVMELIR

SEQ ID NO: 1189 - protein, 9 aa, Influenza A virus
IIKMMENAR

SEQ ID NO: 1190 - protein, 9 aa, Influenza A virus
IIKMMESAR

SEQ ID NO: 1191 - protein, 9 aa, Influenza A virus
IIKRGINDR

SEQ ID NO: 1192 - protein, 9 aa, Influenza A virus
IIRIMESAR

SEQ ID NO: 1193 - protein, 9 aa, Influenza A virus
IIRLMEGAK

SEQ ID NO: 1194 - protein, 9 aa, Influenza A virus
IIRLMESAR

SEQ ID NO: 1195 - protein, 9 aa, Influenza A virus
IIRMMEDAK

SEQ ID NO: 1196 - protein, 9 aa, Influenza A virus
IIRMMEGAK

SEQ ID NO: 1197 - protein, 9 aa, Influenza A virus
IIRMMENAK

SEQ ID NO: 1198 - protein, 9 aa, Influenza A virus
IIRMMENAR

SEQ ID NO: 1199 - protein, 9 aa, Influenza A virus
IIRMMENSR

SEQ ID NO: 1200 - protein, 9 aa, Influenza A virus
IIRMMESAK

SEQ ID NO: 1201 - protein, 9 aa, Influenza A virus
IIRMMESAR

SEQ ID NO: 1202 - protein, 9 aa, Influenza A virus
IIRMMESSR

SEQ ID NO: 1203 - protein, 9 aa, Influenza A virus
IIRPNENPA

SEQ ID NO: 1204 - protein, 9 aa, Influenza A virus
IIRVMESAK

SEQ ID NO: 1205 - protein, 9 aa, Influenza A virus
IKGVGTMVM

SEQ ID NO: 1206 - protein, 10 aa, Influenza A virus
IKLSDYEGRL

SEQ ID NO: 1207 - protein, 9 aa, Influenza A virus
ILCDKEEIR

SEQ ID NO: 1208 - protein, 9 aa, Influenza A virus
ILHDKEEIM

SEQ ID NO: 1209 - protein, 10 aa, Influenza A virus
ILHDKEEIMR

SEQ ID NO: 1210 - protein, 11 aa, Influenza A virus
ILHDKEEIMRI

SEQ ID NO: 1211 - protein, 9 aa, Influenza A virus
ILHDKEEIR

SEQ ID NO: 1212 - protein, 10 aa, Influenza A virus
ILHDKEEIRR

SEQ ID NO: 1213 - protein, 10 aa, Influenza A virus
ILKGKFQTAA

SEQ ID NO: 1214 - protein, 9 aa, Influenza A virus
ILRGAVAHK

SEQ ID NO: 1215 - protein, 9 aa, Influenza A virus
ILSAFDERR

SEQ ID NO: 1216 - protein, 11 aa, Influenza A virus
ILSAFDERRNK

SEQ ID NO: 1217 - protein, 9 aa, Influenza A virus
ILYDKDEIR

SEQ ID NO: 1218 - protein, 10 aa, Influenza A virus
ILYDKDEIRR

SEQ ID NO: 1219 - protein, 11 aa, Influenza A virus
ILYDKDEIRRI

SEQ ID NO: 1220 - protein, 9 aa, Influenza A virus
ILYDKEEIM

SEQ ID NO: 1221 - protein, 10 aa, Influenza A virus
ILYDKEEIMR

SEQ ID NO: 1222 - protein, 11 aa, Influenza A virus
ILYDKEEIMRI

SEQ ID NO: 1223 - protein, 9 aa, Influenza A virus
ILYDKEEIR

SEQ ID NO: 1224 - protein, 10 aa, Influenza A virus
ILYDKEEIRR

SEQ ID NO: 1225 - protein, 11 aa, Influenza A virus
ILYDKEEIRRI

SEQ ID NO: 1226 - protein, 11 aa, Influenza A virus
ILYDKEEIRRV

SEQ ID NO: 1227 - protein, 10 aa, Influenza A virus
ILYDKEEISR

SEQ ID NO: 1228 - protein, 11 aa, Influenza A virus
ILYDKEEISRI

SEQ ID NO: 1229 - protein, 9 aa, Influenza A virus
ILYDKEEMR

SEQ ID NO: 1230 - protein, 10 aa, Influenza A virus
ILYDKEEMRR

SEQ ID NO: 1231 - protein, 11 aa, Influenza A virus
ILYDKEEMRRI

SEQ ID NO: 1232 - protein, 8 aa, Influenza A virus
ILYDKEEV

SEQ ID NO: 1233 - protein, 9 aa, Influenza A virus
ILYDKEEVR

SEQ ID NO: 1234 - protein, 10 aa, Influenza A virus
ILYDKEEVRR

SEQ ID NO: 1235 - protein, 11 aa, Influenza A virus
ILYDKEEVRRI

SEQ ID NO: 1236 - protein, 9 aa, Influenza A virus
IMAAFIGNT

SEQ ID NO: 1237 - protein, 9 aa, Influenza A virus
IMAAFNGNT

SEQ ID NO: 1238 - protein, 9 aa, Influenza A virus
IMAAFTGNA

SEQ ID NO: 1239 - protein, 9 aa, Influenza A virus
IMAAFTGNP

SEQ ID NO: 1240 - protein, 9 aa, Influenza A virus
IMAAFTGNT

SEQ ID NO: 1241 - protein, 11 aa, Influenza A virus
IMAAFTGNTER

SEQ ID NO: 1242 - protein, 9 aa, Influenza A virus
IMDQVRESR

SEQ ID NO: 1243 - protein, 9 aa, Influenza A virus
IMELIRMIK

SEQ ID NO: 1244 - protein, 10 aa, Influenza A virus
IMELIRMIKR

SEQ ID NO: 1245 - protein, 11 aa, Influenza A virus
IMIWHSNLNDA

SEQ ID NO: 1246 - protein, 11 aa, Influenza A virus
IPRGKLSTRGV

SEQ ID NO: 1247 - protein, 9 aa, Influenza A virus
IPRGQLATR

SEQ ID NO: 1248 - protein, 11 aa, Influenza A virus
IPRGQLATRGV

SEQ ID NO: 1249 - protein, 11 aa, Influenza A virus
IPRGQLSTRGI

SEQ ID NO: 1250 - protein, 11 aa, Influenza A virus
IPRGQLSTRGV

SEQ ID NO: 1251 - protein, 9 aa, Influenza A virus
IQIASNENM

SEQ ID NO: 1252 - protein, 9 aa, Influenza A virus
IQMCTEFKL

SEQ ID NO: 1253 - protein, 9 aa, Influenza A virus
IQMCTEIKL

SEQ ID NO: 1254 - protein, 9 aa, Influenza A virus
IQMCTELQL

SEQ ID NO: 1255 - protein, 9 aa, Influenza A virus
IQNSITIEK

SEQ ID NO: 1256 - protein, 10 aa, Influenza A virus
IQNSITIEKM

SEQ ID NO: 1257 - protein, 9 aa, Influenza A virus
IQNSITIER

SEQ ID NO: 1258 - protein, 10 aa, Influenza A virus
IQNSITIERM

SEQ ID NO: 1259 - protein, 9 aa, Influenza A virus
IQNSITMER

SEQ ID NO: 1260 - protein, 10 aa, Influenza A virus
IQNSITMERM

SEQ ID NO: 1261 - protein, 9 aa, Influenza A virus
IQNSLTIER

SEQ ID NO: 1262 - protein, 10 aa, Influenza A virus
IQNSLTIERM

SEQ ID NO: 1263 - protein, 9 aa, Influenza A virus
IQNSLTVER

SEQ ID NO: 1264 - protein, 10 aa, Influenza A virus
IQNSLTVERM

SEQ ID NO: 1265 - protein, 9 aa, Influenza A virus
IQNSMTIER

SEQ ID NO: 1266 - protein, 10 aa, Influenza A virus
IQNSMTIERM

SEQ ID NO: 1267 - protein, 9 aa, Influenza A virus
IQPTFSVQR

SEQ ID NO: 1268 - protein, 9 aa, Influenza A virus
IRASVGGMV

SEQ ID NO: 1269 - protein, 9 aa, Influenza A virus
IRASVGKMI

SEQ ID NO: 1270 - protein, 9 aa, Influenza A virus
IRASVGKMV

SEQ ID NO: 1271 - protein, 9 aa, Influenza A virus
IRASVGRMI

SEQ ID NO: 1272 - protein, 9 aa, Influenza A virus
IRASVGRMV

SEQ ID NO: 1273 - protein, 9 aa, Influenza A virus
IRGARVLPR

SEQ ID NO: 1274 - protein, 9 aa, Influenza A virus
IRGARVVPR

SEQ ID NO: 1275 - protein, 9 aa, Influenza A virus
IRGKRVVPR

SEQ ID NO: 1276 - protein, 9 aa, Influenza A virus
IRGTKVFPR

SEQ ID NO: 1277 - protein, 9 aa, Influenza A virus
IRGTRIVPR

SEQ ID NO: 1278 - protein, 9 aa, Influenza A virus
IRGTRLVPR

SEQ ID NO: 1279 - protein, 11 aa, Influenza A virus
IRGTRMVPRGK

SEQ ID NO: 1280 - protein, 9 aa, Influenza A virus
IRGTRVIPR

SEQ ID NO: 1281 - protein, 9 aa, Influenza A virus
IRGTRVLPR

SEQ ID NO: 1282 - protein, 9 aa, Influenza A virus
IRGTRVVPR

SEQ ID NO: 1283 - protein, 11 aa, Influenza A virus
IRMIKRGINDR

SEQ ID NO: 1284 - protein, 11 aa, Influenza A virus
IRMIKRGVNDR

SEQ ID NO: 1285 - protein, 11 aa, Influenza A virus
IRMVKRGINDR

SEQ ID NO: 1286 - protein, 9 aa, Influenza A virus
IRSSVGRMV

SEQ ID NO: 1287 - protein, 11 aa, Influenza A virus
IRTRSGGNTNK

SEQ ID NO: 1288 - protein, 10 aa, Influenza A virus
IRTRSGGNTS

SEQ ID NO: 1289 - protein, 8 aa, Influenza A virus
ISDMRTEI

SEQ ID NO: 1290 - protein, 9 aa, Influenza A virus
ISDMRTEII

SEQ ID NO: 1291 - protein, 10 aa, Influenza A virus
ISDMRTEIIR

SEQ ID NO: 1292 - protein, 9 aa, Influenza A virus
ISGFIRGKR

SEQ ID NO: 1293 - protein, 8 aa, Influenza A virus
ISGIGRFY

SEQ ID NO: 1294 - protein, 9 aa, Influenza A virus
ISGIGRFYI

SEQ ID NO: 1295 - protein, 9 aa, Influenza A virus
ISIQPTFSV

SEQ ID NO: 1296 - protein, 11 aa, Influenza A virus
ISIQPTFSVQR

SEQ ID NO: 1297 - protein, 9 aa, Influenza A virus
ISTQPTFSV

SEQ ID NO: 1298 - protein, 11 aa, Influenza A virus
ISTQPTFSVQR

SEQ ID NO: 1299 - protein, 9 aa, Influenza A virus
ISVQPAFSV

SEQ ID NO: 1300 - protein, 11 aa, Influenza A virus
ISVQPAFSVQK

SEQ ID NO: 1301 - protein, 11 aa, Influenza A virus
ISVQPAFSVQR

SEQ ID NO: 1302 - protein, 9 aa, Influenza A virus
ISVQPTFSV

SEQ ID NO: 1303 - protein, 11 aa, Influenza A virus
ISVQPTFSVQR

SEQ ID NO: 1304 - protein, 8 aa, Influenza A virus
ITIEKMVL

SEQ ID NO: 1305 - protein, 10 aa, Influenza A virus
ITIEKMVLSA

SEQ ID NO: 1306 - protein, 11 aa, Influenza A virus
ITIEKMVLSAF

SEQ ID NO: 1307 - protein, 8 aa, Influenza A virus
ITIERMIL

SEQ ID NO: 1308 - protein, 10 aa, Influenza A virus
ITIERMILSA

SEQ ID NO: 1309 - protein, 11 aa, Influenza A virus
ITIERMILSAF

SEQ ID NO: 1310 - protein, 8 aa, Influenza A virus
ITIERMVL

SEQ ID NO: 1311 - protein, 10 aa, Influenza A virus
ITIERMVLSA

SEQ ID NO: 1312 - protein, 11 aa, Influenza A virus
ITIERMVLSAF

SEQ ID NO: 1313 - protein, 9 aa, Influenza A virus
ITLELRSKY

SEQ ID NO: 1314 - protein, 10 aa, Influenza A virus
ITLELRSKYW

SEQ ID NO: 1315 - protein, 11 aa, Influenza A virus
ITLELRSKYWA

SEQ ID NO: 1316 - protein, 8 aa, Influenza A virus
ITMERMVL

SEQ ID NO: 1317 - protein, 10 aa, Influenza A virus
ITMERMVLSA

SEQ ID NO: 1318 - protein, 11 aa, Influenza A virus
ITMERMVLSAF

SEQ ID NO: 1319 - protein, 10 aa, Influenza A virus
IVASGYDFER

SEQ ID NO: 1320 - protein, 9 aa, Influenza A virus
IVMELIRMI

SEQ ID NO: 1321 - protein, 10 aa, Influenza A virus
IVMELIRMIK

SEQ ID NO: 1322 - protein, 11 aa, Influenza A virus
IVMELIRMIKR

SEQ ID NO: 1323 - protein, 10 aa, Influenza A virus
IVPRGQLSTR

SEQ ID NO: 1324 - protein, 9 aa, Influenza A virus
IVPSFDMSK

SEQ ID NO: 1325 - protein, 9 aa, Influenza A virus
IVSSTLELR

SEQ ID NO: 1326 - protein, 11 aa, Influenza A virus
IVSSTLELRSR

SEQ ID NO: 1327 - protein, 11 aa, Influenza A virus
IWHSNLNDATY

SEQ ID NO: 1328 - protein, 10 aa, Influenza A virus
IWRQANNGEY

SEQ ID NO: 1329 - protein, 11 aa, Influenza A virus
IYKKRDGKWMR

SEQ ID NO: 1330 - protein, 9 aa, Influenza A virus
IYKRIDGKW

SEQ ID NO: 1331 - protein, 11 aa, Influenza A virus
IYKRIDGKWMR

SEQ ID NO: 1332 - protein, 11 aa, Influenza A virus
IYKRRDGKWMR

SEQ ID NO: 1333 - protein, 11 aa, Influenza A virus
IYKRREGKWVR

SEQ ID NO: 1334 - protein, 9 aa, Influenza A virus
IYKRVDGKW

SEQ ID NO: 1335 - protein, 11 aa, Influenza A virus
IYKRVDGKWMR

SEQ ID NO: 1336 - protein, 11 aa, Influenza A virus
IYKRVDGKWVR

SEQ ID NO: 1337 - protein, 9 aa, Influenza A virus
IYKRVDGRW

SEQ ID NO: 1338 - protein, 11 aa, Influenza A virus
IYKRVDGRWMR

SEQ ID NO: 1339 - protein, 9 aa, Influenza A virus
IYKRVDRKW

SEQ ID NO: 1340 - protein, 11 aa, Influenza A virus
IYKRVDRKWMR

SEQ ID NO: 1341 - protein, 9 aa, Influenza A virus
IYKRVGGKW

SEQ ID NO: 1342 - protein, 11 aa, Influenza A virus
IYKRVGGKWMR

SEQ ID NO: 1343 - protein, 9 aa, Influenza A virus
IYKRVGGRW

SEQ ID NO: 1344 - protein, 10 aa, Influenza A virus
IYKRVGGRWM

SEQ ID NO: 1345 - protein, 11 aa, Influenza A virus
IYKRVGGRWMR

SEQ ID NO: 1346 - protein, 9 aa, Influenza A virus
IYKRVNGKW

SEQ ID NO: 1347 - protein, 11 aa, Influenza A virus
IYKRVNGKWMR

SEQ ID NO: 1348 - protein, 9 aa, Influenza A virus
IYRKIDGKW

SEQ ID NO: 1349 - protein, 11 aa, Influenza A virus
IYRKIDGKWMR

SEQ ID NO: 1350 - protein, 11 aa, Influenza A virus
IYRKREGKWIR

SEQ ID NO: 1351 - protein, 9 aa, Influenza A virus
IYRRIDGKW

SEQ ID NO: 1352 - protein, 11 aa, Influenza A virus
IYRRIDGKWIR

SEQ ID NO: 1353 - protein, 11 aa, Influenza A virus
IYRRIDGKWMR

SEQ ID NO: 1354 - protein, 11 aa, Influenza A virus
IYRRIDGKWTR

SEQ ID NO: 1355 - protein, 11 aa, Influenza A virus
IYRRKDGKWMR

SEQ ID NO: 1356 - protein, 11 aa, Influenza A virus
IYRRRDGKWIR

SEQ ID NO: 1357 - protein, 11 aa, Influenza A virus
IYRRRDGKWMR

SEQ ID NO: 1358 - protein, 11 aa, Influenza A virus
IYRRRDGKWVR

SEQ ID NO: 1359 - protein, 11 aa, Influenza A virus
IYRRREGKWVR

SEQ ID NO: 1360 - protein, 11 aa, Influenza A virus
IYRRRNGKWVR

SEQ ID NO: 1361 - protein, 9 aa, Influenza A virus
IYRRVDGKW

SEQ ID NO: 1362 - protein, 11 aa, Influenza A virus
IYRRVDGKWIR

SEQ ID NO: 1363 - protein, 11 aa, Influenza A virus
IYRRVDGKWMR

SEQ ID NO: 1364 - protein, 9 aa, Influenza A virus
IYRRVGGKW

SEQ ID NO: 1365 - protein, 11 aa, Influenza A virus
IYRRVGGKWIR

SEQ ID NO: 1366 - protein, 9 aa, Influenza A virus
IYRRVNGKW

SEQ ID NO: 1367 - protein, 11 aa, Influenza A virus
IYRRVNGKWMR

SEQ ID NO: 1368 - protein, 9 aa, Influenza A virus
KAANPIVPS

SEQ ID NO: 1369 - protein, 10 aa, Influenza A virus
KAANPIVPSF

SEQ ID NO: 1370 - protein, 9 aa, Influenza A virus
KAASPIVPS

SEQ ID NO: 1371 - protein, 10 aa, Influenza A virus
KAASPIVPSF

SEQ ID NO: 1372 - protein, 11 aa, Influenza A virus
KAMMDQVRESR

SEQ ID NO: 1373 - protein, 9 aa, Influenza A virus
KASADQISV

SEQ ID NO: 1374 - protein, 9 aa, Influenza A virus
KASAGQISV

SEQ ID NO: 1375 - protein, 8 aa, Influenza A virus
KATIMAAF

SEQ ID NO: 1376 - protein, 10 aa, Influenza A virus
KATIMAAFTG

SEQ ID NO: 1377 - protein, 10 aa, Influenza A virus
KATNPIVPSF

SEQ ID NO: 1378 - protein, 10 aa, Influenza A virus
KATNPIVPSL

SEQ ID NO: 1379 - protein, 10 aa, Influenza A virus
KATNPVVPSF

SEQ ID NO: 1380 - protein, 10 aa, Influenza A virus
KATSPIVPSF

SEQ ID NO: 1381 - protein, 10 aa, Influenza A virus
KATSPIVPSL

SEQ ID NO: 1382 - protein, 11 aa, Influenza A virus
KDEIRRIWRQA

SEQ ID NO: 1383 - protein, 10 aa, Influenza A virus
KDPKRTGGPI

SEQ ID NO: 1384 - protein, 11 aa, Influenza A virus
KEEIRRIWRHA

SEQ ID NO: 1385 - protein, 11 aa, Influenza A virus
KEEIRRIWRQA

SEQ ID NO: 1386 - protein, 11 aa, Influenza A virus
KEEIRRIWRQR

SEQ ID NO: 1387 - protein, 11 aa, Influenza A virus
KEEIRRTWRQA

SEQ ID NO: 1388 - protein, 11 aa, Influenza A virus
KEEIRRVWRQA

SEQ ID NO: 1389 - protein, 11 aa, Influenza A virus
KEELRRIWRQA

SEQ ID NO: 1390 - protein, 11 aa, Influenza A virus
KEEMRRIWRQA

SEQ ID NO: 1391 - protein, 11 aa, Influenza A virus
KEEVRRIWRQA

SEQ ID NO: 1392 - protein, 11 aa, Influenza A virus
KEGSYFFGDNA

SEQ ID NO: 1393 - protein, 9 aa, Influenza A virus
KEGYSLVGI

SEQ ID NO: 1394 - protein, 9 aa, Influenza A virus
KEGYSLVGV

SEQ ID NO: 1395 - protein, 10 aa, Influenza A virus
KENPAHKSQL

SEQ ID NO: 1396 - protein, 10 aa, Influenza A virus
KFQTAAQKAM

SEQ ID NO: 1397 - protein, 8 aa, Influenza A virus
KFQTAAQR

SEQ ID NO: 1398 - protein, 10 aa, Influenza A virus
KFQTAAQRAM

SEQ ID NO: 1399 - protein, 8 aa, Influenza A virus
KFQTASQR

SEQ ID NO: 1400 - protein, 10 aa, Influenza A virus
KFQTASQRAM

SEQ ID NO: 1401 - protein, 9 aa, Influenza A virus
KGEIRRIWR

SEQ ID NO: 1402 - protein, 11 aa, Influenza A virus
KGEIRRIWRQA

SEQ ID NO: 1403 - protein, 10 aa, Influenza A virus
KGKFQTAAQK

SEQ ID NO: 1404 - protein, 10 aa, Influenza A virus
KGKFQTAAQR

SEQ ID NO: 1405 - protein, 10 aa, Influenza A virus
KGKFQTASQR

SEQ ID NO: 1406 - protein, 10 aa, Influenza A virus
KGTKRSYEQM

SEQ ID NO: 1407 - protein, 10 aa, Influenza A virus
KGTKVLPRGK

SEQ ID NO: 1408 - protein, 10 aa, Influenza A virus
KGTKVVPRGK

SEQ ID NO: 1409 - protein, 10 aa, Influenza A virus
KIAYERMCNI

SEQ ID NO: 1410 - protein, 8 aa, Influenza A virus
KIDGKWMR

SEQ ID NO: 1411 - protein, 8 aa, Influenza A virus
KKTGGPIY

SEQ ID NO: 1412 - protein, 10 aa, Influenza A virus
KKTGGPIYKK

SEQ ID NO: 1413 - protein, 10 aa, Influenza A virus
KKTGGPIYKR

SEQ ID NO: 1414 - protein, 10 aa, Influenza A virus
KKTGGPIYRK

SEQ ID NO: 1415 - protein, 10 aa, Influenza A virus
KKTGGPIYRR

SEQ ID NO: 1416 - protein, 9 aa, Influenza A virus
KLGDHEGRL

SEQ ID NO: 1417 - protein, 9 aa, Influenza A virus
KLLQNSHVY

SEQ ID NO: 1418 - protein, 10 aa, Influenza A virus
KLLQNSHVYS

SEQ ID NO: 1419 - protein, 11 aa, Influenza A virus
KLLQNSHVYSL

SEQ ID NO: 1420 - protein, 9 aa, Influenza A virus
KLLQNSQIF

SEQ ID NO: 1421 - protein, 11 aa, Influenza A virus
KLLQNSQIFSL

SEQ ID NO: 1422 - protein, 9 aa, Influenza A virus
KLLQNSQVF

SEQ ID NO: 1423 - protein, 11 aa, Influenza A virus
KLLQNSQVFSL

SEQ ID NO: 1424 - protein, 9 aa, Influenza A virus
KLLQNSQVY

SEQ ID NO: 1425 - protein, 10 aa, Influenza A virus
KLLQNSQVYS

SEQ ID NO: 1426 - protein, 11 aa, Influenza A virus
KLLQNSQVYSL

SEQ ID NO: 1427 - protein, 9 aa, Influenza A virus
KLLQTSQVY

SEQ ID NO: 1428 - protein, 10 aa, Influenza A virus
KLLQTSQVYS

SEQ ID NO: 1429 - protein, 11 aa, Influenza A virus
KLLQTSQVYSL

SEQ ID NO: 1430 - protein, 9 aa, Influenza A virus
KLNDHEGRL

SEQ ID NO: 1431 - protein, 10 aa, Influenza A virus
KLNDHEGRLI

SEQ ID NO: 1432 - protein, 9 aa, Influenza A virus
KLNDYEGRL

SEQ ID NO: 1433 - protein, 10 aa, Influenza A virus
KLNDYEGRLI

SEQ ID NO: 1434 - protein, 9 aa, Influenza A virus
KLPFERATI

SEQ ID NO: 1435 - protein, 10 aa, Influenza A virus
KLPFERATIM

SEQ ID NO: 1436 - protein, 9 aa, Influenza A virus
KLSDHEGRL

SEQ ID NO: 1437 - protein, 10 aa, Influenza A virus
KLSDHEGRLI

SEQ ID NO: 1438 - protein, 9 aa, Influenza A virus
KLSDNEGRL

SEQ ID NO: 1439 - protein, 10 aa, Influenza A virus
KLSDNEGRLI

SEQ ID NO: 1440 - protein, 9 aa, Influenza A virus
KLSDQEGRL

SEQ ID NO: 1441 - protein, 10 aa, Influenza A virus
KLSDQEGRLI

SEQ ID NO: 1442 - protein, 9 aa, Influenza A virus
KLSDYEGRL

SEQ ID NO: 1443 - protein, 10 aa, Influenza A virus
KLSDYEGRLI

SEQ ID NO: 1444 - protein, 9 aa, Influenza A virus
KLSTRGVQI

SEQ ID NO: 1445 - protein, 10 aa, Influenza A virus
KLSTRGVQIA

SEQ ID NO: 1446 - protein, 11 aa, Influenza A virus
KLSTRGVQIAS

SEQ ID NO: 1447 - protein, 10 aa, Influenza A virus
KLVLYDKEEI

SEQ ID NO: 1448 - protein, 11 aa, Influenza A virus
KLVLYDKEEIR

SEQ ID NO: 1449 - protein, 8 aa, Influenza A virus
KMIDGIGR

SEQ ID NO: 1450 - protein, 9 aa, Influenza A virus
KMIDGIGRF

SEQ ID NO: 1451 - protein, 10 aa, Influenza A virus
KMIDGIGRFY

SEQ ID NO: 1452 - protein, 11 aa, Influenza A virus
KMIDGIGRFYI

SEQ ID NO: 1453 - protein, 8 aa, Influenza A virus
KMIGGIGR

SEQ ID NO: 1454 - protein, 9 aa, Influenza A virus
KMIGGIGRF

SEQ ID NO: 1455 - protein, 10 aa, Influenza A virus
KMIGGIGRFY

SEQ ID NO: 1456 - protein, 11 aa, Influenza A virus
KMIGGIGRFYI

SEQ ID NO: 1457 - protein, 8 aa, Influenza A virus
KMINGIGR

SEQ ID NO: 1458 - protein, 9 aa, Influenza A virus
KMINGIGRF

SEQ ID NO: 1459 - protein, 10 aa, Influenza A virus
KMINGIGRFY

SEQ ID NO: 1460 - protein, 11 aa, Influenza A virus
KMINGIGRFYI

SEQ ID NO: 1461 - protein, 8 aa, Influenza A virus
KMISGIGR

SEQ ID NO: 1462 - protein, 9 aa, Influenza A virus
KMISGIGRF

SEQ ID NO: 1463 - protein, 10 aa, Influenza A virus
KMISGIGRFY

SEQ ID NO: 1464 - protein, 11 aa, Influenza A virus
KMISGIGRFYI

SEQ ID NO: 1465 - protein, 11 aa, Influenza A virus
KMMENARPEDV

SEQ ID NO: 1466 - protein, 11 aa, Influenza A virus
KMMESARPEEV

SEQ ID NO: 1467 - protein, 8 aa, Influenza A virus
KMVDGIGR

SEQ ID NO: 1468 - protein, 9 aa, Influenza A virus
KMVDGIGRF

SEQ ID NO: 1469 - protein, 10 aa, Influenza A virus
KMVDGIGRFY

SEQ ID NO: 1470 - protein, 11 aa, Influenza A virus
KMVDGIGRFYI

SEQ ID NO: 1471 - protein, 8 aa, Influenza A virus
KMVGGIGR

SEQ ID NO: 1472 - protein, 9 aa, Influenza A virus
KMVGGIGRF

SEQ ID NO: 1473 - protein, 10 aa, Influenza A virus
KMVGGIGRFY

SEQ ID NO: 1474 - protein, 11 aa, Influenza A virus
KMVGGIGRFYI

SEQ ID NO: 1475 - protein, 10 aa, Influenza A virus
KMVLSAFDER

SEQ ID NO: 1476 - protein, 11 aa, Influenza A virus
KMVLSAFDERR

SEQ ID NO: 1477 - protein, 11 aa, Influenza A virus
KNLPFDKSTIM

SEQ ID NO: 1478 - protein, 8 aa, Influenza A virus
KPTIMAAF

SEQ ID NO: 1479 - protein, 9 aa, Influenza A virus
KQRASAGQI

SEQ ID NO: 1480 - protein, 11 aa, Influenza A virus
KQRASAGQISV

SEQ ID NO: 1481 - protein, 10 aa, Influenza A virus
KRDGKWMREL

SEQ ID NO: 1482 - protein, 11 aa, Influenza A virus
KRDGKWMRELI

SEQ ID NO: 1483 - protein, 10 aa, Influenza A virus
KREGKWIREL

SEQ ID NO: 1484 - protein, 10 aa, Influenza A virus
KRGINDRNFW

SEQ ID NO: 1485 - protein, 11 aa, Influenza A virus
KRGINDRNFWR

SEQ ID NO: 1486 - protein, 10 aa, Influenza A virus
KRGVNDRNFW

SEQ ID NO: 1487 - protein, 11 aa, Influenza A virus
KRGVNDRNFWR

SEQ ID NO: 1488 - protein, 9 aa, Influenza A virus
KRIDGKWMR

SEQ ID NO: 1489 - protein, 11 aa, Influenza A virus
KRIDGKWMREL

SEQ ID NO: 1490 - protein, 9 aa, Influenza A virus
KRRDGKWMR

SEQ ID NO: 1491 - protein, 11 aa, Influenza A virus
KRRDGKWMREL

SEQ ID NO: 1492 - protein, 9 aa, Influenza A virus
KRREGKWVR

SEQ ID NO: 1493 - protein, 11 aa, Influenza A virus
KRREGKWVREL

SEQ ID NO: 1494 - protein, 10 aa, Influenza A virus
KRTGGPIYRR

SEQ ID NO: 1495 - protein, 9 aa, Influenza A virus
KRVDGKWMR

SEQ ID NO: 1496 - protein, 11 aa, Influenza A virus
KRVDGKWMREL

SEQ ID NO: 1497 - protein, 10 aa, Influenza A virus
KRVDGKWMRK

SEQ ID NO: 1498 - protein, 11 aa, Influenza A virus
KRVDGKWMRKL

SEQ ID NO: 1499 - protein, 9 aa, Influenza A virus
KRVDGKWVR

SEQ ID NO: 1500 - protein, 11 aa, Influenza A virus
KRVDGKWVREL

SEQ ID NO: 1501 - protein, 9 aa, Influenza A virus
KRVDGRWMR

SEQ ID NO: 1502 - protein, 11 aa, Influenza A virus
KRVDGRWMREL

SEQ ID NO: 1503 - protein, 9 aa, Influenza A virus
KRVDRKWMR

SEQ ID NO: 1504 - protein, 11 aa, Influenza A virus
KRVDRKWMREL

SEQ ID NO: 1505 - protein, 9 aa, Influenza A virus
KRVGGKWMR

SEQ ID NO: 1506 - protein, 11 aa, Influenza A virus
KRVGGKWMREL

SEQ ID NO: 1507 - protein, 9 aa, Influenza A virus
KRVGGRWMR

SEQ ID NO: 1508 - protein, 11 aa, Influenza A virus
KRVGGRWMREL

SEQ ID NO: 1509 - protein, 9 aa, Influenza A virus
KRVNGKWMR

SEQ ID NO: 1510 - protein, 11 aa, Influenza A virus
KRVNGKWMREL

SEQ ID NO: 1511 - protein, 9 aa, Influenza A virus
KRVVPRGKL

SEQ ID NO: 1512 - protein, 9 aa, Influenza A virus
KRVVPRGQL

SEQ ID NO: 1513 - protein, 11 aa, Influenza A virus
KSCLPACVYGL

SEQ ID NO: 1514 - protein, 9 aa, Influenza A virus
KSCLPTCVY

SEQ ID NO: 1515 - protein, 9 aa, Influenza A virus
KSQLAWMAC

SEQ ID NO: 1516 - protein, 10 aa, Influenza A virus
KSQLAWMACH

SEQ ID NO: 1517 - protein, 9 aa, Influenza A virus
KSSAGQISV

SEQ ID NO: 1518 - protein, 8 aa, Influenza A virus
KSTIMAAF

SEQ ID NO: 1519 - protein, 10 aa, Influenza A virus
KSTIMAAFTG

SEQ ID NO: 1520 - protein, 8 aa, Influenza A virus
KSTVMAAF

SEQ ID NO: 1521 - protein, 10 aa, Influenza A virus
KSTVMAAFTG

SEQ ID NO: 1522 - protein, 8 aa, Influenza A virus
KTGGPIYK

SEQ ID NO: 1523 - protein, 9 aa, Influenza A virus
KTGGPIYKK

SEQ ID NO: 1524 - protein, 10 aa, Influenza A virus
KTGGPIYKKR

SEQ ID NO: 1525 - protein, 9 aa, Influenza A virus
KTGGPIYKR

SEQ ID NO: 1526 - protein, 10 aa, Influenza A virus
KTGGPIYKRR

SEQ ID NO: 1527 - protein, 8 aa, Influenza A virus
KTGGPIYR

SEQ ID NO: 1528 - protein, 9 aa, Influenza A virus
KTGGPIYRK

SEQ ID NO: 1529 - protein, 10 aa, Influenza A virus
KTGGPIYRKR

SEQ ID NO: 1530 - protein, 9 aa, Influenza A virus
KTGGPIYRR

SEQ ID NO: 1531 - protein, 10 aa, Influenza A virus
KTGGPIYRRK

SEQ ID NO: 1532 - protein, 10 aa, Influenza A virus
KTGGPIYRRR

SEQ ID NO: 1533 - protein, 8 aa, Influenza A virus
KTRGAYER

SEQ ID NO: 1534 - protein, 9 aa, Influenza A virus
KTRGAYERM

SEQ ID NO: 1535 - protein, 10 aa, Influenza A virus
KTRGAYERMC

SEQ ID NO: 1536 - protein, 8 aa, Influenza A virus
KTRIAYER

SEQ ID NO: 1537 - protein, 9 aa, Influenza A virus
KTRIAYERM

SEQ ID NO: 1538 - protein, 10 aa, Influenza A virus
KTRIAYERMC

SEQ ID NO: 1539 - protein, 8 aa, Influenza A virus
KTRNAYER

SEQ ID NO: 1540 - protein, 9 aa, Influenza A virus
KTRNAYERM

SEQ ID NO: 1541 - protein, 10 aa, Influenza A virus
KTRNAYERMC

SEQ ID NO: 1542 - protein, 8 aa, Influenza A virus
KTRSAYER

SEQ ID NO: 1543 - protein, 9 aa, Influenza A virus
KTRSAYERM

SEQ ID NO: 1544 - protein, 10 aa, Influenza A virus
KTRSAYERMC

SEQ ID NO: 1545 - protein, 9 aa, Influenza A virus
KTRSGGNTN

SEQ ID NO: 1546 - protein, 10 aa, Influenza A virus
KTRSGGNTNQ

SEQ ID NO: 1547 - protein, 8 aa, Influenza A virus
KTTIMAAF

SEQ ID NO: 1548 - protein, 10 aa, Influenza A virus
KTTIMAAFTG

SEQ ID NO: 1549 - protein, 11 aa, Influenza A virus
KVCPRGKLSTR

SEQ ID NO: 1550 - protein, 9 aa, Influenza A virus
KVFPRGKLS

SEQ ID NO: 1551 - protein, 10 aa, Influenza A virus
KVFPRGKLST

SEQ ID NO: 1552 - protein, 11 aa, Influenza A virus
KVFPRGKLSTR

SEQ ID NO: 1553 - protein, 9 aa, Influenza A virus
KVIPRGKLS

SEQ ID NO: 1554 - protein, 11 aa, Influenza A virus
KVIPRGKLSTR

SEQ ID NO: 1555 - protein, 9 aa, Influenza A virus
KVIPRGQLA

SEQ ID NO: 1556 - protein, 11 aa, Influenza A virus
KVIPRGQLATR

SEQ ID NO: 1557 - protein, 9 aa, Influenza A virus
KVIPRGQLS

SEQ ID NO: 1558 - protein, 11 aa, Influenza A virus
KVIPRGQLSTR

SEQ ID NO: 1559 - protein, 9 aa, Influenza A virus
KVLPRGKLS

SEQ ID NO: 1560 - protein, 11 aa, Influenza A virus
KVLPRGKLSTR

SEQ ID NO: 1561 - protein, 9 aa, Influenza A virus
KVSPRGKLS

SEQ ID NO: 1562 - protein, 11 aa, Influenza A virus
KVSPRGKLSTR

SEQ ID NO: 1563 - protein, 9 aa, Influenza A virus
KVVPRGKLS

SEQ ID NO: 1564 - protein, 11 aa, Influenza A virus
KVVPRGKLSTR

SEQ ID NO: 1565 - protein, 9 aa, Influenza A virus
KVVPRGQLA

SEQ ID NO: 1566 - protein, 11 aa, Influenza A virus
KVVPRGQLATR

SEQ ID NO: 1567 - protein, 9 aa, Influenza A virus
KVVPRGQLS

SEQ ID NO: 1568 - protein, 11 aa, Influenza A virus
KVVPRGQLSTR

SEQ ID NO: 1569 - protein, 9 aa, Influenza A virus
KVVPRGRLS

SEQ ID NO: 1570 - protein, 11 aa, Influenza A virus
KVVPRGRLSTR

SEQ ID NO: 1571 - protein, 11 aa, Influenza A virus
KWIRELILCDK

SEQ ID NO: 1572 - protein, 9 aa, Influenza A virus
KWIRELILY

SEQ ID NO: 1573 - protein, 11 aa, Influenza A virus
KWIRELILYDK

SEQ ID NO: 1574 - protein, 9 aa, Influenza A virus
KWIRELVLY

SEQ ID NO: 1575 - protein, 11 aa, Influenza A virus
KWIRELVLYDK

SEQ ID NO: 1576 - protein, 8 aa, Influenza A virus
KWMRELIL

SEQ ID NO: 1577 - protein, 9 aa, Influenza A virus
KWMRELILH

SEQ ID NO: 1578 - protein, 11 aa, Influenza A virus
KWMRELILHDK

SEQ ID NO: 1579 - protein, 9 aa, Influenza A virus
KWMRELILY

SEQ ID NO: 1580 - protein, 11 aa, Influenza A virus
KWMRELILYDK

SEQ ID NO: 1581 - protein, 8 aa, Influenza A virus
KWMRELTL

SEQ ID NO: 1582 - protein, 9 aa, Influenza A virus
KWMRELTLY

SEQ ID NO: 1583 - protein, 11 aa, Influenza A virus
KWMRELTLYDK

SEQ ID NO: 1584 - protein, 8 aa, Influenza A virus
KWMRELVL

SEQ ID NO: 1585 - protein, 9 aa, Influenza A virus
KWMRELVLY

SEQ ID NO: 1586 - protein, 11 aa, Influenza A virus
KWMRELVLYDK

SEQ ID NO: 1587 - protein, 9 aa, Influenza A virus
KWMRKLVLY

SEQ ID NO: 1588 - protein, 11 aa, Influenza A virus
KWMRKLVLYDK

SEQ ID NO: 1589 - protein, 9 aa, Influenza A virus
KWTRELILY

SEQ ID NO: 1590 - protein, 9 aa, Influenza A virus
KWVRELILY

SEQ ID NO: 1591 - protein, 9 aa, Influenza A virus
KWVRELTLY

SEQ ID NO: 1592 - protein, 9 aa, Influenza A virus
KWVRELVLY

SEQ ID NO: 1593 - protein, 11 aa, Influenza A virus
KYLEEHPNAGK

SEQ ID NO: 1594 - protein, 11 aa, Influenza A virus
KYLEEHPNTGK

SEQ ID NO: 1595 - protein, 9 aa, Influenza A virus
KYLEEHPSA

SEQ ID NO: 1596 - protein, 11 aa, Influenza A virus
KYLEEHPSAGK

SEQ ID NO: 1597 - protein, 11 aa, Influenza A virus
KYLEEHPSTGR

SEQ ID NO: 1598 - protein, 9 aa, Influenza A virus
KYLEEHPSV

SEQ ID NO: 1599 - protein, 11 aa, Influenza A virus
KYLEEHPSVGK

SEQ ID NO: 1600 - protein, 8 aa, Influenza A virus
KYWAIRTR

SEQ ID NO: 1601 - protein, 9 aa, Influenza A virus
KYWAIRTRS

SEQ ID NO: 1602 - protein, 10 aa, Influenza A virus
KYWAIRTRSG

SEQ ID NO: 1603 - protein, 8 aa, Influenza A virus
LARSALIL

SEQ ID NO: 1604 - protein, 9 aa, Influenza A virus
LARSALILR

SEQ ID NO: 1605 - protein, 8 aa, Influenza A virus
LARSALVL

SEQ ID NO: 1606 - protein, 9 aa, Influenza A virus
LARSALVLR

SEQ ID NO: 1607 - protein, 9 aa, Influenza A virus
LAVAGGYDF

SEQ ID NO: 1608 - protein, 11 aa, Influenza A virus
LAVAGGYDFER

SEQ ID NO: 1609 - protein, 9 aa, Influenza A virus
LAVASGHDF

SEQ ID NO: 1610 - protein, 11 aa, Influenza A virus
LAVASGHDFER

SEQ ID NO: 1611 - protein, 9 aa, Influenza A virus
LAVASGYDF

SEQ ID NO: 1612 - protein, 11 aa, Influenza A virus
LAVASGYDFEK

SEQ ID NO: 1613 - protein, 11 aa, Influenza A virus
LAVASGYDFER

SEQ ID NO: 1614 - protein, 9 aa, Influenza A virus
LAVASGYEF

SEQ ID NO: 1615 - protein, 11 aa, Influenza A virus
LAVASGYEFER

SEQ ID NO: 1616 - protein, 9 aa, Influenza A virus
LAWMACHSA

SEQ ID NO: 1617 - protein, 10 aa, Influenza A virus
LAWMACHSAA

SEQ ID NO: 1618 - protein, 11 aa, Influenza A virus
LAWMACHSAAF

SEQ ID NO: 1619 - protein, 10 aa, Influenza A virus
LDMSNEGSYF

SEQ ID NO: 1620 - protein, 11 aa, Influenza A virus
LDMSNEGSYFF

SEQ ID NO: 1621 - protein, 9 aa, Influenza A virus
LELRSKYWA

SEQ ID NO: 1622 - protein, 10 aa, Influenza A virus
LELRSKYWAI

SEQ ID NO: 1623 - protein, 9 aa, Influenza A virus
LELRSRYRA

SEQ ID NO: 1624 - protein, 10 aa, Influenza A virus
LELRSRYRAI

SEQ ID NO: 1625 - protein, 9 aa, Influenza A virus
LELRSRYWA

SEQ ID NO: 1626 - protein, 9 aa, Influenza A virus
LFSFIRGTK

SEQ ID NO: 1627 - protein, 9 aa, Influenza A virus
LIFLARSAL

SEQ ID NO: 1628 - protein, 10 aa, Influenza A virus
LIFLARSALI

SEQ ID NO: 1629 - protein, 10 aa, Influenza A virus
LIFLARSALV

SEQ ID NO: 1630 - protein, 9 aa, Influenza A virus
LIFLTRSAL

SEQ ID NO: 1631 - protein, 10 aa, Influenza A virus
LIFLTRSALI

SEQ ID NO: 1632 - protein, 9 aa, Influenza A virus
LIFSARSAL

SEQ ID NO: 1633 - protein, 10 aa, Influenza A virus
LIFSARSALI

SEQ ID NO: 1634 - protein, 11 aa, Influenza A virus
LIFSARSALIL

SEQ ID NO: 1635 - protein, 10 aa, Influenza A virus
LILRGAVAHK

SEQ ID NO: 1636 - protein, 10 aa, Influenza A virus
LILRGSVAHK

SEQ ID NO: 1637 - protein, 10 aa, Influenza A virus
LILYDKDEIR

SEQ ID NO: 1638 - protein, 10 aa, Influenza A virus
LILYDKEEIM

SEQ ID NO: 1639 - protein, 10 aa, Influenza A virus
LILYDKEEIR

SEQ ID NO: 1640 - protein, 10 aa, Influenza A virus
LILYDKEEMR

SEQ ID NO: 1641 - protein, 9 aa, Influenza A virus
LILYDKEEV

SEQ ID NO: 1642 - protein, 10 aa, Influenza A virus
LILYDKEEVR

SEQ ID NO: 1643 - protein, 10 aa, Influenza A virus
LIQNSITIEK

SEQ ID NO: 1644 - protein, 10 aa, Influenza A virus
LIQNSITIER

SEQ ID NO: 1645 - protein, 10 aa, Influenza A virus
LIQNSITMER

SEQ ID NO: 1646 - protein, 10 aa, Influenza A virus
LIQNSLTIER

SEQ ID NO: 1647 - protein, 10 aa, Influenza A virus
LIQNSLTVER

SEQ ID NO: 1648 - protein, 10 aa, Influenza A virus
LIQNSMTIER

SEQ ID NO: 1649 - protein, 9 aa, Influenza A virus
LIRMIKRGV

SEQ ID NO: 1650 - protein, 9 aa, Influenza A virus
LIRPKENPA

SEQ ID NO: 1651 - protein, 9 aa, Influenza A virus
LIRPNENPA

SEQ ID NO: 1652 - protein, 9 aa, Influenza A virus
LIRPNENPV

SEQ ID NO: 1653 - protein, 9 aa, Influenza A virus
LIVASGYDF

SEQ ID NO: 1654 - protein, 11 aa, Influenza A virus
LIVASGYDFER

SEQ ID NO: 1655 - protein, 10 aa, Influenza A virus
LKLNDYEGRL

SEQ ID NO: 1656 - protein, 10 aa, Influenza A virus
LKLSDHEGRL

SEQ ID NO: 1657 - protein, 10 aa, Influenza A virus
LKLSDNEGRL

SEQ ID NO: 1658 - protein, 10 aa, Influenza A virus
LKLSDYEGRL

SEQ ID NO: 1659 - protein, 8 aa, Influenza A virus
LLQNSHVY

SEQ ID NO: 1660 - protein, 10 aa, Influenza A virus
LLQNSHVYSL

SEQ ID NO: 1661 - protein, 11 aa, Influenza A virus
LLQNSHVYSLI

SEQ ID NO: 1662 - protein, 10 aa, Influenza A virus
LLQNSQIFSL

SEQ ID NO: 1663 - protein, 11 aa, Influenza A virus
LLQNSQIFSLI

SEQ ID NO: 1664 - protein, 8 aa, Influenza A virus
LLQNSQVF

SEQ ID NO: 1665 - protein, 10 aa, Influenza A virus
LLQNSQVFSI

SEQ ID NO: 1666 - protein, 11 aa, Influenza A virus
LLQNSQVFSII

SEQ ID NO: 1667 - protein, 10 aa, Influenza A virus
LLQNSQVFSL

SEQ ID NO: 1668 - protein, 11 aa, Influenza A virus
LLQNSQVFSLI

SEQ ID NO: 1669 - protein, 11 aa, Influenza A virus
LLQNSQVFSLV

SEQ ID NO: 1670 - protein, 10 aa, Influenza A virus
LLQNSQVLSL

SEQ ID NO: 1671 - protein, 11 aa, Influenza A virus
LLQNSQVLSLI

SEQ ID NO: 1672 - protein, 8 aa, Influenza A virus
LLQNSQVY

SEQ ID NO: 1673 - protein, 10 aa, Influenza A virus
LLQNSQVYSL

SEQ ID NO: 1674 - protein, 11 aa, Influenza A virus
LLQNSQVYSLI

SEQ ID NO: 1675 - protein, 8 aa, Influenza A virus
LLQTSQVY

SEQ ID NO: 1676 - protein, 10 aa, Influenza A virus
LLQTSQVYSL

SEQ ID NO: 1677 - protein, 11 aa, Influenza A virus
LLQTSQVYSLI

SEQ ID NO: 1678 - protein, 9 aa, Influenza A virus
LLSFIRGTK

SEQ ID NO: 1679 - protein, 10 aa, Influenza A virus
LLSFIRGTKV

SEQ ID NO: 1680 - protein, 11 aa, Influenza A virus
LLSFIRGTKVF

SEQ ID NO: 1681 - protein, 10 aa, Influenza A virus
LMEGAKPEEV

SEQ ID NO: 1682 - protein, 11 aa, Influenza A virus
LMIWHSNLNDA

SEQ ID NO: 1683 - protein, 10 aa, Influenza A virus
LMQGSTLPRR

SEQ ID NO: 1684 - protein, 8 aa, Influenza A virus
LPACVHGL

SEQ ID NO: 1685 - protein, 9 aa, Influenza A virus
LPACVHGLA

SEQ ID NO: 1686 - protein, 10 aa, Influenza A virus
LPACVHGLAV

SEQ ID NO: 1687 - protein, 11 aa, Influenza A virus
LPACVHGLAVA

SEQ ID NO: 1688 - protein, 8 aa, Influenza A virus
LPACVNGL

SEQ ID NO: 1689 - protein, 9 aa, Influenza A virus
LPACVNGLA

SEQ ID NO: 1690 - protein, 10 aa, Influenza A virus
LPACVNGLAV

SEQ ID NO: 1691 - protein, 11 aa, Influenza A virus
LPACVNGLAVA

SEQ ID NO: 1692 - protein, 8 aa, Influenza A virus
LPACVYGL

SEQ ID NO: 1693 - protein, 9 aa, Influenza A virus
LPACVYGLA

SEQ ID NO: 1694 - protein, 10 aa, Influenza A virus
LPACVYGLAV

SEQ ID NO: 1695 - protein, 11 aa, Influenza A virus
LPACVYGLAVA

SEQ ID NO: 1696 - protein, 9 aa, Influenza A virus
LPACVYGLI

SEQ ID NO: 1697 - protein, 10 aa, Influenza A virus
LPACVYGLIV

SEQ ID NO: 1698 - protein, 11 aa, Influenza A virus
LPACVYGLIVA

SEQ ID NO: 1699 - protein, 9 aa, Influenza A virus
LPACVYGLS

SEQ ID NO: 1700 - protein, 10 aa, Influenza A virus
LPACVYGLSV

SEQ ID NO: 1701 - protein, 11 aa, Influenza A virus
LPACVYGLSVA

SEQ ID NO: 1702 - protein, 9 aa, Influenza A virus
LPACVYGLT

SEQ ID NO: 1703 - protein, 10 aa, Influenza A virus
LPACVYGLTV

SEQ ID NO: 1704 - protein, 11 aa, Influenza A virus
LPACVYGLTVA

SEQ ID NO: 1705 - protein, 9 aa, Influenza A virus
LPACVYGLV

SEQ ID NO: 1706 - protein, 10 aa, Influenza A virus
LPACVYGLVV

SEQ ID NO: 1707 - protein, 11 aa, Influenza A virus
LPACVYGLVVA

SEQ ID NO: 1708 - protein, 9 aa, Influenza A virus
LPACVYGPA

SEQ ID NO: 1709 - protein, 10 aa, Influenza A virus
LPACVYGPAV

SEQ ID NO: 1710 - protein, 11 aa, Influenza A virus
LPACVYGPAVA

SEQ ID NO: 1711 - protein, 8 aa, Influenza A virus
LPFDKATI

SEQ ID NO: 1712 - protein, 9 aa, Influenza A virus
LPFDKATIM

SEQ ID NO: 1713 - protein, 10 aa, Influenza A virus
LPFDKATIMA

SEQ ID NO: 1714 - protein, 11 aa, Influenza A virus
LPFDKATIMAA

SEQ ID NO: 1715 - protein, 8 aa, Influenza A virus
LPFDKPTI

SEQ ID NO: 1716 - protein, 9 aa, Influenza A virus
LPFDKPTIM

SEQ ID NO: 1717 - protein, 10 aa, Influenza A virus
LPFDKPTIMA

SEQ ID NO: 1718 - protein, 11 aa, Influenza A virus
LPFDKPTIMAA

SEQ ID NO: 1719 - protein, 8 aa, Influenza A virus
LPFDKSTI

SEQ ID NO: 1720 - protein, 9 aa, Influenza A virus
LPFDKSTIM

SEQ ID NO: 1721 - protein, 10 aa, Influenza A virus
LPFDKSTIMA

SEQ ID NO: 1722 - protein, 11 aa, Influenza A virus
LPFDKSTIMAA

SEQ ID NO: 1723 - protein, 8 aa, Influenza A virus
LPFDKSTV

SEQ ID NO: 1724 - protein, 9 aa, Influenza A virus
LPFDKSTVM

SEQ ID NO: 1725 - protein, 10 aa, Influenza A virus
LPFDKSTVMA

SEQ ID NO: 1726 - protein, 11 aa, Influenza A virus
LPFDKSTVMAA

SEQ ID NO: 1727 - protein, 8 aa, Influenza A virus
LPFDKTTI

SEQ ID NO: 1728 - protein, 9 aa, Influenza A virus
LPFDKTTIM

SEQ ID NO: 1729 - protein, 10 aa, Influenza A virus
LPFDKTTIMA

SEQ ID NO: 1730 - protein, 11 aa, Influenza A virus
LPFDKTTIMAA

SEQ ID NO: 1731 - protein, 8 aa, Influenza A virus
LPFDRPTI

SEQ ID NO: 1732 - protein, 9 aa, Influenza A virus
LPFDRPTIM

SEQ ID NO: 1733 - protein, 10 aa, Influenza A virus
LPFDRPTIMA

SEQ ID NO: 1734 - protein, 11 aa, Influenza A virus
LPFDRPTIMAA

SEQ ID NO: 1735 - protein, 8 aa, Influenza A virus
LPFDRSTI

SEQ ID NO: 1736 - protein, 9 aa, Influenza A virus
LPFDRSTIM

SEQ ID NO: 1737 - protein, 10 aa, Influenza A virus
LPFDRSTIMA

SEQ ID NO: 1738 - protein, 11 aa, Influenza A virus
LPFDRSTIMAA

SEQ ID NO: 1739 - protein, 8 aa, Influenza A virus
LPFDRTTI

SEQ ID NO: 1740 - protein, 9 aa, Influenza A virus
LPFDRTTIM

SEQ ID NO: 1741 - protein, 10 aa, Influenza A virus
LPFDRTTIMA

SEQ ID NO: 1742 - protein, 11 aa, Influenza A virus
LPFDRTTIMAA

SEQ ID NO: 1743 - protein, 8 aa, Influenza A virus
LPFDRTTV

SEQ ID NO: 1744 - protein, 9 aa, Influenza A virus
LPFDRTTVM

SEQ ID NO: 1745 - protein, 10 aa, Influenza A virus
LPFDRTTVMA

SEQ ID NO: 1746 - protein, 11 aa, Influenza A virus
LPFDRTTVMAA

SEQ ID NO: 1747 - protein, 8 aa, Influenza A virus
LPFEKATI

SEQ ID NO: 1748 - protein, 9 aa, Influenza A virus
LPFEKATIM

SEQ ID NO: 1749 - protein, 10 aa, Influenza A virus
LPFEKATIMA

SEQ ID NO: 1750 - protein, 11 aa, Influenza A virus
LPFEKATIMAA

SEQ ID NO: 1751 - protein, 8 aa, Influenza A virus
LPFEKSTV

SEQ ID NO: 1752 - protein, 9 aa, Influenza A virus
LPFEKSTVM

SEQ ID NO: 1753 - protein, 10 aa, Influenza A virus
LPFEKSTVMA

SEQ ID NO: 1754 - protein, 11 aa, Influenza A virus
LPFEKSTVMAA

SEQ ID NO: 1755 - protein, 8 aa, Influenza A virus
LPFERATI

SEQ ID NO: 1756 - protein, 9 aa, Influenza A virus
LPFERATIM

SEQ ID NO: 1757 - protein, 10 aa, Influenza A virus
LPFERATIMA

SEQ ID NO: 1758 - protein, 11 aa, Influenza A virus
LPFERATIMAA

SEQ ID NO: 1759 - protein, 8 aa, Influenza A virus
LPFERATV

SEQ ID NO: 1760 - protein, 9 aa, Influenza A virus
LPFERATVM

SEQ ID NO: 1761 - protein, 10 aa, Influenza A virus
LPFERATVMA

SEQ ID NO: 1762 - protein, 11 aa, Influenza A virus
LPFERATVMAA

SEQ ID NO: 1763 - protein, 8 aa, Influenza A virus
LPFERSTI

SEQ ID NO: 1764 - protein, 9 aa, Influenza A virus
LPFERSTIM

SEQ ID NO: 1765 - protein, 10 aa, Influenza A virus
LPFERSTIMA

SEQ ID NO: 1766 - protein, 11 aa, Influenza A virus
LPFERSTIMAA

SEQ ID NO: 1767 - protein, 8 aa, Influenza A virus
LPFERTTI

SEQ ID NO: 1768 - protein, 9 aa, Influenza A virus
LPFERTTIM

SEQ ID NO: 1769 - protein, 10 aa, Influenza A virus
LPFERTTIMA

SEQ ID NO: 1770 - protein, 11 aa, Influenza A virus
LPFERTTIMAA

SEQ ID NO: 1771 - protein, 8 aa, Influenza A virus
LPFERVTI

SEQ ID NO: 1772 - protein, 9 aa, Influenza A virus
LPFERVTIM

SEQ ID NO: 1773 - protein, 10 aa, Influenza A virus
LPFERVTIMA

SEQ ID NO: 1774 - protein, 11 aa, Influenza A virus
LPFERVTIMAA

SEQ ID NO: 1775 - protein, 11 aa, Influenza A virus
LPRGKLSTRGV

SEQ ID NO: 1776 - protein, 11 aa, Influenza A virus
LPRGQLSTRGV

SEQ ID NO: 1777 - protein, 8 aa, Influenza A virus
LPRRSGAA

SEQ ID NO: 1778 - protein, 11 aa, Influenza A virus
LPRRSGAAGAA

SEQ ID NO: 1779 - protein, 11 aa, Influenza A virus
LPRRSGAAGAT

SEQ ID NO: 1780 - protein, 8 aa, Influenza A virus
LPTCVYGL

SEQ ID NO: 1781 - protein, 9 aa, Influenza A virus
LPTCVYGLA

SEQ ID NO: 1782 - protein, 10 aa, Influenza A virus
LPTCVYGLAV

SEQ ID NO: 1783 - protein, 11 aa, Influenza A virus
LPTCVYGLAVA

SEQ ID NO: 1784 - protein, 8 aa, Influenza A virus
LQGTKRSY

SEQ ID NO: 1785 - protein, 9 aa, Influenza A virus
LQLSDYEGR

SEQ ID NO: 1786 - protein, 10 aa, Influenza A virus
LQLSDYEGRL

SEQ ID NO: 1787 - protein, 9 aa, Influenza A virus
LQNSHVYSL

SEQ ID NO: 1788 - protein, 10 aa, Influenza A virus
LQNSHVYSLI

SEQ ID NO: 1789 - protein, 11 aa, Influenza A virus
LQNSHVYSLIR

SEQ ID NO: 1790 - protein, 9 aa, Influenza A virus
LQNSQIFSL

SEQ ID NO: 1791 - protein, 10 aa, Influenza A virus
LQNSQIFSLI

SEQ ID NO: 1792 - protein, 11 aa, Influenza A virus
LQNSQIFSLIR

SEQ ID NO: 1793 - protein, 9 aa, Influenza A virus
LQNSQVFSI

SEQ ID NO: 1794 - protein, 10 aa, Influenza A virus
LQNSQVFSII

SEQ ID NO: 1795 - protein, 11 aa, Influenza A virus
LQNSQVFSIIR

SEQ ID NO: 1796 - protein, 9 aa, Influenza A virus
LQNSQVFSL

SEQ ID NO: 1797 - protein, 10 aa, Influenza A virus
LQNSQVFSLI

SEQ ID NO: 1798 - protein, 11 aa, Influenza A virus
LQNSQVFSLIR

SEQ ID NO: 1799 - protein, 10 aa, Influenza A virus
LQNSQVFSLV

SEQ ID NO: 1800 - protein, 11 aa, Influenza A virus
LQNSQVFSLVR

SEQ ID NO: 1801 - protein, 9 aa, Influenza A virus
LQNSQVLSL

SEQ ID NO: 1802 - protein, 10 aa, Influenza A virus
LQNSQVLSLI

SEQ ID NO: 1803 - protein, 11 aa, Influenza A virus
LQNSQVLSLIR

SEQ ID NO: 1804 - protein, 9 aa, Influenza A virus
LQNSQVYSL

SEQ ID NO: 1805 - protein, 10 aa, Influenza A virus
LQNSQVYSLI

SEQ ID NO: 1806 - protein, 11 aa, Influenza A virus
LQNSQVYSLIR

SEQ ID NO: 1807 - protein, 9 aa, Influenza A virus
LQTSQVYSL

SEQ ID NO: 1808 - protein, 10 aa, Influenza A virus
LQTSQVYSLI

SEQ ID NO: 1809 - protein, 11 aa, Influenza A virus
LQTSQVYSLIR

SEQ ID NO: 1810 - protein, 10 aa, Influenza A virus
LRISGFIRGK

SEQ ID NO: 1811 - protein, 11 aa, Influenza A virus
LRISGFIRGKR

SEQ ID NO: 1812 - protein, 10 aa, Influenza A virus
LRLFSFIRGT

SEQ ID NO: 1813 - protein, 11 aa, Influenza A virus
LRLFSFIRGTK

SEQ ID NO: 1814 - protein, 11 aa, Influenza A virus
LRLLSFIRGTK

SEQ ID NO: 1815 - protein, 10 aa, Influenza A virus
LRLSSFIRGT

SEQ ID NO: 1816 - protein, 11 aa, Influenza A virus
LRLSSFIRGTK

SEQ ID NO: 1817 - protein, 8 aa, Influenza A virus
LRSKYWAI

SEQ ID NO: 1818 - protein, 9 aa, Influenza A virus
LRSKYWAIR

SEQ ID NO: 1819 - protein, 11 aa, Influenza A virus
LRSKYWAIRTR

SEQ ID NO: 1820 - protein, 8 aa, Influenza A virus
LRSRYRAI

SEQ ID NO: 1821 - protein, 9 aa, Influenza A virus
LRSRYRAIR

SEQ ID NO: 1822 - protein, 11 aa, Influenza A virus
LRSRYRAIRTR

SEQ ID NO: 1823 - protein, 8 aa, Influenza A virus
LRSRYWAI

SEQ ID NO: 1824 - protein, 9 aa, Influenza A virus
LRSRYWAIK

SEQ ID NO: 1825 - protein, 11 aa, Influenza A virus
LRSRYWAIKTR

SEQ ID NO: 1826 - protein, 9 aa, Influenza A virus
LRSRYWAIR

SEQ ID NO: 1827 - protein, 11 aa, Influenza A virus
LRSRYWAIRTK

SEQ ID NO: 1828 - protein, 11 aa, Influenza A virus
LRSRYWAIRTR

SEQ ID NO: 1829 - protein, 11 aa, Influenza A virus
LRVLNFIRGTK

SEQ ID NO: 1830 - protein, 11 aa, Influenza A virus
LRVLSFIKGTK

SEQ ID NO: 1831 - protein, 11 aa, Influenza A virus
LRVLSFIRGTK

SEQ ID NO: 1832 - protein, 11 aa, Influenza A virus
LRVLSFIRGTR

SEQ ID NO: 1833 - protein, 10 aa, Influenza A virus
LRVSGFIRGK

SEQ ID NO: 1834 - protein, 11 aa, Influenza A virus
LRVSGFIRGKK

SEQ ID NO: 1835 - protein, 11 aa, Influenza A virus
LRVSGFIRGKR

SEQ ID NO: 1836 - protein, 11 aa, Influenza A virus
LRVSNFIRGTK

SEQ ID NO: 1837 - protein, 11 aa, Influenza A virus
LRVSNFIRGTR

SEQ ID NO: 1838 - protein, 11 aa, Influenza A virus
LRVSSFIRGAK

SEQ ID NO: 1839 - protein, 11 aa, Influenza A virus
LRVSSFIRGAR

SEQ ID NO: 1840 - protein, 10 aa, Influenza A virus
LRVSSFIRGK

SEQ ID NO: 1841 - protein, 11 aa, Influenza A virus
LRVSSFIRGKK

SEQ ID NO: 1842 - protein, 11 aa, Influenza A virus
LRVSSFIRGKR

SEQ ID NO: 1843 - protein, 11 aa, Influenza A virus
LRVSSFIRGTK

SEQ ID NO: 1844 - protein, 11 aa, Influenza A virus
LRVSSFIRGTR

SEQ ID NO: 1845 - protein, 10 aa, Influenza A virus
LSAFDERRNR

SEQ ID NO: 1846 - protein, 10 aa, Influenza A virus
LSDEKAASPI

SEQ ID NO: 1847 - protein, 10 aa, Influenza A virus
LSDEKATNPI

SEQ ID NO: 1848 - protein, 10 aa, Influenza A virus
LSDEKATSPI

SEQ ID NO: 1849 - protein, 10 aa, Influenza A virus
LSDENATNPI

SEQ ID NO: 1850 - protein, 10 aa, Influenza A virus
LSDERATNPI

SEQ ID NO: 1851 - protein, 8 aa, Influenza A virus
LSDHEGRL

SEQ ID NO: 1852 - protein, 9 aa, Influenza A virus
LSDHEGRLI

SEQ ID NO: 1853 - protein, 8 aa, Influenza A virus
LSDNEGRL

SEQ ID NO: 1854 - protein, 9 aa, Influenza A virus
LSDNEGRLI

SEQ ID NO: 1855 - protein, 9 aa, Influenza A virus
LSDQEGRLI

SEQ ID NO: 1856 - protein, 8 aa, Influenza A virus
LSDYEGRL

SEQ ID NO: 1857 - protein, 9 aa, Influenza A virus
LSDYEGRLI

SEQ ID NO: 1858 - protein, 9 aa, Influenza A virus
LSFIKGTKV

SEQ ID NO: 1859 - protein, 10 aa, Influenza A virus
LSFIKGTKVL

SEQ ID NO: 1860 - protein, 9 aa, Influenza A virus
LSFIRGTKV

SEQ ID NO: 1861 - protein, 10 aa, Influenza A virus
LSFIRGTKVF

SEQ ID NO: 1862 - protein, 9 aa, Influenza A virus
LSFIRGTRV

SEQ ID NO: 1863 - protein, 10 aa, Influenza A virus
LSFIRGTRVV

SEQ ID NO: 1864 - protein, 9 aa, Influenza A virus
LSFQGRGVF

SEQ ID NO: 1865 - protein, 11 aa, Influenza A virus
LSFQGRGVFEL

SEQ ID NO: 1866 - protein, 9 aa, Influenza A virus
LSSFIRGTK

SEQ ID NO: 1867 - protein, 10 aa, Influenza A virus
LSSFIRGTKV

SEQ ID NO: 1868 - protein, 9 aa, Influenza A virus
LSVASGYDF

SEQ ID NO: 1869 - protein, 11 aa, Influenza A virus
LSVASGYDFER

SEQ ID NO: 1870 - protein, 9 aa, Influenza A virus
LTFLARSAL

SEQ ID NO: 1871 - protein, 10 aa, Influenza A virus
LTFLARSALI

SEQ ID NO: 1872 - protein, 11 aa, Influenza A virus
LTFLARSALIL

SEQ ID NO: 1873 - protein, 8 aa, Influenza A virus
LTIERMVL

SEQ ID NO: 1874 - protein, 10 aa, Influenza A virus
LTIERMVLSA

SEQ ID NO: 1875 - protein, 11 aa, Influenza A virus
LTIERMVLSAF

SEQ ID NO: 1876 - protein, 10 aa, Influenza A virus
LTLYDKEEIR

SEQ ID NO: 1877 - protein, 8 aa, Influenza A virus
LTRIAYER

SEQ ID NO: 1878 - protein, 9 aa, Influenza A virus
LTRIAYERM

SEQ ID NO: 1879 - protein, 8 aa, Influenza A virus
LTRSALIL

SEQ ID NO: 1880 - protein, 9 aa, Influenza A virus
LTRSALILR

SEQ ID NO: 1881 - protein, 10 aa, Influenza A virus
LTRSALILRG

SEQ ID NO: 1882 - protein, 9 aa, Influenza A virus
LTVASGYDF

SEQ ID NO: 1883 - protein, 11 aa, Influenza A virus
LTVASGYDFER

SEQ ID NO: 1884 - protein, 8 aa, Influenza A virus
LTVERMVL

SEQ ID NO: 1885 - protein, 10 aa, Influenza A virus
LTVERMVLSA

SEQ ID NO: 1886 - protein, 11 aa, Influenza A virus
LTVERMVLSAF

SEQ ID NO: 1887 - protein, 9 aa, Influenza A virus
LVLRGSVAH

SEQ ID NO: 1888 - protein, 10 aa, Influenza A virus
LVLRGSVAHK

SEQ ID NO: 1889 - protein, 10 aa, Influenza A virus
LVLYDKEEIR

SEQ ID NO: 1890 - protein, 10 aa, Influenza A virus
LVLYDKEELR

SEQ ID NO: 1891 - protein, 10 aa, Influenza A virus
LVLYDKEEMR

SEQ ID NO: 1892 - protein, 10 aa, Influenza A virus
LVLYDKGEIR

SEQ ID NO: 1893 - protein, 10 aa, Influenza A virus
LVPRGQLSTR

SEQ ID NO: 1894 - protein, 9 aa, Influenza A virus
LVRAGMDPR

SEQ ID NO: 1895 - protein, 9 aa, Influenza A virus
LVRMIKRGI

SEQ ID NO: 1896 - protein, 9 aa, Influenza A virus
LVRPNENPA

SEQ ID NO: 1897 - protein, 9 aa, Influenza A virus
LVRTGMDPR

SEQ ID NO: 1898 - protein, 9 aa, Influenza A virus
LVVASGYDF

SEQ ID NO: 1899 - protein, 11 aa, Influenza A virus
LVVASGYDFER

SEQ ID NO: 1900 - protein, 9 aa, Influenza A virus
LVWMACHSA

SEQ ID NO: 1901 - protein, 11 aa, Influenza A virus
LVWMACHSAAF

SEQ ID NO: 1902 - protein, 10 aa, Influenza A virus
LVWMACHSPA

SEQ ID NO: 1903 - protein, 11 aa, Influenza A virus
LVWMACHSPAF

SEQ ID NO: 1904 - protein, 9 aa, Influenza A virus
LVWMACNSA

SEQ ID NO: 1905 - protein, 11 aa, Influenza A virus
LVWMACNSAAF

SEQ ID NO: 1906 - protein, 10 aa, Influenza A virus
LYDKEEIMRI

SEQ ID NO: 1907 - protein, 11 aa, Influenza A virus
LYDKEEIRRTW

SEQ ID NO: 1908 - protein, 11 aa, Influenza A virus
MAAFIGDNEGR

SEQ ID NO: 1909 - protein, 11 aa, Influenza A virus
MAAFIGNNEGR

SEQ ID NO: 1910 - protein, 11 aa, Influenza A virus
MAAFIGNTEGR

SEQ ID NO: 1911 - protein, 11 aa, Influenza A virus
MAAFKGNTEGR

SEQ ID NO: 1912 - protein, 11 aa, Influenza A virus
MAAFNGNTEGR

SEQ ID NO: 1913 - protein, 11 aa, Influenza A virus
MAAFSGNNEGR

SEQ ID NO: 1914 - protein, 11 aa, Influenza A virus
MAAFSGNTEGR

SEQ ID NO: 1915 - protein, 11 aa, Influenza A virus
MAAFTGNAEGR

SEQ ID NO: 1916 - protein, 11 aa, Influenza A virus
MAAFTGNNEGR

SEQ ID NO: 1917 - protein, 11 aa, Influenza A virus
MAAFTGNPEGR

SEQ ID NO: 1918 - protein, 11 aa, Influenza A virus
MAAFTGNTEGR

SEQ ID NO: 1919 - protein, 10 aa, Influenza A virus
MAAFTGNTER

SEQ ID NO: 1920 - protein, 11 aa, Influenza A virus
MAAFTGNTERR

SEQ ID NO: 1921 - protein, 11 aa, Influenza A virus
MAAFVGNNEGR

SEQ ID NO: 1922 - protein, 11 aa, Influenza A virus
MAAFVGNTEGR

SEQ ID NO: 1923 - protein, 8 aa, Influenza A virus
MACHSAAF

SEQ ID NO: 1924 - protein, 8 aa, Influenza A virus
MACHSPAF

SEQ ID NO: 1925 - protein, 8 aa, Influenza A virus
MACNSAAF

SEQ ID NO: 1926 - protein, 10 aa, Influenza A virus
MALQGTKRSY

SEQ ID NO: 1927 - protein, 10 aa, Influenza A virus
MASQGTKRPY

SEQ ID NO: 1928 - protein, 10 aa, Influenza A virus
MASQGTKRSY

SEQ ID NO: 1929 - protein, 10 aa, Influenza A virus
MASQGTTRSY

SEQ ID NO: 1930 - protein, 10 aa, Influenza A virus
MATKGTKRSY

SEQ ID NO: 1931 - protein, 10 aa, Influenza A virus
MATQGTKRSY

SEQ ID NO: 1932 - protein, 10 aa, Influenza A virus
MCTEFKLSDY

SEQ ID NO: 1933 - protein, 10 aa, Influenza A virus
MCTEIKLSDY

SEQ ID NO: 1934 - protein, 10 aa, Influenza A virus
MCTELKLNDY

SEQ ID NO: 1935 - protein, 10 aa, Influenza A virus
MCTELKLSDY

SEQ ID NO: 1936 - protein, 10 aa, Influenza A virus
MCTELQLSDY

SEQ ID NO: 1937 - protein, 11 aa, Influenza A virus
MDAIDSSTLEL

SEQ ID NO: 1938 - protein, 9 aa, Influenza A virus
MDAIVSSTL

SEQ ID NO: 1939 - protein, 9 aa, Influenza A virus
MDAMESSTL

SEQ ID NO: 1940 - protein, 9 aa, Influenza A virus
MDNMESSTL

SEQ ID NO: 1941 - protein, 9 aa, Influenza A virus
MDSCTLELR

SEQ ID NO: 1942 - protein, 9 aa, Influenza A virus
MDSIVSSTL

SEQ ID NO: 1943 - protein, 9 aa, Influenza A virus
MDSNTLELR

SEQ ID NO: 1944 - protein, 9 aa, Influenza A virus
MDSRTLELR

SEQ ID NO: 1945 - protein, 9 aa, Influenza A virus
MDSSTLELR

SEQ ID NO: 1946 - protein, 9 aa, Influenza A virus
MDSTTLELR

SEQ ID NO: 1947 - protein, 11 aa, Influenza A virus
MDTMDSNTLEL

SEQ ID NO: 1948 - protein, 9 aa, Influenza A virus
MDTMGSSTL

SEQ ID NO: 1949 - protein, 11 aa, Influenza A virus
MDTMGSSTLEL

SEQ ID NO: 1950 - protein, 9 aa, Influenza A virus
MDTMVSSTL

SEQ ID NO: 1951 - protein, 11 aa, Influenza A virus
MDTMVSSTLEL

SEQ ID NO: 1952 - protein, 9 aa, Influenza A virus
MEAIDSNTL

SEQ ID NO: 1953 - protein, 11 aa, Influenza A virus
MEAIDSNTLEL

SEQ ID NO: 1954 - protein, 9 aa, Influenza A virus
MEAMDSNTL

SEQ ID NO: 1955 - protein, 11 aa, Influenza A virus
MEAMDSNTLEL

SEQ ID NO: 1956 - protein, 9 aa, Influenza A virus
MEAMDSSTL

SEQ ID NO: 1957 - protein, 11 aa, Influenza A virus
MEAMDSSTLEL

SEQ ID NO: 1958 - protein, 9 aa, Influenza A virus
MEAMESSTL

SEQ ID NO: 1959 - protein, 11 aa, Influenza A virus
MEAMESSTLEL

SEQ ID NO: 1960 - protein, 9 aa, Influenza A virus
MEDAKPEEV

SEQ ID NO: 1961 - protein, 9 aa, Influenza A virus
MEGAKPEEM

SEQ ID NO: 1962 - protein, 11 aa, Influenza A virus
MENAKPDDVSF

SEQ ID NO: 1963 - protein, 9 aa, Influenza A virus
MENAKPEEV

SEQ ID NO: 1964 - protein, 9 aa, Influenza A virus
MENARPEDV

SEQ ID NO: 1965 - protein, 11 aa, Influenza A virus
MENARPEDVSF

SEQ ID NO: 1966 - protein, 9 aa, Influenza A virus
MENARPEEV

SEQ ID NO: 1967 - protein, 11 aa, Influenza A virus
MENARPEEVSF

SEQ ID NO: 1968 - protein, 9 aa, Influenza A virus
MENARSEDV

SEQ ID NO: 1969 - protein, 11 aa, Influenza A virus
MENARSEDVSF

SEQ ID NO: 1970 - protein, 9 aa, Influenza A virus
MENASPEDV

SEQ ID NO: 1971 - protein, 11 aa, Influenza A virus
MENASPEDVSF

SEQ ID NO: 1972 - protein, 9 aa, Influenza A virus
MENSRPEDV

SEQ ID NO: 1973 - protein, 11 aa, Influenza A virus
MENSRPEDVSF

SEQ ID NO: 1974 - protein, 8 aa, Influenza A virus
MERMVLSA

SEQ ID NO: 1975 - protein, 9 aa, Influenza A virus
MERMVLSAF

SEQ ID NO: 1976 - protein, 10 aa, Influenza A virus
MERMVLSAFD

SEQ ID NO: 1977 - protein, 9 aa, Influenza A virus
MESAKPEDL

SEQ ID NO: 1978 - protein, 11 aa, Influenza A virus
MESAKPEDLSF

SEQ ID NO: 1979 - protein, 9 aa, Influenza A virus
MESAKPEEV

SEQ ID NO: 1980 - protein, 9 aa, Influenza A virus
MESARPEDA

SEQ ID NO: 1981 - protein, 11 aa, Influenza A virus
MESARPEDASF

SEQ ID NO: 1982 - protein, 9 aa, Influenza A virus
MESARPEDL

SEQ ID NO: 1983 - protein, 11 aa, Influenza A virus
MESARPEDLSF

SEQ ID NO: 1984 - protein, 11 aa, Influenza A virus
MESARPEDVSF

SEQ ID NO: 1985 - protein, 9 aa, Influenza A virus
MESARPEEV

SEQ ID NO: 1986 - protein, 9 aa, Influenza A virus
MESARSEDV

SEQ ID NO: 1987 - protein, 11 aa, Influenza A virus
MESARSEDVSF

SEQ ID NO: 1988 - protein, 11 aa, Influenza A virus
MESSRPEDVSF

SEQ ID NO: 1989 - protein, 8 aa, Influenza A virus
MESSTLEL

SEQ ID NO: 1990 - protein, 9 aa, Influenza A virus
MESSTLELR

SEQ ID NO: 1991 - protein, 10 aa, Influenza A virus
METDGDRQNA

SEQ ID NO: 1992 - protein, 10 aa, Influenza A virus
METDGERPNA

SEQ ID NO: 1993 - protein, 10 aa, Influenza A virus
METDGERQNA

SEQ ID NO: 1994 - protein, 9 aa, Influenza A virus
METIDSNTL

SEQ ID NO: 1995 - protein, 11 aa, Influenza A virus
METIDSNTLEL

SEQ ID NO: 1996 - protein, 9 aa, Influenza A virus
METIDSSTL

SEQ ID NO: 1997 - protein, 11 aa, Influenza A virus
METIDSSTLEL

SEQ ID NO: 1998 - protein, 9 aa, Influenza A virus
METMDSCTL

SEQ ID NO: 1999 - protein, 11 aa, Influenza A virus
METMDSCTLEL

SEQ ID NO: 2000 - protein, 9 aa, Influenza A virus
METMDSITL

SEQ ID NO: 2001 - protein, 11 aa, Influenza A virus
METMDSITLEL

SEQ ID NO: 2002 - protein, 9 aa, Influenza A virus
METMDSNTL

SEQ ID NO: 2003 - protein, 11 aa, Influenza A virus
METMDSNTLEL

SEQ ID NO: 2004 - protein, 9 aa, Influenza A virus
METMDSRTL

SEQ ID NO: 2005 - protein, 11 aa, Influenza A virus
METMDSRTLEL

SEQ ID NO: 2006 - protein, 9 aa, Influenza A virus
METMDSSTL

SEQ ID NO: 2007 - protein, 11 aa, Influenza A virus
METMDSSTLEL

SEQ ID NO: 2008 - protein, 9 aa, Influenza A virus
METMDSTTL

SEQ ID NO: 2009 - protein, 11 aa, Influenza A virus
METMDSTTLEL

SEQ ID NO: 2010 - protein, 9 aa, Influenza A virus
METMESSTL

SEQ ID NO: 2011 - protein, 11 aa, Influenza A virus
METMESSTLEL

SEQ ID NO: 2012 - protein, 9 aa, Influenza A virus
METMGSSTL

SEQ ID NO: 2013 - protein, 11 aa, Influenza A virus
METMGSSTLEL

SEQ ID NO: 2014 - protein, 9 aa, Influenza A virus
METMNSSTL

SEQ ID NO: 2015 - protein, 11 aa, Influenza A virus
METMNSSTLEL

SEQ ID NO: 2016 - protein, 9 aa, Influenza A virus
METMSSSTL

SEQ ID NO: 2017 - protein, 11 aa, Influenza A virus
METMSSSTLEL

SEQ ID NO: 2018 - protein, 9 aa, Influenza A virus
MGSSTLELR

SEQ ID NO: 2019 - protein, 11 aa, Influenza A virus
MGSSTLELRSR

SEQ ID NO: 2020 - protein, 9 aa, Influenza A virus
MIDGIGRFY

SEQ ID NO: 2021 - protein, 10 aa, Influenza A virus
MIDGIGRFYI

SEQ ID NO: 2022 - protein, 9 aa, Influenza A virus
MIGGIGRFY

SEQ ID NO: 2023 - protein, 10 aa, Influenza A virus
MIGGIGRFYI

SEQ ID NO: 2024 - protein, 9 aa, Influenza A virus
MIKRGINDR

SEQ ID NO: 2025 - protein, 9 aa, Influenza A virus
MIKRGVNDR

SEQ ID NO: 2026 - protein, 9 aa, Influenza A virus
MILSAFDER

SEQ ID NO: 2027 - protein, 10 aa, Influenza A virus
MILSAFDERR

SEQ ID NO: 2028 - protein, 9 aa, Influenza A virus
MIMELIRMI

SEQ ID NO: 2029 - protein, 10 aa, Influenza A virus
MIMELIRMIK

SEQ ID NO: 2030 - protein, 11 aa, Influenza A virus
MIMELIRMIKR

SEQ ID NO: 2031 - protein, 9 aa, Influenza A virus
MINGIGRFY

SEQ ID NO: 2032 - protein, 10 aa, Influenza A virus
MINGIGRFYI

SEQ ID NO: 2033 - protein, 9 aa, Influenza A virus
MISGIGRFY

SEQ ID NO: 2034 - protein, 10 aa, Influenza A virus
MISGIGRFYI

SEQ ID NO: 2035 - protein, 10 aa, Influenza A virus
MIWHSNLNDA

SEQ ID NO: 2036 - protein, 8 aa, Influenza A virus
MLQNSQVF

SEQ ID NO: 2037 - protein, 9 aa, Influenza A virus
MLQNSQVFS

SEQ ID NO: 2038 - protein, 10 aa, Influenza A virus
MLQNSQVFSL

SEQ ID NO: 2039 - protein, 11 aa, Influenza A virus
MLQNSQVFSLI

SEQ ID NO: 2040 - protein, 9 aa, Influenza A virus
MMDQVREGR

SEQ ID NO: 2041 - protein, 9 aa, Influenza A virus
MMDQVRESR

SEQ ID NO: 2042 - protein, 10 aa, Influenza A virus
MMEDAKPEEV

SEQ ID NO: 2043 - protein, 10 aa, Influenza A virus
MMEGAKPEEV

SEQ ID NO: 2044 - protein, 10 aa, Influenza A virus
MMENAKPEDV

SEQ ID NO: 2045 - protein, 10 aa, Influenza A virus
MMENAKPEEV

SEQ ID NO: 2046 - protein, 10 aa, Influenza A virus
MMENARPEDV

SEQ ID NO: 2047 - protein, 10 aa, Influenza A virus
MMENARPEEV

SEQ ID NO: 2048 - protein, 10 aa, Influenza A virus
MMENARSEDV

SEQ ID NO: 2049 - protein, 10 aa, Influenza A virus
MMENASPEDV

SEQ ID NO: 2050 - protein, 10 aa, Influenza A virus
MMENSRPEDV

SEQ ID NO: 2051 - protein, 10 aa, Influenza A virus
MMESAKPEDL

SEQ ID NO: 2052 - protein, 10 aa, Influenza A virus
MMESAKPEDV

SEQ ID NO: 2053 - protein, 10 aa, Influenza A virus
MMESAKPEEV

SEQ ID NO: 2054 - protein, 10 aa, Influenza A virus
MMESARPEDL

SEQ ID NO: 2055 - protein, 10 aa, Influenza A virus
MMESARPEDV

SEQ ID NO: 2056 - protein, 10 aa, Influenza A virus
MMESARPEEV

SEQ ID NO: 2057 - protein, 10 aa, Influenza A virus
MMESARSEDV

SEQ ID NO: 2058 - protein, 10 aa, Influenza A virus
MMESSRPEDV

SEQ ID NO: 2059 - protein, 8 aa, Influenza A virus
MMIWHSNL

SEQ ID NO: 2060 - protein, 11 aa, Influenza A virus
MMIWHSNLNDA

SEQ ID NO: 2061 - protein, 9 aa, Influenza A virus
MNMELIRMI

SEQ ID NO: 2062 - protein, 10 aa, Influenza A virus
MNMELIRMIK

SEQ ID NO: 2063 - protein, 11 aa, Influenza A virus
MNMELIRMIKR

SEQ ID NO: 2064 - protein, 9 aa, Influenza A virus
MNNEGSYFF

SEQ ID NO: 2065 - protein, 9 aa, Influenza A virus
MNSSTLELR

SEQ ID NO: 2066 - protein, 8 aa, Influenza A virus
MQGSTLPR

SEQ ID NO: 2067 - protein, 9 aa, Influenza A virus
MQGSTLPRR

SEQ ID NO: 2068 - protein, 8 aa, Influenza A virus
MRAEIIKM

SEQ ID NO: 2069 - protein, 9 aa, Influenza A virus
MRAEIIKMM

SEQ ID NO: 2070 - protein, 8 aa, Influenza A virus
MRAEIIRL

SEQ ID NO: 2071 - protein, 9 aa, Influenza A virus
MRAEIIRLM

SEQ ID NO: 2072 - protein, 10 aa, Influenza A virus
MRAEIIRLME

SEQ ID NO: 2073 - protein, 8 aa, Influenza A virus
MRAEIIRM

SEQ ID NO: 2074 - protein, 9 aa, Influenza A virus
MRAEIIRMM

SEQ ID NO: 2075 - protein, 9 aa, Influenza A virus
MRAEIIRVM

SEQ ID NO: 2076 - protein, 9 aa, Influenza A virus
MRELILHDK

SEQ ID NO: 2077 - protein, 9 aa, Influenza A virus
MRELILYDK

SEQ ID NO: 2078 - protein, 9 aa, Influenza A virus
MRELTLYDK

SEQ ID NO: 2079 - protein, 9 aa, Influenza A virus
MRELVLYDK

SEQ ID NO: 2080 - protein, 8 aa, Influenza A virus
MRIEIIRM

SEQ ID NO: 2081 - protein, 9 aa, Influenza A virus
MRIEIIRMM

SEQ ID NO: 2082 - protein, 10 aa, Influenza A virus
MRIEIIRMME

SEQ ID NO: 2083 - protein, 9 aa, Influenza A virus
MRKLVLYDK

SEQ ID NO: 2084 - protein, 9 aa, Influenza A virus
MRTEIIKMM

SEQ ID NO: 2085 - protein, 9 aa, Influenza A virus
MRTEIIRIM

SEQ ID NO: 2086 - protein, 8 aa, Influenza A virus
MRTEIIRL

SEQ ID NO: 2087 - protein, 9 aa, Influenza A virus
MRTEIIRLM

SEQ ID NO: 2088 - protein, 10 aa, Influenza A virus
MRTEIIRLME

SEQ ID NO: 2089 - protein, 9 aa, Influenza A virus
MRTEIIRMM

SEQ ID NO: 2090 - protein, 9 aa, Influenza A virus
MRTEVIRMM

SEQ ID NO: 2091 - protein, 9 aa, Influenza A virus
MSFQGRGVF

SEQ ID NO: 2092 - protein, 10 aa, Influenza A virus
MSFQGRGVFE

SEQ ID NO: 2093 - protein, 11 aa, Influenza A virus
MSFQGRGVFEL

SEQ ID NO: 2094 - protein, 9 aa, Influenza A virus
MSFRGRGVF

SEQ ID NO: 2095 - protein, 10 aa, Influenza A virus
MSFRGRGVFE

SEQ ID NO: 2096 - protein, 11 aa, Influenza A virus
MSFRGRGVFEL

SEQ ID NO: 2097 - protein, 8 aa, Influenza A virus
MSKEGSYF

SEQ ID NO: 2098 - protein, 9 aa, Influenza A virus
MSKEGSYFF

SEQ ID NO: 2099 - protein, 10 aa, Influenza A virus
MSKEGSYFFG

SEQ ID NO: 2100 - protein, 8 aa, Influenza A virus
MSNEGSYF

SEQ ID NO: 2101 - protein, 9 aa, Influenza A virus
MSNEGSYFF

SEQ ID NO: 2102 - protein, 10 aa, Influenza A virus
MSNEGSYFFG

SEQ ID NO: 2103 - protein, 8 aa, Influenza A virus
MSSSTLEL

SEQ ID NO: 2104 - protein, 9 aa, Influenza A virus
MSSSTLELR

SEQ ID NO: 2105 - protein, 10 aa, Influenza A virus
MSSSTLELRS

SEQ ID NO: 2106 - protein, 11 aa, Influenza A virus
MSSSTLELRSK

SEQ ID NO: 2107 - protein, 10 aa, Influenza A virus
MSTRGVQIAS

SEQ ID NO: 2108 - protein, 8 aa, Influenza A virus
MTIERMVL

SEQ ID NO: 2109 - protein, 9 aa, Influenza A virus
MTIERMVLS

SEQ ID NO: 2110 - protein, 10 aa, Influenza A virus
MTIERMVLSA

SEQ ID NO: 2111 - protein, 11 aa, Influenza A virus
MTIERMVLSAF

SEQ ID NO: 2112 - protein, 9 aa, Influenza A virus
MVDGIGRFY

SEQ ID NO: 2113 - protein, 10 aa, Influenza A virus
MVDGIGRFYI

SEQ ID NO: 2114 - protein, 9 aa, Influenza A virus
MVDQVRESR

SEQ ID NO: 2115 - protein, 9 aa, Influenza A virus
MVGGIGRFY

SEQ ID NO: 2116 - protein, 10 aa, Influenza A virus
MVGGIGRFYI

SEQ ID NO: 2117 - protein, 10 aa, Influenza A virus
MVGGIGRFYV

SEQ ID NO: 2118 - protein, 9 aa, Influenza A virus
MVKRGINDR

SEQ ID NO: 2119 - protein, 9 aa, Influenza A virus
MVLELIRII

SEQ ID NO: 2120 - protein, 10 aa, Influenza A virus
MVLELIRIIK

SEQ ID NO: 2121 - protein, 11 aa, Influenza A virus
MVLELIRIIKR

SEQ ID NO: 2122 - protein, 9 aa, Influenza A virus
MVLELIRMI

SEQ ID NO: 2123 - protein, 10 aa, Influenza A virus
MVLELIRMIK

SEQ ID NO: 2124 - protein, 11 aa, Influenza A virus
MVLELIRMIKR

SEQ ID NO: 2125 - protein, 9 aa, Influenza A virus
MVLSAFEER

SEQ ID NO: 2126 - protein, 10 aa, Influenza A virus
MVLSAFEERR

SEQ ID NO: 2127 - protein, 9 aa, Influenza A virus
MVMELIQMI

SEQ ID NO: 2128 - protein, 10 aa, Influenza A virus
MVMELIQMIK

SEQ ID NO: 2129 - protein, 11 aa, Influenza A virus
MVMELIQMIKR

SEQ ID NO: 2130 - protein, 9 aa, Influenza A virus
MVMELIRMI

SEQ ID NO: 2131 - protein, 10 aa, Influenza A virus
MVMELIRMIK

SEQ ID NO: 2132 - protein, 11 aa, Influenza A virus
MVMELIRMIKR

SEQ ID NO: 2133 - protein, 9 aa, Influenza A virus
MVMELIRMV

SEQ ID NO: 2134 - protein, 10 aa, Influenza A virus
MVMELIRMVK

SEQ ID NO: 2135 - protein, 11 aa, Influenza A virus
MVMELIRMVKR

SEQ ID NO: 2136 - protein, 9 aa, Influenza A virus
MVMELVRMI

SEQ ID NO: 2137 - protein, 10 aa, Influenza A virus
MVMELVRMIK

SEQ ID NO: 2138 - protein, 11 aa, Influenza A virus
MVMELVRMIKR

SEQ ID NO: 2139 - protein, 10 aa, Influenza A virus
MVPRGKLSTR

SEQ ID NO: 2140 - protein, 9 aa, Influenza A virus
MVSGIGRFY

SEQ ID NO: 2141 - protein, 10 aa, Influenza A virus
MVSGIGRFYI

SEQ ID NO: 2142 - protein, 8 aa, Influenza A virus
MVSSTLEL

SEQ ID NO: 2143 - protein, 9 aa, Influenza A virus
MVSSTLELR

SEQ ID NO: 2144 - protein, 10 aa, Influenza A virus
MVSSTLELRS

SEQ ID NO: 2145 - protein, 11 aa, Influenza A virus
MVSSTLELRSR

SEQ ID NO: 2146 - protein, 9 aa, Influenza A virus
NAAAGLTHL

SEQ ID NO: 2147 - protein, 10 aa, Influenza A virus
NAAAGLTHLM

SEQ ID NO: 2148 - protein, 9 aa, Influenza A virus
NAEFEDLIF

SEQ ID NO: 2149 - protein, 10 aa, Influenza A virus
NAEFEDLIFL

SEQ ID NO: 2150 - protein, 9 aa, Influenza A virus
NAEFEDLTF

SEQ ID NO: 2151 - protein, 10 aa, Influenza A virus
NAEFEDLTFL

SEQ ID NO: 2152 - protein, 9 aa, Influenza A virus
NAEIEDLIF

SEQ ID NO: 2153 - protein, 10 aa, Influenza A virus
NAEIEDLIFL

SEQ ID NO: 2154 - protein, 9 aa, Influenza A virus
NAEIEDLTF

SEQ ID NO: 2155 - protein, 10 aa, Influenza A virus
NAEIEDLTFL

SEQ ID NO: 2156 - protein, 9 aa, Influenza A virus
NAEVEDLIF

SEQ ID NO: 2157 - protein, 10 aa, Influenza A virus
NAEVEDLIFL

SEQ ID NO: 2158 - protein, 9 aa, Influenza A virus
NAEYEDLIF

SEQ ID NO: 2159 - protein, 10 aa, Influenza A virus
NAEYEDLIFL

SEQ ID NO: 2160 - protein, 9 aa, Influenza A virus
NAKPDDVSF

SEQ ID NO: 2161 - protein, 9 aa, Influenza A virus
NAKPEDVSF

SEQ ID NO: 2162 - protein, 9 aa, Influenza A virus
NAKPEEVSF

SEQ ID NO: 2163 - protein, 10 aa, Influenza A virus
NAKPEEVSFR

SEQ ID NO: 2164 - protein, 9 aa, Influenza A virus
NANDIRASV

SEQ ID NO: 2165 - protein, 11 aa, Influenza A virus
NANDIRASVGR

SEQ ID NO: 2166 - protein, 9 aa, Influenza A virus
NANEIRASV

SEQ ID NO: 2167 - protein, 11 aa, Influenza A virus
NANEIRASVGK

SEQ ID NO: 2168 - protein, 11 aa, Influenza A virus
NANEIRASVGR

SEQ ID NO: 2169 - protein, 9 aa, Influenza A virus
NARPEDVSF

SEQ ID NO: 2170 - protein, 9 aa, Influenza A virus
NARPEEVSF

SEQ ID NO: 2171 - protein, 9 aa, Influenza A virus
NARSEDVSF

SEQ ID NO: 2172 - protein, 9 aa, Influenza A virus
NASPEDVSF

SEQ ID NO: 2173 - protein, 9 aa, Influenza A virus
NATEIRASV

SEQ ID NO: 2174 - protein, 11 aa, Influenza A virus
NATEIRASVGK

SEQ ID NO: 2175 - protein, 11 aa, Influenza A virus
NATEIRASVGR

SEQ ID NO: 2176 - protein, 9 aa, Influenza A virus
NATEIRSSV

SEQ ID NO: 2177 - protein, 11 aa, Influenza A virus
NATEIRSSVGR

SEQ ID NO: 2178 - protein, 10 aa, Influenza A virus
NATNPIVPSF

SEQ ID NO: 2179 - protein, 9 aa, Influenza A virus
NAYERMCNI

SEQ ID NO: 2180 - protein, 10 aa, Influenza A virus
NAYERMCNIL

SEQ ID NO: 2181 - protein, 11 aa, Influenza A virus
NAYERMCNILK

SEQ ID NO: 2182 - protein, 10 aa, Influenza A virus
NEGRLIQNSI

SEQ ID NO: 2183 - protein, 11 aa, Influenza A virus
NEGSYFFGDSA

SEQ ID NO: 2184 - protein, 10 aa, Influenza A virus
NEIRASVGKM

SEQ ID NO: 2185 - protein, 10 aa, Influenza A virus
NEIRASVGRM

SEQ ID NO: 2186 - protein, 9 aa, Influenza A virus
NENMDAIVS

SEQ ID NO: 2187 - protein, 10 aa, Influenza A virus
NENMDAIVSS

SEQ ID NO: 2188 - protein, 9 aa, Influenza A virus
NENMDSIVS

SEQ ID NO: 2189 - protein, 10 aa, Influenza A virus
NENMDSIVSS

SEQ ID NO: 2190 - protein, 9 aa, Influenza A virus
NENMDTMVS

SEQ ID NO: 2191 - protein, 10 aa, Influenza A virus
NENMETMDSI

SEQ ID NO: 2192 - protein, 10 aa, Influenza A virus
NENPAHKSQL

SEQ ID NO: 2193 - protein, 11 aa, Influenza A virus
NENPAHKSQLA

SEQ ID NO: 2194 - protein, 10 aa, Influenza A virus
NENPVHKSQL

SEQ ID NO: 2195 - protein, 10 aa, Influenza A virus
NENSAHKSQL

SEQ ID NO: 2196 - protein, 9 aa, Influenza A virus
NERRTRIAY

SEQ ID NO: 2197 - protein, 9 aa, Influenza A virus
NFEKEGYSL

SEQ ID NO: 2198 - protein, 9 aa, Influenza A virus
NFIRGTKVI

SEQ ID NO: 2199 - protein, 11 aa, Influenza A virus
NFIRGTKVIPR

SEQ ID NO: 2200 - protein, 9 aa, Influenza A virus
NFIRGTKVV

SEQ ID NO: 2201 - protein, 11 aa, Influenza A virus
NFIRGTKVVPR

SEQ ID NO: 2202 - protein, 9 aa, Influenza A virus
NFIRGTRVV

SEQ ID NO: 2203 - protein, 11 aa, Influenza A virus
NFIRGTRVVPR

SEQ ID NO: 2204 - protein, 9 aa, Influenza A virus
NFWRGDNGR

SEQ ID NO: 2205 - protein, 9 aa, Influenza A virus
NFWRGENER

SEQ ID NO: 2206 - protein, 10 aa, Influenza A virus
NFWRGENERR

SEQ ID NO: 2207 - protein, 10 aa, Influenza A virus
NFWRGENGRR

SEQ ID NO: 2208 - protein, 9 aa, Influenza A virus
NGDDATAGL

SEQ ID NO: 2209 - protein, 10 aa, Influenza A virus
NGKWMRELIL

SEQ ID NO: 2210 - protein, 10 aa, Influenza A virus
NGKWMRELVL

SEQ ID NO: 2211 - protein, 9 aa, Influenza A virus
NGLAVASGY

SEQ ID NO: 2212 - protein, 9 aa, Influenza A virus
NGRLTRIAY

SEQ ID NO: 2213 - protein, 11 aa, Influenza A virus
NGRLTRIAYER

SEQ ID NO: 2214 - protein, 9 aa, Influenza A virus
NGRRTRVAY

SEQ ID NO: 2215 - protein, 10 aa, Influenza A virus
NILKGKFQTA

SEQ ID NO: 2216 - protein, 9 aa, Influenza A virus
NLNDATYQR

SEQ ID NO: 2217 - protein, 11 aa, Influenza A virus
NLNDATYQRTR

SEQ ID NO: 2218 - protein, 9 aa, Influenza A virus
NLNDSTYQR

SEQ ID NO: 2219 - protein, 11 aa, Influenza A virus
NLNDSTYQRTR

SEQ ID NO: 2220 - protein, 9 aa, Influenza A virus
NLNDTTYQR

SEQ ID NO: 2221 - protein, 11 aa, Influenza A virus
NLNDTTYQRTR

SEQ ID NO: 2222 - protein, 10 aa, Influenza A virus
NLPFDKATIM

SEQ ID NO: 2223 - protein, 9 aa, Influenza A virus
NLPFDKPTI

SEQ ID NO: 2224 - protein, 10 aa, Influenza A virus
NLPFDKSTIM

SEQ ID NO: 2225 - protein, 9 aa, Influenza A virus
NLPFDKSTV

SEQ ID NO: 2226 - protein, 10 aa, Influenza A virus
NLPFDKSTVM

SEQ ID NO: 2227 - protein, 10 aa, Influenza A virus
NLPFDKTTIM

SEQ ID NO: 2228 - protein, 9 aa, Influenza A virus
NLPFDRPTI

SEQ ID NO: 2229 - protein, 10 aa, Influenza A virus
NLPFDRPTIM

SEQ ID NO: 2230 - protein, 10 aa, Influenza A virus
NLPFDRSTIM

SEQ ID NO: 2231 - protein, 10 aa, Influenza A virus
NLPFDRTTIM

SEQ ID NO: 2232 - protein, 9 aa, Influenza A virus
NLPFDRTTV

SEQ ID NO: 2233 - protein, 10 aa, Influenza A virus
NLPFDRTTVM

SEQ ID NO: 2234 - protein, 11 aa, Influenza A virus
NLPFDRTTVMA

SEQ ID NO: 2235 - protein, 10 aa, Influenza A virus
NLPFEKATIM

SEQ ID NO: 2236 - protein, 9 aa, Influenza A virus
NLPFEKSTV

SEQ ID NO: 2237 - protein, 10 aa, Influenza A virus
NLPFEKSTVM

SEQ ID NO: 2238 - protein, 10 aa, Influenza A virus
NLPFERATIM

SEQ ID NO: 2239 - protein, 9 aa, Influenza A virus
NLPFERATV

SEQ ID NO: 2240 - protein, 10 aa, Influenza A virus
NLPFERATVM

SEQ ID NO: 2241 - protein, 9 aa, Influenza A virus
NLPFERSTI

SEQ ID NO: 2242 - protein, 10 aa, Influenza A virus
NLPFERSTIM

SEQ ID NO: 2243 - protein, 9 aa, Influenza A virus
NLPFERTTI

SEQ ID NO: 2244 - protein, 10 aa, Influenza A virus
NLPFERTTIM

SEQ ID NO: 2245 - protein, 9 aa, Influenza A virus
NLPFERVTI

SEQ ID NO: 2246 - protein, 10 aa, Influenza A virus
NLPFERVTIM

SEQ ID NO: 2247 - protein, 11 aa, Influenza A virus
NLPFERVTIMA

SEQ ID NO: 2248 - protein, 10 aa, Influenza A virus
NMDAIDSSTL

SEQ ID NO: 2249 - protein, 9 aa, Influenza A virus
NMDAIVSST

SEQ ID NO: 2250 - protein, 10 aa, Influenza A virus
NMDAIVSSTL

SEQ ID NO: 2251 - protein, 10 aa, Influenza A virus
NMDAMESSTL

SEQ ID NO: 2252 - protein, 10 aa, Influenza A virus
NMDNMESSTL

SEQ ID NO: 2253 - protein, 9 aa, Influenza A virus
NMDSIVSST

SEQ ID NO: 2254 - protein, 10 aa, Influenza A virus
NMDSIVSSTL

SEQ ID NO: 2255 - protein, 10 aa, Influenza A virus
NMDTMDSNTL

SEQ ID NO: 2256 - protein, 10 aa, Influenza A virus
NMDTMGSSTL

SEQ ID NO: 2257 - protein, 10 aa, Influenza A virus
NMDTMVSSTL

SEQ ID NO: 2258 - protein, 10 aa, Influenza A virus
NMEAIDSNTL

SEQ ID NO: 2259 - protein, 10 aa, Influenza A virus
NMEAMDSNTL

SEQ ID NO: 2260 - protein, 10 aa, Influenza A virus
NMEAMDSSTL

SEQ ID NO: 2261 - protein, 10 aa, Influenza A virus
NMEAMESSTL

SEQ ID NO: 2262 - protein, 9 aa, Influenza A virus
NMELIRMIK

SEQ ID NO: 2263 - protein, 10 aa, Influenza A virus
NMELIRMIKR

SEQ ID NO: 2264 - protein, 9 aa, Influenza A virus
NMESSTLEL

SEQ ID NO: 2265 - protein, 10 aa, Influenza A virus
NMESSTLELR

SEQ ID NO: 2266 - protein, 10 aa, Influenza A virus
NMETMDSITL

SEQ ID NO: 2267 - protein, 10 aa, Influenza A virus
NMETMGSSTL

SEQ ID NO: 2268 - protein, 10 aa, Influenza A virus
NMETMSSSTL

SEQ ID NO: 2269 - protein, 8 aa, Influenza A virus
NPAHKSQL

SEQ ID NO: 2270 - protein, 9 aa, Influenza A virus
NPAHKSQLA

SEQ ID NO: 2271 - protein, 10 aa, Influenza A virus
NPAHKSQLAW

SEQ ID NO: 2272 - protein, 9 aa, Influenza A virus
NPAHKSQLV

SEQ ID NO: 2273 - protein, 9 aa, Influenza A virus
NPEGRTSDM

SEQ ID NO: 2274 - protein, 9 aa, Influenza A virus
NPIVPSFDM

SEQ ID NO: 2275 - protein, 11 aa, Influenza A virus
NPIVPSFDMSK

SEQ ID NO: 2276 - protein, 9 aa, Influenza A virus
NPIVPSLDM

SEQ ID NO: 2277 - protein, 9 aa, Influenza A virus
NPVHKSQLV

SEQ ID NO: 2278 - protein, 10 aa, Influenza A virus
NPVHKSQLVW

SEQ ID NO: 2279 - protein, 9 aa, Influenza A virus
NPVVPSFDM

SEQ ID NO: 2280 - protein, 9 aa, Influenza A virus
NRYLEEHPS

SEQ ID NO: 2281 - protein, 10 aa, Influenza A virus
NRYLEEHPSA

SEQ ID NO: 2282 - protein, 10 aa, Influenza A virus
NRYLEENPSA

SEQ ID NO: 2283 - protein, 9 aa, Influenza A virus
NRYLEGHPS

SEQ ID NO: 2284 - protein, 10 aa, Influenza A virus
NRYLEGHPSA

SEQ ID NO: 2285 - protein, 9 aa, Influenza A virus
NSAAFEDLR

SEQ ID NO: 2286 - protein, 10 aa, Influenza A virus
NSAAFEDLRV

SEQ ID NO: 2287 - protein, 9 aa, Influenza A virus
NSAHKSQLV

SEQ ID NO: 2288 - protein, 10 aa, Influenza A virus
NSAHKSQLVW

SEQ ID NO: 2289 - protein, 9 aa, Influenza A virus
NSHVYSLIR

SEQ ID NO: 2290 - protein, 9 aa, Influenza A virus
NSITIEKMV

SEQ ID NO: 2291 - protein, 9 aa, Influenza A virus
NSITIERMV

SEQ ID NO: 2292 - protein, 9 aa, Influenza A virus
NSITMERMV

SEQ ID NO: 2293 - protein, 9 aa, Influenza A virus
NSMTIERMV

SEQ ID NO: 2294 - protein, 10 aa, Influenza A virus
NSMTIERMVL

SEQ ID NO: 2295 - protein, 9 aa, Influenza A virus
NSQIFSLIR

SEQ ID NO: 2296 - protein, 11 aa, Influenza A virus
NSQIFSLIRPK

SEQ ID NO: 2297 - protein, 9 aa, Influenza A virus
NSQVFSIIR

SEQ ID NO: 2298 - protein, 9 aa, Influenza A virus
NSQVFSLIR

SEQ ID NO: 2299 - protein, 11 aa, Influenza A virus
NSQVFSLIRPK

SEQ ID NO: 2300 - protein, 9 aa, Influenza A virus
NSQVFSLVR

SEQ ID NO: 2301 - protein, 9 aa, Influenza A virus
NSQVLSLIR

SEQ ID NO: 2302 - protein, 9 aa, Influenza A virus
NSQVYSLIR

SEQ ID NO: 2303 - protein, 9 aa, Influenza A virus
NSRPEDVSF

SEQ ID NO: 2304 - protein, 10 aa, Influenza A virus
NSSTLELRSK

SEQ ID NO: 2305 - protein, 10 aa, Influenza A virus
NSSTLELRSR

SEQ ID NO: 2306 - protein, 10 aa, Influenza A virus
NTEGRISDMR

SEQ ID NO: 2307 - protein, 10 aa, Influenza A virus
NTEGRTSDMR

SEQ ID NO: 2308 - protein, 10 aa, Influenza A virus
NTERRTSDMR

SEQ ID NO: 2309 - protein, 9 aa, Influenza A virus
NTLELRSKY

SEQ ID NO: 2310 - protein, 10 aa, Influenza A virus
NTLELRSKYW

SEQ ID NO: 2311 - protein, 8 aa, Influenza A virus
NTLELRSR

SEQ ID NO: 2312 - protein, 9 aa, Influenza A virus
NTLELRSRY

SEQ ID NO: 2313 - protein, 10 aa, Influenza A virus
NTLELRSRYW

SEQ ID NO: 2314 - protein, 9 aa, Influenza A virus
NTNQHRASA

SEQ ID NO: 2315 - protein, 9 aa, Influenza A virus
NTTEIRASV

SEQ ID NO: 2316 - protein, 10 aa, Influenza A virus
NTTEIRASVG

SEQ ID NO: 2317 - protein, 11 aa, Influenza A virus
NTTEIRASVGR

SEQ ID NO: 2318 - protein, 10 aa, Influenza A virus
NVEAMDSNTL

SEQ ID NO: 2319 - protein, 10 aa, Influenza A virus
NVEAMDSSTL

SEQ ID NO: 2320 - protein, 10 aa, Influenza A virus
NVEAMDSTTL

SEQ ID NO: 2321 - protein, 10 aa, Influenza A virus
PAGLTHLMIW

SEQ ID NO: 2322 - protein, 9 aa, Influenza A virus
PAHKSQLAW

SEQ ID NO: 2323 - protein, 9 aa, Influenza A virus
PAHKSQLVW

SEQ ID NO: 2324 - protein, 9 aa, Influenza A virus
PAVASGYAF

SEQ ID NO: 2325 - protein, 11 aa, Influenza A virus
PAVASGYAFEK

SEQ ID NO: 2326 - protein, 11 aa, Influenza A virus
PAVASGYDFEK

SEQ ID NO: 2327 - protein, 11 aa, Influenza A virus
PAVASGYDFER

SEQ ID NO: 2328 - protein, 11 aa, Influenza A virus
PAVASGYEFEK

SEQ ID NO: 2329 - protein, 11 aa, Influenza A virus
PAVASGYNFEK

SEQ ID NO: 2330 - protein, 11 aa, Influenza A virus
PAVSSGYNFEK

SEQ ID NO: 2331 - protein, 10 aa, Influenza A virus
PFEKATIMAA

SEQ ID NO: 2332 - protein, 10 aa, Influenza A virus
PFERATIMAA

SEQ ID NO: 2333 - protein, 10 aa, Influenza A virus
PFERATVMAA

SEQ ID NO: 2334 - protein, 10 aa, Influenza A virus
PFERSTIMAA

SEQ ID NO: 2335 - protein, 10 aa, Influenza A virus
PFERTTIMAA

SEQ ID NO: 2336 - protein, 11 aa, Influenza A virus
PFKLLQTSQVY

SEQ ID NO: 2337 - protein, 10 aa, Influenza A virus
PIVPSFDMSK

SEQ ID NO: 2338 - protein, 9 aa, Influenza A virus
PIYKRVGGK

SEQ ID NO: 2339 - protein, 9 aa, Influenza A virus
PIYKRVNGK

SEQ ID NO: 2340 - protein, 9 aa, Influenza A virus
PIYRRVNGK

SEQ ID NO: 2341 - protein, 9 aa, Influenza A virus
PVHKSQLVW

SEQ ID NO: 2342 - protein, 10 aa, Influenza A virus
QANNGDDATR

SEQ ID NO: 2343 - protein, 10 aa, Influenza A virus
QDATEIRASV

SEQ ID NO: 2344 - protein, 10 aa, Influenza A virus
QEGRLIQNSI

SEQ ID NO: 2345 - protein, 9 aa, Influenza A virus
QIFSLIRPK

SEQ ID NO: 2346 - protein, 10 aa, Influenza A virus
QISIQPTFSV

SEQ ID NO: 2347 - protein, 8 aa, Influenza A virus
QISTQPTF

SEQ ID NO: 2348 - protein, 10 aa, Influenza A virus
QISTQPTFSV

SEQ ID NO: 2349 - protein, 8 aa, Influenza A virus
QISVQPAF

SEQ ID NO: 2350 - protein, 10 aa, Influenza A virus
QISVQPAFSV

SEQ ID NO: 2351 - protein, 10 aa, Influenza A virus
QISVQPTFSV

SEQ ID NO: 2352 - protein, 9 aa, Influenza A virus
QLATRGVQI

SEQ ID NO: 2353 - protein, 10 aa, Influenza A virus
QLAWMACHSA

SEQ ID NO: 2354 - protein, 9 aa, Influenza A virus
QLSDYEGRL

SEQ ID NO: 2355 - protein, 10 aa, Influenza A virus
QLSDYEGRLI

SEQ ID NO: 2356 - protein, 9 aa, Influenza A virus
QLSTRGFQI

SEQ ID NO: 2357 - protein, 10 aa, Influenza A virus
QLVWMACHSA

SEQ ID NO: 2358 - protein, 10 aa, Influenza A virus
QLVWMACNSA

SEQ ID NO: 2359 - protein, 10 aa, Influenza A virus
QMIKRGINDR

SEQ ID NO: 2360 - protein, 10 aa, Influenza A virus
QNANDIRASV

SEQ ID NO: 2361 - protein, 10 aa, Influenza A virus
QNANEIRASV

SEQ ID NO: 2362 - protein, 10 aa, Influenza A virus
QNATEIRASV

SEQ ID NO: 2363 - protein, 10 aa, Influenza A virus
QNATEIRSSV

SEQ ID NO: 2364 - protein, 9 aa, Influenza A virus
QNSHVYSLI

SEQ ID NO: 2365 - protein, 10 aa, Influenza A virus
QNSHVYSLIR

SEQ ID NO: 2366 - protein, 9 aa, Influenza A virus
QNSQIFSLI

SEQ ID NO: 2367 - protein, 10 aa, Influenza A virus
QNSQIFSLIR

SEQ ID NO: 2368 - protein, 10 aa, Influenza A virus
QNSQVFSIIR

SEQ ID NO: 2369 - protein, 9 aa, Influenza A virus
QNSQVFSLI

SEQ ID NO: 2370 - protein, 10 aa, Influenza A virus
QNSQVFSLIR

SEQ ID NO: 2371 - protein, 9 aa, Influenza A virus
QNSQVFSLV

SEQ ID NO: 2372 - protein, 10 aa, Influenza A virus
QNSQVFSLVR

SEQ ID NO: 2373 - protein, 10 aa, Influenza A virus
QNSQVLSLIR

SEQ ID NO: 2374 - protein, 10 aa, Influenza A virus
QNSQVYSLIR

SEQ ID NO: 2375 - protein, 10 aa, Influenza A virus
QNTTEIRASV

SEQ ID NO: 2376 - protein, 10 aa, Influenza A virus
QPAFSVQKNL

SEQ ID NO: 2377 - protein, 10 aa, Influenza A virus
QPAFSVQRNL

SEQ ID NO: 2378 - protein, 10 aa, Influenza A virus
QPSFSVQRNL

SEQ ID NO: 2379 - protein, 10 aa, Influenza A virus
QPTFSVQRKL

SEQ ID NO: 2380 - protein, 10 aa, Influenza A virus
QPTFSVQRNL

SEQ ID NO: 2381 - protein, 9 aa, Influenza A virus
QQRASAGHI

SEQ ID NO: 2382 - protein, 9 aa, Influenza A virus
QQRASAGQI

SEQ ID NO: 2383 - protein, 9 aa, Influenza A virus
QQRASAGQV

SEQ ID NO: 2384 - protein, 9 aa, Influenza A virus
QQRASSGQI

SEQ ID NO: 2385 - protein, 10 aa, Influenza A virus
QRASAGHISV

SEQ ID NO: 2386 - protein, 10 aa, Influenza A virus
QRASAGQISI

SEQ ID NO: 2387 - protein, 10 aa, Influenza A virus
QRASAGQISV

SEQ ID NO: 2388 - protein, 10 aa, Influenza A virus
QRASAGQVSV

SEQ ID NO: 2389 - protein, 10 aa, Influenza A virus
QRASSGQISI

SEQ ID NO: 2390 - protein, 9 aa, Influenza A virus
QRNLPFERV

SEQ ID NO: 2391 - protein, 10 aa, Influenza A virus
QRTRAHVRTG

SEQ ID NO: 2392 - protein, 11 aa, Influenza A virus
QRTRAHVRTGM

SEQ ID NO: 2393 - protein, 10 aa, Influenza A virus
QRTRALVRAG

SEQ ID NO: 2394 - protein, 11 aa, Influenza A virus
QRTRALVRAGM

SEQ ID NO: 2395 - protein, 10 aa, Influenza A virus
QRTRALVRTG

SEQ ID NO: 2396 - protein, 11 aa, Influenza A virus
QRTRALVRTGM

SEQ ID NO: 2397 - protein, 9 aa, Influenza A virus
QTAAQKAMM

SEQ ID NO: 2398 - protein, 9 aa, Influenza A virus
QTAAQRAIM

SEQ ID NO: 2399 - protein, 9 aa, Influenza A virus
QTAAQRAMM

SEQ ID NO: 2400 - protein, 9 aa, Influenza A virus
QTAAQRAMV

SEQ ID NO: 2401 - protein, 9 aa, Influenza A virus
QTASQRAMM

SEQ ID NO: 2402 - protein, 9 aa, Influenza A virus
QTSQVYSLI

SEQ ID NO: 2403 - protein, 10 aa, Influenza A virus
QTSQVYSLIR

SEQ ID NO: 2404 - protein, 9 aa, Influenza A virus
QVFSLIRPK

SEQ ID NO: 2405 - protein, 10 aa, Influenza A virus
QVFSLIRPKE

SEQ ID NO: 2406 - protein, 9 aa, Influenza A virus
QVREGRNPG

SEQ ID NO: 2407 - protein, 9 aa, Influenza A virus
QVRESRNPG

SEQ ID NO: 2408 - protein, 9 aa, Influenza A virus
QVRESRSPG

SEQ ID NO: 2409 - protein, 10 aa, Influenza A virus
QVSVQPSFSV

SEQ ID NO: 2410 - protein, 10 aa, Influenza A virus
QVSVQPTFSV

SEQ ID NO: 2411 - protein, 9 aa, Influenza A virus
RAANPIVPS

SEQ ID NO: 2412 - protein, 10 aa, Influenza A virus
RAANPIVPSF

SEQ ID NO: 2413 - protein, 8 aa, Influenza A virus
RAEIIRLM

SEQ ID NO: 2414 - protein, 8 aa, Influenza A virus
RAEIIRMM

SEQ ID NO: 2415 - protein, 8 aa, Influenza A virus
RAEIIRVM

SEQ ID NO: 2416 - protein, 8 aa, Influenza A virus
RAHVRTGM

SEQ ID NO: 2417 - protein, 11 aa, Influenza A virus
RAHVRTGMDPR

SEQ ID NO: 2418 - protein, 11 aa, Influenza A virus
RAIMDQVRESR

SEQ ID NO: 2419 - protein, 9 aa, Influenza A virus
RAIRTRSGG

SEQ ID NO: 2420 - protein, 11 aa, Influenza A virus
RALVRAGMDPR

SEQ ID NO: 2421 - protein, 8 aa, Influenza A virus
RALVRTGM

SEQ ID NO: 2422 - protein, 11 aa, Influenza A virus
RALVRTGMDPR

SEQ ID NO: 2423 - protein, 11 aa, Influenza A virus
RAMMDQVREGR

SEQ ID NO: 2424 - protein, 11 aa, Influenza A virus
RAMMDQVRESR

SEQ ID NO: 2425 - protein, 11 aa, Influenza A virus
RAMVDQVRESR

SEQ ID NO: 2426 - protein, 9 aa, Influenza A virus
RASAGHISV

SEQ ID NO: 2427 - protein, 9 aa, Influenza A virus
RASAGQISI

SEQ ID NO: 2428 - protein, 9 aa, Influenza A virus
RASAGQISV

SEQ ID NO: 2429 - protein, 9 aa, Influenza A virus
RASAGQVSV

SEQ ID NO: 2430 - protein, 9 aa, Influenza A virus
RASSGQISI

SEQ ID NO: 2431 - protein, 9 aa, Influenza A virus
RASVGRMIG

SEQ ID NO: 2432 - protein, 9 aa, Influenza A virus
RASVGRMVG

SEQ ID NO: 2433 - protein, 9 aa, Influenza A virus
RASVGRMVS

SEQ ID NO: 2434 - protein, 8 aa, Influenza A virus
RATIMAAF

SEQ ID NO: 2435 - protein, 9 aa, Influenza A virus
RATIMAAFI

SEQ ID NO: 2436 - protein, 10 aa, Influenza A virus
RATIMAAFTG

SEQ ID NO: 2437 - protein, 10 aa, Influenza A virus
RATNPIVPSF

SEQ ID NO: 2438 - protein, 8 aa, Influenza A virus
RATVMAAF

SEQ ID NO: 2439 - protein, 9 aa, Influenza A virus
RATVMAAFI

SEQ ID NO: 2440 - protein, 10 aa, Influenza A virus
RATVMAAFTG

SEQ ID NO: 2441 - protein, 9 aa, Influenza A virus
RATVMAAFV

SEQ ID NO: 2442 - protein, 11 aa, Influenza A virus
RDGKWMRELTL

SEQ ID NO: 2443 - protein, 10 aa, Influenza A virus
RDPKKTGGPI

SEQ ID NO: 2444 - protein, 11 aa, Influenza A virus
RDPKKTGGPIY

SEQ ID NO: 2445 - protein, 9 aa, Influenza A virus
REGKWIREL

SEQ ID NO: 2446 - protein, 10 aa, Influenza A virus
REGKWIRELI

SEQ ID NO: 2447 - protein, 11 aa, Influenza A virus
REGKWIRELIL

SEQ ID NO: 2448 - protein, 9 aa, Influenza A virus
REGKWVREL

SEQ ID NO: 2449 - protein, 10 aa, Influenza A virus
REGKWVRELI

SEQ ID NO: 2450 - protein, 11 aa, Influenza A virus
REGKWVRELIL

SEQ ID NO: 2451 - protein, 10 aa, Influenza A virus
REGKWVRELV

SEQ ID NO: 2452 - protein, 11 aa, Influenza A virus
REGKWVRELVL

SEQ ID NO: 2453 - protein, 9 aa, Influenza A virus
REGYSLIGI

SEQ ID NO: 2454 - protein, 9 aa, Influenza A virus
REGYSLVGI

SEQ ID NO: 2455 - protein, 9 aa, Influenza A virus
REGYSLVGV

SEQ ID NO: 2456 - protein, 11 aa, Influenza A virus
RELILCDKEEI

SEQ ID NO: 2457 - protein, 11 aa, Influenza A virus
RELILHDKEEI

SEQ ID NO: 2458 - protein, 11 aa, Influenza A virus
RELILYDKEEI

SEQ ID NO: 2459 - protein, 11 aa, Influenza A virus
RELILYDKEEM

SEQ ID NO: 2460 - protein, 11 aa, Influenza A virus
RELTLYDKEEI

SEQ ID NO: 2461 - protein, 11 aa, Influenza A virus
RELVLYDKEEI

SEQ ID NO: 2462 - protein, 11 aa, Influenza A virus
RELVLYDKEEL

SEQ ID NO: 2463 - protein, 11 aa, Influenza A virus
RELVLYDKEEM

SEQ ID NO: 2464 - protein, 11 aa, Influenza A virus
RELVLYDKGEI

SEQ ID NO: 2465 - protein, 9 aa, Influenza A virus
RESRNPGNA

SEQ ID NO: 2466 - protein, 10 aa, Influenza A virus
RESRNPGNAE

SEQ ID NO: 2467 - protein, 11 aa, Influenza A virus
RESRNPGNAEF

SEQ ID NO: 2468 - protein, 11 aa, Influenza A virus
RESRNPGNAEY

SEQ ID NO: 2469 - protein, 9 aa, Influenza A virus
RESRSPGNA

SEQ ID NO: 2470 - protein, 10 aa, Influenza A virus
RESRSPGNAE

SEQ ID NO: 2471 - protein, 10 aa, Influenza A virus
RFYIQMCTEF

SEQ ID NO: 2472 - protein, 11 aa, Influenza A virus
RFYIQMCTEFK

SEQ ID NO: 2473 - protein, 10 aa, Influenza A virus
RFYIQMCTEI

SEQ ID NO: 2474 - protein, 11 aa, Influenza A virus
RFYIQMCTEIK

SEQ ID NO: 2475 - protein, 10 aa, Influenza A virus
RFYIQMCTEL

SEQ ID NO: 2476 - protein, 11 aa, Influenza A virus
RFYIQMCTELK

SEQ ID NO: 2477 - protein, 10 aa, Influenza A virus
RFYVQMCTEL

SEQ ID NO: 2478 - protein, 11 aa, Influenza A virus
RFYVQMCTELK

SEQ ID NO: 2479 - protein, 8 aa, Influenza A virus
RGAKVVPR

SEQ ID NO: 2480 - protein, 8 aa, Influenza A virus
RGARVLPR

SEQ ID NO: 2481 - protein, 11 aa, Influenza A virus
RGARVLPRGQL

SEQ ID NO: 2482 - protein, 8 aa, Influenza A virus
RGARVVPR

SEQ ID NO: 2483 - protein, 10 aa, Influenza A virus
RGAYERMCNI

SEQ ID NO: 2484 - protein, 9 aa, Influenza A virus
RGENGRLTR

SEQ ID NO: 2485 - protein, 10 aa, Influenza A virus
RGENGRLTRI

SEQ ID NO: 2486 - protein, 11 aa, Influenza A virus
RGFQIASNENM

SEQ ID NO: 2487 - protein, 10 aa, Influenza A virus
RGINDRNFWR

SEQ ID NO: 2488 - protein, 11 aa, Influenza A virus
RGINDRNFWRG

SEQ ID NO: 2489 - protein, 11 aa, Influenza A virus
RGIQIASNENM

SEQ ID NO: 2490 - protein, 8 aa, Influenza A virus
RGKKVIPR

SEQ ID NO: 2491 - protein, 9 aa, Influenza A virus
RGKKVIPRG

SEQ ID NO: 2492 - protein, 10 aa, Influenza A virus
RGKKVIPRGK

SEQ ID NO: 2493 - protein, 8 aa, Influenza A virus
RGKKVVPR

SEQ ID NO: 2494 - protein, 9 aa, Influenza A virus
RGKKVVPRG

SEQ ID NO: 2495 - protein, 10 aa, Influenza A virus
RGKKVVPRGK

SEQ ID NO: 2496 - protein, 10 aa, Influenza A virus
RGKKVVPRGR

SEQ ID NO: 2497 - protein, 9 aa, Influenza A virus
RGKLSTRGV

SEQ ID NO: 2498 - protein, 8 aa, Influenza A virus
RGKRVVPR

SEQ ID NO: 2499 - protein, 9 aa, Influenza A virus
RGKRVVPRG

SEQ ID NO: 2500 - protein, 10 aa, Influenza A virus
RGKRVVPRGK

SEQ ID NO: 2501 - protein, 9 aa, Influenza A virus
RGLTHMMIW

SEQ ID NO: 2502 - protein, 9 aa, Influenza A virus
RGQLATRGV

SEQ ID NO: 2503 - protein, 9 aa, Influenza A virus
RGQLSTRGF

SEQ ID NO: 2504 - protein, 9 aa, Influenza A virus
RGQLSTRGV

SEQ ID NO: 2505 - protein, 9 aa, Influenza A virus
RGQMSTRGV

SEQ ID NO: 2506 - protein, 9 aa, Influenza A virus
RGRGVFELS

SEQ ID NO: 2507 - protein, 9 aa, Influenza A virus
RGRLSTRGI

SEQ ID NO: 2508 - protein, 9 aa, Influenza A virus
RGRLSTRGV

SEQ ID NO: 2509 - protein, 10 aa, Influenza A virus
RGTKVCPRGK

SEQ ID NO: 2510 - protein, 8 aa, Influenza A virus
RGTKVFPR

SEQ ID NO: 2511 - protein, 10 aa, Influenza A virus
RGTKVFPRGK

SEQ ID NO: 2512 - protein, 8 aa, Influenza A virus
RGTKVIPR

SEQ ID NO: 2513 - protein, 10 aa, Influenza A virus
RGTKVIPRGK

SEQ ID NO: 2514 - protein, 10 aa, Influenza A virus
RGTKVSPRGK

SEQ ID NO: 2515 - protein, 8 aa, Influenza A virus
RGTKVVPR

SEQ ID NO: 2516 - protein, 10 aa, Influenza A virus
RGTKVVPRGK

SEQ ID NO: 2517 - protein, 10 aa, Influenza A virus
RGTKVVPRGR

SEQ ID NO: 2518 - protein, 8 aa, Influenza A virus
RGTRIVPR

SEQ ID NO: 2519 - protein, 10 aa, Influenza A virus
RGTRIVPRGQ

SEQ ID NO: 2520 - protein, 11 aa, Influenza A virus
RGTRIVPRGQL

SEQ ID NO: 2521 - protein, 8 aa, Influenza A virus
RGTRLVPR

SEQ ID NO: 2522 - protein, 10 aa, Influenza A virus
RGTRLVPRGQ

SEQ ID NO: 2523 - protein, 11 aa, Influenza A virus
RGTRLVPRGQL

SEQ ID NO: 2524 - protein, 8 aa, Influenza A virus
RGTRMVPR

SEQ ID NO: 2525 - protein, 10 aa, Influenza A virus
RGTRMVPRGK

SEQ ID NO: 2526 - protein, 11 aa, Influenza A virus
RGTRMVPRGKL

SEQ ID NO: 2527 - protein, 8 aa, Influenza A virus
RGTRVAPR

SEQ ID NO: 2528 - protein, 10 aa, Influenza A virus
RGTRVAPRGQ

SEQ ID NO: 2529 - protein, 11 aa, Influenza A virus
RGTRVAPRGQL

SEQ ID NO: 2530 - protein, 8 aa, Influenza A virus
RGTRVIPR

SEQ ID NO: 2531 - protein, 10 aa, Influenza A virus
RGTRVIPRGQ

SEQ ID NO: 2532 - protein, 8 aa, Influenza A virus
RGTRVLPR

SEQ ID NO: 2533 - protein, 10 aa, Influenza A virus
RGTRVLPRGK

SEQ ID NO: 2534 - protein, 11 aa, Influenza A virus
RGTRVLPRGQL

SEQ ID NO: 2535 - protein, 8 aa, Influenza A virus
RGTRVVPR

SEQ ID NO: 2536 - protein, 10 aa, Influenza A virus
RGTRVVPRGK

SEQ ID NO: 2537 - protein, 10 aa, Influenza A virus
RGTRVVPRGQ

SEQ ID NO: 2538 - protein, 10 aa, Influenza A virus
RGVFEFSDER

SEQ ID NO: 2539 - protein, 10 aa, Influenza A virus
RGVFELSDEK

SEQ ID NO: 2540 - protein, 10 aa, Influenza A virus
RGVFELSDER

SEQ ID NO: 2541 - protein, 9 aa, Influenza A virus
RGVNDRNFW

SEQ ID NO: 2542 - protein, 10 aa, Influenza A virus
RGVNDRNFWR

SEQ ID NO: 2543 - protein, 11 aa, Influenza A virus
RGVNDRNFWRG

SEQ ID NO: 2544 - protein, 11 aa, Influenza A virus
RGVQIASNENM

SEQ ID NO: 2545 - protein, 10 aa, Influenza A virus
RIAYERMCNI

SEQ ID NO: 2546 - protein, 8 aa, Influenza A virus
RIDGKWIR

SEQ ID NO: 2547 - protein, 8 aa, Influenza A virus
RIDGKWMR

SEQ ID NO: 2548 - protein, 8 aa, Influenza A virus
RIDGKWTR

SEQ ID NO: 2549 - protein, 10 aa, Influenza A virus
RIIKRGINDR

SEQ ID NO: 2550 - protein, 11 aa, Influenza A virus
RIMESARPEDV

SEQ ID NO: 2551 - protein, 9 aa, Influenza A virus
RISDMRTEI

SEQ ID NO: 2552 - protein, 11 aa, Influenza A virus
RISDMRTEIIR

SEQ ID NO: 2553 - protein, 9 aa, Influenza A virus
RISGFIRGK

SEQ ID NO: 2554 - protein, 10 aa, Influenza A virus
RISGFIRGKR

SEQ ID NO: 2555 - protein, 11 aa, Influenza A virus
RISGFIRGKRV

SEQ ID NO: 2556 - protein, 9 aa, Influenza A virus
RIVPRGQLS

SEQ ID NO: 2557 - protein, 11 aa, Influenza A virus
RIVPRGQLSTR

SEQ ID NO: 2558 - protein, 9 aa, Influenza A virus
RIWRHANNG

SEQ ID NO: 2559 - protein, 11 aa, Influenza A virus
RIWRQANNGEY

SEQ ID NO: 2560 - protein, 9 aa, Influenza A virus
RIWRQRNNG

SEQ ID NO: 2561 - protein, 9 aa, Influenza A virus
RKIDGKWMR

SEQ ID NO: 2562 - protein, 10 aa, Influenza A virus
RKLPFERATI

SEQ ID NO: 2563 - protein, 11 aa, Influenza A virus
RKLPFERATIM

SEQ ID NO: 2564 - protein, 10 aa, Influenza A virus
RKTRGAYERM

SEQ ID NO: 2565 - protein, 9 aa, Influenza A virus
RKTRIAYER

SEQ ID NO: 2566 - protein, 10 aa, Influenza A virus
RKTRIAYERM

SEQ ID NO: 2567 - protein, 10 aa, Influenza A virus
RKTRNAYERM

SEQ ID NO: 2568 - protein, 10 aa, Influenza A virus
RKTRSAYERM

SEQ ID NO: 2569 - protein, 9 aa, Influenza A virus
RKWMRELIL

SEQ ID NO: 2570 - protein, 10 aa, Influenza A virus
RKWMRELILY

SEQ ID NO: 2571 - protein, 9 aa, Influenza A virus
RKWMRELVL

SEQ ID NO: 2572 - protein, 10 aa, Influenza A virus
RKWMRELVLY

SEQ ID NO: 2573 - protein, 9 aa, Influenza A virus
RLFSFIRGT

SEQ ID NO: 2574 - protein, 10 aa, Influenza A virus
RLFSFIRGTK

SEQ ID NO: 2575 - protein, 11 aa, Influenza A virus
RLFSFIRGTKV

SEQ ID NO: 2576 - protein, 9 aa, Influenza A virus
RLIQNSITI

SEQ ID NO: 2577 - protein, 11 aa, Influenza A virus
RLIQNSITIEK

SEQ ID NO: 2578 - protein, 11 aa, Influenza A virus
RLIQNSITIER

SEQ ID NO: 2579 - protein, 9 aa, Influenza A virus
RLIQNSITM

SEQ ID NO: 2580 - protein, 11 aa, Influenza A virus
RLIQNSITMER

SEQ ID NO: 2581 - protein, 9 aa, Influenza A virus
RLIQNSLTI

SEQ ID NO: 2582 - protein, 11 aa, Influenza A virus
RLIQNSLTIER

SEQ ID NO: 2583 - protein, 9 aa, Influenza A virus
RLIQNSLTV

SEQ ID NO: 2584 - protein, 10 aa, Influenza A virus
RLIQNSLTVE

SEQ ID NO: 2585 - protein, 11 aa, Influenza A virus
RLIQNSLTVER

SEQ ID NO: 2586 - protein, 9 aa, Influenza A virus
RLIQNSMTI

SEQ ID NO: 2587 - protein, 11 aa, Influenza A virus
RLIQNSMTIER

SEQ ID NO: 2588 - protein, 9 aa, Influenza A virus
RLLQNSQIF

SEQ ID NO: 2589 - protein, 11 aa, Influenza A virus
RLLQNSQIFSL

SEQ ID NO: 2590 - protein, 9 aa, Influenza A virus
RLLQNSQVF

SEQ ID NO: 2591 - protein, 10 aa, Influenza A virus
RLLQNSQVFS

SEQ ID NO: 2592 - protein, 11 aa, Influenza A virus
RLLQNSQVFSI

SEQ ID NO: 2593 - protein, 11 aa, Influenza A virus
RLLQNSQVFSL

SEQ ID NO: 2594 - protein, 9 aa, Influenza A virus
RLLQNSQVL

SEQ ID NO: 2595 - protein, 11 aa, Influenza A virus
RLLQNSQVLSL

SEQ ID NO: 2596 - protein, 9 aa, Influenza A virus
RLLQNSQVY

SEQ ID NO: 2597 - protein, 10 aa, Influenza A virus
RLLQNSQVYS

SEQ ID NO: 2598 - protein, 11 aa, Influenza A virus
RLLQNSQVYSL

SEQ ID NO: 2599 - protein, 9 aa, Influenza A virus
RLLSFIRGT

SEQ ID NO: 2600 - protein, 10 aa, Influenza A virus
RLLSFIRGTK

SEQ ID NO: 2601 - protein, 11 aa, Influenza A virus
RLLSFIRGTKV

SEQ ID NO: 2602 - protein, 11 aa, Influenza A virus
RLMEGAKPEEV

SEQ ID NO: 2603 - protein, 11 aa, Influenza A virus
RLMESARPEDV

SEQ ID NO: 2604 - protein, 9 aa, Influenza A virus
RLSSFIRGT

SEQ ID NO: 2605 - protein, 10 aa, Influenza A virus
RLSSFIRGTK

SEQ ID NO: 2606 - protein, 11 aa, Influenza A virus
RLSSFIRGTKV

SEQ ID NO: 2607 - protein, 9 aa, Influenza A virus
RLSTRGIQI

SEQ ID NO: 2608 - protein, 10 aa, Influenza A virus
RLSTRGIQIA

SEQ ID NO: 2609 - protein, 11 aa, Influenza A virus
RLSTRGIQIAS

SEQ ID NO: 2610 - protein, 9 aa, Influenza A virus
RLSTRGVQI

SEQ ID NO: 2611 - protein, 10 aa, Influenza A virus
RLSTRGVQIA

SEQ ID NO: 2612 - protein, 11 aa, Influenza A virus
RLSTRGVQIAS

SEQ ID NO: 2613 - protein, 9 aa, Influenza A virus
RLTRIAYER

SEQ ID NO: 2614 - protein, 10 aa, Influenza A virus
RLTRIAYERM

SEQ ID NO: 2615 - protein, 11 aa, Influenza A virus
RLVPRGQLSTR

SEQ ID NO: 2616 - protein, 10 aa, Influenza A virus
RMCNILKGKF

SEQ ID NO: 2617 - protein, 11 aa, Influenza A virus
RMCSLMQGSTL

SEQ ID NO: 2618 - protein, 8 aa, Influenza A virus
RMIDGIGR

SEQ ID NO: 2619 - protein, 9 aa, Influenza A virus
RMIDGIGRF

SEQ ID NO: 2620 - protein, 10 aa, Influenza A virus
RMIDGIGRFY

SEQ ID NO: 2621 - protein, 11 aa, Influenza A virus
RMIDGIGRFYI

SEQ ID NO: 2622 - protein, 8 aa, Influenza A virus
RMIGGIGR

SEQ ID NO: 2623 - protein, 9 aa, Influenza A virus
RMIGGIGRF

SEQ ID NO: 2624 - protein, 10 aa, Influenza A virus
RMIGGIGRFY

SEQ ID NO: 2625 - protein, 11 aa, Influenza A virus
RMIGGIGRFYI

SEQ ID NO: 2626 - protein, 11 aa, Influenza A virus
RMIKRGINDRN

SEQ ID NO: 2627 - protein, 10 aa, Influenza A virus
RMIKRGVNDR

SEQ ID NO: 2628 - protein, 11 aa, Influenza A virus
RMIKRGVNDRN

SEQ ID NO: 2629 - protein, 10 aa, Influenza A virus
RMILSAFDER

SEQ ID NO: 2630 - protein, 11 aa, Influenza A virus
RMILSAFDERR

SEQ ID NO: 2631 - protein, 9 aa, Influenza A virus
RMLQNSQVF

SEQ ID NO: 2632 - protein, 10 aa, Influenza A virus
RMLQNSQVFS

SEQ ID NO: 2633 - protein, 11 aa, Influenza A virus
RMLQNSQVFSL

SEQ ID NO: 2634 - protein, 11 aa, Influenza A virus
RMMEDAKPEEV

SEQ ID NO: 2635 - protein, 11 aa, Influenza A virus
RMMEGAKPEEM

SEQ ID NO: 2636 - protein, 11 aa, Influenza A virus
RMMEGAKPEEV

SEQ ID NO: 2637 - protein, 11 aa, Influenza A virus
RMMENAKPDDV

SEQ ID NO: 2638 - protein, 11 aa, Influenza A virus
RMMENAKPEDV

SEQ ID NO: 2639 - protein, 11 aa, Influenza A virus
RMMENAKPEEV

SEQ ID NO: 2640 - protein, 9 aa, Influenza A virus
RMMENARPE

SEQ ID NO: 2641 - protein, 11 aa, Influenza A virus
RMMENARPEDV

SEQ ID NO: 2642 - protein, 11 aa, Influenza A virus
RMMENARPEEV

SEQ ID NO: 2643 - protein, 11 aa, Influenza A virus
RMMENARSEDV

SEQ ID NO: 2644 - protein, 9 aa, Influenza A virus
RMMENASPE

SEQ ID NO: 2645 - protein, 11 aa, Influenza A virus
RMMENASPEDV

SEQ ID NO: 2646 - protein, 9 aa, Influenza A virus
RMMENSRPE

SEQ ID NO: 2647 - protein, 11 aa, Influenza A virus
RMMENSRPEDV

SEQ ID NO: 2648 - protein, 11 aa, Influenza A virus
RMMESAKPEDL

SEQ ID NO: 2649 - protein, 11 aa, Influenza A virus
RMMESAKPEDV

SEQ ID NO: 2650 - protein, 11 aa, Influenza A virus
RMMESAKPEEV

SEQ ID NO: 2651 - protein, 9 aa, Influenza A virus
RMMESARPE

SEQ ID NO: 2652 - protein, 11 aa, Influenza A virus
RMMESARPEDA

SEQ ID NO: 2653 - protein, 11 aa, Influenza A virus
RMMESARPEDL

SEQ ID NO: 2654 - protein, 11 aa, Influenza A virus
RMMESARPEDV

SEQ ID NO: 2655 - protein, 11 aa, Influenza A virus
RMMESARPEEV

SEQ ID NO: 2656 - protein, 9 aa, Influenza A virus
RMMESARSE

SEQ ID NO: 2657 - protein, 11 aa, Influenza A virus
RMMESARSEDV

SEQ ID NO: 2658 - protein, 9 aa, Influenza A virus
RMMESSRPE

SEQ ID NO: 2659 - protein, 11 aa, Influenza A virus
RMMESSRPEDV

SEQ ID NO: 2660 - protein, 8 aa, Influenza A virus
RMVGGIGR

SEQ ID NO: 2661 - protein, 9 aa, Influenza A virus
RMVGGIGRF

SEQ ID NO: 2662 - protein, 10 aa, Influenza A virus
RMVGGIGRFY

SEQ ID NO: 2663 - protein, 11 aa, Influenza A virus
RMVGGIGRFYI

SEQ ID NO: 2664 - protein, 11 aa, Influenza A virus
RMVGGIGRFYV

SEQ ID NO: 2665 - protein, 10 aa, Influenza A virus
RMVKRGINDR

SEQ ID NO: 2666 - protein, 10 aa, Influenza A virus
RMVLSAFDER

SEQ ID NO: 2667 - protein, 11 aa, Influenza A virus
RMVLSAFDERR

SEQ ID NO: 2668 - protein, 10 aa, Influenza A virus
RMVLSAFEER

SEQ ID NO: 2669 - protein, 11 aa, Influenza A virus
RMVLSAFEERR

SEQ ID NO: 2670 - protein, 9 aa, Influenza A virus
RMVPRGKLS

SEQ ID NO: 2671 - protein, 11 aa, Influenza A virus
RMVPRGKLSTR

SEQ ID NO: 2672 - protein, 8 aa, Influenza A virus
RMVSGIGR

SEQ ID NO: 2673 - protein, 9 aa, Influenza A virus
RMVSGIGRF

SEQ ID NO: 2674 - protein, 10 aa, Influenza A virus
RMVSGIGRFY

SEQ ID NO: 2675 - protein, 11 aa, Influenza A virus
RMVSGIGRFYI

SEQ ID NO: 2676 - protein, 10 aa, Influenza A virus
RNAYERMCNI

SEQ ID NO: 2677 - protein, 10 aa, Influenza A virus
RNFWRGDNGR

SEQ ID NO: 2678 - protein, 10 aa, Influenza A virus
RNFWRGENER

SEQ ID NO: 2679 - protein, 11 aa, Influenza A virus
RNFWRGENERR

SEQ ID NO: 2680 - protein, 10 aa, Influenza A virus
RNFWRGENGR

SEQ ID NO: 2681 - protein, 11 aa, Influenza A virus
RNFWRGENGRR

SEQ ID NO: 2682 - protein, 11 aa, Influenza A virus
RNKYLEEHPSV

SEQ ID NO: 2683 - protein, 11 aa, Influenza A virus
RNLPFDKATIM

SEQ ID NO: 2684 - protein, 11 aa, Influenza A virus
RNLPFDKPTIM

SEQ ID NO: 2685 - protein, 11 aa, Influenza A virus
RNLPFDKSTIM

SEQ ID NO: 2686 - protein, 11 aa, Influenza A virus
RNLPFDKSTVM

SEQ ID NO: 2687 - protein, 11 aa, Influenza A virus
RNLPFDKTTIM

SEQ ID NO: 2688 - protein, 11 aa, Influenza A virus
RNLPFDRPTIM

SEQ ID NO: 2689 - protein, 11 aa, Influenza A virus
RNLPFDRSTIM

SEQ ID NO: 2690 - protein, 11 aa, Influenza A virus
RNLPFDRTTIM

SEQ ID NO: 2691 - protein, 10 aa, Influenza A virus
RNLPFDRTTV

SEQ ID NO: 2692 - protein, 11 aa, Influenza A virus
RNLPFDRTTVM

SEQ ID NO: 2693 - protein, 11 aa, Influenza A virus
RNLPFEKATIM

SEQ ID NO: 2694 - protein, 11 aa, Influenza A virus
RNLPFEKSTVM

SEQ ID NO: 2695 - protein, 11 aa, Influenza A virus
RNLPFERATIM

SEQ ID NO: 2696 - protein, 10 aa, Influenza A virus
RNLPFERATV

SEQ ID NO: 2697 - protein, 11 aa, Influenza A virus
RNLPFERATVM

SEQ ID NO: 2698 - protein, 11 aa, Influenza A virus
RNLPFERSTIM

SEQ ID NO: 2699 - protein, 11 aa, Influenza A virus
RNLPFERTTIM

SEQ ID NO: 2700 - protein, 11 aa, Influenza A virus
RNLPFERVTIM

SEQ ID NO: 2701 - protein, 11 aa, Influenza A virus
RNRYLEEHPSA

SEQ ID NO: 2702 - protein, 11 aa, Influenza A virus
RNRYLEENPSA

SEQ ID NO: 2703 - protein, 11 aa, Influenza A virus
RNRYLEGHPSA

SEQ ID NO: 2704 - protein, 9 aa, Influenza A virus
RPNATEIRA

SEQ ID NO: 2705 - protein, 10 aa, Influenza A virus
RPNATEIRAS

SEQ ID NO: 2706 - protein, 11 aa, Influenza A virus
RPNATEIRASV

SEQ ID NO: 2707 - protein, 8 aa, Influenza A virus
RPTIMAAF

SEQ ID NO: 2708 - protein, 9 aa, Influenza A virus
RPTIMAAFT

SEQ ID NO: 2709 - protein, 10 aa, Influenza A virus
RPTIMAAFTG

SEQ ID NO: 2710 - protein, 9 aa, Influenza A virus
RQANNGENA

SEQ ID NO: 2711 - protein, 8 aa, Influenza A virus
RQANNGEY

SEQ ID NO: 2712 - protein, 9 aa, Influenza A virus
RQANNGEYA

SEQ ID NO: 2713 - protein, 9 aa, Influenza A virus
RQNANDIRA

SEQ ID NO: 2714 - protein, 10 aa, Influenza A virus
RRDGKWIREL

SEQ ID NO: 2715 - protein, 11 aa, Influenza A virus
RRDGKWIRELI

SEQ ID NO: 2716 - protein, 10 aa, Influenza A virus
RRDGKWMREL

SEQ ID NO: 2717 - protein, 11 aa, Influenza A virus
RRDGKWMRELI

SEQ ID NO: 2718 - protein, 10 aa, Influenza A virus
RRDGKWVREL

SEQ ID NO: 2719 - protein, 11 aa, Influenza A virus
RRDGKWVRELI

SEQ ID NO: 2720 - protein, 11 aa, Influenza A virus
RRDGKWVRELV

SEQ ID NO: 2721 - protein, 10 aa, Influenza A virus
RREGKWVREL

SEQ ID NO: 2722 - protein, 11 aa, Influenza A virus
RREGKWVRELI

SEQ ID NO: 2723 - protein, 11 aa, Influenza A virus
RREGKWVRELV

SEQ ID NO: 2724 - protein, 8 aa, Influenza A virus
RRIDGKWI

SEQ ID NO: 2725 - protein, 9 aa, Influenza A virus
RRIDGKWIR

SEQ ID NO: 2726 - protein, 10 aa, Influenza A virus
RRIDGKWIRE

SEQ ID NO: 2727 - protein, 11 aa, Influenza A virus
RRIDGKWIREL

SEQ ID NO: 2728 - protein, 8 aa, Influenza A virus
RRIDGKWM

SEQ ID NO: 2729 - protein, 9 aa, Influenza A virus
RRIDGKWMR

SEQ ID NO: 2730 - protein, 10 aa, Influenza A virus
RRIDGKWMRE

SEQ ID NO: 2731 - protein, 11 aa, Influenza A virus
RRIDGKWMREL

SEQ ID NO: 2732 - protein, 9 aa, Influenza A virus
RRIDGKWTR

SEQ ID NO: 2733 - protein, 10 aa, Influenza A virus
RRIDGKWTRE

SEQ ID NO: 2734 - protein, 11 aa, Influenza A virus
RRIDGKWTREL

SEQ ID NO: 2735 - protein, 9 aa, Influenza A virus
RRIWRHANN

SEQ ID NO: 2736 - protein, 10 aa, Influenza A virus
RRIWRHANNG

SEQ ID NO: 2737 - protein, 9 aa, Influenza A virus
RRIWRQANN

SEQ ID NO: 2738 - protein, 10 aa, Influenza A virus
RRIWRQANNG

SEQ ID NO: 2739 - protein, 10 aa, Influenza A virus
RRIWRQRNNG

SEQ ID NO: 2740 - protein, 9 aa, Influenza A virus
RRKDGKWMR

SEQ ID NO: 2741 - protein, 11 aa, Influenza A virus
RRKDGKWMREL

SEQ ID NO: 2742 - protein, 8 aa, Influenza A virus
RRNGKWVR

SEQ ID NO: 2743 - protein, 10 aa, Influenza A virus
RRNGKWVREL

SEQ ID NO: 2744 - protein, 11 aa, Influenza A virus
RRNGKWVRELI

SEQ ID NO: 2745 - protein, 9 aa, Influenza A virus
RRNKYLEEH

SEQ ID NO: 2746 - protein, 9 aa, Influenza A virus
RRNRYLEEH

SEQ ID NO: 2747 - protein, 9 aa, Influenza A virus
RRNRYLEGH

SEQ ID NO: 2748 - protein, 9 aa, Influenza A virus
RRRDGKWIR

SEQ ID NO: 2749 - protein, 11 aa, Influenza A virus
RRRDGKWIREL

SEQ ID NO: 2750 - protein, 9 aa, Influenza A virus
RRRDGKWMR

SEQ ID NO: 2751 - protein, 11 aa, Influenza A virus
RRRDGKWMREL

SEQ ID NO: 2752 - protein, 9 aa, Influenza A virus
RRRDGKWVR

SEQ ID NO: 2753 - protein, 11 aa, Influenza A virus
RRRDGKWVREL

SEQ ID NO: 2754 - protein, 9 aa, Influenza A virus
RRREGKWVR

SEQ ID NO: 2755 - protein, 11 aa, Influenza A virus
RRREGKWVREL

SEQ ID NO: 2756 - protein, 9 aa, Influenza A virus
RRRNGKWVR

SEQ ID NO: 2757 - protein, 11 aa, Influenza A virus
RRRNGKWVREL

SEQ ID NO: 2758 - protein, 10 aa, Influenza A virus
RRSGAAGAAI

SEQ ID NO: 2759 - protein, 11 aa, Influenza A virus
RRSGAAGAAIK

SEQ ID NO: 2760 - protein, 10 aa, Influenza A virus
RRSGAAGAAV

SEQ ID NO: 2761 - protein, 11 aa, Influenza A virus
RRSGAAGAAVK

SEQ ID NO: 2762 - protein, 10 aa, Influenza A virus
RRSGAAGATV

SEQ ID NO: 2763 - protein, 11 aa, Influenza A virus
RRSGAAGATVK

SEQ ID NO: 2764 - protein, 9 aa, Influenza A virus
RRTKIAYER

SEQ ID NO: 2765 - protein, 10 aa, Influenza A virus
RRTKIAYERM

SEQ ID NO: 2766 - protein, 9 aa, Influenza A virus
RRTRIAYER

SEQ ID NO: 2767 - protein, 10 aa, Influenza A virus
RRTRIAYERM

SEQ ID NO: 2768 - protein, 11 aa, Influenza A virus
RRTRIAYERMC

SEQ ID NO: 2769 - protein, 9 aa, Influenza A virus
RRTRTAYER

SEQ ID NO: 2770 - protein, 10 aa, Influenza A virus
RRTRTAYERM

SEQ ID NO: 2771 - protein, 9 aa, Influenza A virus
RRTRVAYER

SEQ ID NO: 2772 - protein, 10 aa, Influenza A virus
RRTRVAYERM

SEQ ID NO: 2773 - protein, 11 aa, Influenza A virus
RRTRVAYERMC

SEQ ID NO: 2774 - protein, 10 aa, Influenza A virus
RRTSDMRTEI

SEQ ID NO: 2775 - protein, 10 aa, Influenza A virus
RRTWRQANNG

SEQ ID NO: 2776 - protein, 9 aa, Influenza A virus
RRVDGKWIR

SEQ ID NO: 2777 - protein, 10 aa, Influenza A virus
RRVDGKWIRE

SEQ ID NO: 2778 - protein, 11 aa, Influenza A virus
RRVDGKWIREL

SEQ ID NO: 2779 - protein, 9 aa, Influenza A virus
RRVDGKWMR

SEQ ID NO: 2780 - protein, 10 aa, Influenza A virus
RRVDGKWMRE

SEQ ID NO: 2781 - protein, 11 aa, Influenza A virus
RRVDGKWMREL

SEQ ID NO: 2782 - protein, 9 aa, Influenza A virus
RRVGGKWIR

SEQ ID NO: 2783 - protein, 10 aa, Influenza A virus
RRVGGKWIRE

SEQ ID NO: 2784 - protein, 11 aa, Influenza A virus
RRVGGKWIREL

SEQ ID NO: 2785 - protein, 8 aa, Influenza A virus
RRVNGKWM

SEQ ID NO: 2786 - protein, 9 aa, Influenza A virus
RRVNGKWMR

SEQ ID NO: 2787 - protein, 10 aa, Influenza A virus
RRVNGKWMRE

SEQ ID NO: 2788 - protein, 11 aa, Influenza A virus
RRVNGKWMREL

SEQ ID NO: 2789 - protein, 10 aa, Influenza A virus
RRVWRQANNG

SEQ ID NO: 2790 - protein, 9 aa, Influenza A virus
RSALILRGA

SEQ ID NO: 2791 - protein, 10 aa, Influenza A virus
RSALILRGAV

SEQ ID NO: 2792 - protein, 9 aa, Influenza A virus
RSALILRGS

SEQ ID NO: 2793 - protein, 10 aa, Influenza A virus
RSALILRGSV

SEQ ID NO: 2794 - protein, 11 aa, Influenza A virus
RSALILRGSVA

SEQ ID NO: 2795 - protein, 9 aa, Influenza A virus
RSALVLRGS

SEQ ID NO: 2796 - protein, 10 aa, Influenza A virus
RSALVLRGSV

SEQ ID NO: 2797 - protein, 10 aa, Influenza A virus
RSAYERMCNI

SEQ ID NO: 2798 - protein, 10 aa, Influenza A virus
RSEDVSFQGR

SEQ ID NO: 2799 - protein, 9 aa, Influenza A virus
RSGAAGAAI

SEQ ID NO: 2800 - protein, 10 aa, Influenza A virus
RSGAAGAAIK

SEQ ID NO: 2801 - protein, 9 aa, Influenza A virus
RSGAAGAAV

SEQ ID NO: 2802 - protein, 10 aa, Influenza A virus
RSGAAGAAVK

SEQ ID NO: 2803 - protein, 9 aa, Influenza A virus
RSGAAGATV

SEQ ID NO: 2804 - protein, 10 aa, Influenza A virus
RSGAAGATVK

SEQ ID NO: 2805 - protein, 10 aa, Influenza A virus
RSGGNTNQHR

SEQ ID NO: 2806 - protein, 10 aa, Influenza A virus
RSGGNTNQQR

SEQ ID NO: 2807 - protein, 10 aa, Influenza A virus
RSGGNTSQQR

SEQ ID NO: 2808 - protein, 10 aa, Influenza A virus
RSGGNTTQQR

SEQ ID NO: 2809 - protein, 8 aa, Influenza A virus
RSKYWAIR

SEQ ID NO: 2810 - protein, 9 aa, Influenza A virus
RSKYWAIRT

SEQ ID NO: 2811 - protein, 10 aa, Influenza A virus
RSKYWAIRTR

SEQ ID NO: 2812 - protein, 11 aa, Influenza A virus
RSKYWAIRTRS

SEQ ID NO: 2813 - protein, 9 aa, Influenza A virus
RSNENPAHK

SEQ ID NO: 2814 - protein, 8 aa, Influenza A virus
RSRYRAIR

SEQ ID NO: 2815 - protein, 9 aa, Influenza A virus
RSRYRAIRT

SEQ ID NO: 2816 - protein, 10 aa, Influenza A virus
RSRYRAIRTR

SEQ ID NO: 2817 - protein, 11 aa, Influenza A virus
RSRYRAIRTRS

SEQ ID NO: 2818 - protein, 8 aa, Influenza A virus
RSRYWAIK

SEQ ID NO: 2819 - protein, 9 aa, Influenza A virus
RSRYWAIKT

SEQ ID NO: 2820 - protein, 10 aa, Influenza A virus
RSRYWAIKTR

SEQ ID NO: 2821 - protein, 11 aa, Influenza A virus
RSRYWAIKTRS

SEQ ID NO: 2822 - protein, 8 aa, Influenza A virus
RSRYWAIR

SEQ ID NO: 2823 - protein, 9 aa, Influenza A virus
RSRYWAIRT

SEQ ID NO: 2824 - protein, 10 aa, Influenza A virus
RSRYWAIRTK

SEQ ID NO: 2825 - protein, 11 aa, Influenza A virus
RSRYWAIRTKS

SEQ ID NO: 2826 - protein, 10 aa, Influenza A virus
RSRYWAIRTR

SEQ ID NO: 2827 - protein, 11 aa, Influenza A virus
RSRYWAIRTRS

SEQ ID NO: 2828 - protein, 9 aa, Influenza A virus
RSSVGRMVG

SEQ ID NO: 2829 - protein, 8 aa, Influenza A virus
RSTIMAAF

SEQ ID NO: 2830 - protein, 10 aa, Influenza A virus
RSTIMAAFTG

SEQ ID NO: 2831 - protein, 9 aa, Influenza A virus
RSYEQMETG

SEQ ID NO: 2832 - protein, 10 aa, Influenza A virus
RTAYERMCNI

SEQ ID NO: 2833 - protein, 10 aa, Influenza A virus
RTEIIRIMES

SEQ ID NO: 2834 - protein, 8 aa, Influenza A virus
RTEIIRLM

SEQ ID NO: 2835 - protein, 10 aa, Influenza A virus
RTEIIRLMES

SEQ ID NO: 2836 - protein, 10 aa, Influenza A virus
RTEIIRMMEG

SEQ ID NO: 2837 - protein, 10 aa, Influenza A virus
RTEIIRMMES

SEQ ID NO: 2838 - protein, 8 aa, Influenza A virus
RTGGPIYR

SEQ ID NO: 2839 - protein, 9 aa, Influenza A virus
RTGGPIYRR

SEQ ID NO: 2840 - protein, 10 aa, Influenza A virus
RTGGPIYRRI

SEQ ID NO: 2841 - protein, 10 aa, Influenza A virus
RTGMDPRMCS

SEQ ID NO: 2842 - protein, 8 aa, Influenza A virus
RTKIAYER

SEQ ID NO: 2843 - protein, 9 aa, Influenza A virus
RTKIAYERM

SEQ ID NO: 2844 - protein, 10 aa, Influenza A virus
RTKIAYERMC

SEQ ID NO: 2845 - protein, 9 aa, Influenza A virus
RTKSGGNTN

SEQ ID NO: 2846 - protein, 10 aa, Influenza A virus
RTKSGGNTNQ

SEQ ID NO: 2847 - protein, 9 aa, Influenza A virus
RTKSGGNTS

SEQ ID NO: 2848 - protein, 10 aa, Influenza A virus
RTKSGGNTSQ

SEQ ID NO: 2849 - protein, 8 aa, Influenza A virus
RTLELRSR

SEQ ID NO: 2850 - protein, 9 aa, Influenza A virus
RTLELRSRY

SEQ ID NO: 2851 - protein, 10 aa, Influenza A virus
RTLELRSRYW

SEQ ID NO: 2852 - protein, 11 aa, Influenza A virus
RTLELRSRYWA

SEQ ID NO: 2853 - protein, 8 aa, Influenza A virus
RTRAHVRT

SEQ ID NO: 2854 - protein, 9 aa, Influenza A virus
RTRAHVRTG

SEQ ID NO: 2855 - protein, 10 aa, Influenza A virus
RTRAHVRTGM

SEQ ID NO: 2856 - protein, 11 aa, Influenza A virus
RTRAHVRTGMD

SEQ ID NO: 2857 - protein, 8 aa, Influenza A virus
RTRALVRA

SEQ ID NO: 2858 - protein, 9 aa, Influenza A virus
RTRALVRAG

SEQ ID NO: 2859 - protein, 10 aa, Influenza A virus
RTRALVRAGM

SEQ ID NO: 2860 - protein, 8 aa, Influenza A virus
RTRALVRT

SEQ ID NO: 2861 - protein, 9 aa, Influenza A virus
RTRALVRTG

SEQ ID NO: 2862 - protein, 8 aa, Influenza A virus
RTRIAYER

SEQ ID NO: 2863 - protein, 9 aa, Influenza A virus
RTRIAYERM

SEQ ID NO: 2864 - protein, 10 aa, Influenza A virus
RTRIAYERMC

SEQ ID NO: 2865 - protein, 9 aa, Influenza A virus
RTRSGGNNN

SEQ ID NO: 2866 - protein, 10 aa, Influenza A virus
RTRSGGNNNQ

SEQ ID NO: 2867 - protein, 8 aa, Influenza A virus
RTRSGGNT

SEQ ID NO: 2868 - protein, 10 aa, Influenza A virus
RTRSGGNTNK

SEQ ID NO: 2869 - protein, 11 aa, Influenza A virus
RTRSGGNTNKQ

SEQ ID NO: 2870 - protein, 10 aa, Influenza A virus
RTRSGGNTNQ

SEQ ID NO: 2871 - protein, 9 aa, Influenza A virus
RTRSGGNTS

SEQ ID NO: 2872 - protein, 10 aa, Influenza A virus
RTRSGGNTSQ

SEQ ID NO: 2873 - protein, 11 aa, Influenza A virus
RTRSGGNTSQQ

SEQ ID NO: 2874 - protein, 9 aa, Influenza A virus
RTRSGGNTT

SEQ ID NO: 2875 - protein, 10 aa, Influenza A virus
RTRSGGNTTQ

SEQ ID NO: 2876 - protein, 11 aa, Influenza A virus
RTRSGGNTTQQ

SEQ ID NO: 2877 - protein, 8 aa, Influenza A virus
RTRSGGST

SEQ ID NO: 2878 - protein, 9 aa, Influenza A virus
RTRSGGSTN

SEQ ID NO: 2879 - protein, 10 aa, Influenza A virus
RTRSGGSTNQ

SEQ ID NO: 2880 - protein, 11 aa, Influenza A virus
RTRSGGSTNQQ

SEQ ID NO: 2881 - protein, 8 aa, Influenza A virus
RTRTAYER

SEQ ID NO: 2882 - protein, 9 aa, Influenza A virus
RTRTAYERM

SEQ ID NO: 2883 - protein, 10 aa, Influenza A virus
RTRTAYERMC

SEQ ID NO: 2884 - protein, 8 aa, Influenza A virus
RTRVAYER

SEQ ID NO: 2885 - protein, 9 aa, Influenza A virus
RTRVAYERM

SEQ ID NO: 2886 - protein, 10 aa, Influenza A virus
RTRVAYERMC

SEQ ID NO: 2887 - protein, 9 aa, Influenza A virus
RTSDMRAEI

SEQ ID NO: 2888 - protein, 11 aa, Influenza A virus
RTSDMRAEIIK

SEQ ID NO: 2889 - protein, 11 aa, Influenza A virus
RTSDMRAEIIR

SEQ ID NO: 2890 - protein, 9 aa, Influenza A virus
RTSDMRIEI

SEQ ID NO: 2891 - protein, 10 aa, Influenza A virus
RTSDMRIEII

SEQ ID NO: 2892 - protein, 11 aa, Influenza A virus
RTSDMRIEIIR

SEQ ID NO: 2893 - protein, 9 aa, Influenza A virus
RTSDMRTEI

SEQ ID NO: 2894 - protein, 10 aa, Influenza A virus
RTSDMRTEII

SEQ ID NO: 2895 - protein, 11 aa, Influenza A virus
RTSDMRTEIIK

SEQ ID NO: 2896 - protein, 11 aa, Influenza A virus
RTSDMRTEIIR

SEQ ID NO: 2897 - protein, 9 aa, Influenza A virus
RTSDMRTEV

SEQ ID NO: 2898 - protein, 10 aa, Influenza A virus
RTSDMRTEVI

SEQ ID NO: 2899 - protein, 11 aa, Influenza A virus
RTSDMRTEVIR

SEQ ID NO: 2900 - protein, 8 aa, Influenza A virus
RTTIMAAF

SEQ ID NO: 2901 - protein, 9 aa, Influenza A virus
RTTIMAAFT

SEQ ID NO: 2902 - protein, 10 aa, Influenza A virus
RTTIMAAFTG

SEQ ID NO: 2903 - protein, 8 aa, Influenza A virus
RTTVMAAF

SEQ ID NO: 2904 - protein, 9 aa, Influenza A virus
RTTVMAAFS

SEQ ID NO: 2905 - protein, 9 aa, Influenza A virus
RTTVMAAFT

SEQ ID NO: 2906 - protein, 10 aa, Influenza A virus
RTTVMAAFTG

SEQ ID NO: 2907 - protein, 9 aa, Influenza A virus
RTWRQANNG

SEQ ID NO: 2908 - protein, 10 aa, Influenza A virus
RTWRQANNGE

SEQ ID NO: 2909 - protein, 8 aa, Influenza A virus
RVAPRGQL

SEQ ID NO: 2910 - protein, 9 aa, Influenza A virus
RVAPRGQLS

SEQ ID NO: 2911 - protein, 11 aa, Influenza A virus
RVAPRGQLSTR

SEQ ID NO: 2912 - protein, 10 aa, Influenza A virus
RVAYERMCNI

SEQ ID NO: 2913 - protein, 8 aa, Influenza A virus
RVDGKWIR

SEQ ID NO: 2914 - protein, 8 aa, Influenza A virus
RVDGKWMR

SEQ ID NO: 2915 - protein, 9 aa, Influenza A virus
RVDGKWMRK

SEQ ID NO: 2916 - protein, 8 aa, Influenza A virus
RVDGKWVR

SEQ ID NO: 2917 - protein, 8 aa, Influenza A virus
RVDGRWMR

SEQ ID NO: 2918 - protein, 11 aa, Influenza A virus
RVDGRWMRELV

SEQ ID NO: 2919 - protein, 8 aa, Influenza A virus
RVDRKWMR

SEQ ID NO: 2920 - protein, 10 aa, Influenza A virus
RVDRKWMREL

SEQ ID NO: 2921 - protein, 8 aa, Influenza A virus
RVGGKWIR

SEQ ID NO: 2922 - protein, 8 aa, Influenza A virus
RVGGKWMR

SEQ ID NO: 2923 - protein, 8 aa, Influenza A virus
RVGGRWMR

SEQ ID NO: 2924 - protein, 11 aa, Influenza A virus
RVGGRWMRELV

SEQ ID NO: 2925 - protein, 9 aa, Influenza A virus
RVIPRGQLS

SEQ ID NO: 2926 - protein, 11 aa, Influenza A virus
RVIPRGQLSTR

SEQ ID NO: 2927 - protein, 9 aa, Influenza A virus
RVLNFIRGT

SEQ ID NO: 2928 - protein, 10 aa, Influenza A virus
RVLNFIRGTK

SEQ ID NO: 2929 - protein, 11 aa, Influenza A virus
RVLNFIRGTKV

SEQ ID NO: 2930 - protein, 9 aa, Influenza A virus
RVLPRGKLS

SEQ ID NO: 2931 - protein, 11 aa, Influenza A virus
RVLPRGKLSTR

SEQ ID NO: 2932 - protein, 9 aa, Influenza A virus
RVLPRGQLS

SEQ ID NO: 2933 - protein, 11 aa, Influenza A virus
RVLPRGQLSTR

SEQ ID NO: 2934 - protein, 10 aa, Influenza A virus
RVLSFIKGTK

SEQ ID NO: 2935 - protein, 11 aa, Influenza A virus
RVLSFIKGTKV

SEQ ID NO: 2936 - protein, 9 aa, Influenza A virus
RVLSFIRGT

SEQ ID NO: 2937 - protein, 10 aa, Influenza A virus
RVLSFIRGTK

SEQ ID NO: 2938 - protein, 11 aa, Influenza A virus
RVLSFIRGTKV

SEQ ID NO: 2939 - protein, 10 aa, Influenza A virus
RVLSFIRGTR

SEQ ID NO: 2940 - protein, 11 aa, Influenza A virus
RVLSFIRGTRV

SEQ ID NO: 2941 - protein, 11 aa, Influenza A virus
RVMESAKPEEV

SEQ ID NO: 2942 - protein, 8 aa, Influenza A virus
RVNGKWMR

SEQ ID NO: 2943 - protein, 9 aa, Influenza A virus
RVNGKWMRE

SEQ ID NO: 2944 - protein, 10 aa, Influenza A virus
RVNGKWMREL

SEQ ID NO: 2945 - protein, 11 aa, Influenza A virus
RVNGKWMRELI

SEQ ID NO: 2946 - protein, 11 aa, Influenza A virus
RVNGKWMRELV

SEQ ID NO: 2947 - protein, 9 aa, Influenza A virus
RVSGFIRGK

SEQ ID NO: 2948 - protein, 10 aa, Influenza A virus
RVSGFIRGKK

SEQ ID NO: 2949 - protein, 10 aa, Influenza A virus
RVSGFIRGKR

SEQ ID NO: 2950 - protein, 11 aa, Influenza A virus
RVSGFIRGKRV

SEQ ID NO: 2951 - protein, 9 aa, Influenza A virus
RVSNFIRGT

SEQ ID NO: 2952 - protein, 10 aa, Influenza A virus
RVSNFIRGTK

SEQ ID NO: 2953 - protein, 11 aa, Influenza A virus
RVSNFIRGTKV

SEQ ID NO: 2954 - protein, 10 aa, Influenza A virus
RVSNFIRGTR

SEQ ID NO: 2955 - protein, 11 aa, Influenza A virus
RVSNFIRGTRV

SEQ ID NO: 2956 - protein, 9 aa, Influenza A virus
RVSSFIRGA

SEQ ID NO: 2957 - protein, 10 aa, Influenza A virus
RVSSFIRGAK

SEQ ID NO: 2958 - protein, 11 aa, Influenza A virus
RVSSFIRGAKV

SEQ ID NO: 2959 - protein, 10 aa, Influenza A virus
RVSSFIRGAR

SEQ ID NO: 2960 - protein, 11 aa, Influenza A virus
RVSSFIRGARV

SEQ ID NO: 2961 - protein, 9 aa, Influenza A virus
RVSSFIRGK

SEQ ID NO: 2962 - protein, 10 aa, Influenza A virus
RVSSFIRGKK

SEQ ID NO: 2963 - protein, 10 aa, Influenza A virus
RVSSFIRGKR

SEQ ID NO: 2964 - protein, 11 aa, Influenza A virus
RVSSFIRGKRV

SEQ ID NO: 2965 - protein, 9 aa, Influenza A virus
RVSSFIRGT

SEQ ID NO: 2966 - protein, 10 aa, Influenza A virus
RVSSFIRGTK

SEQ ID NO: 2967 - protein, 11 aa, Influenza A virus
RVSSFIRGTKV

SEQ ID NO: 2968 - protein, 10 aa, Influenza A virus
RVSSFIRGTR

SEQ ID NO: 2969 - protein, 11 aa, Influenza A virus
RVSSFIRGTRI

SEQ ID NO: 2970 - protein, 11 aa, Influenza A virus
RVSSFIRGTRL

SEQ ID NO: 2971 - protein, 11 aa, Influenza A virus
RVSSFIRGTRM

SEQ ID NO: 2972 - protein, 11 aa, Influenza A virus
RVSSFIRGTRV

SEQ ID NO: 2973 - protein, 8 aa, Influenza A virus
RVTIMAAF

SEQ ID NO: 2974 - protein, 9 aa, Influenza A virus
RVTIMAAFK

SEQ ID NO: 2975 - protein, 9 aa, Influenza A virus
RVVPRGKLS

SEQ ID NO: 2976 - protein, 11 aa, Influenza A virus
RVVPRGKLSTR

SEQ ID NO: 2977 - protein, 9 aa, Influenza A virus
RVVPRGQLS

SEQ ID NO: 2978 - protein, 11 aa, Influenza A virus
RVVPRGQLSTR

SEQ ID NO: 2979 - protein, 9 aa, Influenza A virus
RVVPRGQMS

SEQ ID NO: 2980 - protein, 11 aa, Influenza A virus
RVVPRGQMSTR

SEQ ID NO: 2981 - protein, 8 aa, Influenza A virus
RWMRELVL

SEQ ID NO: 2982 - protein, 9 aa, Influenza A virus
RWMRELVLY

SEQ ID NO: 2983 - protein, 11 aa, Influenza A virus
RWMRELVLYDK

SEQ ID NO: 2984 - protein, 9 aa, Influenza A virus
RYLEEHPSA

SEQ ID NO: 2985 - protein, 11 aa, Influenza A virus
RYLEEHPSAGK

SEQ ID NO: 2986 - protein, 11 aa, Influenza A virus
RYLEEHPSAGR

SEQ ID NO: 2987 - protein, 11 aa, Influenza A virus
RYLEENPSAGK

SEQ ID NO: 2988 - protein, 9 aa, Influenza A virus
RYLEGHPSA

SEQ ID NO: 2989 - protein, 11 aa, Influenza A virus
RYLEGHPSAGK

SEQ ID NO: 2990 - protein, 8 aa, Influenza A virus
RYRAIRTR

SEQ ID NO: 2991 - protein, 9 aa, Influenza A virus
RYRAIRTRS

SEQ ID NO: 2992 - protein, 10 aa, Influenza A virus
RYRAIRTRSG

SEQ ID NO: 2993 - protein, 8 aa, Influenza A virus
RYWAIKTR

SEQ ID NO: 2994 - protein, 10 aa, Influenza A virus
RYWAIKTRSG

SEQ ID NO: 2995 - protein, 8 aa, Influenza A virus
RYWAIRTK

SEQ ID NO: 2996 - protein, 9 aa, Influenza A virus
RYWAIRTKS

SEQ ID NO: 2997 - protein, 10 aa, Influenza A virus
RYWAIRTKSG

SEQ ID NO: 2998 - protein, 8 aa, Influenza A virus
RYWAIRTR

SEQ ID NO: 2999 - protein, 9 aa, Influenza A virus
RYWAIRTRS

SEQ ID NO: 3000 - protein, 10 aa, Influenza A virus
RYWAIRTRSG

SEQ ID NO: 3001 - protein, 9 aa, Influenza A virus
SAAFEDLRL

SEQ ID NO: 3002 - protein, 10 aa, Influenza A virus
SAAFEDLRLF

SEQ ID NO: 3003 - protein, 10 aa, Influenza A virus
SAAFEDLRVL

SEQ ID NO: 3004 - protein, 11 aa, Influenza A virus
SADQISVQPTF

SEQ ID NO: 3005 - protein, 9 aa, Influenza A virus
SAFDERRNK

SEQ ID NO: 3006 - protein, 10 aa, Influenza A virus
SAFDERRNKY

SEQ ID NO: 3007 - protein, 9 aa, Influenza A virus
SAFDERRNR

SEQ ID NO: 3008 - protein, 10 aa, Influenza A virus
SAFDERRNRY

SEQ ID NO: 3009 - protein, 11 aa, Influenza A virus
SAFDERRNRYL

SEQ ID NO: 3010 - protein, 9 aa, Influenza A virus
SAFEERRNK

SEQ ID NO: 3011 - protein, 10 aa, Influenza A virus
SAFEERRNKY

SEQ ID NO: 3012 - protein, 11 aa, Influenza A virus
SAGHISVQPTF

SEQ ID NO: 3013 - protein, 11 aa, Influenza A virus
SAGQISIQPTF

SEQ ID NO: 3014 - protein, 11 aa, Influenza A virus
SAGQISTQPTF

SEQ ID NO: 3015 - protein, 11 aa, Influenza A virus
SAGQISVQPAF

SEQ ID NO: 3016 - protein, 11 aa, Influenza A virus
SAGQISVQPTF

SEQ ID NO: 3017 - protein, 11 aa, Influenza A virus
SAGQVSVQPSF

SEQ ID NO: 3018 - protein, 11 aa, Influenza A virus
SAGQVSVQPTF

SEQ ID NO: 3019 - protein, 9 aa, Influenza A virus
SAHKSQLVW

SEQ ID NO: 3020 - protein, 10 aa, Influenza A virus
SAHKSQLVWM

SEQ ID NO: 3021 - protein, 9 aa, Influenza A virus
SAKPEDLSF

SEQ ID NO: 3022 - protein, 9 aa, Influenza A virus
SAKPEDVSF

SEQ ID NO: 3023 - protein, 9 aa, Influenza A virus
SAKPEEVSF

SEQ ID NO: 3024 - protein, 9 aa, Influenza A virus
SALILRGAV

SEQ ID NO: 3025 - protein, 10 aa, Influenza A virus
SALILRGAVA

SEQ ID NO: 3026 - protein, 9 aa, Influenza A virus
SALILRGSV

SEQ ID NO: 3027 - protein, 10 aa, Influenza A virus
SALILRGSVA

SEQ ID NO: 3028 - protein, 9 aa, Influenza A virus
SALVLRGSV

SEQ ID NO: 3029 - protein, 10 aa, Influenza A virus
SALVLRGSVA

SEQ ID NO: 3030 - protein, 9 aa, Influenza A virus
SARPEDASF

SEQ ID NO: 3031 - protein, 9 aa, Influenza A virus
SARPEDLSF

SEQ ID NO: 3032 - protein, 9 aa, Influenza A virus
SARPEDVSF

SEQ ID NO: 3033 - protein, 9 aa, Influenza A virus
SARPEEVSF

SEQ ID NO: 3034 - protein, 8 aa, Influenza A virus
SARSALIL

SEQ ID NO: 3035 - protein, 9 aa, Influenza A virus
SARSALILR

SEQ ID NO: 3036 - protein, 10 aa, Influenza A virus
SARSALILRG

SEQ ID NO: 3037 - protein, 9 aa, Influenza A virus
SARSEDVSF

SEQ ID NO: 3038 - protein, 9 aa, Influenza A virus
SAYERMCNI

SEQ ID NO: 3039 - protein, 10 aa, Influenza A virus
SAYERMCNIL

SEQ ID NO: 3040 - protein, 11 aa, Influenza A virus
SAYERMCNILK

SEQ ID NO: 3041 - protein, 10 aa, Influenza A virus
SCLPACVHGL

SEQ ID NO: 3042 - protein, 10 aa, Influenza A virus
SCLPACVNGL

SEQ ID NO: 3043 - protein, 10 aa, Influenza A virus
SCLPACVYGL

SEQ ID NO: 3044 - protein, 11 aa, Influenza A virus
SCLPACVYGPA

SEQ ID NO: 3045 - protein, 10 aa, Influenza A virus
SCLPTCVYGL

SEQ ID NO: 3046 - protein, 10 aa, Influenza A virus
SCTLELRSRY

SEQ ID NO: 3047 - protein, 11 aa, Influenza A virus
SCTLELRSRYW

SEQ ID NO: 3048 - protein, 9 aa, Influenza A virus
SDEKAASPI

SEQ ID NO: 3049 - protein, 10 aa, Influenza A virus
SDEKAASPIV

SEQ ID NO: 3050 - protein, 9 aa, Influenza A virus
SDEKATNPI

SEQ ID NO: 3051 - protein, 9 aa, Influenza A virus
SDEKATSPI

SEQ ID NO: 3052 - protein, 10 aa, Influenza A virus
SDENATNPIV

SEQ ID NO: 3053 - protein, 10 aa, Influenza A virus
SDMRAEIIKM

SEQ ID NO: 3054 - protein, 10 aa, Influenza A virus
SDMRAEIIRL

SEQ ID NO: 3055 - protein, 11 aa, Influenza A virus
SDMRAEIIRLM

SEQ ID NO: 3056 - protein, 10 aa, Influenza A virus
SDMRAEIIRM

SEQ ID NO: 3057 - protein, 10 aa, Influenza A virus
SDMRAEIIRV

SEQ ID NO: 3058 - protein, 8 aa, Influenza A virus
SDMRIEII

SEQ ID NO: 3059 - protein, 11 aa, Influenza A virus
SDMRIEIIRMM

SEQ ID NO: 3060 - protein, 10 aa, Influenza A virus
SDMRTEIIRI

SEQ ID NO: 3061 - protein, 10 aa, Influenza A virus
SDMRTEIIRL

SEQ ID NO: 3062 - protein, 11 aa, Influenza A virus
SDMRTEIIRLM

SEQ ID NO: 3063 - protein, 10 aa, Influenza A virus
SFDMNNEGSY

SEQ ID NO: 3064 - protein, 11 aa, Influenza A virus
SFDMNNEGSYF

SEQ ID NO: 3065 - protein, 10 aa, Influenza A virus
SFDMSKEGSY

SEQ ID NO: 3066 - protein, 11 aa, Influenza A virus
SFDMSKEGSYF

SEQ ID NO: 3067 - protein, 10 aa, Influenza A virus
SFDMSNEGSY

SEQ ID NO: 3068 - protein, 11 aa, Influenza A virus
SFDMSNEGSYF

SEQ ID NO: 3069 - protein, 9 aa, Influenza A virus
SFIKGTKVL

SEQ ID NO: 3070 - protein, 11 aa, Influenza A virus
SFIKGTKVLPR

SEQ ID NO: 3071 - protein, 9 aa, Influenza A virus
SFIKGTKVV

SEQ ID NO: 3072 - protein, 11 aa, Influenza A virus
SFIKGTKVVPR

SEQ ID NO: 3073 - protein, 9 aa, Influenza A virus
SFIRGAKVV

SEQ ID NO: 3074 - protein, 11 aa, Influenza A virus
SFIRGAKVVPR

SEQ ID NO: 3075 - protein, 9 aa, Influenza A virus
SFIRGARVL

SEQ ID NO: 3076 - protein, 10 aa, Influenza A virus
SFIRGARVLP

SEQ ID NO: 3077 - protein, 11 aa, Influenza A virus
SFIRGARVLPR

SEQ ID NO: 3078 - protein, 9 aa, Influenza A virus
SFIRGARVV

SEQ ID NO: 3079 - protein, 11 aa, Influenza A virus
SFIRGARVVPR

SEQ ID NO: 3080 - protein, 9 aa, Influenza A virus
SFIRGKKVV

SEQ ID NO: 3081 - protein, 11 aa, Influenza A virus
SFIRGKKVVPR

SEQ ID NO: 3082 - protein, 9 aa, Influenza A virus
SFIRGKRVV

SEQ ID NO: 3083 - protein, 11 aa, Influenza A virus
SFIRGKRVVPR

SEQ ID NO: 3084 - protein, 11 aa, Influenza A virus
SFIRGTKVCPR

SEQ ID NO: 3085 - protein, 9 aa, Influenza A virus
SFIRGTKVF

SEQ ID NO: 3086 - protein, 11 aa, Influenza A virus
SFIRGTKVFPR

SEQ ID NO: 3087 - protein, 9 aa, Influenza A virus
SFIRGTKVI

SEQ ID NO: 3088 - protein, 11 aa, Influenza A virus
SFIRGTKVIPR

SEQ ID NO: 3089 - protein, 11 aa, Influenza A virus
SFIRGTKVSPR

SEQ ID NO: 3090 - protein, 9 aa, Influenza A virus
SFIRGTKVV

SEQ ID NO: 3091 - protein, 11 aa, Influenza A virus
SFIRGTKVVPR

SEQ ID NO: 3092 - protein, 9 aa, Influenza A virus
SFIRGTRIV

SEQ ID NO: 3093 - protein, 11 aa, Influenza A virus
SFIRGTRIVPR

SEQ ID NO: 3094 - protein, 8 aa, Influenza A virus
SFIRGTRL

SEQ ID NO: 3095 - protein, 9 aa, Influenza A virus
SFIRGTRLV

SEQ ID NO: 3096 - protein, 11 aa, Influenza A virus
SFIRGTRLVPR

SEQ ID NO: 3097 - protein, 8 aa, Influenza A virus
SFIRGTRM

SEQ ID NO: 3098 - protein, 9 aa, Influenza A virus
SFIRGTRMV

SEQ ID NO: 3099 - protein, 11 aa, Influenza A virus
SFIRGTRMVPR

SEQ ID NO: 3100 - protein, 9 aa, Influenza A virus
SFIRGTRVA

SEQ ID NO: 3101 - protein, 11 aa, Influenza A virus
SFIRGTRVAPR

SEQ ID NO: 3102 - protein, 9 aa, Influenza A virus
SFIRGTRVI

SEQ ID NO: 3103 - protein, 11 aa, Influenza A virus
SFIRGTRVIPR

SEQ ID NO: 3104 - protein, 9 aa, Influenza A virus
SFIRGTRVL

SEQ ID NO: 3105 - protein, 11 aa, Influenza A virus
SFIRGTRVLPR

SEQ ID NO: 3106 - protein, 9 aa, Influenza A virus
SFIRGTRVV

SEQ ID NO: 3107 - protein, 11 aa, Influenza A virus
SFIRGTRVVPR

SEQ ID NO: 3108 - protein, 8 aa, Influenza A virus
SFQGRGVF

SEQ ID NO: 3109 - protein, 10 aa, Influenza A virus
SFQGRGVFEF

SEQ ID NO: 3110 - protein, 10 aa, Influenza A virus
SFQGRGVFEL

SEQ ID NO: 3111 - protein, 8 aa, Influenza A virus
SFRGRGVF

SEQ ID NO: 3112 - protein, 9 aa, Influenza A virus
SFRGRGVFE

SEQ ID NO: 3113 - protein, 10 aa, Influenza A virus
SFRGRGVFEL

SEQ ID NO: 3114 - protein, 10 aa, Influenza A virus
SFRMLQNSQV

SEQ ID NO: 3115 - protein, 11 aa, Influenza A virus
SFRMLQNSQVF

SEQ ID NO: 3116 - protein, 8 aa, Influenza A virus
SFSVQRNL

SEQ ID NO: 3117 - protein, 10 aa, Influenza A virus
SFSVQRNLPF

SEQ ID NO: 3118 - protein, 9 aa, Influenza A virus
SGAAGAAIK

SEQ ID NO: 3119 - protein, 10 aa, Influenza A virus
SGQISIQPTF

SEQ ID NO: 3120 - protein, 10 aa, Influenza A virus
SGYAFEKEGY

SEQ ID NO: 3121 - protein, 10 aa, Influenza A virus
SGYDFEREGY

SEQ ID NO: 3122 - protein, 10 aa, Influenza A virus
SGYEFEREGY

SEQ ID NO: 3123 - protein, 10 aa, Influenza A virus
SGYNFEKEGY

SEQ ID NO: 3124 - protein, 10 aa, Influenza A virus
SIQPTFSVQR

SEQ ID NO: 3125 - protein, 9 aa, Influenza A virus
SITLELRSK

SEQ ID NO: 3126 - protein, 10 aa, Influenza A virus
SITLELRSKY

SEQ ID NO: 3127 - protein, 11 aa, Influenza A virus
SITLELRSKYW

SEQ ID NO: 3128 - protein, 9 aa, Influenza A virus
SITMERMVL

SEQ ID NO: 3129 - protein, 9 aa, Influenza A virus
SIVSSTLEL

SEQ ID NO: 3130 - protein, 10 aa, Influenza A virus
SIVSSTLELR

SEQ ID NO: 3131 - protein, 10 aa, Influenza A virus
SLDMSNEGSY

SEQ ID NO: 3132 - protein, 11 aa, Influenza A virus
SLDMSNEGSYF

SEQ ID NO: 3133 - protein, 8 aa, Influenza A virus
SLIGIDPF

SEQ ID NO: 3134 - protein, 9 aa, Influenza A virus
SLIGIDPFK

SEQ ID NO: 3135 - protein, 10 aa, Influenza A virus
SLIGIDPFKL

SEQ ID NO: 3136 - protein, 11 aa, Influenza A virus
SLIGIDPFKLL

SEQ ID NO: 3137 - protein, 10 aa, Influenza A virus
SLIRPKENPA

SEQ ID NO: 3138 - protein, 10 aa, Influenza A virus
SLIRPNENPA

SEQ ID NO: 3139 - protein, 10 aa, Influenza A virus
SLIRPNENPV

SEQ ID NO: 3140 - protein, 10 aa, Influenza A virus
SLIRPNENSA

SEQ ID NO: 3141 - protein, 10 aa, Influenza A virus
SLIRSNENPA

SEQ ID NO: 3142 - protein, 10 aa, Influenza A virus
SLMQGSTLPR

SEQ ID NO: 3143 - protein, 11 aa, Influenza A virus
SLMQGSTLPRR

SEQ ID NO: 3144 - protein, 9 aa, Influenza A virus
SLTIERMVL

SEQ ID NO: 3145 - protein, 10 aa, Influenza A virus
SLTIERMVLS

SEQ ID NO: 3146 - protein, 9 aa, Influenza A virus
SLTVERMVL

SEQ ID NO: 3147 - protein, 10 aa, Influenza A virus
SLTVERMVLS

SEQ ID NO: 3148 - protein, 8 aa, Influenza A virus
SLVGIDPF

SEQ ID NO: 3149 - protein, 9 aa, Influenza A virus
SLVGIDPFK

SEQ ID NO: 3150 - protein, 10 aa, Influenza A virus
SLVGIDPFKL

SEQ ID NO: 3151 - protein, 11 aa, Influenza A virus
SLVGIDPFKLL

SEQ ID NO: 3152 - protein, 9 aa, Influenza A virus
SLVGIDPFR

SEQ ID NO: 3153 - protein, 10 aa, Influenza A virus
SLVGIDPFRL

SEQ ID NO: 3154 - protein, 11 aa, Influenza A virus
SLVGIDPFRLL

SEQ ID NO: 3155 - protein, 9 aa, Influenza A virus
SLVGIDSFR

SEQ ID NO: 3156 - protein, 10 aa, Influenza A virus
SLVGIDSFRM

SEQ ID NO: 3157 - protein, 11 aa, Influenza A virus
SLVGIDSFRML

SEQ ID NO: 3158 - protein, 8 aa, Influenza A virus
SLVGIEPF

SEQ ID NO: 3159 - protein, 9 aa, Influenza A virus
SLVGIEPFK

SEQ ID NO: 3160 - protein, 10 aa, Influenza A virus
SLVGIEPFKL

SEQ ID NO: 3161 - protein, 11 aa, Influenza A virus
SLVGIEPFKLL

SEQ ID NO: 3162 - protein, 8 aa, Influenza A virus
SLVGVDPF

SEQ ID NO: 3163 - protein, 9 aa, Influenza A virus
SLVGVDPFK

SEQ ID NO: 3164 - protein, 10 aa, Influenza A virus
SLVGVDPFKL

SEQ ID NO: 3165 - protein, 11 aa, Influenza A virus
SLVGVDPFKLL

SEQ ID NO: 3166 - protein, 10 aa, Influenza A virus
SLVRPNENPA

SEQ ID NO: 3167 - protein, 9 aa, Influenza A virus
SMTIERMVL

SEQ ID NO: 3168 - protein, 10 aa, Influenza A virus
SMTIERMVLS

SEQ ID NO: 3169 - protein, 10 aa, Influenza A virus
SNLNDATYQR

SEQ ID NO: 3170 - protein, 10 aa, Influenza A virus
SNLNDSTYQR

SEQ ID NO: 3171 - protein, 10 aa, Influenza A virus
SNLNDTTYQR

SEQ ID NO: 3172 - protein, 10 aa, Influenza A virus
SNTLELRSKY

SEQ ID NO: 3173 - protein, 10 aa, Influenza A virus
SNTLELRSRY

SEQ ID NO: 3174 - protein, 9 aa, Influenza A virus
SPAFEDLRV

SEQ ID NO: 3175 - protein, 9 aa, Influenza A virus
SPIVPSFDM

SEQ ID NO: 3176 - protein, 9 aa, Influenza A virus
SPIVPSLDM

SEQ ID NO: 3177 - protein, 8 aa, Influenza A virus
SPRGKLST

SEQ ID NO: 3178 - protein, 9 aa, Influenza A virus
SPRGKLSTR

SEQ ID NO: 3179 - protein, 10 aa, Influenza A virus
SPRGKLSTRG

SEQ ID NO: 3180 - protein, 11 aa, Influenza A virus
SPRGKLSTRGV

SEQ ID NO: 3181 - protein, 8 aa, Influenza A virus
SQGTKRPY

SEQ ID NO: 3182 - protein, 8 aa, Influenza A virus
SQGTKRSY

SEQ ID NO: 3183 - protein, 8 aa, Influenza A virus
SQGTTRSY

SEQ ID NO: 3184 - protein, 8 aa, Influenza A virus
SQIFSLIR

SEQ ID NO: 3185 - protein, 10 aa, Influenza A virus
SQIFSLIRPK

SEQ ID NO: 3186 - protein, 9 aa, Influenza A virus
SQLAWMACH

SEQ ID NO: 3187 - protein, 11 aa, Influenza A virus
SQLAWMACHSA

SEQ ID NO: 3188 - protein, 9 aa, Influenza A virus
SQLVWMACH

SEQ ID NO: 3189 - protein, 11 aa, Influenza A virus
SQLVWMACHSA

SEQ ID NO: 3190 - protein, 11 aa, Influenza A virus
SQLVWMACNSA

SEQ ID NO: 3191 - protein, 9 aa, Influenza A virus
SQRAMMDQV

SEQ ID NO: 3192 - protein, 10 aa, Influenza A virus
SQRAMMDQVR

SEQ ID NO: 3193 - protein, 10 aa, Influenza A virus
SQVFSLIRPK

SEQ ID NO: 3194 - protein, 9 aa, Influenza A virus
SRNPGNAEF

SEQ ID NO: 3195 - protein, 9 aa, Influenza A virus
SRNPGNAEI

SEQ ID NO: 3196 - protein, 9 aa, Influenza A virus
SRNPGNAEV

SEQ ID NO: 3197 - protein, 9 aa, Influenza A virus
SRNPGNAEY

SEQ ID NO: 3198 - protein, 9 aa, Influenza A virus
SRSPGNAEI

SEQ ID NO: 3199 - protein, 10 aa, Influenza A virus
SRTLELRSRY

SEQ ID NO: 3200 - protein, 11 aa, Influenza A virus
SRTLELRSRYW

SEQ ID NO: 3201 - protein, 9 aa, Influenza A virus
SRYRAIRTR

SEQ ID NO: 3202 - protein, 10 aa, Influenza A virus
SRYRAIRTRS

SEQ ID NO: 3203 - protein, 9 aa, Influenza A virus
SRYWAIKTR

SEQ ID NO: 3204 - protein, 10 aa, Influenza A virus
SRYWAIKTRS

SEQ ID NO: 3205 - protein, 9 aa, Influenza A virus
SRYWAIRTK

SEQ ID NO: 3206 - protein, 10 aa, Influenza A virus
SRYWAIRTKS

SEQ ID NO: 3207 - protein, 9 aa, Influenza A virus
SRYWAIRTR

SEQ ID NO: 3208 - protein, 10 aa, Influenza A virus
SRYWAIRTRS

SEQ ID NO: 3209 - protein, 8 aa, Influenza A virus
SSFIRGAK

SEQ ID NO: 3210 - protein, 9 aa, Influenza A virus
SSFIRGAKV

SEQ ID NO: 3211 - protein, 8 aa, Influenza A virus
SSFIRGAR

SEQ ID NO: 3212 - protein, 9 aa, Influenza A virus
SSFIRGARV

SEQ ID NO: 3213 - protein, 10 aa, Influenza A virus
SSFIRGARVL

SEQ ID NO: 3214 - protein, 10 aa, Influenza A virus
SSFIRGARVV

SEQ ID NO: 3215 - protein, 9 aa, Influenza A virus
SSFIRGKKV

SEQ ID NO: 3216 - protein, 9 aa, Influenza A virus
SSFIRGKRV

SEQ ID NO: 3217 - protein, 8 aa, Influenza A virus
SSFIRGTK

SEQ ID NO: 3218 - protein, 9 aa, Influenza A virus
SSFIRGTKV

SEQ ID NO: 3219 - protein, 10 aa, Influenza A virus
SSFIRGTKVI

SEQ ID NO: 3220 - protein, 8 aa, Influenza A virus
SSFIRGTR

SEQ ID NO: 3221 - protein, 9 aa, Influenza A virus
SSFIRGTRI

SEQ ID NO: 3222 - protein, 10 aa, Influenza A virus
SSFIRGTRIV

SEQ ID NO: 3223 - protein, 9 aa, Influenza A virus
SSFIRGTRL

SEQ ID NO: 3224 - protein, 10 aa, Influenza A virus
SSFIRGTRLV

SEQ ID NO: 3225 - protein, 9 aa, Influenza A virus
SSFIRGTRM

SEQ ID NO: 3226 - protein, 10 aa, Influenza A virus
SSFIRGTRMV

SEQ ID NO: 3227 - protein, 9 aa, Influenza A virus
SSFIRGTRV

SEQ ID NO: 3228 - protein, 10 aa, Influenza A virus
SSFIRGTRVA

SEQ ID NO: 3229 - protein, 10 aa, Influenza A virus
SSFIRGTRVI

SEQ ID NO: 3230 - protein, 10 aa, Influenza A virus
SSFIRGTRVL

SEQ ID NO: 3231 - protein, 10 aa, Influenza A virus
SSFIRGTRVV

SEQ ID NO: 3232 - protein, 11 aa, Influenza A virus
SSGQISIQPTF

SEQ ID NO: 3233 - protein, 9 aa, Influenza A virus
SSRPEDVSF

SEQ ID NO: 3234 - protein, 10 aa, Influenza A virus
SSSTLELRSK

SEQ ID NO: 3235 - protein, 11 aa, Influenza A virus
SSSTLELRSKY

SEQ ID NO: 3236 - protein, 9 aa, Influenza A virus
SSTLELRSK

SEQ ID NO: 3237 - protein, 10 aa, Influenza A virus
SSTLELRSKY

SEQ ID NO: 3238 - protein, 11 aa, Influenza A virus
SSTLELRSKYW

SEQ ID NO: 3239 - protein, 9 aa, Influenza A virus
SSTLELRSR

SEQ ID NO: 3240 - protein, 10 aa, Influenza A virus
SSTLELRSRY

SEQ ID NO: 3241 - protein, 11 aa, Influenza A virus
SSTLELRSRYR

SEQ ID NO: 3242 - protein, 11 aa, Influenza A virus
SSTLELRSRYW

SEQ ID NO: 3243 - protein, 10 aa, Influenza A virus
SSVGRMVGGI

SEQ ID NO: 3244 - protein, 9 aa, Influenza A virus
STLELRSKY

SEQ ID NO: 3245 - protein, 10 aa, Influenza A virus
STLELRSKYW

SEQ ID NO: 3246 - protein, 8 aa, Influenza A virus
STLELRSR

SEQ ID NO: 3247 - protein, 9 aa, Influenza A virus
STLELRSRY

SEQ ID NO: 3248 - protein, 10 aa, Influenza A virus
STLELRSRYR

SEQ ID NO: 3249 - protein, 11 aa, Influenza A virus
STLELRSRYRA

SEQ ID NO: 3250 - protein, 10 aa, Influenza A virus
STLELRSRYW

SEQ ID NO: 3251 - protein, 9 aa, Influenza A virus
STLPRRSGA

SEQ ID NO: 3252 - protein, 10 aa, Influenza A virus
STLPRRSGAA

SEQ ID NO: 3253 - protein, 11 aa, Influenza A virus
STLPRRSGAAG

SEQ ID NO: 3254 - protein, 9 aa, Influenza A virus
STNQQKSSA

SEQ ID NO: 3255 - protein, 10 aa, Influenza A virus
STQPTFSVQR

SEQ ID NO: 3256 - protein, 8 aa, Influenza A virus
STRGFQIA

SEQ ID NO: 3257 - protein, 9 aa, Influenza A virus
STRGFQIAS

SEQ ID NO: 3258 - protein, 10 aa, Influenza A virus
STRGFQIASN

SEQ ID NO: 3259 - protein, 8 aa, Influenza A virus
STRGIQIA

SEQ ID NO: 3260 - protein, 9 aa, Influenza A virus
STRGIQIAS

SEQ ID NO: 3261 - protein, 9 aa, Influenza A virus
STTLELRSR

SEQ ID NO: 3262 - protein, 10 aa, Influenza A virus
STTLELRSRY

SEQ ID NO: 3263 - protein, 11 aa, Influenza A virus
STTLELRSRYW

SEQ ID NO: 3264 - protein, 9 aa, Influenza A virus
STYQRTRAL

SEQ ID NO: 3265 - protein, 10 aa, Influenza A virus
STYQRTRALV

SEQ ID NO: 3266 - protein, 11 aa, Influenza A virus
STYQRTRALVR

SEQ ID NO: 3267 - protein, 10 aa, Influenza A virus
SVAHKSCLPA

SEQ ID NO: 3268 - protein, 10 aa, Influenza A virus
SVASGYDFER

SEQ ID NO: 3269 - protein, 9 aa, Influenza A virus
SVGGMVGGI

SEQ ID NO: 3270 - protein, 11 aa, Influenza A virus
SVGGMVGGIGR

SEQ ID NO: 3271 - protein, 9 aa, Influenza A virus
SVGKMIDGI

SEQ ID NO: 3272 - protein, 11 aa, Influenza A virus
SVGKMIDGIGR

SEQ ID NO: 3273 - protein, 9 aa, Influenza A virus
SVGKMIGGI

SEQ ID NO: 3274 - protein, 11 aa, Influenza A virus
SVGKMIGGIGR

SEQ ID NO: 3275 - protein, 9 aa, Influenza A virus
SVGKMINGI

SEQ ID NO: 3276 - protein, 11 aa, Influenza A virus
SVGKMINGIGR

SEQ ID NO: 3277 - protein, 9 aa, Influenza A virus
SVGKMISGI

SEQ ID NO: 3278 - protein, 11 aa, Influenza A virus
SVGKMISGIGR

SEQ ID NO: 3279 - protein, 11 aa, Influenza A virus
SVGKMVDGIGR

SEQ ID NO: 3280 - protein, 11 aa, Influenza A virus
SVGKMVGGIGR

SEQ ID NO: 3281 - protein, 11 aa, Influenza A virus
SVGRMIDGIGR

SEQ ID NO: 3282 - protein, 11 aa, Influenza A virus
SVGRMIGGIGR

SEQ ID NO: 3283 - protein, 11 aa, Influenza A virus
SVGRMVGGIGR

SEQ ID NO: 3284 - protein, 9 aa, Influenza A virus
SVGRMVSGI

SEQ ID NO: 3285 - protein, 11 aa, Influenza A virus
SVGRMVSGIGR

SEQ ID NO: 3286 - protein, 10 aa, Influenza A virus
SVQKNLPFDK

SEQ ID NO: 3287 - protein, 10 aa, Influenza A virus
SVQPAFSVQK

SEQ ID NO: 3288 - protein, 11 aa, Influenza A virus
SVQPAFSVQKN

SEQ ID NO: 3289 - protein, 10 aa, Influenza A virus
SVQPAFSVQR

SEQ ID NO: 3290 - protein, 11 aa, Influenza A virus
SVQPAFSVQRN

SEQ ID NO: 3291 - protein, 10 aa, Influenza A virus
SVQPSFSVQR

SEQ ID NO: 3292 - protein, 11 aa, Influenza A virus
SVQPSFSVQRN

SEQ ID NO: 3293 - protein, 10 aa, Influenza A virus
SVQPTFSVQR

SEQ ID NO: 3294 - protein, 11 aa, Influenza A virus
SVQPTFSVQRK

SEQ ID NO: 3295 - protein, 11 aa, Influenza A virus
SVQPTFSVQRN

SEQ ID NO: 3296 - protein, 10 aa, Influenza A virus
SVQRKLPFER

SEQ ID NO: 3297 - protein, 10 aa, Influenza A virus
SVQRNLPFDK

SEQ ID NO: 3298 - protein, 10 aa, Influenza A virus
SVQRNLPFDR

SEQ ID NO: 3299 - protein, 10 aa, Influenza A virus
SVQRNLPFEK

SEQ ID NO: 3300 - protein, 10 aa, Influenza A virus
SVQRNLPFER

SEQ ID NO: 3301 - protein, 11 aa, Influenza A virus
SYEQMETGGER

SEQ ID NO: 3302 - protein, 11 aa, Influenza A virus
SYFFGDNAEDY

SEQ ID NO: 3303 - protein, 11 aa, Influenza A virus
SYFFGDNAEEF

SEQ ID NO: 3304 - protein, 11 aa, Influenza A virus
SYFFGDSAEEY

SEQ ID NO: 3305 - protein, 8 aa, Influenza A virus
TAAQRAIM

SEQ ID NO: 3306 - protein, 11 aa, Influenza A virus
TAAQRAIMDQV

SEQ ID NO: 3307 - protein, 8 aa, Influenza A virus
TAAQRAMM

SEQ ID NO: 3308 - protein, 10 aa, Influenza A virus
TAGLTHIMIW

SEQ ID NO: 3309 - protein, 10 aa, Influenza A virus
TAGLTHLMIW

SEQ ID NO: 3310 - protein, 10 aa, Influenza A virus
TAGLTHMMIW

SEQ ID NO: 3311 - protein, 8 aa, Influenza A virus
TASQRAMM

SEQ ID NO: 3312 - protein, 9 aa, Influenza A virus
TAYERMCNI

SEQ ID NO: 3313 - protein, 10 aa, Influenza A virus
TAYERMCNIL

SEQ ID NO: 3314 - protein, 11 aa, Influenza A virus
TAYERMCNILK

SEQ ID NO: 3315 - protein, 8 aa, Influenza A virus
TEFKLSDY

SEQ ID NO: 3316 - protein, 10 aa, Influenza A virus
TEIIKMMENA

SEQ ID NO: 3317 - protein, 9 aa, Influenza A virus
TEIIRIMES

SEQ ID NO: 3318 - protein, 10 aa, Influenza A virus
TEIIRIMESA

SEQ ID NO: 3319 - protein, 9 aa, Influenza A virus
TEIIRLMES

SEQ ID NO: 3320 - protein, 10 aa, Influenza A virus
TEIIRLMESA

SEQ ID NO: 3321 - protein, 10 aa, Influenza A virus
TEIIRMMEGA

SEQ ID NO: 3322 - protein, 10 aa, Influenza A virus
TEIIRMMENA

SEQ ID NO: 3323 - protein, 10 aa, Influenza A virus
TEIIRMMESA

SEQ ID NO: 3324 - protein, 8 aa, Influenza A virus
TEIKLSDY

SEQ ID NO: 3325 - protein, 10 aa, Influenza A virus
TEIRASVGGM

SEQ ID NO: 3326 - protein, 10 aa, Influenza A virus
TEIRASVGKM

SEQ ID NO: 3327 - protein, 10 aa, Influenza A virus
TEIRASVGRM

SEQ ID NO: 3328 - protein, 10 aa, Influenza A virus
TEIRSSVGRM

SEQ ID NO: 3329 - protein, 8 aa, Influenza A virus
TELQLSDY

SEQ ID NO: 3330 - protein, 10 aa, Influenza A virus
TEVIRMMESA

SEQ ID NO: 3331 - protein, 8 aa, Influenza A virus
TFLARSAL

SEQ ID NO: 3332 - protein, 9 aa, Influenza A virus
TFLARSALI

SEQ ID NO: 3333 - protein, 10 aa, Influenza A virus
TFLARSALIL

SEQ ID NO: 3334 - protein, 11 aa, Influenza A virus
TFLARSALILR

SEQ ID NO: 3335 - protein, 10 aa, Influenza A virus
TFSVQRKLPF

SEQ ID NO: 3336 - protein, 10 aa, Influenza A virus
TFSVQRNLPF

SEQ ID NO: 3337 - protein, 10 aa, Influenza A virus
TGMDPRMCSL

SEQ ID NO: 3338 - protein, 10 aa, Influenza A virus
THIMIWHSNL

SEQ ID NO: 3339 - protein, 10 aa, Influenza A virus
THLMIWHSNL

SEQ ID NO: 3340 - protein, 10 aa, Influenza A virus
THMMIWHSNL

SEQ ID NO: 3341 - protein, 9 aa, Influenza A virus
TIAMELIGM

SEQ ID NO: 3342 - protein, 10 aa, Influenza A virus
TIAMELIGMI

SEQ ID NO: 3343 - protein, 11 aa, Influenza A virus
TIAMELIGMIK

SEQ ID NO: 3344 - protein, 10 aa, Influenza A virus
TIAMELIRMI

SEQ ID NO: 3345 - protein, 11 aa, Influenza A virus
TIAMELIRMIK

SEQ ID NO: 3346 - protein, 9 aa, Influenza A virus
TIDSNTLEL

SEQ ID NO: 3347 - protein, 10 aa, Influenza A virus
TIDSNTLELR

SEQ ID NO: 3348 - protein, 9 aa, Influenza A virus
TIDSSTLEL

SEQ ID NO: 3349 - protein, 10 aa, Influenza A virus
TIDSSTLELR

SEQ ID NO: 3350 - protein, 10 aa, Influenza A virus
TIEKMVLSAF

SEQ ID NO: 3351 - protein, 10 aa, Influenza A virus
TIERMILSAF

SEQ ID NO: 3352 - protein, 10 aa, Influenza A virus
TIERMVLSAF

SEQ ID NO: 3353 - protein, 10 aa, Influenza A virus
TIMAAFIGNT

SEQ ID NO: 3354 - protein, 10 aa, Influenza A virus
TIMAAFTGNA

SEQ ID NO: 3355 - protein, 10 aa, Influenza A virus
TIMAAFTGNT

SEQ ID NO: 3356 - protein, 10 aa, Influenza A virus
TIVMELIRMI

SEQ ID NO: 3357 - protein, 11 aa, Influenza A virus
TIVMELIRMIK

SEQ ID NO: 3358 - protein, 11 aa, Influenza A virus
TLELRSKYWAI

SEQ ID NO: 3359 - protein, 9 aa, Influenza A virus
TLELRSRYR

SEQ ID NO: 3360 - protein, 11 aa, Influenza A virus
TLELRSRYWAI

SEQ ID NO: 3361 - protein, 10 aa, Influenza A virus
TLPRRSGAAG

SEQ ID NO: 3362 - protein, 9 aa, Influenza A virus
TLYDKEEIR

SEQ ID NO: 3363 - protein, 10 aa, Influenza A virus
TLYDKEEIRR

SEQ ID NO: 3364 - protein, 11 aa, Influenza A virus
TLYDKEEIRRI

SEQ ID NO: 3365 - protein, 9 aa, Influenza A virus
TMDSCTLEL

SEQ ID NO: 3366 - protein, 10 aa, Influenza A virus
TMDSCTLELR

SEQ ID NO: 3367 - protein, 9 aa, Influenza A virus
TMDSITLEL

SEQ ID NO: 3368 - protein, 10 aa, Influenza A virus
TMDSITLELR

SEQ ID NO: 3369 - protein, 9 aa, Influenza A virus
TMDSNTLEL

SEQ ID NO: 3370 - protein, 10 aa, Influenza A virus
TMDSNTLELR

SEQ ID NO: 3371 - protein, 9 aa, Influenza A virus
TMDSRTLEL

SEQ ID NO: 3372 - protein, 10 aa, Influenza A virus
TMDSRTLELR

SEQ ID NO: 3373 - protein, 9 aa, Influenza A virus
TMDSSTLEL

SEQ ID NO: 3374 - protein, 10 aa, Influenza A virus
TMDSSTLELR

SEQ ID NO: 3375 - protein, 9 aa, Influenza A virus
TMDSTTLEL

SEQ ID NO: 3376 - protein, 10 aa, Influenza A virus
TMDSTTLELR

SEQ ID NO: 3377 - protein, 9 aa, Influenza A virus
TMERMVLSA

SEQ ID NO: 3378 - protein, 10 aa, Influenza A virus
TMERMVLSAF

SEQ ID NO: 3379 - protein, 9 aa, Influenza A virus
TMESSTLEL

SEQ ID NO: 3380 - protein, 10 aa, Influenza A virus
TMESSTLELR

SEQ ID NO: 3381 - protein, 9 aa, Influenza A virus
TMGSSTLEL

SEQ ID NO: 3382 - protein, 10 aa, Influenza A virus
TMGSSTLELR

SEQ ID NO: 3383 - protein, 9 aa, Influenza A virus
TMIMELIRM

SEQ ID NO: 3384 - protein, 10 aa, Influenza A virus
TMIMELIRMI

SEQ ID NO: 3385 - protein, 11 aa, Influenza A virus
TMIMELIRMIK

SEQ ID NO: 3386 - protein, 9 aa, Influenza A virus
TMNMELIRM

SEQ ID NO: 3387 - protein, 10 aa, Influenza A virus
TMNMELIRMI

SEQ ID NO: 3388 - protein, 11 aa, Influenza A virus
TMNMELIRMIK

SEQ ID NO: 3389 - protein, 9 aa, Influenza A virus
TMNSSTLEL

SEQ ID NO: 3390 - protein, 10 aa, Influenza A virus
TMNSSTLELR

SEQ ID NO: 3391 - protein, 9 aa, Influenza A virus
TMSSSTLEL

SEQ ID NO: 3392 - protein, 10 aa, Influenza A virus
TMSSSTLELR

SEQ ID NO: 3393 - protein, 9 aa, Influenza A virus
TMVLELIRI

SEQ ID NO: 3394 - protein, 10 aa, Influenza A virus
TMVLELIRII

SEQ ID NO: 3395 - protein, 9 aa, Influenza A virus
TMVLELIRM

SEQ ID NO: 3396 - protein, 10 aa, Influenza A virus
TMVLELIRMI

SEQ ID NO: 3397 - protein, 9 aa, Influenza A virus
TMVMELIQM

SEQ ID NO: 3398 - protein, 10 aa, Influenza A virus
TMVMELIQMI

SEQ ID NO: 3399 - protein, 11 aa, Influenza A virus
TMVMELIQMIK

SEQ ID NO: 3400 - protein, 9 aa, Influenza A virus
TMVMELIRM

SEQ ID NO: 3401 - protein, 10 aa, Influenza A virus
TMVMELIRMI

SEQ ID NO: 3402 - protein, 11 aa, Influenza A virus
TMVMELIRMIK

SEQ ID NO: 3403 - protein, 10 aa, Influenza A virus
TMVMELIRMV

SEQ ID NO: 3404 - protein, 11 aa, Influenza A virus
TMVMELIRMVK

SEQ ID NO: 3405 - protein, 9 aa, Influenza A virus
TMVMELVRM

SEQ ID NO: 3406 - protein, 10 aa, Influenza A virus
TMVMELVRMI

SEQ ID NO: 3407 - protein, 11 aa, Influenza A virus
TMVMELVRMIK

SEQ ID NO: 3408 - protein, 9 aa, Influenza A virus
TMVSSTLEL

SEQ ID NO: 3409 - protein, 10 aa, Influenza A virus
TMVSSTLELR

SEQ ID NO: 3410 - protein, 10 aa, Influenza A virus
TNPIVPSFDM

SEQ ID NO: 3411 - protein, 10 aa, Influenza A virus
TNPIVPSLDM

SEQ ID NO: 3412 - protein, 10 aa, Influenza A virus
TNPVVPSFDM

SEQ ID NO: 3413 - protein, 9 aa, Influenza A virus
TQPTFSVQR

SEQ ID NO: 3414 - protein, 9 aa, Influenza A virus
TRAHVRTGM

SEQ ID NO: 3415 - protein, 9 aa, Influenza A virus
TRALVRAGM

SEQ ID NO: 3416 - protein, 9 aa, Influenza A virus
TRALVRTGM

SEQ ID NO: 3417 - protein, 9 aa, Influenza A virus
TRGLTHMMI

SEQ ID NO: 3418 - protein, 10 aa, Influenza A virus
TRGLTHMMIW

SEQ ID NO: 3419 - protein, 9 aa, Influenza A virus
TRIVPRGQL

SEQ ID NO: 3420 - protein, 9 aa, Influenza A virus
TRLVPRGQL

SEQ ID NO: 3421 - protein, 9 aa, Influenza A virus
TRMVPRGKL

SEQ ID NO: 3422 - protein, 11 aa, Influenza A virus
TRSALILRGSV

SEQ ID NO: 3423 - protein, 9 aa, Influenza A virus
TRVAPRGQL

SEQ ID NO: 3424 - protein, 9 aa, Influenza A virus
TRVIPRGQL

SEQ ID NO: 3425 - protein, 9 aa, Influenza A virus
TRVLPRGKL

SEQ ID NO: 3426 - protein, 9 aa, Influenza A virus
TRVLPRGQL

SEQ ID NO: 3427 - protein, 9 aa, Influenza A virus
TRVVPRGQL

SEQ ID NO: 3428 - protein, 9 aa, Influenza A virus
TSDMRAEII

SEQ ID NO: 3429 - protein, 10 aa, Influenza A virus
TSDMRAEIIK

SEQ ID NO: 3430 - protein, 10 aa, Influenza A virus
TSDMRAEIIR

SEQ ID NO: 3431 - protein, 10 aa, Influenza A virus
TSDMRIEIIR

SEQ ID NO: 3432 - protein, 9 aa, Influenza A virus
TSDMRTEII

SEQ ID NO: 3433 - protein, 10 aa, Influenza A virus
TSDMRTEIIK

SEQ ID NO: 3434 - protein, 10 aa, Influenza A virus
TSDMRTEIIR

SEQ ID NO: 3435 - protein, 9 aa, Influenza A virus
TSDMRTEVI

SEQ ID NO: 3436 - protein, 10 aa, Influenza A virus
TSDMRTEVIR

SEQ ID NO: 3437 - protein, 10 aa, Influenza A virus
TSPIVPSFDM

SEQ ID NO: 3438 - protein, 8 aa, Influenza A virus
TSPIVPSL

SEQ ID NO: 3439 - protein, 10 aa, Influenza A virus
TSPIVPSLDM

SEQ ID NO: 3440 - protein, 9 aa, Influenza A virus
TSQVYSLIR

SEQ ID NO: 3441 - protein, 9 aa, Influenza A virus
TTAGLTHMM

SEQ ID NO: 3442 - protein, 10 aa, Influenza A virus
TTAGLTHMMI

SEQ ID NO: 3443 - protein, 11 aa, Influenza A virus
TTAGLTHMMIW

SEQ ID NO: 3444 - protein, 10 aa, Influenza A virus
TTEIRASVGR

SEQ ID NO: 3445 - protein, 11 aa, Influenza A virus
TTIMAAFTGNA

SEQ ID NO: 3446 - protein, 8 aa, Influenza A virus
TTLELRSR

SEQ ID NO: 3447 - protein, 9 aa, Influenza A virus
TTLELRSRY

SEQ ID NO: 3448 - protein, 10 aa, Influenza A virus
TTLELRSRYW

SEQ ID NO: 3449 - protein, 9 aa, Influenza A virus
TTYQRTRAL

SEQ ID NO: 3450 - protein, 10 aa, Influenza A virus
TTYQRTRALV

SEQ ID NO: 3451 - protein, 11 aa, Influenza A virus
TTYQRTRALVR

SEQ ID NO: 3452 - protein, 10 aa, Influenza A virus
TVASGYDFER

SEQ ID NO: 3453 - protein, 10 aa, Influenza A virus
TVERMVLSAF

SEQ ID NO: 3454 - protein, 9 aa, Influenza A virus
TVKGVGTMV

SEQ ID NO: 3455 - protein, 10 aa, Influenza A virus
TVKGVGTMVM

SEQ ID NO: 3456 - protein, 10 aa, Influenza A virus
TVMAAFIGNT

SEQ ID NO: 3457 - protein, 10 aa, Influenza A virus
TVMAAFSGNT

SEQ ID NO: 3458 - protein, 10 aa, Influenza A virus
TVMAAFTGNT

SEQ ID NO: 3459 - protein, 10 aa, Influenza A virus
TVMAAFVGNT

SEQ ID NO: 3460 - protein, 10 aa, Influenza A virus
TVVMELIRMI

SEQ ID NO: 3461 - protein, 11 aa, Influenza A virus
TVVMELIRMIK

SEQ ID NO: 3462 - protein, 9 aa, Influenza A virus
TYQRTRAHV

SEQ ID NO: 3463 - protein, 10 aa, Influenza A virus
TYQRTRAHVR

SEQ ID NO: 3464 - protein, 9 aa, Influenza A virus
TYQRTRALV

SEQ ID NO: 3465 - protein, 10 aa, Influenza A virus
TYQRTRALVR

SEQ ID NO: 3466 - protein, 9 aa, Influenza A virus
VAGGYDFER

SEQ ID NO: 3467 - protein, 9 aa, Influenza A virus
VAHKSCLPA

SEQ ID NO: 3468 - protein, 9 aa, Influenza A virus
VASGHDFER

SEQ ID NO: 3469 - protein, 9 aa, Influenza A virus
VASGYAFEK

SEQ ID NO: 3470 - protein, 9 aa, Influenza A virus
VASGYDFEK

SEQ ID NO: 3471 - protein, 9 aa, Influenza A virus
VASGYDFER

SEQ ID NO: 3472 - protein, 9 aa, Influenza A virus
VASGYEFEK

SEQ ID NO: 3473 - protein, 9 aa, Influenza A virus
VASGYEFER

SEQ ID NO: 3474 - protein, 9 aa, Influenza A virus
VASGYNFEK

SEQ ID NO: 3475 - protein, 9 aa, Influenza A virus
VAYERMCNI

SEQ ID NO: 3476 - protein, 10 aa, Influenza A virus
VAYERMCNIL

SEQ ID NO: 3477 - protein, 11 aa, Influenza A virus
VAYERMCNILK

SEQ ID NO: 3478 - protein, 11 aa, Influenza A virus
VDGRWMRELVL

SEQ ID NO: 3479 - protein, 9 aa, Influenza A virus
VEAMDSNTL

SEQ ID NO: 3480 - protein, 11 aa, Influenza A virus
VEAMDSNTLEL

SEQ ID NO: 3481 - protein, 9 aa, Influenza A virus
VEAMDSSTL

SEQ ID NO: 3482 - protein, 11 aa, Influenza A virus
VEAMDSSTLEL

SEQ ID NO: 3483 - protein, 9 aa, Influenza A virus
VEAMDSTTL

SEQ ID NO: 3484 - protein, 11 aa, Influenza A virus
VEAMDSTTLEL

SEQ ID NO: 3485 - protein, 8 aa, Influenza A virus
VEDLIFLA

SEQ ID NO: 3486 - protein, 11 aa, Influenza A virus
VEDLIFLARSA

SEQ ID NO: 3487 - protein, 8 aa, Influenza A virus
VERMVLSA

SEQ ID NO: 3488 - protein, 9 aa, Influenza A virus
VERMVLSAF

SEQ ID NO: 3489 - protein, 9 aa, Influenza A virus
VETMDSSTL

SEQ ID NO: 3490 - protein, 11 aa, Influenza A virus
VETMDSSTLEL

SEQ ID NO: 3491 - protein, 10 aa, Influenza A virus
VFEFSDERAA

SEQ ID NO: 3492 - protein, 10 aa, Influenza A virus
VFPRGKLSTR

SEQ ID NO: 3493 - protein, 10 aa, Influenza A virus
VGGMVGGIGR

SEQ ID NO: 3494 - protein, 11 aa, Influenza A virus
VGGRWMRELVL

SEQ ID NO: 3495 - protein, 9 aa, Influenza A virus
VGIDPFRLL

SEQ ID NO: 3496 - protein, 9 aa, Influenza A virus
VGIDSFRML

SEQ ID NO: 3497 - protein, 10 aa, Influenza A virus
VGKMIDGIGR

SEQ ID NO: 3498 - protein, 11 aa, Influenza A virus
VGKMIDGIGRF

SEQ ID NO: 3499 - protein, 10 aa, Influenza A virus
VGKMIGGIGR

SEQ ID NO: 3500 - protein, 11 aa, Influenza A virus
VGKMIGGIGRF

SEQ ID NO: 3501 - protein, 10 aa, Influenza A virus
VGKMINGIGR

SEQ ID NO: 3502 - protein, 11 aa, Influenza A virus
VGKMINGIGRF

SEQ ID NO: 3503 - protein, 10 aa, Influenza A virus
VGKMISGIGR

SEQ ID NO: 3504 - protein, 11 aa, Influenza A virus
VGKMISGIGRF

SEQ ID NO: 3505 - protein, 10 aa, Influenza A virus
VGKMVDGIGR

SEQ ID NO: 3506 - protein, 10 aa, Influenza A virus
VGKMVGGIGR

SEQ ID NO: 3507 - protein, 10 aa, Influenza A virus
VGRMIDGIGR

SEQ ID NO: 3508 - protein, 11 aa, Influenza A virus
VGRMIDGIGRF

SEQ ID NO: 3509 - protein, 10 aa, Influenza A virus
VGRMIGGIGR

SEQ ID NO: 3510 - protein, 11 aa, Influenza A virus
VGRMIGGIGRF

SEQ ID NO: 3511 - protein, 10 aa, Influenza A virus
VGRMVGGIGR

SEQ ID NO: 3512 - protein, 10 aa, Influenza A virus
VGRMVSGIGR

SEQ ID NO: 3513 - protein, 11 aa, Influenza A virus
VGRMVSGIGRF

SEQ ID NO: 3514 - protein, 10 aa, Influenza A virus
VGTIAMELIR

SEQ ID NO: 3515 - protein, 10 aa, Influenza A virus
VGTIVMELIR

SEQ ID NO: 3516 - protein, 10 aa, Influenza A virus
VGTMIMELIR

SEQ ID NO: 3517 - protein, 10 aa, Influenza A virus
VGTMNMELIR

SEQ ID NO: 3518 - protein, 10 aa, Influenza A virus
VGTMVLELIR

SEQ ID NO: 3519 - protein, 10 aa, Influenza A virus
VGTMVMELIR

SEQ ID NO: 3520 - protein, 10 aa, Influenza A virus
VGTMVMELVR

SEQ ID NO: 3521 - protein, 10 aa, Influenza A virus
VGTVVMELIR

SEQ ID NO: 3522 - protein, 10 aa, Influenza A virus
VHGLAVASGY

SEQ ID NO: 3523 - protein, 10 aa, Influenza A virus
VIPRGKLSTR

SEQ ID NO: 3524 - protein, 10 aa, Influenza A virus
VIPRGQLATR

SEQ ID NO: 3525 - protein, 10 aa, Influenza A virus
VIPRGQLSTR

SEQ ID NO: 3526 - protein, 9 aa, Influenza A virus
VIRMMESAK

SEQ ID NO: 3527 - protein, 9 aa, Influenza A virus
VKGIGTMVM

SEQ ID NO: 3528 - protein, 9 aa, Influenza A virus
VKGVGTIAM

SEQ ID NO: 3529 - protein, 9 aa, Influenza A virus
VKGVGTIVM

SEQ ID NO: 3530 - protein, 9 aa, Influenza A virus
VKGVGTMIM

SEQ ID NO: 3531 - protein, 9 aa, Influenza A virus
VKGVGTMNM

SEQ ID NO: 3532 - protein, 9 aa, Influenza A virus
VKGVGTMVL

SEQ ID NO: 3533 - protein, 9 aa, Influenza A virus
VKGVGTMVM

SEQ ID NO: 3534 - protein, 9 aa, Influenza A virus
VKGVGTVVM

SEQ ID NO: 3535 - protein, 9 aa, Influenza A virus
VLELIRIIK

SEQ ID NO: 3536 - protein, 10 aa, Influenza A virus
VLELIRIIKR

SEQ ID NO: 3537 - protein, 9 aa, Influenza A virus
VLELIRMIK

SEQ ID NO: 3538 - protein, 10 aa, Influenza A virus
VLELIRMIKR

SEQ ID NO: 3539 - protein, 9 aa, Influenza A virus
VLNFIRGTK

SEQ ID NO: 3540 - protein, 10 aa, Influenza A virus
VLNFIRGTKV

SEQ ID NO: 3541 - protein, 10 aa, Influenza A virus
VLPRGKLSTR

SEQ ID NO: 3542 - protein, 10 aa, Influenza A virus
VLPRGQLSTR

SEQ ID NO: 3543 - protein, 9 aa, Influenza A virus
VLRGSVAHK

SEQ ID NO: 3544 - protein, 9 aa, Influenza A virus
VLSAFDERR

SEQ ID NO: 3545 - protein, 11 aa, Influenza A virus
VLSAFDERRNK

SEQ ID NO: 3546 - protein, 11 aa, Influenza A virus
VLSAFDERRNR

SEQ ID NO: 3547 - protein, 9 aa, Influenza A virus
VLSAFEERR

SEQ ID NO: 3548 - protein, 11 aa, Influenza A virus
VLSAFEERRNK

SEQ ID NO: 3549 - protein, 9 aa, Influenza A virus
VLSFIKGTK

SEQ ID NO: 3550 - protein, 10 aa, Influenza A virus
VLSFIKGTKV

SEQ ID NO: 3551 - protein, 11 aa, Influenza A virus
VLSFIKGTKVV

SEQ ID NO: 3552 - protein, 9 aa, Influenza A virus
VLSFIRGTK

SEQ ID NO: 3553 - protein, 10 aa, Influenza A virus
VLSFIRGTKV

SEQ ID NO: 3554 - protein, 9 aa, Influenza A virus
VLSFIRGTR

SEQ ID NO: 3555 - protein, 10 aa, Influenza A virus
VLSFIRGTRV

SEQ ID NO: 3556 - protein, 11 aa, Influenza A virus
VLSFIRGTRVV

SEQ ID NO: 3557 - protein, 9 aa, Influenza A virus
VLYDKEEIR

SEQ ID NO: 3558 - protein, 10 aa, Influenza A virus
VLYDKEEIRR

SEQ ID NO: 3559 - protein, 11 aa, Influenza A virus
VLYDKEEIRRI

SEQ ID NO: 3560 - protein, 9 aa, Influenza A virus
VLYDKEELR

SEQ ID NO: 3561 - protein, 10 aa, Influenza A virus
VLYDKEELRR

SEQ ID NO: 3562 - protein, 11 aa, Influenza A virus
VLYDKEELRRI

SEQ ID NO: 3563 - protein, 9 aa, Influenza A virus
VLYDKEEMR

SEQ ID NO: 3564 - protein, 10 aa, Influenza A virus
VLYDKEEMRR

SEQ ID NO: 3565 - protein, 11 aa, Influenza A virus
VLYDKEEMRRI

SEQ ID NO: 3566 - protein, 9 aa, Influenza A virus
VLYDKGEIR

SEQ ID NO: 3567 - protein, 10 aa, Influenza A virus
VLYDKGEIRR

SEQ ID NO: 3568 - protein, 11 aa, Influenza A virus
VLYDKGEIRRI

SEQ ID NO: 3569 - protein, 9 aa, Influenza A virus
VMAAFIGNT

SEQ ID NO: 3570 - protein, 9 aa, Influenza A virus
VMAAFSGNT

SEQ ID NO: 3571 - protein, 9 aa, Influenza A virus
VMAAFTGNT

SEQ ID NO: 3572 - protein, 9 aa, Influenza A virus
VMAAFVGNT

SEQ ID NO: 3573 - protein, 9 aa, Influenza A virus
VMELIQMIK

SEQ ID NO: 3574 - protein, 10 aa, Influenza A virus
VMELIQMIKR

SEQ ID NO: 3575 - protein, 9 aa, Influenza A virus
VMELIRMIK

SEQ ID NO: 3576 - protein, 10 aa, Influenza A virus
VMELIRMIKR

SEQ ID NO: 3577 - protein, 9 aa, Influenza A virus
VMELIRMVK

SEQ ID NO: 3578 - protein, 10 aa, Influenza A virus
VMELIRMVKR

SEQ ID NO: 3579 - protein, 9 aa, Influenza A virus
VMELVRMIK

SEQ ID NO: 3580 - protein, 10 aa, Influenza A virus
VMELVRMIKR

SEQ ID NO: 3581 - protein, 10 aa, Influenza A virus
VMESAKPEEV

SEQ ID NO: 3582 - protein, 10 aa, Influenza A virus
VNGLAVASGY

SEQ ID NO: 3583 - protein, 11 aa, Influenza A virus
VPRGKLSTRGV

SEQ ID NO: 3584 - protein, 9 aa, Influenza A virus
VPRGQLATR

SEQ ID NO: 3585 - protein, 11 aa, Influenza A virus
VPRGQLATRGV

SEQ ID NO: 3586 - protein, 11 aa, Influenza A virus
VPRGQLSTRGF

SEQ ID NO: 3587 - protein, 11 aa, Influenza A virus
VPRGQLSTRGV

SEQ ID NO: 3588 - protein, 11 aa, Influenza A virus
VPRGQMSTRGV

SEQ ID NO: 3589 - protein, 8 aa, Influenza A virus
VPRGRLST

SEQ ID NO: 3590 - protein, 11 aa, Influenza A virus
VPRGRLSTRGI

SEQ ID NO: 3591 - protein, 11 aa, Influenza A virus
VPRGRLSTRGV

SEQ ID NO: 3592 - protein, 9 aa, Influenza A virus
VQIASNENM

SEQ ID NO: 3593 - protein, 9 aa, Influenza A virus
VQIASNENV

SEQ ID NO: 3594 - protein, 9 aa, Influenza A virus
VQKNLPFDK

SEQ ID NO: 3595 - protein, 9 aa, Influenza A virus
VQMCTELKL

SEQ ID NO: 3596 - protein, 9 aa, Influenza A virus
VQPAFSVQK

SEQ ID NO: 3597 - protein, 9 aa, Influenza A virus
VQPAFSVQR

SEQ ID NO: 3598 - protein, 9 aa, Influenza A virus
VQPSFSVQR

SEQ ID NO: 3599 - protein, 9 aa, Influenza A virus
VQPTFSVQR

SEQ ID NO: 3600 - protein, 10 aa, Influenza A virus
VQPTFSVQRK

SEQ ID NO: 3601 - protein, 9 aa, Influenza A virus
VQRKLPFER

SEQ ID NO: 3602 - protein, 9 aa, Influenza A virus
VQRNLPFDK

SEQ ID NO: 3603 - protein, 9 aa, Influenza A virus
VQRNLPFDR

SEQ ID NO: 3604 - protein, 9 aa, Influenza A virus
VQRNLPFEK

SEQ ID NO: 3605 - protein, 9 aa, Influenza A virus
VQRNLPFER

SEQ ID NO: 3606 - protein, 9 aa, Influenza A virus
VRAGMDPRM

SEQ ID NO: 3607 - protein, 11 aa, Influenza A virus
VRMIKRGINDR

SEQ ID NO: 3608 - protein, 9 aa, Influenza A virus
VRTGMDPRM

SEQ ID NO: 3609 - protein, 9 aa, Influenza A virus
VSFQGRGVF

SEQ ID NO: 3610 - protein, 11 aa, Influenza A virus
VSFQGRGVFEF

SEQ ID NO: 3611 - protein, 11 aa, Influenza A virus
VSFQGRGVFEL

SEQ ID NO: 3612 - protein, 9 aa, Influenza A virus
VSFRGRGVF

SEQ ID NO: 3613 - protein, 11 aa, Influenza A virus
VSFRGRGVFEL

SEQ ID NO: 3614 - protein, 9 aa, Influenza A virus
VSGFIRGKK

SEQ ID NO: 3615 - protein, 9 aa, Influenza A virus
VSGFIRGKR

SEQ ID NO: 3616 - protein, 9 aa, Influenza A virus
VSGIGRFYI

SEQ ID NO: 3617 - protein, 9 aa, Influenza A virus
VSNFIRGTK

SEQ ID NO: 3618 - protein, 9 aa, Influenza A virus
VSNFIRGTR

SEQ ID NO: 3619 - protein, 10 aa, Influenza A virus
VSPRGKLSTR

SEQ ID NO: 3620 - protein, 9 aa, Influenza A virus
VSSFIRGAK

SEQ ID NO: 3621 - protein, 10 aa, Influenza A virus
VSSFIRGAKV

SEQ ID NO: 3622 - protein, 9 aa, Influenza A virus
VSSFIRGAR

SEQ ID NO: 3623 - protein, 10 aa, Influenza A virus
VSSFIRGARV

SEQ ID NO: 3624 - protein, 9 aa, Influenza A virus
VSSFIRGKK

SEQ ID NO: 3625 - protein, 9 aa, Influenza A virus
VSSFIRGKR

SEQ ID NO: 3626 - protein, 9 aa, Influenza A virus
VSSFIRGTK

SEQ ID NO: 3627 - protein, 9 aa, Influenza A virus
VSSFIRGTR

SEQ ID NO: 3628 - protein, 10 aa, Influenza A virus
VSSFIRGTRI

SEQ ID NO: 3629 - protein, 10 aa, Influenza A virus
VSSFIRGTRL

SEQ ID NO: 3630 - protein, 10 aa, Influenza A virus
VSSFIRGTRM

SEQ ID NO: 3631 - protein, 11 aa, Influenza A virus
VSSFIRGTRVL

SEQ ID NO: 3632 - protein, 9 aa, Influenza A virus
VSSGYDFEK

SEQ ID NO: 3633 - protein, 9 aa, Influenza A virus
VSSGYNFEK

SEQ ID NO: 3634 - protein, 10 aa, Influenza A virus
VSSTLELRSR

SEQ ID NO: 3635 - protein, 11 aa, Influenza A virus
VSSTLELRSRY

SEQ ID NO: 3636 - protein, 9 aa, Influenza A virus
VSVQPSFSV

SEQ ID NO: 3637 - protein, 11 aa, Influenza A virus
VSVQPSFSVQR

SEQ ID NO: 3638 - protein, 9 aa, Influenza A virus
VSVQPTFSV

SEQ ID NO: 3639 - protein, 11 aa, Influenza A virus
VSVQPTFSVQR

SEQ ID NO: 3640 - protein, 8 aa, Influenza A virus
VTIMAAFK

SEQ ID NO: 3641 - protein, 10 aa, Influenza A virus
VVASGYDFER

SEQ ID NO: 3642 - protein, 9 aa, Influenza A virus
VVMELIRMI

SEQ ID NO: 3643 - protein, 10 aa, Influenza A virus
VVMELIRMIK

SEQ ID NO: 3644 - protein, 11 aa, Influenza A virus
VVMELIRMIKR

SEQ ID NO: 3645 - protein, 10 aa, Influenza A virus
VVPRGKLSTR

SEQ ID NO: 3646 - protein, 10 aa, Influenza A virus
VVPRGQLATR

SEQ ID NO: 3647 - protein, 10 aa, Influenza A virus
VVPRGQLSTR

SEQ ID NO: 3648 - protein, 10 aa, Influenza A virus
VVPRGQMSTR

SEQ ID NO: 3649 - protein, 10 aa, Influenza A virus
VVPRGRLSTR

SEQ ID NO: 3650 - protein, 9 aa, Influenza A virus
VWMACHSAA

SEQ ID NO: 3651 - protein, 10 aa, Influenza A virus
VWMACHSAAF

SEQ ID NO: 3652 - protein, 9 aa, Influenza A virus
VWMACHSPA

SEQ ID NO: 3653 - protein, 10 aa, Influenza A virus
VWMACHSPAF

SEQ ID NO: 3654 - protein, 9 aa, Influenza A virus
VWMACNSAA

SEQ ID NO: 3655 - protein, 10 aa, Influenza A virus
VWMACNSAAF

SEQ ID NO: 3656 - protein, 10 aa, Influenza A virus
VYGLAVAGGY

SEQ ID NO: 3657 - protein, 10 aa, Influenza A virus
VYGLAVASGY

SEQ ID NO: 3658 - protein, 10 aa, Influenza A virus
VYGLIVASGY

SEQ ID NO: 3659 - protein, 10 aa, Influenza A virus
VYGLSVASGY

SEQ ID NO: 3660 - protein, 10 aa, Influenza A virus
VYGLTVASGY

SEQ ID NO: 3661 - protein, 10 aa, Influenza A virus
VYGLVVASGY

SEQ ID NO: 3662 - protein, 10 aa, Influenza A virus
VYGPAVASGY

SEQ ID NO: 3663 - protein, 10 aa, Influenza A virus
VYGPAVSSGY

SEQ ID NO: 3664 - protein, 9 aa, Influenza A virus
WHSNLNDAT

SEQ ID NO: 3665 - protein, 10 aa, Influenza A virus
WHSNLNDATY

SEQ ID NO: 3666 - protein, 10 aa, Influenza A virus
WHSNLNDSTY

SEQ ID NO: 3667 - protein, 10 aa, Influenza A virus
WHSNLNDTTY

SEQ ID NO: 3668 - protein, 10 aa, Influenza A virus
WIRELILYDK

SEQ ID NO: 3669 - protein, 10 aa, Influenza A virus
WIRELVLYDK

SEQ ID NO: 3670 - protein, 9 aa, Influenza A virus
WMACHSAAF

SEQ ID NO: 3671 - protein, 10 aa, Influenza A virus
WMACHSAAFE

SEQ ID NO: 3672 - protein, 9 aa, Influenza A virus
WMACHSPAF

SEQ ID NO: 3673 - protein, 10 aa, Influenza A virus
WMACHSPAFE

SEQ ID NO: 3674 - protein, 9 aa, Influenza A virus
WMACNSAAF

SEQ ID NO: 3675 - protein, 10 aa, Influenza A virus
WMACNSAAFE

SEQ ID NO: 3676 - protein, 10 aa, Influenza A virus
WMRELILHDK

SEQ ID NO: 3677 - protein, 8 aa, Influenza A virus
WMRELILY

SEQ ID NO: 3678 - protein, 10 aa, Influenza A virus
WMRELILYDK

SEQ ID NO: 3679 - protein, 8 aa, Influenza A virus
WMRELTLY

SEQ ID NO: 3680 - protein, 10 aa, Influenza A virus
WMRELTLYDK

SEQ ID NO: 3681 - protein, 8 aa, Influenza A virus
WMRELVLY

SEQ ID NO: 3682 - protein, 10 aa, Influenza A virus
WMRELVLYDK

SEQ ID NO: 3683 - protein, 8 aa, Influenza A virus
WMRKLVLY

SEQ ID NO: 3684 - protein, 10 aa, Influenza A virus
WMRKLVLYDK

SEQ ID NO: 3685 - protein, 10 aa, Influenza A virus
WRGENGRLTR

SEQ ID NO: 3686 - protein, 9 aa, Influenza A virus
WRQANNGEY

SEQ ID NO: 3687 - protein, 10 aa, Influenza A virus
WTRELILYDK

SEQ ID NO: 3688 - protein, 10 aa, Influenza A virus
WVRELILYDK

SEQ ID NO: 3689 - protein, 10 aa, Influenza A virus
WVRELTLYDK

SEQ ID NO: 3690 - protein, 10 aa, Influenza A virus
WVRELVLYDK

SEQ ID NO: 3691 - protein, 8 aa, Influenza A virus
YAFEKEGY

SEQ ID NO: 3692 - protein, 10 aa, Influenza A virus
YAFEKEGYSL

SEQ ID NO: 3693 - protein, 11 aa, Influenza A virus
YAFEKEGYSLV

SEQ ID NO: 3694 - protein, 9 aa, Influenza A virus
YATAGLTHI

SEQ ID NO: 3695 - protein, 10 aa, Influenza A virus
YATAGLTHIM

SEQ ID NO: 3696 - protein, 10 aa, Influenza A virus
YDFEKEGYSL

SEQ ID NO: 3697 - protein, 10 aa, Influenza A virus
YDFEREGYSL

SEQ ID NO: 3698 - protein, 11 aa, Influenza A virus
YDFEREGYSLI

SEQ ID NO: 3699 - protein, 8 aa, Influenza A virus
YEDLIFLA

SEQ ID NO: 3700 - protein, 11 aa, Influenza A virus
YEDLIFLARSA

SEQ ID NO: 3701 - protein, 8 aa, Influenza A virus
YEFEKEGY

SEQ ID NO: 3702 - protein, 10 aa, Influenza A virus
YEFEKEGYSL

SEQ ID NO: 3703 - protein, 11 aa, Influenza A virus
YEFEKEGYSLV

SEQ ID NO: 3704 - protein, 8 aa, Influenza A virus
YEFEREGY

SEQ ID NO: 3705 - protein, 10 aa, Influenza A virus
YEFEREGYSL

SEQ ID NO: 3706 - protein, 11 aa, Influenza A virus
YEFEREGYSLV

SEQ ID NO: 3707 - protein, 10 aa, Influenza A virus
YEGRLIQNSI

SEQ ID NO: 3708 - protein, 10 aa, Influenza A virus
YEGRLIQNSL

SEQ ID NO: 3709 - protein, 10 aa, Influenza A virus
YEGRLIQNSM

SEQ ID NO: 3710 - protein, 10 aa, Influenza A virus
YFFGDNAEDY

SEQ ID NO: 3711 - protein, 11 aa, Influenza A virus
YFFGDNAEDYD

SEQ ID NO: 3712 - protein, 10 aa, Influenza A virus
YFFGDNAEEF

SEQ ID NO: 3713 - protein, 11 aa, Influenza A virus
YFFGDNAEEYD

SEQ ID NO: 3714 - protein, 11 aa, Influenza A virus
YFFGDNAEEYE

SEQ ID NO: 3715 - protein, 11 aa, Influenza A virus
YFFGDNAEEYG

SEQ ID NO: 3716 - protein, 11 aa, Influenza A virus
YFFGDNAEEYN

SEQ ID NO: 3717 - protein, 10 aa, Influenza A virus
YFFGDSAEEY

SEQ ID NO: 3718 - protein, 11 aa, Influenza A virus
YFFGDSAEEYD

SEQ ID NO: 3719 - protein, 9 aa, Influenza A virus
YGLAVAGGY

SEQ ID NO: 3720 - protein, 11 aa, Influenza A virus
YGLAVASGHDF

SEQ ID NO: 3721 - protein, 9 aa, Influenza A virus
YGLAVASGY

SEQ ID NO: 3722 - protein, 11 aa, Influenza A virus
YGLAVASGYDF

SEQ ID NO: 3723 - protein, 11 aa, Influenza A virus
YGLAVASGYEF

SEQ ID NO: 3724 - protein, 9 aa, Influenza A virus
YGLIVASGY

SEQ ID NO: 3725 - protein, 9 aa, Influenza A virus
YGLSVASGY

SEQ ID NO: 3726 - protein, 11 aa, Influenza A virus
YGLSVASGYDF

SEQ ID NO: 3727 - protein, 9 aa, Influenza A virus
YGLTVASGY

SEQ ID NO: 3728 - protein, 9 aa, Influenza A virus
YGLVVASGY

SEQ ID NO: 3729 - protein, 9 aa, Influenza A virus
YGPAVASGY

SEQ ID NO: 3730 - protein, 10 aa, Influenza A virus
YGPAVASGYA

SEQ ID NO: 3731 - protein, 11 aa, Influenza A virus
YGPAVASGYAF

SEQ ID NO: 3732 - protein, 11 aa, Influenza A virus
YGPAVASGYDF

SEQ ID NO: 3733 - protein, 11 aa, Influenza A virus
YGPAVASGYEF

SEQ ID NO: 3734 - protein, 11 aa, Influenza A virus
YGPAVASGYNF

SEQ ID NO: 3735 - protein, 9 aa, Influenza A virus
YGPAVSSGY

SEQ ID NO: 3736 - protein, 11 aa, Influenza A virus
YGPAVSSGYDF

SEQ ID NO: 3737 - protein, 11 aa, Influenza A virus
YGPAVSSGYNF

SEQ ID NO: 3738 - protein, 8 aa, Influenza A virus
YIQMCTEF

SEQ ID NO: 3739 - protein, 9 aa, Influenza A virus
YIQMCTEFK

SEQ ID NO: 3740 - protein, 10 aa, Influenza A virus
YIQMCTEFKL

SEQ ID NO: 3741 - protein, 9 aa, Influenza A virus
YIQMCTEIK

SEQ ID NO: 3742 - protein, 10 aa, Influenza A virus
YIQMCTEIKL

SEQ ID NO: 3743 - protein, 9 aa, Influenza A virus
YIQMCTELK

SEQ ID NO: 3744 - protein, 10 aa, Influenza A virus
YIQMCTELKL

SEQ ID NO: 3745 - protein, 10 aa, Influenza A virus
YIQMCTELQL

SEQ ID NO: 3746 - protein, 9 aa, Influenza A virus
YKRIDGKWM

SEQ ID NO: 3747 - protein, 10 aa, Influenza A virus
YKRIDGKWMR

SEQ ID NO: 3748 - protein, 9 aa, Influenza A virus
YKRRDGKWM

SEQ ID NO: 3749 - protein, 9 aa, Influenza A virus
YKRVDGKWM

SEQ ID NO: 3750 - protein, 9 aa, Influenza A virus
YKRVDGRWM

SEQ ID NO: 3751 - protein, 10 aa, Influenza A virus
YKRVDGRWMR

SEQ ID NO: 3752 - protein, 9 aa, Influenza A virus
YKRVGGKWM

SEQ ID NO: 3753 - protein, 10 aa, Influenza A virus
YKRVGGKWMR

SEQ ID NO: 3754 - protein, 9 aa, Influenza A virus
YKRVGGRWM

SEQ ID NO: 3755 - protein, 10 aa, Influenza A virus
YKRVGGRWMR

SEQ ID NO: 3756 - protein, 9 aa, Influenza A virus
YKRVNGKWM

SEQ ID NO: 3757 - protein, 10 aa, Influenza A virus
YKRVNGKWMR

SEQ ID NO: 3758 - protein, 8 aa, Influenza A virus
YLEEHPSV

SEQ ID NO: 3759 - protein, 8 aa, Influenza A virus
YLEGHPSA

SEQ ID NO: 3760 - protein, 10 aa, Influenza A virus
YLEGHPSAGK

SEQ ID NO: 3761 - protein, 8 aa, Influenza A virus
YQRTRAHV

SEQ ID NO: 3762 - protein, 9 aa, Influenza A virus
YQRTRAHVR

SEQ ID NO: 3763 - protein, 8 aa, Influenza A virus
YQRTRALV

SEQ ID NO: 3764 - protein, 9 aa, Influenza A virus
YQRTRALVR

SEQ ID NO: 3765 - protein, 10 aa, Influenza A virus
YQRTRALVRA

SEQ ID NO: 3766 - protein, 9 aa, Influenza A virus
YRKIDGKWM

SEQ ID NO: 3767 - protein, 10 aa, Influenza A virus
YRKIDGKWMR

SEQ ID NO: 3768 - protein, 9 aa, Influenza A virus
YRKREGKWI

SEQ ID NO: 3769 - protein, 10 aa, Influenza A virus
YRKREGKWIR

SEQ ID NO: 3770 - protein, 10 aa, Influenza A virus
YRRIDGKWIR

SEQ ID NO: 3771 - protein, 9 aa, Influenza A virus
YRRIDGKWM

SEQ ID NO: 3772 - protein, 10 aa, Influenza A virus
YRRIDGKWMR

SEQ ID NO: 3773 - protein, 10 aa, Influenza A virus
YRRIDGKWTR

SEQ ID NO: 3774 - protein, 9 aa, Influenza A virus
YRRKDGKWM

SEQ ID NO: 3775 - protein, 10 aa, Influenza A virus
YRRRDGKWIR

SEQ ID NO: 3776 - protein, 9 aa, Influenza A virus
YRRRDGKWM

SEQ ID NO: 3777 - protein, 10 aa, Influenza A virus
YRRRDGKWMR

SEQ ID NO: 3778 - protein, 10 aa, Influenza A virus
YRRRDGKWVR

SEQ ID NO: 3779 - protein, 10 aa, Influenza A virus
YRRREGKWVR

SEQ ID NO: 3780 - protein, 9 aa, Influenza A virus
YRRRNGKWV

SEQ ID NO: 3781 - protein, 10 aa, Influenza A virus
YRRRNGKWVR

SEQ ID NO: 3782 - protein, 10 aa, Influenza A virus
YRRVDGKWIR

SEQ ID NO: 3783 - protein, 9 aa, Influenza A virus
YRRVDGKWM

SEQ ID NO: 3784 - protein, 10 aa, Influenza A virus
YRRVDGKWMR

SEQ ID NO: 3785 - protein, 9 aa, Influenza A virus
YRRVGGKWI

SEQ ID NO: 3786 - protein, 10 aa, Influenza A virus
YRRVGGKWIR

SEQ ID NO: 3787 - protein, 9 aa, Influenza A virus
YRRVNGKWM

SEQ ID NO: 3788 - protein, 10 aa, Influenza A virus
YRRVNGKWMR

SEQ ID NO: 3789 - protein, 9 aa, Influenza A virus
YSLIGIDPF

SEQ ID NO: 3790 - protein, 10 aa, Influenza A virus
YSLIGIDPFK

SEQ ID NO: 3791 - protein, 11 aa, Influenza A virus
YSLIGIDPFKL

SEQ ID NO: 3792 - protein, 10 aa, Influenza A virus
YSLVGIDPFK

SEQ ID NO: 3793 - protein, 10 aa, Influenza A virus
YSLVGIDPFR

SEQ ID NO: 3794 - protein, 9 aa, Influenza A virus
YSLVGIDSF

SEQ ID NO: 3795 - protein, 10 aa, Influenza A virus
YSLVGIDSFR

SEQ ID NO: 3796 - protein, 11 aa, Influenza A virus
YSLVGIDSFRM

SEQ ID NO: 3797 - protein, 9 aa, Influenza A virus
YSLVGIEPF

SEQ ID NO: 3798 - protein, 10 aa, Influenza A virus
YSLVGIEPFK

SEQ ID NO: 3799 - protein, 9 aa, Influenza A virus
YSLVGVDPF

SEQ ID NO: 3800 - protein, 10 aa, Influenza A virus
YSLVGVDPFK

SEQ ID NO: 3801 - protein, 9 aa, Influenza A virus
YVQMCTELK

SEQ ID NO: 3802 - protein, 10 aa, Influenza A virus
YVQMCTELKL

SEQ ID NO: 3803 - protein, 11 aa, Artificial Sequence
  Description of Artificial Sequence: Synthetic peptide
  Seed: RMMEGAKPEEV
RLMEGAKPEEA

SEQ ID NO: 3804 - protein, 10 aa, Artificial Sequence
  Description of Artificial Sequence: Synthetic peptide
  Seed: RRTRIAYERM
RFTRIAYERP

SEQ ID NO: 3805 - protein, 10 aa, Artificial Sequence
  Description of Artificial Sequence: Synthetic peptide
  Seed: RRTRIAYERM
RITRIAYERV

SEQ ID NO: 3806 - protein, 10 aa, Artificial Sequence
  Description of Artificial Sequence: Synthetic peptide
  Seed: RRTRIAYERM
RITRIAYERL

SEQ ID NO: 3807 - protein, 10 aa, Artificial Sequence
  Description of Artificial Sequence: Synthetic peptide
  Seed: RRTRIAYERM
RITRIAYERI

SEQ ID NO: 3808 - protein, 10 aa, Artificial Sequence
  Description of Artificial Sequence: Synthetic peptide
  Seed: RRTRIAYERM
RPTRIAYERM

SEQ ID NO: 3809 - protein, 10 aa, Artificial Sequence
  Description of Artificial Sequence: Synthetic peptide
  Seed: RRTRIAYERM
RFTRIAYERF

SEQ ID NO: 3810 - protein, 10 aa, Artificial Sequence
  Description of Artificial Sequence: Synthetic peptide
  Seed: RRTRIAYERM
RFTRIAYERS

SEQ ID NO: 3811 - protein, 10 aa, Artificial Sequence
  Description of Artificial Sequence: Synthetic peptide
  Seed: RRTRIAYERM
RITRIAYERF

SEQ ID NO: 3812 - protein, 11 aa, Artificial Sequence
  Description of Artificial Sequence: Synthetic peptide
  Seed: RMMEGAKPEEV
RQMEGAKPEEV

SEQ ID NO: 3813 - protein, 11 aa, Artificial Sequence
  Description of Artificial Sequence: Synthetic peptide
  Seed: RMMEGAKPEEV
RLMEGAKPEEL

SEQ ID NO: 3814 - protein, 11 aa, Artificial Sequence
  Description of Artificial Sequence: Synthetic peptide
  Seed: RMMEGAKPEEV
RLMEGAKPEEM

SEQ ID NO: 3815 - protein, 10 aa, Artificial Sequence
  Description of Artificial Sequence: Synthetic peptide
  Seed: RRTRIAYERM
RPTRIAYERI

SEQ ID NO: 3816 - protein, 10 aa, Artificial Sequence
  Description of Artificial Sequence: Synthetic peptide
  Seed: RRTRIAYERM
RPTRIAYERL

SEQ ID NO: 3817 - protein, 11 aa, Artificial Sequence
  Description of Artificial Sequence: Synthetic peptide
  Seed: RMMEGAKPEEV
RIMEGAKPEEV

SEQ ID NO: 3818 - protein, 10 aa, Artificial Sequence
  Description of Artificial Sequence: Synthetic peptide
  Seed: RRTRIAYERM
RPTRIAYERG

SEQ ID NO: 3819 - protein, 10 aa, Artificial Sequence
  Description of Artificial Sequence: Synthetic peptide
  Seed: RRTRIAYERM
RITRIAYERS

SEQ ID NO: 3820 - protein, 10 aa, Artificial Sequence
  Description of Artificial Sequence: Synthetic peptide
  Seed: RRTRIAYERM
RPTRIAYERR

SEQ ID NO: 3821 - protein, 11 aa, Artificial Sequence
  Description of Artificial Sequence: Synthetic peptide
  Seed: RMMEGAKPEEV
RQMEGAKPEEW

SEQ ID NO: 3822 - protein, 10 aa, Artificial Sequence
  Description of Artificial Sequence: Synthetic peptide
  Seed: RRTRIAYERM
RITRIAYERT

SEQ ID NO: 3823 - protein, 10 aa, Artificial Sequence
  Description of Artificial Sequence: Synthetic peptide
  Seed: RRTRIAYERM
RITRIAYERM

SEQ ID NO: 3824 - protein, 10 aa, Artificial Sequence
  Description of Artificial Sequence: Synthetic peptide
  Seed: RRTRIAYERM
RITRIAYERK

SEQ ID NO: 3825 - protein, 11 aa, Artificial Sequence
  Description of Artificial Sequence: Synthetic peptide
  Seed: RMMEGAKPEEV
RQMEGAKPEEF

SEQ ID NO: 3826 - protein, 11 aa, Artificial Sequence
  Description of Artificial Sequence: Synthetic peptide
  Seed: RMMEGAKPEEV
RQMEGAKPEEY

SEQ ID NO: 3827 - protein, 10 aa, Artificial Sequence
  Description of Artificial Sequence: Synthetic peptide
  Seed: RRTRIAYERM
RITRIAYERY

SEQ ID NO: 3828 - protein, 10 aa, Artificial Sequence
  Description of Artificial Sequence: Synthetic peptide
  Seed: RRTRIAYERM
RPTRIAYERA

SEQ ID NO: 3829 - protein, 10 aa, Artificial Sequence
  Description of Artificial Sequence: Synthetic peptide
  Seed: RRTRIAYERM
RFTRIAYERV

SEQ ID NO: 3830 - protein, 10 aa, Artificial Sequence
  Description of Artificial Sequence: Synthetic peptide
  Seed: RRTRIAYERM
RFTRIAYERY

SEQ ID NO: 3831 - protein, 10 aa, Artificial Sequence
  Description of Artificial Sequence: Synthetic peptide
  Seed: RRTRIAYERM
RFTRIAYERT

SEQ ID NO: 3832 - protein, 10 aa, Artificial Sequence
  Description of Artificial Sequence: Synthetic peptide
  Seed: RRTRIAYERM
RPTRIAYERK

SEQ ID NO: 3833 - protein, 11 aa, Artificial Sequence
  Description of Artificial Sequence: Synthetic peptide
  Seed: RMMEGAKPEEV
RLMEGAKPEEI

SEQ ID NO: 3834 - protein, 10 aa, Artificial Sequence
  Description of Artificial Sequence: Synthetic peptide
  Seed: RRTRIAYERM
RKTRIAYERT

SEQ ID NO: 3835 - protein, 10 aa, Artificial Sequence
  Description of Artificial Sequence: Synthetic peptide
  Seed: RRTRIAYERM
RFTRIAYERG

SEQ ID NO: 3836 - protein, 10 aa, Artificial Sequence
  Description of Artificial Sequence: Synthetic peptide
  Seed: RRTRIAYERM
RLTRIAYERA

SEQ ID NO: 3837 - protein, 10 aa, Artificial Sequence
  Description of Artificial Sequence: Synthetic peptide
  Seed: RRTRIAYERM
RPTRIAYERF

SEQ ID NO: 3838 - protein, 10 aa, Artificial Sequence
  Description of Artificial Sequence: Synthetic peptide
  Seed: RRTRIAYERM
RMTRIAYERK

SEQ ID NO: 3839 - protein, 10 aa, Artificial Sequence
  Description of Artificial Sequence: Synthetic peptide
  Seed: RRTRIAYERM
RMTRIAYERL

SEQ ID NO: 3840 - protein, 10 aa, Artificial Sequence
  Description of Artificial Sequence: Synthetic peptide
  Seed: RRTRIAYERM
RMTRIAYERI

SEQ ID NO: 3841 - protein, 11 aa, Artificial Sequence
  Description of Artificial Sequence: Synthetic peptide
  Seed: RMMEGAKPEEV
RHMEGAKPEEM

SEQ ID NO: 3842 - protein, 11 aa, Artificial Sequence
  Description of Artificial Sequence: Synthetic peptide
  Seed: RMMEGAKPEEV
RIMEGAKPEEF

SEQ ID NO: 3843 - protein, 10 aa, Artificial Sequence
  Description of Artificial Sequence: Synthetic peptide
  Seed: RRTRIAYERM
RLTRIAYERV

SEQ ID NO: 3844 - protein, 10 aa, Artificial Sequence
  Description of Artificial Sequence: Synthetic peptide
  Seed: RRTRIAYERM
RKTRIAYERA

SEQ ID NO: 3845 - protein, 10 aa, Artificial Sequence
  Description of Artificial Sequence: Synthetic peptide
  Seed: RRTRIAYERM
RKTRIAYERR

SEQ ID NO: 3846 - protein, 11 aa, Artificial Sequence
  Description of Artificial Sequence: Synthetic peptide
  Seed: RMMEGAKPEEV
RIMEGAKPEEL

SEQ ID NO: 3847 - protein, 10 aa, Artificial Sequence
  Description of Artificial Sequence: Synthetic peptide
  Seed: RRTRIAYERM
RKTRIAYERG

SEQ ID NO: 3848 - protein, 10 aa, Artificial Sequence
  Description of Artificial Sequence: Synthetic peptide
  Seed: RRTRIAYERM
RMTRIAYERG

SEQ ID NO: 3849 - protein, 10 aa, Artificial Sequence
  Description of Artificial Sequence: Synthetic peptide
  Seed: RRTRIAYERM
RMTRIAYERR

SEQ ID NO: 3850 - protein, 10 aa, Artificial Sequence
  Description of Artificial Sequence: Synthetic peptide
  Seed: RRTRIAYERM
RLTRIAYERR

SEQ ID NO: 3851 - protein, 10 aa, Artificial Sequence
  Description of Artificial Sequence: Synthetic peptide
  Seed: RRTRIAYERM
RKTRIAYERI

SEQ ID NO: 3852 - protein, 10 aa, Artificial Sequence
  Description of Artificial Sequence: Synthetic peptide
  Seed: RRTRIAYERM
RKTRIAYERL

SEQ ID NO: 3853 - protein, 10 aa, Artificial Sequence
  Description of Artificial Sequence: Synthetic peptide
  Seed: RRTRIAYERM
RKTRIAYERK

SEQ ID NO: 3854 - protein, 11 aa, Artificial Sequence
  Description of Artificial Sequence: Synthetic peptide
  Seed: RMMEGAKPEEV
RHMEGAKPEEF

SEQ ID NO: 3855 - protein, 10 aa, Artificial Sequence
  Description of Artificial Sequence: Synthetic peptide
  Seed: RRTRIAYERM
RMTRIAYERA

SEQ ID NO: 3856 - protein, 10 aa, Artificial Sequence
  Description of Artificial Sequence: Synthetic peptide
  Seed: RRTRIAYERM
RKTRIAYERV

SEQ ID NO: 3857 - protein, 11 aa, Artificial Sequence
  Description of Artificial Sequence: Synthetic peptide
  Seed: RMMEGAKPEEV
RHMEGAKPEEY

SEQ ID NO: 3858 - protein, 10 aa, Artificial Sequence
  Description of Artificial Sequence: Synthetic peptide
  Seed: RRTRIAYERM
RKTRIAYERF

SEQ ID NO: 3859 - protein, 10 aa, Artificial Sequence
  Description of Artificial Sequence: Synthetic peptide
  Seed: RRTRIAYERM
RKTRIAYERY

SEQ ID NO: 3860 - protein, 10 aa, Artificial Sequence
  Description of Artificial Sequence: Synthetic peptide
  Seed: RRTRIAYERM
RKTRIAYERS

SEQ ID NO: 3861 - protein, 10 aa, Artificial Sequence
  Description of Artificial Sequence: Synthetic peptide
  Seed: RRTRIAYERM
RMTRIAYERM

SEQ ID NO: 3862 - protein, 10 aa, Artificial Sequence
  Description of Artificial Sequence: Synthetic peptide
  Seed: RRTRIAYERM
RMTRIAYERF

SEQ ID NO: 3863 - protein, 10 aa, Artificial Sequence
  Description of Artificial Sequence: Synthetic peptide
  Seed: RRTRIAYERM
RMTRIAYERP

SEQ ID NO: 3864 - protein, 11 aa, Artificial Sequence
  Description of Artificial Sequence: Synthetic peptide
  Seed: RMMEGAKPEEV
REMEGAKPEEY

SEQ ID NO: 3865 - protein, 10 aa, Artificial Sequence
  Description of Artificial Sequence: Synthetic peptide
  Seed: RRTRIAYERM
RFTRIAYERM

SEQ ID NO: 3866 - protein, 10 aa, Artificial Sequence
  Description of Artificial Sequence: Synthetic peptide
  Seed: RRTRIAYERM
RFTRIAYERK

SEQ ID NO: 3867 - protein, 11 aa, Artificial Sequence
  Description of Artificial Sequence: Synthetic peptide
  Seed: RMMEGAKPEEV
REMEGAKPEEM

SEQ ID NO: 3868 - protein, 10 aa, Artificial Sequence
  Description of Artificial Sequence: Synthetic peptide
  Seed: RRTRIAYERM
RLTRIAYERG

SEQ ID NO: 3869 - protein, 10 aa, Artificial Sequence
  Description of Artificial Sequence: Synthetic peptide
  Seed: RRTRIAYERM
RLTRIAYERI

SEQ ID NO: 3870 - protein, 10 aa, Artificial Sequence
  Description of Artificial Sequence: Synthetic peptide
  Seed: RRTRIAYERM
RFTRIAYERL

SEQ ID NO: 3871 - protein, 10 aa, Artificial Sequence
  Description of Artificial Sequence: Synthetic peptide
  Seed: RRTRIAYERM
RFTRIAYERI

SEQ ID NO: 3872 - protein, 11 aa, Artificial Sequence
  Description of Artificial Sequence: Synthetic peptide
  Seed: RMMEGAKPEEV
REMEGAKPEEF

SEQ ID NO: 3873 - protein, 10 aa, Artificial Sequence
  Description of Artificial Sequence: Synthetic peptide
  Seed: RRTRIAYERM
RLTRIAYERL

SEQ ID NO: 3874 - protein, 10 aa, Artificial Sequence
  Description of Artificial Sequence: Synthetic peptide
  Seed: RRTRIAYERM
RLTRIAYERK

SEQ ID NO: 3875 - protein, 11 aa, Artificial Sequence
  Description of Artificial Sequence: Synthetic peptide
  Seed: RMMEGAKPEEV
RIMEGAKPEEI

SEQ ID NO: 3876 - protein, 10 aa, Artificial Sequence
  Description of Artificial Sequence: Synthetic peptide
  Seed: RRTRIAYERM
RFTRIAYERC

SEQ ID NO: 3877 - protein, 10 aa, Artificial Sequence
  Description of Artificial Sequence: Synthetic peptide
  Seed: RRTRIAYERM
RFTRIAYERR

SEQ ID NO: 3878 - protein, 10 aa, Artificial Sequence
  Description of Artificial Sequence: Synthetic peptide
  Seed: RRTRIAYERM
RFTRIAYERA

SEQ ID NO: 3879 - protein, 10 aa, Artificial Sequence
  Description of Artificial Sequence: Synthetic peptide
  Seed: RRTRIAYERM
RMTRIAYERV

SEQ ID NO: 3880 - protein, 10 aa, Artificial Sequence
  Description of Artificial Sequence: Synthetic peptide
  Seed: RRTRIAYERM
RMTRIAYERY

SEQ ID NO: 3881 - protein, 10 aa, Artificial Sequence
  Description of Artificial Sequence: Synthetic peptide
  Seed: RRTRIAYERM
RMTRIAYERT

SEQ ID NO: 3882 - protein, 10 aa, Artificial Sequence
  Description of Artificial Sequence: Synthetic peptide
  Seed: RRTRIAYERM
RLTRIAYERF

SEQ ID NO: 3883 - protein, 10 aa, Artificial Sequence
  Description of Artificial Sequence: Synthetic peptide
  Seed: RRTRIAYERM
RLTRIAYERS

SEQ ID NO: 3884 - protein, 10 aa, Artificial Sequence
  Description of Artificial Sequence: Synthetic peptide
  Seed: RRTRIAYERM
RLTRIAYERT

SEQ ID NO: 3885 - protein, 10 aa, Artificial Sequence
  Description of Artificial Sequence: Synthetic peptide
  Seed: RRTRIAYERM
RMTRIAYERS

SEQ ID NO: 3886 - protein, 10 aa, Artificial Sequence
  Description of Artificial Sequence: Synthetic peptide
  Seed: RRTRIAYERM
RLTRIAYERY

SEQ ID NO: 3887 - protein, 10 aa, Artificial Sequence
  Description of Artificial Sequence: Synthetic peptide
  Seed: RRTRIAYERM
RMTRIAYERC

SEQ ID NO: 3888 - protein, 10 aa, Artificial Sequence
  Description of Artificial Sequence: Synthetic peptide
  Seed: RRTRIAYERM
RTTRIAYERS

SEQ ID NO: 3889 - protein, 11 aa, Artificial Sequence
  Description of Artificial Sequence: Synthetic peptide
  Seed: RMMEGAKPEEV
RQMEGAKPEEM

SEQ ID NO: 3890 - protein, 11 aa, Artificial Sequence
  Description of Artificial Sequence: Synthetic peptide
  Seed: RRTRIAYERMC
RATRIAYERMI

SEQ ID NO: 3891 - protein, 11 aa, Artificial Sequence
  Description of Artificial Sequence: Synthetic peptide
  Seed: RRTRIAYERMC
RRTRIAYERMF

SEQ ID NO: 3892 - protein, 11 aa, Artificial Sequence
  Description of Artificial Sequence: Synthetic peptide
  Seed: RRTRIAYERMC
RRTRIAYERMP

SEQ ID NO: 3893 - protein, 11 aa, Artificial Sequence
  Description of Artificial Sequence: Synthetic peptide
  Seed: RRTRIAYERMC
RRTRIAYERMS

SEQ ID NO: 3894 - protein, 11 aa, Artificial Sequence
  Description of Artificial Sequence: Synthetic peptide
  Seed: RRTRIAYERMC
RRTRIAYERMT

SEQ ID NO: 3895 - protein, 11 aa, Artificial Sequence
  Description of Artificial Sequence: Synthetic peptide
  Seed: RRTRIAYERMC
RRTRIAYERMW

SEQ ID NO: 3896 - protein, 11 aa, Artificial Sequence
  Description of Artificial Sequence: Synthetic peptide
  Seed: RRTRIAYERMC
RRTRIAYERMY

SEQ ID NO: 3897 - protein, 11 aa, Artificial Sequence
  Description of Artificial Sequence: Synthetic peptide
  Seed: RRTRIAYERMC
RRTRIAYERMV

SEQ ID NO: 3898 - protein, 11 aa, Artificial Sequence
  Description of Artificial Sequence: Synthetic peptide
  Seed: RRTRIAYERMC
RNTRIAYERMR

SEQ ID NO: 3899 - protein, 11 aa, Artificial Sequence
  Description of Artificial Sequence: Synthetic peptide
  Seed: RRTRIAYERMC
RNTRIAYERMI

SEQ ID NO: 3900 - protein, 11 aa, Artificial Sequence
  Description of Artificial Sequence: Synthetic peptide
  Seed: RRTRIAYERMC
RNTRIAYERML

SEQ ID NO: 3901 - protein, 11 aa, Artificial Sequence
  Description of Artificial Sequence: Synthetic peptide
  Seed: RMIKRGINDRN
RSIKRGINDRR

SEQ ID NO: 3902 - protein, 11 aa, Artificial Sequence
  Description of Artificial Sequence: Synthetic peptide
  Seed: RRTRIAYERMC
RNTRIAYERMK

SEQ ID NO: 3903 - protein, 11 aa, Artificial Sequence
  Description of Artificial Sequence: Synthetic peptide
  Seed: RRTRIAYERMC
RNTRIAYERMM

SEQ ID NO: 3904 - protein, 11 aa, Artificial Sequence
  Description of Artificial Sequence: Synthetic peptide
  Seed: RRTRIAYERMC
RNTRIAYERMF

SEQ ID NO: 3905 - protein, 11 aa, Artificial Sequence
  Description of Artificial Sequence: Synthetic peptide
  Seed: RRTRIAYERMC
RNTRIAYERMY

SEQ ID NO: 3906 - protein, 11 aa, Artificial Sequence
  Description of Artificial Sequence: Synthetic peptide
  Seed: RRTRIAYERMC
RNTRIAYERMV

SEQ ID NO: 3907 - protein, 11 aa, Artificial Sequence
  Description of Artificial Sequence: Synthetic peptide
  Seed: RRTRIAYERMC
RDTRIAYERMR

SEQ ID NO: 3908 - protein, 11 aa, Artificial Sequence
  Description of Artificial Sequence: Synthetic peptide
  Seed: RMIKRGINDRN
RTIKRGINDRR

SEQ ID NO: 3909 - protein, 11 aa, Artificial Sequence
  Description of Artificial Sequence: Synthetic peptide
  Seed: RRTRIAYERMC
RRTRIAYERMM

SEQ ID NO: 3910 - protein, 11 aa, Artificial Sequence
  Description of Artificial Sequence: Synthetic peptide
  Seed: RRTRIAYERMC
RRTRIAYERMK

SEQ ID NO: 3911 - protein, 11 aa, Artificial Sequence
  Description of Artificial Sequence: Synthetic peptide
  Seed: RMIKRGINDRN
RWIKRGINDRK

SEQ ID NO: 3912 - protein, 11 aa, Artificial Sequence
  Description of Artificial Sequence: Synthetic peptide
  Seed: RRTRIAYERMC
RATRIAYERMK

SEQ ID NO: 3913 - protein, 11 aa, Artificial Sequence
  Description of Artificial Sequence: Synthetic peptide
  Seed: RRTRIAYERMC
RATRIAYERMM

SEQ ID NO: 3914 - protein, 11 aa, Artificial Sequence
  Description of Artificial Sequence: Synthetic peptide
  Seed: RRTRIAYERMC
RATRIAYERMF

SEQ ID NO: 3915 - protein, 11 aa, Artificial Sequence
  Description of Artificial Sequence: Synthetic peptide
  Seed: RRTRIAYERMC
RATRIAYERMY

SEQ ID NO: 3916 - protein, 11 aa, Artificial Sequence
  Description of Artificial Sequence: Synthetic peptide
  Seed: RRTRIAYERMC
RATRIAYERMV

SEQ ID NO: 3917 - protein, 11 aa, Artificial Sequence
  Description of Artificial Sequence: Synthetic peptide
  Seed: RRTRIAYERMC
RRTRIAYERMA

SEQ ID NO: 3918 - protein, 11 aa, Artificial Sequence
  Description of Artificial Sequence: Synthetic peptide
  Seed: RRTRIAYERMC
RRTRIAYERMR

SEQ ID NO: 3919 - protein, 11 aa, Artificial Sequence
  Description of Artificial Sequence: Synthetic peptide
  Seed: RRTRIAYERMC
RRTRIAYERMN

SEQ ID NO: 3920 - protein, 11 aa, Artificial Sequence
  Description of Artificial Sequence: Synthetic peptide
  Seed: RRTRIAYERMC
RRTRIAYERML

SEQ ID NO: 3921 - protein, 11 aa, Artificial Sequence
  Description of Artificial Sequence: Synthetic peptide
  Seed: RMIKRGINDRN
RWIKRGINDRR

SEQ ID NO: 3922 - protein, 11 aa, Artificial Sequence
  Description of Artificial Sequence: Synthetic peptide
  Seed: RRTRIAYERMC
RRTRIAYERMQ

SEQ ID NO: 3923 - protein, 11 aa, Artificial Sequence
  Description of Artificial Sequence: Synthetic peptide
  Seed: RRTRIAYERMC
RRTRIAYERME

SEQ ID NO: 3924 - protein, 11 aa, Artificial Sequence
  Description of Artificial Sequence: Synthetic peptide
  Seed: RRTRIAYERMC
RRTRIAYERMG

SEQ ID NO: 3925 - protein, 11 aa, Artificial Sequence
  Description of Artificial Sequence: Synthetic peptide
  Seed: RRTRIAYERMC
RRTRIAYERMH

SEQ ID NO: 3926 - protein, 11 aa, Artificial Sequence
  Description of Artificial Sequence: Synthetic peptide
  Seed: RMIKRGINDRN
RTIKRGINDRK

SEQ ID NO: 3927 - protein, 11 aa, Artificial Sequence
  Description of Artificial Sequence: Synthetic peptide
  Seed: RRTRIAYERMC
RRTRIAYERMI

SEQ ID NO: 3928 - protein, 11 aa, Artificial Sequence
  Description of Artificial Sequence: Synthetic peptide
  Seed: RRTRIAYERMC
RDTRIAYERMI

SEQ ID NO: 3929 - protein, 11 aa, Artificial Sequence
  Description of Artificial Sequence: Synthetic peptide
  Seed: RMIKRGINDRN
RFIKRGINDRV

SEQ ID NO: 3930 - protein, 11 aa, Artificial Sequence
  Description of Artificial Sequence: Synthetic peptide
  Seed: RRTRIAYERMC
RDTRIAYERML

SEQ ID NO: 3931 - protein, 11 aa, Artificial Sequence
  Description of Artificial Sequence: Synthetic peptide
  Seed: RRTRIAYERMC
RQTRIAYERMV

SEQ ID NO: 3932 - protein, 11 aa, Artificial Sequence
  Description of Artificial Sequence: Synthetic peptide
  Seed: RRTRIAYERMC
RQTRIAYERML

SEQ ID NO: 3933 - protein, 11 aa, Artificial Sequence
  Description of Artificial Sequence: Synthetic peptide
  Seed: RRTRIAYERMC
RQTRIAYERMK

SEQ ID NO: 3934 - protein, 11 aa, Artificial Sequence
  Description of Artificial Sequence: Synthetic peptide
  Seed: RRTRIAYERMC
RQTRIAYERMM

SEQ ID NO: 3935 - protein, 11 aa, Artificial Sequence
  Description of Artificial Sequence: Synthetic peptide
  Seed: RMIKRGINDRN
RFIKRGINDRM

SEQ ID NO: 3936 - protein, 11 aa, Artificial Sequence
  Description of Artificial Sequence: Synthetic peptide
  Seed: RRTRIAYERMC
RQTRIAYERMF

SEQ ID NO: 3937 - protein, 11 aa, Artificial Sequence
  Description of Artificial Sequence: Synthetic peptide
  Seed: RRTRIAYERMC
RQTRIAYERMY

SEQ ID NO: 3938 - protein, 11 aa, Artificial Sequence
  Description of Artificial Sequence: Synthetic peptide
  Seed: RMIKRGINDRN
RFIKRGINDRK

SEQ ID NO: 3939 - protein, 11 aa, Artificial Sequence
  Description of Artificial Sequence: Synthetic peptide
  Seed: RMIKRGINDRN
RFIKRGINDRL

SEQ ID NO: 3940 - protein, 11 aa, Artificial Sequence
  Description of Artificial Sequence: Synthetic peptide
  Seed: RMIKRGINDRN
RFIKRGINDRF

SEQ ID NO: 3941 - protein, 11 aa, Artificial Sequence
  Description of Artificial Sequence: Synthetic peptide
  Seed: RMIKRGINDRN
RFIKRGINDRI

SEQ ID NO: 3942 - protein, 11 aa, Artificial Sequence
  Description of Artificial Sequence: Synthetic peptide
  Seed: RMIKRGINDRN
RFIKRGINDRH

SEQ ID NO: 3943 - protein, 11 aa, Artificial Sequence
  Description of Artificial Sequence: Synthetic peptide
  Seed: RRTRIAYERMC
RETRIAYERMR

SEQ ID NO: 3944 - protein, 11 aa, Artificial Sequence
  Description of Artificial Sequence: Synthetic peptide
  Seed: RRTRIAYERMC
RETRIAYERMI

SEQ ID NO: 3945 - protein, 11 aa, Artificial Sequence
  Description of Artificial Sequence: Synthetic peptide
  Seed: RRTRIAYERMC
RETRIAYERML

SEQ ID NO: 3946 - protein, 11 aa, Artificial Sequence
  Description of Artificial Sequence: Synthetic peptide
  Seed: RRTRIAYERMC
RETRIAYERMK

SEQ ID NO: 3947 - protein, 11 aa, Artificial Sequence
  Description of Artificial Sequence: Synthetic peptide
  Seed: RRTRIAYERMC
RETRIAYERMM

SEQ ID NO: 3948 - protein, 11 aa, Artificial Sequence
  Description of Artificial Sequence: Synthetic peptide
  Seed: RRTRIAYERMC
RQTRIAYERMI

SEQ ID NO: 3949 - protein, 11 aa, Artificial Sequence
  Description of Artificial Sequence: Synthetic peptide
  Seed: RRTRIAYERMC
RQTRIAYERMR

SEQ ID NO: 3950 - protein, 11 aa, Artificial Sequence
  Description of Artificial Sequence: Synthetic peptide
  Seed: RRTRIAYERMC
RDTRIAYERMK

SEQ ID NO: 3951 - protein, 11 aa, Artificial Sequence
  Description of Artificial Sequence: Synthetic peptide
  Seed: RRTRIAYERMC
RCTRIAYERMR

SEQ ID NO: 3952 - protein, 11 aa, Artificial Sequence
  Description of Artificial Sequence: Synthetic peptide
  Seed: RRTRIAYERMC
RDTRIAYERMM

SEQ ID NO: 3953 - protein, 11 aa, Artificial Sequence
  Description of Artificial Sequence: Synthetic peptide
  Seed: RRTRIAYERMC
RDTRIAYERMF

SEQ ID NO: 3954 - protein, 11 aa, Artificial Sequence
  Description of Artificial Sequence: Synthetic peptide
  Seed: RRTRIAYERMC
RDTRIAYERMY

SEQ ID NO: 3955 - protein, 11 aa, Artificial Sequence
  Description of Artificial Sequence: Synthetic peptide
  Seed: RMIKRGINDRN
RFIKRGINDRY

SEQ ID NO: 3956 - protein, 11 aa, Artificial Sequence
  Description of Artificial Sequence: Synthetic peptide
  Seed: RRTRIAYERMC
RDTRIAYERMV

SEQ ID NO: 3957 - protein, 11 aa, Artificial Sequence
  Description of Artificial Sequence: Synthetic peptide
  Seed: RMIKRGINDRN
RFIKRGINDRW

SEQ ID NO: 3958 - protein, 11 aa, Artificial Sequence
  Description of Artificial Sequence: Synthetic peptide
  Seed: RMIKRGINDRN
RFIKRGINDRT

SEQ ID NO: 3959 - protein, 11 aa, Artificial Sequence
  Description of Artificial Sequence: Synthetic peptide
  Seed: RRTRIAYERMC
RCTRIAYERMI

SEQ ID NO: 3960 - protein, 11 aa, Artificial Sequence
  Description of Artificial Sequence: Synthetic peptide
  Seed: RRTRIAYERMC
RCTRIAYERMV

SEQ ID NO: 3961 - protein, 11 aa, Artificial Sequence
  Description of Artificial Sequence: Synthetic peptide
  Seed: RRTRIAYERMC
RCTRIAYERML

SEQ ID NO: 3962 - protein, 11 aa, Artificial Sequence
  Description of Artificial Sequence: Synthetic peptide
  Seed: RRTRIAYERMC
RCTRIAYERMK

SEQ ID NO: 3963 - protein, 11 aa, Artificial Sequence
  Description of Artificial Sequence: Synthetic peptide
  Seed: RRTRIAYERMC
RCTRIAYERMM

SEQ ID NO: 3964 - protein, 11 aa, Artificial Sequence
  Description of Artificial Sequence: Synthetic peptide
  Seed: RRTRIAYERMC
RCTRIAYERMF

SEQ ID NO: 3965 - protein, 11 aa, Artificial Sequence
  Description of Artificial Sequence: Synthetic peptide
  Seed: RMIKRGINDRN
RFIKRGINDRS

SEQ ID NO: 3966 - protein, 11 aa, Artificial Sequence
  Description of Artificial Sequence: Synthetic peptide
  Seed: RRTRIAYERMC
RCTRIAYERMY

SEQ ID NO: 3967 - protein, 11 aa, Artificial Sequence
  Description of Artificial Sequence: Synthetic peptide
  Seed: RMIKRGINDRN
RFIKRGINDRP

SEQ ID NO: 3968 - protein, 11 aa, Artificial Sequence
  Description of Artificial Sequence: Synthetic peptide
  Seed: RRTRIAYERMC
RATRIAYERML

SEQ ID NO: 3969 - protein, 11 aa, Artificial Sequence
  Description of Artificial Sequence: Synthetic peptide
  Seed: RRTRIAYERMC
RATRIAYERMR

SEQ ID NO: 3970 - protein, 10 aa, Artificial Sequence
  Description of Artificial Sequence: Synthetic peptide
  Seed: RRTRIAYERM
RPTRIAYERS

SEQ ID NO: 3971 - protein, 10 aa, Artificial Sequence
  Description of Artificial Sequence: Synthetic peptide
  Seed: RRTRIAYERM
RVTRIAYERV

SEQ ID NO: 3972 - protein, 10 aa, Artificial Sequence
  Description of Artificial Sequence: Synthetic peptide
  Seed: RRTRIAYERM
RTTRIAYERR

SEQ ID NO: 3973 - protein, 10 aa, Artificial Sequence
  Description of Artificial Sequence: Synthetic peptide
  Seed: RRTRIAYERM
RTTRIAYERG

SEQ ID NO: 3974 - protein, 11 aa, Artificial Sequence
  Description of Artificial Sequence: Synthetic peptide
  Seed: RMMEGAKPEEV
RRMEGAKPEEF

SEQ ID NO: 3975 - protein, 10 aa, Artificial Sequence
  Description of Artificial Sequence: Synthetic peptide
  Seed: RRTRIAYERM
RTTRIAYERI

SEQ ID NO: 3976 - protein, 10 aa, Artificial Sequence
  Description of Artificial Sequence: Synthetic peptide
  Seed: RRTRIAYERM
RTTRIAYERL

SEQ ID NO: 3977 - protein, 10 aa, Artificial Sequence
  Description of Artificial Sequence: Synthetic peptide
  Seed: RRTRIAYERM
RTTRIAYERK

SEQ ID NO: 3978 - protein, 10 aa, Artificial Sequence
  Description of Artificial Sequence: Synthetic peptide
  Seed: RRTRIAYERM
RTTRIAYERM

SEQ ID NO: 3979 - protein, 10 aa, Artificial Sequence
  Description of Artificial Sequence: Synthetic peptide
  Seed: RRTRIAYERM
RTTRIAYERF

SEQ ID NO: 3980 - protein, 10 aa, Artificial Sequence
  Description of Artificial Sequence: Synthetic peptide
  Seed: RRTRIAYERM
RTTRIAYERT

SEQ ID NO: 3981 - protein, 10 aa, Artificial Sequence
  Description of Artificial Sequence: Synthetic peptide
  Seed: RRTRIAYERM
RTTRIAYERY

SEQ ID NO: 3982 - protein, 10 aa, Artificial Sequence
  Description of Artificial Sequence: Synthetic peptide
  Seed: RRTRIAYERM
RTTRIAYERV

SEQ ID NO: 3983 - protein, 11 aa, Artificial Sequence
  Description of Artificial Sequence: Synthetic peptide
  Seed: RMMEGAKPEEV
RAMEGAKPEEY

SEQ ID NO: 3984 - protein, 10 aa, Artificial Sequence
  Description of Artificial Sequence: Synthetic peptide
  Seed: RRTRIAYERM
RWTRIAYERA

SEQ ID NO: 3985 - protein, 10 aa, Artificial Sequence
  Description of Artificial Sequence: Synthetic peptide
  Seed: RRTRIAYERM
RWTRIAYERR

SEQ ID NO: 3986 - protein, 10 aa, Artificial Sequence
  Description of Artificial Sequence: Synthetic peptide
  Seed: RRTRIAYERM
RWTRIAYERG

SEQ ID NO: 3987 - protein, 10 aa, Artificial Sequence
  Description of Artificial Sequence: Synthetic peptide
  Seed: RRTRIAYERM
RWTRIAYERI

SEQ ID NO: 3988 - protein, 10 aa, Artificial Sequence
  Description of Artificial Sequence: Synthetic peptide
  Seed: RRTRIAYERM
RTTRIAYERA

SEQ ID NO: 3989 - protein, 10 aa, Artificial Sequence
  Description of Artificial Sequence: Synthetic peptide
  Seed: RRTRIAYERM
RSTRIAYERV

SEQ ID NO: 3990 - protein, 10 aa, Artificial Sequence
  Description of Artificial Sequence: Synthetic peptide
  Seed: RRTRIAYERM
RSTRIAYERY

SEQ ID NO: 3991 - protein, 11 aa, Artificial Sequence
  Description of Artificial Sequence: Synthetic peptide
  Seed: RMMEGAKPEEV
RRMEGAKPEEY

SEQ ID NO: 3992 - protein, 10 aa, Artificial Sequence
  Description of Artificial Sequence: Synthetic peptide
  Seed: RRTRIAYERM
RPTRIAYERT

SEQ ID NO: 3993 - protein, 11 aa, Artificial Sequence
  Description of Artificial Sequence: Synthetic peptide
  Seed: RMMEGAKPEEV
RQMEGAKPEEL

SEQ ID NO: 3994 - protein, 10 aa, Artificial Sequence
  Description of Artificial Sequence: Synthetic peptide
  Seed: RRTRIAYERM
RPTRIAYERY

SEQ ID NO: 3995 - protein, 11 aa, Artificial Sequence
  Description of Artificial Sequence: Synthetic peptide
  Seed: RMMEGAKPEEV
RQMEGAKPEEI

SEQ ID NO: 3996 - protein, 11 aa, Artificial Sequence
  Description of Artificial Sequence: Synthetic peptide
  Seed: RMMEGAKPEEV
RQMEGAKPEEH

SEQ ID NO: 3997 - protein, 10 aa, Artificial Sequence
  Description of Artificial Sequence: Synthetic peptide
  Seed: RRTRIAYERM
RPTRIAYERV

SEQ ID NO: 3998 - protein, 10 aa, Artificial Sequence
  Description of Artificial Sequence: Synthetic peptide
  Seed: RRTRIAYERM
RSTRIAYERA

SEQ ID NO: 3999 - protein, 10 aa, Artificial Sequence
  Description of Artificial Sequence: Synthetic peptide
  Seed: RRTRIAYERM
RSTRIAYERR

SEQ ID NO: 4000 - protein, 10 aa, Artificial Sequence
  Description of Artificial Sequence: Synthetic peptide
  Seed: RRTRIAYERM
RSTRIAYERT

SEQ ID NO: 4001 - protein, 10 aa, Artificial Sequence
  Description of Artificial Sequence: Synthetic peptide
  Seed: RRTRIAYERM
RSTRIAYERG

SEQ ID NO: 4002 - protein, 10 aa, Artificial Sequence
  Description of Artificial Sequence: Synthetic peptide
  Seed: RRTRIAYERM
RSTRIAYERI

SEQ ID NO: 4003 - protein, 10 aa, Artificial Sequence
  Description of Artificial Sequence: Synthetic peptide
  Seed: RRTRIAYERM
RSTRIAYERL

SEQ ID NO: 4004 - protein, 10 aa, Artificial Sequence
  Description of Artificial Sequence: Synthetic peptide
  Seed: RRTRIAYERM
RSTRIAYERK

SEQ ID NO: 4005 - protein, 10 aa, Artificial Sequence
  Description of Artificial Sequence: Synthetic peptide
  Seed: RRTRIAYERM
RSTRIAYERM

SEQ ID NO: 4006 - protein, 10 aa, Artificial Sequence
  Description of Artificial Sequence: Synthetic peptide
  Seed: RRTRIAYERM
RSTRIAYERF

SEQ ID NO: 4007 - protein, 10 aa, Artificial Sequence
  Description of Artificial Sequence: Synthetic peptide
  Seed: RRTRIAYERM
RSTRIAYERS

SEQ ID NO: 4008 - protein, 11 aa, Artificial Sequence
  Description of Artificial Sequence: Synthetic peptide
  Seed: RMMEGAKPEEV
RAMEGAKPEEF

SEQ ID NO: 4009 - protein, 10 aa, Artificial Sequence
  Description of Artificial Sequence: Synthetic peptide
  Seed: RRTRIAYERM
RWTRIAYERL

SEQ ID NO: 4010 - protein, 10 aa, Artificial Sequence
  Description of Artificial Sequence: Synthetic peptide
  Seed: RRTRIAYERM
RWTRIAYERK

SEQ ID NO: 4011 - protein, 10 aa, Artificial Sequence
  Description of Artificial Sequence: Synthetic peptide
  Seed: RRTRIAYERM
RVTRIAYERL

SEQ ID NO: 4012 - protein, 10 aa, Artificial Sequence
  Description of Artificial Sequence: Synthetic peptide
  Seed: RRTRIAYERM
RVTRIAYERA

SEQ ID NO: 4013 - protein, 10 aa, Artificial Sequence
  Description of Artificial Sequence: Synthetic peptide
  Seed: RRTRIAYERM
RVTRIAYERR

SEQ ID NO: 4014 - protein, 10 aa, Artificial Sequence
  Description of Artificial Sequence: Synthetic peptide
  Seed: RRTRIAYERM
RVTRIAYERC

SEQ ID NO: 4015 - protein, 10 aa, Artificial Sequence
  Description of Artificial Sequence: Synthetic peptide
  Seed: RRTRIAYERM
RVTRIAYERG

SEQ ID NO: 4016 - protein, 10 aa, Artificial Sequence
  Description of Artificial Sequence: Synthetic peptide
  Seed: RRTRIAYERM
RVTRIAYERI

SEQ ID NO: 4017 - protein, 11 aa, Artificial Sequence
  Description of Artificial Sequence: Synthetic peptide
  Seed: RMIKRGINDRN
RVIKRGINDRR

SEQ ID NO: 4018 - protein, 11 aa, Artificial Sequence
  Description of Artificial Sequence: Synthetic peptide
  Seed: RMIKRGINDRN
RYIKRGINDRK

SEQ ID NO: 4019 - protein, 10 aa, Artificial Sequence
  Description of Artificial Sequence: Synthetic peptide
  Seed: RRTRIAYERM
RVTRIAYERK

SEQ ID NO: 4020 - protein, 10 aa, Artificial Sequence
  Description of Artificial Sequence: Synthetic peptide
  Seed: RRTRIAYERM
RYTRIAYERY

SEQ ID NO: 4021 - protein, 10 aa, Artificial Sequence
  Description of Artificial Sequence: Synthetic peptide
  Seed: RRTRIAYERM
RVTRIAYERM

SEQ ID NO: 4022 - protein, 10 aa, Artificial Sequence
  Description of Artificial Sequence: Synthetic peptide
  Seed: RRTRIAYERM
RVTRIAYERF

SEQ ID NO: 4023 - protein, 10 aa, Artificial Sequence
  Description of Artificial Sequence: Synthetic peptide
  Seed: RRTRIAYERM
RVTRIAYERP

SEQ ID NO: 4024 - protein, 11 aa, Artificial Sequence
  Description of Artificial Sequence: Synthetic peptide
  Seed: RMIKRGINDRN
RYIKRGINDRR

SEQ ID NO: 4025 - protein, 10 aa, Artificial Sequence
  Description of Artificial Sequence: Synthetic peptide
  Seed: RRTRIAYERM
RVTRIAYERS

SEQ ID NO: 4026 - protein, 10 aa, Artificial Sequence
  Description of Artificial Sequence: Synthetic peptide
  Seed: RRTRIAYERM
RVTRIAYERT

SEQ ID NO: 4027 - protein, 10 aa, Artificial Sequence
  Description of Artificial Sequence: Synthetic peptide
  Seed: RRTRIAYERM
RVTRIAYERY

SEQ ID NO: 4028 - protein, 10 aa, Artificial Sequence
  Description of Artificial Sequence: Synthetic peptide
  Seed: RRTRIAYERM
RYTRIAYERV

SEQ ID NO: 4029 - protein, 10 aa, Artificial Sequence
  Description of Artificial Sequence: Synthetic peptide
  Seed: RRTRIAYERM
RYTRIAYERT

SEQ ID NO: 4030 - protein, 10 aa, Artificial Sequence
  Description of Artificial Sequence: Synthetic peptide
  Seed: RRTRIAYERM
RWTRIAYERM

SEQ ID NO: 4031 - protein, 10 aa, Artificial Sequence
  Description of Artificial Sequence: Synthetic peptide
  Seed: RRTRIAYERM
RYTRIAYERC

SEQ ID NO: 4032 - protein, 10 aa, Artificial Sequence
  Description of Artificial Sequence: Synthetic peptide
  Seed: RRTRIAYERM
RWTRIAYERF

SEQ ID NO: 4033 - protein, 10 aa, Artificial Sequence
  Description of Artificial Sequence: Synthetic peptide
  Seed: RRTRIAYERM
RWTRIAYERS

SEQ ID NO: 4034 - protein, 10 aa, Artificial Sequence
  Description of Artificial Sequence: Synthetic peptide
  Seed: RRTRIAYERM
RWTRIAYERT

SEQ ID NO: 4035 - protein, 10 aa, Artificial Sequence
  Description of Artificial Sequence: Synthetic peptide
  Seed: RRTRIAYERM
RWTRIAYERY

SEQ ID NO: 4036 - protein, 10 aa, Artificial Sequence
  Description of Artificial Sequence: Synthetic peptide
  Seed: RRTRIAYERM
RWTRIAYERV

SEQ ID NO: 4037 - protein, 10 aa, Artificial Sequence
  Description of Artificial Sequence: Synthetic peptide
  Seed: RRTRIAYERM
RYTRIAYERA

SEQ ID NO: 4038 - protein, 10 aa, Artificial Sequence
  Description of Artificial Sequence: Synthetic peptide
  Seed: RRTRIAYERM
RYTRIAYERR

SEQ ID NO: 4039 - protein, 10 aa, Artificial Sequence
  Description of Artificial Sequence: Synthetic peptide
  Seed: RRTRIAYERM
RYTRIAYERG

SEQ ID NO: 4040 - protein, 10 aa, Artificial Sequence
  Description of Artificial Sequence: Synthetic peptide
  Seed: RRTRIAYERM
RYTRIAYERS

SEQ ID NO: 4041 - protein, 10 aa, Artificial Sequence
  Description of Artificial Sequence: Synthetic peptide
  Seed: RRTRIAYERM
RYTRIAYERI

SEQ ID NO: 4042 - protein, 10 aa, Artificial Sequence
  Description of Artificial Sequence: Synthetic peptide
  Seed: RRTRIAYERM
RYTRIAYERL

SEQ ID NO: 4043 - protein, 11 aa, Artificial Sequence
  Description of Artificial Sequence: Synthetic peptide
  Seed: RMIKRGINDRN
RVIKRGINDRK

SEQ ID NO: 4044 - protein, 10 aa, Artificial Sequence
  Description of Artificial Sequence: Synthetic peptide
  Seed: RRTRIAYERM
RYTRIAYERK

SEQ ID NO: 4045 - protein, 10 aa, Artificial Sequence
  Description of Artificial Sequence: Synthetic peptide
  Seed: RRTRIAYERM
RYTRIAYERM

SEQ ID NO: 4046 - protein, 10 aa, Artificial Sequence
  Description of Artificial Sequence: Synthetic peptide
  Seed: RRTRIAYERM
RYTRIAYERF

SEQ ID NO: 4047 - protein, 10 aa, Artificial Sequence
  Description of Artificial Sequence: Synthetic peptide
  Seed: RRTRIAYERM
RYTRIAYERP

SEQ ID NO: 4048 - protein, 10 aa, Artificial Sequence
  Description of Artificial Sequence: Synthetic peptide
  Seed: RRTRIAYERM
RITRIAYERG

SEQ ID NO: 4049 - protein, 10 aa, Artificial Sequence
  Description of Artificial Sequence: Synthetic peptide
  Seed: RMVGGIGRFY
RCVGGIGRFW

SEQ ID NO: 4050 - protein, 10 aa, Artificial Sequence
  Description of Artificial Sequence: Synthetic peptide
  Seed: RRTRIAYERM
RITRIAYERR

SEQ ID NO: 4051 - protein, 9 aa, Artificial Sequence
  Description of Artificial Sequence: Synthetic peptide
  Seed: RRRDGKWMR
RRRDGKWMF

SEQ ID NO: 4052 - protein, 9 aa, Artificial Sequence
  Description of Artificial Sequence: Synthetic peptide
  Seed: RRRDGKWMR
RRRDGKWMY

SEQ ID NO: 4053 - protein, 9 aa, Artificial Sequence
  Description of Artificial Sequence: Synthetic peptide
  Seed: RRRDGKWMR
RRRDGKWMV

SEQ ID NO: 4054 - protein, 9 aa, Artificial Sequence
  Description of Artificial Sequence: Synthetic peptide
  Seed: RRRDGKWMR
RQRDGKWMK

SEQ ID NO: 4055 - protein, 11 aa, Artificial Sequence
  Description of Artificial Sequence: Synthetic peptide
  Seed: RRRDGKWMREL
RRRDGKWMRER

SEQ ID NO: 4056 - protein, 9 aa, Artificial Sequence
  Description of Artificial Sequence: Synthetic peptide
  Seed: RMMESARPE
RQMESARPN

SEQ ID NO: 4057 - protein, 9 aa, Artificial Sequence
  Description of Artificial Sequence: Synthetic peptide
  Seed: RMMESARPE
RQMESARPA

SEQ ID NO: 4058 - protein, 11 aa, Artificial Sequence
  Description of Artificial Sequence: Synthetic peptide
  Seed: RRRDGKWMREL
RRRDGKWMREI

SEQ ID NO: 4059 - protein, 9 aa, Artificial Sequence
  Description of Artificial Sequence: Synthetic peptide
  Seed: RMMESARPE
RCMESARPY

SEQ ID NO: 4060 - protein, 11 aa, Artificial Sequence
  Description of Artificial Sequence: Synthetic peptide
  Seed: RRRDGKWMREL
RRRDGKWMREK

SEQ ID NO: 4061 - protein, 11 aa, Artificial Sequence
  Description of Artificial Sequence: Synthetic peptide
  Seed: RRRDGKWMREL
RRRDGKWMREM

SEQ ID NO: 4062 - protein, 11 aa, Artificial Sequence
  Description of Artificial Sequence: Synthetic peptide
  Seed: RRRDGKWMREL
RRRDGKWMREF

SEQ ID NO: 4063 - protein, 11 aa, Artificial Sequence
  Description of Artificial Sequence: Synthetic peptide
  Seed: RRRDGKWMREL
RRRDGKWMREY

SEQ ID NO: 4064 - protein, 11 aa, Artificial Sequence
  Description of Artificial Sequence: Synthetic peptide
  Seed: RRRDGKWMREL
RRRDGKWMREV

SEQ ID NO: 4065 - protein, 9 aa, Artificial Sequence
  Description of Artificial Sequence: Synthetic peptide
  Seed: RRRDGKWVR
RRRDGKWVA

SEQ ID NO: 4066 - protein, 9 aa, Artificial Sequence
  Description of Artificial Sequence: Synthetic peptide
  Seed: RMMESARPE
RCMESARPF

SEQ ID NO: 4067 - protein, 9 aa, Artificial Sequence
  Description of Artificial Sequence: Synthetic peptide
  Seed: RMMESARPE
RCMESARPM

SEQ ID NO: 4068 - protein, 9 aa, Artificial Sequence
  Description of Artificial Sequence: Synthetic peptide
  Seed: RMMESARPE
RCMESARPL

SEQ ID NO: 4069 - protein, 9 aa, Artificial Sequence
  Description of Artificial Sequence: Synthetic peptide
  Seed: RRRDGKWMR
RRRDGKWMW

SEQ ID NO: 4070 - protein, 9 aa, Artificial Sequence
  Description of Artificial Sequence: Synthetic peptide
  Seed: RRRDGKWMR
RRRDGKWMM

SEQ ID NO: 4071 - protein, 9 aa, Artificial Sequence
  Description of Artificial Sequence: Synthetic peptide
  Seed: RRTRIAYER
RGTRIAYER

SEQ ID NO: 4072 - protein, 9 aa, Artificial Sequence
  Description of Artificial Sequence: Synthetic peptide
  Seed: RMMESARPE
RQMESARPD

SEQ ID NO: 4073 - protein, 9 aa, Artificial Sequence
  Description of Artificial Sequence: Synthetic peptide
  Seed: RRNRYLEEH
RRNRYLEEM

SEQ ID NO: 4074 - protein, 9 aa, Artificial Sequence
  Description of Artificial Sequence: Synthetic peptide
  Seed: RRNRYLEEH
RRNRYLEEF

SEQ ID NO: 4075 - protein, 9 aa, Artificial Sequence
  Description of Artificial Sequence: Synthetic peptide
  Seed: RRNRYLEEH
RRNRYLEEW

SEQ ID NO: 4076 - protein, 9 aa, Artificial Sequence
  Description of Artificial Sequence: Synthetic peptide
  Seed: RRNRYLEEH
RRNRYLEEY

SEQ ID NO: 4077 - protein, 9 aa, Artificial Sequence
  Description of Artificial Sequence: Synthetic peptide
  Seed: RRNRYLEEH
RRNRYLEEV

SEQ ID NO: 4078 - protein, 9 aa, Artificial Sequence
  Description of Artificial Sequence: Synthetic peptide
  Seed: RMMESARPE
RQMESARPH

SEQ ID NO: 4079 - protein, 9 aa, Artificial Sequence
  Description of Artificial Sequence: Synthetic peptide
  Seed: RRNRYLEEH
RQNRYLEEK

SEQ ID NO: 4080 - protein, 9 aa, Artificial Sequence
  Description of Artificial Sequence: Synthetic peptide
  Seed: RRRDGKWMR
RRRDGKWMA

SEQ ID NO: 4081 - protein, 9 aa, Artificial Sequence
  Description of Artificial Sequence: Synthetic peptide
  Seed: RMMESARPE
RQMESARPG

SEQ ID NO: 4082 - protein, 9 aa, Artificial Sequence
  Description of Artificial Sequence: Synthetic peptide
  Seed: RMMESARPE
RQMESARPE

SEQ ID NO: 4083 - protein, 9 aa, Artificial Sequence
  Description of Artificial Sequence: Synthetic peptide
  Seed: RMMESARPE
RQMESARPQ

SEQ ID NO: 4084 - protein, 9 aa, Artificial Sequence
  Description of Artificial Sequence: Synthetic peptide
  Seed: RMMESARPE
RQMESARPC

SEQ ID NO: 4085 - protein, 9 aa, Artificial Sequence
  Description of Artificial Sequence: Synthetic peptide
  Seed: RRRDGKWMR
RRRDGKWMG

SEQ ID NO: 4086 - protein, 9 aa, Artificial Sequence
  Description of Artificial Sequence: Synthetic peptide
  Seed: RRRDGKWMR
RRRDGKWMH

SEQ ID NO: 4087 - protein, 9 aa, Artificial Sequence
  Description of Artificial Sequence: Synthetic peptide
  Seed: RRRDGKWMR
RRRDGKWMI

SEQ ID NO: 4088 - protein, 9 aa, Artificial Sequence
  Description of Artificial Sequence: Synthetic peptide
  Seed: RRRDGKWMR
RRRDGKWML

SEQ ID NO: 4089 - protein, 9 aa, Artificial Sequence
  Description of Artificial Sequence: Synthetic peptide
  Seed: RRRDGKWMR
RRRDGKWMK

SEQ ID NO: 4090 - protein, 9 aa, Artificial Sequence
  Description of Artificial Sequence: Synthetic peptide
  Seed: RRRDGKWVR
RRRDGKWVI

SEQ ID NO: 4091 - protein, 9 aa, Artificial Sequence
  Description of Artificial Sequence: Synthetic peptide
  Seed: RMMESARPE
RDMESARPY

SEQ ID NO: 4092 - protein, 9 aa, Artificial Sequence
  Description of Artificial Sequence: Synthetic peptide
  Seed: RRRDGKWVR
RRRDGKWVL

SEQ ID NO: 4093 - protein, 9 aa, Artificial Sequence
  Description of Artificial Sequence: Synthetic peptide
  Seed: RMMESARPE
RDMESARPF

SEQ ID NO: 4094 - protein, 10 aa, Artificial Sequence
  Description of Artificial Sequence: Synthetic peptide
  Seed: RRSGAAGAAV
RRSGAAGAAF

SEQ ID NO: 4095 - protein, 9 aa, Artificial Sequence
  Description of Artificial Sequence: Synthetic peptide
  Seed: RMMESARPE
RNMESARPF

SEQ ID NO: 4096 - protein, 10 aa, Artificial Sequence
  Description of Artificial Sequence: Synthetic peptide
  Seed: RRSGAAGAAV
RRSGAAGAAW

SEQ ID NO: 4097 - protein, 10 aa, Artificial Sequence
  Description of Artificial Sequence: Synthetic peptide
  Seed: RRSGAAGAAV
RRSGAAGAAY

SEQ ID NO: 4098 - protein, 9 aa, Artificial Sequence
  Description of Artificial Sequence: Synthetic peptide
  Seed: RMMESARPE
RNMESARPM

SEQ ID NO: 4099 - protein, 11 aa, Artificial Sequence
  Description of Artificial Sequence: Synthetic peptide
  Seed: RRSGAAGAAVK
RRSGAAGAAVR

SEQ ID NO: 4100 - protein, 9 aa, Artificial Sequence
  Description of Artificial Sequence: Synthetic peptide
  Seed: RMMESARPE
RNMESARPL

SEQ ID NO: 4101 - protein, 11 aa, Artificial Sequence
  Description of Artificial Sequence: Synthetic peptide
  Seed: RRSGAAGAAVK
RRSGAAGAAVF

SEQ ID NO: 4102 - protein, 9 aa, Artificial Sequence
  Description of Artificial Sequence: Synthetic peptide
  Seed: RRTRIAYER
RATRIAYER

SEQ ID NO: 4103 - protein, 9 aa, Artificial Sequence
  Description of Artificial Sequence: Synthetic peptide
  Seed: RRTRIAYER
RATRIAYEK

SEQ ID NO: 4104 - protein, 9 aa, Artificial Sequence
  Description of Artificial Sequence: Synthetic peptide
  Seed: RMMESARPE
RNMESARPI

SEQ ID NO: 4105 - protein, 9 aa, Artificial Sequence
  Description of Artificial Sequence: Synthetic peptide
  Seed: RRTRIAYER
RNTRIAYER

SEQ ID NO: 4106 - protein, 9 aa, Artificial Sequence
  Description of Artificial Sequence: Synthetic peptide
  Seed: RRTRIAYER
RNTRIAYEK

SEQ ID NO: 4107 - protein, 9 aa, Artificial Sequence
  Description of Artificial Sequence: Synthetic peptide
  Seed: RRTRIAYER
RCTRIAYER

SEQ ID NO: 4108 - protein, 9 aa, Artificial Sequence
  Description of Artificial Sequence: Synthetic peptide
  Seed: RRTRIAYER
RQTRIAYER

SEQ ID NO: 4109 - protein, 9 aa, Artificial Sequence
  Description of Artificial Sequence: Synthetic peptide
  Seed: RRTRIAYER
RQTRIAYEK

SEQ ID NO: 4110 - protein, 9 aa, Artificial Sequence
  Description of Artificial Sequence: Synthetic peptide
  Seed: RRTRIAYER
RETRIAYER

SEQ ID NO: 4111 - protein, 10 aa, Artificial Sequence
  Description of Artificial Sequence: Synthetic peptide
  Seed: RRSGAAGAAV
RRSGAAGAAM

SEQ ID NO: 4112 - protein, 10 aa, Artificial Sequence
  Description of Artificial Sequence: Synthetic peptide
  Seed: RRSGAAGAAV
RRSGAAGAAK

SEQ ID NO: 4113 - protein, 9 aa, Artificial Sequence
  Description of Artificial Sequence: Synthetic peptide
  Seed: RMMESARPE
RNMESARPW

SEQ ID NO: 4114 - protein, 9 aa, Artificial Sequence
  Description of Artificial Sequence: Synthetic peptide
  Seed: RMMESARPE
RDMESARPM

SEQ ID NO: 4115 - protein, 9 aa, Artificial Sequence
  Description of Artificial Sequence: Synthetic peptide
  Seed: RRRDGKWVR
RRRDGKWVK

SEQ ID NO: 4116 - protein, 9 aa, Artificial Sequence
  Description of Artificial Sequence: Synthetic peptide
  Seed: RRRDGKWVR
RRRDGKWVM

SEQ ID NO: 4117 - protein, 9 aa, Artificial Sequence
  Description of Artificial Sequence: Synthetic peptide
  Seed: RRRDGKWVR
RRRDGKWVF

SEQ ID NO: 4118 - protein, 9 aa, Artificial Sequence
  Description of Artificial Sequence: Synthetic peptide
  Seed: RRRDGKWVR
RRRDGKWVY

SEQ ID NO: 4119 - protein, 9 aa, Artificial Sequence
  Description of Artificial Sequence: Synthetic peptide
  Seed: RRRDGKWVR
RRRDGKWVV

SEQ ID NO: 4120 - protein, 11 aa, Artificial Sequence
  Description of Artificial Sequence: Synthetic peptide
  Seed: RRRDGKWVREL
RRRDGKWVRER

SEQ ID NO: 4121 - protein, 11 aa, Artificial Sequence
  Description of Artificial Sequence: Synthetic peptide
  Seed: RRRDGKWVREL
RRRDGKWVREI

SEQ ID NO: 4122 - protein, 11 aa, Artificial Sequence
  Description of Artificial Sequence: Synthetic peptide
  Seed: RRRDGKWVREL
RRRDGKWVREK

SEQ ID NO: 4123 - protein, 9 aa, Artificial Sequence
  Description of Artificial Sequence: Synthetic peptide
  Seed: RMMESARPE
RNMESARPY

SEQ ID NO: 4124 - protein, 11 aa, Artificial Sequence
  Description of Artificial Sequence: Synthetic peptide
  Seed: RRRDGKWVREL
RRRDGKWVREM

SEQ ID NO: 4125 - protein, 11 aa, Artificial Sequence
  Description of Artificial Sequence: Synthetic peptide
  Seed: RRRDGKWVREL
RRRDGKWVREF

SEQ ID NO: 4126 - protein, 11 aa, Artificial Sequence
  Description of Artificial Sequence: Synthetic peptide
  Seed: RRRDGKWVREL
RRRDGKWVREY

SEQ ID NO: 4127 - protein, 10 aa, Artificial Sequence
  Description of Artificial Sequence: Synthetic peptide
  Seed: RRSGAAGAAV
RRSGAAGAAR

SEQ ID NO: 4128 - protein, 10 aa, Artificial Sequence
  Description of Artificial Sequence: Synthetic peptide
  Seed: RRSGAAGAAV
RRSGAAGAAL

SEQ ID NO: 4129 - protein, 9 aa, Artificial Sequence
  Description of Artificial Sequence: Synthetic peptide
  Seed: RMMESARPE
RNMESARPV

SEQ ID NO: 4130 - protein, 9 aa, Artificial Sequence
  Description of Artificial Sequence: Synthetic peptide
  Seed: RRNRYLEEH
RRNRYLEEK

SEQ ID NO: 4131 - protein, 9 aa, Artificial Sequence
  Description of Artificial Sequence: Synthetic peptide
  Seed: RRNRYLEEH
RRNRYLEEL

SEQ ID NO: 4132 - protein, 9 aa, Artificial Sequence
  Description of Artificial Sequence: Synthetic peptide
  Seed: RRNRYLEEH
RRNRYLEEI

SEQ ID NO: 4133 - protein, 9 aa, Artificial Sequence
  Description of Artificial Sequence: Synthetic peptide
  Seed: RRIWRQANN
RRIWRQANV

SEQ ID NO: 4134 - protein, 9 aa, Artificial Sequence
  Description of Artificial Sequence: Synthetic peptide
  Seed: RRIWRQANN
RRIWRQANR

SEQ ID NO: 4135 - protein, 9 aa, Artificial Sequence
  Description of Artificial Sequence: Synthetic peptide
  Seed: RMMESARPE
REMESARPG

SEQ ID NO: 4136 - protein, 9 aa, Artificial Sequence
  Description of Artificial Sequence: Synthetic peptide
  Seed: RRIWRQANN
RRIWRQANC

SEQ ID NO: 4137 - protein, 9 aa, Artificial Sequence
  Description of Artificial Sequence: Synthetic peptide
  Seed: RRIWRQANN
RRIWRQANQ

SEQ ID NO: 4138 - protein, 9 aa, Artificial Sequence
  Description of Artificial Sequence: Synthetic peptide
  Seed: RRIWRQANN
RRIWRQANG

SEQ ID NO: 4139 - protein, 9 aa, Artificial Sequence
  Description of Artificial Sequence: Synthetic peptide
  Seed: RRIWRQANN
RRIWRQANH

SEQ ID NO: 4140 - protein, 9 aa, Artificial Sequence
  Description of Artificial Sequence: Synthetic peptide
  Seed: RRIWRQANN
RRIWRQANI

SEQ ID NO: 4141 - protein, 9 aa, Artificial Sequence
  Description of Artificial Sequence: Synthetic peptide
  Seed: RMMESARPE
REMESARPC

SEQ ID NO: 4142 - protein, 9 aa, Artificial Sequence
  Description of Artificial Sequence: Synthetic peptide
  Seed: RRIWRQANN
RRIWRQANL

SEQ ID NO: 4143 - protein, 9 aa, Artificial Sequence
  Description of Artificial Sequence: Synthetic peptide
  Seed: RRIWRQANN
RRIWRQANK

SEQ ID NO: 4144 - protein, 9 aa, Artificial Sequence
  Description of Artificial Sequence: Synthetic peptide
  Seed: RRIWRQANN
RRIWRQANM

SEQ ID NO: 4145 - protein, 9 aa, Artificial Sequence
  Description of Artificial Sequence: Synthetic peptide
  Seed: RRIWRQANN
RRIWRQANF

SEQ ID NO: 4146 - protein, 9 aa, Artificial Sequence
  Description of Artificial Sequence: Synthetic peptide
  Seed: RMMESARPE
REMESARPA

SEQ ID NO: 4147 - protein, 9 aa, Artificial Sequence
  Description of Artificial Sequence: Synthetic peptide
  Seed: RRIWRQANN
RRIWRQANS

SEQ ID NO: 4148 - protein, 9 aa, Artificial Sequence
  Description of Artificial Sequence: Synthetic peptide
  Seed: RRIWRQANN
RRIWRQANT

SEQ ID NO: 4149 - protein, 9 aa, Artificial Sequence
  Description of Artificial Sequence: Synthetic peptide
  Seed: RRIWRQANN
RRIWRQANW

SEQ ID NO: 4150 - protein, 9 aa, Artificial Sequence
  Description of Artificial Sequence: Synthetic peptide
  Seed: RMMESARPE
RQMESARPV

SEQ ID NO: 4151 - protein, 9 aa, Artificial Sequence
  Description of Artificial Sequence: Synthetic peptide
  Seed: RRIWRQANN
RRIWRQANA

SEQ ID NO: 4152 - protein, 9 aa, Artificial Sequence
  Description of Artificial Sequence: Synthetic peptide
  Seed: RMMESARPE
REMESARPH

SEQ ID NO: 4153 - protein, 10 aa, Artificial Sequence
  Description of Artificial Sequence: Synthetic peptide
  Seed: RRDGKWVREL
RRDGKWVREF

SEQ ID NO: 4154 - protein, 11 aa, Artificial Sequence
  Description of Artificial Sequence: Synthetic peptide
  Seed: RRDGKWMRELI
RRDGKWMRELY

SEQ ID NO: 4155 - protein, 11 aa, Artificial Sequence
  Description of Artificial Sequence: Synthetic peptide
  Seed: RRDGKWMRELI
RRDGKWMRELV

SEQ ID NO: 4156 - protein, 10 aa, Artificial Sequence
  Description of Artificial Sequence: Synthetic peptide
  Seed: RRDGKWVREL
RRDGKWVRER

SEQ ID NO: 4157 - protein, 10 aa, Artificial Sequence
  Description of Artificial Sequence: Synthetic peptide
  Seed: RRDGKWVREL
RRDGKWVREI

SEQ ID NO: 4158 - protein, 9 aa, Artificial Sequence
  Description of Artificial Sequence: Synthetic peptide
  Seed: RMMESARPE
REMESARPF

SEQ ID NO: 4159 - protein, 10 aa, Artificial Sequence
  Description of Artificial Sequence: Synthetic peptide
  Seed: RRDGKWVREL
RRDGKWVREK

SEQ ID NO: 4160 - protein, 10 aa, Artificial Sequence
  Description of Artificial Sequence: Synthetic peptide
  Seed: RRDGKWVREL
RRDGKWVREM

SEQ ID NO: 4161 - protein, 10 aa, Artificial Sequence
  Description of Artificial Sequence: Synthetic peptide
  Seed: RRDGKWVREL
RRDGKWVREY

SEQ ID NO: 4162 - protein, 9 aa, Artificial Sequence
  Description of Artificial Sequence: Synthetic peptide
  Seed: RMMESARPE
REMESARPI

SEQ ID NO: 4163 - protein, 10 aa, Artificial Sequence
  Description of Artificial Sequence: Synthetic peptide
  Seed: RRDGKWVREL
RRDGKWVREV

SEQ ID NO: 4164 - protein, 10 aa, Artificial Sequence
  Description of Artificial Sequence: Synthetic peptide
  Seed: RRDGKWVREL
RQDGKWVREL

SEQ ID NO: 4165 - protein, 9 aa, Artificial Sequence
  Description of Artificial Sequence: Synthetic peptide
  Seed: RMMESARPE
REMESARPM

SEQ ID NO: 4166 - protein, 11 aa, Artificial Sequence
  Description of Artificial Sequence: Synthetic peptide
  Seed: RRDGKWVRELI
RRDGKWVRELL

SEQ ID NO: 4167 - protein, 11 aa, Artificial Sequence
  Description of Artificial Sequence: Synthetic peptide
  Seed: RRDGKWVRELI
RRDGKWVRELM

SEQ ID NO: 4168 - protein, 9 aa, Artificial Sequence
  Description of Artificial Sequence: Synthetic peptide
  Seed: RMMESARPE
REMESARPL

SEQ ID NO: 4169 - protein, 11 aa, Artificial Sequence
  Description of Artificial Sequence: Synthetic peptide
  Seed: RRDGKWVRELI
RRDGKWVRELF

SEQ ID NO: 4170 - protein, 9 aa, Artificial Sequence
  Description of Artificial Sequence: Synthetic peptide
  Seed: RRIWRQANN
RRIWRQANY

SEQ ID NO: 4171 - protein, 9 aa, Artificial Sequence
  Description of Artificial Sequence: Synthetic peptide
  Seed: RRIWRQANN
RQIWRQANR

SEQ ID NO: 4172 - protein, 9 aa, Artificial Sequence
  Description of Artificial Sequence: Synthetic peptide
  Seed: RMMESARPE
RQMESARPI

SEQ ID NO: 4173 - protein, 9 aa, Artificial Sequence
  Description of Artificial Sequence: Synthetic peptide
  Seed: RMMESARPE
RQMESARPY

SEQ ID NO: 4174 - protein, 10 aa, Artificial Sequence
  Description of Artificial Sequence: Synthetic peptide
  Seed: RRIWRQANNG
RRIWRQANNV

SEQ ID NO: 4175 - protein, 10 aa, Artificial Sequence
  Description of Artificial Sequence: Synthetic peptide
  Seed: RRIWRQANNG
RQIWRQANNK

SEQ ID NO: 4176 - protein, 9 aa, Artificial Sequence
  Description of Artificial Sequence: Synthetic peptide
  Seed: RRNKYLEEH
RRNKYLEEA

SEQ ID NO: 4177 - protein, 9 aa, Artificial Sequence
  Description of Artificial Sequence: Synthetic peptide
  Seed: RMMESARPE
RQMESARPF

SEQ ID NO: 4178 - protein, 9 aa, Artificial Sequence
  Description of Artificial Sequence: Synthetic peptide
  Seed: RRNKYLEEH
RRNKYLEER

SEQ ID NO: 4179 - protein, 9 aa, Artificial Sequence
  Description of Artificial Sequence: Synthetic peptide
  Seed: RMMESARPE
RQMESARPM

SEQ ID NO: 4180 - protein, 9 aa, Artificial Sequence
  Description of Artificial Sequence: Synthetic peptide
  Seed: RMMESARPE
RQMESARPK

SEQ ID NO: 4181 - protein, 9 aa, Artificial Sequence
  Description of Artificial Sequence: Synthetic peptide
  Seed: RRNKYLEEH
RRNKYLEEI

SEQ ID NO: 4182 - protein, 9 aa, Artificial Sequence
  Description of Artificial Sequence: Synthetic peptide
  Seed: RRNKYLEEH
RRNKYLEEL

SEQ ID NO: 4183 - protein, 9 aa, Artificial Sequence
  Description of Artificial Sequence: Synthetic peptide
  Seed: RRNKYLEEH
RRNKYLEEK

SEQ ID NO: 4184 - protein, 9 aa, Artificial Sequence
  Description of Artificial Sequence: Synthetic peptide
  Seed: RRNKYLEEH
RRNKYLEEM

SEQ ID NO: 4185 - protein, 9 aa, Artificial Sequence
  Description of Artificial Sequence: Synthetic peptide
  Seed: RRNKYLEEH
RRNKYLEEF

SEQ ID NO: 4186 - protein, 9 aa, Artificial Sequence
  Description of Artificial Sequence: Synthetic peptide
  Seed: RRNKYLEEH
RRNKYLEEY

SEQ ID NO: 4187 - protein, 9 aa, Artificial Sequence
  Description of Artificial Sequence: Synthetic peptide
  Seed: RRNKYLEEH
RRNKYLEEV

SEQ ID NO: 4188 - protein, 9 aa, Artificial Sequence
  Description of Artificial Sequence: Synthetic peptide
  Seed: RMMESARPE
RQMESARPL

SEQ ID NO: 4189 - protein, 9 aa, Artificial Sequence
  Description of Artificial Sequence: Synthetic peptide
  Seed: RRNRYLEEH
RRNRYLEEA

SEQ ID NO: 4190 - protein, 9 aa, Artificial Sequence
  Description of Artificial Sequence: Synthetic peptide
  Seed: RRNRYLEEH
RRNRYLEER

SEQ ID NO: 4191 - protein, 10 aa, Artificial Sequence
  Description of Artificial Sequence: Synthetic peptide
  Seed: RRIWRQANNG
RRIWRQANNY

SEQ ID NO: 4192 - protein, 10 aa, Artificial Sequence
  Description of Artificial Sequence: Synthetic peptide
  Seed: RRIWRQANNG
RRIWRQANNW

SEQ ID NO: 4193 - protein, 10 aa, Artificial Sequence
  Description of Artificial Sequence: Synthetic peptide
  Seed: RRIWRQANNG
RRIWRQANNT

SEQ ID NO: 4194 - protein, 9 aa, Artificial Sequence
  Description of Artificial Sequence: Synthetic peptide
  Seed: RMMESARPE
RQMESARPT

SEQ ID NO: 4195 - protein, 9 aa, Artificial Sequence
  Description of Artificial Sequence: Synthetic peptide
  Seed: RRIWRQANN
RQIWRQANK

SEQ ID NO: 4196 - protein, 10 aa, Artificial Sequence
  Description of Artificial Sequence: Synthetic peptide
  Seed: RRIWRQANNG
RRIWRQANNA

SEQ ID NO: 4197 - protein, 10 aa, Artificial Sequence
  Description of Artificial Sequence: Synthetic peptide
  Seed: RRIWRQANNG
RRIWRQANNR

SEQ ID NO: 4198 - protein, 9 aa, Artificial Sequence
  Description of Artificial Sequence: Synthetic peptide
  Seed: RMMESARPE
RQMESARPW

SEQ ID NO: 4199 - protein, 10 aa, Artificial Sequence
  Description of Artificial Sequence: Synthetic peptide
  Seed: RRIWRQANNG
RRIWRQANNC

SEQ ID NO: 4200 - protein, 10 aa, Artificial Sequence
  Description of Artificial Sequence: Synthetic peptide
  Seed: RRIWRQANNG
RRIWRQANNQ

SEQ ID NO: 4201 - protein, 10 aa, Artificial Sequence
  Description of Artificial Sequence: Synthetic peptide
  Seed: RRIWRQANNG
RRIWRQANNE

SEQ ID NO: 4202 - protein, 9 aa, Artificial Sequence
  Description of Artificial Sequence: Synthetic peptide
  Seed: RMMESARPE
RQMESARPS

SEQ ID NO: 4203 - protein, 10 aa, Artificial Sequence
  Description of Artificial Sequence: Synthetic peptide
  Seed: RRIWRQANNG
RRIWRQANNS

SEQ ID NO: 4204 - protein, 10 aa, Artificial Sequence
  Description of Artificial Sequence: Synthetic peptide
  Seed: RRIWRQANNG
RRIWRQANNH

SEQ ID NO: 4205 - protein, 10 aa, Artificial Sequence
  Description of Artificial Sequence: Synthetic peptide
  Seed: RRIWRQANNG
RRIWRQANNI

SEQ ID NO: 4206 - protein, 10 aa, Artificial Sequence
  Description of Artificial Sequence: Synthetic peptide
  Seed: RRIWRQANNG
RRIWRQANNL

SEQ ID NO: 4207 - protein, 10 aa, Artificial Sequence
  Description of Artificial Sequence: Synthetic peptide
  Seed: RRIWRQANNG
RRIWRQANNK

SEQ ID NO: 4208 - protein, 10 aa, Artificial Sequence
  Description of Artificial Sequence: Synthetic peptide
  Seed: RRIWRQANNG
RRIWRQANNM

SEQ ID NO: 4209 - protein, 10 aa, Artificial Sequence
  Description of Artificial Sequence: Synthetic peptide
  Seed: RRIWRQANNG
RRIWRQANNF

SEQ ID NO: 4210 - protein, 9 aa, Artificial Sequence
  Description of Artificial Sequence: Synthetic peptide
  Seed: RMMESARPE
RQMESARPP

SEQ ID NO: 4211 - protein, 9 aa, Artificial Sequence
  Description of Artificial Sequence: Synthetic peptide
  Seed: RMMESARPE
RNMESARPH

SEQ ID NO: 4212 - protein, 9 aa, Artificial Sequence
  Description of Artificial Sequence: Synthetic peptide
  Seed: RRTRIAYER
RGTRIAYEK

SEQ ID NO: 4213 - protein, 10 aa, Artificial Sequence
  Description of Artificial Sequence: Synthetic peptide
  Seed: RRTRIAYERM
RITRIAYERA

SEQ ID NO: 4214 - protein, 10 aa, Artificial Sequence
  Description of Artificial Sequence: Synthetic peptide
  Seed: RRTRIAYERM
RCTRIAYERV

SEQ ID NO: 4215 - protein, 9 aa, Artificial Sequence
  Description of Artificial Sequence: Synthetic peptide
  Seed: RMMESARPE
RAMESARPL

SEQ ID NO: 4216 - protein, 10 aa, Artificial Sequence
  Description of Artificial Sequence: Synthetic peptide
  Seed: RRTRIAYERM
RQTRIAYERR

SEQ ID NO: 4217 - protein, 10 aa, Artificial Sequence
  Description of Artificial Sequence: Synthetic peptide
  Seed: RRTRIAYERM
RQTRIAYERG

SEQ ID NO: 4218 - protein, 10 aa, Artificial Sequence
  Description of Artificial Sequence: Synthetic peptide
  Seed: RRTRIAYERM
RQTRIAYERI

SEQ ID NO: 4219 - protein, 9 aa, Artificial Sequence
  Description of Artificial Sequence: Synthetic peptide
  Seed: RMMESARPE
RAMESARPI

SEQ ID NO: 4220 - protein, 10 aa, Artificial Sequence
  Description of Artificial Sequence: Synthetic peptide
  Seed: RRTRIAYERM
RQTRIAYERL

SEQ ID NO: 4221 - protein, 10 aa, Artificial Sequence
  Description of Artificial Sequence: Synthetic peptide
  Seed: RRTRIAYERM
RQTRIAYERK

SEQ ID NO: 4222 - protein, 10 aa, Artificial Sequence
  Description of Artificial Sequence: Synthetic peptide
  Seed: RRTRIAYERM
RQTRIAYERM

SEQ ID NO: 4223 - protein, 9 aa, Artificial Sequence
  Description of Artificial Sequence: Synthetic peptide
  Seed: RMMESARPE
RAMESARPH

SEQ ID NO: 4224 - protein, 10 aa, Artificial Sequence
  Description of Artificial Sequence: Synthetic peptide
  Seed: RRTRIAYERM
RQTRIAYERF

SEQ ID NO: 4225 - protein, 10 aa, Artificial Sequence
  Description of Artificial Sequence: Synthetic peptide
  Seed: RRTRIAYERM
RQTRIAYERS

SEQ ID NO: 4226 - protein, 10 aa, Artificial Sequence
  Description of Artificial Sequence: Synthetic peptide
  Seed: RRTRIAYERM
RQTRIAYERT

SEQ ID NO: 4227 - protein, 10 aa, Artificial Sequence
  Description of Artificial Sequence: Synthetic peptide
  Seed: RRTRIAYERM
RQTRIAYERY

SEQ ID NO: 4228 - protein, 10 aa, Artificial Sequence
  Description of Artificial Sequence: Synthetic peptide
  Seed: RRTRIAYERM
RQTRIAYERV

SEQ ID NO: 4229 - protein, 10 aa, Artificial Sequence
  Description of Artificial Sequence: Synthetic peptide
  Seed: RRTRIAYERM
RETRIAYERA

SEQ ID NO: 4230 - protein, 10 aa, Artificial Sequence
  Description of Artificial Sequence: Synthetic peptide
  Seed: RRTRIAYERM
RETRIAYERR

SEQ ID NO: 4231 - protein, 10 aa, Artificial Sequence
  Description of Artificial Sequence: Synthetic peptide
  Seed: RRTRIAYERM
RETRIAYERG

SEQ ID NO: 4232 - protein, 10 aa, Artificial Sequence
  Description of Artificial Sequence: Synthetic peptide
  Seed: RRTRIAYERM
RQTRIAYERA

SEQ ID NO: 4233 - protein, 9 aa, Artificial Sequence
  Description of Artificial Sequence: Synthetic peptide
  Seed: RMMESARPE
RAMESARPM

SEQ ID NO: 4234 - protein, 9 aa, Artificial Sequence
  Description of Artificial Sequence: Synthetic peptide
  Seed: RRTRIAYER
RHTRIAYER

SEQ ID NO: 4235 - protein, 10 aa, Artificial Sequence
  Description of Artificial Sequence: Synthetic peptide
  Seed: RRTRIAYERM
RCTRIAYERY

SEQ ID NO: 4236 - protein, 10 aa, Artificial Sequence
  Description of Artificial Sequence: Synthetic peptide
  Seed: RRTRIAYERM
RDTRIAYERF

SEQ ID NO: 4237 - protein, 10 aa, Artificial Sequence
  Description of Artificial Sequence: Synthetic peptide
  Seed: RRTRIAYERM
RDTRIAYERS

SEQ ID NO: 4238 - protein, 10 aa, Artificial Sequence
  Description of Artificial Sequence: Synthetic peptide
  Seed: RRTRIAYERM
RDTRIAYERT

SEQ ID NO: 4239 - protein, 10 aa, Artificial Sequence
  Description of Artificial Sequence: Synthetic peptide
  Seed: RRTRIAYERM
RDTRIAYERY

SEQ ID NO: 4240 - protein, 10 aa, Artificial Sequence
  Description of Artificial Sequence: Synthetic peptide
  Seed: RRTRIAYERM
RDTRIAYERV

SEQ ID NO: 4241 - protein, 10 aa, Artificial Sequence
  Description of Artificial Sequence: Synthetic peptide
  Seed: RRTRIAYERM
RCTRIAYERA

SEQ ID NO: 4242 - protein, 10 aa, Artificial Sequence
  Description of Artificial Sequence: Synthetic peptide
  Seed: RRTRIAYERM
RCTRIAYERR

SEQ ID NO: 4243 - protein, 10 aa, Artificial Sequence
  Description of Artificial Sequence: Synthetic peptide
  Seed: RRTRIAYERM
RCTRIAYERG

SEQ ID NO: 4244 - protein, 10 aa, Artificial Sequence
  Description of Artificial Sequence: Synthetic peptide
  Seed: RRTRIAYERM
RCTRIAYERI

SEQ ID NO: 4245 - protein, 10 aa, Artificial Sequence
  Description of Artificial Sequence: Synthetic peptide
  Seed: RRTRIAYERM
RCTRIAYERL

SEQ ID NO: 4246 - protein, 9 aa, Artificial Sequence
  Description of Artificial Sequence: Synthetic peptide
  Seed: RMMESARPE
RAMESARPW

SEQ ID NO: 4247 - protein, 10 aa, Artificial Sequence
  Description of Artificial Sequence: Synthetic peptide
  Seed: RRTRIAYERM
RCTRIAYERK

SEQ ID NO: 4248 - protein, 10 aa, Artificial Sequence
  Description of Artificial Sequence: Synthetic peptide
  Seed: RRTRIAYERM
RCTRIAYERM

SEQ ID NO: 4249 - protein, 10 aa, Artificial Sequence
  Description of Artificial Sequence: Synthetic peptide
  Seed: RRTRIAYERM
RCTRIAYERF

SEQ ID NO: 4250 - protein, 10 aa, Artificial Sequence
  Description of Artificial Sequence: Synthetic peptide
  Seed: RRTRIAYERM
RCTRIAYERS

SEQ ID NO: 4251 - protein, 9 aa, Artificial Sequence
  Description of Artificial Sequence: Synthetic peptide
  Seed: RMMESARPE
RAMESARPF

SEQ ID NO: 4252 - protein, 10 aa, Artificial Sequence
  Description of Artificial Sequence: Synthetic peptide
  Seed: RRTRIAYERM
RCTRIAYERT

SEQ ID NO: 4253 - protein, 9 aa, Artificial Sequence
  Description of Artificial Sequence: Synthetic peptide
  Seed: RMMESARPE
RAMESARPG

SEQ ID NO: 4254 - protein, 11 aa, Artificial Sequence
  Description of Artificial Sequence: Synthetic peptide
  Seed: RRTRIAYERMC
RETRIAYERMF

SEQ ID NO: 4255 - protein, 11 aa, Artificial Sequence
  Description of Artificial Sequence: Synthetic peptide
  Seed: RMMEGAKPEEV
RVMEGAKPEEV

SEQ ID NO: 4256 - protein, 10 aa, Artificial Sequence
  Description of Artificial Sequence: Synthetic peptide
  Seed: RRTRIAYERM
RETRIAYERI

SEQ ID NO: 4257 - protein, 10 aa, Artificial Sequence
  Description of Artificial Sequence: Synthetic peptide
  Seed: RRTRIAYERM
RGTRIAYERT

SEQ ID NO: 4258 - protein, 10 aa, Artificial Sequence
  Description of Artificial Sequence: Synthetic peptide
  Seed: RRTRIAYERM
RGTRIAYERY

SEQ ID NO: 4259 - protein, 10 aa, Artificial Sequence
  Description of Artificial Sequence: Synthetic peptide
  Seed: RRTRIAYERM
RGTRIAYERV

SEQ ID NO: 4260 - protein, 10 aa, Artificial Sequence
  Description of Artificial Sequence: Synthetic peptide
  Seed: RRTRIAYERM
RHTRIAYERA

SEQ ID NO: 4261 - protein, 11 aa, Artificial Sequence
  Description of Artificial Sequence: Synthetic peptide
  Seed: RMMEGAKPEEV
RMMEGAKPEEI

SEQ ID NO: 4262 - protein, 10 aa, Artificial Sequence
  Description of Artificial Sequence: Synthetic peptide
  Seed: RRTRIAYERM
RHTRIAYERR

SEQ ID NO: 4263 - protein, 10 aa, Artificial Sequence
  Description of Artificial Sequence: Synthetic peptide
  Seed: RRTRIAYERM
RHTRIAYERG

SEQ ID NO: 4264 - protein, 10 aa, Artificial Sequence
  Description of Artificial Sequence: Synthetic peptide
  Seed: RRTRIAYERM
RHTRIAYERI

SEQ ID NO: 4265 - protein, 10 aa, Artificial Sequence
  Description of Artificial Sequence: Synthetic peptide
  Seed: RRTRIAYERM
RHTRIAYERL

SEQ ID NO: 4266 - protein, 10 aa, Artificial Sequence
  Description of Artificial Sequence: Synthetic peptide
  Seed: RRTRIAYERM
RHTRIAYERK

SEQ ID NO: 4267 - protein, 10 aa, Artificial Sequence
  Description of Artificial Sequence: Synthetic peptide
  Seed: RRTRIAYERM
RHTRIAYERM

SEQ ID NO: 4268 - protein, 10 aa, Artificial Sequence
  Description of Artificial Sequence: Synthetic peptide
  Seed: RRTRIAYERM
RHTRIAYERF

SEQ ID NO: 4269 - protein, 10 aa, Artificial Sequence
  Description of Artificial Sequence: Synthetic peptide
  Seed: RRTRIAYERM
RHTRIAYERS

SEQ ID NO: 4270 - protein, 10 aa, Artificial Sequence
  Description of Artificial Sequence: Synthetic peptide
  Seed: RRTRIAYERM
RHTRIAYERT

SEQ ID NO: 4271 - protein, 10 aa, Artificial Sequence
  Description of Artificial Sequence: Synthetic peptide
  Seed: RRTRIAYERM
RHTRIAYERY

SEQ ID NO: 4272 - protein, 10 aa, Artificial Sequence
  Description of Artificial Sequence: Synthetic peptide
  Seed: RRTRIAYERM
RHTRIAYERV

SEQ ID NO: 4273 - protein, 11 aa, Artificial Sequence
  Description of Artificial Sequence: Synthetic peptide
  Seed: RMMEGAKPEEV
RMMEGAKPEEA

SEQ ID NO: 4274 - protein, 11 aa, Artificial Sequence
  Description of Artificial Sequence: Synthetic peptide
  Seed: RMMEGAKPEEV
RMMEGAKPEEL

SEQ ID NO: 4275 - protein, 10 aa, Artificial Sequence
  Description of Artificial Sequence: Synthetic peptide
  Seed: RRTRIAYERM
RGTRIAYERS

SEQ ID NO: 4276 - protein, 10 aa, Artificial Sequence
  Description of Artificial Sequence: Synthetic peptide
  Seed: RRTRIAYERM
RGTRIAYERF

SEQ ID NO: 4277 - protein, 10 aa, Artificial Sequence
  Description of Artificial Sequence: Synthetic peptide
  Seed: RRTRIAYERM
RETRIAYERY

SEQ ID NO: 4278 - protein, 11 aa, Artificial Sequence
  Description of Artificial Sequence: Synthetic peptide
  Seed: RMMEGAKPEEV
RTMEGAKPEEV

SEQ ID NO: 4279 - protein, 10 aa, Artificial Sequence
  Description of Artificial Sequence: Synthetic peptide
  Seed: RRTRIAYERM
RETRIAYERL

SEQ ID NO: 4280 - protein, 10 aa, Artificial Sequence
  Description of Artificial Sequence: Synthetic peptide
  Seed: RRTRIAYERM
RETRIAYERK

SEQ ID NO: 4281 - protein, 10 aa, Artificial Sequence
  Description of Artificial Sequence: Synthetic peptide
  Seed: RRTRIAYERM
RETRIAYERM

SEQ ID NO: 4282 - protein, 10 aa, Artificial Sequence
  Description of Artificial Sequence: Synthetic peptide
  Seed: RRTRIAYERM
RETRIAYERF

SEQ ID NO: 4283 - protein, 10 aa, Artificial Sequence
  Description of Artificial Sequence: Synthetic peptide
  Seed: RRTRIAYERM
RETRIAYERS

SEQ ID NO: 4284 - protein, 10 aa, Artificial Sequence
  Description of Artificial Sequence: Synthetic peptide
  Seed: RRTRIAYERM
RETRIAYERT

SEQ ID NO: 4285 - protein, 10 aa, Artificial Sequence
  Description of Artificial Sequence: Synthetic peptide
  Seed: RRTRIAYERM
RETRIAYERV

SEQ ID NO: 4286 - protein, 10 aa, Artificial Sequence
  Description of Artificial Sequence: Synthetic peptide
  Seed: RRTRIAYERM
RGTRIAYERA

SEQ ID NO: 4287 - protein, 10 aa, Artificial Sequence
  Description of Artificial Sequence: Synthetic peptide
  Seed: RRTRIAYERM
RGTRIAYERR

SEQ ID NO: 4288 - protein, 10 aa, Artificial Sequence
  Description of Artificial Sequence: Synthetic peptide
  Seed: RRTRIAYERM
RGTRIAYERG

SEQ ID NO: 4289 - protein, 10 aa, Artificial Sequence
  Description of Artificial Sequence: Synthetic peptide
  Seed: RRTRIAYERM
RGTRIAYERI

SEQ ID NO: 4290 - protein, 10 aa, Artificial Sequence
  Description of Artificial Sequence: Synthetic peptide
  Seed: RRTRIAYERM
RGTRIAYERL

SEQ ID NO: 4291 - protein, 10 aa, Artificial Sequence
  Description of Artificial Sequence: Synthetic peptide
  Seed: RRTRIAYERM
RGTRIAYERK

SEQ ID NO: 4292 - protein, 10 aa, Artificial Sequence
  Description of Artificial Sequence: Synthetic peptide
  Seed: RRTRIAYERM
RGTRIAYERM

SEQ ID NO: 4293 - protein, 10 aa, Artificial Sequence
  Description of Artificial Sequence: Synthetic peptide
  Seed: RRTRIAYERM
RDTRIAYERM

SEQ ID NO: 4294 - protein, 10 aa, Artificial Sequence
  Description of Artificial Sequence: Synthetic peptide
  Seed: RRTRIAYERM
RDTRIAYERK

SEQ ID NO: 4295 - protein, 10 aa, Artificial Sequence
  Description of Artificial Sequence: Synthetic peptide
  Seed: RRTRIAYERM
RDTRIAYERL

SEQ ID NO: 4296 - protein, 9 aa, Artificial Sequence
  Description of Artificial Sequence: Synthetic peptide
  Seed: RMMESARPE
RRMESARPF

SEQ ID NO: 4297 - protein, 9 aa, Artificial Sequence
  Description of Artificial Sequence: Synthetic peptide
  Seed: RRTRIAYER
RTTRIAYEK

SEQ ID NO: 4298 - protein, 9 aa, Artificial Sequence
  Description of Artificial Sequence: Synthetic peptide
  Seed: RRTRIAYER
RWTRIAYER

SEQ ID NO: 4299 - protein, 9 aa, Artificial Sequence
  Description of Artificial Sequence: Synthetic peptide
  Seed: RRTRIAYER
RWTRIAYEH

SEQ ID NO: 4300 - protein, 9 aa, Artificial Sequence
  Description of Artificial Sequence: Synthetic peptide
  Seed: RRTRIAYER
RWTRIAYEK

SEQ ID NO: 4301 - protein, 9 aa, Artificial Sequence
  Description of Artificial Sequence: Synthetic peptide
  Seed: RRTRIAYER
RWTRIAYEY

SEQ ID NO: 4302 - protein, 9 aa, Artificial Sequence
  Description of Artificial Sequence: Synthetic peptide
  Seed: RRTRIAYER
RYTRIAYER

SEQ ID NO: 4303 - protein, 9 aa, Artificial Sequence
  Description of Artificial Sequence: Synthetic peptide
  Seed: RRTRIAYER
RYTRIAYEH

SEQ ID NO: 4304 - protein, 9 aa, Artificial Sequence
  Description of Artificial Sequence: Synthetic peptide
  Seed: RRTRIAYER
RYTRIAYEK

SEQ ID NO: 4305 - protein, 9 aa, Artificial Sequence
  Description of Artificial Sequence: Synthetic peptide
  Seed: RRTRIAYER
RVTRIAYER

SEQ ID NO: 4306 - protein, 9 aa, Artificial Sequence
  Description of Artificial Sequence: Synthetic peptide
  Seed: RRTRIAYER
RVTRIAYEH

SEQ ID NO: 4307 - protein, 9 aa, Artificial Sequence
  Description of Artificial Sequence: Synthetic peptide
  Seed: RRTRIAYER
RVTRIAYEK

SEQ ID NO: 4308 - protein, 10 aa, Artificial Sequence
  Description of Artificial Sequence: Synthetic peptide
  Seed: RRTRIAYERM
RATRIAYERA

SEQ ID NO: 4309 - protein, 9 aa, Artificial Sequence
  Description of Artificial Sequence: Synthetic peptide
  Seed: RMMESARPE
RRMESARPW

SEQ ID NO: 4310 - protein, 10 aa, Artificial Sequence
  Description of Artificial Sequence: Synthetic peptide
  Seed: RRTRIAYERM
RATRIAYERR

SEQ ID NO: 4311 - protein, 10 aa, Artificial Sequence
  Description of Artificial Sequence: Synthetic peptide
  Seed: RRTRIAYERM
RATRIAYERG

SEQ ID NO: 4312 - protein, 10 aa, Artificial Sequence
  Description of Artificial Sequence: Synthetic peptide
  Seed: RRTRIAYERM
RATRIAYERI

SEQ ID NO: 4313 - protein, 10 aa, Artificial Sequence
  Description of Artificial Sequence: Synthetic peptide
  Seed: RRTRIAYERM
RATRIAYERL

SEQ ID NO: 4314 - protein, 9 aa, Artificial Sequence
  Description of Artificial Sequence: Synthetic peptide
  Seed: RMMESARPE
RRMESARPY

SEQ ID NO: 4315 - protein, 9 aa, Artificial Sequence
  Description of Artificial Sequence: Synthetic peptide
  Seed: RRTRIAYER
RTTRIAYEH

SEQ ID NO: 4316 - protein, 9 aa, Artificial Sequence
  Description of Artificial Sequence: Synthetic peptide
  Seed: RRTRIAYER
RTTRIAYER

SEQ ID NO: 4317 - protein, 9 aa, Artificial Sequence
  Description of Artificial Sequence: Synthetic peptide
  Seed: RRTRIAYER
RITRIAYER

SEQ ID NO: 4318 - protein, 9 aa, Artificial Sequence
  Description of Artificial Sequence: Synthetic peptide
  Seed: RMMESARPE
RRMESARPV

SEQ ID NO: 4319 - protein, 9 aa, Artificial Sequence
  Description of Artificial Sequence: Synthetic peptide
  Seed: RRTRIAYER
RITRIAYEH

SEQ ID NO: 4320 - protein, 9 aa, Artificial Sequence
  Description of Artificial Sequence: Synthetic peptide
  Seed: RRTRIAYER
RITRIAYEK

SEQ ID NO: 4321 - protein, 9 aa, Artificial Sequence
  Description of Artificial Sequence: Synthetic peptide
  Seed: RRTRIAYER
RLTRIAYEH

SEQ ID NO: 4322 - protein, 9 aa, Artificial Sequence
  Description of Artificial Sequence: Synthetic peptide
  Seed: RRTRIAYER
RLTRIAYEK

SEQ ID NO: 4323 - protein, 9 aa, Artificial Sequence
  Description of Artificial Sequence: Synthetic peptide
  Seed: RRTRIAYER
RMTRIAYER

SEQ ID NO: 4324 - protein, 9 aa, Artificial Sequence
  Description of Artificial Sequence: Synthetic peptide
  Seed: RRTRIAYER
RSTRIAYEK

SEQ ID NO: 4325 - protein, 9 aa, Artificial Sequence
  Description of Artificial Sequence: Synthetic peptide
  Seed: RRTRIAYER
RMTRIAYEH

SEQ ID NO: 4326 - protein, 9 aa, Artificial Sequence
  Description of Artificial Sequence: Synthetic peptide
  Seed: RRTRIAYER
RMTRIAYEK

SEQ ID NO: 4327 - protein, 9 aa, Artificial Sequence
  Description of Artificial Sequence: Synthetic peptide
  Seed: RRTRIAYER
RMTRIAYEY

SEQ ID NO: 4328 - protein, 9 aa, Artificial Sequence
  Description of Artificial Sequence: Synthetic peptide
  Seed: RRTRIAYER
RFTRIAYER

SEQ ID NO: 4329 - protein, 9 aa, Artificial Sequence
  Description of Artificial Sequence: Synthetic peptide
  Seed: RRTRIAYER
RFTRIAYEH

SEQ ID NO: 4330 - protein, 9 aa, Artificial Sequence
  Description of Artificial Sequence: Synthetic peptide
  Seed: RRTRIAYER
RFTRIAYEK

SEQ ID NO: 4331 - protein, 9 aa, Artificial Sequence
  Description of Artificial Sequence: Synthetic peptide
  Seed: RRTRIAYER
RSTRIAYER

SEQ ID NO: 4332 - protein, 10 aa, Artificial Sequence
  Description of Artificial Sequence: Synthetic peptide
  Seed: RRTRIAYERM
RATRIAYERK

SEQ ID NO: 4333 - protein, 9 aa, Artificial Sequence
  Description of Artificial Sequence: Synthetic peptide
  Seed: RMMESARPE
RRMESARPM

SEQ ID NO: 4334 - protein, 10 aa, Artificial Sequence
  Description of Artificial Sequence: Synthetic peptide
  Seed: RRTRIAYERM
RDTRIAYERI

SEQ ID NO: 4335 - protein, 9 aa, Artificial Sequence
  Description of Artificial Sequence: Synthetic peptide
  Seed: RMMESARPE
RRMESARPL

SEQ ID NO: 4336 - protein, 10 aa, Artificial Sequence
  Description of Artificial Sequence: Synthetic peptide
  Seed: RRTRIAYERM
RNTRIAYERA

SEQ ID NO: 4337 - protein, 10 aa, Artificial Sequence
  Description of Artificial Sequence: Synthetic peptide
  Seed: RRTRIAYERM
RNTRIAYERR

SEQ ID NO: 4338 - protein, 10 aa, Artificial Sequence
  Description of Artificial Sequence: Synthetic peptide
  Seed: RRTRIAYERM
RNTRIAYERG

SEQ ID NO: 4339 - protein, 10 aa, Artificial Sequence
  Description of Artificial Sequence: Synthetic peptide
  Seed: RRTRIAYERM
RNTRIAYERI

SEQ ID NO: 4340 - protein, 10 aa, Artificial Sequence
  Description of Artificial Sequence: Synthetic peptide
  Seed: RRTRIAYERM
RNTRIAYERL

SEQ ID NO: 4341 - protein, 9 aa, Artificial Sequence
  Description of Artificial Sequence: Synthetic peptide
  Seed: RMMESARPE
RAMESARPV

SEQ ID NO: 4342 - protein, 10 aa, Artificial Sequence
  Description of Artificial Sequence: Synthetic peptide
  Seed: RRTRIAYERM
RNTRIAYERK

SEQ ID NO: 4343 - protein, 10 aa, Artificial Sequence
  Description of Artificial Sequence: Synthetic peptide
  Seed: RRTRIAYERM
RNTRIAYERM

SEQ ID NO: 4344 - protein, 10 aa, Artificial Sequence
  Description of Artificial Sequence: Synthetic peptide
  Seed: RRTRIAYERM
RNTRIAYERF

SEQ ID NO: 4345 - protein, 10 aa, Artificial Sequence
  Description of Artificial Sequence: Synthetic peptide
  Seed: RRTRIAYERM
RNTRIAYERS

SEQ ID NO: 4346 - protein, 10 aa, Artificial Sequence
  Description of Artificial Sequence: Synthetic peptide
  Seed: RRTRIAYERM
RNTRIAYERT

SEQ ID NO: 4347 - protein, 10 aa, Artificial Sequence
  Description of Artificial Sequence: Synthetic peptide
  Seed: RRTRIAYERM
RNTRIAYERY

SEQ ID NO: 4348 - protein, 9 aa, Artificial Sequence
  Description of Artificial Sequence: Synthetic peptide
  Seed: RMMESARPE
RAMESARPY

SEQ ID NO: 4349 - protein, 10 aa, Artificial Sequence
  Description of Artificial Sequence: Synthetic peptide
  Seed: RRTRIAYERM
RNTRIAYERV

SEQ ID NO: 4350 - protein, 10 aa, Artificial Sequence
  Description of Artificial Sequence: Synthetic peptide
  Seed: RRTRIAYERM
RDTRIAYERA

SEQ ID NO: 4351 - protein, 10 aa, Artificial Sequence
  Description of Artificial Sequence: Synthetic peptide
  Seed: RRTRIAYERM
RDTRIAYERR

SEQ ID NO: 4352 - protein, 10 aa, Artificial Sequence
  Description of Artificial Sequence: Synthetic peptide
  Seed: RRTRIAYERM
RDTRIAYERG

SEQ ID NO: 4353 - protein, 10 aa, Artificial Sequence
  Description of Artificial Sequence: Synthetic peptide
  Seed: RRTRIAYERM
RRTRIAYERV

SEQ ID NO: 4354 - protein, 10 aa, Artificial Sequence
  Description of Artificial Sequence: Synthetic peptide
  Seed: RRTRIAYERM
RRTRIAYERY

SEQ ID NO: 4355 - protein, 10 aa, Artificial Sequence
  Description of Artificial Sequence: Synthetic peptide
  Seed: RRTRIAYERM
RRTRIAYERT

SEQ ID NO: 4356 - protein, 10 aa, Artificial Sequence
  Description of Artificial Sequence: Synthetic peptide
  Seed: RRTRIAYERM
RRTRIAYERA

SEQ ID NO: 4357 - protein, 10 aa, Artificial Sequence
  Description of Artificial Sequence: Synthetic peptide
  Seed: RRTRIAYERM
RATRIAYERM

SEQ ID NO: 4358 - protein, 9 aa, Artificial Sequence
  Description of Artificial Sequence: Synthetic peptide
  Seed: RMMESARPE
RRMESARPI

SEQ ID NO: 4359 - protein, 10 aa, Artificial Sequence
  Description of Artificial Sequence: Synthetic peptide
  Seed: RRTRIAYERM
RATRIAYERF

SEQ ID NO: 4360 - protein, 10 aa, Artificial Sequence
  Description of Artificial Sequence: Synthetic peptide
  Seed: RRTRIAYERM
RATRIAYERS

SEQ ID NO: 4361 - protein, 10 aa, Artificial Sequence
  Description of Artificial Sequence: Synthetic peptide
  Seed: RRTRIAYERM
RATRIAYERT

SEQ ID NO: 4362 - protein, 10 aa, Artificial Sequence
  Description of Artificial Sequence: Synthetic peptide
  Seed: RRTRIAYERM
RATRIAYERY

SEQ ID NO: 4363 - protein, 10 aa, Artificial Sequence
  Description of Artificial Sequence: Synthetic peptide
  Seed: RRTRIAYERM
RATRIAYERV

SEQ ID NO: 4364 - protein, 10 aa, Artificial Sequence
  Description of Artificial Sequence: Synthetic peptide
  Seed: RRTRIAYERM
RRTRIAYERR

SEQ ID NO: 4365 - protein, 10 aa, Artificial Sequence
  Description of Artificial Sequence: Synthetic peptide
  Seed: RRTRIAYERM
RRTRIAYERS

SEQ ID NO: 4366 - protein, 10 aa, Artificial Sequence
  Description of Artificial Sequence: Synthetic peptide
  Seed: RRTRIAYERM
RRTRIAYERG

SEQ ID NO: 4367 - protein, 9 aa, Artificial Sequence
  Description of Artificial Sequence: Synthetic peptide
  Seed: RMMESARPE
RRMESARPH

SEQ ID NO: 4368 - protein, 10 aa, Artificial Sequence
  Description of Artificial Sequence: Synthetic peptide
  Seed: RRTRIAYERM
RRTRIAYERI

SEQ ID NO: 4369 - protein, 10 aa, Artificial Sequence
  Description of Artificial Sequence: Synthetic peptide
  Seed: RRTRIAYERM
RRTRIAYERL

SEQ ID NO: 4370 - protein, 10 aa, Artificial Sequence
  Description of Artificial Sequence: Synthetic peptide
  Seed: RRTRIAYERM
RRTRIAYERK

SEQ ID NO: 4371 - protein, 9 aa, Artificial Sequence
  Description of Artificial Sequence: Synthetic peptide
  Seed: RMMESARPE
RRMESARPA

SEQ ID NO: 4372 - protein, 10 aa, Artificial Sequence
  Description of Artificial Sequence: Synthetic peptide
  Seed: RRTRIAYERM
RRTRIAYERF

SEQ ID NO: 4373 - protein, 9 aa, Artificial Sequence
  Description of Artificial Sequence: Synthetic peptide
  Seed: RMMESARPE
RAMESARPA

SEQ ID NO: 4374 - protein, 11 aa, Artificial Sequence
  Description of Artificial Sequence: Synthetic peptide
  Seed: RRTRIAYERMC
RKTRIAYERMK

SEQ ID NO: 4375 - protein, 11 aa, Artificial Sequence
  Description of Artificial Sequence: Synthetic peptide
  Seed: RRTRIAYERMC
RETRIAYERMY

SEQ ID NO: 4376 - protein, 11 aa, Artificial Sequence
  Description of Artificial Sequence: Synthetic peptide
  Seed: RMIGGIGRFYI
RTIGGIGRFYP

SEQ ID NO: 4377 - protein, 10 aa, Artificial Sequence
  Description of Artificial Sequence: Synthetic peptide
  Seed: RSAYERMCNI
RHAYERMCNK

SEQ ID NO: 4378 - protein, 11 aa, Artificial Sequence
  Description of Artificial Sequence: Synthetic peptide
  Seed: RMIGGIGRFYI
RTIGGIGRFYF

SEQ ID NO: 4379 - protein, 11 aa, Artificial Sequence
  Description of Artificial Sequence: Synthetic peptide
  Seed: RMIGGIGRFYI
RTIGGIGRFYM

SEQ ID NO: 4380 - protein, 10 aa, Artificial Sequence
  Description of Artificial Sequence: Synthetic peptide
  Seed: RSAYERMCNI
RHAYERMCNM

SEQ ID NO: 4381 - protein, 10 aa, Artificial Sequence
  Description of Artificial Sequence: Synthetic peptide
  Seed: RSAYERMCNI
RHAYERMCNF

SEQ ID NO: 4382 - protein, 10 aa, Artificial Sequence
  Description of Artificial Sequence: Synthetic peptide
  Seed: RSAYERMCNI
RHAYERMCNW

SEQ ID NO: 4383 - protein, 10 aa, Artificial Sequence
  Description of Artificial Sequence: Synthetic peptide
  Seed: RSAYERMCNI
RHAYERMCNY

SEQ ID NO: 4384 - protein, 10 aa, Artificial Sequence
  Description of Artificial Sequence: Synthetic peptide
  Seed: RSAYERMCNI
RHAYERMCNV

SEQ ID NO: 4385 - protein, 10 aa, Artificial Sequence
  Description of Artificial Sequence: Synthetic peptide
  Seed: RSAYERMCNI
RIAYERMCNA

SEQ ID NO: 4386 - protein, 10 aa, Artificial Sequence
  Description of Artificial Sequence: Synthetic peptide
  Seed: RSAYERMCNI
RIAYERMCNL

SEQ ID NO: 4387 - protein, 10 aa, Artificial Sequence
  Description of Artificial Sequence: Synthetic peptide
  Seed: RSAYERMCNI
RIAYERMCNK

SEQ ID NO: 4388 - protein, 10 aa, Artificial Sequence
  Description of Artificial Sequence: Synthetic peptide
  Seed: RSAYERMCNI
RIAYERMCNM

SEQ ID NO: 4389 - protein, 10 aa, Artificial Sequence
  Description of Artificial Sequence: Synthetic peptide
  Seed: RSAYERMCNI
RIAYERMCNF

SEQ ID NO: 4390 - protein, 11 aa, Artificial Sequence
  Description of Artificial Sequence: Synthetic peptide
  Seed: RMIGGIGRFYI
RTIGGIGRFYK

SEQ ID NO: 4391 - protein, 10 aa, Artificial Sequence
  Description of Artificial Sequence: Synthetic peptide
  Seed: RSAYERMCNI
RIAYERMCNW

SEQ ID NO: 4392 - protein, 11 aa, Artificial Sequence
  Description of Artificial Sequence: Synthetic peptide
  Seed: RMIGGIGRFYI
RTIGGIGRFYL

SEQ ID NO: 4393 - protein, 10 aa, Artificial Sequence
  Description of Artificial Sequence: Synthetic peptide
  Seed: RSAYERMCNI
RHAYERMCNL

SEQ ID NO: 4394 - protein, 10 aa, Artificial Sequence
  Description of Artificial Sequence: Synthetic peptide
  Seed: RSAYERMCNI
RHAYERMCNI

SEQ ID NO: 4395 - protein, 11 aa, Artificial Sequence
  Description of Artificial Sequence: Synthetic peptide
  Seed: RMIGGIGRFYI
RTIGGIGRFYI

SEQ ID NO: 4396 - protein, 11 aa, Artificial Sequence
  Description of Artificial Sequence: Synthetic peptide
  Seed: RMIGGIGRFYI
RTIGGIGRFYS

SEQ ID NO: 4397 - protein, 10 aa, Artificial Sequence
  Description of Artificial Sequence: Synthetic peptide
  Seed: RSAYERMCNI
REAYERMCNF

SEQ ID NO: 4398 - protein, 10 aa, Artificial Sequence
  Description of Artificial Sequence: Synthetic peptide
  Seed: RSAYERMCNI
REAYERMCNW

SEQ ID NO: 4399 - protein, 10 aa, Artificial Sequence
  Description of Artificial Sequence: Synthetic peptide
  Seed: RSAYERMCNI
REAYERMCNY

SEQ ID NO: 4400 - protein, 11 aa, Artificial Sequence
  Description of Artificial Sequence: Synthetic peptide
  Seed: RMIGGIGRFYI
RTIGGIGRFYY

SEQ ID NO: 4401 - protein, 10 aa, Artificial Sequence
  Description of Artificial Sequence: Synthetic peptide
  Seed: RSAYERMCNI
REAYERMCNV

SEQ ID NO: 4402 - protein, 11 aa, Artificial Sequence
  Description of Artificial Sequence: Synthetic peptide
  Seed: RMIGGIGRFYI
RTIGGIGRFYW

SEQ ID NO: 4403 - protein, 10 aa, Artificial Sequence
  Description of Artificial Sequence: Synthetic peptide
  Seed: RSAYERMCNI
RGAYERMCNA

SEQ ID NO: 4404 - protein, 10 aa, Artificial Sequence
  Description of Artificial Sequence: Synthetic peptide
  Seed: RSAYERMCNI
RGAYERMCNL

SEQ ID NO: 4405 - protein, 11 aa, Artificial Sequence
  Description of Artificial Sequence: Synthetic peptide
  Seed: RMIGGIGRFYI
RTIGGIGRFYT

SEQ ID NO: 4406 - protein, 10 aa, Artificial Sequence
  Description of Artificial Sequence: Synthetic peptide
  Seed: RSAYERMCNI
RGAYERMCNK

SEQ ID NO: 4407 - protein, 10 aa, Artificial Sequence
  Description of Artificial Sequence: Synthetic peptide
  Seed: RSAYERMCNI
RGAYERMCNM

SEQ ID NO: 4408 - protein, 10 aa, Artificial Sequence
  Description of Artificial Sequence: Synthetic peptide
  Seed: RSAYERMCNI
RGAYERMCNF

SEQ ID NO: 4409 - protein, 10 aa, Artificial Sequence
  Description of Artificial Sequence: Synthetic peptide
  Seed: RSAYERMCNI
RGAYERMCNW

SEQ ID NO: 4410 - protein, 10 aa, Artificial Sequence
  Description of Artificial Sequence: Synthetic peptide
  Seed: RSAYERMCNI
RGAYERMCNY

SEQ ID NO: 4411 - protein, 10 aa, Artificial Sequence
  Description of Artificial Sequence: Synthetic peptide
  Seed: RSAYERMCNI
RGAYERMCNV

SEQ ID NO: 4412 - protein, 10 aa, Artificial Sequence
  Description of Artificial Sequence: Synthetic peptide
  Seed: RSAYERMCNI
RHAYERMCNA

SEQ ID NO: 4413 - protein, 10 aa, Artificial Sequence
  Description of Artificial Sequence: Synthetic peptide
  Seed: RSAYERMCNI
RIAYERMCNY

SEQ ID NO: 4414 - protein, 10 aa, Artificial Sequence
  Description of Artificial Sequence: Synthetic peptide
  Seed: RSAYERMCNI
RIAYERMCNV

SEQ ID NO: 4415 - protein, 10 aa, Artificial Sequence
  Description of Artificial Sequence: Synthetic peptide
  Seed: RSAYERMCNI
REAYERMCNK

SEQ ID NO: 4416 - protein, 11 aa, Artificial Sequence
  Description of Artificial Sequence: Synthetic peptide
  Seed: RMIGGIGRFYI
RTIGGIGRFYC

SEQ ID NO: 4417 - protein, 10 aa, Artificial Sequence
  Description of Artificial Sequence: Synthetic peptide
  Seed: RSAYERMCNI
RKAYERMCNV

SEQ ID NO: 4418 - protein, 10 aa, Artificial Sequence
  Description of Artificial Sequence: Synthetic peptide
  Seed: RSAYERMCNI
RMAYERMCNA

SEQ ID NO: 4419 - protein, 10 aa, Artificial Sequence
  Description of Artificial Sequence: Synthetic peptide
  Seed: RSAYERMCNI
RMAYERMCNI

SEQ ID NO: 4420 - protein, 11 aa, Artificial Sequence
  Description of Artificial Sequence: Synthetic peptide
  Seed: RMIGGIGRFYI
RTIGGIGRFYD

SEQ ID NO: 4421 - protein, 10 aa, Artificial Sequence
  Description of Artificial Sequence: Synthetic peptide
  Seed: RSAYERMCNI
RMAYERMCNL

SEQ ID NO: 4422 - protein, 10 aa, Artificial Sequence
  Description of Artificial Sequence: Synthetic peptide
  Seed: RSAYERMCNI
RMAYERMCNK

SEQ ID NO: 4423 - protein, 10 aa, Artificial Sequence
  Description of Artificial Sequence: Synthetic peptide
  Seed: RSAYERMCNI
RMAYERMCNM

SEQ ID NO: 4424 - protein, 10 aa, Artificial Sequence
  Description of Artificial Sequence: Synthetic peptide
  Seed: RSAYERMCNI
RMAYERMCNF

SEQ ID NO: 4425 - protein, 10 aa, Artificial Sequence
  Description of Artificial Sequence: Synthetic peptide
  Seed: RSAYERMCNI
RMAYERMCNW

SEQ ID NO: 4426 - protein, 11 aa, Artificial Sequence
  Description of Artificial Sequence: Synthetic peptide
  Seed: RMIGGIGRFYI
RTIGGIGRFYN

SEQ ID NO: 4427 - protein, 11 aa, Artificial Sequence
  Description of Artificial Sequence: Synthetic peptide
  Seed: RMIGGIGRFYI
RTIGGIGRFYR

SEQ ID NO: 4428 - protein, 10 aa, Artificial Sequence
  Description of Artificial Sequence: Synthetic peptide
  Seed: RSAYERMCNI
RMAYERMCNY

SEQ ID NO: 4429 - protein, 10 aa, Artificial Sequence
  Description of Artificial Sequence: Synthetic peptide
  Seed: RSAYERMCNI
RMAYERMCNV

SEQ ID NO: 4430 - protein, 10 aa, Artificial Sequence
  Description of Artificial Sequence: Synthetic peptide
  Seed: RSAYERMCNI
RFAYERMCNA

SEQ ID NO: 4431 - protein, 10 aa, Artificial Sequence
  Description of Artificial Sequence: Synthetic peptide
  Seed: RSAYERMCNI
RFAYERMCNI

SEQ ID NO: 4432 - protein, 10 aa, Artificial Sequence
  Description of Artificial Sequence: Synthetic peptide
  Seed: RSAYERMCNI
RFAYERMCNL

SEQ ID NO: 4433 - protein, 10 aa, Artificial Sequence
  Description of Artificial Sequence: Synthetic peptide
  Seed: RSAYERMCNI
RFAYERMCNK

SEQ ID NO: 4434 - protein, 10 aa, Artificial Sequence
  Description of Artificial Sequence: Synthetic peptide
  Seed: RSAYERMCNI
RKAYERMCNY

SEQ ID NO: 4435 - protein, 10 aa, Artificial Sequence
  Description of Artificial Sequence: Synthetic peptide
  Seed: RSAYERMCNI
RKAYERMCNW

SEQ ID NO: 4436 - protein, 11 aa, Artificial Sequence
  Description of Artificial Sequence: Synthetic peptide
  Seed: RMIGGIGRFYI
RTIGGIGRFYH

SEQ ID NO: 4437 - protein, 10 aa, Artificial Sequence
  Description of Artificial Sequence: Synthetic peptide
  Seed: RSAYERMCNI
RKAYERMCNF

SEQ ID NO: 4438 - protein, 10 aa, Artificial Sequence
  Description of Artificial Sequence: Synthetic peptide
  Seed: RSAYERMCNI
RLAYERMCNA

SEQ ID NO: 4439 - protein, 10 aa, Artificial Sequence
  Description of Artificial Sequence: Synthetic peptide
  Seed: RSAYERMCNI
RLAYERMCNI

SEQ ID NO: 4440 - protein, 10 aa, Artificial Sequence
  Description of Artificial Sequence: Synthetic peptide
  Seed: RSAYERMCNI
RLAYERMCNL

SEQ ID NO: 4441 - protein, 10 aa, Artificial Sequence
  Description of Artificial Sequence: Synthetic peptide
  Seed: RSAYERMCNI
RLAYERMCNK

SEQ ID NO: 4442 - protein, 10 aa, Artificial Sequence
  Description of Artificial Sequence: Synthetic peptide
  Seed: RSAYERMCNI
RLAYERMCNM

SEQ ID NO: 4443 - protein, 10 aa, Artificial Sequence
  Description of Artificial Sequence: Synthetic peptide
  Seed: RSAYERMCNI
RLAYERMCNF

SEQ ID NO: 4444 - protein, 10 aa, Artificial Sequence
  Description of Artificial Sequence: Synthetic peptide
  Seed: RSAYERMCNI
RLAYERMCNW

SEQ ID NO: 4445 - protein, 11 aa, Artificial Sequence
  Description of Artificial Sequence: Synthetic peptide
  Seed: RMIGGIGRFYI
RTIGGIGRFYG

SEQ ID NO: 4446 - protein, 11 aa, Artificial Sequence
  Description of Artificial Sequence: Synthetic peptide
  Seed: RMIGGIGRFYI
RTIGGIGRFYE

SEQ ID NO: 4447 - protein, 10 aa, Artificial Sequence
  Description of Artificial Sequence: Synthetic peptide
  Seed: RSAYERMCNI
RLAYERMCNY

SEQ ID NO: 4448 - protein, 11 aa, Artificial Sequence
  Description of Artificial Sequence: Synthetic peptide
  Seed: RMIGGIGRFYI
RTIGGIGRFYQ

SEQ ID NO: 4449 - protein, 10 aa, Artificial Sequence
  Description of Artificial Sequence: Synthetic peptide
  Seed: RSAYERMCNI
RLAYERMCNV

SEQ ID NO: 4450 - protein, 10 aa, Artificial Sequence
  Description of Artificial Sequence: Synthetic peptide
  Seed: RSAYERMCNI
RKAYERMCNA

SEQ ID NO: 4451 - protein, 10 aa, Artificial Sequence
  Description of Artificial Sequence: Synthetic peptide
  Seed: RSAYERMCNI
RKAYERMCNI

SEQ ID NO: 4452 - protein, 10 aa, Artificial Sequence
  Description of Artificial Sequence: Synthetic peptide
  Seed: RSAYERMCNI
RKAYERMCNL

SEQ ID NO: 4453 - protein, 10 aa, Artificial Sequence
  Description of Artificial Sequence: Synthetic peptide
  Seed: RSAYERMCNI
RKAYERMCNK

SEQ ID NO: 4454 - protein, 10 aa, Artificial Sequence
  Description of Artificial Sequence: Synthetic peptide
  Seed: RSAYERMCNI
RKAYERMCNM

SEQ ID NO: 4455 - protein, 10 aa, Artificial Sequence
  Description of Artificial Sequence: Synthetic peptide
  Seed: RSAYERMCNI
REAYERMCNM

SEQ ID NO: 4456 - protein, 11 aa, Artificial Sequence
  Description of Artificial Sequence: Synthetic peptide
  Seed: RMIGGIGRFYI
RTIGGIGRFYV

SEQ ID NO: 4457 - protein, 10 aa, Artificial Sequence
  Description of Artificial Sequence: Synthetic peptide
  Seed: RSAYERMCNI
RFAYERMCNF

SEQ ID NO: 4458 - protein, 10 aa, Artificial Sequence
  Description of Artificial Sequence: Synthetic peptide
  Seed: RSAYERMCNI
RAAYERMCNY

SEQ ID NO: 4459 - protein, 10 aa, Artificial Sequence
  Description of Artificial Sequence: Synthetic peptide
  Seed: RSAYERMCNI
RRAYERMCNA

SEQ ID NO: 4460 - protein, 10 aa, Artificial Sequence
  Description of Artificial Sequence: Synthetic peptide
  Seed: RSAYERMCNI
RRAYERMCNI

SEQ ID NO: 4461 - protein, 10 aa, Artificial Sequence
  Description of Artificial Sequence: Synthetic peptide
  Seed: RSAYERMCNI
RRAYERMCNL

SEQ ID NO: 4462 - protein, 11 aa, Artificial Sequence
  Description of Artificial Sequence: Synthetic peptide
  Seed: RMIGGIGRFYI
RVIGGIGRFYG

SEQ ID NO: 4463 - protein, 10 aa, Artificial Sequence
  Description of Artificial Sequence: Synthetic peptide
  Seed: RSAYERMCNI
RRAYERMCNK

SEQ ID NO: 4464 - protein, 10 aa, Artificial Sequence
  Description of Artificial Sequence: Synthetic peptide
  Seed: RSAYERMCNI
RRAYERMCNM

SEQ ID NO: 4465 - protein, 10 aa, Artificial Sequence
  Description of Artificial Sequence: Synthetic peptide
  Seed: RSAYERMCNI
RRAYERMCNF

SEQ ID NO: 4466 - protein, 10 aa, Artificial Sequence
  Description of Artificial Sequence: Synthetic peptide
  Seed: RSAYERMCNI
RRAYERMCNW

SEQ ID NO: 4467 - protein, 10 aa, Artificial Sequence
  Description of Artificial Sequence: Synthetic peptide
  Seed: RSAYERMCNI
RRAYERMCNY

SEQ ID NO: 4468 - protein, 11 aa, Artificial Sequence
  Description of Artificial Sequence: Synthetic peptide
  Seed: RMIGGIGRFYI
RVIGGIGRFYE

SEQ ID NO: 4469 - protein, 10 aa, Artificial Sequence
  Description of Artificial Sequence: Synthetic peptide
  Seed: RSAYERMCNI
RRAYERMCNV

SEQ ID NO: 4470 - protein, 11 aa, Artificial Sequence
  Description of Artificial Sequence: Synthetic peptide
  Seed: RMIGGIGRFYI
RVIGGIGRFYQ

SEQ ID NO: 4471 - protein, 11 aa, Artificial Sequence
  Description of Artificial Sequence: Synthetic peptide
  Seed: RMIGGIGRFYI
RVIGGIGRFYC

SEQ ID NO: 4472 - protein, 10 aa, Artificial Sequence
  Description of Artificial Sequence: Synthetic peptide
  Seed: RSAYERMCNI
RNAYERMCNA

SEQ ID NO: 4473 - protein, 10 aa, Artificial Sequence
  Description of Artificial Sequence: Synthetic peptide
  Seed: RSAYERMCNI
RNAYERMCNL

SEQ ID NO: 4474 - protein, 10 aa, Artificial Sequence
  Description of Artificial Sequence: Synthetic peptide
  Seed: RSAYERMCNI
RNAYERMCNK

SEQ ID NO: 4475 - protein, 10 aa, Artificial Sequence
  Description of Artificial Sequence: Synthetic peptide
  Seed: RSAYERMCNI
RAAYERMCNV

SEQ ID NO: 4476 - protein, 11 aa, Artificial Sequence
  Description of Artificial Sequence: Synthetic peptide
  Seed: RMIGGIGRFYI
RVIGGIGRFYH

SEQ ID NO: 4477 - protein, 11 aa, Artificial Sequence
  Description of Artificial Sequence: Synthetic peptide
  Seed: RMIGGIGRFYI
RVIGGIGRFYN

SEQ ID NO: 4478 - protein, 10 aa, Artificial Sequence
  Description of Artificial Sequence: Synthetic peptide
  Seed: RSAYERMCNI
RAAYERMCNW

SEQ ID NO: 4479 - protein, 11 aa, Artificial Sequence
  Description of Artificial Sequence: Synthetic peptide
  Seed: RSALILRGSVA
RIALILRGSVK

SEQ ID NO: 4480 - protein, 11 aa, Artificial Sequence
  Description of Artificial Sequence: Synthetic peptide
  Seed: RSALILRGSVA
RMALILRGSVK

SEQ ID NO: 4481 - protein, 11 aa, Artificial Sequence
  Description of Artificial Sequence: Synthetic peptide
  Seed: RSALILRGSVA
RFALILRGSVK

SEQ ID NO: 4482 - protein, 11 aa, Artificial Sequence
  Description of Artificial Sequence: Synthetic peptide
  Seed: RMIGGIGRFYI
RVIGGIGRFYK

SEQ ID NO: 4483 - protein, 11 aa, Artificial Sequence
  Description of Artificial Sequence: Synthetic peptide
  Seed: RSALILRGSVA
RSALILRGSVK

SEQ ID NO: 4484 - protein, 11 aa, Artificial Sequence
  Description of Artificial Sequence: Synthetic peptide
  Seed: RSALILRGSVA
RTALILRGSVA

SEQ ID NO: 4485 - protein, 11 aa, Artificial Sequence
  Description of Artificial Sequence: Synthetic peptide
  Seed: RSALILRGSVA
RTALILRGSVK

SEQ ID NO: 4486 - protein, 11 aa, Artificial Sequence
  Description of Artificial Sequence: Synthetic peptide
  Seed: RSALILRGSVA
RYALILRGSVK

SEQ ID NO: 4487 - protein, 11 aa, Artificial Sequence
  Description of Artificial Sequence: Synthetic peptide
  Seed: RMIGGIGRFYI
RVIGGIGRFYL

SEQ ID NO: 4488 - protein, 11 aa, Artificial Sequence
  Description of Artificial Sequence: Synthetic peptide
  Seed: RSALILRGSVA
RVALILRGSVK

SEQ ID NO: 4489 - protein, 10 aa, Artificial Sequence
  Description of Artificial Sequence: Synthetic peptide
  Seed: RSAYERMCNI
RAAYERMCNA

SEQ ID NO: 4490 - protein, 11 aa, Artificial Sequence
  Description of Artificial Sequence: Synthetic peptide
  Seed: RMIGGIGRFYI
RVIGGIGRFYI

SEQ ID NO: 4491 - protein, 10 aa, Artificial Sequence
  Description of Artificial Sequence: Synthetic peptide
  Seed: RSAYERMCNI
RAAYERMCNI

SEQ ID NO: 4492 - protein, 10 aa, Artificial Sequence
  Description of Artificial Sequence: Synthetic peptide
  Seed: RSAYERMCNI
RAAYERMCNL

SEQ ID NO: 4493 - protein, 10 aa, Artificial Sequence
  Description of Artificial Sequence: Synthetic peptide
  Seed: RSAYERMCNI
RAAYERMCNK

SEQ ID NO: 4494 - protein, 10 aa, Artificial Sequence
  Description of Artificial Sequence: Synthetic peptide
  Seed: RSAYERMCNI
RAAYERMCNM

SEQ ID NO: 4495 - protein, 10 aa, Artificial Sequence
  Description of Artificial Sequence: Synthetic peptide
  Seed: RSAYERMCNI
RAAYERMCNF

SEQ ID NO: 4496 - protein, 11 aa, Artificial Sequence
  Description of Artificial Sequence: Synthetic peptide
  Seed: RMIGGIGRFYI
RVIGGIGRFYD

SEQ ID NO: 4497 - protein, 10 aa, Artificial Sequence
  Description of Artificial Sequence: Synthetic peptide
  Seed: RSAYERMCNI
RNAYERMCNM

SEQ ID NO: 4498 - protein, 10 aa, Artificial Sequence
  Description of Artificial Sequence: Synthetic peptide
  Seed: RSAYERMCNI
REAYERMCNL

SEQ ID NO: 4499 - protein, 10 aa, Artificial Sequence
  Description of Artificial Sequence: Synthetic peptide
  Seed: RSAYERMCNI
RCAYERMCNM

SEQ ID NO: 4500 - protein, 10 aa, Artificial Sequence
  Description of Artificial Sequence: Synthetic peptide
  Seed: RSAYERMCNI
RCAYERMCNF

SEQ ID NO: 4501 - protein, 10 aa, Artificial Sequence
  Description of Artificial Sequence: Synthetic peptide
  Seed: RSAYERMCNI
RCAYERMCNW

SEQ ID NO: 4502 - protein, 11 aa, Artificial Sequence
  Description of Artificial Sequence: Synthetic peptide
  Seed: RMIGGIGRFYI
RYIGGIGRFYH

SEQ ID NO: 4503 - protein, 10 aa, Artificial Sequence
  Description of Artificial Sequence: Synthetic peptide
  Seed: RSAYERMCNI
RCAYERMCNY

SEQ ID NO: 4504 - protein, 10 aa, Artificial Sequence
  Description of Artificial Sequence: Synthetic peptide
  Seed: RSAYERMCNI
RCAYERMCNV

SEQ ID NO: 4505 - protein, 11 aa, Artificial Sequence
  Description of Artificial Sequence: Synthetic peptide
  Seed: RMIGGIGRFYI
RWIGGIGRFYY

SEQ ID NO: 4506 - protein, 10 aa, Artificial Sequence
  Description of Artificial Sequence: Synthetic peptide
  Seed: RSAYERMCNI
RQAYERMCNA

SEQ ID NO: 4507 - protein, 10 aa, Artificial Sequence
  Description of Artificial Sequence: Synthetic peptide
  Seed: RSAYERMCNI
RQAYERMCNI

SEQ ID NO: 4508 - protein, 10 aa, Artificial Sequence
  Description of Artificial Sequence: Synthetic peptide
  Seed: RSAYERMCNI
RQAYERMCNL

SEQ ID NO: 4509 - protein, 10 aa, Artificial Sequence
  Description of Artificial Sequence: Synthetic peptide
  Seed: RSAYERMCNI
RQAYERMCNK

SEQ ID NO: 4510 - protein, 10 aa, Artificial Sequence
  Description of Artificial Sequence: Synthetic peptide
  Seed: RSAYERMCNI
RQAYERMCNM

SEQ ID NO: 4511 - protein, 10 aa, Artificial Sequence
  Description of Artificial Sequence: Synthetic peptide
  Seed: RSAYERMCNI
RQAYERMCNF

SEQ ID NO: 4512 - protein, 10 aa, Artificial Sequence
  Description of Artificial Sequence: Synthetic peptide
  Seed: RSAYERMCNI
RQAYERMCNW

SEQ ID NO: 4513 - protein, 10 aa, Artificial Sequence
  Description of Artificial Sequence: Synthetic peptide
  Seed: RSAYERMCNI
RQAYERMCNY

SEQ ID NO: 4514 - protein, 10 aa, Artificial Sequence
  Description of Artificial Sequence: Synthetic peptide
  Seed: RSAYERMCNI
RQAYERMCNV

SEQ ID NO: 4515 - protein, 10 aa, Artificial Sequence
  Description of Artificial Sequence: Synthetic peptide
  Seed: RSAYERMCNI
REAYERMCNA

SEQ ID NO: 4516 - protein, 10 aa, Artificial Sequence
  Description of Artificial Sequence: Synthetic peptide
  Seed: RSAYERMCNI
REAYERMCNI

SEQ ID NO: 4517 - protein, 11 aa, Artificial Sequence
  Description of Artificial Sequence: Synthetic peptide
  Seed: RMIGGIGRFYI
RYIGGIGRFYY

SEQ ID NO: 4518 - protein, 10 aa, Artificial Sequence
  Description of Artificial Sequence: Synthetic peptide
  Seed: RSAYERMCNI
RCAYERMCNK

SEQ ID NO: 4519 - protein, 10 aa, Artificial Sequence
  Description of Artificial Sequence: Synthetic peptide
  Seed: RSAYERMCNI
RNAYERMCNF

SEQ ID NO: 4520 - protein, 10 aa, Artificial Sequence
  Description of Artificial Sequence: Synthetic peptide
  Seed: RSAYERMCNI
RCAYERMCNL

SEQ ID NO: 4521 - protein, 10 aa, Artificial Sequence
  Description of Artificial Sequence: Synthetic peptide
  Seed: RSAYERMCNI
RNAYERMCNW

SEQ ID NO: 4522 - protein, 10 aa, Artificial Sequence
  Description of Artificial Sequence: Synthetic peptide
  Seed: RSAYERMCNI
RNAYERMCNY

SEQ ID NO: 4523 - protein, 10 aa, Artificial Sequence
  Description of Artificial Sequence: Synthetic peptide
  Seed: RSAYERMCNI
RNAYERMCNV

SEQ ID NO: 4524 - protein, 11 aa, Artificial Sequence
  Description of Artificial Sequence: Synthetic peptide
  Seed: RMIGGIGRFYI
RVIGGIGRFYR

SEQ ID NO: 4525 - protein, 10 aa, Artificial Sequence
  Description of Artificial Sequence: Synthetic peptide
  Seed: RSAYERMCNI
RDAYERMCNA

SEQ ID NO: 4526 - protein, 10 aa, Artificial Sequence
  Description of Artificial Sequence: Synthetic peptide
  Seed: RSAYERMCNI
RDAYERMCNI

SEQ ID NO: 4527 - protein, 10 aa, Artificial Sequence
  Description of Artificial Sequence: Synthetic peptide
  Seed: RSAYERMCNI
RDAYERMCNL

SEQ ID NO: 4528 - protein, 11 aa, Artificial Sequence
  Description of Artificial Sequence: Synthetic peptide
  Seed: RMIGGIGRFYI
RVIGGIGRFYA

SEQ ID NO: 4529 - protein, 10 aa, Artificial Sequence
  Description of Artificial Sequence: Synthetic peptide
  Seed: RSAYERMCNI
RDAYERMCNK

SEQ ID NO: 4530 - protein, 10 aa, Artificial Sequence
  Description of Artificial Sequence: Synthetic peptide
  Seed: RSAYERMCNI
RDAYERMCNM

SEQ ID NO: 4531 - protein, 10 aa, Artificial Sequence
  Description of Artificial Sequence: Synthetic peptide
  Seed: RSAYERMCNI
RDAYERMCNF

SEQ ID NO: 4532 - protein, 10 aa, Artificial Sequence
  Description of Artificial Sequence: Synthetic peptide
  Seed: RSAYERMCNI
RDAYERMCNW

SEQ ID NO: 4533 - protein, 10 aa, Artificial Sequence
  Description of Artificial Sequence: Synthetic peptide
  Seed: RSAYERMCNI
RDAYERMCNY

SEQ ID NO: 4534 - protein, 10 aa, Artificial Sequence
  Description of Artificial Sequence: Synthetic peptide
  Seed: RSAYERMCNI
RDAYERMCNV

SEQ ID NO: 4535 - protein, 10 aa, Artificial Sequence
  Description of Artificial Sequence: Synthetic peptide
  Seed: RSAYERMCNI
RCAYERMCNA

SEQ ID NO: 4536 - protein, 11 aa, Artificial Sequence
  Description of Artificial Sequence: Synthetic peptide
  Seed: RMIGGIGRFYI
RYIGGIGRFYV

SEQ ID NO: 4537 - protein, 10 aa, Artificial Sequence
  Description of Artificial Sequence: Synthetic peptide
  Seed: RSAYERMCNI
RCAYERMCNI

SEQ ID NO: 4538 - protein, 10 aa, Artificial Sequence
  Description of Artificial Sequence: Synthetic peptide
  Seed: RSAYERMCNI
RFAYERMCNM

SEQ ID NO: 4539 - protein, 10 aa, Artificial Sequence
  Description of Artificial Sequence: Synthetic peptide
  Seed: RSAYERMCNI
RFAYERMCNW

SEQ ID NO: 4540 - protein, 11 aa, Artificial Sequence
  Description of Artificial Sequence: Synthetic peptide
  Seed: RSALILRGSVA
RAALILRGSVK

SEQ ID NO: 4541 - protein, 9 aa, Artificial Sequence
  Description of Artificial Sequence: Synthetic peptide
  Seed: RSGAAGAAV
RTGAAGAAA

SEQ ID NO: 4542 - protein, 9 aa, Artificial Sequence
  Description of Artificial Sequence: Synthetic peptide
  Seed: RSGAAGAAV
RTGAAGAAI

SEQ ID NO: 4543 - protein, 9 aa, Artificial Sequence
  Description of Artificial Sequence: Synthetic peptide
  Seed: RSGAAGAAV
RTGAAGAAL

SEQ ID NO: 4544 - protein, 11 aa, Artificial Sequence
  Description of Artificial Sequence: Synthetic peptide
  Seed: RMIGGIGRFYI
RSIGGIGRFYG

SEQ ID NO: 4545 - protein, 11 aa, Artificial Sequence
  Description of Artificial Sequence: Synthetic peptide
  Seed: RMIGGIGRFYI
RSIGGIGRFYE

SEQ ID NO: 4546 - protein, 9 aa, Artificial Sequence
  Description of Artificial Sequence: Synthetic peptide
  Seed: RSGAAGAAV
RTGAAGAAK

SEQ ID NO: 4547 - protein, 9 aa, Artificial Sequence
  Description of Artificial Sequence: Synthetic peptide
  Seed: RSGAAGAAV
RTGAAGAAM

SEQ ID NO: 4548 - protein, 11 aa, Artificial Sequence
  Description of Artificial Sequence: Synthetic peptide
  Seed: RMIGGIGRFYI
RSIGGIGRFYQ

SEQ ID NO: 4549 - protein, 9 aa, Artificial Sequence
  Description of Artificial Sequence: Synthetic peptide
  Seed: RSGAAGAAV
RTGAAGAAF

SEQ ID NO: 4550 - protein, 9 aa, Artificial Sequence
  Description of Artificial Sequence: Synthetic peptide
  Seed: RSGAAGAAV
RTGAAGAAS

SEQ ID NO: 4551 - protein, 9 aa, Artificial Sequence
  Description of Artificial Sequence: Synthetic peptide
  Seed: RSGAAGAAV
RTGAAGAAY

SEQ ID NO: 4552 - protein, 11 aa, Artificial Sequence
  Description of Artificial Sequence: Synthetic peptide
  Seed: RMIGGIGRFYI
RSIGGIGRFYC

SEQ ID NO: 4553 - protein, 9 aa, Artificial Sequence
  Description of Artificial Sequence: Synthetic peptide
  Seed: RSGAAGAAV
RTGAAGAAV

SEQ ID NO: 4554 - protein, 11 aa, Artificial Sequence
  Description of Artificial Sequence: Synthetic peptide
  Seed: RMIGGIGRFYI
RSIGGIGRFYD

SEQ ID NO: 4555 - protein, 11 aa, Artificial Sequence
  Description of Artificial Sequence: Synthetic peptide
  Seed: RMIGGIGRFYI
RSIGGIGRFYN

SEQ ID NO: 4556 - protein, 9 aa, Artificial Sequence
  Description of Artificial Sequence: Synthetic peptide
  Seed: RSGAAGAAV
RWGAAGAAK

SEQ ID NO: 4557 - protein, 9 aa, Artificial Sequence
  Description of Artificial Sequence: Synthetic peptide
  Seed: RSGAAGAAV
RYGAAGAAA

SEQ ID NO: 4558 - protein, 9 aa, Artificial Sequence
  Description of Artificial Sequence: Synthetic peptide
  Seed: RSGAAGAAV
RYGAAGAAK

SEQ ID NO: 4559 - protein, 9 aa, Artificial Sequence
  Description of Artificial Sequence: Synthetic peptide
  Seed: RSGAAGAAV
RTGAAGAAR

SEQ ID NO: 4560 - protein, 9 aa, Artificial Sequence
  Description of Artificial Sequence: Synthetic peptide
  Seed: RSGAAGAAV
RSGAAGAAY

SEQ ID NO: 4561 - protein, 9 aa, Artificial Sequence
  Description of Artificial Sequence: Synthetic peptide
  Seed: RSGAAGAAV
RVGAAGAAI

SEQ ID NO: 4562 - protein, 9 aa, Artificial Sequence
  Description of Artificial Sequence: Synthetic peptide
  Seed: RSGAAGAAV
RSGAAGAAF

SEQ ID NO: 4563 - protein, 9 aa, Artificial Sequence
  Description of Artificial Sequence: Synthetic peptide
  Seed: RSGAAGAAV
RAGAAGAAY

SEQ ID NO: 4564 - protein, 9 aa, Artificial Sequence
  Description of Artificial Sequence: Synthetic peptide
  Seed: RSGAAGAAV
RAGAAGAAV

SEQ ID NO: 4565 - protein, 9 aa, Artificial Sequence
  Description of Artificial Sequence: Synthetic peptide
  Seed: RSGAAGAAV
RNGAAGAAK

SEQ ID NO: 4566 - protein, 9 aa, Artificial Sequence
  Description of Artificial Sequence: Synthetic peptide
  Seed: RSGAAGAAV
RQGAAGAAK

SEQ ID NO: 4567 - protein, 9 aa, Artificial Sequence
  Description of Artificial Sequence: Synthetic peptide
  Seed: RSGAAGAAV
RGGAAGAAK

SEQ ID NO: 4568 - protein, 9 aa, Artificial Sequence
  Description of Artificial Sequence: Synthetic peptide
  Seed: RSGAAGAAV
RIGAAGAAA

SEQ ID NO: 4569 - protein, 9 aa, Artificial Sequence
  Description of Artificial Sequence: Synthetic peptide
  Seed: RSGAAGAAV
RIGAAGAAK

SEQ ID NO: 4570 - protein, 9 aa, Artificial Sequence
  Description of Artificial Sequence: Synthetic peptide
  Seed: RSGAAGAAV
RLGAAGAAK

SEQ ID NO: 4571 - protein, 9 aa, Artificial Sequence
  Description of Artificial Sequence: Synthetic peptide
  Seed: RSGAAGAAV
RMGAAGAAA

SEQ ID NO: 4572 - protein, 9 aa, Artificial Sequence
  Description of Artificial Sequence: Synthetic peptide
  Seed: RSGAAGAAV
RMGAAGAAK

SEQ ID NO: 4573 - protein, 9 aa, Artificial Sequence
  Description of Artificial Sequence: Synthetic peptide
  Seed: RSGAAGAAV
RFGAAGAAK

SEQ ID NO: 4574 - protein, 9 aa, Artificial Sequence
  Description of Artificial Sequence: Synthetic peptide
  Seed: RSGAAGAAV
RSGAAGAAA

SEQ ID NO: 4575 - protein, 9 aa, Artificial Sequence
  Description of Artificial Sequence: Synthetic peptide
  Seed: RSGAAGAAV
RSGAAGAAL

SEQ ID NO: 4576 - protein, 9 aa, Artificial Sequence
  Description of Artificial Sequence: Synthetic peptide
  Seed: RSGAAGAAV
RSGAAGAAK

SEQ ID NO: 4577 - protein, 9 aa, Artificial Sequence
  Description of Artificial Sequence: Synthetic peptide
  Seed: RSGAAGAAV
RSGAAGAAM

SEQ ID NO: 4578 - protein, 11 aa, Artificial Sequence
  Description of Artificial Sequence: Synthetic peptide
  Seed: RMIGGIGRFYI
RSIGGIGRFYH

SEQ ID NO: 4579 - protein, 9 aa, Artificial Sequence
  Description of Artificial Sequence: Synthetic peptide
  Seed: RSGAAGAAV
RVGAAGAAA

SEQ ID NO: 4580 - protein, 9 aa, Artificial Sequence
  Description of Artificial Sequence: Synthetic peptide
  Seed: RSGAAGAAV
RVGAAGAAK

SEQ ID NO: 4581 - protein, 9 aa, Artificial Sequence
  Description of Artificial Sequence: Synthetic peptide
  Seed: RSGAAGAAV
RAGAAGAAM

SEQ ID NO: 4582 - protein, 10 aa, Artificial Sequence
  Description of Artificial Sequence: Synthetic peptide
  Seed: RSGAAGAAVK
RMGAAGAAVR

SEQ ID NO: 4583 - protein, 10 aa, Artificial Sequence
  Description of Artificial Sequence: Synthetic peptide
  Seed: RSGAAGAAVK
RMGAAGAAVY

SEQ ID NO: 4584 - protein, 10 aa, Artificial Sequence
  Description of Artificial Sequence: Synthetic peptide
  Seed: RSGAAGAAVK
RFGAAGAAVR

SEQ ID NO: 4585 - protein, 10 aa, Artificial Sequence
  Description of Artificial Sequence: Synthetic peptide
  Seed: RSGAAGAAVK
RFGAAGAAVK

SEQ ID NO: 4586 - protein, 10 aa, Artificial Sequence
  Description of Artificial Sequence: Synthetic peptide
  Seed: RSGAAGAAVK
RPGAAGAAVR

SEQ ID NO: 4587 - protein, 10 aa, Artificial Sequence
  Description of Artificial Sequence: Synthetic peptide
  Seed: RSGAAGAAVK
RSGAAGAAVR

SEQ ID NO: 4588 - protein, 10 aa, Artificial Sequence
  Description of Artificial Sequence: Synthetic peptide
  Seed: RSGAAGAAVK
RTGAAGAAVA

SEQ ID NO: 4589 - protein, 10 aa, Artificial Sequence
  Description of Artificial Sequence: Synthetic peptide
  Seed: RSGAAGAAVK
RTGAAGAAVR

SEQ ID NO: 4590 - protein, 10 aa, Artificial Sequence
  Description of Artificial Sequence: Synthetic peptide
  Seed: RSGAAGAAVK
RTGAAGAAVK

SEQ ID NO: 4591 - protein, 10 aa, Artificial Sequence
  Description of Artificial Sequence: Synthetic peptide
  Seed: RSGAAGAAVK
RWGAAGAAVR

SEQ ID NO: 4592 - protein, 10 aa, Artificial Sequence
  Description of Artificial Sequence: Synthetic peptide
  Seed: RSGAAGAAVK
RWGAAGAAVK

SEQ ID NO: 4593 - protein, 10 aa, Artificial Sequence
  Description of Artificial Sequence: Synthetic peptide
  Seed: RSGAAGAAVK
RYGAAGAAVR

SEQ ID NO: 4594 - protein, 10 aa, Artificial Sequence
  Description of Artificial Sequence: Synthetic peptide
  Seed: RSGAAGAAVK
RYGAAGAAVK

SEQ ID NO: 4595 - protein, 10 aa, Artificial Sequence
  Description of Artificial Sequence: Synthetic peptide
  Seed: RSGAAGAAVK
RVGAAGAAVR

SEQ ID NO: 4596 - protein, 10 aa, Artificial Sequence
  Description of Artificial Sequence: Synthetic peptide
  Seed: RSGAAGAAVK
RVGAAGAAVK

SEQ ID NO: 4597 - protein, 10 aa, Artificial Sequence
  Description of Artificial Sequence: Synthetic peptide
  Seed: RSGGNTNQQR
RIGGNTNQQR

SEQ ID NO: 4598 - protein, 10 aa, Artificial Sequence
  Description of Artificial Sequence: Synthetic peptide
  Seed: RSGGNTNQQR
RLGGNTNQQR

SEQ ID NO: 4599 - protein, 10 aa, Artificial Sequence
  Description of Artificial Sequence: Synthetic peptide
  Seed: RSGGNTNQQR
RMGGNTNQQR

SEQ ID NO: 4600 - protein, 10 aa, Artificial Sequence
  Description of Artificial Sequence: Synthetic peptide
  Seed: RSGAAGAAVK
RMGAAGAAVK

SEQ ID NO: 4601 - protein, 10 aa, Artificial Sequence
  Description of Artificial Sequence: Synthetic peptide
  Seed: RSGAAGAAVK
RKGAAGAAVR

SEQ ID NO: 4602 - protein, 9 aa, Artificial Sequence
  Description of Artificial Sequence: Synthetic peptide
  Seed: RSGAAGAAV
RVGAAGAAM

SEQ ID NO: 4603 - protein, 10 aa, Artificial Sequence
  Description of Artificial Sequence: Synthetic peptide
  Seed: RSGAAGAAVK
RLGAAGAAVY

SEQ ID NO: 4604 - protein, 9 aa, Artificial Sequence
  Description of Artificial Sequence: Synthetic peptide
  Seed: RSGAAGAAV
RVGAAGAAV

SEQ ID NO: 4605 - protein, 11 aa, Artificial Sequence
  Description of Artificial Sequence: Synthetic peptide
  Seed: RMIGGIGRFYI
RSIGGIGRFYR

SEQ ID NO: 4606 - protein, 10 aa, Artificial Sequence
  Description of Artificial Sequence: Synthetic peptide
  Seed: RSGAAGAAVK
RAGAAGAAVR

SEQ ID NO: 4607 - protein, 10 aa, Artificial Sequence
  Description of Artificial Sequence: Synthetic peptide
  Seed: RSGAAGAAVK
RAGAAGAAVK

SEQ ID NO: 4608 - protein, 10 aa, Artificial Sequence
  Description of Artificial Sequence: Synthetic peptide
  Seed: RSGAAGAAVK
RRGAAGAAVR

SEQ ID NO: 4609 - protein, 10 aa, Artificial Sequence
  Description of Artificial Sequence: Synthetic peptide
  Seed: RSGAAGAAVK
RNGAAGAAVR

SEQ ID NO: 4610 - protein, 10 aa, Artificial Sequence
  Description of Artificial Sequence: Synthetic peptide
  Seed: RSGAAGAAVK
RDGAAGAAVR

SEQ ID NO: 4611 - protein, 10 aa, Artificial Sequence
  Description of Artificial Sequence: Synthetic peptide
  Seed: RSGAAGAAVK
RCGAAGAAVR

SEQ ID NO: 4612 - protein, 10 aa, Artificial Sequence
  Description of Artificial Sequence: Synthetic peptide
  Seed: RSGAAGAAVK
RQGAAGAAVR

SEQ ID NO: 4613 - protein, 10 aa, Artificial Sequence
  Description of Artificial Sequence: Synthetic peptide
  Seed: RSGAAGAAVK
RQGAAGAAVK

SEQ ID NO: 4614 - protein, 10 aa, Artificial Sequence
  Description of Artificial Sequence: Synthetic peptide
  Seed: RSGAAGAAVK
REGAAGAAVR

SEQ ID NO: 4615 - protein, 10 aa, Artificial Sequence
  Description of Artificial Sequence: Synthetic peptide
  Seed: RSGAAGAAVK
RGGAAGAAVR

SEQ ID NO: 4616 - protein, 10 aa, Artificial Sequence
  Description of Artificial Sequence: Synthetic peptide
  Seed: RSGAAGAAVK
RHGAAGAAVR

SEQ ID NO: 4617 - protein, 10 aa, Artificial Sequence
  Description of Artificial Sequence: Synthetic peptide
  Seed: RSGAAGAAVK
RIGAAGAAVR

SEQ ID NO: 4618 - protein, 10 aa, Artificial Sequence
  Description of Artificial Sequence: Synthetic peptide
  Seed: RSGAAGAAVK
RIGAAGAAVK

SEQ ID NO: 4619 - protein, 10 aa, Artificial Sequence
  Description of Artificial Sequence: Synthetic peptide
  Seed: RSGAAGAAVK
RLGAAGAAVR

SEQ ID NO: 4620 - protein, 10 aa, Artificial Sequence
  Description of Artificial Sequence: Synthetic peptide
  Seed: RSGAAGAAVK
RLGAAGAAVK

SEQ ID NO: 4621 - protein, 9 aa, Artificial Sequence
  Description of Artificial Sequence: Synthetic peptide
  Seed: RSGAAGAAV
RAGAAGAAF

SEQ ID NO: 4622 - protein, 11 aa, Artificial Sequence
  Description of Artificial Sequence: Synthetic peptide
  Seed: RMIGGIGRFYI
RSIGGIGRFYI

SEQ ID NO: 4623 - protein, 10 aa, Artificial Sequence
  Description of Artificial Sequence: Synthetic peptide
  Seed: RSAYERMCNI
RFAYERMCNY

SEQ ID NO: 4624 - protein, 10 aa, Artificial Sequence
  Description of Artificial Sequence: Synthetic peptide
  Seed: RSAYERMCNI
RSAYERMCNM

SEQ ID NO: 4625 - protein, 10 aa, Artificial Sequence
  Description of Artificial Sequence: Synthetic peptide
  Seed: RSAYERMCNI
RSAYERMCNF

SEQ ID NO: 4626 - protein, 10 aa, Artificial Sequence
  Description of Artificial Sequence: Synthetic peptide
  Seed: RSAYERMCNI
RSAYERMCNS

SEQ ID NO: 4627 - protein, 10 aa, Artificial Sequence
  Description of Artificial Sequence: Synthetic peptide
  Seed: RSAYERMCNI
RSAYERMCNT

SEQ ID NO: 4628 - protein, 10 aa, Artificial Sequence
  Description of Artificial Sequence: Synthetic peptide
  Seed: RSAYERMCNI
RSAYERMCNW

SEQ ID NO: 4629 - protein, 10 aa, Artificial Sequence
  Description of Artificial Sequence: Synthetic peptide
  Seed: RSAYERMCNI
RSAYERMCNY

SEQ ID NO: 4630 - protein, 11 aa, Artificial Sequence
  Description of Artificial Sequence: Synthetic peptide
  Seed: RMIGGIGRFYI
RSIGGIGRFYP

SEQ ID NO: 4631 - protein, 10 aa, Artificial Sequence
  Description of Artificial Sequence: Synthetic peptide
  Seed: RSAYERMCNI
RSAYERMCNV

SEQ ID NO: 4632 - protein, 10 aa, Artificial Sequence
  Description of Artificial Sequence: Synthetic peptide
  Seed: RSAYERMCNI
RTAYERMCNA

SEQ ID NO: 4633 - protein, 10 aa, Artificial Sequence
  Description of Artificial Sequence: Synthetic peptide
  Seed: RSAYERMCNI
RTAYERMCNR

SEQ ID NO: 4634 - protein, 10 aa, Artificial Sequence
  Description of Artificial Sequence: Synthetic peptide
  Seed: RSAYERMCNI
RTAYERMCNC

SEQ ID NO: 4635 - protein, 10 aa, Artificial Sequence
  Description of Artificial Sequence: Synthetic peptide
  Seed: RSAYERMCNI
RTAYERMCNG

SEQ ID NO: 4636 - protein, 11 aa, Artificial Sequence
  Description of Artificial Sequence: Synthetic peptide
  Seed: RMIGGIGRFYI
RSIGGIGRFYF

SEQ ID NO: 4637 - protein, 10 aa, Artificial Sequence
  Description of Artificial Sequence: Synthetic peptide
  Seed: RSAYERMCNI
RTAYERMCNL

SEQ ID NO: 4638 - protein, 10 aa, Artificial Sequence
  Description of Artificial Sequence: Synthetic peptide
  Seed: RSAYERMCNI
RTAYERMCNK

SEQ ID NO: 4639 - protein, 10 aa, Artificial Sequence
  Description of Artificial Sequence: Synthetic peptide
  Seed: RSAYERMCNI
RTAYERMCNM

SEQ ID NO: 4640 - protein, 10 aa, Artificial Sequence
  Description of Artificial Sequence: Synthetic peptide
  Seed: RSAYERMCNI
RTAYERMCNF

SEQ ID NO: 4641 - protein, 11 aa, Artificial Sequence
  Description of Artificial Sequence: Synthetic peptide
  Seed: RMIGGIGRFYI
RSIGGIGRFYS

SEQ ID NO: 4642 - protein, 10 aa, Artificial Sequence
  Description of Artificial Sequence: Synthetic peptide
  Seed: RSAYERMCNI
RSAYERMCNK

SEQ ID NO: 4643 - protein, 10 aa, Artificial Sequence
  Description of Artificial Sequence: Synthetic peptide
  Seed: RSAYERMCNI
RTAYERMCNT

SEQ ID NO: 4644 - protein, 10 aa, Artificial Sequence
  Description of Artificial Sequence: Synthetic peptide
  Seed: RSAYERMCNI
RSAYERMCNL

SEQ ID NO: 4645 - protein, 10 aa, Artificial Sequence
  Description of Artificial Sequence: Synthetic peptide
  Seed: RSAYERMCNI
RFAYERMCNV

SEQ ID NO: 4646 - protein, 10 aa, Artificial Sequence
  Description of Artificial Sequence: Synthetic peptide
  Seed: RSAYERMCNI
RPAYERMCNA

SEQ ID NO: 4647 - protein, 11 aa, Artificial Sequence
  Description of Artificial Sequence: Synthetic peptide
  Seed: RMIGGIGRFYI
RTIGGIGRFYA

SEQ ID NO: 4648 - protein, 10 aa, Artificial Sequence
  Description of Artificial Sequence: Synthetic peptide
  Seed: RSAYERMCNI
RPAYERMCNI

SEQ ID NO: 4649 - protein, 10 aa, Artificial Sequence
  Description of Artificial Sequence: Synthetic peptide
  Seed: RSAYERMCNI
RPAYERMCNL

SEQ ID NO: 4650 - protein, 10 aa, Artificial Sequence
  Description of Artificial Sequence: Synthetic peptide
  Seed: RSAYERMCNI
RPAYERMCNK

SEQ ID NO: 4651 - protein, 10 aa, Artificial Sequence
  Description of Artificial Sequence: Synthetic peptide
  Seed: RSAYERMCNI
RPAYERMCNM

SEQ ID NO: 4652 - protein, 10 aa, Artificial Sequence
  Description of Artificial Sequence: Synthetic peptide
  Seed: RSAYERMCNI
RPAYERMCNF

SEQ ID NO: 4653 - protein, 10 aa, Artificial Sequence
  Description of Artificial Sequence: Synthetic peptide
  Seed: RSAYERMCNI
RPAYERMCNW

SEQ ID NO: 4654 - protein, 10 aa, Artificial Sequence
  Description of Artificial Sequence: Synthetic peptide
  Seed: RSAYERMCNI
RPAYERMCNY

SEQ ID NO: 4655 - protein, 11 aa, Artificial Sequence
  Description of Artificial Sequence: Synthetic peptide
  Seed: RMIGGIGRFYI
RSIGGIGRFYV

SEQ ID NO: 4656 - protein, 11 aa, Artificial Sequence
  Description of Artificial Sequence: Synthetic peptide
  Seed: RMIGGIGRFYI
RSIGGIGRFYY

SEQ ID NO: 4657 - protein, 10 aa, Artificial Sequence
  Description of Artificial Sequence: Synthetic peptide
  Seed: RSAYERMCNI
RPAYERMCNV

SEQ ID NO: 4658 - protein, 11 aa, Artificial Sequence
  Description of Artificial Sequence: Synthetic peptide
  Seed: RMIGGIGRFYI
RSIGGIGRFYW

SEQ ID NO: 4659 - protein, 10 aa, Artificial Sequence
  Description of Artificial Sequence: Synthetic peptide
  Seed: RSAYERMCNI
RSAYERMCNA

SEQ ID NO: 4660 - protein, 10 aa, Artificial Sequence
  Description of Artificial Sequence: Synthetic peptide
  Seed: RSAYERMCNI
RSAYERMCNG

SEQ ID NO: 4661 - protein, 11 aa, Artificial Sequence
  Description of Artificial Sequence: Synthetic peptide
  Seed: RMIGGIGRFYI
RSIGGIGRFYT

SEQ ID NO: 4662 - protein, 10 aa, Artificial Sequence
  Description of Artificial Sequence: Synthetic peptide
  Seed: RSAYERMCNI
RTAYERMCNS

SEQ ID NO: 4663 - protein, 10 aa, Artificial Sequence
  Description of Artificial Sequence: Synthetic peptide
  Seed: RSAYERMCNI
RTAYERMCNW

SEQ ID NO: 4664 - protein, 9 aa, Artificial Sequence
  Description of Artificial Sequence: Synthetic peptide
  Seed: RSGAAGAAV
RAGAAGAAK

SEQ ID NO: 4665 - protein, 10 aa, Artificial Sequence
  Description of Artificial Sequence: Synthetic peptide
  Seed: RSAYERMCNI
RYAYERMCNF

SEQ ID NO: 4666 - protein, 10 aa, Artificial Sequence
  Description of Artificial Sequence: Synthetic peptide
  Seed: RSAYERMCNI
RYAYERMCNW

SEQ ID NO: 4667 - protein, 10 aa, Artificial Sequence
  Description of Artificial Sequence: Synthetic peptide
  Seed: RSAYERMCNI
RYAYERMCNY

SEQ ID NO: 4668 - protein, 10 aa, Artificial Sequence
  Description of Artificial Sequence: Synthetic peptide
  Seed: RSAYERMCNI
RYAYERMCNV

SEQ ID NO: 4669 - protein, 10 aa, Artificial Sequence
  Description of Artificial Sequence: Synthetic peptide
  Seed: RSAYERMCNI
RVAYERMCNA

SEQ ID NO: 4670 - protein, 10 aa, Artificial Sequence
  Description of Artificial Sequence: Synthetic peptide
  Seed: RSAYERMCNI
RVAYERMCNG

SEQ ID NO: 4671 - protein, 10 aa, Artificial Sequence
  Description of Artificial Sequence: Synthetic peptide
  Seed: RSAYERMCNI
RVAYERMCNL

SEQ ID NO: 4672 - protein, 10 aa, Artificial Sequence
  Description of Artificial Sequence: Synthetic peptide
  Seed: RSAYERMCNI
RVAYERMCNK

SEQ ID NO: 4673 - protein, 10 aa, Artificial Sequence
  Description of Artificial Sequence: Synthetic peptide
  Seed: RSAYERMCNI
RVAYERMCNM

SEQ ID NO: 4674 - protein, 10 aa, Artificial Sequence
  Description of Artificial Sequence: Synthetic peptide
  Seed: RSAYERMCNI
RVAYERMCNF

SEQ ID NO: 4675 - protein, 10 aa, Artificial Sequence
  Description of Artificial Sequence: Synthetic peptide
  Seed: RSAYERMCNI
RVAYERMCNS

SEQ ID NO: 4676 - protein, 10 aa, Artificial Sequence
  Description of Artificial Sequence: Synthetic peptide
  Seed: RSAYERMCNI
RVAYERMCNW

SEQ ID NO: 4677 - protein, 10 aa, Artificial Sequence
  Description of Artificial Sequence: Synthetic peptide
  Seed: RSAYERMCNI
RVAYERMCNY

SEQ ID NO: 4678 - protein, 10 aa, Artificial Sequence
  Description of Artificial Sequence: Synthetic peptide
  Seed: RSAYERMCNI
RVAYERMCNV

SEQ ID NO: 4679 - protein, 9 aa, Artificial Sequence
  Description of Artificial Sequence: Synthetic peptide
  Seed: RSGAAGAAV
RAGAAGAAA

SEQ ID NO: 4680 - protein, 9 aa, Artificial Sequence
  Description of Artificial Sequence: Synthetic peptide
  Seed: RSGAAGAAV
RAGAAGAAI

SEQ ID NO: 4681 - protein, 9 aa, Artificial Sequence
  Description of Artificial Sequence: Synthetic peptide
  Seed: RSGAAGAAV
RAGAAGAAL

SEQ ID NO: 4682 - protein, 10 aa, Artificial Sequence
  Description of Artificial Sequence: Synthetic peptide
  Seed: RSAYERMCNI
RYAYERMCNS

SEQ ID NO: 4683 - protein, 10 aa, Artificial Sequence
  Description of Artificial Sequence: Synthetic peptide
  Seed: RSAYERMCNI
RYAYERMCNM

SEQ ID NO: 4684 - protein, 10 aa, Artificial Sequence
  Description of Artificial Sequence: Synthetic peptide
  Seed: RSAYERMCNI
RTAYERMCNY

SEQ ID NO: 4685 - protein, 10 aa, Artificial Sequence
  Description of Artificial Sequence: Synthetic peptide
  Seed: RSAYERMCNI
RYAYERMCNK

SEQ ID NO: 4686 - protein, 10 aa, Artificial Sequence
  Description of Artificial Sequence: Synthetic peptide
  Seed: RSAYERMCNI
RTAYERMCNV

SEQ ID NO: 4687 - protein, 10 aa, Artificial Sequence
  Description of Artificial Sequence: Synthetic peptide
  Seed: RSAYERMCNI
RWAYERMCNA

SEQ ID NO: 4688 - protein, 10 aa, Artificial Sequence
  Description of Artificial Sequence: Synthetic peptide
  Seed: RSAYERMCNI
RWAYERMCNI

SEQ ID NO: 4689 - protein, 10 aa, Artificial Sequence
  Description of Artificial Sequence: Synthetic peptide
  Seed: RSAYERMCNI
RWAYERMCNL

SEQ ID NO: 4690 - protein, 10 aa, Artificial Sequence
  Description of Artificial Sequence: Synthetic peptide
  Seed: RSAYERMCNI
RWAYERMCNK

SEQ ID NO: 4691 - protein, 10 aa, Artificial Sequence
  Description of Artificial Sequence: Synthetic peptide
  Seed: RSAYERMCNI
RWAYERMCNM

SEQ ID NO: 4692 - protein, 10 aa, Artificial Sequence
  Description of Artificial Sequence: Synthetic peptide
  Seed: RSAYERMCNI
RWAYERMCNF

SEQ ID NO: 4693 - protein, 11 aa, Artificial Sequence
  Description of Artificial Sequence: Synthetic peptide
  Seed: RMIGGIGRFYI
RSIGGIGRFYM

SEQ ID NO: 4694 - protein, 10 aa, Artificial Sequence
  Description of Artificial Sequence: Synthetic peptide
  Seed: RSAYERMCNI
RWAYERMCNW

SEQ ID NO: 4695 - protein, 10 aa, Artificial Sequence
  Description of Artificial Sequence: Synthetic peptide
  Seed: RSAYERMCNI
RWAYERMCNY

SEQ ID NO: 4696 - protein, 10 aa, Artificial Sequence
  Description of Artificial Sequence: Synthetic peptide
  Seed: RSAYERMCNI
RWAYERMCNV

SEQ ID NO: 4697 - protein, 10 aa, Artificial Sequence
  Description of Artificial Sequence: Synthetic peptide
  Seed: RSAYERMCNI
RYAYERMCNA

SEQ ID NO: 4698 - protein, 10 aa, Artificial Sequence
  Description of Artificial Sequence: Synthetic peptide
  Seed: RSAYERMCNI
RYAYERMCNR

SEQ ID NO: 4699 - protein, 10 aa, Artificial Sequence
  Description of Artificial Sequence: Synthetic peptide
  Seed: RSAYERMCNI
RYAYERMCNI

SEQ ID NO: 4700 - protein, 10 aa, Artificial Sequence
  Description of Artificial Sequence: Synthetic peptide
  Seed: RSAYERMCNI
RYAYERMCNL

SEQ ID NO: 4701 - protein, 11 aa, Artificial Sequence
  Description of Artificial Sequence: Synthetic peptide
  Seed: RMIGGIGRFYI
RSIGGIGRFYK

SEQ ID NO: 4702 - protein, 11 aa, Artificial Sequence
  Description of Artificial Sequence: Synthetic peptide
  Seed: RMIGGIGRFYI
RSIGGIGRFYL

SEQ ID NO: 4703 - protein, 11 aa, Artificial Sequence
  Description of Artificial Sequence: Synthetic peptide
  Seed: RSALILRGSVA
RQALILRGSVK

SEQ ID NO: 4704 - protein, 10 aa, Artificial Sequence
  Description of Artificial Sequence: Synthetic peptide
  Seed: RSALILRGSV
RVALILRGSV

SEQ ID NO: 4705 - protein, 11 aa, Artificial Sequence
  Description of Artificial Sequence: Synthetic peptide
  Seed: RRTRIAYERMC
RETRIAYERMV

SEQ ID NO: 4706 - protein, 11 aa, Artificial Sequence
  Description of Artificial Sequence: Synthetic peptide
  Seed: RRTRIAYERMC
RWTRIAYERMY

SEQ ID NO: 4707 - protein, 11 aa, Artificial Sequence
  Description of Artificial Sequence: Synthetic peptide
  Seed: RRTRIAYERMC
RYTRIAYERMR

SEQ ID NO: 4708 - protein, 11 aa, Artificial Sequence
  Description of Artificial Sequence: Synthetic peptide
  Seed: RRTRIAYERMC
RYTRIAYERMI

SEQ ID NO: 4709 - protein, 11 aa, Artificial Sequence
  Description of Artificial Sequence: Synthetic peptide
  Seed: RRTRIAYERMC
RYTRIAYERML

SEQ ID NO: 4710 - protein, 11 aa, Artificial Sequence
  Description of Artificial Sequence: Synthetic peptide
  Seed: RRTRIAYERMC
RYTRIAYERMK

SEQ ID NO: 4711 - protein, 11 aa, Artificial Sequence
  Description of Artificial Sequence: Synthetic peptide
  Seed: RMIKRGINDRN
RMIKRGINDRL

SEQ ID NO: 4712 - protein, 11 aa, Artificial Sequence
  Description of Artificial Sequence: Synthetic peptide
  Seed: RRTRIAYERMC
RYTRIAYERMM

SEQ ID NO: 4713 - protein, 11 aa, Artificial Sequence
  Description of Artificial Sequence: Synthetic peptide
  Seed: RMIKRGINDRN
RMIKRGINDRI

SEQ ID NO: 4714 - protein, 11 aa, Artificial Sequence
  Description of Artificial Sequence: Synthetic peptide
  Seed: RRTRIAYERMC
RYTRIAYERMF

SEQ ID NO: 4715 - protein, 11 aa, Artificial Sequence
  Description of Artificial Sequence: Synthetic peptide
  Seed: RRTRIAYERMC
RYTRIAYERMY

SEQ ID NO: 4716 - protein, 11 aa, Artificial Sequence
  Description of Artificial Sequence: Synthetic peptide
  Seed: RMIKRGINDRN
RMIKRGINDRH

SEQ ID NO: 4717 - protein, 11 aa, Artificial Sequence
  Description of Artificial Sequence: Synthetic peptide
  Seed: RRTRIAYERMC
RYTRIAYERMV

SEQ ID NO: 4718 - protein, 11 aa, Artificial Sequence
  Description of Artificial Sequence: Synthetic peptide
  Seed: RMIKRGINDRN
RMIKRGINDRG

SEQ ID NO: 4719 - protein, 11 aa, Artificial Sequence
  Description of Artificial Sequence: Synthetic peptide
  Seed: RRTRIAYERMC
RVTRIAYERMR

SEQ ID NO: 4720 - protein, 11 aa, Artificial Sequence
  Description of Artificial Sequence: Synthetic peptide
  Seed: RMIKRGINDRN
RMIKRGINDRE

SEQ ID NO: 4721 - protein, 11 aa, Artificial Sequence
  Description of Artificial Sequence: Synthetic peptide
  Seed: RRTRIAYERMC
RVTRIAYERMI

SEQ ID NO: 4722 - protein, 11 aa, Artificial Sequence
  Description of Artificial Sequence: Synthetic peptide
  Seed: RMIKRGINDRN
RMIKRGINDRQ

SEQ ID NO: 4723 - protein, 11 aa, Artificial Sequence
  Description of Artificial Sequence: Synthetic peptide
  Seed: RRTRIAYERMC
RVTRIAYERML

SEQ ID NO: 4724 - protein, 11 aa, Artificial Sequence
  Description of Artificial Sequence: Synthetic peptide
  Seed: RRTRIAYERMC
RWTRIAYERMV

SEQ ID NO: 4725 - protein, 11 aa, Artificial Sequence
  Description of Artificial Sequence: Synthetic peptide
  Seed: RRTRIAYERMC
RWTRIAYERMF

SEQ ID NO: 4726 - protein, 11 aa, Artificial Sequence
  Description of Artificial Sequence: Synthetic peptide
  Seed: RRTRIAYERMC
RVTRIAYERMM

SEQ ID NO: 4727 - protein, 11 aa, Artificial Sequence
  Description of Artificial Sequence: Synthetic peptide
  Seed: RRTRIAYERMC
RWTRIAYERMM

SEQ ID NO: 4728 - protein, 11 aa, Artificial Sequence
  Description of Artificial Sequence: Synthetic peptide
  Seed: RRTRIAYERMC
RSTRIAYERMF

SEQ ID NO: 4729 - protein, 11 aa, Artificial Sequence
  Description of Artificial Sequence: Synthetic peptide
  Seed: RRTRIAYERMC
RSTRIAYERMY

SEQ ID NO: 4730 - protein, 11 aa, Artificial Sequence
  Description of Artificial Sequence: Synthetic peptide
  Seed: RRTRIAYERMC
RSTRIAYERMV

SEQ ID NO: 4731 - protein, 11 aa, Artificial Sequence
  Description of Artificial Sequence: Synthetic peptide
  Seed: RRTRIAYERMC
RTTRIAYERMR

SEQ ID NO: 4732 - protein, 11 aa, Artificial Sequence
  Description of Artificial Sequence: Synthetic peptide
  Seed: RRTRIAYERMC
RTTRIAYERMI

SEQ ID NO: 4733 - protein, 11 aa, Artificial Sequence
  Description of Artificial Sequence: Synthetic peptide
  Seed: RMIKRGINDRN
RMIKRGINDRM

SEQ ID NO: 4734 - protein, 11 aa, Artificial Sequence
  Description of Artificial Sequence: Synthetic peptide
  Seed: RRTRIAYERMC
RTTRIAYERML

SEQ ID NO: 4735 - protein, 11 aa, Artificial Sequence
  Description of Artificial Sequence: Synthetic peptide
  Seed: RRTRIAYERMC
RTTRIAYERMK

SEQ ID NO: 4736 - protein, 11 aa, Artificial Sequence
  Description of Artificial Sequence: Synthetic peptide
  Seed: RMIKRGINDRN
RMIKRGINDRK

SEQ ID NO: 4737 - protein, 11 aa, Artificial Sequence
  Description of Artificial Sequence: Synthetic peptide
  Seed: RRTRIAYERMC
RTTRIAYERMM

SEQ ID NO: 4738 - protein, 11 aa, Artificial Sequence
  Description of Artificial Sequence: Synthetic peptide
  Seed: RRTRIAYERMC
RTTRIAYERMF

SEQ ID NO: 4739 - protein, 11 aa, Artificial Sequence
  Description of Artificial Sequence: Synthetic peptide
  Seed: RRTRIAYERMC
RTTRIAYERMY

SEQ ID NO: 4740 - protein, 11 aa, Artificial Sequence
  Description of Artificial Sequence: Synthetic peptide
  Seed: RRTRIAYERMC
RTTRIAYERMV

SEQ ID NO: 4741 - protein, 11 aa, Artificial Sequence
  Description of Artificial Sequence: Synthetic peptide
  Seed: RRTRIAYERMC
RWTRIAYERMR

SEQ ID NO: 4742 - protein, 11 aa, Artificial Sequence
  Description of Artificial Sequence: Synthetic peptide
  Seed: RRTRIAYERMC
RWTRIAYERMI

SEQ ID NO: 4743 - protein, 11 aa, Artificial Sequence
  Description of Artificial Sequence: Synthetic peptide
  Seed: RRTRIAYERMC
RWTRIAYERML

SEQ ID NO: 4744 - protein, 11 aa, Artificial Sequence
  Description of Artificial Sequence: Synthetic peptide
  Seed: RRTRIAYERMC
RWTRIAYERMK

SEQ ID NO: 4745 - protein, 11 aa, Artificial Sequence
  Description of Artificial Sequence: Synthetic peptide
  Seed: RRTRIAYERMC
RVTRIAYERMK

SEQ ID NO: 4746 - protein, 11 aa, Artificial Sequence
  Description of Artificial Sequence: Synthetic peptide
  Seed: RMIKRGINDRN
RMIKRGINDRC

SEQ ID NO: 4747 - protein, 11 aa, Artificial Sequence
  Description of Artificial Sequence: Synthetic peptide
  Seed: RRTRIAYERMC
RSTRIAYERMK

SEQ ID NO: 4748 - protein, 9 aa, Artificial Sequence
  Description of Artificial Sequence: Synthetic peptide
  Seed: RSALILRGS
RIALILRGG

SEQ ID NO: 4749 - protein, 9 aa, Artificial Sequence
  Description of Artificial Sequence: Synthetic peptide
  Seed: RSALILRGS
RIALILRGL

SEQ ID NO: 4750 - protein, 9 aa, Artificial Sequence
  Description of Artificial Sequence: Synthetic peptide
  Seed: RSALILRGS
RIALILRGK

SEQ ID NO: 4751 - protein, 9 aa, Artificial Sequence
  Description of Artificial Sequence: Synthetic peptide
  Seed: RSALILRGS
RIALILRGM

SEQ ID NO: 4752 - protein, 9 aa, Artificial Sequence
  Description of Artificial Sequence: Synthetic peptide
  Seed: RSALILRGS
RIALILRGV

SEQ ID NO: 4753 - protein, 11 aa, Artificial Sequence
  Description of Artificial Sequence: Synthetic peptide
  Seed: RMIKRGINDRN
RMIKRGINDRA

SEQ ID NO: 4754 - protein, 9 aa, Artificial Sequence
  Description of Artificial Sequence: Synthetic peptide
  Seed: RSALILRGS
RLALILRGA

SEQ ID NO: 4755 - protein, 11 aa, Artificial Sequence
  Description of Artificial Sequence: Synthetic peptide
  Seed: RMIKRGINDRN
RLIKRGINDRK

SEQ ID NO: 4756 - protein, 11 aa, Artificial Sequence
  Description of Artificial Sequence: Synthetic peptide
  Seed: RMIKRGINDRN
RLIKRGINDRR

SEQ ID NO: 4757 - protein, 9 aa, Artificial Sequence
  Description of Artificial Sequence: Synthetic peptide
  Seed: RSALILRGS
RLALILRGK

SEQ ID NO: 4758 - protein, 9 aa, Artificial Sequence
  Description of Artificial Sequence: Synthetic peptide
  Seed: RSALILRGS
RMALILRGA

SEQ ID NO: 4759 - protein, 9 aa, Artificial Sequence
  Description of Artificial Sequence: Synthetic peptide
  Seed: RSALILRGS
RMALILRGG

SEQ ID NO: 4760 - protein, 9 aa, Artificial Sequence
  Description of Artificial Sequence: Synthetic peptide
  Seed: RSALILRGS
RMALILRGI

SEQ ID NO: 4761 - protein, 9 aa, Artificial Sequence
  Description of Artificial Sequence: Synthetic peptide
  Seed: RSALILRGS
RMALILRGL

SEQ ID NO: 4762 - protein, 9 aa, Artificial Sequence
  Description of Artificial Sequence: Synthetic peptide
  Seed: RSALILRGS
RMALILRGK

SEQ ID NO: 4763 - protein, 11 aa, Artificial Sequence
  Description of Artificial Sequence: Synthetic peptide
  Seed: RMIKRGINDRN
RIIKRGINDRK

SEQ ID NO: 4764 - protein, 9 aa, Artificial Sequence
  Description of Artificial Sequence: Synthetic peptide
  Seed: RSALILRGS
RMALILRGM

SEQ ID NO: 4765 - protein, 9 aa, Artificial Sequence
  Description of Artificial Sequence: Synthetic peptide
  Seed: RSALILRGS
RMALILRGS

SEQ ID NO: 4766 - protein, 9 aa, Artificial Sequence
  Description of Artificial Sequence: Synthetic peptide
  Seed: RSALILRGS
RIALILRGI

SEQ ID NO: 4767 - protein, 9 aa, Artificial Sequence
  Description of Artificial Sequence: Synthetic peptide
  Seed: RSALILRGS
RIALILRGA

SEQ ID NO: 4768 - protein, 11 aa, Artificial Sequence
  Description of Artificial Sequence: Synthetic peptide
  Seed: RRTRIAYERMC
RVTRIAYERMF

SEQ ID NO: 4769 - protein, 11 aa, Artificial Sequence
  Description of Artificial Sequence: Synthetic peptide
  Seed: RMIKRGINDRN
RMIKRGINDRR

SEQ ID NO: 4770 - protein, 11 aa, Artificial Sequence
  Description of Artificial Sequence: Synthetic peptide
  Seed: RRTRIAYERMC
RVTRIAYERMY

SEQ ID NO: 4771 - protein, 11 aa, Artificial Sequence
  Description of Artificial Sequence: Synthetic peptide
  Seed: RRTRIAYERMC
RVTRIAYERMV

SEQ ID NO: 4772 - protein, 9 aa, Artificial Sequence
  Description of Artificial Sequence: Synthetic peptide
  Seed: RSALILRGS
RAALILRGA

SEQ ID NO: 4773 - protein, 11 aa, Artificial Sequence
  Description of Artificial Sequence: Synthetic peptide
  Seed: RMIKRGINDRN
RMIKRGINDRD

SEQ ID NO: 4774 - protein, 9 aa, Artificial Sequence
  Description of Artificial Sequence: Synthetic peptide
  Seed: RSALILRGS
RAALILRGI

SEQ ID NO: 4775 - protein, 9 aa, Artificial Sequence
  Description of Artificial Sequence: Synthetic peptide
  Seed: RSALILRGS
RAALILRGL

SEQ ID NO: 4776 - protein, 9 aa, Artificial Sequence
  Description of Artificial Sequence: Synthetic peptide
  Seed: RSALILRGS
RAALILRGK

SEQ ID NO: 4777 - protein, 9 aa, Artificial Sequence
  Description of Artificial Sequence: Synthetic peptide
  Seed: RSALILRGS
RAALILRGM

SEQ ID NO: 4778 - protein, 9 aa, Artificial Sequence
  Description of Artificial Sequence: Synthetic peptide
  Seed: RSALILRGS
RAALILRGS

SEQ ID NO: 4779 - protein, 9 aa, Artificial Sequence
  Description of Artificial Sequence: Synthetic peptide
  Seed: RSALILRGS
RAALILRGV

SEQ ID NO: 4780 - protein, 9 aa, Artificial Sequence
  Description of Artificial Sequence: Synthetic peptide
  Seed: RSALILRGS
RNALILRGK

SEQ ID NO: 4781 - protein, 9 aa, Artificial Sequence
  Description of Artificial Sequence: Synthetic peptide
  Seed: RSALILRGS
RCALILRGK

SEQ ID NO: 4782 - protein, 9 aa, Artificial Sequence
  Description of Artificial Sequence: Synthetic peptide
  Seed: RSALILRGS
RQALILRGA

SEQ ID NO: 4783 - protein, 9 aa, Artificial Sequence
  Description of Artificial Sequence: Synthetic peptide
  Seed: RSALILRGS
RQALILRGK

SEQ ID NO: 4784 - protein, 9 aa, Artificial Sequence
  Description of Artificial Sequence: Synthetic peptide
  Seed: RSALILRGS
RGALILRGA

SEQ ID NO: 4785 - protein, 9 aa, Artificial Sequence
  Description of Artificial Sequence: Synthetic peptide
  Seed: RSALILRGS
RGALILRGK

SEQ ID NO: 4786 - protein, 9 aa, Artificial Sequence
  Description of Artificial Sequence: Synthetic peptide
  Seed: RSALILRGS
RGALILRGV

SEQ ID NO: 4787 - protein, 11 aa, Artificial Sequence
  Description of Artificial Sequence: Synthetic peptide
  Seed: RRTRIAYERMC
RSTRIAYERMM

SEQ ID NO: 4788 - protein, 11 aa, Artificial Sequence
  Description of Artificial Sequence: Synthetic peptide
  Seed: RRTRIAYERMC
RSTRIAYERML

SEQ ID NO: 4789 - protein, 11 aa, Artificial Sequence
  Description of Artificial Sequence: Synthetic peptide
  Seed: RMIKRGINDRN
RIIKRGINDRR

SEQ ID NO: 4790 - protein, 11 aa, Artificial Sequence
  Description of Artificial Sequence: Synthetic peptide
  Seed: RRTRIAYERMC
RITRIAYERML

SEQ ID NO: 4791 - protein, 11 aa, Artificial Sequence
  Description of Artificial Sequence: Synthetic peptide
  Seed: RRTRIAYERMC
RITRIAYERMM

SEQ ID NO: 4792 - protein, 11 aa, Artificial Sequence
  Description of Artificial Sequence: Synthetic peptide
  Seed: RRTRIAYERMC
RITRIAYERMF

SEQ ID NO: 4793 - protein, 11 aa, Artificial Sequence
  Description of Artificial Sequence: Synthetic peptide
  Seed: RRTRIAYERMC
RITRIAYERMY

SEQ ID NO: 4794 - protein, 11 aa, Artificial Sequence
  Description of Artificial Sequence: Synthetic peptide
  Seed: RRTRIAYERMC
RITRIAYERMV

SEQ ID NO: 4795 - protein, 11 aa, Artificial Sequence
  Description of Artificial Sequence: Synthetic peptide
  Seed: RRTRIAYERMC
RLTRIAYERMR

SEQ ID NO: 4796 - protein, 11 aa, Artificial Sequence
  Description of Artificial Sequence: Synthetic peptide
  Seed: RRTRIAYERMC
RLTRIAYERMI

SEQ ID NO: 4797 - protein, 11 aa, Artificial Sequence
  Description of Artificial Sequence: Synthetic peptide
  Seed: RRTRIAYERMC
RLTRIAYERML

SEQ ID NO: 4798 - protein, 11 aa, Artificial Sequence
  Description of Artificial Sequence: Synthetic peptide
  Seed: RRTRIAYERMC
RLTRIAYERMK

SEQ ID NO: 4799 - protein, 11 aa, Artificial Sequence
  Description of Artificial Sequence: Synthetic peptide
  Seed: RRTRIAYERMC
RLTRIAYERMM

SEQ ID NO: 4800 - protein, 11 aa, Artificial Sequence
  Description of Artificial Sequence: Synthetic peptide
  Seed: RRTRIAYERMC
RLTRIAYERMF

SEQ ID NO: 4801 - protein, 11 aa, Artificial Sequence
  Description of Artificial Sequence: Synthetic peptide
  Seed: RRTRIAYERMC
RLTRIAYERMY

SEQ ID NO: 4802 - protein, 11 aa, Artificial Sequence
  Description of Artificial Sequence: Synthetic peptide
  Seed: RRTRIAYERMC
RLTRIAYERMV

SEQ ID NO: 4803 - protein, 11 aa, Artificial Sequence
  Description of Artificial Sequence: Synthetic peptide
  Seed: RRTRIAYERMC
RKTRIAYERMR

SEQ ID NO: 4804 - protein, 11 aa, Artificial Sequence
  Description of Artificial Sequence: Synthetic peptide
  Seed: RRTRIAYERMC
RKTRIAYERMI

SEQ ID NO: 4805 - protein, 11 aa, Artificial Sequence
  Description of Artificial Sequence: Synthetic peptide
  Seed: RMIKRGINDRN
RFIKRGINDRE

SEQ ID NO: 4806 - protein, 11 aa, Artificial Sequence
  Description of Artificial Sequence: Synthetic peptide
  Seed: RRTRIAYERMC
RKTRIAYERML

SEQ ID NO: 4807 - protein, 11 aa, Artificial Sequence
  Description of Artificial Sequence: Synthetic peptide
  Seed: RRDGKWMRELI
RRDGKWMRELM

SEQ ID NO: 4808 - protein, 11 aa, Artificial Sequence
  Description of Artificial Sequence: Synthetic peptide
  Seed: RRTRIAYERMC
RITRIAYERMK

SEQ ID NO: 4809 - protein, 11 aa, Artificial Sequence
  Description of Artificial Sequence: Synthetic peptide
  Seed: RRTRIAYERMC
RITRIAYERMI

SEQ ID NO: 4810 - protein, 11 aa, Artificial Sequence
  Description of Artificial Sequence: Synthetic peptide
  Seed: RRTRIAYERMC
RKTRIAYERMF

SEQ ID NO: 4811 - protein, 11 aa, Artificial Sequence
  Description of Artificial Sequence: Synthetic peptide
  Seed: RMIKRGINDRN
RFIKRGINDRG

SEQ ID NO: 4812 - protein, 11 aa, Artificial Sequence
  Description of Artificial Sequence: Synthetic peptide
  Seed: RRTRIAYERMC
RGTRIAYERMR

SEQ ID NO: 4813 - protein, 11 aa, Artificial Sequence
  Description of Artificial Sequence: Synthetic peptide
  Seed: RRTRIAYERMC
RGTRIAYERMI

SEQ ID NO: 4814 - protein, 11 aa, Artificial Sequence
  Description of Artificial Sequence: Synthetic peptide
  Seed: RRTRIAYERMC
RGTRIAYERML

SEQ ID NO: 4815 - protein, 11 aa, Artificial Sequence
  Description of Artificial Sequence: Synthetic peptide
  Seed: RRTRIAYERMC
RGTRIAYERMK

SEQ ID NO: 4816 - protein, 11 aa, Artificial Sequence
  Description of Artificial Sequence: Synthetic peptide
  Seed: RRTRIAYERMC
RGTRIAYERMM

SEQ ID NO: 4817 - protein, 11 aa, Artificial Sequence
  Description of Artificial Sequence: Synthetic peptide
  Seed: RRTRIAYERMC
RGTRIAYERMF

SEQ ID NO: 4818 - protein, 11 aa, Artificial Sequence
  Description of Artificial Sequence: Synthetic peptide
  Seed: RRTRIAYERMC
RGTRIAYERMY

SEQ ID NO: 4819 - protein, 11 aa, Artificial Sequence
  Description of Artificial Sequence: Synthetic peptide
  Seed: RRTRIAYERMC
RGTRIAYERMV

SEQ ID NO: 4820 - protein, 11 aa, Artificial Sequence
  Description of Artificial Sequence: Synthetic peptide
  Seed: RRTRIAYERMC
RHTRIAYERMR

SEQ ID NO: 4821 - protein, 11 aa, Artificial Sequence
  Description of Artificial Sequence: Synthetic peptide
  Seed: RRTRIAYERMC
RHTRIAYERMI

SEQ ID NO: 4822 - protein, 11 aa, Artificial Sequence
  Description of Artificial Sequence: Synthetic peptide
  Seed: RRTRIAYERMC
RHTRIAYERML

SEQ ID NO: 4823 - protein, 11 aa, Artificial Sequence
  Description of Artificial Sequence: Synthetic peptide
  Seed: RRTRIAYERMC
RHTRIAYERMK

SEQ ID NO: 4824 - protein, 11 aa, Artificial Sequence
  Description of Artificial Sequence: Synthetic peptide
  Seed: RRTRIAYERMC
RHTRIAYERMM

SEQ ID NO: 4825 - protein, 11 aa, Artificial Sequence
  Description of Artificial Sequence: Synthetic peptide
  Seed: RRTRIAYERMC
RHTRIAYERMF

SEQ ID NO: 4826 - protein, 11 aa, Artificial Sequence
  Description of Artificial Sequence: Synthetic peptide
  Seed: RRTRIAYERMC
RHTRIAYERMY

SEQ ID NO: 4827 - protein, 11 aa, Artificial Sequence
  Description of Artificial Sequence: Synthetic peptide
  Seed: RRTRIAYERMC
RHTRIAYERMV

SEQ ID NO: 4828 - protein, 11 aa, Artificial Sequence
  Description of Artificial Sequence: Synthetic peptide
  Seed: RRTRIAYERMC
RITRIAYERMR

SEQ ID NO: 4829 - protein, 11 aa, Artificial Sequence
  Description of Artificial Sequence: Synthetic peptide
  Seed: RRTRIAYERMC
RKTRIAYERMM

SEQ ID NO: 4830 - protein, 11 aa, Artificial Sequence
  Description of Artificial Sequence: Synthetic peptide
  Seed: RRTRIAYERMC
RKTRIAYERMY

SEQ ID NO: 4831 - protein, 11 aa, Artificial Sequence
  Description of Artificial Sequence: Synthetic peptide
  Seed: RRTRIAYERMC
RSTRIAYERMI

SEQ ID NO: 4832 - protein, 11 aa, Artificial Sequence
  Description of Artificial Sequence: Synthetic peptide
  Seed: RMIKRGINDRN
RMIKRGINDRY

SEQ ID NO: 4833 - protein, 11 aa, Artificial Sequence
  Description of Artificial Sequence: Synthetic peptide
  Seed: RRTRIAYERMC
RFTRIAYERMM

SEQ ID NO: 4834 - protein, 11 aa, Artificial Sequence
  Description of Artificial Sequence: Synthetic peptide
  Seed: RMIKRGINDRN
RMIKRGINDRT

SEQ ID NO: 4835 - protein, 11 aa, Artificial Sequence
  Description of Artificial Sequence: Synthetic peptide
  Seed: RRTRIAYERMC
RFTRIAYERMF

SEQ ID NO: 4836 - protein, 11 aa, Artificial Sequence
  Description of Artificial Sequence: Synthetic peptide
  Seed: RRTRIAYERMC
RFTRIAYERMY

SEQ ID NO: 4837 - protein, 11 aa, Artificial Sequence
  Description of Artificial Sequence: Synthetic peptide
  Seed: RRTRIAYERMC
RFTRIAYERMV

SEQ ID NO: 4838 - protein, 11 aa, Artificial Sequence
  Description of Artificial Sequence: Synthetic peptide
  Seed: RRTRIAYERMC
RPTRIAYERMR

SEQ ID NO: 4839 - protein, 11 aa, Artificial Sequence
  Description of Artificial Sequence: Synthetic peptide
  Seed: RRTRIAYERMC
RPTRIAYERMI

SEQ ID NO: 4840 - protein, 11 aa, Artificial Sequence
  Description of Artificial Sequence: Synthetic peptide
  Seed: RRTRIAYERMC
RPTRIAYERML

SEQ ID NO: 4841 - protein, 11 aa, Artificial Sequence
  Description of Artificial Sequence: Synthetic peptide
  Seed: RMIKRGINDRN
RMIKRGINDRS

SEQ ID NO: 4842 - protein, 11 aa, Artificial Sequence
  Description of Artificial Sequence: Synthetic peptide
  Seed: RRTRIAYERMC
RPTRIAYERMK

SEQ ID NO: 4843 - protein, 11 aa, Artificial Sequence
  Description of Artificial Sequence: Synthetic peptide
  Seed: RRTRIAYERMC
RPTRIAYERMM

SEQ ID NO: 4844 - protein, 11 aa, Artificial Sequence
  Description of Artificial Sequence: Synthetic peptide
  Seed: RRTRIAYERMC
RPTRIAYERMF

SEQ ID NO: 4845 - protein, 11 aa, Artificial Sequence
  Description of Artificial Sequence: Synthetic peptide
  Seed: RRTRIAYERMC
RPTRIAYERMY

SEQ ID NO: 4846 - protein, 11 aa, Artificial Sequence
  Description of Artificial Sequence: Synthetic peptide
  Seed: RMIKRGINDRN
RMIKRGINDRP

SEQ ID NO: 4847 - protein, 11 aa, Artificial Sequence
  Description of Artificial Sequence: Synthetic peptide
  Seed: RRTRIAYERMC
RPTRIAYERMV

SEQ ID NO: 4848 - protein, 11 aa, Artificial Sequence
  Description of Artificial Sequence: Synthetic peptide
  Seed: RMIKRGINDRN
RMIKRGINDRF

SEQ ID NO: 4849 - protein, 11 aa, Artificial Sequence
  Description of Artificial Sequence: Synthetic peptide
  Seed: RRTRIAYERMC
RSTRIAYERMR

SEQ ID NO: 4850 - protein, 11 aa, Artificial Sequence
  Description of Artificial Sequence: Synthetic peptide
  Seed: RMIKRGINDRN
RMIKRGINDRW

SEQ ID NO: 4851 - protein, 11 aa, Artificial Sequence
  Description of Artificial Sequence: Synthetic peptide
  Seed: RRTRIAYERMC
RFTRIAYERMK

SEQ ID NO: 4852 - protein, 11 aa, Artificial Sequence
  Description of Artificial Sequence: Synthetic peptide
  Seed: RMIKRGINDRN
RFIKRGINDRQ

SEQ ID NO: 4853 - protein, 11 aa, Artificial Sequence
  Description of Artificial Sequence: Synthetic peptide
  Seed: RRTRIAYERMC
RFTRIAYERML

SEQ ID NO: 4854 - protein, 11 aa, Artificial Sequence
  Description of Artificial Sequence: Synthetic peptide
  Seed: RRTRIAYERMC
RKTRIAYERMV

SEQ ID NO: 4855 - protein, 11 aa, Artificial Sequence
  Description of Artificial Sequence: Synthetic peptide
  Seed: RRTRIAYERMC
RMTRIAYERMR

SEQ ID NO: 4856 - protein, 11 aa, Artificial Sequence
  Description of Artificial Sequence: Synthetic peptide
  Seed: RRTRIAYERMC
RMTRIAYERMI

SEQ ID NO: 4857 - protein, 11 aa, Artificial Sequence
  Description of Artificial Sequence: Synthetic peptide
  Seed: RRTRIAYERMC
RMTRIAYERML

SEQ ID NO: 4858 - protein, 11 aa, Artificial Sequence
  Description of Artificial Sequence: Synthetic peptide
  Seed: RRTRIAYERMC
RMTRIAYERMK

SEQ ID NO: 4859 - protein, 11 aa, Artificial Sequence
  Description of Artificial Sequence: Synthetic peptide
  Seed: RMIKRGINDRN
RFIKRGINDRC

SEQ ID NO: 4860 - protein, 11 aa, Artificial Sequence
  Description of Artificial Sequence: Synthetic peptide
  Seed: RRTRIAYERMC
RMTRIAYERMM

SEQ ID NO: 4861 - protein, 11 aa, Artificial Sequence
  Description of Artificial Sequence: Synthetic peptide
  Seed: RRTRIAYERMC
RMTRIAYERMF

SEQ ID NO: 4862 - protein, 11 aa, Artificial Sequence
  Description of Artificial Sequence: Synthetic peptide
  Seed: RRTRIAYERMC
RMTRIAYERMY

SEQ ID NO: 4863 - protein, 11 aa, Artificial Sequence
  Description of Artificial Sequence: Synthetic peptide
  Seed: RMIKRGINDRN
RFIKRGINDRD

SEQ ID NO: 4864 - protein, 11 aa, Artificial Sequence
  Description of Artificial Sequence: Synthetic peptide
  Seed: RRTRIAYERMC
RMTRIAYERMV

SEQ ID NO: 4865 - protein, 11 aa, Artificial Sequence
  Description of Artificial Sequence: Synthetic peptide
  Seed: RMIKRGINDRN
RFIKRGINDRN

SEQ ID NO: 4866 - protein, 11 aa, Artificial Sequence
  Description of Artificial Sequence: Synthetic peptide
  Seed: RMIKRGINDRN
RFIKRGINDRR

SEQ ID NO: 4867 - protein, 11 aa, Artificial Sequence
  Description of Artificial Sequence: Synthetic peptide
  Seed: RMIKRGINDRN
RFIKRGINDRA

SEQ ID NO: 4868 - protein, 11 aa, Artificial Sequence
  Description of Artificial Sequence: Synthetic peptide
  Seed: RRTRIAYERMC
RFTRIAYERMR

SEQ ID NO: 4869 - protein, 11 aa, Artificial Sequence
  Description of Artificial Sequence: Synthetic peptide
  Seed: RMIKRGINDRN
RMIKRGINDRV

SEQ ID NO: 4870 - protein, 11 aa, Artificial Sequence
  Description of Artificial Sequence: Synthetic peptide
  Seed: RRTRIAYERMC
RFTRIAYERMI

SEQ ID NO: 4871 - protein, 9 aa, Artificial Sequence
  Description of Artificial Sequence: Synthetic peptide
  Seed: RSALILRGS
RMALILRGV

SEQ ID NO: 4872 - protein, 9 aa, Artificial Sequence
  Description of Artificial Sequence: Synthetic peptide
  Seed: RSALILRGS
RFALILRGA

SEQ ID NO: 4873 - protein, 11 aa, Artificial Sequence
  Description of Artificial Sequence: Synthetic peptide
  Seed: RMIGGIGRFYI
RVIGGIGRFYM

SEQ ID NO: 4874 - protein, 10 aa, Artificial Sequence
  Description of Artificial Sequence: Synthetic peptide
  Seed: RSALILRGSV
RMALILRGSK

SEQ ID NO: 4875 - protein, 10 aa, Artificial Sequence
  Description of Artificial Sequence: Synthetic peptide
  Seed: RSALILRGSV
RMALILRGSM

SEQ ID NO: 4876 - protein, 10 aa, Artificial Sequence
  Description of Artificial Sequence: Synthetic peptide
  Seed: RSALILRGSV
RMALILRGSS

SEQ ID NO: 4877 - protein, 10 aa, Artificial Sequence
  Description of Artificial Sequence: Synthetic peptide
  Seed: RMIKRGINDR
RHIKRGINDR

SEQ ID NO: 4878 - protein, 10 aa, Artificial Sequence
  Description of Artificial Sequence: Synthetic peptide
  Seed: RSALILRGSV
RMALILRGST

SEQ ID NO: 4879 - protein, 10 aa, Artificial Sequence
  Description of Artificial Sequence: Synthetic peptide
  Seed: RSALILRGSV
RMALILRGSV

SEQ ID NO: 4880 - protein, 10 aa, Artificial Sequence
  Description of Artificial Sequence: Synthetic peptide
  Seed: RSALILRGSV
RFALILRGSA

SEQ ID NO: 4881 - protein, 10 aa, Artificial Sequence
  Description of Artificial Sequence: Synthetic peptide
  Seed: RSALILRGSV
RFALILRGSK

SEQ ID NO: 4882 - protein, 10 aa, Artificial Sequence
  Description of Artificial Sequence: Synthetic peptide
  Seed: RSALILRGSV
RFALILRGSV

SEQ ID NO: 4883 - protein, 10 aa, Artificial Sequence
  Description of Artificial Sequence: Synthetic peptide
  Seed: RSALILRGSV
RPALILRGSK

SEQ ID NO: 4884 - protein, 10 aa, Artificial Sequence
  Description of Artificial Sequence: Synthetic peptide
  Seed: RSALILRGSV
RSALILRGSA

SEQ ID NO: 4885 - protein, 10 aa, Artificial Sequence
  Description of Artificial Sequence: Synthetic peptide
  Seed: RSALILRGSV
RSALILRGSR

SEQ ID NO: 4886 - protein, 10 aa, Artificial Sequence
  Description of Artificial Sequence: Synthetic peptide
  Seed: RMIKRGINDR
RGIKRGINDR

SEQ ID NO: 4887 - protein, 10 aa, Artificial Sequence
  Description of Artificial Sequence: Synthetic peptide
  Seed: RSALILRGSV
RSALILRGSI

SEQ ID NO: 4888 - protein, 10 aa, Artificial Sequence
  Description of Artificial Sequence: Synthetic peptide
  Seed: RSALILRGSV
RSALILRGSL

SEQ ID NO: 4889 - protein, 10 aa, Artificial Sequence
  Description of Artificial Sequence: Synthetic peptide
  Seed: RSALILRGSV
RSALILRGSK

SEQ ID NO: 4890 - protein, 10 aa, Artificial Sequence
  Description of Artificial Sequence: Synthetic peptide
  Seed: RSALILRGSV
RSALILRGSM

SEQ ID NO: 4891 - protein, 10 aa, Artificial Sequence
  Description of Artificial Sequence: Synthetic peptide
  Seed: RSALILRGSV
RMALILRGSL

SEQ ID NO: 4892 - protein, 10 aa, Artificial Sequence
  Description of Artificial Sequence: Synthetic peptide
  Seed: RSALILRGSV
RMALILRGSI

SEQ ID NO: 4893 - protein, 10 aa, Artificial Sequence
  Description of Artificial Sequence: Synthetic peptide
  Seed: RSALILRGSV
RSALILRGSY

SEQ ID NO: 4894 - protein, 10 aa, Artificial Sequence
  Description of Artificial Sequence: Synthetic peptide
  Seed: RMIKRGINDR
RIIKRGINDK

SEQ ID NO: 4895 - protein, 10 aa, Artificial Sequence
  Description of Artificial Sequence: Synthetic peptide
  Seed: RMIKRGINDR
RFIKRGINDR

SEQ ID NO: 4896 - protein, 10 aa, Artificial Sequence
  Description of Artificial Sequence: Synthetic peptide
  Seed: RSALILRGSV
RIALILRGSK

SEQ ID NO: 4897 - protein, 10 aa, Artificial Sequence
  Description of Artificial Sequence: Synthetic peptide
  Seed: RSALILRGSV
RIALILRGSV

SEQ ID NO: 4898 - protein, 10 aa, Artificial Sequence
  Description of Artificial Sequence: Synthetic peptide
  Seed: RSALILRGSV
RLALILRGSA

SEQ ID NO: 4899 - protein, 10 aa, Artificial Sequence
  Description of Artificial Sequence: Synthetic peptide
  Seed: RSALILRGSV
RLALILRGSI

SEQ ID NO: 4900 - protein, 10 aa, Artificial Sequence
  Description of Artificial Sequence: Synthetic peptide
  Seed: RSALILRGSV
RLALILRGSL

SEQ ID NO: 4901 - protein, 10 aa, Artificial Sequence
  Description of Artificial Sequence: Synthetic peptide
  Seed: RSALILRGSV
RLALILRGSK

SEQ ID NO: 4902 - protein, 10 aa, Artificial Sequence
  Description of Artificial Sequence: Synthetic peptide
  Seed: RSALILRGSV
RLALILRGSM

SEQ ID NO: 4903 - protein, 10 aa, Artificial Sequence
  Description of Artificial Sequence: Synthetic peptide
  Seed: RSALILRGSV
RLALILRGSS

SEQ ID NO: 4904 - protein, 10 aa, Artificial Sequence
  Description of Artificial Sequence: Synthetic peptide
  Seed: RMIKRGINDR
RMIKRGINDK

SEQ ID NO: 4905 - protein, 10 aa, Artificial Sequence
  Description of Artificial Sequence: Synthetic peptide
  Seed: RSALILRGSV
RLALILRGST

SEQ ID NO: 4906 - protein, 10 aa, Artificial Sequence
  Description of Artificial Sequence: Synthetic peptide
  Seed: RSALILRGSV
RLALILRGSV

SEQ ID NO: 4907 - protein, 10 aa, Artificial Sequence
  Description of Artificial Sequence: Synthetic peptide
  Seed: RMIKRGINDR
RKIKRGINDR

SEQ ID NO: 4908 - protein, 10 aa, Artificial Sequence
  Description of Artificial Sequence: Synthetic peptide
  Seed: RSALILRGSV
RKALILRGSK

SEQ ID NO: 4909 - protein, 10 aa, Artificial Sequence
  Description of Artificial Sequence: Synthetic peptide
  Seed: RMIKRGINDR
RLIKRGINDK

SEQ ID NO: 4910 - protein, 10 aa, Artificial Sequence
  Description of Artificial Sequence: Synthetic peptide
  Seed: RSALILRGSV
RMALILRGSA

SEQ ID NO: 4911 - protein, 10 aa, Artificial Sequence
  Description of Artificial Sequence: Synthetic peptide
  Seed: RMIKRGINDR
RLIKRGINDR

SEQ ID NO: 4912 - protein, 10 aa, Artificial Sequence
  Description of Artificial Sequence: Synthetic peptide
  Seed: RSALILRGSV
RSALILRGSS

SEQ ID NO: 4913 - protein, 10 aa, Artificial Sequence
  Description of Artificial Sequence: Synthetic peptide
  Seed: RMIKRGINDR
REIKRGINDR

SEQ ID NO: 4914 - protein, 10 aa, Artificial Sequence
  Description of Artificial Sequence: Synthetic peptide
  Seed: RSALILRGSV
RIALILRGSI

SEQ ID NO: 4915 - protein, 10 aa, Artificial Sequence
  Description of Artificial Sequence: Synthetic peptide
  Seed: RSALILRGSV
RWALILRGSK

SEQ ID NO: 4916 - protein, 10 aa, Artificial Sequence
  Description of Artificial Sequence: Synthetic peptide
  Seed: RSALILRGSV
RWALILRGSV

SEQ ID NO: 4917 - protein, 10 aa, Artificial Sequence
  Description of Artificial Sequence: Synthetic peptide
  Seed: RSALILRGSV
RYALILRGSA

SEQ ID NO: 4918 - protein, 10 aa, Artificial Sequence
  Description of Artificial Sequence: Synthetic peptide
  Seed: RSALILRGSV
RYALILRGSI

SEQ ID NO: 4919 - protein, 11 aa, Artificial Sequence
  Description of Artificial Sequence: Synthetic peptide
  Seed: RMIGGIGRFYI
RVIGGIGRFYY

SEQ ID NO: 4920 - protein, 10 aa, Artificial Sequence
  Description of Artificial Sequence: Synthetic peptide
  Seed: RSALILRGSV
RYALILRGSK

SEQ ID NO: 4921 - protein, 11 aa, Artificial Sequence
  Description of Artificial Sequence: Synthetic peptide
  Seed: RMIGGIGRFYI
RVIGGIGRFYW

SEQ ID NO: 4922 - protein, 10 aa, Artificial Sequence
  Description of Artificial Sequence: Synthetic peptide
  Seed: RSALILRGSV
RYALILRGSM

SEQ ID NO: 4923 - protein, 10 aa, Artificial Sequence
  Description of Artificial Sequence: Synthetic peptide
  Seed: RSALILRGSV
RYALILRGSV

SEQ ID NO: 4924 - protein, 11 aa, Artificial Sequence
  Description of Artificial Sequence: Synthetic peptide
  Seed: RMIGGIGRFYI
RVIGGIGRFYT

SEQ ID NO: 4925 - protein, 10 aa, Artificial Sequence
  Description of Artificial Sequence: Synthetic peptide
  Seed: RSALILRGSV
RVALILRGSA

SEQ ID NO: 4926 - protein, 11 aa, Artificial Sequence
  Description of Artificial Sequence: Synthetic peptide
  Seed: RMIGGIGRFYI
RVIGGIGRFYS

SEQ ID NO: 4927 - protein, 11 aa, Artificial Sequence
  Description of Artificial Sequence: Synthetic peptide
  Seed: RMIGGIGRFYI
RVIGGIGRFYP

SEQ ID NO: 4928 - protein, 10 aa, Artificial Sequence
  Description of Artificial Sequence: Synthetic peptide
  Seed: RSALILRGSV
RVALILRGSI

SEQ ID NO: 4929 - protein, 10 aa, Artificial Sequence
  Description of Artificial Sequence: Synthetic peptide
  Seed: RSALILRGSV
RVALILRGSL

SEQ ID NO: 4930 - protein, 11 aa, Artificial Sequence
  Description of Artificial Sequence: Synthetic peptide
  Seed: RMIGGIGRFYI
RVIGGIGRFYF

SEQ ID NO: 4931 - protein, 10 aa, Artificial Sequence
  Description of Artificial Sequence: Synthetic peptide
  Seed: RSALILRGSV
RVALILRGSK

SEQ ID NO: 4932 - protein, 10 aa, Artificial Sequence
  Description of Artificial Sequence: Synthetic peptide
  Seed: RSALILRGSV
RVALILRGSM

SEQ ID NO: 4933 - protein, 11 aa, Artificial Sequence
  Description of Artificial Sequence: Synthetic peptide
  Seed: RMIGGIGRFYI
RVIGGIGRFYV

SEQ ID NO: 4934 - protein, 10 aa, Artificial Sequence
  Description of Artificial Sequence: Synthetic peptide
  Seed: RMIKRGINDR
RAIKRGINDR

SEQ ID NO: 4935 - protein, 10 aa, Artificial Sequence
  Description of Artificial Sequence: Synthetic peptide
  Seed: RMIKRGINDR
RQIKRGINDK

SEQ ID NO: 4936 - protein, 10 aa, Artificial Sequence
  Description of Artificial Sequence: Synthetic peptide
  Seed: RSALILRGSV
RWALILRGSI

SEQ ID NO: 4937 - protein, 10 aa, Artificial Sequence
  Description of Artificial Sequence: Synthetic peptide
  Seed: RMIKRGINDR
RQIKRGINDR

SEQ ID NO: 4938 - protein, 10 aa, Artificial Sequence
  Description of Artificial Sequence: Synthetic peptide
  Seed: RMIKRGINDR
RCIKRGINDR

SEQ ID NO: 4939 - protein, 10 aa, Artificial Sequence
  Description of Artificial Sequence: Synthetic peptide
  Seed: RMIKRGINDR
RDIKRGINDR

SEQ ID NO: 4940 - protein, 10 aa, Artificial Sequence
  Description of Artificial Sequence: Synthetic peptide
  Seed: RSALILRGSV
RTALILRGSA

SEQ ID NO: 4941 - protein, 10 aa, Artificial Sequence
  Description of Artificial Sequence: Synthetic peptide
  Seed: RSALILRGSV
RTALILRGSR

SEQ ID NO: 4942 - protein, 10 aa, Artificial Sequence
  Description of Artificial Sequence: Synthetic peptide
  Seed: RSALILRGSV
RTALILRGSG

SEQ ID NO: 4943 - protein, 10 aa, Artificial Sequence
  Description of Artificial Sequence: Synthetic peptide
  Seed: RSALILRGSV
RTALILRGSI

SEQ ID NO: 4944 - protein, 10 aa, Artificial Sequence
  Description of Artificial Sequence: Synthetic peptide
  Seed: RSALILRGSV
RTALILRGSL

SEQ ID NO: 4945 - protein, 10 aa, Artificial Sequence
  Description of Artificial Sequence: Synthetic peptide
  Seed: RMIKRGINDR
RNIKRGINDR

SEQ ID NO: 4946 - protein, 10 aa, Artificial Sequence
  Description of Artificial Sequence: Synthetic peptide
  Seed: RSALILRGSV
RTALILRGSK

SEQ ID NO: 4947 - protein, 10 aa, Artificial Sequence
  Description of Artificial Sequence: Synthetic peptide
  Seed: RSALILRGSV
RTALILRGSM

SEQ ID NO: 4948 - protein, 10 aa, Artificial Sequence
  Description of Artificial Sequence: Synthetic peptide
  Seed: RSALILRGSV
RTALILRGSS

SEQ ID NO: 4949 - protein, 10 aa, Artificial Sequence
  Description of Artificial Sequence: Synthetic peptide
  Seed: RSALILRGSV
RTALILRGST

SEQ ID NO: 4950 - protein, 10 aa, Artificial Sequence
  Description of Artificial Sequence: Synthetic peptide
  Seed: RSALILRGSV
RTALILRGSY

SEQ ID NO: 4951 - protein, 10 aa, Artificial Sequence
  Description of Artificial Sequence: Synthetic peptide
  Seed: RMIKRGINDR
RRIKRGINDR

SEQ ID NO: 4952 - protein, 10 aa, Artificial Sequence
  Description of Artificial Sequence: Synthetic peptide
  Seed: RSALILRGSV
RTALILRGSV

SEQ ID NO: 4953 - protein, 10 aa, Artificial Sequence
  Description of Artificial Sequence: Synthetic peptide
  Seed: RSALILRGSV
RWALILRGSA

SEQ ID NO: 4954 - protein, 10 aa, Artificial Sequence
  Description of Artificial Sequence: Synthetic peptide
  Seed: RSALILRGSV
RIALILRGSL

SEQ ID NO: 4955 - protein, 10 aa, Artificial Sequence
  Description of Artificial Sequence: Synthetic peptide
  Seed: RSALILRGSV
RIALILRGSA

SEQ ID NO: 4956 - protein, 9 aa, Artificial Sequence
  Description of Artificial Sequence: Synthetic peptide
  Seed: RSALILRGS
RFALILRGK

SEQ ID NO: 4957 - protein, 9 aa, Artificial Sequence
  Description of Artificial Sequence: Synthetic peptide
  Seed: RSALILRGS
RTALILRGG

SEQ ID NO: 4958 - protein, 9 aa, Artificial Sequence
  Description of Artificial Sequence: Synthetic peptide
  Seed: RSALILRGS
RTALILRGI

SEQ ID NO: 4959 - protein, 9 aa, Artificial Sequence
  Description of Artificial Sequence: Synthetic peptide
  Seed: RSALILRGS
RTALILRGL

SEQ ID NO: 4960 - protein, 9 aa, Artificial Sequence
  Description of Artificial Sequence: Synthetic peptide
  Seed: RSALILRGS
RTALILRGK

SEQ ID NO: 4961 - protein, 10 aa, Artificial Sequence
  Description of Artificial Sequence: Synthetic peptide
  Seed: RMIKRGINDR
RVIKRGINDK

SEQ ID NO: 4962 - protein, 9 aa, Artificial Sequence
  Description of Artificial Sequence: Synthetic peptide
  Seed: RSALILRGS
RTALILRGM

SEQ ID NO: 4963 - protein, 9 aa, Artificial Sequence
  Description of Artificial Sequence: Synthetic peptide
  Seed: RSALILRGS
RTALILRGF

SEQ ID NO: 4964 - protein, 9 aa, Artificial Sequence
  Description of Artificial Sequence: Synthetic peptide
  Seed: RSALILRGS
RTALILRGP

SEQ ID NO: 4965 - protein, 10 aa, Artificial Sequence
  Description of Artificial Sequence: Synthetic peptide
  Seed: RMIKRGINDR
RVIKRGINDR

SEQ ID NO: 4966 - protein, 9 aa, Artificial Sequence
  Description of Artificial Sequence: Synthetic peptide
  Seed: RSALILRGS
RTALILRGS

SEQ ID NO: 4967 - protein, 9 aa, Artificial Sequence
  Description of Artificial Sequence: Synthetic peptide
  Seed: RSALILRGS
RTALILRGT

SEQ ID NO: 4968 - protein, 9 aa, Artificial Sequence
  Description of Artificial Sequence: Synthetic peptide
  Seed: RSALILRGS
RTALILRGY

SEQ ID NO: 4969 - protein, 9 aa, Artificial Sequence
  Description of Artificial Sequence: Synthetic peptide
  Seed: RSALILRGS
RTALILRGV

SEQ ID NO: 4970 - protein, 9 aa, Artificial Sequence
  Description of Artificial Sequence: Synthetic peptide
  Seed: RSALILRGS
RWALILRGA

SEQ ID NO: 4971 - protein, 10 aa, Artificial Sequence
  Description of Artificial Sequence: Synthetic peptide
  Seed: RMIKRGINDR
RYIKRGINDK

SEQ ID NO: 4972 - protein, 9 aa, Artificial Sequence
  Description of Artificial Sequence: Synthetic peptide
  Seed: RSALILRGS
RWALILRGI

SEQ ID NO: 4973 - protein, 9 aa, Artificial Sequence
  Description of Artificial Sequence: Synthetic peptide
  Seed: RSALILRGS
RWALILRGK

SEQ ID NO: 4974 - protein, 9 aa, Artificial Sequence
  Description of Artificial Sequence: Synthetic peptide
  Seed: RSALILRGS
RWALILRGV

SEQ ID NO: 4975 - protein, 9 aa, Artificial Sequence
  Description of Artificial Sequence: Synthetic peptide
  Seed: RSALILRGS
RTALILRGH

SEQ ID NO: 4976 - protein, 9 aa, Artificial Sequence
  Description of Artificial Sequence: Synthetic peptide
  Seed: RSALILRGS
RTALILRGC

SEQ ID NO: 4977 - protein, 9 aa, Artificial Sequence
  Description of Artificial Sequence: Synthetic peptide
  Seed: RSALILRGS
RYALILRGA

SEQ ID NO: 4978 - protein, 9 aa, Artificial Sequence
  Description of Artificial Sequence: Synthetic peptide
  Seed: RSALILRGS
RTALILRGN

SEQ ID NO: 4979 - protein, 9 aa, Artificial Sequence
  Description of Artificial Sequence: Synthetic peptide
  Seed: RSALILRGS
RFALILRGV

SEQ ID NO: 4980 - protein, 11 aa, Artificial Sequence
  Description of Artificial Sequence: Synthetic peptide
  Seed: RMIKRGINDRN
RGIKRGINDRR

SEQ ID NO: 4981 - protein, 9 aa, Artificial Sequence
  Description of Artificial Sequence: Synthetic peptide
  Seed: RSALILRGS
RSALILRGR

SEQ ID NO: 4982 - protein, 9 aa, Artificial Sequence
  Description of Artificial Sequence: Synthetic peptide
  Seed: RSALILRGS
RSALILRGC

SEQ ID NO: 4983 - protein, 9 aa, Artificial Sequence
  Description of Artificial Sequence: Synthetic peptide
  Seed: RSALILRGS
RSALILRGG

SEQ ID NO: 4984 - protein, 11 aa, Artificial Sequence
  Description of Artificial Sequence: Synthetic peptide
  Seed: RMIKRGINDRN
RQIKRGINDRR

SEQ ID NO: 4985 - protein, 9 aa, Artificial Sequence
  Description of Artificial Sequence: Synthetic peptide
  Seed: RSALILRGS
RSALILRGI

SEQ ID NO: 4986 - protein, 9 aa, Artificial Sequence
  Description of Artificial Sequence: Synthetic peptide
  Seed: RSALILRGS
RSALILRGL

SEQ ID NO: 4987 - protein, 9 aa, Artificial Sequence
  Description of Artificial Sequence: Synthetic peptide
  Seed: RSALILRGS
RSALILRGK

SEQ ID NO: 4988 - protein, 9 aa, Artificial Sequence
  Description of Artificial Sequence: Synthetic peptide
  Seed: RSALILRGS
RSALILRGM

SEQ ID NO: 4989 - protein, 9 aa, Artificial Sequence
  Description of Artificial Sequence: Synthetic peptide
  Seed: RSALILRGS
RSALILRGT

SEQ ID NO: 4990 - protein, 11 aa, Artificial Sequence
  Description of Artificial Sequence: Synthetic peptide
  Seed: RMIKRGINDRN
RAIKRGINDRR

SEQ ID NO: 4991 - protein, 9 aa, Artificial Sequence
  Description of Artificial Sequence: Synthetic peptide
  Seed: RSALILRGS
RSALILRGY

SEQ ID NO: 4992 - protein, 9 aa, Artificial Sequence
  Description of Artificial Sequence: Synthetic peptide
  Seed: RSALILRGS
RSALILRGV

SEQ ID NO: 4993 - protein, 9 aa, Artificial Sequence
  Description of Artificial Sequence: Synthetic peptide
  Seed: RSALILRGS
RTALILRGA

SEQ ID NO: 4994 - protein, 9 aa, Artificial Sequence
  Description of Artificial Sequence: Synthetic peptide
  Seed: RSALILRGS
RTALILRGR

SEQ ID NO: 4995 - protein, 10 aa, Artificial Sequence
  Description of Artificial Sequence: Synthetic peptide
  Seed: RMIKRGINDR
RYIKRGINDR

SEQ ID NO: 4996 - protein, 9 aa, Artificial Sequence
  Description of Artificial Sequence: Synthetic peptide
  Seed: RSALILRGS
RYALILRGR

SEQ ID NO: 4997 - protein, 10 aa, Artificial Sequence
  Description of Artificial Sequence: Synthetic peptide
  Seed: RSALILRGSV
RHALILRGSK

SEQ ID NO: 4998 - protein, 10 aa, Artificial Sequence
  Description of Artificial Sequence: Synthetic peptide
  Seed: RSALILRGSV
RAALILRGSA

SEQ ID NO: 4999 - protein, 10 aa, Artificial Sequence
  Description of Artificial Sequence: Synthetic peptide
  Seed: RMIKRGINDR
RSIKRGINDK

SEQ ID NO: 5000 - protein, 10 aa, Artificial Sequence
  Description of Artificial Sequence: Synthetic peptide
  Seed: RSALILRGSV
RAALILRGSV

SEQ ID NO: 5001 - protein, 10 aa, Artificial Sequence
  Description of Artificial Sequence: Synthetic peptide
  Seed: RSALILRGSV
RRALILRGSK

SEQ ID NO: 5002 - protein, 10 aa, Artificial Sequence
  Description of Artificial Sequence: Synthetic peptide
  Seed: RSALILRGSV
RNALILRGSK

SEQ ID NO: 5003 - protein, 10 aa, Artificial Sequence
  Description of Artificial Sequence: Synthetic peptide
  Seed: RSALILRGSV
RDALILRGSK

SEQ ID NO: 5004 - protein, 10 aa, Artificial Sequence
  Description of Artificial Sequence: Synthetic peptide
  Seed: RSALILRGSV
RCALILRGSK

SEQ ID NO: 5005 - protein, 10 aa, Artificial Sequence
  Description of Artificial Sequence: Synthetic peptide
  Seed: RMIKRGINDR
RSIKRGINDR

SEQ ID NO: 5006 - protein, 10 aa, Artificial Sequence
  Description of Artificial Sequence: Synthetic peptide
  Seed: RSALILRGSV
RQALILRGSA

SEQ ID NO: 5007 - protein, 10 aa, Artificial Sequence
  Description of Artificial Sequence: Synthetic peptide
  Seed: RMIKRGINDR
RPIKRGINDR

SEQ ID NO: 5008 - protein, 10 aa, Artificial Sequence
  Description of Artificial Sequence: Synthetic peptide
  Seed: RSALILRGSV
RQALILRGSI

SEQ ID NO: 5009 - protein, 10 aa, Artificial Sequence
  Description of Artificial Sequence: Synthetic peptide
  Seed: RSALILRGSV
RQALILRGSL

SEQ ID NO: 5010 - protein, 10 aa, Artificial Sequence
  Description of Artificial Sequence: Synthetic peptide
  Seed: RSALILRGSV
RQALILRGSK

SEQ ID NO: 5011 - protein, 10 aa, Artificial Sequence
  Description of Artificial Sequence: Synthetic peptide
  Seed: RSALILRGSV
RQALILRGSM

SEQ ID NO: 5012 - protein, 10 aa, Artificial Sequence
  Description of Artificial Sequence: Synthetic peptide
  Seed: RSALILRGSV
RQALILRGSV

SEQ ID NO: 5013 - protein, 10 aa, Artificial Sequence
  Description of Artificial Sequence: Synthetic peptide
  Seed: RSALILRGSV
REALILRGSK

SEQ ID NO: 5014 - protein, 10 aa, Artificial Sequence
  Description of Artificial Sequence: Synthetic peptide
  Seed: RSALILRGSV
RGALILRGSK

SEQ ID NO: 5015 - protein, 10 aa, Artificial Sequence
  Description of Artificial Sequence: Synthetic peptide
  Seed: RMIKRGINDR
RFIKRGINDK

SEQ ID NO: 5016 - protein, 10 aa, Artificial Sequence
  Description of Artificial Sequence: Synthetic peptide
  Seed: RSALILRGSV
RAALILRGSK

SEQ ID NO: 5017 - protein, 9 aa, Artificial Sequence
  Description of Artificial Sequence: Synthetic peptide
  Seed: RSALILRGS
RVALILRGV

SEQ ID NO: 5018 - protein, 10 aa, Artificial Sequence
  Description of Artificial Sequence: Synthetic peptide
  Seed: RMIKRGINDR
RWIKRGINDK

SEQ ID NO: 5019 - protein, 9 aa, Artificial Sequence
  Description of Artificial Sequence: Synthetic peptide
  Seed: RSALILRGS
RVALILRGY

SEQ ID NO: 5020 - protein, 9 aa, Artificial Sequence
  Description of Artificial Sequence: Synthetic peptide
  Seed: RSALILRGS
RYALILRGI

SEQ ID NO: 5021 - protein, 9 aa, Artificial Sequence
  Description of Artificial Sequence: Synthetic peptide
  Seed: RSALILRGS
RYALILRGL

SEQ ID NO: 5022 - protein, 9 aa, Artificial Sequence
  Description of Artificial Sequence: Synthetic peptide
  Seed: RSALILRGS
RYALILRGK

SEQ ID NO: 5023 - protein, 9 aa, Artificial Sequence
  Description of Artificial Sequence: Synthetic peptide
  Seed: RSALILRGS
RYALILRGM

SEQ ID NO: 5024 - protein, 9 aa, Artificial Sequence
  Description of Artificial Sequence: Synthetic peptide
  Seed: RSALILRGS
RYALILRGS

SEQ ID NO: 5025 - protein, 9 aa, Artificial Sequence
  Description of Artificial Sequence: Synthetic peptide
  Seed: RSALILRGS
RYALILRGV

SEQ ID NO: 5026 - protein, 10 aa, Artificial Sequence
  Description of Artificial Sequence: Synthetic peptide
  Seed: RMIKRGINDR
RWIKRGINDR

SEQ ID NO: 5027 - protein, 9 aa, Artificial Sequence
  Description of Artificial Sequence: Synthetic peptide
  Seed: RSALILRGS
RVALILRGA

SEQ ID NO: 5028 - protein, 9 aa, Artificial Sequence
  Description of Artificial Sequence: Synthetic peptide
  Seed: RSALILRGS
RVALILRGG

SEQ ID NO: 5029 - protein, 9 aa, Artificial Sequence
  Description of Artificial Sequence: Synthetic peptide
  Seed: RSALILRGS
RVALILRGI

SEQ ID NO: 5030 - protein, 10 aa, Artificial Sequence
  Description of Artificial Sequence: Synthetic peptide
  Seed: RMIKRGINDR
RTIKRGINDK

SEQ ID NO: 5031 - protein, 9 aa, Artificial Sequence
  Description of Artificial Sequence: Synthetic peptide
  Seed: RSALILRGS
RVALILRGL

SEQ ID NO: 5032 - protein, 9 aa, Artificial Sequence
  Description of Artificial Sequence: Synthetic peptide
  Seed: RSALILRGS
RVALILRGK

SEQ ID NO: 5033 - protein, 9 aa, Artificial Sequence
  Description of Artificial Sequence: Synthetic peptide
  Seed: RSALILRGS
RVALILRGM

SEQ ID NO: 5034 - protein, 9 aa, Artificial Sequence
  Description of Artificial Sequence: Synthetic peptide
  Seed: RSALILRGS
RVALILRGS

SEQ ID NO: 5035 - protein, 10 aa, Artificial Sequence
  Description of Artificial Sequence: Synthetic peptide
  Seed: RMIKRGINDR
RTIKRGINDR

SEQ ID NO: 5036 - protein, 9 aa, Artificial Sequence
  Description of Artificial Sequence: Synthetic peptide
  Seed: RSALILRGS
RVALILRGT

SEQ ID NO: 5037 - protein, 11 aa, Artificial Sequence
  Description of Artificial Sequence: Synthetic peptide
  Seed: RRDGKWMRELI
RRDGKWMRELF

SEQ ID NO: 5038 - protein, 11 aa, Artificial Sequence
  Description of Artificial Sequence: Synthetic peptide
  Seed: RNRYLEEHPSA
RYRYLEEHPSI

SEQ ID NO: 5039 - protein, 11 aa, Artificial Sequence
  Description of Artificial Sequence: Synthetic peptide
  Seed: RRDGKWMRELI
RRDGKWMRELK

SEQ ID NO: 5040 - protein, 11 aa, Artificial Sequence
  Description of Artificial Sequence: Synthetic peptide
  Seed: RNFWRGENGRR
RQFWRGENGRT

SEQ ID NO: 5041 - protein, 11 aa, Artificial Sequence
  Description of Artificial Sequence: Synthetic peptide
  Seed: RNFWRGENGRR
RQFWRGENGRL

SEQ ID NO: 5042 - protein, 11 aa, Artificial Sequence
  Description of Artificial Sequence: Synthetic peptide
  Seed: RNFWRGENGRR
RQFWRGENGRK

SEQ ID NO: 5043 - protein, 11 aa, Artificial Sequence
  Description of Artificial Sequence: Synthetic peptide
  Seed: RNFWRGENGRR
RQFWRGENGRM

SEQ ID NO: 5044 - protein, 11 aa, Artificial Sequence
  Description of Artificial Sequence: Synthetic peptide
  Seed: RNFWRGENGRR
RQFWRGENGRF

SEQ ID NO: 5045 - protein, 9 aa, Artificial Sequence
  Description of Artificial Sequence: Synthetic peptide
  Seed: RMVGGIGRF
RGVGGIGRY

SEQ ID NO: 5046 - protein, 9 aa, Artificial Sequence
  Description of Artificial Sequence: Synthetic peptide
  Seed: RMVGGIGRF
RGVGGIGRW

SEQ ID NO: 5047 - protein, 11 aa, Artificial Sequence
  Description of Artificial Sequence: Synthetic peptide
  Seed: RNFWRGENGRR
RQFWRGENGRP

SEQ ID NO: 5048 - protein, 11 aa, Artificial Sequence
  Description of Artificial Sequence: Synthetic peptide
  Seed: RNFWRGENGRR
RQFWRGENGRS

SEQ ID NO: 5049 - protein, 11 aa, Artificial Sequence
  Description of Artificial Sequence: Synthetic peptide
  Seed: RNFWRGENGRR
RQFWRGENGRW

SEQ ID NO: 5050 - protein, 11 aa, Artificial Sequence
  Description of Artificial Sequence: Synthetic peptide
  Seed: RNFWRGENGRR
RLFWRGENGRY

SEQ ID NO: 5051 - protein, 11 aa, Artificial Sequence
  Description of Artificial Sequence: Synthetic peptide
  Seed: RNFWRGENGRR
RQFWRGENGRY

SEQ ID NO: 5052 - protein, 11 aa, Artificial Sequence
  Description of Artificial Sequence: Synthetic peptide
  Seed: RNFWRGENGRR
RQFWRGENGRV

SEQ ID NO: 5053 - protein, 11 aa, Artificial Sequence
  Description of Artificial Sequence: Synthetic peptide
  Seed: RNFWRGENGRR
RGFWRGENGRR

SEQ ID NO: 5054 - protein, 11 aa, Artificial Sequence
  Description of Artificial Sequence: Synthetic peptide
  Seed: RNFWRGENGRR
RGFWRGENGRK

SEQ ID NO: 5055 - protein, 9 aa, Artificial Sequence
  Description of Artificial Sequence: Synthetic peptide
  Seed: RMVGGIGRF
RGVGGIGRF

SEQ ID NO: 5056 - protein, 11 aa, Artificial Sequence
  Description of Artificial Sequence: Synthetic peptide
  Seed: RNFWRGENGRR
RHFWRGENGRR

SEQ ID NO: 5057 - protein, 11 aa, Artificial Sequence
  Description of Artificial Sequence: Synthetic peptide
  Seed: RNFWRGENGRR
RIFWRGENGRA

SEQ ID NO: 5058 - protein, 11 aa, Artificial Sequence
  Description of Artificial Sequence: Synthetic peptide
  Seed: RNFWRGENGRR
RIFWRGENGRR

SEQ ID NO: 5059 - protein, 11 aa, Artificial Sequence
  Description of Artificial Sequence: Synthetic peptide
  Seed: RNFWRGENGRR
RQFWRGENGRI

SEQ ID NO: 5060 - protein, 11 aa, Artificial Sequence
  Description of Artificial Sequence: Synthetic peptide
  Seed: RNFWRGENGRR
RQFWRGENGRH

SEQ ID NO: 5061 - protein, 11 aa, Artificial Sequence
  Description of Artificial Sequence: Synthetic peptide
  Seed: RNFWRGENGRR
RQFWRGENGRG

SEQ ID NO: 5062 - protein, 11 aa, Artificial Sequence
  Description of Artificial Sequence: Synthetic peptide
  Seed: RNFWRGENGRR
RQFWRGENGRE

SEQ ID NO: 5063 - protein, 9 aa, Artificial Sequence
  Description of Artificial Sequence: Synthetic peptide
  Seed: RMVGGIGRF
RHVGGIGRY

SEQ ID NO: 5064 - protein, 11 aa, Artificial Sequence
  Description of Artificial Sequence: Synthetic peptide
  Seed: RNFWRGENGRR
RAFWRGENGRP

SEQ ID NO: 5065 - protein, 11 aa, Artificial Sequence
  Description of Artificial Sequence: Synthetic peptide
  Seed: RNFWRGENGRR
RAFWRGENGRS

SEQ ID NO: 5066 - protein, 11 aa, Artificial Sequence
  Description of Artificial Sequence: Synthetic peptide
  Seed: RNFWRGENGRR
RAFWRGENGRT

SEQ ID NO: 5067 - protein, 11 aa, Artificial Sequence
  Description of Artificial Sequence: Synthetic peptide
  Seed: RNFWRGENGRR
RAFWRGENGRW

SEQ ID NO: 5068 - protein, 11 aa, Artificial Sequence
  Description of Artificial Sequence: Synthetic peptide
  Seed: RNFWRGENGRR
RAFWRGENGRY

SEQ ID NO: 5069 - protein, 11 aa, Artificial Sequence
  Description of Artificial Sequence: Synthetic peptide
  Seed: RNFWRGENGRR
RAFWRGENGRV

SEQ ID NO: 5070 - protein, 11 aa, Artificial Sequence
  Description of Artificial Sequence: Synthetic peptide
  Seed: RNFWRGENGRR
RRFWRGENGRR

SEQ ID NO: 5071 - protein, 9 aa, Artificial Sequence
  Description of Artificial Sequence: Synthetic peptide
  Seed: RMVGGIGRF
RHVGGIGRF

SEQ ID NO: 5072 - protein, 11 aa, Artificial Sequence
  Description of Artificial Sequence: Synthetic peptide
  Seed: RNFWRGENGRR
RCFWRGENGRR

SEQ ID NO: 5073 - protein, 11 aa, Artificial Sequence
  Description of Artificial Sequence: Synthetic peptide
  Seed: RNFWRGENGRR
RQFWRGENGRA

SEQ ID NO: 5074 - protein, 11 aa, Artificial Sequence
  Description of Artificial Sequence: Synthetic peptide
  Seed: RNFWRGENGRR
RQFWRGENGRR

SEQ ID NO: 5075 - protein, 11 aa, Artificial Sequence
  Description of Artificial Sequence: Synthetic peptide
  Seed: RNFWRGENGRR
RQFWRGENGRN

SEQ ID NO: 5076 - protein, 11 aa, Artificial Sequence
  Description of Artificial Sequence: Synthetic peptide
  Seed: RNFWRGENGRR
RQFWRGENGRD

SEQ ID NO: 5077 - protein, 11 aa, Artificial Sequence
  Description of Artificial Sequence: Synthetic peptide
  Seed: RNFWRGENGRR
RQFWRGENGRC

SEQ ID NO: 5078 - protein, 11 aa, Artificial Sequence
  Description of Artificial Sequence: Synthetic peptide
  Seed: RNFWRGENGRR
RQFWRGENGRQ

SEQ ID NO: 5079 - protein, 9 aa, Artificial Sequence
  Description of Artificial Sequence: Synthetic peptide
  Seed: RMVGGIGRF
RHVGGIGRM

SEQ ID NO: 5080 - protein, 11 aa, Artificial Sequence
  Description of Artificial Sequence: Synthetic peptide
  Seed: RNFWRGENGRR
RIFWRGENGRN

SEQ ID NO: 5081 - protein, 9 aa, Artificial Sequence
  Description of Artificial Sequence: Synthetic peptide
  Seed: RMVGGIGRF
REVGGIGRY

SEQ ID NO: 5082 - protein, 11 aa, Artificial Sequence
  Description of Artificial Sequence: Synthetic peptide
  Seed: RNFWRGENGRR
RIFWRGENGRD

SEQ ID NO: 5083 - protein, 11 aa, Artificial Sequence
  Description of Artificial Sequence: Synthetic peptide
  Seed: RNFWRGENGRR
RLFWRGENGRA

SEQ ID NO: 5084 - protein, 11 aa, Artificial Sequence
  Description of Artificial Sequence: Synthetic peptide
  Seed: RNFWRGENGRR
RLFWRGENGRN

SEQ ID NO: 5085 - protein, 11 aa, Artificial Sequence
  Description of Artificial Sequence: Synthetic peptide
  Seed: RNFWRGENGRR
RLFWRGENGRD

SEQ ID NO: 5086 - protein, 11 aa, Artificial Sequence
  Description of Artificial Sequence: Synthetic peptide
  Seed: RNFWRGENGRR
RLFWRGENGRC

SEQ ID NO: 5087 - protein, 11 aa, Artificial Sequence
  Description of Artificial Sequence: Synthetic peptide
  Seed: RNFWRGENGRR
RLFWRGENGRQ

SEQ ID NO: 5088 - protein, 11 aa, Artificial Sequence
  Description of Artificial Sequence: Synthetic peptide
  Seed: RNFWRGENGRR
RLFWRGENGRE

SEQ ID NO: 5089 - protein, 11 aa, Artificial Sequence
  Description of Artificial Sequence: Synthetic peptide
  Seed: RNFWRGENGRR
RLFWRGENGRG

SEQ ID NO: 5090 - protein, 9 aa, Artificial Sequence
  Description of Artificial Sequence: Synthetic peptide
  Seed: RMVGGIGRF
RQVGGIGRW

SEQ ID NO: 5091 - protein, 11 aa, Artificial Sequence
  Description of Artificial Sequence: Synthetic peptide
  Seed: RNFWRGENGRR
RLFWRGENGRH

SEQ ID NO: 5092 - protein, 11 aa, Artificial Sequence
  Description of Artificial Sequence: Synthetic peptide
  Seed: RNFWRGENGRR
RLFWRGENGRI

SEQ ID NO: 5093 - protein, 11 aa, Artificial Sequence
  Description of Artificial Sequence: Synthetic peptide
  Seed: RNFWRGENGRR
RLFWRGENGRL

SEQ ID NO: 5094 - protein, 11 aa, Artificial Sequence
  Description of Artificial Sequence: Synthetic peptide
  Seed: RNFWRGENGRR
RLFWRGENGRK

SEQ ID NO: 5095 - protein, 11 aa, Artificial Sequence
  Description of Artificial Sequence: Synthetic peptide
  Seed: RNFWRGENGRR
RLFWRGENGRM

SEQ ID NO: 5096 - protein, 11 aa, Artificial Sequence
  Description of Artificial Sequence: Synthetic peptide
  Seed: RNFWRGENGRR
RLFWRGENGRF

SEQ ID NO: 5097 - protein, 11 aa, Artificial Sequence
  Description of Artificial Sequence: Synthetic peptide
  Seed: RNFWRGENGRR
RLFWRGENGRP

SEQ ID NO: 5098 - protein, 11 aa, Artificial Sequence
  Description of Artificial Sequence: Synthetic peptide
  Seed: RNFWRGENGRR
RLFWRGENGRS

SEQ ID NO: 5099 - protein, 9 aa, Artificial Sequence
  Description of Artificial Sequence: Synthetic peptide
  Seed: RMVGGIGRF
RQVGGIGRF

SEQ ID NO: 5100 - protein, 11 aa, Artificial Sequence
  Description of Artificial Sequence: Synthetic peptide
  Seed: RNFWRGENGRR
RLFWRGENGRT

SEQ ID NO: 5101 - protein, 11 aa, Artificial Sequence
  Description of Artificial Sequence: Synthetic peptide
  Seed: RNFWRGENGRR
RLFWRGENGRR

SEQ ID NO: 5102 - protein, 11 aa, Artificial Sequence
  Description of Artificial Sequence: Synthetic peptide
  Seed: RNFWRGENGRR
RIFWRGENGRV

SEQ ID NO: 5103 - protein, 9 aa, Artificial Sequence
  Description of Artificial Sequence: Synthetic peptide
  Seed: RMVGGIGRF
REVGGIGRF

SEQ ID NO: 5104 - protein, 11 aa, Artificial Sequence
  Description of Artificial Sequence: Synthetic peptide
  Seed: RNFWRGENGRR
RIFWRGENGRY

SEQ ID NO: 5105 - protein, 11 aa, Artificial Sequence
  Description of Artificial Sequence: Synthetic peptide
  Seed: RNFWRGENGRR
RIFWRGENGRC

SEQ ID NO: 5106 - protein, 11 aa, Artificial Sequence
  Description of Artificial Sequence: Synthetic peptide
  Seed: RNFWRGENGRR
RIFWRGENGRQ

SEQ ID NO: 5107 - protein, 11 aa, Artificial Sequence
  Description of Artificial Sequence: Synthetic peptide
  Seed: RNFWRGENGRR
RIFWRGENGRE

SEQ ID NO: 5108 - protein, 11 aa, Artificial Sequence
  Description of Artificial Sequence: Synthetic peptide
  Seed: RNFWRGENGRR
RIFWRGENGRG

SEQ ID NO: 5109 - protein, 11 aa, Artificial Sequence
  Description of Artificial Sequence: Synthetic peptide
  Seed: RNFWRGENGRR
RIFWRGENGRH

SEQ ID NO: 5110 - protein, 11 aa, Artificial Sequence
  Description of Artificial Sequence: Synthetic peptide
  Seed: RNFWRGENGRR
RIFWRGENGRI

SEQ ID NO: 5111 - protein, 11 aa, Artificial Sequence
  Description of Artificial Sequence: Synthetic peptide
  Seed: RNFWRGENGRR
RIFWRGENGRL

SEQ ID NO: 5112 - protein, 11 aa, Artificial Sequence
  Description of Artificial Sequence: Synthetic peptide
  Seed: RNFWRGENGRR
RIFWRGENGRK

SEQ ID NO: 5113 - protein, 9 aa, Artificial Sequence
  Description of Artificial Sequence: Synthetic peptide
  Seed: RMVGGIGRF
REVGGIGRM

SEQ ID NO: 5114 - protein, 11 aa, Artificial Sequence
  Description of Artificial Sequence: Synthetic peptide
  Seed: RNFWRGENGRR
RIFWRGENGRM

SEQ ID NO: 5115 - protein, 9 aa, Artificial Sequence
  Description of Artificial Sequence: Synthetic peptide
  Seed: RMVGGIGRF
RQVGGIGRV

SEQ ID NO: 5116 - protein, 11 aa, Artificial Sequence
  Description of Artificial Sequence: Synthetic peptide
  Seed: RNFWRGENGRR
RIFWRGENGRF

SEQ ID NO: 5117 - protein, 9 aa, Artificial Sequence
  Description of Artificial Sequence: Synthetic peptide
  Seed: RMVGGIGRF
RQVGGIGRY

SEQ ID NO: 5118 - protein, 11 aa, Artificial Sequence
  Description of Artificial Sequence: Synthetic peptide
  Seed: RNFWRGENGRR
RIFWRGENGRP

SEQ ID NO: 5119 - protein, 11 aa, Artificial Sequence
  Description of Artificial Sequence: Synthetic peptide
  Seed: RNFWRGENGRR
RIFWRGENGRS

SEQ ID NO: 5120 - protein, 11 aa, Artificial Sequence
  Description of Artificial Sequence: Synthetic peptide
  Seed: RNFWRGENGRR
RIFWRGENGRT

SEQ ID NO: 5121 - protein, 11 aa, Artificial Sequence
  Description of Artificial Sequence: Synthetic peptide
  Seed: RNFWRGENGRR
RIFWRGENGRW

SEQ ID NO: 5122 - protein, 11 aa, Artificial Sequence
  Description of Artificial Sequence: Synthetic peptide
  Seed: RNFWRGENGRR
RAFWRGENGRF

SEQ ID NO: 5123 - protein, 11 aa, Artificial Sequence
  Description of Artificial Sequence: Synthetic peptide
  Seed: RNFWRGENGRR
RAFWRGENGRM

SEQ ID NO: 5124 - protein, 11 aa, Artificial Sequence
  Description of Artificial Sequence: Synthetic peptide
  Seed: RNFWRGENGRR
RAFWRGENGRK

SEQ ID NO: 5125 - protein, 9 aa, Artificial Sequence
  Description of Artificial Sequence: Synthetic peptide
  Seed: RMVGGIGRF
RMVGGIGRH

SEQ ID NO: 5126 - protein, 10 aa, Artificial Sequence
  Description of Artificial Sequence: Synthetic peptide
  Seed: RNFWRGENGR
RQFWRGENGR

SEQ ID NO: 5127 - protein, 9 aa, Artificial Sequence
  Description of Artificial Sequence: Synthetic peptide
  Seed: RMVGGIGRF
RKVGGIGRY

SEQ ID NO: 5128 - protein, 10 aa, Artificial Sequence
  Description of Artificial Sequence: Synthetic peptide
  Seed: RNFWRGENGR
RQFWRGENGK

SEQ ID NO: 5129 - protein, 10 aa, Artificial Sequence
  Description of Artificial Sequence: Synthetic peptide
  Seed: RNFWRGENGR
REFWRGENGR

SEQ ID NO: 5130 - protein, 10 aa, Artificial Sequence
  Description of Artificial Sequence: Synthetic peptide
  Seed: RNFWRGENGR
REFWRGENGK

SEQ ID NO: 5131 - protein, 10 aa, Artificial Sequence
  Description of Artificial Sequence: Synthetic peptide
  Seed: RNFWRGENGR
RGFWRGENGR

SEQ ID NO: 5132 - protein, 10 aa, Artificial Sequence
  Description of Artificial Sequence: Synthetic peptide
  Seed: RNFWRGENGR
RGFWRGENGK

SEQ ID NO: 5133 - protein, 10 aa, Artificial Sequence
  Description of Artificial Sequence: Synthetic peptide
  Seed: RNFWRGENGR
RHFWRGENGR

SEQ ID NO: 5134 - protein, 10 aa, Artificial Sequence
  Description of Artificial Sequence: Synthetic peptide
  Seed: RNFWRGENGR
RHFWRGENGK

SEQ ID NO: 5135 - protein, 10 aa, Artificial Sequence
  Description of Artificial Sequence: Synthetic peptide
  Seed: RNFWRGENGR
RIFWRGENGR

SEQ ID NO: 5136 - protein, 10 aa, Artificial Sequence
  Description of Artificial Sequence: Synthetic peptide
  Seed: RNFWRGENGR
RIFWRGENGK

SEQ ID NO: 5137 - protein, 10 aa, Artificial Sequence
  Description of Artificial Sequence: Synthetic peptide
  Seed: RNFWRGENGR
RLFWRGENGR

SEQ ID NO: 5138 - protein, 10 aa, Artificial Sequence
  Description of Artificial Sequence: Synthetic peptide
  Seed: RNFWRGENGR
RLFWRGENGK

SEQ ID NO: 5139 - protein, 10 aa, Artificial Sequence
  Description of Artificial Sequence: Synthetic peptide
  Seed: RNFWRGENGR
RKFWRGENGR

SEQ ID NO: 5140 - protein, 10 aa, Artificial Sequence
  Description of Artificial Sequence: Synthetic peptide
  Seed: RNFWRGENGR
RKFWRGENGK

SEQ ID NO: 5141 - protein, 9 aa, Artificial Sequence
  Description of Artificial Sequence: Synthetic peptide
  Seed: RMVGGIGRF
RKVGGIGRF

SEQ ID NO: 5142 - protein, 10 aa, Artificial Sequence
  Description of Artificial Sequence: Synthetic peptide
  Seed: RNFWRGENGR
RMFWRGENGR

SEQ ID NO: 5143 - protein, 10 aa, Artificial Sequence
  Description of Artificial Sequence: Synthetic peptide
  Seed: RNFWRGENGR
RCFWRGENGK

SEQ ID NO: 5144 - protein, 10 aa, Artificial Sequence
  Description of Artificial Sequence: Synthetic peptide
  Seed: RNFWRGENGR
RCFWRGENGR

SEQ ID NO: 5145 - protein, 10 aa, Artificial Sequence
  Description of Artificial Sequence: Synthetic peptide
  Seed: RNFWRGENGR
RMFWRGENGK

SEQ ID NO: 5146 - protein, 10 aa, Artificial Sequence
  Description of Artificial Sequence: Synthetic peptide
  Seed: RNFWRGENGR
RDFWRGENGK

SEQ ID NO: 5147 - protein, 11 aa, Artificial Sequence
  Description of Artificial Sequence: Synthetic peptide
  Seed: RMVLSAFDERR
RYVLSAFDERK

SEQ ID NO: 5148 - protein, 11 aa, Artificial Sequence
  Description of Artificial Sequence: Synthetic peptide
  Seed: RMVLSAFDERR
RYVLSAFDERM

SEQ ID NO: 5149 - protein, 11 aa, Artificial Sequence
  Description of Artificial Sequence: Synthetic peptide
  Seed: RMVLSAFDERR
RYVLSAFDERF

SEQ ID NO: 5150 - protein, 11 aa, Artificial Sequence
  Description of Artificial Sequence: Synthetic peptide
  Seed: RMVLSAFDERR
RYVLSAFDERP

SEQ ID NO: 5151 - protein, 11 aa, Artificial Sequence
  Description of Artificial Sequence: Synthetic peptide
  Seed: RMVLSAFDERR
RYVLSAFDERS

SEQ ID NO: 5152 - protein, 11 aa, Artificial Sequence
  Description of Artificial Sequence: Synthetic peptide
  Seed: RMVLSAFDERR
RYVLSAFDERT

SEQ ID NO: 5153 - protein, 11 aa, Artificial Sequence
  Description of Artificial Sequence: Synthetic peptide
  Seed: RMVLSAFDERR
RYVLSAFDERW

SEQ ID NO: 5154 - protein, 11 aa, Artificial Sequence
  Description of Artificial Sequence: Synthetic peptide
  Seed: RMVLSAFDERR
RYVLSAFDERY

SEQ ID NO: 5155 - protein, 11 aa, Artificial Sequence
  Description of Artificial Sequence: Synthetic peptide
  Seed: RMVLSAFDERR
RYVLSAFDERV

SEQ ID NO: 5156 - protein, 11 aa, Artificial Sequence
  Description of Artificial Sequence: Synthetic peptide
  Seed: RMVLSAFDERR
RVVLSAFDERR

SEQ ID NO: 5157 - protein, 11 aa, Artificial Sequence
  Description of Artificial Sequence: Synthetic peptide
  Seed: RMVLSAFDERR
RVVLSAFDERK

SEQ ID NO: 5158 - protein, 10 aa, Artificial Sequence
  Description of Artificial Sequence: Synthetic peptide
  Seed: RNFWRGENGR
RAFWRGENGR

SEQ ID NO: 5159 - protein, 10 aa, Artificial Sequence
  Description of Artificial Sequence: Synthetic peptide
  Seed: RNFWRGENGR
RAFWRGENGK

SEQ ID NO: 5160 - protein, 10 aa, Artificial Sequence
  Description of Artificial Sequence: Synthetic peptide
  Seed: RNFWRGENGR
RRFWRGENGR

SEQ ID NO: 5161 - protein, 10 aa, Artificial Sequence
  Description of Artificial Sequence: Synthetic peptide
  Seed: RNFWRGENGR
RRFWRGENGK

SEQ ID NO: 5162 - protein, 10 aa, Artificial Sequence
  Description of Artificial Sequence: Synthetic peptide
  Seed: RNFWRGENGR
RNFWRGENGK

SEQ ID NO: 5163 - protein, 10 aa, Artificial Sequence
  Description of Artificial Sequence: Synthetic peptide
  Seed: RNFWRGENGR
RDFWRGENGR

SEQ ID NO: 5164 - protein, 10 aa, Artificial Sequence
  Description of Artificial Sequence: Synthetic peptide
  Seed: RNFWRGENGR
RMFWRGENGH

SEQ ID NO: 5165 - protein, 9 aa, Artificial Sequence
  Description of Artificial Sequence: Synthetic peptide
  Seed: RMVGGIGRF
RKVGGIGRM

SEQ ID NO: 5166 - protein, 11 aa, Artificial Sequence
  Description of Artificial Sequence: Synthetic peptide
  Seed: RNFWRGENGRR
RAFWRGENGRL

SEQ ID NO: 5167 - protein, 10 aa, Artificial Sequence
  Description of Artificial Sequence: Synthetic peptide
  Seed: RNFWRGENGR
RYFWRGENGK

SEQ ID NO: 5168 - protein, 10 aa, Artificial Sequence
  Description of Artificial Sequence: Synthetic peptide
  Seed: RNFWRGENGR
RVFWRGENGK

SEQ ID NO: 5169 - protein, 9 aa, Artificial Sequence
  Description of Artificial Sequence: Synthetic peptide
  Seed: RMVGGIGRF
RLVGGIGRF

SEQ ID NO: 5170 - protein, 11 aa, Artificial Sequence
  Description of Artificial Sequence: Synthetic peptide
  Seed: RNFWRGENGRR
RAFWRGENGRA

SEQ ID NO: 5171 - protein, 11 aa, Artificial Sequence
  Description of Artificial Sequence: Synthetic peptide
  Seed: RNFWRGENGRR
RAFWRGENGRR

SEQ ID NO: 5172 - protein, 9 aa, Artificial Sequence
  Description of Artificial Sequence: Synthetic peptide
  Seed: RMVGGIGRF
RLVGGIGRM

SEQ ID NO: 5173 - protein, 9 aa, Artificial Sequence
  Description of Artificial Sequence: Synthetic peptide
  Seed: RMVGGIGRF
RIVGGIGRY

SEQ ID NO: 5174 - protein, 11 aa, Artificial Sequence
  Description of Artificial Sequence: Synthetic peptide
  Seed: RNFWRGENGRR
RAFWRGENGRN

SEQ ID NO: 5175 - protein, 11 aa, Artificial Sequence
  Description of Artificial Sequence: Synthetic peptide
  Seed: RNFWRGENGRR
RAFWRGENGRD

SEQ ID NO: 5176 - protein, 9 aa, Artificial Sequence
  Description of Artificial Sequence: Synthetic peptide
  Seed: RMVGGIGRF
RIVGGIGRW

SEQ ID NO: 5177 - protein, 11 aa, Artificial Sequence
  Description of Artificial Sequence: Synthetic peptide
  Seed: RNFWRGENGRR
RAFWRGENGRC

SEQ ID NO: 5178 - protein, 9 aa, Artificial Sequence
  Description of Artificial Sequence: Synthetic peptide
  Seed: RMVGGIGRF
RIVGGIGRF

SEQ ID NO: 5179 - protein, 11 aa, Artificial Sequence
  Description of Artificial Sequence: Synthetic peptide
  Seed: RNFWRGENGRR
RAFWRGENGRQ

SEQ ID NO: 5180 - protein, 11 aa, Artificial Sequence
  Description of Artificial Sequence: Synthetic peptide
  Seed: RNFWRGENGRR
RAFWRGENGRE

SEQ ID NO: 5181 - protein, 11 aa, Artificial Sequence
  Description of Artificial Sequence: Synthetic peptide
  Seed: RNFWRGENGRR
RAFWRGENGRG

SEQ ID NO: 5182 - protein, 9 aa, Artificial Sequence
  Description of Artificial Sequence: Synthetic peptide
  Seed: RMVGGIGRF
RIVGGIGRM

SEQ ID NO: 5183 - protein, 11 aa, Artificial Sequence
  Description of Artificial Sequence: Synthetic peptide
  Seed: RNFWRGENGRR
RAFWRGENGRH

SEQ ID NO: 5184 - protein, 11 aa, Artificial Sequence
  Description of Artificial Sequence: Synthetic peptide
  Seed: RNFWRGENGRR
RAFWRGENGRI

SEQ ID NO: 5185 - protein, 10 aa, Artificial Sequence
  Description of Artificial Sequence: Synthetic peptide
  Seed: RNFWRGENGR
RVFWRGENGR

SEQ ID NO: 5186 - protein, 10 aa, Artificial Sequence
  Description of Artificial Sequence: Synthetic peptide
  Seed: RNFWRGENGR
RYFWRGENGH

SEQ ID NO: 5187 - protein, 10 aa, Artificial Sequence
  Description of Artificial Sequence: Synthetic peptide
  Seed: RNFWRGENGR
RMFWRGENGY

SEQ ID NO: 5188 - protein, 10 aa, Artificial Sequence
  Description of Artificial Sequence: Synthetic peptide
  Seed: RNFWRGENGR
RYFWRGENGR

SEQ ID NO: 5189 - protein, 10 aa, Artificial Sequence
  Description of Artificial Sequence: Synthetic peptide
  Seed: RNFWRGENGR
RFFWRGENGR

SEQ ID NO: 5190 - protein, 10 aa, Artificial Sequence
  Description of Artificial Sequence: Synthetic peptide
  Seed: RNFWRGENGR
RFFWRGENGH

SEQ ID NO: 5191 - protein, 10 aa, Artificial Sequence
  Description of Artificial Sequence: Synthetic peptide
  Seed: RNFWRGENGR
RFFWRGENGK

SEQ ID NO: 5192 - protein, 9 aa, Artificial Sequence
  Description of Artificial Sequence: Synthetic peptide
  Seed: RMVGGIGRF
RKVGGIGRL

SEQ ID NO: 5193 - protein, 10 aa, Artificial Sequence
  Description of Artificial Sequence: Synthetic peptide
  Seed: RNFWRGENGR
RPFWRGENGR

SEQ ID NO: 5194 - protein, 10 aa, Artificial Sequence
  Description of Artificial Sequence: Synthetic peptide
  Seed: RNFWRGENGR
RPFWRGENGK

SEQ ID NO: 5195 - protein, 10 aa, Artificial Sequence
  Description of Artificial Sequence: Synthetic peptide
  Seed: RNFWRGENGR
RSFWRGENGR

SEQ ID NO: 5196 - protein, 9 aa, Artificial Sequence
  Description of Artificial Sequence: Synthetic peptide
  Seed: RMVGGIGRF
RLVGGIGRY

SEQ ID NO: 5197 - protein, 10 aa, Artificial Sequence
  Description of Artificial Sequence: Synthetic peptide
  Seed: RNFWRGENGR
RSFWRGENGK

SEQ ID NO: 5198 - protein, 10 aa, Artificial Sequence
  Description of Artificial Sequence: Synthetic peptide
  Seed: RNFWRGENGR
RTFWRGENGR

SEQ ID NO: 5199 - protein, 10 aa, Artificial Sequence
  Description of Artificial Sequence: Synthetic peptide
  Seed: RNFWRGENGR
RTFWRGENGH

SEQ ID NO: 5200 - protein, 10 aa, Artificial Sequence
  Description of Artificial Sequence: Synthetic peptide
  Seed: RNFWRGENGR
RTFWRGENGK

SEQ ID NO: 5201 - protein, 10 aa, Artificial Sequence
  Description of Artificial Sequence: Synthetic peptide
  Seed: RNFWRGENGR
RWFWRGENGR

SEQ ID NO: 5202 - protein, 10 aa, Artificial Sequence
  Description of Artificial Sequence: Synthetic peptide
  Seed: RNFWRGENGR
RWFWRGENGH

SEQ ID NO: 5203 - protein, 10 aa, Artificial Sequence
  Description of Artificial Sequence: Synthetic peptide
  Seed: RNFWRGENGR
RWFWRGENGK

SEQ ID NO: 5204 - protein, 10 aa, Artificial Sequence
  Description of Artificial Sequence: Synthetic peptide
  Seed: RNFWRGENGR
RWFWRGENGY

SEQ ID NO: 5205 - protein, 9 aa, Artificial Sequence
  Description of Artificial Sequence: Synthetic peptide
  Seed: RMVGGIGRF
RLVGGIGRW

SEQ ID NO: 5206 - protein, 11 aa, Artificial Sequence
  Description of Artificial Sequence: Synthetic peptide
  Seed: RNFWRGENGRR
RLFWRGENGRW

SEQ ID NO: 5207 - protein, 9 aa, Artificial Sequence
  Description of Artificial Sequence: Synthetic peptide
  Seed: RMVGGIGRF
RQVGGIGRM

SEQ ID NO: 5208 - protein, 11 aa, Artificial Sequence
  Description of Artificial Sequence: Synthetic peptide
  Seed: RRDGKWMRELI
RRDGKWMRELL

SEQ ID NO: 5209 - protein, 11 aa, Artificial Sequence
  Description of Artificial Sequence: Synthetic peptide
  Seed: RNFWRGENGRR
RWFWRGENGRP

SEQ ID NO: 5210 - protein, 11 aa, Artificial Sequence
  Description of Artificial Sequence: Synthetic peptide
  Seed: RNFWRGENGRR
RWFWRGENGRG

SEQ ID NO: 5211 - protein, 11 aa, Artificial Sequence
  Description of Artificial Sequence: Synthetic peptide
  Seed: RNFWRGENGRR
RWFWRGENGRH

SEQ ID NO: 5212 - protein, 11 aa, Artificial Sequence
  Description of Artificial Sequence: Synthetic peptide
  Seed: RNFWRGENGRR
RWFWRGENGRI

SEQ ID NO: 5213 - protein, 11 aa, Artificial Sequence
  Description of Artificial Sequence: Synthetic peptide
  Seed: RNFWRGENGRR
RWFWRGENGRL

SEQ ID NO: 5214 - protein, 9 aa, Artificial Sequence
  Description of Artificial Sequence: Synthetic peptide
  Seed: RMVGGIGRF
RAVGGIGRL

SEQ ID NO: 5215 - protein, 11 aa, Artificial Sequence
  Description of Artificial Sequence: Synthetic peptide
  Seed: RNFWRGENGRR
RWFWRGENGRK

SEQ ID NO: 5216 - protein, 11 aa, Artificial Sequence
  Description of Artificial Sequence: Synthetic peptide
  Seed: RNFWRGENGRR
RWFWRGENGRM

SEQ ID NO: 5217 - protein, 11 aa, Artificial Sequence
  Description of Artificial Sequence: Synthetic peptide
  Seed: RNFWRGENGRR
RWFWRGENGRF

SEQ ID NO: 5218 - protein, 11 aa, Artificial Sequence
  Description of Artificial Sequence: Synthetic peptide
  Seed: RNFWRGENGRR
RWFWRGENGRS

SEQ ID NO: 5219 - protein, 11 aa, Artificial Sequence
  Description of Artificial Sequence: Synthetic peptide
  Seed: RNFWRGENGRR
RLFWRGENGRV

SEQ ID NO: 5220 - protein, 11 aa, Artificial Sequence
  Description of Artificial Sequence: Synthetic peptide
  Seed: RNFWRGENGRR
RWFWRGENGRT

SEQ ID NO: 5221 - protein, 11 aa, Artificial Sequence
  Description of Artificial Sequence: Synthetic peptide
  Seed: RNFWRGENGRR
RWFWRGENGRW

SEQ ID NO: 5222 - protein, 9 aa, Artificial Sequence
  Description of Artificial Sequence: Synthetic peptide
  Seed: RMVGGIGRF
RAVGGIGRI

SEQ ID NO: 5223 - protein, 11 aa, Artificial Sequence
  Description of Artificial Sequence: Synthetic peptide
  Seed: RNFWRGENGRR
RWFWRGENGRY

SEQ ID NO: 5224 - protein, 11 aa, Artificial Sequence
  Description of Artificial Sequence: Synthetic peptide
  Seed: RNFWRGENGRR
RWFWRGENGRV

SEQ ID NO: 5225 - protein, 11 aa, Artificial Sequence
  Description of Artificial Sequence: Synthetic peptide
  Seed: RNFWRGENGRR
RYFWRGENGRA

SEQ ID NO: 5226 - protein, 11 aa, Artificial Sequence
  Description of Artificial Sequence: Synthetic peptide
  Seed: RNFWRGENGRR
RYFWRGENGRR

SEQ ID NO: 5227 - protein, 11 aa, Artificial Sequence
  Description of Artificial Sequence: Synthetic peptide
  Seed: RNFWRGENGRR
RYFWRGENGRN

SEQ ID NO: 5228 - protein, 11 aa, Artificial Sequence
  Description of Artificial Sequence: Synthetic peptide
  Seed: RNFWRGENGRR
RWFWRGENGRE

SEQ ID NO: 5229 - protein, 11 aa, Artificial Sequence
  Description of Artificial Sequence: Synthetic peptide
  Seed: RNFWRGENGRR
RWFWRGENGRQ

SEQ ID NO: 5230 - protein, 11 aa, Artificial Sequence
  Description of Artificial Sequence: Synthetic peptide
  Seed: RNFWRGENGRR
RWFWRGENGRC

SEQ ID NO: 5231 - protein, 11 aa, Artificial Sequence
  Description of Artificial Sequence: Synthetic peptide
  Seed: RNFWRGENGRR
RWFWRGENGRD

SEQ ID NO: 5232 - protein, 11 aa, Artificial Sequence
  Description of Artificial Sequence: Synthetic peptide
  Seed: RNFWRGENGRR
RTFWRGENGRH

SEQ ID NO: 5233 - protein, 11 aa, Artificial Sequence
  Description of Artificial Sequence: Synthetic peptide
  Seed: RNFWRGENGRR
RTFWRGENGRI

SEQ ID NO: 5234 - protein, 11 aa, Artificial Sequence
  Description of Artificial Sequence: Synthetic peptide
  Seed: RNFWRGENGRR
RTFWRGENGRL

SEQ ID NO: 5235 - protein, 11 aa, Artificial Sequence
  Description of Artificial Sequence: Synthetic peptide
  Seed: RNFWRGENGRR
RTFWRGENGRK

SEQ ID NO: 5236 - protein, 11 aa, Artificial Sequence
  Description of Artificial Sequence: Synthetic peptide
  Seed: RNFWRGENGRR
RTFWRGENGRM

SEQ ID NO: 5237 - protein, 11 aa, Artificial Sequence
  Description of Artificial Sequence: Synthetic peptide
  Seed: RNFWRGENGRR
RTFWRGENGRF

SEQ ID NO: 5238 - protein, 11 aa, Artificial Sequence
  Description of Artificial Sequence: Synthetic peptide
  Seed: RNFWRGENGRR
RTFWRGENGRP

SEQ ID NO: 5239 - protein, 11 aa, Artificial Sequence
  Description of Artificial Sequence: Synthetic peptide
  Seed: RNFWRGENGRR
RTFWRGENGRS

SEQ ID NO: 5240 - protein, 11 aa, Artificial Sequence
  Description of Artificial Sequence: Synthetic peptide
  Seed: RNFWRGENGRR
RTFWRGENGRT

SEQ ID NO: 5241 - protein, 11 aa, Artificial Sequence
  Description of Artificial Sequence: Synthetic peptide
  Seed: RNFWRGENGRR
RTFWRGENGRW

SEQ ID NO: 5242 - protein, 9 aa, Artificial Sequence
  Description of Artificial Sequence: Synthetic peptide
  Seed: RMVGGIGRF
RAVGGIGRF

SEQ ID NO: 5243 - protein, 9 aa, Artificial Sequence
  Description of Artificial Sequence: Synthetic peptide
  Seed: RMVGGIGRF
RAVGGIGRM

SEQ ID NO: 5244 - protein, 11 aa, Artificial Sequence
  Description of Artificial Sequence: Synthetic peptide
  Seed: RNFWRGENGRR
RTFWRGENGRY

SEQ ID NO: 5245 - protein, 11 aa, Artificial Sequence
  Description of Artificial Sequence: Synthetic peptide
  Seed: RNFWRGENGRR
RTFWRGENGRV

SEQ ID NO: 5246 - protein, 11 aa, Artificial Sequence
  Description of Artificial Sequence: Synthetic peptide
  Seed: RNFWRGENGRR
RWFWRGENGRA

SEQ ID NO: 5247 - protein, 11 aa, Artificial Sequence
  Description of Artificial Sequence: Synthetic peptide
  Seed: RNFWRGENGRR
RWFWRGENGRR

SEQ ID NO: 5248 - protein, 11 aa, Artificial Sequence
  Description of Artificial Sequence: Synthetic peptide
  Seed: RNFWRGENGRR
RWFWRGENGRN

SEQ ID NO: 5249 - protein, 11 aa, Artificial Sequence
  Description of Artificial Sequence: Synthetic peptide
  Seed: RNFWRGENGRR
RYFWRGENGRD

SEQ ID NO: 5250 - protein, 11 aa, Artificial Sequence
  Description of Artificial Sequence: Synthetic peptide
  Seed: RNFWRGENGRR
RYFWRGENGRC

SEQ ID NO: 5251 - protein, 11 aa, Artificial Sequence
  Description of Artificial Sequence: Synthetic peptide
  Seed: RNFWRGENGRR
RYFWRGENGRQ

SEQ ID NO: 5252 - protein, 11 aa, Artificial Sequence
  Description of Artificial Sequence: Synthetic peptide
  Seed: RNFWRGENGRR
RYFWRGENGRV

SEQ ID NO: 5253 - protein, 11 aa, Artificial Sequence
  Description of Artificial Sequence: Synthetic peptide
  Seed: RNFWRGENGRR
RVFWRGENGRR

SEQ ID NO: 5254 - protein, 11 aa, Artificial Sequence
  Description of Artificial Sequence: Synthetic peptide
  Seed: RNFWRGENGRR
RVFWRGENGRN

SEQ ID NO: 5255 - protein, 11 aa, Artificial Sequence
  Description of Artificial Sequence: Synthetic peptide
  Seed: RNFWRGENGRR
RVFWRGENGRD

SEQ ID NO: 5256 - protein, 11 aa, Artificial Sequence
  Description of Artificial Sequence: Synthetic peptide
  Seed: RNFWRGENGRR
RVFWRGENGRC

SEQ ID NO: 5257 - protein, 11 aa, Artificial Sequence
  Description of Artificial Sequence: Synthetic peptide
  Seed: RNFWRGENGRR
RVFWRGENGRQ

SEQ ID NO: 5258 - protein, 11 aa, Artificial Sequence
  Description of Artificial Sequence: Synthetic peptide
  Seed: RNFWRGENGRR
RVFWRGENGRE

SEQ ID NO: 5259 - protein, 11 aa, Artificial Sequence
  Description of Artificial Sequence: Synthetic peptide
  Seed: RNFWRGENGRR
RVFWRGENGRG

SEQ ID NO: 5260 - protein, 11 aa, Artificial Sequence
  Description of Artificial Sequence: Synthetic peptide
  Seed: RNFWRGENGRR
RVFWRGENGRH

SEQ ID NO: 5261 - protein, 11 aa, Artificial Sequence
  Description of Artificial Sequence: Synthetic peptide
  Seed: RMMESARPEDV
RMMESARPEDM

SEQ ID NO: 5262 - protein, 11 aa, Artificial Sequence
  Description of Artificial Sequence: Synthetic peptide
  Seed: RNFWRGENGRR
RVFWRGENGRI

SEQ ID NO: 5263 - protein, 11 aa, Artificial Sequence
  Description of Artificial Sequence: Synthetic peptide
  Seed: RNFWRGENGRR
RVFWRGENGRL

SEQ ID NO: 5264 - protein, 11 aa, Artificial Sequence
  Description of Artificial Sequence: Synthetic peptide
  Seed: RNFWRGENGRR
RVFWRGENGRK

SEQ ID NO: 5265 - protein, 11 aa, Artificial Sequence
  Description of Artificial Sequence: Synthetic peptide
  Seed: RNFWRGENGRR
RVFWRGENGRM

SEQ ID NO: 5266 - protein, 11 aa, Artificial Sequence
  Description of Artificial Sequence: Synthetic peptide
  Seed: RNFWRGENGRR
RVFWRGENGRF

SEQ ID NO: 5267 - protein, 11 aa, Artificial Sequence
  Description of Artificial Sequence: Synthetic peptide
  Seed: RMMESARPEDV
RMMESARPEDI

SEQ ID NO: 5268 - protein, 11 aa, Artificial Sequence
  Description of Artificial Sequence: Synthetic peptide
  Seed: RNFWRGENGRR
RVFWRGENGRP

SEQ ID NO: 5269 - protein, 11 aa, Artificial Sequence
  Description of Artificial Sequence: Synthetic peptide
  Seed: RNFWRGENGRR
RVFWRGENGRA

SEQ ID NO: 5270 - protein, 11 aa, Artificial Sequence
  Description of Artificial Sequence: Synthetic peptide
  Seed: RMMESARPEDV
RVMESARPEDV

SEQ ID NO: 5271 - protein, 11 aa, Artificial Sequence
  Description of Artificial Sequence: Synthetic peptide
  Seed: RNFWRGENGRR
RYFWRGENGRE

SEQ ID NO: 5272 - protein, 8 aa, Artificial Sequence
  Description of Artificial Sequence: Synthetic peptide
  Seed: RMVGGIGR
RLVGGIGR

SEQ ID NO: 5273 - protein, 11 aa, Artificial Sequence
  Description of Artificial Sequence: Synthetic peptide
  Seed: RNFWRGENGRR
RYFWRGENGRG

SEQ ID NO: 5274 - protein, 8 aa, Artificial Sequence
  Description of Artificial Sequence: Synthetic peptide
  Seed: RMVGGIGR
RVVGGIGR

SEQ ID NO: 5275 - protein, 11 aa, Artificial Sequence
  Description of Artificial Sequence: Synthetic peptide
  Seed: RNFWRGENGRR
RYFWRGENGRH

SEQ ID NO: 5276 - protein, 11 aa, Artificial Sequence
  Description of Artificial Sequence: Synthetic peptide
  Seed: RNFWRGENGRR
RYFWRGENGRI

SEQ ID NO: 5277 - protein, 11 aa, Artificial Sequence
  Description of Artificial Sequence: Synthetic peptide
  Seed: RNFWRGENGRR
RYFWRGENGRL

SEQ ID NO: 5278 - protein, 11 aa, Artificial Sequence
  Description of Artificial Sequence: Synthetic peptide
  Seed: RNFWRGENGRR
RYFWRGENGRK

SEQ ID NO: 5279 - protein, 11 aa, Artificial Sequence
  Description of Artificial Sequence: Synthetic peptide
  Seed: RNFWRGENGRR
RYFWRGENGRM

SEQ ID NO: 5280 - protein, 8 aa, Artificial Sequence
  Description of Artificial Sequence: Synthetic peptide
  Seed: RMVGGIGR
RYVGGIGR

SEQ ID NO: 5281 - protein, 8 aa, Artificial Sequence
  Description of Artificial Sequence: Synthetic peptide
  Seed: RMVGGIGR
RWVGGIGR

SEQ ID NO: 5282 - protein, 8 aa, Artificial Sequence
  Description of Artificial Sequence: Synthetic peptide
  Seed: RMVGGIGR
RTVGGIGR

SEQ ID NO: 5283 - protein, 11 aa, Artificial Sequence
  Description of Artificial Sequence: Synthetic peptide
  Seed: RNFWRGENGRR
RYFWRGENGRF

SEQ ID NO: 5284 - protein, 11 aa, Artificial Sequence
  Description of Artificial Sequence: Synthetic peptide
  Seed: RNFWRGENGRR
RYFWRGENGRP

SEQ ID NO: 5285 - protein, 11 aa, Artificial Sequence
  Description of Artificial Sequence: Synthetic peptide
  Seed: RNFWRGENGRR
RYFWRGENGRS

SEQ ID NO: 5286 - protein, 8 aa, Artificial Sequence
  Description of Artificial Sequence: Synthetic peptide
  Seed: RMVGGIGR
RFVGGIGR

SEQ ID NO: 5287 - protein, 11 aa, Artificial Sequence
  Description of Artificial Sequence: Synthetic peptide
  Seed: RNFWRGENGRR
RYFWRGENGRT

SEQ ID NO: 5288 - protein, 11 aa, Artificial Sequence
  Description of Artificial Sequence: Synthetic peptide
  Seed: RNFWRGENGRR
RYFWRGENGRW

SEQ ID NO: 5289 - protein, 11 aa, Artificial Sequence
  Description of Artificial Sequence: Synthetic peptide
  Seed: RNFWRGENGRR
RYFWRGENGRY

SEQ ID NO: 5290 - protein, 11 aa, Artificial Sequence
  Description of Artificial Sequence: Synthetic peptide
  Seed: RNFWRGENGRR
RTFWRGENGRG

SEQ ID NO: 5291 - protein, 11 aa, Artificial Sequence
  Description of Artificial Sequence: Synthetic peptide
  Seed: RNFWRGENGRR
RTFWRGENGRE

SEQ ID NO: 5292 - protein, 11 aa, Artificial Sequence
  Description of Artificial Sequence: Synthetic peptide
  Seed: RNFWRGENGRR
RTFWRGENGRQ

SEQ ID NO: 5293 - protein, 11 aa, Artificial Sequence
  Description of Artificial Sequence: Synthetic peptide
  Seed: RNFWRGENGRR
RMFWRGENGRS

SEQ ID NO: 5294 - protein, 11 aa, Artificial Sequence
  Description of Artificial Sequence: Synthetic peptide
  Seed: RNFWRGENGRR
RMFWRGENGRW

SEQ ID NO: 5295 - protein, 11 aa, Artificial Sequence
  Description of Artificial Sequence: Synthetic peptide
  Seed: RNFWRGENGRR
RMFWRGENGRY

SEQ ID NO: 5296 - protein, 11 aa, Artificial Sequence
  Description of Artificial Sequence: Synthetic peptide
  Seed: RNFWRGENGRR
RMFWRGENGRV

SEQ ID NO: 5297 - protein, 11 aa, Artificial Sequence
  Description of Artificial Sequence: Synthetic peptide
  Seed: RNFWRGENGRR
RFFWRGENGRA

SEQ ID NO: 5298 - protein, 11 aa, Artificial Sequence
  Description of Artificial Sequence: Synthetic peptide
  Seed: RNFWRGENGRR
RFFWRGENGRR

SEQ ID NO: 5299 - protein, 11 aa, Artificial Sequence
  Description of Artificial Sequence: Synthetic peptide
  Seed: RNFWRGENGRR
RFFWRGENGRN

SEQ ID NO: 5300 - protein, 11 aa, Artificial Sequence
  Description of Artificial Sequence: Synthetic peptide
  Seed: RNFWRGENGRR
RFFWRGENGRD

SEQ ID NO: 5301 - protein, 11 aa, Artificial Sequence
  Description of Artificial Sequence: Synthetic peptide
  Seed: RNFWRGENGRR
RFFWRGENGRC

SEQ ID NO: 5302 - protein, 11 aa, Artificial Sequence
  Description of Artificial Sequence: Synthetic peptide
  Seed: RNFWRGENGRR
RFFWRGENGRQ

SEQ ID NO: 5303 - protein, 11 aa, Artificial Sequence
  Description of Artificial Sequence: Synthetic peptide
  Seed: RNFWRGENGRR
RFFWRGENGRE

SEQ ID NO: 5304 - protein, 9 aa, Artificial Sequence
  Description of Artificial Sequence: Synthetic peptide
  Seed: RMVGGIGRF
RQVGGIGRA

SEQ ID NO: 5305 - protein, 11 aa, Artificial Sequence
  Description of Artificial Sequence: Synthetic peptide
  Seed: RNFWRGENGRR
RFFWRGENGRG

SEQ ID NO: 5306 - protein, 9 aa, Artificial Sequence
  Description of Artificial Sequence: Synthetic peptide
  Seed: RMVGGIGRF
RCVGGIGRY

SEQ ID NO: 5307 - protein, 11 aa, Artificial Sequence
  Description of Artificial Sequence: Synthetic peptide
  Seed: RNFWRGENGRR
RFFWRGENGRH

SEQ ID NO: 5308 - protein, 11 aa, Artificial Sequence
  Description of Artificial Sequence: Synthetic peptide
  Seed: RNFWRGENGRR
RFFWRGENGRI

SEQ ID NO: 5309 - protein, 11 aa, Artificial Sequence
  Description of Artificial Sequence: Synthetic peptide
  Seed: RNFWRGENGRR
RFFWRGENGRL

SEQ ID NO: 5310 - protein, 11 aa, Artificial Sequence
  Description of Artificial Sequence: Synthetic peptide
  Seed: RNFWRGENGRR
RFFWRGENGRK

SEQ ID NO: 5311 - protein, 11 aa, Artificial Sequence
  Description of Artificial Sequence: Synthetic peptide
  Seed: RNFWRGENGRR
RMFWRGENGRT

SEQ ID NO: 5312 - protein, 11 aa, Artificial Sequence
  Description of Artificial Sequence: Synthetic peptide
  Seed: RNFWRGENGRR
RMFWRGENGRP

SEQ ID NO: 5313 - protein, 11 aa, Artificial Sequence
  Description of Artificial Sequence: Synthetic peptide
  Seed: RNFWRGENGRR
RFFWRGENGRF

SEQ ID NO: 5314 - protein, 11 aa, Artificial Sequence
  Description of Artificial Sequence: Synthetic peptide
  Seed: RNFWRGENGRR
RMFWRGENGRF

SEQ ID NO: 5315 - protein, 11 aa, Artificial Sequence
  Description of Artificial Sequence: Synthetic peptide
  Seed: RNFWRGENGRR
RKFWRGENGRR

SEQ ID NO: 5316 - protein, 11 aa, Artificial Sequence
  Description of Artificial Sequence: Synthetic peptide
  Seed: RNFWRGENGRR
RMFWRGENGRA

SEQ ID NO: 5317 - protein, 11 aa, Artificial Sequence
  Description of Artificial Sequence: Synthetic peptide
  Seed: RNFWRGENGRR
RMFWRGENGRR

SEQ ID NO: 5318 - protein, 11 aa, Artificial Sequence
  Description of Artificial Sequence: Synthetic peptide
  Seed: RNFWRGENGRR
RMFWRGENGRN

SEQ ID NO: 5319 - protein, 9 aa, Artificial Sequence
  Description of Artificial Sequence: Synthetic peptide
  Seed: RMVGGIGRF
RQVGGIGRL

SEQ ID NO: 5320 - protein, 11 aa, Artificial Sequence
  Description of Artificial Sequence: Synthetic peptide
  Seed: RNFWRGENGRR
RMFWRGENGRD

SEQ ID NO: 5321 - protein, 11 aa, Artificial Sequence
  Description of Artificial Sequence: Synthetic peptide
  Seed: RNFWRGENGRR
RMFWRGENGRC

SEQ ID NO: 5322 - protein, 11 aa, Artificial Sequence
  Description of Artificial Sequence: Synthetic peptide
  Seed: RNFWRGENGRR
RMFWRGENGRQ

SEQ ID NO: 5323 - protein, 11 aa, Artificial Sequence
  Description of Artificial Sequence: Synthetic peptide
  Seed: RNFWRGENGRR
RMFWRGENGRE

SEQ ID NO: 5324 - protein, 11 aa, Artificial Sequence
  Description of Artificial Sequence: Synthetic peptide
  Seed: RNFWRGENGRR
RMFWRGENGRG

SEQ ID NO: 5325 - protein, 11 aa, Artificial Sequence
  Description of Artificial Sequence: Synthetic peptide
  Seed: RNFWRGENGRR
RMFWRGENGRH

SEQ ID NO: 5326 - protein, 11 aa, Artificial Sequence
  Description of Artificial Sequence: Synthetic peptide
  Seed: RNFWRGENGRR
RMFWRGENGRI

SEQ ID NO: 5327 - protein, 9 aa, Artificial Sequence
  Description of Artificial Sequence: Synthetic peptide
  Seed: RMVGGIGRF
RQVGGIGRI

SEQ ID NO: 5328 - protein, 11 aa, Artificial Sequence
  Description of Artificial Sequence: Synthetic peptide
  Seed: RNFWRGENGRR
RMFWRGENGRL

SEQ ID NO: 5329 - protein, 11 aa, Artificial Sequence
  Description of Artificial Sequence: Synthetic peptide
  Seed: RNFWRGENGRR
RMFWRGENGRK

SEQ ID NO: 5330 - protein, 9 aa, Artificial Sequence
  Description of Artificial Sequence: Synthetic peptide
  Seed: RMVGGIGRF
RQVGGIGRH

SEQ ID NO: 5331 - protein, 11 aa, Artificial Sequence
  Description of Artificial Sequence: Synthetic peptide
  Seed: RNFWRGENGRR
RMFWRGENGRM

SEQ ID NO: 5332 - protein, 11 aa, Artificial Sequence
  Description of Artificial Sequence: Synthetic peptide
  Seed: RNFWRGENGRR
RFFWRGENGRM

SEQ ID NO: 5333 - protein, 11 aa, Artificial Sequence
  Description of Artificial Sequence: Synthetic peptide
  Seed: RNFWRGENGRR
RFFWRGENGRP

SEQ ID NO: 5334 - protein, 11 aa, Artificial Sequence
  Description of Artificial Sequence: Synthetic peptide
  Seed: RNFWRGENGRR
RTFWRGENGRC

SEQ ID NO: 5335 - protein, 11 aa, Artificial Sequence
  Description of Artificial Sequence: Synthetic peptide
  Seed: RNFWRGENGRR
RSFWRGENGRP

SEQ ID NO: 5336 - protein, 9 aa, Artificial Sequence
  Description of Artificial Sequence: Synthetic peptide
  Seed: RMVGGIGRF
RCVGGIGRF

SEQ ID NO: 5337 - protein, 11 aa, Artificial Sequence
  Description of Artificial Sequence: Synthetic peptide
  Seed: RNFWRGENGRR
RSFWRGENGRT

SEQ ID NO: 5338 - protein, 11 aa, Artificial Sequence
  Description of Artificial Sequence: Synthetic peptide
  Seed: RNFWRGENGRR
RSFWRGENGRW

SEQ ID NO: 5339 - protein, 9 aa, Artificial Sequence
  Description of Artificial Sequence: Synthetic peptide
  Seed: RMVGGIGRF
RDVGGIGRY

SEQ ID NO: 5340 - protein, 11 aa, Artificial Sequence
  Description of Artificial Sequence: Synthetic peptide
  Seed: RNFWRGENGRR
RSFWRGENGRY

SEQ ID NO: 5341 - protein, 11 aa, Artificial Sequence
  Description of Artificial Sequence: Synthetic peptide
  Seed: RNFWRGENGRR
RSFWRGENGRV

SEQ ID NO: 5342 - protein, 9 aa, Artificial Sequence
  Description of Artificial Sequence: Synthetic peptide
  Seed: RMVGGIGRF
RNVGGIGRY

SEQ ID NO: 5343 - protein, 9 aa, Artificial Sequence
  Description of Artificial Sequence: Synthetic peptide
  Seed: RMVGGIGRF
RNVGGIGRF

SEQ ID NO: 5344 - protein, 11 aa, Artificial Sequence
  Description of Artificial Sequence: Synthetic peptide
  Seed: RNFWRGENGRR
RTFWRGENGRA

SEQ ID NO: 5345 - protein, 9 aa, Artificial Sequence
  Description of Artificial Sequence: Synthetic peptide
  Seed: RMVGGIGRF
RRVGGIGRY

SEQ ID NO: 5346 - protein, 9 aa, Artificial Sequence
  Description of Artificial Sequence: Synthetic peptide
  Seed: RMVGGIGRF
RRVGGIGRF

SEQ ID NO: 5347 - protein, 11 aa, Artificial Sequence
  Description of Artificial Sequence: Synthetic peptide
  Seed: RNFWRGENGRR
RTFWRGENGRR

SEQ ID NO: 5348 - protein, 9 aa, Artificial Sequence
  Description of Artificial Sequence: Synthetic peptide
  Seed: RMVGGIGRF
RRVGGIGRM

SEQ ID NO: 5349 - protein, 11 aa, Artificial Sequence
  Description of Artificial Sequence: Synthetic peptide
  Seed: RNFWRGENGRR
RTFWRGENGRN

SEQ ID NO: 5350 - protein, 11 aa, Artificial Sequence
  Description of Artificial Sequence: Synthetic peptide
  Seed: RNFWRGENGRR
RTFWRGENGRD

SEQ ID NO: 5351 - protein, 9 aa, Artificial Sequence
  Description of Artificial Sequence: Synthetic peptide
  Seed: RMVGGIGRF
RAVGGIGRY

SEQ ID NO: 5352 - protein, 9 aa, Artificial Sequence
  Description of Artificial Sequence: Synthetic peptide
  Seed: RMVGGIGRF
RAVGGIGRW

SEQ ID NO: 5353 - protein, 11 aa, Artificial Sequence
  Description of Artificial Sequence: Synthetic peptide
  Seed: RNFWRGENGRR
RSFWRGENGRS

SEQ ID NO: 5354 - protein, 11 aa, Artificial Sequence
  Description of Artificial Sequence: Synthetic peptide
  Seed: RNFWRGENGRR
RSFWRGENGRF

SEQ ID NO: 5355 - protein, 11 aa, Artificial Sequence
  Description of Artificial Sequence: Synthetic peptide
  Seed: RNFWRGENGRR
RFFWRGENGRS

SEQ ID NO: 5356 - protein, 11 aa, Artificial Sequence
  Description of Artificial Sequence: Synthetic peptide
  Seed: RNFWRGENGRR
RSFWRGENGRM

SEQ ID NO: 5357 - protein, 11 aa, Artificial Sequence
  Description of Artificial Sequence: Synthetic peptide
  Seed: RNFWRGENGRR
RFFWRGENGRT

SEQ ID NO: 5358 - protein, 11 aa, Artificial Sequence
  Description of Artificial Sequence: Synthetic peptide
  Seed: RNFWRGENGRR
RFFWRGENGRW

SEQ ID NO: 5359 - protein, 11 aa, Artificial Sequence
  Description of Artificial Sequence: Synthetic peptide
  Seed: RNFWRGENGRR
RFFWRGENGRY

SEQ ID NO: 5360 - protein, 9 aa, Artificial Sequence
  Description of Artificial Sequence: Synthetic peptide
  Seed: RMVGGIGRF
RCVGGIGRW

SEQ ID NO: 5361 - protein, 11 aa, Artificial Sequence
  Description of Artificial Sequence: Synthetic peptide
  Seed: RNFWRGENGRR
RFFWRGENGRV

SEQ ID NO: 5362 - protein, 11 aa, Artificial Sequence
  Description of Artificial Sequence: Synthetic peptide
  Seed: RNFWRGENGRR
RSFWRGENGRA

SEQ ID NO: 5363 - protein, 11 aa, Artificial Sequence
  Description of Artificial Sequence: Synthetic peptide
  Seed: RNFWRGENGRR
RSFWRGENGRR

SEQ ID NO: 5364 - protein, 11 aa, Artificial Sequence
  Description of Artificial Sequence: Synthetic peptide
  Seed: RNFWRGENGRR
RSFWRGENGRN

SEQ ID NO: 5365 - protein, 11 aa, Artificial Sequence
  Description of Artificial Sequence: Synthetic peptide
  Seed: RNFWRGENGRR
RSFWRGENGRD

SEQ ID NO: 5366 - protein, 11 aa, Artificial Sequence
  Description of Artificial Sequence: Synthetic peptide
  Seed: RNFWRGENGRR
RSFWRGENGRC

SEQ ID NO: 5367 - protein, 11 aa, Artificial Sequence
  Description of Artificial Sequence: Synthetic peptide
  Seed: RNFWRGENGRR
RSFWRGENGRQ

SEQ ID NO: 5368 - protein, 11 aa, Artificial Sequence
  Description of Artificial Sequence: Synthetic peptide
  Seed: RNFWRGENGRR
RSFWRGENGRE

SEQ ID NO: 5369 - protein, 11 aa, Artificial Sequence
  Description of Artificial Sequence: Synthetic peptide
  Seed: RNFWRGENGRR
RSFWRGENGRG

SEQ ID NO: 5370 - protein, 11 aa, Artificial Sequence
  Description of Artificial Sequence: Synthetic peptide
  Seed: RNFWRGENGRR
RSFWRGENGRH

SEQ ID NO: 5371 - protein, 11 aa, Artificial Sequence
  Description of Artificial Sequence: Synthetic peptide
  Seed: RNFWRGENGRR
RSFWRGENGRI

SEQ ID NO: 5372 - protein, 11 aa, Artificial Sequence
  Description of Artificial Sequence: Synthetic peptide
  Seed: RNFWRGENGRR
RSFWRGENGRL

SEQ ID NO: 5373 - protein, 11 aa, Artificial Sequence
  Description of Artificial Sequence: Synthetic peptide
  Seed: RNFWRGENGRR
RSFWRGENGRK

SEQ ID NO: 5374 - protein, 11 aa, Artificial Sequence
  Description of Artificial Sequence: Synthetic peptide
  Seed: RMVLSAFDERR
RYVLSAFDERL

SEQ ID NO: 5375 - protein, 9 aa, Artificial Sequence
  Description of Artificial Sequence: Synthetic peptide
  Seed: RMVGGIGRF
RMVGGIGRI

SEQ ID NO: 5376 - protein, 11 aa, Artificial Sequence
  Description of Artificial Sequence: Synthetic peptide
  Seed: RMVLSAFDERR
RYVLSAFDERI

SEQ ID NO: 5377 - protein, 11 aa, Artificial Sequence
  Description of Artificial Sequence: Synthetic peptide
  Seed: RMVGGIGRFYI
RAVGGIGRFYV

SEQ ID NO: 5378 - protein, 9 aa, Artificial Sequence
  Description of Artificial Sequence: Synthetic peptide
  Seed: RMVGGIGRF
RYVGGIGRY

SEQ ID NO: 5379 - protein, 9 aa, Artificial Sequence
  Description of Artificial Sequence: Synthetic peptide
  Seed: RMVGGIGRF
RYVGGIGRW

SEQ ID NO: 5380 - protein, 10 aa, Artificial Sequence
  Description of Artificial Sequence: Synthetic peptide
  Seed: RMVGGIGRFY
RVVGGIGRFF

SEQ ID NO: 5381 - protein, 10 aa, Artificial Sequence
  Description of Artificial Sequence: Synthetic peptide
  Seed: RMVGGIGRFY
RVVGGIGRFW

SEQ ID NO: 5382 - protein, 10 aa, Artificial Sequence
  Description of Artificial Sequence: Synthetic peptide
  Seed: RMVGGIGRFY
RVVGGIGRFY

SEQ ID NO: 5383 - protein, 11 aa, Artificial Sequence
  Description of Artificial Sequence: Synthetic peptide
  Seed: RMVGGIGRFYI
RAVGGIGRFYI

SEQ ID NO: 5384 - protein, 11 aa, Artificial Sequence
  Description of Artificial Sequence: Synthetic peptide
  Seed: RMVGGIGRFYI
RAVGGIGRFYL

SEQ ID NO: 5385 - protein, 11 aa, Artificial Sequence
  Description of Artificial Sequence: Synthetic peptide
  Seed: RMVGGIGRFYI
RAVGGIGRFYY

SEQ ID NO: 5386 - protein, 11 aa, Artificial Sequence
  Description of Artificial Sequence: Synthetic peptide
  Seed: RMVGGIGRFYI
RRVGGIGRFYY

SEQ ID NO: 5387 - protein, 9 aa, Artificial Sequence
  Description of Artificial Sequence: Synthetic peptide
  Seed: RMVGGIGRF
RMVGGIGRL

SEQ ID NO: 5388 - protein, 11 aa, Artificial Sequence
  Description of Artificial Sequence: Synthetic peptide
  Seed: RMVGGIGRFYI
RNVGGIGRFYY

SEQ ID NO: 5389 - protein, 9 aa, Artificial Sequence
  Description of Artificial Sequence: Synthetic peptide
  Seed: RMVGGIGRF
RYVGGIGRF

SEQ ID NO: 5390 - protein, 9 aa, Artificial Sequence
  Description of Artificial Sequence: Synthetic peptide
  Seed: RMVGGIGRF
RYVGGIGRM

SEQ ID NO: 5391 - protein, 11 aa, Artificial Sequence
  Description of Artificial Sequence: Synthetic peptide
  Seed: RMVGGIGRFYI
RCVGGIGRFYY

SEQ ID NO: 5392 - protein, 11 aa, Artificial Sequence
  Description of Artificial Sequence: Synthetic peptide
  Seed: RMVGGIGRFYI
RQVGGIGRFYA

SEQ ID NO: 5393 - protein, 11 aa, Artificial Sequence
  Description of Artificial Sequence: Synthetic peptide
  Seed: RMVGGIGRFYI
RQVGGIGRFYI

SEQ ID NO: 5394 - protein, 11 aa, Artificial Sequence
  Description of Artificial Sequence: Synthetic peptide
  Seed: RMVGGIGRFYI
RQVGGIGRFYL

SEQ ID NO: 5395 - protein, 11 aa, Artificial Sequence
  Description of Artificial Sequence: Synthetic peptide
  Seed: RMVGGIGRFYI
RQVGGIGRFYM

SEQ ID NO: 5396 - protein, 10 aa, Artificial Sequence
  Description of Artificial Sequence: Synthetic peptide
  Seed: RMVGGIGRFY
RVVGGIGRFM

SEQ ID NO: 5397 - protein, 10 aa, Artificial Sequence
  Description of Artificial Sequence: Synthetic peptide
  Seed: RMVGGIGRFY
RVVGGIGRFK

SEQ ID NO: 5398 - protein, 10 aa, Artificial Sequence
  Description of Artificial Sequence: Synthetic peptide
  Seed: RMVGGIGRFY
RYVGGIGRFY

SEQ ID NO: 5399 - protein, 10 aa, Artificial Sequence
  Description of Artificial Sequence: Synthetic peptide
  Seed: RMVGGIGRFY
RYVGGIGRFF

SEQ ID NO: 5400 - protein, 9 aa, Artificial Sequence
  Description of Artificial Sequence: Synthetic peptide
  Seed: RMVGGIGRF
RVVGGIGRL

SEQ ID NO: 5401 - protein, 10 aa, Artificial Sequence
  Description of Artificial Sequence: Synthetic peptide
  Seed: RMVGGIGRFY
RSVGGIGRFY

SEQ ID NO: 5402 - protein, 10 aa, Artificial Sequence
  Description of Artificial Sequence: Synthetic peptide
  Seed: RMVGGIGRFY
RSVGGIGRFV

SEQ ID NO: 5403 - protein, 10 aa, Artificial Sequence
  Description of Artificial Sequence: Synthetic peptide
  Seed: RMVGGIGRFY
RTVGGIGRFI

SEQ ID NO: 5404 - protein, 10 aa, Artificial Sequence
  Description of Artificial Sequence: Synthetic peptide
  Seed: RMVGGIGRFY
RTVGGIGRFL

SEQ ID NO: 5405 - protein, 10 aa, Artificial Sequence
  Description of Artificial Sequence: Synthetic peptide
  Seed: RMVGGIGRFY
RTVGGIGRFK

SEQ ID NO: 5406 - protein, 10 aa, Artificial Sequence
  Description of Artificial Sequence: Synthetic peptide
  Seed: RMVGGIGRFY
RTVGGIGRFM

SEQ ID NO: 5407 - protein, 10 aa, Artificial Sequence
  Description of Artificial Sequence: Synthetic peptide
  Seed: RMVGGIGRFY
RTVGGIGRFF

SEQ ID NO: 5408 - protein, 9 aa, Artificial Sequence
  Description of Artificial Sequence: Synthetic peptide
  Seed: RMVGGIGRF
RVVGGIGRI

SEQ ID NO: 5409 - protein, 10 aa, Artificial Sequence
  Description of Artificial Sequence: Synthetic peptide
  Seed: RMVGGIGRFY
RTVGGIGRFW

SEQ ID NO: 5410 - protein, 10 aa, Artificial Sequence
  Description of Artificial Sequence: Synthetic peptide
  Seed: RMVGGIGRFY
RTVGGIGRFY

SEQ ID NO: 5411 - protein, 10 aa, Artificial Sequence
  Description of Artificial Sequence: Synthetic peptide
  Seed: RMVGGIGRFY
RTVGGIGRFV

SEQ ID NO: 5412 - protein, 10 aa, Artificial Sequence
  Description of Artificial Sequence: Synthetic peptide
  Seed: RMVGGIGRFY
RWVGGIGRFK

SEQ ID NO: 5413 - protein, 10 aa, Artificial Sequence
  Description of Artificial Sequence: Synthetic peptide
  Seed: RMVGGIGRFY
RWVGGIGRFF

SEQ ID NO: 5414 - protein, 9 aa, Artificial Sequence
  Description of Artificial Sequence: Synthetic peptide
  Seed: RMVGGIGRF
RYVGGIGRV

SEQ ID NO: 5415 - protein, 10 aa, Artificial Sequence
  Description of Artificial Sequence: Synthetic peptide
  Seed: RMVGGIGRFY
RWVGGIGRFY

SEQ ID NO: 5416 - protein, 10 aa, Artificial Sequence
  Description of Artificial Sequence: Synthetic peptide
  Seed: RMVGGIGRFY
RYVGGIGRFK

SEQ ID NO: 5417 - protein, 11 aa, Artificial Sequence
  Description of Artificial Sequence: Synthetic peptide
  Seed: RMVGGIGRFYI
RQVGGIGRFYF

SEQ ID NO: 5418 - protein, 11 aa, Artificial Sequence
  Description of Artificial Sequence: Synthetic peptide
  Seed: RMVGGIGRFYI
RQVGGIGRFYT

SEQ ID NO: 5419 - protein, 11 aa, Artificial Sequence
  Description of Artificial Sequence: Synthetic peptide
  Seed: RMVGGIGRFYI
RQVGGIGRFYY

SEQ ID NO: 5420 - protein, 11 aa, Artificial Sequence
  Description of Artificial Sequence: Synthetic peptide
  Seed: RMVGGIGRFYI
RLVGGIGRFYV

SEQ ID NO: 5421 - protein, 11 aa, Artificial Sequence
  Description of Artificial Sequence: Synthetic peptide
  Seed: RMVGGIGRFYI
RMVGGIGRFYA

SEQ ID NO: 5422 - protein, 11 aa, Artificial Sequence
  Description of Artificial Sequence: Synthetic peptide
  Seed: RMVGGIGRFYI
RMVGGIGRFYR

SEQ ID NO: 5423 - protein, 11 aa, Artificial Sequence
  Description of Artificial Sequence: Synthetic peptide
  Seed: RMVGGIGRFYI
RMVGGIGRFYN

SEQ ID NO: 5424 - protein, 11 aa, Artificial Sequence
  Description of Artificial Sequence: Synthetic peptide
  Seed: RMVGGIGRFYI
RMVGGIGRFYD

SEQ ID NO: 5425 - protein, 11 aa, Artificial Sequence
  Description of Artificial Sequence: Synthetic peptide
  Seed: RMVGGIGRFYI
RMVGGIGRFYC

SEQ ID NO: 5426 - protein, 11 aa, Artificial Sequence
  Description of Artificial Sequence: Synthetic peptide
  Seed: RMVGGIGRFYI
RMVGGIGRFYQ

SEQ ID NO: 5427 - protein, 11 aa, Artificial Sequence
  Description of Artificial Sequence: Synthetic peptide
  Seed: RMVGGIGRFYI
RMVGGIGRFYE

SEQ ID NO: 5428 - protein, 11 aa, Artificial Sequence
  Description of Artificial Sequence: Synthetic peptide
  Seed: RMVGGIGRFYI
RMVGGIGRFYG

SEQ ID NO: 5429 - protein, 9 aa, Artificial Sequence
  Description of Artificial Sequence: Synthetic peptide
  Seed: RMVGGIGRF
RWVGGIGRF

SEQ ID NO: 5430 - protein, 11 aa, Artificial Sequence
  Description of Artificial Sequence: Synthetic peptide
  Seed: RMVGGIGRFYI
RMVGGIGRFYH

SEQ ID NO: 5431 - protein, 9 aa, Artificial Sequence
  Description of Artificial Sequence: Synthetic peptide
  Seed: RMVGGIGRF
RWVGGIGRM

SEQ ID NO: 5432 - protein, 9 aa, Artificial Sequence
  Description of Artificial Sequence: Synthetic peptide
  Seed: RMVGGIGRF
RWVGGIGRL

SEQ ID NO: 5433 - protein, 11 aa, Artificial Sequence
  Description of Artificial Sequence: Synthetic peptide
  Seed: RMVGGIGRFYI
RMVGGIGRFYL

SEQ ID NO: 5434 - protein, 11 aa, Artificial Sequence
  Description of Artificial Sequence: Synthetic peptide
  Seed: RMVGGIGRFYI
RMVGGIGRFYK

SEQ ID NO: 5435 - protein, 11 aa, Artificial Sequence
  Description of Artificial Sequence: Synthetic peptide
  Seed: RMVGGIGRFYI
RMVGGIGRFYM

SEQ ID NO: 5436 - protein, 11 aa, Artificial Sequence
  Description of Artificial Sequence: Synthetic peptide
  Seed: RMVGGIGRFYI
RMVGGIGRFYF

SEQ ID NO: 5437 - protein, 11 aa, Artificial Sequence
  Description of Artificial Sequence: Synthetic peptide
  Seed: RMVGGIGRFYI
RMVGGIGRFYP

SEQ ID NO: 5438 - protein, 11 aa, Artificial Sequence
  Description of Artificial Sequence: Synthetic peptide
  Seed: RMVGGIGRFYI
RKVGGIGRFYY

SEQ ID NO: 5439 - protein, 11 aa, Artificial Sequence
  Description of Artificial Sequence: Synthetic peptide
  Seed: RMVGGIGRFYI
RLVGGIGRFYY

SEQ ID NO: 5440 - protein, 11 aa, Artificial Sequence
  Description of Artificial Sequence: Synthetic peptide
  Seed: RMVGGIGRFYI
RQVGGIGRFYV

SEQ ID NO: 5441 - protein, 11 aa, Artificial Sequence
  Description of Artificial Sequence: Synthetic peptide
  Seed: RMVGGIGRFYI
RLVGGIGRFYT

SEQ ID NO: 5442 - protein, 11 aa, Artificial Sequence
  Description of Artificial Sequence: Synthetic peptide
  Seed: RMVGGIGRFYI
REVGGIGRFYY

SEQ ID NO: 5443 - protein, 9 aa, Artificial Sequence
  Description of Artificial Sequence: Synthetic peptide
  Seed: RMVGGIGRF
RYVGGIGRL

SEQ ID NO: 5444 - protein, 11 aa, Artificial Sequence
  Description of Artificial Sequence: Synthetic peptide
  Seed: RMVGGIGRFYI
RGVGGIGRFYY

SEQ ID NO: 5445 - protein, 11 aa, Artificial Sequence
  Description of Artificial Sequence: Synthetic peptide
  Seed: RMVGGIGRFYI
RHVGGIGRFYY

SEQ ID NO: 5446 - protein, 11 aa, Artificial Sequence
  Description of Artificial Sequence: Synthetic peptide
  Seed: RMVGGIGRFYI
RIVGGIGRFYA

SEQ ID NO: 5447 - protein, 9 aa, Artificial Sequence
  Description of Artificial Sequence: Synthetic peptide
  Seed: RMVGGIGRF
RYVGGIGRI

SEQ ID NO: 5448 - protein, 11 aa, Artificial Sequence
  Description of Artificial Sequence: Synthetic peptide
  Seed: RMVGGIGRFYI
RIVGGIGRFYI

SEQ ID NO: 5449 - protein, 11 aa, Artificial Sequence
  Description of Artificial Sequence: Synthetic peptide
  Seed: RMVGGIGRFYI
RIVGGIGRFYL

SEQ ID NO: 5450 - protein, 11 aa, Artificial Sequence
  Description of Artificial Sequence: Synthetic peptide
  Seed: RMVGGIGRFYI
RIVGGIGRFYY

SEQ ID NO: 5451 - protein, 9 aa, Artificial Sequence
  Description of Artificial Sequence: Synthetic peptide
  Seed: RMVGGIGRF
RWVGGIGRV

SEQ ID NO: 5452 - protein, 9 aa, Artificial Sequence
  Description of Artificial Sequence: Synthetic peptide
  Seed: RMVGGIGRF
RWVGGIGRY

SEQ ID NO: 5453 - protein, 11 aa, Artificial Sequence
  Description of Artificial Sequence: Synthetic peptide
  Seed: RMVGGIGRFYI
RIVGGIGRFYV

SEQ ID NO: 5454 - protein, 11 aa, Artificial Sequence
  Description of Artificial Sequence: Synthetic peptide
  Seed: RMVGGIGRFYI
RLVGGIGRFYA

SEQ ID NO: 5455 - protein, 11 aa, Artificial Sequence
  Description of Artificial Sequence: Synthetic peptide
  Seed: RMVGGIGRFYI
RLVGGIGRFYI

SEQ ID NO: 5456 - protein, 9 aa, Artificial Sequence
  Description of Artificial Sequence: Synthetic peptide
  Seed: RMVGGIGRF
RWVGGIGRW

SEQ ID NO: 5457 - protein, 11 aa, Artificial Sequence
  Description of Artificial Sequence: Synthetic peptide
  Seed: RMVGGIGRFYI
RLVGGIGRFYL

SEQ ID NO: 5458 - protein, 11 aa, Artificial Sequence
  Description of Artificial Sequence: Synthetic peptide
  Seed: RMVGGIGRFYI
RLVGGIGRFYM

SEQ ID NO: 5459 - protein, 10 aa, Artificial Sequence
  Description of Artificial Sequence: Synthetic peptide
  Seed: RMVGGIGRFY
RSVGGIGRFW

SEQ ID NO: 5460 - protein, 10 aa, Artificial Sequence
  Description of Artificial Sequence: Synthetic peptide
  Seed: RMVGGIGRFY
RSVGGIGRFF

SEQ ID NO: 5461 - protein, 10 aa, Artificial Sequence
  Description of Artificial Sequence: Synthetic peptide
  Seed: RMVGGIGRFY
RSVGGIGRFM

SEQ ID NO: 5462 - protein, 10 aa, Artificial Sequence
  Description of Artificial Sequence: Synthetic peptide
  Seed: RMVGGIGRFY
RNVGGIGRFK

SEQ ID NO: 5463 - protein, 10 aa, Artificial Sequence
  Description of Artificial Sequence: Synthetic peptide
  Seed: RMVGGIGRFY
RQVGGIGRFS

SEQ ID NO: 5464 - protein, 10 aa, Artificial Sequence
  Description of Artificial Sequence: Synthetic peptide
  Seed: RMVGGIGRFY
RQVGGIGRFT

SEQ ID NO: 5465 - protein, 10 aa, Artificial Sequence
  Description of Artificial Sequence: Synthetic peptide
  Seed: RMVGGIGRFY
RQVGGIGRFW

SEQ ID NO: 5466 - protein, 10 aa, Artificial Sequence
  Description of Artificial Sequence: Synthetic peptide
  Seed: RMVGGIGRFY
RQVGGIGRFY

SEQ ID NO: 5467 - protein, 10 aa, Artificial Sequence
  Description of Artificial Sequence: Synthetic peptide
  Seed: RMVGGIGRFY
RQVGGIGRFV

SEQ ID NO: 5468 - protein, 10 aa, Artificial Sequence
  Description of Artificial Sequence: Synthetic peptide
  Seed: RMVGGIGRFY
REVGGIGRFK

SEQ ID NO: 5469 - protein, 10 aa, Artificial Sequence
  Description of Artificial Sequence: Synthetic peptide
  Seed: RMVGGIGRFY
RRVGGIGRFY

SEQ ID NO: 5470 - protein, 10 aa, Artificial Sequence
  Description of Artificial Sequence: Synthetic peptide
  Seed: RMVGGIGRFY
REVGGIGRFM

SEQ ID NO: 5471 - protein, 10 aa, Artificial Sequence
  Description of Artificial Sequence: Synthetic peptide
  Seed: RMVGGIGRFY
REVGGIGRFF

SEQ ID NO: 5472 - protein, 10 aa, Artificial Sequence
  Description of Artificial Sequence: Synthetic peptide
  Seed: RMVGGIGRFY
REVGGIGRFY

SEQ ID NO: 5473 - protein, 10 aa, Artificial Sequence
  Description of Artificial Sequence: Synthetic peptide
  Seed: RMVGGIGRFY
RGVGGIGRFK

SEQ ID NO: 5474 - protein, 10 aa, Artificial Sequence
  Description of Artificial Sequence: Synthetic peptide
  Seed: RMVGGIGRFY
RRVGGIGRFF

SEQ ID NO: 5475 - protein, 10 aa, Artificial Sequence
  Description of Artificial Sequence: Synthetic peptide
  Seed: RMVGGIGRFY
RGVGGIGRFF

SEQ ID NO: 5476 - protein, 10 aa, Artificial Sequence
  Description of Artificial Sequence: Synthetic peptide
  Seed: RMVGGIGRFY
RGVGGIGRFW

SEQ ID NO: 5477 - protein, 10 aa, Artificial Sequence
  Description of Artificial Sequence: Synthetic peptide
  Seed: RMVGGIGRFY
RGVGGIGRFY

SEQ ID NO: 5478 - protein, 10 aa, Artificial Sequence
  Description of Artificial Sequence: Synthetic peptide
  Seed: RMVGGIGRFY
RHVGGIGRFK

SEQ ID NO: 5479 - protein, 10 aa, Artificial Sequence
  Description of Artificial Sequence: Synthetic peptide
  Seed: RMVGGIGRFY
RHVGGIGRFM

SEQ ID NO: 5480 - protein, 10 aa, Artificial Sequence
  Description of Artificial Sequence: Synthetic peptide
  Seed: RMVGGIGRFY
RQVGGIGRFP

SEQ ID NO: 5481 - protein, 10 aa, Artificial Sequence
  Description of Artificial Sequence: Synthetic peptide
  Seed: RMVGGIGRFY
RQVGGIGRFF

SEQ ID NO: 5482 - protein, 10 aa, Artificial Sequence
  Description of Artificial Sequence: Synthetic peptide
  Seed: RMVGGIGRFY
RHVGGIGRFF

SEQ ID NO: 5483 - protein, 10 aa, Artificial Sequence
  Description of Artificial Sequence: Synthetic peptide
  Seed: RMVGGIGRFY
RQVGGIGRFM

SEQ ID NO: 5484 - protein, 10 aa, Artificial Sequence
  Description of Artificial Sequence: Synthetic peptide
  Seed: RMVGGIGRFY
RQVGGIGRFA

SEQ ID NO: 5485 - protein, 10 aa, Artificial Sequence
  Description of Artificial Sequence: Synthetic peptide
  Seed: RMVGGIGRFY
RQVGGIGRFR

SEQ ID NO: 5486 - protein, 10 aa, Artificial Sequence
  Description of Artificial Sequence: Synthetic peptide
  Seed: RMVGGIGRFY
RCVGGIGRFK

SEQ ID NO: 5487 - protein, 10 aa, Artificial Sequence
  Description of Artificial Sequence: Synthetic peptide
  Seed: RMVGGIGRFY
RDVGGIGRFY

SEQ ID NO: 5488 - protein, 10 aa, Artificial Sequence
  Description of Artificial Sequence: Synthetic peptide
  Seed: RMVGGIGRFY
RDVGGIGRFK

SEQ ID NO: 5489 - protein, 10 aa, Artificial Sequence
  Description of Artificial Sequence: Synthetic peptide
  Seed: RMVGGIGRFY
RQVGGIGRFN

SEQ ID NO: 5490 - protein, 10 aa, Artificial Sequence
  Description of Artificial Sequence: Synthetic peptide
  Seed: RMVGGIGRFY
RQVGGIGRFD

SEQ ID NO: 5491 - protein, 10 aa, Artificial Sequence
  Description of Artificial Sequence: Synthetic peptide
  Seed: RMVGGIGRFY
RQVGGIGRFC

SEQ ID NO: 5492 - protein, 10 aa, Artificial Sequence
  Description of Artificial Sequence: Synthetic peptide
  Seed: RMVGGIGRFY
RQVGGIGRFQ

SEQ ID NO: 5493 - protein, 10 aa, Artificial Sequence
  Description of Artificial Sequence: Synthetic peptide
  Seed: RMVGGIGRFY
RQVGGIGRFE

SEQ ID NO: 5494 - protein, 10 aa, Artificial Sequence
  Description of Artificial Sequence: Synthetic peptide
  Seed: RMVGGIGRFY
RQVGGIGRFG

SEQ ID NO: 5495 - protein, 10 aa, Artificial Sequence
  Description of Artificial Sequence: Synthetic peptide
  Seed: RMVGGIGRFY
RNVGGIGRFY

SEQ ID NO: 5496 - protein, 10 aa, Artificial Sequence
  Description of Artificial Sequence: Synthetic peptide
  Seed: RMVGGIGRFY
RQVGGIGRFH

SEQ ID NO: 5497 - protein, 10 aa, Artificial Sequence
  Description of Artificial Sequence: Synthetic peptide
  Seed: RMVGGIGRFY
RQVGGIGRFI

SEQ ID NO: 5498 - protein, 10 aa, Artificial Sequence
  Description of Artificial Sequence: Synthetic peptide
  Seed: RMVGGIGRFY
RQVGGIGRFL

SEQ ID NO: 5499 - protein, 10 aa, Artificial Sequence
  Description of Artificial Sequence: Synthetic peptide
  Seed: RMVGGIGRFY
RNVGGIGRFW

SEQ ID NO: 5500 - protein, 10 aa, Artificial Sequence
  Description of Artificial Sequence: Synthetic peptide
  Seed: RMVGGIGRFY
RQVGGIGRFK

SEQ ID NO: 5501 - protein, 10 aa, Artificial Sequence
  Description of Artificial Sequence: Synthetic peptide
  Seed: RMVGGIGRFY
RRVGGIGRFK

SEQ ID NO: 5502 - protein, 10 aa, Artificial Sequence
  Description of Artificial Sequence: Synthetic peptide
  Seed: RMVGGIGRFY
RHVGGIGRFY

SEQ ID NO: 5503 - protein, 10 aa, Artificial Sequence
  Description of Artificial Sequence: Synthetic peptide
  Seed: RMVGGIGRFY
RSVGGIGRFK

SEQ ID NO: 5504 - protein, 10 aa, Artificial Sequence
  Description of Artificial Sequence: Synthetic peptide
  Seed: RMVGGIGRFY
RKVGGIGRFY

SEQ ID NO: 5505 - protein, 10 aa, Artificial Sequence
  Description of Artificial Sequence: Synthetic peptide
  Seed: RMVGGIGRFY
RMVGGIGRFR

SEQ ID NO: 5506 - protein, 10 aa, Artificial Sequence
  Description of Artificial Sequence: Synthetic peptide
  Seed: RMVGGIGRFY
RMVGGIGRFH

SEQ ID NO: 5507 - protein, 10 aa, Artificial Sequence
  Description of Artificial Sequence: Synthetic peptide
  Seed: RMVGGIGRFY
RMVGGIGRFL

SEQ ID NO: 5508 - protein, 10 aa, Artificial Sequence
  Description of Artificial Sequence: Synthetic peptide
  Seed: RMVGGIGRFY
RMVGGIGRFK

SEQ ID NO: 5509 - protein, 10 aa, Artificial Sequence
  Description of Artificial Sequence: Synthetic peptide
  Seed: RMVGGIGRFY
RMVGGIGRFM

SEQ ID NO: 5510 - protein, 10 aa, Artificial Sequence
  Description of Artificial Sequence: Synthetic peptide
  Seed: RMVGGIGRFY
RMVGGIGRFF

SEQ ID NO: 5511 - protein, 9 aa, Artificial Sequence
  Description of Artificial Sequence: Synthetic peptide
  Seed: RMVGGIGRF
RVVGGIGRW

SEQ ID NO: 5512 - protein, 10 aa, Artificial Sequence
  Description of Artificial Sequence: Synthetic peptide
  Seed: RMVGGIGRFY
RMVGGIGRFW

SEQ ID NO: 5513 - protein, 9 aa, Artificial Sequence
  Description of Artificial Sequence: Synthetic peptide
  Seed: RMVGGIGRF
RVVGGIGRF

SEQ ID NO: 5514 - protein, 9 aa, Artificial Sequence
  Description of Artificial Sequence: Synthetic peptide
  Seed: RMVGGIGRF
RVVGGIGRM

SEQ ID NO: 5515 - protein, 10 aa, Artificial Sequence
  Description of Artificial Sequence: Synthetic peptide
  Seed: RMVGGIGRFY
RFVGGIGRFK

SEQ ID NO: 5516 - protein, 10 aa, Artificial Sequence
  Description of Artificial Sequence: Synthetic peptide
  Seed: RMVGGIGRFY
RFVGGIGRFF

SEQ ID NO: 5517 - protein, 10 aa, Artificial Sequence
  Description of Artificial Sequence: Synthetic peptide
  Seed: RMVGGIGRFY
RFVGGIGRFY

SEQ ID NO: 5518 - protein, 10 aa, Artificial Sequence
  Description of Artificial Sequence: Synthetic peptide
  Seed: RMVGGIGRFY
RPVGGIGRFK

SEQ ID NO: 5519 - protein, 10 aa, Artificial Sequence
  Description of Artificial Sequence: Synthetic peptide
  Seed: RMVGGIGRFY
RPVGGIGRFY

SEQ ID NO: 5520 - protein, 10 aa, Artificial Sequence
  Description of Artificial Sequence: Synthetic peptide
  Seed: RMVGGIGRFY
RSVGGIGRFI

SEQ ID NO: 5521 - protein, 10 aa, Artificial Sequence
  Description of Artificial Sequence: Synthetic peptide
  Seed: RMVGGIGRFY
RSVGGIGRFL

SEQ ID NO: 5522 - protein, 9 aa, Artificial Sequence
  Description of Artificial Sequence: Synthetic peptide
  Seed: RMVGGIGRF
RVVGGIGRY

SEQ ID NO: 5523 - protein, 10 aa, Artificial Sequence
  Description of Artificial Sequence: Synthetic peptide
  Seed: RMVGGIGRFY
RAVGGIGRFI

SEQ ID NO: 5524 - protein, 10 aa, Artificial Sequence
  Description of Artificial Sequence: Synthetic peptide
  Seed: RMVGGIGRFY
RIVGGIGRFK

SEQ ID NO: 5525 - protein, 10 aa, Artificial Sequence
  Description of Artificial Sequence: Synthetic peptide
  Seed: RMVGGIGRFY
RKVGGIGRFF

SEQ ID NO: 5526 - protein, 10 aa, Artificial Sequence
  Description of Artificial Sequence: Synthetic peptide
  Seed: RMVGGIGRFY
RAVGGIGRFY

SEQ ID NO: 5527 - protein, 10 aa, Artificial Sequence
  Description of Artificial Sequence: Synthetic peptide
  Seed: RMVGGIGRFY
RIVGGIGRFF

SEQ ID NO: 5528 - protein, 10 aa, Artificial Sequence
  Description of Artificial Sequence: Synthetic peptide
  Seed: RMVGGIGRFY
RIVGGIGRFW

SEQ ID NO: 5529 - protein, 10 aa, Artificial Sequence
  Description of Artificial Sequence: Synthetic peptide
  Seed: RMVGGIGRFY
RIVGGIGRFY

SEQ ID NO: 5530 - protein, 10 aa, Artificial Sequence
  Description of Artificial Sequence: Synthetic peptide
  Seed: RMVGGIGRFY
RLVGGIGRFR

SEQ ID NO: 5531 - protein, 10 aa, Artificial Sequence
  Description of Artificial Sequence: Synthetic peptide
  Seed: RMVGGIGRFY
RLVGGIGRFK

SEQ ID NO: 5532 - protein, 10 aa, Artificial Sequence
  Description of Artificial Sequence: Synthetic peptide
  Seed: RMVGGIGRFY
RLVGGIGRFM

SEQ ID NO: 5533 - protein, 10 aa, Artificial Sequence
  Description of Artificial Sequence: Synthetic peptide
  Seed: RMVGGIGRFY
RAVGGIGRFW

SEQ ID NO: 5534 - protein, 10 aa, Artificial Sequence
  Description of Artificial Sequence: Synthetic peptide
  Seed: RMVGGIGRFY
RLVGGIGRFF

SEQ ID NO: 5535 - protein, 10 aa, Artificial Sequence
  Description of Artificial Sequence: Synthetic peptide
  Seed: RMVGGIGRFY
RAVGGIGRFF

SEQ ID NO: 5536 - protein, 10 aa, Artificial Sequence
  Description of Artificial Sequence: Synthetic peptide
  Seed: RMVGGIGRFY
RAVGGIGRFM

SEQ ID NO: 5537 - protein, 10 aa, Artificial Sequence
  Description of Artificial Sequence: Synthetic peptide
  Seed: RMVGGIGRFY
RAVGGIGRFK

SEQ ID NO: 5538 - protein, 10 aa, Artificial Sequence
  Description of Artificial Sequence: Synthetic peptide
  Seed: RMVGGIGRFY
RLVGGIGRFW

SEQ ID NO: 5539 - protein, 10 aa, Artificial Sequence
  Description of Artificial Sequence: Synthetic peptide
  Seed: RMVGGIGRFY
RLVGGIGRFY

SEQ ID NO: 5540 - protein, 10 aa, Artificial Sequence
  Description of Artificial Sequence: Synthetic peptide
  Seed: RMVGGIGRFY
RKVGGIGRFK

SEQ ID NO: 5541 - protein, 10 aa, Artificial Sequence
  Description of Artificial Sequence: Synthetic peptide
  Seed: RMVGGIGRFY
RAVGGIGRFL

SEQ ID NO: 5542 - protein, 10 aa, Artificial Sequence
  Description of Artificial Sequence: Synthetic peptide
  Seed: RMVGGIGRFY
RKVGGIGRFM

SEQ ID NO: 5543 - protein, 11 aa, Artificial Sequence
  Description of Artificial Sequence: Synthetic peptide
  Seed: RMVGGIGRFYI
RMVGGIGRFYS

SEQ ID NO: 5544 - protein, 11 aa, Artificial Sequence
  Description of Artificial Sequence: Synthetic peptide
  Seed: RMVGGIGRFYI
RMVGGIGRFYT

SEQ ID NO: 5545 - protein, 11 aa, Artificial Sequence
  Description of Artificial Sequence: Synthetic peptide
  Seed: RMVGGIGRFYI
RMVGGIGRFYW

SEQ ID NO: 5546 - protein, 11 aa, Artificial Sequence
  Description of Artificial Sequence: Synthetic peptide
  Seed: RMVLSAFDERR
RMVLSAFDERA

SEQ ID NO: 5547 - protein, 11 aa, Artificial Sequence
  Description of Artificial Sequence: Synthetic peptide
  Seed: RMVLSAFDERR
RMVLSAFDERN

SEQ ID NO: 5548 - protein, 9 aa, Artificial Sequence
  Description of Artificial Sequence: Synthetic peptide
  Seed: RMVGGIGRF
RFVGGIGRL

SEQ ID NO: 5549 - protein, 11 aa, Artificial Sequence
  Description of Artificial Sequence: Synthetic peptide
  Seed: RMVLSAFDERR
RMVLSAFDERD

SEQ ID NO: 5550 - protein, 9 aa, Artificial Sequence
  Description of Artificial Sequence: Synthetic peptide
  Seed: RMVGGIGRF
RFVGGIGRI

SEQ ID NO: 5551 - protein, 11 aa, Artificial Sequence
  Description of Artificial Sequence: Synthetic peptide
  Seed: RMVLSAFDERR
RMVLSAFDERC

SEQ ID NO: 5552 - protein, 11 aa, Artificial Sequence
  Description of Artificial Sequence: Synthetic peptide
  Seed: RMVLSAFDERR
RMVLSAFDERQ

SEQ ID NO: 5553 - protein, 11 aa, Artificial Sequence
  Description of Artificial Sequence: Synthetic peptide
  Seed: RMVLSAFDERR
RMVLSAFDERE

SEQ ID NO: 5554 - protein, 11 aa, Artificial Sequence
  Description of Artificial Sequence: Synthetic peptide
  Seed: RMVLSAFDERR
RMVLSAFDERG

SEQ ID NO: 5555 - protein, 11 aa, Artificial Sequence
  Description of Artificial Sequence: Synthetic peptide
  Seed: RMVLSAFDERR
RMVLSAFDERH

SEQ ID NO: 5556 - protein, 11 aa, Artificial Sequence
  Description of Artificial Sequence: Synthetic peptide
  Seed: RMVLSAFDERR
RMVLSAFDERI

SEQ ID NO: 5557 - protein, 11 aa, Artificial Sequence
  Description of Artificial Sequence: Synthetic peptide
  Seed: RMVLSAFDERR
RMVLSAFDERL

SEQ ID NO: 5558 - protein, 11 aa, Artificial Sequence
  Description of Artificial Sequence: Synthetic peptide
  Seed: RMVLSAFDERR
RMVLSAFDERK

SEQ ID NO: 5559 - protein, 11 aa, Artificial Sequence
  Description of Artificial Sequence: Synthetic peptide
  Seed: RMVLSAFDERR
RMVLSAFDERM

SEQ ID NO: 5560 - protein, 11 aa, Artificial Sequence
  Description of Artificial Sequence: Synthetic peptide
  Seed: RMVLSAFDERR
RMVLSAFDERF

SEQ ID NO: 5561 - protein, 11 aa, Artificial Sequence
  Description of Artificial Sequence: Synthetic peptide
  Seed: RMVLSAFDERR
RMVLSAFDERP

SEQ ID NO: 5562 - protein, 11 aa, Artificial Sequence
  Description of Artificial Sequence: Synthetic peptide
  Seed: RMVLSAFDERR
RMVLSAFDERS

SEQ ID NO: 5563 - protein, 11 aa, Artificial Sequence
  Description of Artificial Sequence: Synthetic peptide
  Seed: RMVLSAFDERR
RMVLSAFDERT

SEQ ID NO: 5564 - protein, 9 aa, Artificial Sequence
  Description of Artificial Sequence: Synthetic peptide
  Seed: RMVGGIGRF
RFVGGIGRM

SEQ ID NO: 5565 - protein, 11 aa, Artificial Sequence
  Description of Artificial Sequence: Synthetic peptide
  Seed: RMVLSAFDERR
RKVLSAFDERR

SEQ ID NO: 5566 - protein, 11 aa, Artificial Sequence
  Description of Artificial Sequence: Synthetic peptide
  Seed: RMVLSAFDERR
RMVLSAFDERY

SEQ ID NO: 5567 - protein, 9 aa, Artificial Sequence
  Description of Artificial Sequence: Synthetic peptide
  Seed: RMVGGIGRF
RFVGGIGRF

SEQ ID NO: 5568 - protein, 11 aa, Artificial Sequence
  Description of Artificial Sequence: Synthetic peptide
  Seed: RMVLSAFDERR
RDVLSAFDERR

SEQ ID NO: 5569 - protein, 11 aa, Artificial Sequence
  Description of Artificial Sequence: Synthetic peptide
  Seed: RMVLSAFDERR
RCVLSAFDERR

SEQ ID NO: 5570 - protein, 9 aa, Artificial Sequence
  Description of Artificial Sequence: Synthetic peptide
  Seed: RMVGGIGRF
RSVGGIGRF

SEQ ID NO: 5571 - protein, 11 aa, Artificial Sequence
  Description of Artificial Sequence: Synthetic peptide
  Seed: RMVLSAFDERR
RQVLSAFDERR

SEQ ID NO: 5572 - protein, 9 aa, Artificial Sequence
  Description of Artificial Sequence: Synthetic peptide
  Seed: RMVGGIGRF
RSVGGIGRM

SEQ ID NO: 5573 - protein, 9 aa, Artificial Sequence
  Description of Artificial Sequence: Synthetic peptide
  Seed: RMVGGIGRF
RSVGGIGRL

SEQ ID NO: 5574 - protein, 9 aa, Artificial Sequence
  Description of Artificial Sequence: Synthetic peptide
  Seed: RMVGGIGRF
RSVGGIGRI

SEQ ID NO: 5575 - protein, 9 aa, Artificial Sequence
  Description of Artificial Sequence: Synthetic peptide
  Seed: RMVGGIGRF
RSVGGIGRH

SEQ ID NO: 5576 - protein, 11 aa, Artificial Sequence
  Description of Artificial Sequence: Synthetic peptide
  Seed: RMVLSAFDERR
REVLSAFDERR

SEQ ID NO: 5577 - protein, 9 aa, Artificial Sequence
  Description of Artificial Sequence: Synthetic peptide
  Seed: RMVGGIGRF
RFVGGIGRY

SEQ ID NO: 5578 - protein, 11 aa, Artificial Sequence
  Description of Artificial Sequence: Synthetic peptide
  Seed: RMVLSAFDERR
RGVLSAFDERR

SEQ ID NO: 5579 - protein, 11 aa, Artificial Sequence
  Description of Artificial Sequence: Synthetic peptide
  Seed: RMVLSAFDERR
RHVLSAFDERR

SEQ ID NO: 5580 - protein, 11 aa, Artificial Sequence
  Description of Artificial Sequence: Synthetic peptide
  Seed: RMVLSAFDERR
RIVLSAFDERR

SEQ ID NO: 5581 - protein, 11 aa, Artificial Sequence
  Description of Artificial Sequence: Synthetic peptide
  Seed: RMVLSAFDERR
RIVLSAFDERK

SEQ ID NO: 5582 - protein, 9 aa, Artificial Sequence
  Description of Artificial Sequence: Synthetic peptide
  Seed: RMVGGIGRF
RFVGGIGRW

SEQ ID NO: 5583 - protein, 11 aa, Artificial Sequence
  Description of Artificial Sequence: Synthetic peptide
  Seed: RMVLSAFDERR
RLVLSAFDERR

SEQ ID NO: 5584 - protein, 11 aa, Artificial Sequence
  Description of Artificial Sequence: Synthetic peptide
  Seed: RMVLSAFDERR
RLVLSAFDERK

SEQ ID NO: 5585 - protein, 11 aa, Artificial Sequence
  Description of Artificial Sequence: Synthetic peptide
  Seed: RMVLSAFDERR
RMVLSAFDERW

SEQ ID NO: 5586 - protein, 11 aa, Artificial Sequence
  Description of Artificial Sequence: Synthetic peptide
  Seed: RMVLSAFDERR
RMVLSAFDERV

SEQ ID NO: 5587 - protein, 11 aa, Artificial Sequence
  Description of Artificial Sequence: Synthetic peptide
  Seed: RMVLSAFDERR
RRVLSAFDERR

SEQ ID NO: 5588 - protein, 11 aa, Artificial Sequence
  Description of Artificial Sequence: Synthetic peptide
  Seed: RMVLSAFDERR
RFVLSAFDERV

SEQ ID NO: 5589 - protein, 11 aa, Artificial Sequence
  Description of Artificial Sequence: Synthetic peptide
  Seed: RMVLSAFDERR
RSVLSAFDERR

SEQ ID NO: 5590 - protein, 11 aa, Artificial Sequence
  Description of Artificial Sequence: Synthetic peptide
  Seed: RMVLSAFDERR
RSVLSAFDERK

SEQ ID NO: 5591 - protein, 11 aa, Artificial Sequence
  Description of Artificial Sequence: Synthetic peptide
  Seed: RMVLSAFDERR
RTVLSAFDERR

SEQ ID NO: 5592 - protein, 11 aa, Artificial Sequence
  Description of Artificial Sequence: Synthetic peptide
  Seed: RMVLSAFDERR
RTVLSAFDERK

SEQ ID NO: 5593 - protein, 11 aa, Artificial Sequence
  Description of Artificial Sequence: Synthetic peptide
  Seed: RMVLSAFDERR
RWVLSAFDERR

SEQ ID NO: 5594 - protein, 11 aa, Artificial Sequence
  Description of Artificial Sequence: Synthetic peptide
  Seed: RMVLSAFDERR
RWVLSAFDERK

SEQ ID NO: 5595 - protein, 11 aa, Artificial Sequence
  Description of Artificial Sequence: Synthetic peptide
  Seed: RMVLSAFDERR
RYVLSAFDERA

SEQ ID NO: 5596 - protein, 11 aa, Artificial Sequence
  Description of Artificial Sequence: Synthetic peptide
  Seed: RMVLSAFDERR
RYVLSAFDERR

SEQ ID NO: 5597 - protein, 9 aa, Artificial Sequence
  Description of Artificial Sequence: Synthetic peptide
  Seed: RMVGGIGRF
RMVGGIGRW

SEQ ID NO: 5598 - protein, 11 aa, Artificial Sequence
  Description of Artificial Sequence: Synthetic peptide
  Seed: RMVLSAFDERR
RYVLSAFDERN

SEQ ID NO: 5599 - protein, 11 aa, Artificial Sequence
  Description of Artificial Sequence: Synthetic peptide
  Seed: RMVLSAFDERR
RYVLSAFDERD

SEQ ID NO: 5600 - protein, 11 aa, Artificial Sequence
  Description of Artificial Sequence: Synthetic peptide
  Seed: RMVLSAFDERR
RYVLSAFDERC

SEQ ID NO: 5601 - protein, 9 aa, Artificial Sequence
  Description of Artificial Sequence: Synthetic peptide
  Seed: RMVGGIGRF
RMVGGIGRM

SEQ ID NO: 5602 - protein, 11 aa, Artificial Sequence
  Description of Artificial Sequence: Synthetic peptide
  Seed: RMVLSAFDERR
RYVLSAFDERQ

SEQ ID NO: 5603 - protein, 11 aa, Artificial Sequence
  Description of Artificial Sequence: Synthetic peptide
  Seed: RMVLSAFDERR
RYVLSAFDERE

SEQ ID NO: 5604 - protein, 11 aa, Artificial Sequence
  Description of Artificial Sequence: Synthetic peptide
  Seed: RMVLSAFDERR
RYVLSAFDERG

SEQ ID NO: 5605 - protein, 11 aa, Artificial Sequence
  Description of Artificial Sequence: Synthetic peptide
  Seed: RMVLSAFDERR
RYVLSAFDERH

SEQ ID NO: 5606 - protein, 11 aa, Artificial Sequence
  Description of Artificial Sequence: Synthetic peptide
  Seed: RMVLSAFDERR
RPVLSAFDERR

SEQ ID NO: 5607 - protein, 11 aa, Artificial Sequence
  Description of Artificial Sequence: Synthetic peptide
  Seed: RMVLSAFDERR
RFVLSAFDERY

SEQ ID NO: 5608 - protein, 11 aa, Artificial Sequence
  Description of Artificial Sequence: Synthetic peptide
  Seed: RMVLSAFDERR
RFVLSAFDERA

SEQ ID NO: 5609 - protein, 9 aa, Artificial Sequence
  Description of Artificial Sequence: Synthetic peptide
  Seed: RMVGGIGRF
RMVGGIGRY

SEQ ID NO: 5610 - protein, 11 aa, Artificial Sequence
  Description of Artificial Sequence: Synthetic peptide
  Seed: RMVLSAFDERR
RFVLSAFDERR

SEQ ID NO: 5611 - protein, 11 aa, Artificial Sequence
  Description of Artificial Sequence: Synthetic peptide
  Seed: RMVLSAFDERR
RFVLSAFDERN

SEQ ID NO: 5612 - protein, 11 aa, Artificial Sequence
  Description of Artificial Sequence: Synthetic peptide
  Seed: RMVLSAFDERR
RFVLSAFDERD

SEQ ID NO: 5613 - protein, 11 aa, Artificial Sequence
  Description of Artificial Sequence: Synthetic peptide
  Seed: RMVLSAFDERR
RFVLSAFDERC

SEQ ID NO: 5614 - protein, 11 aa, Artificial Sequence
  Description of Artificial Sequence: Synthetic peptide
  Seed: RMVLSAFDERR
RFVLSAFDERQ

SEQ ID NO: 5615 - protein, 11 aa, Artificial Sequence
  Description of Artificial Sequence: Synthetic peptide
  Seed: RMVLSAFDERR
RFVLSAFDERE

SEQ ID NO: 5616 - protein, 11 aa, Artificial Sequence
  Description of Artificial Sequence: Synthetic peptide
  Seed: RMVLSAFDERR
RFVLSAFDERG

SEQ ID NO: 5617 - protein, 11 aa, Artificial Sequence
  Description of Artificial Sequence: Synthetic peptide
  Seed: RMVLSAFDERR
RFVLSAFDERH

SEQ ID NO: 5618 - protein, 11 aa, Artificial Sequence
  Description of Artificial Sequence: Synthetic peptide
  Seed: RMVLSAFDERR
RFVLSAFDERI

SEQ ID NO: 5619 - protein, 11 aa, Artificial Sequence
  Description of Artificial Sequence: Synthetic peptide
  Seed: RMVLSAFDERR
RFVLSAFDERL

SEQ ID NO: 5620 - protein, 11 aa, Artificial Sequence
  Description of Artificial Sequence: Synthetic peptide
  Seed: RMVLSAFDERR
RFVLSAFDERK

SEQ ID NO: 5621 - protein, 11 aa, Artificial Sequence
  Description of Artificial Sequence: Synthetic peptide
  Seed: RMVLSAFDERR
RFVLSAFDERM

SEQ ID NO: 5622 - protein, 11 aa, Artificial Sequence
  Description of Artificial Sequence: Synthetic peptide
  Seed: RMVLSAFDERR
RFVLSAFDERF

SEQ ID NO: 5623 - protein, 11 aa, Artificial Sequence
  Description of Artificial Sequence: Synthetic peptide
  Seed: RMVLSAFDERR
RFVLSAFDERP

SEQ ID NO: 5624 - protein, 11 aa, Artificial Sequence
  Description of Artificial Sequence: Synthetic peptide
  Seed: RMVLSAFDERR
RFVLSAFDERS

SEQ ID NO: 5625 - protein, 11 aa, Artificial Sequence
  Description of Artificial Sequence: Synthetic peptide
  Seed: RMVLSAFDERR
RFVLSAFDERT

SEQ ID NO: 5626 - protein, 11 aa, Artificial Sequence
  Description of Artificial Sequence: Synthetic peptide
  Seed: RMVLSAFDERR
RFVLSAFDERW

SEQ ID NO: 5627 - protein, 11 aa, Artificial Sequence
  Description of Artificial Sequence: Synthetic peptide
  Seed: RMVLSAFDERR
RNVLSAFDERR

SEQ ID NO: 5628 - protein, 11 aa, Artificial Sequence
  Description of Artificial Sequence: Synthetic peptide
  Seed: RMVLSAFDERR
RAVLSAFDERR

SEQ ID NO: 5629 - protein, 11 aa, Artificial Sequence
  Description of Artificial Sequence: Synthetic peptide
  Seed: RMVGGIGRFYI
RMVGGIGRFYY

SEQ ID NO: 5630 - protein, 11 aa, Artificial Sequence
  Description of Artificial Sequence: Synthetic peptide
  Seed: RMVGGIGRFYI
RTVGGIGRFYV

SEQ ID NO: 5631 - protein, 11 aa, Artificial Sequence
  Description of Artificial Sequence: Synthetic peptide
  Seed: RMVGGIGRFYI
RWVGGIGRFYY

SEQ ID NO: 5632 - protein, 11 aa, Artificial Sequence
  Description of Artificial Sequence: Synthetic peptide
  Seed: RMVGGIGRFYI
RYVGGIGRFYY

SEQ ID NO: 5633 - protein, 11 aa, Artificial Sequence
  Description of Artificial Sequence: Synthetic peptide
  Seed: RMVGGIGRFYI
RYVGGIGRFYV

SEQ ID NO: 5634 - protein, 11 aa, Artificial Sequence
  Description of Artificial Sequence: Synthetic peptide
  Seed: RMVGGIGRFYI
RVVGGIGRFYA

SEQ ID NO: 5635 - protein, 11 aa, Artificial Sequence
  Description of Artificial Sequence: Synthetic peptide
  Seed: RMVGGIGRFYI
RVVGGIGRFYI

SEQ ID NO: 5636 - protein, 11 aa, Artificial Sequence
  Description of Artificial Sequence: Synthetic peptide
  Seed: RMVGGIGRFYI
RVVGGIGRFYL

SEQ ID NO: 5637 - protein, 11 aa, Artificial Sequence
  Description of Artificial Sequence: Synthetic peptide
  Seed: RMVGGIGRFYI
RVVGGIGRFYM

SEQ ID NO: 5638 - protein, 9 aa, Artificial Sequence
  Description of Artificial Sequence: Synthetic peptide
  Seed: RMVGGIGRF
RTVGGIGRF

SEQ ID NO: 5639 - protein, 11 aa, Artificial Sequence
  Description of Artificial Sequence: Synthetic peptide
  Seed: RMVGGIGRFYI
RVVGGIGRFYF

SEQ ID NO: 5640 - protein, 11 aa, Artificial Sequence
  Description of Artificial Sequence: Synthetic peptide
  Seed: RMVGGIGRFYI
RVVGGIGRFYW

SEQ ID NO: 5641 - protein, 11 aa, Artificial Sequence
  Description of Artificial Sequence: Synthetic peptide
  Seed: RMVGGIGRFYI
RVVGGIGRFYY

SEQ ID NO: 5642 - protein, 11 aa, Artificial Sequence
  Description of Artificial Sequence: Synthetic peptide
  Seed: RMVGGIGRFYI
RVVGGIGRFYV

SEQ ID NO: 5643 - protein, 10 aa, Artificial Sequence
  Description of Artificial Sequence: Synthetic peptide
  Seed: RMVLSAFDER
RAVLSAFDER

SEQ ID NO: 5644 - protein, 10 aa, Artificial Sequence
  Description of Artificial Sequence: Synthetic peptide
  Seed: RMVLSAFDER
RAVLSAFDEK

SEQ ID NO: 5645 - protein, 10 aa, Artificial Sequence
  Description of Artificial Sequence: Synthetic peptide
  Seed: RMVLSAFDER
RRVLSAFDER

SEQ ID NO: 5646 - protein, 10 aa, Artificial Sequence
  Description of Artificial Sequence: Synthetic peptide
  Seed: RMVLSAFDER
RRVLSAFDEK

SEQ ID NO: 5647 - protein, 10 aa, Artificial Sequence
  Description of Artificial Sequence: Synthetic peptide
  Seed: RMVLSAFDER
RNVLSAFDER

SEQ ID NO: 5648 - protein, 9 aa, Artificial Sequence
  Description of Artificial Sequence: Synthetic peptide
  Seed: RMVGGIGRF
RTVGGIGRW

SEQ ID NO: 5649 - protein, 11 aa, Artificial Sequence
  Description of Artificial Sequence: Synthetic peptide
  Seed: RMVGGIGRFYI
RTVGGIGRFYY

SEQ ID NO: 5650 - protein, 10 aa, Artificial Sequence
  Description of Artificial Sequence: Synthetic peptide
  Seed: RMVLSAFDER
RDVLSAFDER

SEQ ID NO: 5651 - protein, 11 aa, Artificial Sequence
  Description of Artificial Sequence: Synthetic peptide
  Seed: RMVGGIGRFYI
RTVGGIGRFYW

SEQ ID NO: 5652 - protein, 9 aa, Artificial Sequence
  Description of Artificial Sequence: Synthetic peptide
  Seed: RMVGGIGRF
RWVGGIGRI

SEQ ID NO: 5653 - protein, 9 aa, Artificial Sequence
  Description of Artificial Sequence: Synthetic peptide
  Seed: RMVGGIGRF
RTVGGIGRV

SEQ ID NO: 5654 - protein, 11 aa, Artificial Sequence
  Description of Artificial Sequence: Synthetic peptide
  Seed: RMVGGIGRFYI
RFVGGIGRFYY

SEQ ID NO: 5655 - protein, 9 aa, Artificial Sequence
  Description of Artificial Sequence: Synthetic peptide
  Seed: RMVGGIGRF
RTVGGIGRY

SEQ ID NO: 5656 - protein, 11 aa, Artificial Sequence
  Description of Artificial Sequence: Synthetic peptide
  Seed: RMVGGIGRFYI
RFVGGIGRFYV

SEQ ID NO: 5657 - protein, 11 aa, Artificial Sequence
  Description of Artificial Sequence: Synthetic peptide
  Seed: RMVGGIGRFYI
RSVGGIGRFYH

SEQ ID NO: 5658 - protein, 11 aa, Artificial Sequence
  Description of Artificial Sequence: Synthetic peptide
  Seed: RMVGGIGRFYI
RSVGGIGRFYF

SEQ ID NO: 5659 - protein, 11 aa, Artificial Sequence
  Description of Artificial Sequence: Synthetic peptide
  Seed: RMVGGIGRFYI
RSVGGIGRFYW

SEQ ID NO: 5660 - protein, 11 aa, Artificial Sequence
  Description of Artificial Sequence: Synthetic peptide
  Seed: RMVGGIGRFYI
RSVGGIGRFYY

SEQ ID NO: 5661 - protein, 11 aa, Artificial Sequence
  Description of Artificial Sequence: Synthetic peptide
  Seed: RMVGGIGRFYI
RSVGGIGRFYV

SEQ ID NO: 5662 - protein, 11 aa, Artificial Sequence
  Description of Artificial Sequence: Synthetic peptide
  Seed: RMVGGIGRFYI
RTVGGIGRFYA

SEQ ID NO: 5663 - protein, 11 aa, Artificial Sequence
  Description of Artificial Sequence: Synthetic peptide
  Seed: RMVGGIGRFYI
RTVGGIGRFYH

SEQ ID NO: 5664 - protein, 11 aa, Artificial Sequence
  Description of Artificial Sequence: Synthetic peptide
  Seed: RMVGGIGRFYI
RTVGGIGRFYI

SEQ ID NO: 5665 - protein, 11 aa, Artificial Sequence
  Description of Artificial Sequence: Synthetic peptide
  Seed: RMVGGIGRFYI
RTVGGIGRFYL

SEQ ID NO: 5666 - protein, 11 aa, Artificial Sequence
  Description of Artificial Sequence: Synthetic peptide
  Seed: RMVGGIGRFYI
RTVGGIGRFYM

SEQ ID NO: 5667 - protein, 11 aa, Artificial Sequence
  Description of Artificial Sequence: Synthetic peptide
  Seed: RMVGGIGRFYI
RTVGGIGRFYF

SEQ ID NO: 5668 - protein, 10 aa, Artificial Sequence
  Description of Artificial Sequence: Synthetic peptide
  Seed: RMVLSAFDER
RNVLSAFDEK

SEQ ID NO: 5669 - protein, 10 aa, Artificial Sequence
  Description of Artificial Sequence: Synthetic peptide
  Seed: RMVLSAFDER
RDVLSAFDEK

SEQ ID NO: 5670 - protein, 9 aa, Artificial Sequence
  Description of Artificial Sequence: Synthetic peptide
  Seed: RMVGGIGRF
RSVGGIGRW

SEQ ID NO: 5671 - protein, 10 aa, Artificial Sequence
  Description of Artificial Sequence: Synthetic peptide
  Seed: RMVLSAFDER
RMVLSAFDEK

SEQ ID NO: 5672 - protein, 10 aa, Artificial Sequence
  Description of Artificial Sequence: Synthetic peptide
  Seed: RMVLSAFDER
RFVLSAFDEK

SEQ ID NO: 5673 - protein, 10 aa, Artificial Sequence
  Description of Artificial Sequence: Synthetic peptide
  Seed: RMVLSAFDER
RPVLSAFDER

SEQ ID NO: 5674 - protein, 10 aa, Artificial Sequence
  Description of Artificial Sequence: Synthetic peptide
  Seed: RMVLSAFDER
RPVLSAFDEK

SEQ ID NO: 5675 - protein, 10 aa, Artificial Sequence
  Description of Artificial Sequence: Synthetic peptide
  Seed: RMVLSAFDER
RSVLSAFDER

SEQ ID NO: 5676 - protein, 9 aa, Artificial Sequence
  Description of Artificial Sequence: Synthetic peptide
  Seed: RMVGGIGRF
RSVGGIGRV

SEQ ID NO: 5677 - protein, 10 aa, Artificial Sequence
  Description of Artificial Sequence: Synthetic peptide
  Seed: RMVLSAFDER
RSVLSAFDEK

SEQ ID NO: 5678 - protein, 9 aa, Artificial Sequence
  Description of Artificial Sequence: Synthetic peptide
  Seed: RMVGGIGRF
RSVGGIGRY

SEQ ID NO: 5679 - protein, 10 aa, Artificial Sequence
  Description of Artificial Sequence: Synthetic peptide
  Seed: RMVLSAFDER
RTVLSAFDER

SEQ ID NO: 5680 - protein, 10 aa, Artificial Sequence
  Description of Artificial Sequence: Synthetic peptide
  Seed: RMVLSAFDER
RTVLSAFDEK

SEQ ID NO: 5681 - protein, 10 aa, Artificial Sequence
  Description of Artificial Sequence: Synthetic peptide
  Seed: RMVLSAFDER
RTVLSAFDEY

SEQ ID NO: 5682 - protein, 10 aa, Artificial Sequence
  Description of Artificial Sequence: Synthetic peptide
  Seed: RMVLSAFDER
RWVLSAFDER

SEQ ID NO: 5683 - protein, 10 aa, Artificial Sequence
  Description of Artificial Sequence: Synthetic peptide
  Seed: RMVLSAFDER
RWVLSAFDEK

SEQ ID NO: 5684 - protein, 10 aa, Artificial Sequence
  Description of Artificial Sequence: Synthetic peptide
  Seed: RMVLSAFDER
RYVLSAFDER

SEQ ID NO: 5685 - protein, 10 aa, Artificial Sequence
  Description of Artificial Sequence: Synthetic peptide
  Seed: RMVLSAFDER
RYVLSAFDEK

SEQ ID NO: 5686 - protein, 10 aa, Artificial Sequence
  Description of Artificial Sequence: Synthetic peptide
  Seed: RMVLSAFDER
RVVLSAFDER

SEQ ID NO: 5687 - protein, 10 aa, Artificial Sequence
  Description of Artificial Sequence: Synthetic peptide
  Seed: RMVLSAFDER
RVVLSAFDEK

SEQ ID NO: 5688 - protein, 10 aa, Artificial Sequence
  Description of Artificial Sequence: Synthetic peptide
  Seed: RMVLSAFDER
RVVLSAFDEY

SEQ ID NO: 5689 - protein, 10 aa, Artificial Sequence
  Description of Artificial Sequence: Synthetic peptide
  Seed: RMVLSAFDER
RFVLSAFDER

SEQ ID NO: 5690 - protein, 9 aa, Artificial Sequence
  Description of Artificial Sequence: Synthetic peptide
  Seed: RMVGGIGRF
RTVGGIGRH

SEQ ID NO: 5691 - protein, 10 aa, Artificial Sequence
  Description of Artificial Sequence: Synthetic peptide
  Seed: RMVLSAFDER
RCVLSAFDER

SEQ ID NO: 5692 - protein, 10 aa, Artificial Sequence
  Description of Artificial Sequence: Synthetic peptide
  Seed: RMVLSAFDER
RKVLSAFDEK

SEQ ID NO: 5693 - protein, 10 aa, Artificial Sequence
  Description of Artificial Sequence: Synthetic peptide
  Seed: RMVLSAFDER
RCVLSAFDEK

SEQ ID NO: 5694 - protein, 10 aa, Artificial Sequence
  Description of Artificial Sequence: Synthetic peptide
  Seed: RMVLSAFDER
RQVLSAFDER

SEQ ID NO: 5695 - protein, 10 aa, Artificial Sequence
  Description of Artificial Sequence: Synthetic peptide
  Seed: RMVLSAFDER
RQVLSAFDEK

SEQ ID NO: 5696 - protein, 9 aa, Artificial Sequence
  Description of Artificial Sequence: Synthetic peptide
  Seed: RMVGGIGRF
RTVGGIGRM

SEQ ID NO: 5697 - protein, 10 aa, Artificial Sequence
  Description of Artificial Sequence: Synthetic peptide
  Seed: RMVLSAFDER
REVLSAFDER

SEQ ID NO: 5698 - protein, 10 aa, Artificial Sequence
  Description of Artificial Sequence: Synthetic peptide
  Seed: RMVLSAFDER
REVLSAFDEK

SEQ ID NO: 5699 - protein, 10 aa, Artificial Sequence
  Description of Artificial Sequence: Synthetic peptide
  Seed: RMVLSAFDER
RGVLSAFDER

SEQ ID NO: 5700 - protein, 10 aa, Artificial Sequence
  Description of Artificial Sequence: Synthetic peptide
  Seed: RMVLSAFDER
RGVLSAFDEK

SEQ ID NO: 5701 - protein, 9 aa, Artificial Sequence
  Description of Artificial Sequence: Synthetic peptide
  Seed: RMVGGIGRF
RTVGGIGRL

SEQ ID NO: 5702 - protein, 10 aa, Artificial Sequence
  Description of Artificial Sequence: Synthetic peptide
  Seed: RMVLSAFDER
RHVLSAFDER

SEQ ID NO: 5703 - protein, 10 aa, Artificial Sequence
  Description of Artificial Sequence: Synthetic peptide
  Seed: RMVLSAFDER
RHVLSAFDEK

SEQ ID NO: 5704 - protein, 10 aa, Artificial Sequence
  Description of Artificial Sequence: Synthetic peptide
  Seed: RMVLSAFDER
RIVLSAFDER

SEQ ID NO: 5705 - protein, 10 aa, Artificial Sequence
  Description of Artificial Sequence: Synthetic peptide
  Seed: RMVLSAFDER
RIVLSAFDEK

SEQ ID NO: 5706 - protein, 10 aa, Artificial Sequence
  Description of Artificial Sequence: Synthetic peptide
  Seed: RMVLSAFDER
RLVLSAFDER

SEQ ID NO: 5707 - protein, 9 aa, Artificial Sequence
  Description of Artificial Sequence: Synthetic peptide
  Seed: RMVGGIGRF
RTVGGIGRI

SEQ ID NO: 5708 - protein, 10 aa, Artificial Sequence
  Description of Artificial Sequence: Synthetic peptide
  Seed: RMVLSAFDER
RLVLSAFDEK

SEQ ID NO: 5709 - protein, 10 aa, Artificial Sequence
  Description of Artificial Sequence: Synthetic peptide
  Seed: RMVLSAFDER
RKVLSAFDER

SEQ ID NO: 5710 - protein, 11 aa, Artificial Sequence
  Description of Artificial Sequence: Synthetic peptide
  Seed: RNFWRGENGRR
RVFWRGENGRS

SEQ ID NO: 5711 - protein, 11 aa, Artificial Sequence
  Description of Artificial Sequence: Synthetic peptide
  Seed: RNFWRGENGRR
RVFWRGENGRT

SEQ ID NO: 5712 - protein, 9 aa, Artificial Sequence
  Description of Artificial Sequence: Synthetic peptide
  Seed: RMMESARPE
RKMESARPL

SEQ ID NO: 5713 - protein, 11 aa, Artificial Sequence
  Description of Artificial Sequence: Synthetic peptide
  Seed: RNLPFERATVM
RFLPFERATVA

SEQ ID NO: 5714 - protein, 11 aa, Artificial Sequence
  Description of Artificial Sequence: Synthetic peptide
  Seed: RNLPFERATVM
RFLPFERATVI

SEQ ID NO: 5715 - protein, 11 aa, Artificial Sequence
  Description of Artificial Sequence: Synthetic peptide
  Seed: RNLPFERATVM
RFLPFERATVL

SEQ ID NO: 5716 - protein, 11 aa, Artificial Sequence
  Description of Artificial Sequence: Synthetic peptide
  Seed: RNLPFERATVM
RFLPFERATVM

SEQ ID NO: 5717 - protein, 11 aa, Artificial Sequence
  Description of Artificial Sequence: Synthetic peptide
  Seed: RNLPFERATVM
RFLPFERATVF

SEQ ID NO: 5718 - protein, 11 aa, Artificial Sequence
  Description of Artificial Sequence: Synthetic peptide
  Seed: RNLPFERATVM
RFLPFERATVV

SEQ ID NO: 5719 - protein, 11 aa, Artificial Sequence
  Description of Artificial Sequence: Synthetic peptide
  Seed: RNLPFERATVM
RPLPFERATVA

SEQ ID NO: 5720 - protein, 11 aa, Artificial Sequence
  Description of Artificial Sequence: Synthetic peptide
  Seed: RNLPFERATVM
RPLPFERATVC

SEQ ID NO: 5721 - protein, 11 aa, Artificial Sequence
  Description of Artificial Sequence: Synthetic peptide
  Seed: RNLPFERATVM
RPLPFERATVG

SEQ ID NO: 5722 - protein, 10 aa, Artificial Sequence
  Description of Artificial Sequence: Synthetic peptide
  Seed: RNLPFERATV
RRLPFERATF

SEQ ID NO: 5723 - protein, 11 aa, Artificial Sequence
  Description of Artificial Sequence: Synthetic peptide
  Seed: RNLPFERATVM
RPLPFERATVI

SEQ ID NO: 5724 - protein, 11 aa, Artificial Sequence
  Description of Artificial Sequence: Synthetic peptide
  Seed: RNLPFERATVM
RPLPFERATVL

SEQ ID NO: 5725 - protein, 9 aa, Artificial Sequence
  Description of Artificial Sequence: Synthetic peptide
  Seed: RMMESARPE
RKMESARPI

SEQ ID NO: 5726 - protein, 9 aa, Artificial Sequence
  Description of Artificial Sequence: Synthetic peptide
  Seed: RMMESARPE
RKMESARPH

SEQ ID NO: 5727 - protein, 11 aa, Artificial Sequence
  Description of Artificial Sequence: Synthetic peptide
  Seed: RNLPFERATVM
RPLPFERATVM

SEQ ID NO: 5728 - protein, 11 aa, Artificial Sequence
  Description of Artificial Sequence: Synthetic peptide
  Seed: RNLPFERATVM
RPLPFERATVF

SEQ ID NO: 5729 - protein, 11 aa, Artificial Sequence
  Description of Artificial Sequence: Synthetic peptide
  Seed: RNLPFERATVM
RPLPFERATVS

SEQ ID NO: 5730 - protein, 11 aa, Artificial Sequence
  Description of Artificial Sequence: Synthetic peptide
  Seed: RNLPFERATVM
RPLPFERATVT

SEQ ID NO: 5731 - protein, 11 aa, Artificial Sequence
  Description of Artificial Sequence: Synthetic peptide
  Seed: RNLPFERATVM
RMLPFERATVV

SEQ ID NO: 5732 - protein, 9 aa, Artificial Sequence
  Description of Artificial Sequence: Synthetic peptide
  Seed: RMMESARPE
RKMESARPM

SEQ ID NO: 5733 - protein, 11 aa, Artificial Sequence
  Description of Artificial Sequence: Synthetic peptide
  Seed: RNLPFERATVM
RMLPFERATVF

SEQ ID NO: 5734 - protein, 9 aa, Artificial Sequence
  Description of Artificial Sequence: Synthetic peptide
  Seed: RMMESARPE
RKMESARPF

SEQ ID NO: 5735 - protein, 11 aa, Artificial Sequence
  Description of Artificial Sequence: Synthetic peptide
  Seed: RNLPFERATVM
RLLPFERATVI

SEQ ID NO: 5736 - protein, 11 aa, Artificial Sequence
  Description of Artificial Sequence: Synthetic peptide
  Seed: RNLPFERATVM
RLLPFERATVL

SEQ ID NO: 5737 - protein, 11 aa, Artificial Sequence
  Description of Artificial Sequence: Synthetic peptide
  Seed: RNLPFERATVM
RLLPFERATVM

SEQ ID NO: 5738 - protein, 11 aa, Artificial Sequence
  Description of Artificial Sequence: Synthetic peptide
  Seed: RNLPFERATVM
RLLPFERATVF

SEQ ID NO: 5739 - protein, 11 aa, Artificial Sequence
  Description of Artificial Sequence: Synthetic peptide
  Seed: RNLPFERATVM
RLLPFERATVV

SEQ ID NO: 5740 - protein, 11 aa, Artificial Sequence
  Description of Artificial Sequence: Synthetic peptide
  Seed: RNLPFERATVM
RKLPFERATVA

SEQ ID NO: 5741 - protein, 11 aa, Artificial Sequence
  Description of Artificial Sequence: Synthetic peptide
  Seed: RNLPFERATVM
RKLPFERATVI

SEQ ID NO: 5742 - protein, 11 aa, Artificial Sequence
  Description of Artificial Sequence: Synthetic peptide
  Seed: RNLPFERATVM
RKLPFERATVL

SEQ ID NO: 5743 - protein, 9 aa, Artificial Sequence
  Description of Artificial Sequence: Synthetic peptide
  Seed: RMMESARPE
RKMESARPS

SEQ ID NO: 5744 - protein, 11 aa, Artificial Sequence
  Description of Artificial Sequence: Synthetic peptide
  Seed: RNLPFERATVM
RKLPFERATVM

SEQ ID NO: 5745 - protein, 11 aa, Artificial Sequence
  Description of Artificial Sequence: Synthetic peptide
  Seed: RNLPFERATVM
RKLPFERATVF

SEQ ID NO: 5746 - protein, 11 aa, Artificial Sequence
  Description of Artificial Sequence: Synthetic peptide
  Seed: RNLPFERATVM
RKLPFERATVV

SEQ ID NO: 5747 - protein, 11 aa, Artificial Sequence
  Description of Artificial Sequence: Synthetic peptide
  Seed: RNLPFERATVM
RMLPFERATVA

SEQ ID NO: 5748 - protein, 11 aa, Artificial Sequence
  Description of Artificial Sequence: Synthetic peptide
  Seed: RNLPFERATVM
RMLPFERATVI

SEQ ID NO: 5749 - protein, 11 aa, Artificial Sequence
  Description of Artificial Sequence: Synthetic peptide
  Seed: RNLPFERATVM
RMLPFERATVL

SEQ ID NO: 5750 - protein, 11 aa, Artificial Sequence
  Description of Artificial Sequence: Synthetic peptide
  Seed: RNLPFERATVM
RMLPFERATVM

SEQ ID NO: 5751 - protein, 9 aa, Artificial Sequence
  Description of Artificial Sequence: Synthetic peptide
  Seed: RMMESARPE
RKMESARPP

SEQ ID NO: 5752 - protein, 11 aa, Artificial Sequence
  Description of Artificial Sequence: Synthetic peptide
  Seed: RNLPFERATVM
RPLPFERATVW

SEQ ID NO: 5753 - protein, 11 aa, Artificial Sequence
  Description of Artificial Sequence: Synthetic peptide
  Seed: RNLPFERATVM
RPLPFERATVY

SEQ ID NO: 5754 - protein, 11 aa, Artificial Sequence
  Description of Artificial Sequence: Synthetic peptide
  Seed: RNLPFERATVM
RPLPFERATVV

SEQ ID NO: 5755 - protein, 11 aa, Artificial Sequence
  Description of Artificial Sequence: Synthetic peptide
  Seed: RNLPFERATVM
RYLPFERATVI

SEQ ID NO: 5756 - protein, 11 aa, Artificial Sequence
  Description of Artificial Sequence: Synthetic peptide
  Seed: RNLPFERATVM
RYLPFERATVM

SEQ ID NO: 5757 - protein, 11 aa, Artificial Sequence
  Description of Artificial Sequence: Synthetic peptide
  Seed: RNLPFERATVM
RYLPFERATVF

SEQ ID NO: 5758 - protein, 9 aa, Artificial Sequence
  Description of Artificial Sequence: Synthetic peptide
  Seed: RMMESARPE
RKMESARPQ

SEQ ID NO: 5759 - protein, 11 aa, Artificial Sequence
  Description of Artificial Sequence: Synthetic peptide
  Seed: RNLPFERATVM
RYLPFERATVV

SEQ ID NO: 5760 - protein, 11 aa, Artificial Sequence
  Description of Artificial Sequence: Synthetic peptide
  Seed: RNLPFERATVM
RVLPFERATVA

SEQ ID NO: 5761 - protein, 11 aa, Artificial Sequence
  Description of Artificial Sequence: Synthetic peptide
  Seed: RNLPFERATVM
RVLPFERATVI

SEQ ID NO: 5762 - protein, 11 aa, Artificial Sequence
  Description of Artificial Sequence: Synthetic peptide
  Seed: RNLPFERATVM
RVLPFERATVL

SEQ ID NO: 5763 - protein, 11 aa, Artificial Sequence
  Description of Artificial Sequence: Synthetic peptide
  Seed: RNLPFERATVM
RVLPFERATVM

SEQ ID NO: 5764 - protein, 11 aa, Artificial Sequence
  Description of Artificial Sequence: Synthetic peptide
  Seed: RNLPFERATVM
RVLPFERATVF

SEQ ID NO: 5765 - protein, 9 aa, Artificial Sequence
  Description of Artificial Sequence: Synthetic peptide
  Seed: RMMESARPE
RKMESARPC

SEQ ID NO: 5766 - protein, 11 aa, Artificial Sequence
  Description of Artificial Sequence: Synthetic peptide
  Seed: RNLPFERATVM
RVLPFERATVV

SEQ ID NO: 5767 - protein, 9 aa, Artificial Sequence
  Description of Artificial Sequence: Synthetic peptide
  Seed: RMMESARPE
RKMESARPN

SEQ ID NO: 5768 - protein, 11 aa, Artificial Sequence
  Description of Artificial Sequence: Synthetic peptide
  Seed: RNRYLEEHPSA
RARYLEEHPSA

SEQ ID NO: 5769 - protein, 11 aa, Artificial Sequence
  Description of Artificial Sequence: Synthetic peptide
  Seed: RNRYLEEHPSA
RARYLEEHPSR

SEQ ID NO: 5770 - protein, 11 aa, Artificial Sequence
  Description of Artificial Sequence: Synthetic peptide
  Seed: RNRYLEEHPSA
RARYLEEHPSI

SEQ ID NO: 5771 - protein, 11 aa, Artificial Sequence
  Description of Artificial Sequence: Synthetic peptide
  Seed: RNRYLEEHPSA
RARYLEEHPSL

SEQ ID NO: 5772 - protein, 11 aa, Artificial Sequence
  Description of Artificial Sequence: Synthetic peptide
  Seed: RNRYLEEHPSA
RARYLEEHPSK

SEQ ID NO: 5773 - protein, 11 aa, Artificial Sequence
  Description of Artificial Sequence: Synthetic peptide
  Seed: RNLPFERATVM
RYLPFERATVL

SEQ ID NO: 5774 - protein, 11 aa, Artificial Sequence
  Description of Artificial Sequence: Synthetic peptide
  Seed: RNLPFERATVM
RYLPFERATVA

SEQ ID NO: 5775 - protein, 11 aa, Artificial Sequence
  Description of Artificial Sequence: Synthetic peptide
  Seed: RNLPFERATVM
RSLPFERATVA

SEQ ID NO: 5776 - protein, 11 aa, Artificial Sequence
  Description of Artificial Sequence: Synthetic peptide
  Seed: RNLPFERATVM
RWLPFERATVV

SEQ ID NO: 5777 - protein, 11 aa, Artificial Sequence
  Description of Artificial Sequence: Synthetic peptide
  Seed: RNLPFERATVM
RSLPFERATVI

SEQ ID NO: 5778 - protein, 11 aa, Artificial Sequence
  Description of Artificial Sequence: Synthetic peptide
  Seed: RNLPFERATVM
RSLPFERATVL

SEQ ID NO: 5779 - protein, 11 aa, Artificial Sequence
  Description of Artificial Sequence: Synthetic peptide
  Seed: RNLPFERATVM
RSLPFERATVM

SEQ ID NO: 5780 - protein, 11 aa, Artificial Sequence
  Description of Artificial Sequence: Synthetic peptide
  Seed: RNLPFERATVM
RSLPFERATVF

SEQ ID NO: 5781 - protein, 11 aa, Artificial Sequence
  Description of Artificial Sequence: Synthetic peptide
  Seed: RNLPFERATVM
RSLPFERATVV

SEQ ID NO: 5782 - protein, 9 aa, Artificial Sequence
  Description of Artificial Sequence: Synthetic peptide
  Seed: RMMESARPE
RKMESARPG

SEQ ID NO: 5783 - protein, 11 aa, Artificial Sequence
  Description of Artificial Sequence: Synthetic peptide
  Seed: RNLPFERATVM
RTLPFERATVA

SEQ ID NO: 5784 - protein, 11 aa, Artificial Sequence
  Description of Artificial Sequence: Synthetic peptide
  Seed: RNLPFERATVM
RTLPFERATVI

SEQ ID NO: 5785 - protein, 11 aa, Artificial Sequence
  Description of Artificial Sequence: Synthetic peptide
  Seed: RNLPFERATVM
RTLPFERATVL

SEQ ID NO: 5786 - protein, 11 aa, Artificial Sequence
  Description of Artificial Sequence: Synthetic peptide
  Seed: RNLPFERATVM
RTLPFERATVM

SEQ ID NO: 5787 - protein, 11 aa, Artificial Sequence
  Description of Artificial Sequence: Synthetic peptide
  Seed: RNLPFERATVM
RTLPFERATVF

SEQ ID NO: 5788 - protein, 11 aa, Artificial Sequence
  Description of Artificial Sequence: Synthetic peptide
  Seed: RNLPFERATVM
RTLPFERATVV

SEQ ID NO: 5789 - protein, 11 aa, Artificial Sequence
  Description of Artificial Sequence: Synthetic peptide
  Seed: RNLPFERATVM
RWLPFERATVA

SEQ ID NO: 5790 - protein, 11 aa, Artificial Sequence
  Description of Artificial Sequence: Synthetic peptide
  Seed: RNLPFERATVM
RWLPFERATVI

SEQ ID NO: 5791 - protein, 11 aa, Artificial Sequence
  Description of Artificial Sequence: Synthetic peptide
  Seed: RNLPFERATVM
RWLPFERATVL

SEQ ID NO: 5792 - protein, 11 aa, Artificial Sequence
  Description of Artificial Sequence: Synthetic peptide
  Seed: RNLPFERATVM
RWLPFERATVM

SEQ ID NO: 5793 - protein, 11 aa, Artificial Sequence
  Description of Artificial Sequence: Synthetic peptide
  Seed: RNLPFERATVM
RWLPFERATVF

SEQ ID NO: 5794 - protein, 11 aa, Artificial Sequence
  Description of Artificial Sequence: Synthetic peptide
  Seed: RNLPFERATVM
RLLPFERATVA

SEQ ID NO: 5795 - protein, 11 aa, Artificial Sequence
  Description of Artificial Sequence: Synthetic peptide
  Seed: RNLPFERATVM
RILPFERATVV

SEQ ID NO: 5796 - protein, 11 aa, Artificial Sequence
  Description of Artificial Sequence: Synthetic peptide
  Seed: RNLPFERATVM
RILPFERATVF

SEQ ID NO: 5797 - protein, 11 aa, Artificial Sequence
  Description of Artificial Sequence: Synthetic peptide
  Seed: RNLPFERATVM
RALPFERATVM

SEQ ID NO: 5798 - protein, 11 aa, Artificial Sequence
  Description of Artificial Sequence: Synthetic peptide
  Seed: RNLPFERATVM
RALPFERATVV

SEQ ID NO: 5799 - protein, 9 aa, Artificial Sequence
  Description of Artificial Sequence: Synthetic peptide
  Seed: RMMESARPE
RMMESARPQ

SEQ ID NO: 5800 - protein, 11 aa, Artificial Sequence
  Description of Artificial Sequence: Synthetic peptide
  Seed: RNLPFERATVM
RRLPFERATVA

SEQ ID NO: 5801 - protein, 11 aa, Artificial Sequence
  Description of Artificial Sequence: Synthetic peptide
  Seed: RNLPFERATVM
RRLPFERATVI

SEQ ID NO: 5802 - protein, 11 aa, Artificial Sequence
  Description of Artificial Sequence: Synthetic peptide
  Seed: RNLPFERATVM
RRLPFERATVL

SEQ ID NO: 5803 - protein, 11 aa, Artificial Sequence
  Description of Artificial Sequence: Synthetic peptide
  Seed: RNLPFERATVM
RRLPFERATVM

SEQ ID NO: 5804 - protein, 9 aa, Artificial Sequence
  Description of Artificial Sequence: Synthetic peptide
  Seed: RMMESARPE
RMMESARPC

SEQ ID NO: 5805 - protein, 11 aa, Artificial Sequence
  Description of Artificial Sequence: Synthetic peptide
  Seed: RNLPFERATVM
RRLPFERATVF

SEQ ID NO: 5806 - protein, 11 aa, Artificial Sequence
  Description of Artificial Sequence: Synthetic peptide
  Seed: RNLPFERATVM
RRLPFERATVV

SEQ ID NO: 5807 - protein, 9 aa, Artificial Sequence
  Description of Artificial Sequence: Synthetic peptide
  Seed: RMMESARPE
RMMESARPN

SEQ ID NO: 5808 - protein, 11 aa, Artificial Sequence
  Description of Artificial Sequence: Synthetic peptide
  Seed: RNLPFERATVM
RNLPFERATVA

SEQ ID NO: 5809 - protein, 11 aa, Artificial Sequence
  Description of Artificial Sequence: Synthetic peptide
  Seed: RNLPFERATVM
RNLPFERATVI

SEQ ID NO: 5810 - protein, 11 aa, Artificial Sequence
  Description of Artificial Sequence: Synthetic peptide
  Seed: RNLPFERATVM
RNLPFERATVL

SEQ ID NO: 5811 - protein, 9 aa, Artificial Sequence
  Description of Artificial Sequence: Synthetic peptide
  Seed: RMMESARPE
RMMESARPA

SEQ ID NO: 5812 - protein, 11 aa, Artificial Sequence
  Description of Artificial Sequence: Synthetic peptide
  Seed: RNLPFERATVM
RNLPFERATVF

SEQ ID NO: 5813 - protein, 11 aa, Artificial Sequence
  Description of Artificial Sequence: Synthetic peptide
  Seed: RNLPFERATVM
RNLPFERATVV

SEQ ID NO: 5814 - protein, 11 aa, Artificial Sequence
  Description of Artificial Sequence: Synthetic peptide
  Seed: RNLPFERATVM
RDLPFERATVA

SEQ ID NO: 5815 - protein, 11 aa, Artificial Sequence
  Description of Artificial Sequence: Synthetic peptide
  Seed: RNLPFERATVM
RALPFERATVF

SEQ ID NO: 5816 - protein, 11 aa, Artificial Sequence
  Description of Artificial Sequence: Synthetic peptide
  Seed: RNLPFERATVM
RALPFERATVL

SEQ ID NO: 5817 - protein, 11 aa, Artificial Sequence
  Description of Artificial Sequence: Synthetic peptide
  Seed: RNLPFERATVM
RDLPFERATVL

SEQ ID NO: 5818 - protein, 11 aa, Artificial Sequence
  Description of Artificial Sequence: Synthetic peptide
  Seed: RNLPFERATVM
RALPFERATVI

SEQ ID NO: 5819 - protein, 10 aa, Artificial Sequence
  Description of Artificial Sequence: Synthetic peptide
  Seed: RNLPFERATV
RRLPFERATT

SEQ ID NO: 5820 - protein, 9 aa, Artificial Sequence
  Description of Artificial Sequence: Synthetic peptide
  Seed: RMMESARPE
RMMESARPI

SEQ ID NO: 5821 - protein, 9 aa, Artificial Sequence
  Description of Artificial Sequence: Synthetic peptide
  Seed: RMMESARPE
RMMESARPH

SEQ ID NO: 5822 - protein, 10 aa, Artificial Sequence
  Description of Artificial Sequence: Synthetic peptide
  Seed: RNLPFERATV
RRLPFERATW

SEQ ID NO: 5823 - protein, 10 aa, Artificial Sequence
  Description of Artificial Sequence: Synthetic peptide
  Seed: RNLPFERATV
RRLPFERATY

SEQ ID NO: 5824 - protein, 10 aa, Artificial Sequence
  Description of Artificial Sequence: Synthetic peptide
  Seed: RNLPFERATV
RRLPFERATV

SEQ ID NO: 5825 - protein, 9 aa, Artificial Sequence
  Description of Artificial Sequence: Synthetic peptide
  Seed: RMMESARPE
RMMESARPG

SEQ ID NO: 5826 - protein, 10 aa, Artificial Sequence
  Description of Artificial Sequence: Synthetic peptide
  Seed: RNLPFERATV
RQLPFERATI

SEQ ID NO: 5827 - protein, 10 aa, Artificial Sequence
  Description of Artificial Sequence: Synthetic peptide
  Seed: RNLPFERATV
RQLPFERATL

SEQ ID NO: 5828 - protein, 10 aa, Artificial Sequence
  Description of Artificial Sequence: Synthetic peptide
  Seed: RNLPFERATV
RQLPFERATM

SEQ ID NO: 5829 - protein, 10 aa, Artificial Sequence
  Description of Artificial Sequence: Synthetic peptide
  Seed: RNLPFERATV
RQLPFERATF

SEQ ID NO: 5830 - protein, 10 aa, Artificial Sequence
  Description of Artificial Sequence: Synthetic peptide
  Seed: RNLPFERATV
RQLPFERATV

SEQ ID NO: 5831 - protein, 10 aa, Artificial Sequence
  Description of Artificial Sequence: Synthetic peptide
  Seed: RNLPFERATV
RKLPFERATL

SEQ ID NO: 5832 - protein, 10 aa, Artificial Sequence
  Description of Artificial Sequence: Synthetic peptide
  Seed: RNLPFERATV
RKLPFERATM

SEQ ID NO: 5833 - protein, 10 aa, Artificial Sequence
  Description of Artificial Sequence: Synthetic peptide
  Seed: RNLPFERATV
RKLPFERATF

SEQ ID NO: 5834 - protein, 11 aa, Artificial Sequence
  Description of Artificial Sequence: Synthetic peptide
  Seed: RNLPFERATVM
RALPFERATVA

SEQ ID NO: 5835 - protein, 11 aa, Artificial Sequence
  Description of Artificial Sequence: Synthetic peptide
  Seed: RNLPFERATVM
RDLPFERATVI

SEQ ID NO: 5836 - protein, 11 aa, Artificial Sequence
  Description of Artificial Sequence: Synthetic peptide
  Seed: RNLPFERATVM
RDLPFERATVM

SEQ ID NO: 5837 - protein, 11 aa, Artificial Sequence
  Description of Artificial Sequence: Synthetic peptide
  Seed: RNLPFERATVM
RILPFERATVM

SEQ ID NO: 5838 - protein, 11 aa, Artificial Sequence
  Description of Artificial Sequence: Synthetic peptide
  Seed: RNLPFERATVM
RELPFERATVM

SEQ ID NO: 5839 - protein, 11 aa, Artificial Sequence
  Description of Artificial Sequence: Synthetic peptide
  Seed: RNLPFERATVM
RELPFERATVV

SEQ ID NO: 5840 - protein, 11 aa, Artificial Sequence
  Description of Artificial Sequence: Synthetic peptide
  Seed: RNLPFERATVM
RGLPFERATVA

SEQ ID NO: 5841 - protein, 11 aa, Artificial Sequence
  Description of Artificial Sequence: Synthetic peptide
  Seed: RNLPFERATVM
RGLPFERATVI

SEQ ID NO: 5842 - protein, 11 aa, Artificial Sequence
  Description of Artificial Sequence: Synthetic peptide
  Seed: RNLPFERATVM
RGLPFERATVL

SEQ ID NO: 5843 - protein, 11 aa, Artificial Sequence
  Description of Artificial Sequence: Synthetic peptide
  Seed: RNLPFERATVM
RGLPFERATVM

SEQ ID NO: 5844 - protein, 11 aa, Artificial Sequence
  Description of Artificial Sequence: Synthetic peptide
  Seed: RNLPFERATVM
RGLPFERATVF

SEQ ID NO: 5845 - protein, 11 aa, Artificial Sequence
  Description of Artificial Sequence: Synthetic peptide
  Seed: RNLPFERATVM
RGLPFERATVV

SEQ ID NO: 5846 - protein, 11 aa, Artificial Sequence
  Description of Artificial Sequence: Synthetic peptide
  Seed: RNLPFERATVM
RHLPFERATVA

SEQ ID NO: 5847 - protein, 11 aa, Artificial Sequence
  Description of Artificial Sequence: Synthetic peptide
  Seed: RNLPFERATVM
RHLPFERATVI

SEQ ID NO: 5848 - protein, 11 aa, Artificial Sequence
  Description of Artificial Sequence: Synthetic peptide
  Seed: RNLPFERATVM
RHLPFERATVL

SEQ ID NO: 5849 - protein, 9 aa, Artificial Sequence
  Description of Artificial Sequence: Synthetic peptide
  Seed: RMMESARPE
RKMESARPT

SEQ ID NO: 5850 - protein, 11 aa, Artificial Sequence
  Description of Artificial Sequence: Synthetic peptide
  Seed: RNLPFERATVM
RHLPFERATVM

SEQ ID NO: 5851 - protein, 11 aa, Artificial Sequence
  Description of Artificial Sequence: Synthetic peptide
  Seed: RNLPFERATVM
RHLPFERATVF

SEQ ID NO: 5852 - protein, 11 aa, Artificial Sequence
  Description of Artificial Sequence: Synthetic peptide
  Seed: RNLPFERATVM
RHLPFERATVV

SEQ ID NO: 5853 - protein, 11 aa, Artificial Sequence
  Description of Artificial Sequence: Synthetic peptide
  Seed: RNLPFERATVM
RILPFERATVA

SEQ ID NO: 5854 - protein, 11 aa, Artificial Sequence
  Description of Artificial Sequence: Synthetic peptide
  Seed: RNLPFERATVM
RILPFERATVI

SEQ ID NO: 5855 - protein, 11 aa, Artificial Sequence
  Description of Artificial Sequence: Synthetic peptide
  Seed: RNLPFERATVM
RILPFERATVL

SEQ ID NO: 5856 - protein, 11 aa, Artificial Sequence
  Description of Artificial Sequence: Synthetic peptide
  Seed: RNLPFERATVM
RELPFERATVF

SEQ ID NO: 5857 - protein, 11 aa, Artificial Sequence
  Description of Artificial Sequence: Synthetic peptide
  Seed: RNLPFERATVM
RELPFERATVL

SEQ ID NO: 5858 - protein, 9 aa, Artificial Sequence
  Description of Artificial Sequence: Synthetic peptide
  Seed: RMMESARPE
RKMESARPV

SEQ ID NO: 5859 - protein, 11 aa, Artificial Sequence
  Description of Artificial Sequence: Synthetic peptide
  Seed: RNLPFERATVM
RELPFERATVI

SEQ ID NO: 5860 - protein, 11 aa, Artificial Sequence
  Description of Artificial Sequence: Synthetic peptide
  Seed: RNLPFERATVM
RDLPFERATVF

SEQ ID NO: 5861 - protein, 11 aa, Artificial Sequence
  Description of Artificial Sequence: Synthetic peptide
  Seed: RNLPFERATVM
RDLPFERATVV

SEQ ID NO: 5862 - protein, 11 aa, Artificial Sequence
  Description of Artificial Sequence: Synthetic peptide
  Seed: RNLPFERATVM
RCLPFERATVA

SEQ ID NO: 5863 - protein, 9 aa, Artificial Sequence
  Description of Artificial Sequence: Synthetic peptide
  Seed: RMMESARPE
RKMESARPY

SEQ ID NO: 5864 - protein, 11 aa, Artificial Sequence
  Description of Artificial Sequence: Synthetic peptide
  Seed: RNLPFERATVM
RCLPFERATVI

SEQ ID NO: 5865 - protein, 11 aa, Artificial Sequence
  Description of Artificial Sequence: Synthetic peptide
  Seed: RNLPFERATVM
RCLPFERATVL

SEQ ID NO: 5866 - protein, 9 aa, Artificial Sequence
  Description of Artificial Sequence: Synthetic peptide
  Seed: RMMESARPE
RKMESARPW

SEQ ID NO: 5867 - protein, 11 aa, Artificial Sequence
  Description of Artificial Sequence: Synthetic peptide
  Seed: RNLPFERATVM
RCLPFERATVM

SEQ ID NO: 5868 - protein, 11 aa, Artificial Sequence
  Description of Artificial Sequence: Synthetic peptide
  Seed: RNLPFERATVM
RCLPFERATVF

SEQ ID NO: 5869 - protein, 11 aa, Artificial Sequence
  Description of Artificial Sequence: Synthetic peptide
  Seed: RNLPFERATVM
RCLPFERATVV

SEQ ID NO: 5870 - protein, 11 aa, Artificial Sequence
  Description of Artificial Sequence: Synthetic peptide
  Seed: RNLPFERATVM
RQLPFERATVA

SEQ ID NO: 5871 - protein, 11 aa, Artificial Sequence
  Description of Artificial Sequence: Synthetic peptide
  Seed: RNLPFERATVM
RQLPFERATVI

SEQ ID NO: 5872 - protein, 11 aa, Artificial Sequence
  Description of Artificial Sequence: Synthetic peptide
  Seed: RNLPFERATVM
RQLPFERATVL

SEQ ID NO: 5873 - protein, 11 aa, Artificial Sequence
  Description of Artificial Sequence: Synthetic peptide
  Seed: RNLPFERATVM
RQLPFERATVM

SEQ ID NO: 5874 - protein, 11 aa, Artificial Sequence
  Description of Artificial Sequence: Synthetic peptide
  Seed: RNLPFERATVM
RQLPFERATVF

SEQ ID NO: 5875 - protein, 11 aa, Artificial Sequence
  Description of Artificial Sequence: Synthetic peptide
  Seed: RNLPFERATVM
RQLPFERATVV

SEQ ID NO: 5876 - protein, 11 aa, Artificial Sequence
  Description of Artificial Sequence: Synthetic peptide
  Seed: RNLPFERATVM
RELPFERATVA

SEQ ID NO: 5877 - protein, 11 aa, Artificial Sequence
  Description of Artificial Sequence: Synthetic peptide
  Seed: RNRYLEEHPSA
RARYLEEHPSM

SEQ ID NO: 5878 - protein, 11 aa, Artificial Sequence
  Description of Artificial Sequence: Synthetic peptide
  Seed: RNRYLEEHPSA
RARYLEEHPSS

SEQ ID NO: 5879 - protein, 11 aa, Artificial Sequence
  Description of Artificial Sequence: Synthetic peptide
  Seed: RNRYLEEHPSA
RARYLEEHPSY

SEQ ID NO: 5880 - protein, 11 aa, Artificial Sequence
  Description of Artificial Sequence: Synthetic peptide
  Seed: RNRYLEEHPSA
RTRYLEEHPSS

SEQ ID NO: 5881 - protein, 9 aa, Artificial Sequence
  Description of Artificial Sequence: Synthetic peptide
  Seed: RMMESARPE
RHMESARPY

SEQ ID NO: 5882 - protein, 11 aa, Artificial Sequence
  Description of Artificial Sequence: Synthetic peptide
  Seed: RNRYLEEHPSA
RTRYLEEHPSY

SEQ ID NO: 5883 - protein, 11 aa, Artificial Sequence
  Description of Artificial Sequence: Synthetic peptide
  Seed: RNRYLEEHPSA
RTRYLEEHPSV

SEQ ID NO: 5884 - protein, 11 aa, Artificial Sequence
  Description of Artificial Sequence: Synthetic peptide
  Seed: RNRYLEEHPSA
RWRYLEEHPSA

SEQ ID NO: 5885 - protein, 11 aa, Artificial Sequence
  Description of Artificial Sequence: Synthetic peptide
  Seed: RNRYLEEHPSA
RWRYLEEHPSI

SEQ ID NO: 5886 - protein, 11 aa, Artificial Sequence
  Description of Artificial Sequence: Synthetic peptide
  Seed: RNRYLEEHPSA
RWRYLEEHPSL

SEQ ID NO: 5887 - protein, 9 aa, Artificial Sequence
  Description of Artificial Sequence: Synthetic peptide
  Seed: RMMESARPE
RHMESARPW

SEQ ID NO: 5888 - protein, 11 aa, Artificial Sequence
  Description of Artificial Sequence: Synthetic peptide
  Seed: RNRYLEEHPSA
RWRYLEEHPSK

SEQ ID NO: 5889 - protein, 11 aa, Artificial Sequence
  Description of Artificial Sequence: Synthetic peptide
  Seed: RNRYLEEHPSA
RWRYLEEHPSM

SEQ ID NO: 5890 - protein, 11 aa, Artificial Sequence
  Description of Artificial Sequence: Synthetic peptide
  Seed: RNRYLEEHPSA
RWRYLEEHPSV

SEQ ID NO: 5891 - protein, 11 aa, Artificial Sequence
  Description of Artificial Sequence: Synthetic peptide
  Seed: RNRYLEEHPSA
RYRYLEEHPSA

SEQ ID NO: 5892 - protein, 11 aa, Artificial Sequence
  Description of Artificial Sequence: Synthetic peptide
  Seed: RNRYLEEHPSA
RYRYLEEHPSR

SEQ ID NO: 5893 - protein, 9 aa, Artificial Sequence
  Description of Artificial Sequence: Synthetic peptide
  Seed: RMMESARPE
RHMESARPF

SEQ ID NO: 5894 - protein, 11 aa, Artificial Sequence
  Description of Artificial Sequence: Synthetic peptide
  Seed: RNRYLEEHPSA
RYRYLEEHPSG

SEQ ID NO: 5895 - protein, 9 aa, Artificial Sequence
  Description of Artificial Sequence: Synthetic peptide
  Seed: RMMESARPE
RHMESARPM

SEQ ID NO: 5896 - protein, 10 aa, Artificial Sequence
  Description of Artificial Sequence: Synthetic peptide
  Seed: RMVGGIGRFY
RCVGGIGRFY

SEQ ID NO: 5897 - protein, 11 aa, Artificial Sequence
  Description of Artificial Sequence: Synthetic peptide
  Seed: RNRYLEEHPSA
RYRYLEEHPSL

SEQ ID NO: 5898 - protein, 11 aa, Artificial Sequence
  Description of Artificial Sequence: Synthetic peptide
  Seed: RNRYLEEHPSA
RTRYLEEHPST

SEQ ID NO: 5899 - protein, 11 aa, Artificial Sequence
  Description of Artificial Sequence: Synthetic peptide
  Seed: RNRYLEEHPSA
RTRYLEEHPSP

SEQ ID NO: 5900 - protein, 9 aa, Artificial Sequence
  Description of Artificial Sequence: Synthetic peptide
  Seed: RMMESARPE
RHMESARPL

SEQ ID NO: 5901 - protein, 11 aa, Artificial Sequence
  Description of Artificial Sequence: Synthetic peptide
  Seed: RNRYLEEHPSA
RTRYLEEHPSF

SEQ ID NO: 5902 - protein, 11 aa, Artificial Sequence
  Description of Artificial Sequence: Synthetic peptide
  Seed: RNRYLEEHPSA
RSRYLEEHPSV

SEQ ID NO: 5903 - protein, 11 aa, Artificial Sequence
  Description of Artificial Sequence: Synthetic peptide
  Seed: RNRYLEEHPSA
RTRYLEEHPSA

SEQ ID NO: 5904 - protein, 11 aa, Artificial Sequence
  Description of Artificial Sequence: Synthetic peptide
  Seed: RNRYLEEHPSA
RTRYLEEHPSR

SEQ ID NO: 5905 - protein, 11 aa, Artificial Sequence
  Description of Artificial Sequence: Synthetic peptide
  Seed: RNRYLEEHPSA
RTRYLEEHPSN

SEQ ID NO: 5906 - protein, 9 aa, Artificial Sequence
  Description of Artificial Sequence: Synthetic peptide
  Seed: RMMESARPE
RIMESARPI

SEQ ID NO: 5907 - protein, 11 aa, Artificial Sequence
  Description of Artificial Sequence: Synthetic peptide
  Seed: RNRYLEEHPSA
RTRYLEEHPSC

SEQ ID NO: 5908 - protein, 11 aa, Artificial Sequence
  Description of Artificial Sequence: Synthetic peptide
  Seed: RNRYLEEHPSA
RTRYLEEHPSQ

SEQ ID NO: 5909 - protein, 11 aa, Artificial Sequence
  Description of Artificial Sequence: Synthetic peptide
  Seed: RNRYLEEHPSA
RTRYLEEHPSE

SEQ ID NO: 5910 - protein, 9 aa, Artificial Sequence
  Description of Artificial Sequence: Synthetic peptide
  Seed: RMMESARPE
RIMESARPH

SEQ ID NO: 5911 - protein, 9 aa, Artificial Sequence
  Description of Artificial Sequence: Synthetic peptide
  Seed: RMMESARPE
RIMESARPA

SEQ ID NO: 5912 - protein, 11 aa, Artificial Sequence
  Description of Artificial Sequence: Synthetic peptide
  Seed: RNRYLEEHPSA
RTRYLEEHPSG

SEQ ID NO: 5913 - protein, 11 aa, Artificial Sequence
  Description of Artificial Sequence: Synthetic peptide
  Seed: RNRYLEEHPSA
RTRYLEEHPSH

SEQ ID NO: 5914 - protein, 11 aa, Artificial Sequence
  Description of Artificial Sequence: Synthetic peptide
  Seed: RNRYLEEHPSA
RTRYLEEHPSI

SEQ ID NO: 5915 - protein, 11 aa, Artificial Sequence
  Description of Artificial Sequence: Synthetic peptide
  Seed: RNRYLEEHPSA
RTRYLEEHPSL

SEQ ID NO: 5916 - protein, 11 aa, Artificial Sequence
  Description of Artificial Sequence: Synthetic peptide
  Seed: RNRYLEEHPSA
RTRYLEEHPSK

SEQ ID NO: 5917 - protein, 11 aa, Artificial Sequence
  Description of Artificial Sequence: Synthetic peptide
  Seed: RNRYLEEHPSA
RTRYLEEHPSM

SEQ ID NO: 5918 - protein, 9 aa, Artificial Sequence
  Description of Artificial Sequence: Synthetic peptide
  Seed: RMMESARPE
RHMESARPV

SEQ ID NO: 5919 - protein, 11 aa, Artificial Sequence
  Description of Artificial Sequence: Synthetic peptide
  Seed: RNRYLEEHPSA
RYRYLEEHPSK

SEQ ID NO: 5920 - protein, 11 aa, Artificial Sequence
  Description of Artificial Sequence: Synthetic peptide
  Seed: RNRYLEEHPSA
RYRYLEEHPSM

SEQ ID NO: 5921 - protein, 9 aa, Artificial Sequence
  Description of Artificial Sequence: Synthetic peptide
  Seed: RMMESARPE
RIMESARPL

SEQ ID NO: 5922 - protein, 9 aa, Artificial Sequence
  Description of Artificial Sequence: Synthetic peptide
  Seed: RMMESARPE
RGMESARPM

SEQ ID NO: 5923 - protein, 11 aa, Artificial Sequence
  Description of Artificial Sequence: Synthetic peptide
  Seed: RNRYLEEHPSA
RVRYLEEHPST

SEQ ID NO: 5924 - protein, 11 aa, Artificial Sequence
  Description of Artificial Sequence: Synthetic peptide
  Seed: RNRYLEEHPSA
RVRYLEEHPSY

SEQ ID NO: 5925 - protein, 11 aa, Artificial Sequence
  Description of Artificial Sequence: Synthetic peptide
  Seed: RNRYLEEHPSA
RVRYLEEHPSV

SEQ ID NO: 5926 - protein, 9 aa, Artificial Sequence
  Description of Artificial Sequence: Synthetic peptide
  Seed: RMMESARPE
RGMESARPL

SEQ ID NO: 5927 - protein, 10 aa, Artificial Sequence
  Description of Artificial Sequence: Synthetic peptide
  Seed: RRDGKWMREL
RRDGKWMRER

SEQ ID NO: 5928 - protein, 10 aa, Artificial Sequence
  Description of Artificial Sequence: Synthetic peptide
  Seed: RRDGKWMREL
RRDGKWMREI

SEQ ID NO: 5929 - protein, 9 aa, Artificial Sequence
  Description of Artificial Sequence: Synthetic peptide
  Seed: RMMESARPE
RGMESARPI

SEQ ID NO: 5930 - protein, 10 aa, Artificial Sequence
  Description of Artificial Sequence: Synthetic peptide
  Seed: RRDGKWMREL
RRDGKWMREK

SEQ ID NO: 5931 - protein, 9 aa, Artificial Sequence
  Description of Artificial Sequence: Synthetic peptide
  Seed: RMMESARPE
RGMESARPH

SEQ ID NO: 5932 - protein, 10 aa, Artificial Sequence
  Description of Artificial Sequence: Synthetic peptide
  Seed: RRDGKWMREL
RRDGKWMREM

SEQ ID NO: 5933 - protein, 10 aa, Artificial Sequence
  Description of Artificial Sequence: Synthetic peptide
  Seed: RRDGKWMREL
RRDGKWMREF

SEQ ID NO: 5934 - protein, 10 aa, Artificial Sequence
  Description of Artificial Sequence: Synthetic peptide
  Seed: RRDGKWMREL
RRDGKWMREY

SEQ ID NO: 5935 - protein, 9 aa, Artificial Sequence
  Description of Artificial Sequence: Synthetic peptide
  Seed: RMMESARPE
REMESARPV

SEQ ID NO: 5936 - protein, 10 aa, Artificial Sequence
  Description of Artificial Sequence: Synthetic peptide
  Seed: RRDGKWMREL
RRDGKWMREV

SEQ ID NO: 5937 - protein, 9 aa, Artificial Sequence
  Description of Artificial Sequence: Synthetic peptide
  Seed: RMMESARPE
REMESARPY

SEQ ID NO: 5938 - protein, 11 aa, Artificial Sequence
  Description of Artificial Sequence: Synthetic peptide
  Seed: RRDGKWMRELI
RRDGKWMRELR

SEQ ID NO: 5939 - protein, 9 aa, Artificial Sequence
  Description of Artificial Sequence: Synthetic peptide
  Seed: RMMESARPE
REMESARPW

SEQ ID NO: 5940 - protein, 11 aa, Artificial Sequence
  Description of Artificial Sequence: Synthetic peptide
  Seed: RNRYLEEHPSA
RVRYLEEHPSS

SEQ ID NO: 5941 - protein, 11 aa, Artificial Sequence
  Description of Artificial Sequence: Synthetic peptide
  Seed: RNRYLEEHPSA
RVRYLEEHPSP

SEQ ID NO: 5942 - protein, 11 aa, Artificial Sequence
  Description of Artificial Sequence: Synthetic peptide
  Seed: RNRYLEEHPSA
RYRYLEEHPSS

SEQ ID NO: 5943 - protein, 11 aa, Artificial Sequence
  Description of Artificial Sequence: Synthetic peptide
  Seed: RNRYLEEHPSA
RVRYLEEHPSF

SEQ ID NO: 5944 - protein, 9 aa, Artificial Sequence
  Description of Artificial Sequence: Synthetic peptide
  Seed: RMMESARPE
RHMESARPI

SEQ ID NO: 5945 - protein, 9 aa, Artificial Sequence
  Description of Artificial Sequence: Synthetic peptide
  Seed: RMMESARPE
RHMESARPH

SEQ ID NO: 5946 - protein, 11 aa, Artificial Sequence
  Description of Artificial Sequence: Synthetic peptide
  Seed: RNRYLEEHPSA
RYRYLEEHPST

SEQ ID NO: 5947 - protein, 11 aa, Artificial Sequence
  Description of Artificial Sequence: Synthetic peptide
  Seed: RNRYLEEHPSA
RYRYLEEHPSY

SEQ ID NO: 5948 - protein, 9 aa, Artificial Sequence
  Description of Artificial Sequence: Synthetic peptide
  Seed: RMMESARPE
RHMESARPA

SEQ ID NO: 5949 - protein, 11 aa, Artificial Sequence
  Description of Artificial Sequence: Synthetic peptide
  Seed: RNRYLEEHPSA
RYRYLEEHPSV

SEQ ID NO: 5950 - protein, 11 aa, Artificial Sequence
  Description of Artificial Sequence: Synthetic peptide
  Seed: RNRYLEEHPSA
RVRYLEEHPSA

SEQ ID NO: 5951 - protein, 11 aa, Artificial Sequence
  Description of Artificial Sequence: Synthetic peptide
  Seed: RNRYLEEHPSA
RVRYLEEHPSR

SEQ ID NO: 5952 - protein, 11 aa, Artificial Sequence
  Description of Artificial Sequence: Synthetic peptide
  Seed: RNRYLEEHPSA
RVRYLEEHPSC

SEQ ID NO: 5953 - protein, 11 aa, Artificial Sequence
  Description of Artificial Sequence: Synthetic peptide
  Seed: RNRYLEEHPSA
RVRYLEEHPSG

SEQ ID NO: 5954 - protein, 9 aa, Artificial Sequence
  Description of Artificial Sequence: Synthetic peptide
  Seed: RMMESARPE
RGMESARPY

SEQ ID NO: 5955 - protein, 11 aa, Artificial Sequence
  Description of Artificial Sequence: Synthetic peptide
  Seed: RNRYLEEHPSA
RVRYLEEHPSI

SEQ ID NO: 5956 - protein, 9 aa, Artificial Sequence
  Description of Artificial Sequence: Synthetic peptide
  Seed: RMMESARPE
RGMESARPW

SEQ ID NO: 5957 - protein, 11 aa, Artificial Sequence
  Description of Artificial Sequence: Synthetic peptide
  Seed: RNRYLEEHPSA
RVRYLEEHPSL

SEQ ID NO: 5958 - protein, 11 aa, Artificial Sequence
  Description of Artificial Sequence: Synthetic peptide
  Seed: RNRYLEEHPSA
RVRYLEEHPSK

SEQ ID NO: 5959 - protein, 9 aa, Artificial Sequence
  Description of Artificial Sequence: Synthetic peptide
  Seed: RMMESARPE
RGMESARPF

SEQ ID NO: 5960 - protein, 11 aa, Artificial Sequence
  Description of Artificial Sequence: Synthetic peptide
  Seed: RNRYLEEHPSA
RVRYLEEHPSM

SEQ ID NO: 5961 - protein, 11 aa, Artificial Sequence
  Description of Artificial Sequence: Synthetic peptide
  Seed: RNRYLEEHPSA
RSRYLEEHPSY

SEQ ID NO: 5962 - protein, 9 aa, Artificial Sequence
  Description of Artificial Sequence: Synthetic peptide
  Seed: RMMESARPE
RIMESARPM

SEQ ID NO: 5963 - protein, 11 aa, Artificial Sequence
  Description of Artificial Sequence: Synthetic peptide
  Seed: RNRYLEEHPSA
RARYLEEHPSV

SEQ ID NO: 5964 - protein, 11 aa, Artificial Sequence
  Description of Artificial Sequence: Synthetic peptide
  Seed: RNRYLEEHPSA
RIRYLEEHPSL

SEQ ID NO: 5965 - protein, 11 aa, Artificial Sequence
  Description of Artificial Sequence: Synthetic peptide
  Seed: RNRYLEEHPSA
RIRYLEEHPSM

SEQ ID NO: 5966 - protein, 11 aa, Artificial Sequence
  Description of Artificial Sequence: Synthetic peptide
  Seed: RNRYLEEHPSA
RIRYLEEHPSS

SEQ ID NO: 5967 - protein, 9 aa, Artificial Sequence
  Description of Artificial Sequence: Synthetic peptide
  Seed: RMMESARPE
RLMESARPW

SEQ ID NO: 5968 - protein, 11 aa, Artificial Sequence
  Description of Artificial Sequence: Synthetic peptide
  Seed: RNRYLEEHPSA
RIRYLEEHPST

SEQ ID NO: 5969 - protein, 11 aa, Artificial Sequence
  Description of Artificial Sequence: Synthetic peptide
  Seed: RNRYLEEHPSA
RIRYLEEHPSY

SEQ ID NO: 5970 - protein, 11 aa, Artificial Sequence
  Description of Artificial Sequence: Synthetic peptide
  Seed: RNRYLEEHPSA
RIRYLEEHPSV

SEQ ID NO: 5971 - protein, 11 aa, Artificial Sequence
  Description of Artificial Sequence: Synthetic peptide
  Seed: RNRYLEEHPSA
RLRYLEEHPSA

SEQ ID NO: 5972 - protein, 9 aa, Artificial Sequence
  Description of Artificial Sequence: Synthetic peptide
  Seed: RMMESARPE
RLMESARPF

SEQ ID NO: 5973 - protein, 9 aa, Artificial Sequence
  Description of Artificial Sequence: Synthetic peptide
  Seed: RMMESARPE
RLMESARPM

SEQ ID NO: 5974 - protein, 11 aa, Artificial Sequence
  Description of Artificial Sequence: Synthetic peptide
  Seed: RNRYLEEHPSA
RLRYLEEHPSI

SEQ ID NO: 5975 - protein, 11 aa, Artificial Sequence
  Description of Artificial Sequence: Synthetic peptide
  Seed: RNRYLEEHPSA
RLRYLEEHPSL

SEQ ID NO: 5976 - protein, 11 aa, Artificial Sequence
  Description of Artificial Sequence: Synthetic peptide
  Seed: RNRYLEEHPSA
RLRYLEEHPSK

SEQ ID NO: 5977 - protein, 9 aa, Artificial Sequence
  Description of Artificial Sequence: Synthetic peptide
  Seed: RMMESARPE
RLMESARPL

SEQ ID NO: 5978 - protein, 11 aa, Artificial Sequence
  Description of Artificial Sequence: Synthetic peptide
  Seed: RNRYLEEHPSA
RLRYLEEHPSM

SEQ ID NO: 5979 - protein, 11 aa, Artificial Sequence
  Description of Artificial Sequence: Synthetic peptide
  Seed: RNRYLEEHPSA
RLRYLEEHPSY

SEQ ID NO: 5980 - protein, 11 aa, Artificial Sequence
  Description of Artificial Sequence: Synthetic peptide
  Seed: RNRYLEEHPSA
RLRYLEEHPSV

SEQ ID NO: 5981 - protein, 11 aa, Artificial Sequence
  Description of Artificial Sequence: Synthetic peptide
  Seed: RNRYLEEHPSA
RKRYLEEHPSK

SEQ ID NO: 5982 - protein, 11 aa, Artificial Sequence
  Description of Artificial Sequence: Synthetic peptide
  Seed: RNRYLEEHPSA
RIRYLEEHPSK

SEQ ID NO: 5983 - protein, 11 aa, Artificial Sequence
  Description of Artificial Sequence: Synthetic peptide
  Seed: RNRYLEEHPSA
RIRYLEEHPSI

SEQ ID NO: 5984 - protein, 11 aa, Artificial Sequence
  Description of Artificial Sequence: Synthetic peptide
  Seed: RNRYLEEHPSA
RMRYLEEHPSR

SEQ ID NO: 5985 - protein, 11 aa, Artificial Sequence
  Description of Artificial Sequence: Synthetic peptide
  Seed: RNRYLEEHPSA
RIRYLEEHPSG

SEQ ID NO: 5986 - protein, 11 aa, Artificial Sequence
  Description of Artificial Sequence: Synthetic peptide
  Seed: RNRYLEEHPSA
RNRYLEEHPSK

SEQ ID NO: 5987 - protein, 11 aa, Artificial Sequence
  Description of Artificial Sequence: Synthetic peptide
  Seed: RNRYLEEHPSA
RNRYLEEHPSV

SEQ ID NO: 5988 - protein, 11 aa, Artificial Sequence
  Description of Artificial Sequence: Synthetic peptide
  Seed: RNRYLEEHPSA
RCRYLEEHPSK

SEQ ID NO: 5989 - protein, 11 aa, Artificial Sequence
  Description of Artificial Sequence: Synthetic peptide
  Seed: RNRYLEEHPSA
RQRYLEEHPSA

SEQ ID NO: 5990 - protein, 9 aa, Artificial Sequence
  Description of Artificial Sequence: Synthetic peptide
  Seed: RMMESARPE
RKMESARPA

SEQ ID NO: 5991 - protein, 11 aa, Artificial Sequence
  Description of Artificial Sequence: Synthetic peptide
  Seed: RNRYLEEHPSA
RQRYLEEHPSI

SEQ ID NO: 5992 - protein, 11 aa, Artificial Sequence
  Description of Artificial Sequence: Synthetic peptide
  Seed: RNRYLEEHPSA
RQRYLEEHPSK

SEQ ID NO: 5993 - protein, 9 aa, Artificial Sequence
  Description of Artificial Sequence: Synthetic peptide
  Seed: RMMESARPE
RLMESARPV

SEQ ID NO: 5994 - protein, 11 aa, Artificial Sequence
  Description of Artificial Sequence: Synthetic peptide
  Seed: RNRYLEEHPSA
RQRYLEEHPSM

SEQ ID NO: 5995 - protein, 11 aa, Artificial Sequence
  Description of Artificial Sequence: Synthetic peptide
  Seed: RNRYLEEHPSA
RQRYLEEHPSV

SEQ ID NO: 5996 - protein, 11 aa, Artificial Sequence
  Description of Artificial Sequence: Synthetic peptide
  Seed: RNRYLEEHPSA
RGRYLEEHPSA

SEQ ID NO: 5997 - protein, 9 aa, Artificial Sequence
  Description of Artificial Sequence: Synthetic peptide
  Seed: RMMESARPE
RLMESARPY

SEQ ID NO: 5998 - protein, 11 aa, Artificial Sequence
  Description of Artificial Sequence: Synthetic peptide
  Seed: RNRYLEEHPSA
RGRYLEEHPSK

SEQ ID NO: 5999 - protein, 11 aa, Artificial Sequence
  Description of Artificial Sequence: Synthetic peptide
  Seed: RNRYLEEHPSA
RGRYLEEHPSV

SEQ ID NO: 6000 - protein, 11 aa, Artificial Sequence
  Description of Artificial Sequence: Synthetic peptide
  Seed: RNRYLEEHPSA
RHRYLEEHPSK

SEQ ID NO: 6001 - protein, 11 aa, Artificial Sequence
  Description of Artificial Sequence: Synthetic peptide
  Seed: RNRYLEEHPSA
RIRYLEEHPSA

SEQ ID NO: 6002 - protein, 11 aa, Artificial Sequence
  Description of Artificial Sequence: Synthetic peptide
  Seed: RNRYLEEHPSA
RIRYLEEHPSR

SEQ ID NO: 6003 - protein, 11 aa, Artificial Sequence
  Description of Artificial Sequence: Synthetic peptide
  Seed: RNRYLEEHPSA
RMRYLEEHPSA

SEQ ID NO: 6004 - protein, 11 aa, Artificial Sequence
  Description of Artificial Sequence: Synthetic peptide
  Seed: RNRYLEEHPSA
RMRYLEEHPSG

SEQ ID NO: 6005 - protein, 11 aa, Artificial Sequence
  Description of Artificial Sequence: Synthetic peptide
  Seed: RNRYLEEHPSA
RSRYLEEHPST

SEQ ID NO: 6006 - protein, 11 aa, Artificial Sequence
  Description of Artificial Sequence: Synthetic peptide
  Seed: RNRYLEEHPSA
RFRYLEEHPSY

SEQ ID NO: 6007 - protein, 9 aa, Artificial Sequence
  Description of Artificial Sequence: Synthetic peptide
  Seed: RMMESARPE
RLMESARPC

SEQ ID NO: 6008 - protein, 11 aa, Artificial Sequence
  Description of Artificial Sequence: Synthetic peptide
  Seed: RNRYLEEHPSA
RSRYLEEHPSA

SEQ ID NO: 6009 - protein, 11 aa, Artificial Sequence
  Description of Artificial Sequence: Synthetic peptide
  Seed: RNRYLEEHPSA
RSRYLEEHPSR

SEQ ID NO: 6010 - protein, 11 aa, Artificial Sequence
  Description of Artificial Sequence: Synthetic peptide
  Seed: RNRYLEEHPSA
RSRYLEEHPSC

SEQ ID NO: 6011 - protein, 11 aa, Artificial Sequence
  Description of Artificial Sequence: Synthetic peptide
  Seed: RNRYLEEHPSA
RSRYLEEHPSG

SEQ ID NO: 6012 - protein, 11 aa, Artificial Sequence
  Description of Artificial Sequence: Synthetic peptide
  Seed: RNRYLEEHPSA
RSRYLEEHPSI

SEQ ID NO: 6013 - protein, 11 aa, Artificial Sequence
  Description of Artificial Sequence: Synthetic peptide
  Seed: RNRYLEEHPSA
RSRYLEEHPSL

SEQ ID NO: 6014 - protein, 9 aa, Artificial Sequence
  Description of Artificial Sequence: Synthetic peptide
  Seed: RMMESARPE
RLMESARPA

SEQ ID NO: 6015 - protein, 11 aa, Artificial Sequence
  Description of Artificial Sequence: Synthetic peptide
  Seed: RNRYLEEHPSA
RSRYLEEHPSK

SEQ ID NO: 6016 - protein, 11 aa, Artificial Sequence
  Description of Artificial Sequence: Synthetic peptide
  Seed: RNRYLEEHPSA
RSRYLEEHPSM

SEQ ID NO: 6017 - protein, 9 aa, Artificial Sequence
  Description of Artificial Sequence: Synthetic peptide
  Seed: RMMESARPE
RIMESARPV

SEQ ID NO: 6018 - protein, 9 aa, Artificial Sequence
  Description of Artificial Sequence: Synthetic peptide
  Seed: RMMESARPE
RIMESARPY

SEQ ID NO: 6019 - protein, 9 aa, Artificial Sequence
  Description of Artificial Sequence: Synthetic peptide
  Seed: RMMESARPE
RIMESARPW

SEQ ID NO: 6020 - protein, 11 aa, Artificial Sequence
  Description of Artificial Sequence: Synthetic peptide
  Seed: RNRYLEEHPSA
RSRYLEEHPSF

SEQ ID NO: 6021 - protein, 11 aa, Artificial Sequence
  Description of Artificial Sequence: Synthetic peptide
  Seed: RNRYLEEHPSA
RSRYLEEHPSP

SEQ ID NO: 6022 - protein, 11 aa, Artificial Sequence
  Description of Artificial Sequence: Synthetic peptide
  Seed: RNRYLEEHPSA
RSRYLEEHPSS

SEQ ID NO: 6023 - protein, 9 aa, Artificial Sequence
  Description of Artificial Sequence: Synthetic peptide
  Seed: RMMESARPE
RIMESARPF

SEQ ID NO: 6024 - protein, 11 aa, Artificial Sequence
  Description of Artificial Sequence: Synthetic peptide
  Seed: RNRYLEEHPSA
RFRYLEEHPSV

SEQ ID NO: 6025 - protein, 11 aa, Artificial Sequence
  Description of Artificial Sequence: Synthetic peptide
  Seed: RNRYLEEHPSA
RFRYLEEHPST

SEQ ID NO: 6026 - protein, 11 aa, Artificial Sequence
  Description of Artificial Sequence: Synthetic peptide
  Seed: RNRYLEEHPSA
RMRYLEEHPSI

SEQ ID NO: 6027 - protein, 11 aa, Artificial Sequence
  Description of Artificial Sequence: Synthetic peptide
  Seed: RNRYLEEHPSA
RFRYLEEHPSS

SEQ ID NO: 6028 - protein, 11 aa, Artificial Sequence
  Description of Artificial Sequence: Synthetic peptide
  Seed: RNRYLEEHPSA
RMRYLEEHPSL

SEQ ID NO: 6029 - protein, 11 aa, Artificial Sequence
  Description of Artificial Sequence: Synthetic peptide
  Seed: RNRYLEEHPSA
RMRYLEEHPSK

SEQ ID NO: 6030 - protein, 11 aa, Artificial Sequence
  Description of Artificial Sequence: Synthetic peptide
  Seed: RNRYLEEHPSA
RMRYLEEHPSM

SEQ ID NO: 6031 - protein, 11 aa, Artificial Sequence
  Description of Artificial Sequence: Synthetic peptide
  Seed: RNRYLEEHPSA
RMRYLEEHPSS

SEQ ID NO: 6032 - protein, 9 aa, Artificial Sequence
  Description of Artificial Sequence: Synthetic peptide
  Seed: RMMESARPE
RLMESARPI

SEQ ID NO: 6033 - protein, 11 aa, Artificial Sequence
  Description of Artificial Sequence: Synthetic peptide
  Seed: RNRYLEEHPSA
RMRYLEEHPST

SEQ ID NO: 6034 - protein, 11 aa, Artificial Sequence
  Description of Artificial Sequence: Synthetic peptide
  Seed: RNRYLEEHPSA
RMRYLEEHPSY

SEQ ID NO: 6035 - protein, 11 aa, Artificial Sequence
  Description of Artificial Sequence: Synthetic peptide
  Seed: RNRYLEEHPSA
RMRYLEEHPSV

SEQ ID NO: 6036 - protein, 11 aa, Artificial Sequence
  Description of Artificial Sequence: Synthetic peptide
  Seed: RNRYLEEHPSA
RFRYLEEHPSA

SEQ ID NO: 6037 - protein, 11 aa, Artificial Sequence
  Description of Artificial Sequence: Synthetic peptide
  Seed: RNRYLEEHPSA
RFRYLEEHPSR

SEQ ID NO: 6038 - protein, 11 aa, Artificial Sequence
  Description of Artificial Sequence: Synthetic peptide
  Seed: RNRYLEEHPSA
RFRYLEEHPSG

SEQ ID NO: 6039 - protein, 11 aa, Artificial Sequence
  Description of Artificial Sequence: Synthetic peptide
  Seed: RNRYLEEHPSA
RFRYLEEHPSI

SEQ ID NO: 6040 - protein, 11 aa, Artificial Sequence
  Description of Artificial Sequence: Synthetic peptide
  Seed: RNRYLEEHPSA
RFRYLEEHPSL

SEQ ID NO: 6041 - protein, 11 aa, Artificial Sequence
  Description of Artificial Sequence: Synthetic peptide
  Seed: RNRYLEEHPSA
RFRYLEEHPSK

SEQ ID NO: 6042 - protein, 11 aa, Artificial Sequence
  Description of Artificial Sequence: Synthetic peptide
  Seed: RNRYLEEHPSA
RFRYLEEHPSM

SEQ ID NO: 6043 - protein, 9 aa, Artificial Sequence
  Description of Artificial Sequence: Synthetic peptide
  Seed: RMMESARPE
RLMESARPH

SEQ ID NO: 6044 - protein, 9 aa, Artificial Sequence
  Description of Artificial Sequence: Synthetic peptide
  Seed: RMMESARPE
RLMESARPG

SEQ ID NO: 6045 - protein, 10 aa, Artificial Sequence
  Description of Artificial Sequence: Synthetic peptide
  Seed: RNLPFERATV
RRLPFERATS

SEQ ID NO: 6046 - protein, 10 aa, Artificial Sequence
  Description of Artificial Sequence: Synthetic peptide
  Seed: RNLPFERATV
RRLPFERATM

SEQ ID NO: 6047 - protein, 11 aa, Artificial Sequence
  Description of Artificial Sequence: Synthetic peptide
  Seed: RNFWRGENGRR
RVFWRGENGRW

SEQ ID NO: 6048 - protein, 9 aa, Artificial Sequence
  Description of Artificial Sequence: Synthetic peptide
  Seed: RMMESARPE
RWMESARPL

SEQ ID NO: 6049 - protein, 11 aa, Artificial Sequence
  Description of Artificial Sequence: Synthetic peptide
  Seed: RNLPFEKSTVM
RFLPFEKSTVA

SEQ ID NO: 6050 - protein, 9 aa, Artificial Sequence
  Description of Artificial Sequence: Synthetic peptide
  Seed: RMMESARPE
RWMESARPY

SEQ ID NO: 6051 - protein, 9 aa, Artificial Sequence
  Description of Artificial Sequence: Synthetic peptide
  Seed: RMMESARPE
RWMESARPF

SEQ ID NO: 6052 - protein, 11 aa, Artificial Sequence
  Description of Artificial Sequence: Synthetic peptide
  Seed: RNLPFEKSTVM
RFLPFEKSTVI

SEQ ID NO: 6053 - protein, 11 aa, Artificial Sequence
  Description of Artificial Sequence: Synthetic peptide
  Seed: RNLPFEKSTVM
RFLPFEKSTVL

SEQ ID NO: 6054 - protein, 11 aa, Artificial Sequence
  Description of Artificial Sequence: Synthetic peptide
  Seed: RNLPFEKSTVM
RFLPFEKSTVM

SEQ ID NO: 6055 - protein, 9 aa, Artificial Sequence
  Description of Artificial Sequence: Synthetic peptide
  Seed: RMMESARPE
RWMESARPM

SEQ ID NO: 6056 - protein, 11 aa, Artificial Sequence
  Description of Artificial Sequence: Synthetic peptide
  Seed: RNLPFEKSTVM
RFLPFEKSTVF

SEQ ID NO: 6057 - protein, 11 aa, Artificial Sequence
  Description of Artificial Sequence: Synthetic peptide
  Seed: RNLPFEKSTVM
RFLPFEKSTVV

SEQ ID NO: 6058 - protein, 9 aa, Artificial Sequence
  Description of Artificial Sequence: Synthetic peptide
  Seed: RMMESARPE
RMMESARPL

SEQ ID NO: 6059 - protein, 11 aa, Artificial Sequence
  Description of Artificial Sequence: Synthetic peptide
  Seed: RNLPFEKSTVM
RPLPFEKSTVA

SEQ ID NO: 6060 - protein, 11 aa, Artificial Sequence
  Description of Artificial Sequence: Synthetic peptide
  Seed: RNLPFEKSTVM
RPLPFEKSTVI

SEQ ID NO: 6061 - protein, 11 aa, Artificial Sequence
  Description of Artificial Sequence: Synthetic peptide
  Seed: RNLPFEKSTVM
RPLPFEKSTVL

SEQ ID NO: 6062 - protein, 11 aa, Artificial Sequence
  Description of Artificial Sequence: Synthetic peptide
  Seed: RNLPFEKSTVM
RPLPFEKSTVM

SEQ ID NO: 6063 - protein, 11 aa, Artificial Sequence
  Description of Artificial Sequence: Synthetic peptide
  Seed: RNLPFEKSTVM
RPLPFEKSTVF

SEQ ID NO: 6064 - protein, 11 aa, Artificial Sequence
  Description of Artificial Sequence: Synthetic peptide
  Seed: RNLPFEKSTVM
RPLPFEKSTVV

SEQ ID NO: 6065 - protein, 11 aa, Artificial Sequence
  Description of Artificial Sequence: Synthetic peptide
  Seed: RNLPFEKSTVM
RSLPFEKSTVA

SEQ ID NO: 6066 - protein, 9 aa, Artificial Sequence
  Description of Artificial Sequence: Synthetic peptide
  Seed: RMMESARPE
RTMESARPV

SEQ ID NO: 6067 - protein, 11 aa, Artificial Sequence
  Description of Artificial Sequence: Synthetic peptide
  Seed: RNLPFEKSTVM
RMLPFEKSTVV

SEQ ID NO: 6068 - protein, 11 aa, Artificial Sequence
  Description of Artificial Sequence: Synthetic peptide
  Seed: RNLPFEKSTVM
RMLPFEKSTVF

SEQ ID NO: 6069 - protein, 9 aa, Artificial Sequence
  Description of Artificial Sequence: Synthetic peptide
  Seed: RMMESARPE
RYMESARPH

SEQ ID NO: 6070 - protein, 11 aa, Artificial Sequence
  Description of Artificial Sequence: Synthetic peptide
  Seed: RNLPFEKSTVM
RMLPFEKSTVM

SEQ ID NO: 6071 - protein, 11 aa, Artificial Sequence
  Description of Artificial Sequence: Synthetic peptide
  Seed: RNLPFEKSTVM
RLLPFEKSTVM

SEQ ID NO: 6072 - protein, 11 aa, Artificial Sequence
  Description of Artificial Sequence: Synthetic peptide
  Seed: RNLPFEKSTVM
RLLPFEKSTVF

SEQ ID NO: 6073 - protein, 9 aa, Artificial Sequence
  Description of Artificial Sequence: Synthetic peptide
  Seed: RMMESARPE
RYMESARPW

SEQ ID NO: 6074 - protein, 11 aa, Artificial Sequence
  Description of Artificial Sequence: Synthetic peptide
  Seed: RNLPFEKSTVM
RLLPFEKSTVV

SEQ ID NO: 6075 - protein, 11 aa, Artificial Sequence
  Description of Artificial Sequence: Synthetic peptide
  Seed: RNLPFEKSTVM
RKLPFEKSTVA

SEQ ID NO: 6076 - protein, 11 aa, Artificial Sequence
  Description of Artificial Sequence: Synthetic peptide
  Seed: RNLPFEKSTVM
RKLPFEKSTVI

SEQ ID NO: 6077 - protein, 9 aa, Artificial Sequence
  Description of Artificial Sequence: Synthetic peptide
  Seed: RMMESARPE
RYMESARPF

SEQ ID NO: 6078 - protein, 11 aa, Artificial Sequence
  Description of Artificial Sequence: Synthetic peptide
  Seed: RNLPFEKSTVM
RKLPFEKSTVL

SEQ ID NO: 6079 - protein, 11 aa, Artificial Sequence
  Description of Artificial Sequence: Synthetic peptide
  Seed: RNLPFEKSTVM
RKLPFEKSTVM

SEQ ID NO: 6080 - protein, 11 aa, Artificial Sequence
  Description of Artificial Sequence: Synthetic peptide
  Seed: RNLPFEKSTVM
RKLPFEKSTVF

SEQ ID NO: 6081 - protein, 11 aa, Artificial Sequence
  Description of Artificial Sequence: Synthetic peptide
  Seed: RNLPFEKSTVM
RKLPFEKSTVV

SEQ ID NO: 6082 - protein, 9 aa, Artificial Sequence
  Description of Artificial Sequence: Synthetic peptide
  Seed: RMMESARPE
RYMESARPM

SEQ ID NO: 6083 - protein, 9 aa, Artificial Sequence
  Description of Artificial Sequence: Synthetic peptide
  Seed: RMMESARPE
RYMESARPL

SEQ ID NO: 6084 - protein, 9 aa, Artificial Sequence
  Description of Artificial Sequence: Synthetic peptide
  Seed: RMMESARPE
RYMESARPI

SEQ ID NO: 6085 - protein, 11 aa, Artificial Sequence
  Description of Artificial Sequence: Synthetic peptide
  Seed: RNLPFEKSTVM
RMLPFEKSTVA

SEQ ID NO: 6086 - protein, 11 aa, Artificial Sequence
  Description of Artificial Sequence: Synthetic peptide
  Seed: RNLPFEKSTVM
RMLPFEKSTVI

SEQ ID NO: 6087 - protein, 11 aa, Artificial Sequence
  Description of Artificial Sequence: Synthetic peptide
  Seed: RNLPFEKSTVM
RMLPFEKSTVL

SEQ ID NO: 6088 - protein, 11 aa, Artificial Sequence
  Description of Artificial Sequence: Synthetic peptide
  Seed: RNLPFEKSTVM
RSLPFEKSTVI

SEQ ID NO: 6089 - protein, 9 aa, Artificial Sequence
  Description of Artificial Sequence: Synthetic peptide
  Seed: RMMESARPE
RTMESARPY

SEQ ID NO: 6090 - protein, 9 aa, Artificial Sequence
  Description of Artificial Sequence: Synthetic peptide
  Seed: RMMESARPE
RTMESARPW

SEQ ID NO: 6091 - protein, 11 aa, Artificial Sequence
  Description of Artificial Sequence: Synthetic peptide
  Seed: RNLPFEKSTVM
RYLPFEKSTVI

SEQ ID NO: 6092 - protein, 9 aa, Artificial Sequence
  Description of Artificial Sequence: Synthetic peptide
  Seed: RMMESARPE
RTMESARPI

SEQ ID NO: 6093 - protein, 11 aa, Artificial Sequence
  Description of Artificial Sequence: Synthetic peptide
  Seed: RNLPFEKSTVM
RYLPFEKSTVM

SEQ ID NO: 6094 - protein, 9 aa, Artificial Sequence
  Description of Artificial Sequence: Synthetic peptide
  Seed: RMMESARPE
RTMESARPH

SEQ ID NO: 6095 - protein, 11 aa, Artificial Sequence
  Description of Artificial Sequence: Synthetic peptide
  Seed: RNLPFEKSTVM
RYLPFEKSTVF

SEQ ID NO: 6096 - protein, 11 aa, Artificial Sequence
  Description of Artificial Sequence: Synthetic peptide
  Seed: RNLPFEKSTVM
RYLPFEKSTVV

SEQ ID NO: 6097 - protein, 11 aa, Artificial Sequence
  Description of Artificial Sequence: Synthetic peptide
  Seed: RNLPFEKSTVM
RVLPFEKSTVA

SEQ ID NO: 6098 - protein, 11 aa, Artificial Sequence
  Description of Artificial Sequence: Synthetic peptide
  Seed: RNLPFEKSTVM
RVLPFEKSTVI

SEQ ID NO: 6099 - protein, 11 aa, Artificial Sequence
  Description of Artificial Sequence: Synthetic peptide
  Seed: RNLPFEKSTVM
RVLPFEKSTVL

SEQ ID NO: 6100 - protein, 11 aa, Artificial Sequence
  Description of Artificial Sequence: Synthetic peptide
  Seed: RNLPFEKSTVM
RVLPFEKSTVM

SEQ ID NO: 6101 - protein, 11 aa, Artificial Sequence
  Description of Artificial Sequence: Synthetic peptide
  Seed: RNLPFEKSTVM
RVLPFEKSTVF

SEQ ID NO: 6102 - protein, 11 aa, Artificial Sequence
  Description of Artificial Sequence: Synthetic peptide
  Seed: RNLPFEKSTVM
RVLPFEKSTVV

SEQ ID NO: 6103 - protein, 11 aa, Artificial Sequence
  Description of Artificial Sequence: Synthetic peptide
  Seed: RNLPFERATIM
RALPFERATIA

SEQ ID NO: 6104 - protein, 11 aa, Artificial Sequence
  Description of Artificial Sequence: Synthetic peptide
  Seed: RNLPFERATIM
RALPFERATII

SEQ ID NO: 6105 - protein, 11 aa, Artificial Sequence
  Description of Artificial Sequence: Synthetic peptide
  Seed: RNLPFERATIM
RALPFERATIL

SEQ ID NO: 6106 - protein, 11 aa, Artificial Sequence
  Description of Artificial Sequence: Synthetic peptide
  Seed: RNLPFERATIM
RALPFERATIM

SEQ ID NO: 6107 - protein, 9 aa, Artificial Sequence
  Description of Artificial Sequence: Synthetic peptide
  Seed: RMMESARPE
RTMESARPA

SEQ ID NO: 6108 - protein, 11 aa, Artificial Sequence
  Description of Artificial Sequence: Synthetic peptide
  Seed: RNLPFERATIM
RALPFERATIF

SEQ ID NO: 6109 - protein, 11 aa, Artificial Sequence
  Description of Artificial Sequence: Synthetic peptide
  Seed: RNLPFEKSTVM
RYLPFEKSTVL

SEQ ID NO: 6110 - protein, 11 aa, Artificial Sequence
  Description of Artificial Sequence: Synthetic peptide
  Seed: RNLPFEKSTVM
RYLPFEKSTVA

SEQ ID NO: 6111 - protein, 11 aa, Artificial Sequence
  Description of Artificial Sequence: Synthetic peptide
  Seed: RNLPFEKSTVM
RSLPFEKSTVL

SEQ ID NO: 6112 - protein, 11 aa, Artificial Sequence
  Description of Artificial Sequence: Synthetic peptide
  Seed: RNLPFEKSTVM
RWLPFEKSTVV

SEQ ID NO: 6113 - protein, 11 aa, Artificial Sequence
  Description of Artificial Sequence: Synthetic peptide
  Seed: RNLPFEKSTVM
RSLPFEKSTVM

SEQ ID NO: 6114 - protein, 11 aa, Artificial Sequence
  Description of Artificial Sequence: Synthetic peptide
  Seed: RNLPFEKSTVM
RSLPFEKSTVF

SEQ ID NO: 6115 - protein, 11 aa, Artificial Sequence
  Description of Artificial Sequence: Synthetic peptide
  Seed: RNLPFEKSTVM
RSLPFEKSTVV

SEQ ID NO: 6116 - protein, 11 aa, Artificial Sequence
  Description of Artificial Sequence: Synthetic peptide
  Seed: RNLPFEKSTVM
RTLPFEKSTVA

SEQ ID NO: 6117 - protein, 9 aa, Artificial Sequence
  Description of Artificial Sequence: Synthetic peptide
  Seed: RMMESARPE
RTMESARPF

SEQ ID NO: 6118 - protein, 11 aa, Artificial Sequence
  Description of Artificial Sequence: Synthetic peptide
  Seed: RNLPFEKSTVM
RTLPFEKSTVI

SEQ ID NO: 6119 - protein, 9 aa, Artificial Sequence
  Description of Artificial Sequence: Synthetic peptide
  Seed: RMMESARPE
RTMESARPM

SEQ ID NO: 6120 - protein, 11 aa, Artificial Sequence
  Description of Artificial Sequence: Synthetic peptide
  Seed: RNLPFEKSTVM
RTLPFEKSTVL

SEQ ID NO: 6121 - protein, 9 aa, Artificial Sequence
  Description of Artificial Sequence: Synthetic peptide
  Seed: RMMESARPE
RTMESARPL

SEQ ID NO: 6122 - protein, 11 aa, Artificial Sequence
  Description of Artificial Sequence: Synthetic peptide
  Seed: RNLPFEKSTVM
RTLPFEKSTVM

SEQ ID NO: 6123 - protein, 11 aa, Artificial Sequence
  Description of Artificial Sequence: Synthetic peptide
  Seed: RNLPFEKSTVM
RTLPFEKSTVF

SEQ ID NO: 6124 - protein, 11 aa, Artificial Sequence
  Description of Artificial Sequence: Synthetic peptide
  Seed: RNLPFEKSTVM
RTLPFEKSTVV

SEQ ID NO: 6125 - protein, 11 aa, Artificial Sequence
  Description of Artificial Sequence: Synthetic peptide
  Seed: RNLPFEKSTVM
RWLPFEKSTVA

SEQ ID NO: 6126 - protein, 11 aa, Artificial Sequence
  Description of Artificial Sequence: Synthetic peptide
  Seed: RNLPFEKSTVM
RWLPFEKSTVI

SEQ ID NO: 6127 - protein, 11 aa, Artificial Sequence
  Description of Artificial Sequence: Synthetic peptide
  Seed: RNLPFEKSTVM
RWLPFEKSTVL

SEQ ID NO: 6128 - protein, 11 aa, Artificial Sequence
  Description of Artificial Sequence: Synthetic peptide
  Seed: RNLPFEKSTVM
RWLPFEKSTVM

SEQ ID NO: 6129 - protein, 11 aa, Artificial Sequence
  Description of Artificial Sequence: Synthetic peptide
  Seed: RNLPFEKSTVM
RWLPFEKSTVF

SEQ ID NO: 6130 - protein, 11 aa, Artificial Sequence
  Description of Artificial Sequence: Synthetic peptide
  Seed: RNLPFEKSTVM
RLLPFEKSTVL

SEQ ID NO: 6131 - protein, 9 aa, Artificial Sequence
  Description of Artificial Sequence: Synthetic peptide
  Seed: RMMESARPE
RYMESARPY

SEQ ID NO: 6132 - protein, 11 aa, Artificial Sequence
  Description of Artificial Sequence: Synthetic peptide
  Seed: RNLPFEKSTVM
RLLPFEKSTVI

SEQ ID NO: 6133 - protein, 11 aa, Artificial Sequence
  Description of Artificial Sequence: Synthetic peptide
  Seed: RNLPFEKSTVM
RNLPFEKSTVA

SEQ ID NO: 6134 - protein, 11 aa, Artificial Sequence
  Description of Artificial Sequence: Synthetic peptide
  Seed: RNLPFEKSTVM
RNLPFEKSTVI

SEQ ID NO: 6135 - protein, 11 aa, Artificial Sequence
  Description of Artificial Sequence: Synthetic peptide
  Seed: RMMESARPEDV
RQMESARPEDV

SEQ ID NO: 6136 - protein, 11 aa, Artificial Sequence
  Description of Artificial Sequence: Synthetic peptide
  Seed: RMMESARPEDV
RQMESARPEDL

SEQ ID NO: 6137 - protein, 11 aa, Artificial Sequence
  Description of Artificial Sequence: Synthetic peptide
  Seed: RMMESARPEDV
RQMESARPEDI

SEQ ID NO: 6138 - protein, 11 aa, Artificial Sequence
  Description of Artificial Sequence: Synthetic peptide
  Seed: RNLPFEKSTVM
RNLPFEKSTVL

SEQ ID NO: 6139 - protein, 11 aa, Artificial Sequence
  Description of Artificial Sequence: Synthetic peptide
  Seed: RNLPFEKSTVM
RNLPFEKSTVF

SEQ ID NO: 6140 - protein, 11 aa, Artificial Sequence
  Description of Artificial Sequence: Synthetic peptide
  Seed: RNLPFEKSTVM
RNLPFEKSTVV

SEQ ID NO: 6141 - protein, 11 aa, Artificial Sequence
  Description of Artificial Sequence: Synthetic peptide
  Seed: RNLPFEKSTVM
RDLPFEKSTVA

SEQ ID NO: 6142 - protein, 11 aa, Artificial Sequence
  Description of Artificial Sequence: Synthetic peptide
  Seed: RNLPFEKSTVM
RDLPFEKSTVI

SEQ ID NO: 6143 - protein, 11 aa, Artificial Sequence
  Description of Artificial Sequence: Synthetic peptide
  Seed: RNLPFEKSTVM
RDLPFEKSTVL

SEQ ID NO: 6144 - protein, 11 aa, Artificial Sequence
  Description of Artificial Sequence: Synthetic peptide
  Seed: RNLPFEKSTVM
RDLPFEKSTVM

SEQ ID NO: 6145 - protein, 11 aa, Artificial Sequence
  Description of Artificial Sequence: Synthetic peptide
  Seed: RNLPFEKSTVM
RDLPFEKSTVF

SEQ ID NO: 6146 - protein, 11 aa, Artificial Sequence
  Description of Artificial Sequence: Synthetic peptide
  Seed: RNLPFEKSTVM
RDLPFEKSTVV

SEQ ID NO: 6147 - protein, 9 aa, Artificial Sequence
  Description of Artificial Sequence: Synthetic peptide
  Seed: RMMESARPE
RVMESARPV

SEQ ID NO: 6148 - protein, 11 aa, Artificial Sequence
  Description of Artificial Sequence: Synthetic peptide
  Seed: RNLPFEKSTVM
RCLPFEKSTVA

SEQ ID NO: 6149 - protein, 11 aa, Artificial Sequence
  Description of Artificial Sequence: Synthetic peptide
  Seed: RNLPFEKSTVM
RCLPFEKSTVI

SEQ ID NO: 6150 - protein, 11 aa, Artificial Sequence
  Description of Artificial Sequence: Synthetic peptide
  Seed: RNLPFEKSTVM
RCLPFEKSTVL

SEQ ID NO: 6151 - protein, 11 aa, Artificial Sequence
  Description of Artificial Sequence: Synthetic peptide
  Seed: RNLPFEKSTVM
RRLPFEKSTVV

SEQ ID NO: 6152 - protein, 11 aa, Artificial Sequence
  Description of Artificial Sequence: Synthetic peptide
  Seed: RNLPFEKSTVM
RCLPFEKSTVF

SEQ ID NO: 6153 - protein, 11 aa, Artificial Sequence
  Description of Artificial Sequence: Synthetic peptide
  Seed: RMMESARPEDV
RLMESARPEDA

SEQ ID NO: 6154 - protein, 11 aa, Artificial Sequence
  Description of Artificial Sequence: Synthetic peptide
  Seed: RNFWRGENGRR
RVFWRGENGRY

SEQ ID NO: 6155 - protein, 11 aa, Artificial Sequence
  Description of Artificial Sequence: Synthetic peptide
  Seed: RNFWRGENGRR
RVFWRGENGRV

SEQ ID NO: 6156 - protein, 11 aa, Artificial Sequence
  Description of Artificial Sequence: Synthetic peptide
  Seed: RNLPFEKSTVM
RALPFEKSTVA

SEQ ID NO: 6157 - protein, 11 aa, Artificial Sequence
  Description of Artificial Sequence: Synthetic peptide
  Seed: RNLPFEKSTVM
RALPFEKSTVI

SEQ ID NO: 6158 - protein, 11 aa, Artificial Sequence
  Description of Artificial Sequence: Synthetic peptide
  Seed: RNLPFEKSTVM
RALPFEKSTVL

SEQ ID NO: 6159 - protein, 11 aa, Artificial Sequence
  Description of Artificial Sequence: Synthetic peptide
  Seed: RMMESARPEDV
RLMESARPEDM

SEQ ID NO: 6160 - protein, 11 aa, Artificial Sequence
  Description of Artificial Sequence: Synthetic peptide
  Seed: RNLPFEKSTVM
RALPFEKSTVM

SEQ ID NO: 6161 - protein, 11 aa, Artificial Sequence
  Description of Artificial Sequence: Synthetic peptide
  Seed: RNLPFEKSTVM
RALPFEKSTVF

SEQ ID NO: 6162 - protein, 11 aa, Artificial Sequence
  Description of Artificial Sequence: Synthetic peptide
  Seed: RNLPFEKSTVM
RALPFEKSTVV

SEQ ID NO: 6163 - protein, 11 aa, Artificial Sequence
  Description of Artificial Sequence: Synthetic peptide
  Seed: RMMESARPEDV
RLMESARPEDL

SEQ ID NO: 6164 - protein, 11 aa, Artificial Sequence
  Description of Artificial Sequence: Synthetic peptide
  Seed: RNLPFEKSTVM
RRLPFEKSTVA

SEQ ID NO: 6165 - protein, 11 aa, Artificial Sequence
  Description of Artificial Sequence: Synthetic peptide
  Seed: RNLPFEKSTVM
RRLPFEKSTVI

SEQ ID NO: 6166 - protein, 11 aa, Artificial Sequence
  Description of Artificial Sequence: Synthetic peptide
  Seed: RMMESARPEDV
RLMESARPEDI

SEQ ID NO: 6167 - protein, 11 aa, Artificial Sequence
  Description of Artificial Sequence: Synthetic peptide
  Seed: RNLPFEKSTVM
RRLPFEKSTVL

SEQ ID NO: 6168 - protein, 11 aa, Artificial Sequence
  Description of Artificial Sequence: Synthetic peptide
  Seed: RNLPFEKSTVM
RRLPFEKSTVM

SEQ ID NO: 6169 - protein, 11 aa, Artificial Sequence
  Description of Artificial Sequence: Synthetic peptide
  Seed: RNLPFEKSTVM
RRLPFEKSTVF

SEQ ID NO: 6170 - protein, 11 aa, Artificial Sequence
  Description of Artificial Sequence: Synthetic peptide
  Seed: RNLPFEKSTVM
RCLPFEKSTVM

SEQ ID NO: 6171 - protein, 11 aa, Artificial Sequence
  Description of Artificial Sequence: Synthetic peptide
  Seed: RNLPFEKSTVM
RCLPFEKSTVV

SEQ ID NO: 6172 - protein, 9 aa, Artificial Sequence
  Description of Artificial Sequence: Synthetic peptide
  Seed: RMMESARPE
RYMESARPV

SEQ ID NO: 6173 - protein, 11 aa, Artificial Sequence
  Description of Artificial Sequence: Synthetic peptide
  Seed: RNLPFEKSTVM
RGLPFEKSTVV

SEQ ID NO: 6174 - protein, 9 aa, Artificial Sequence
  Description of Artificial Sequence: Synthetic peptide
  Seed: RMMESARPE
RVMESARPL

SEQ ID NO: 6175 - protein, 11 aa, Artificial Sequence
  Description of Artificial Sequence: Synthetic peptide
  Seed: RNLPFEKSTVM
RHLPFEKSTVA

SEQ ID NO: 6176 - protein, 9 aa, Artificial Sequence
  Description of Artificial Sequence: Synthetic peptide
  Seed: RMMESARPE
RVMESARPI

SEQ ID NO: 6177 - protein, 9 aa, Artificial Sequence
  Description of Artificial Sequence: Synthetic peptide
  Seed: RMMESARPE
RVMESARPH

SEQ ID NO: 6178 - protein, 11 aa, Artificial Sequence
  Description of Artificial Sequence: Synthetic peptide
  Seed: RNLPFEKSTVM
RHLPFEKSTVI

SEQ ID NO: 6179 - protein, 11 aa, Artificial Sequence
  Description of Artificial Sequence: Synthetic peptide
  Seed: RNLPFEKSTVM
RHLPFEKSTVL

SEQ ID NO: 6180 - protein, 11 aa, Artificial Sequence
  Description of Artificial Sequence: Synthetic peptide
  Seed: RNLPFEKSTVM
RHLPFEKSTVM

SEQ ID NO: 6181 - protein, 11 aa, Artificial Sequence
  Description of Artificial Sequence: Synthetic peptide
  Seed: RNLPFEKSTVM
RHLPFEKSTVF

SEQ ID NO: 6182 - protein, 11 aa, Artificial Sequence
  Description of Artificial Sequence: Synthetic peptide
  Seed: RNLPFEKSTVM
RHLPFEKSTVV

SEQ ID NO: 6183 - protein, 11 aa, Artificial Sequence
  Description of Artificial Sequence: Synthetic peptide
  Seed: RNLPFEKSTVM
RILPFEKSTVA

SEQ ID NO: 6184 - protein, 11 aa, Artificial Sequence
  Description of Artificial Sequence: Synthetic peptide
  Seed: RNLPFEKSTVM
RILPFEKSTVI

SEQ ID NO: 6185 - protein, 11 aa, Artificial Sequence
  Description of Artificial Sequence: Synthetic peptide
  Seed: RNLPFEKSTVM
RILPFEKSTVL

SEQ ID NO: 6186 - protein, 11 aa, Artificial Sequence
  Description of Artificial Sequence: Synthetic peptide
  Seed: RNLPFEKSTVM
RILPFEKSTVM

SEQ ID NO: 6187 - protein, 9 aa, Artificial Sequence
  Description of Artificial Sequence: Synthetic peptide
  Seed: RMMESARPE
RVMESARPA

SEQ ID NO: 6188 - protein, 11 aa, Artificial Sequence
  Description of Artificial Sequence: Synthetic peptide
  Seed: RNLPFEKSTVM
RILPFEKSTVF

SEQ ID NO: 6189 - protein, 11 aa, Artificial Sequence
  Description of Artificial Sequence: Synthetic peptide
  Seed: RNLPFEKSTVM
RILPFEKSTVV

SEQ ID NO: 6190 - protein, 11 aa, Artificial Sequence
  Description of Artificial Sequence: Synthetic peptide
  Seed: RNLPFEKSTVM
RLLPFEKSTVA

SEQ ID NO: 6191 - protein, 9 aa, Artificial Sequence
  Description of Artificial Sequence: Synthetic peptide
  Seed: RMMESARPE
RVMESARPM

SEQ ID NO: 6192 - protein, 11 aa, Artificial Sequence
  Description of Artificial Sequence: Synthetic peptide
  Seed: RNLPFEKSTVM
RGLPFEKSTVF

SEQ ID NO: 6193 - protein, 11 aa, Artificial Sequence
  Description of Artificial Sequence: Synthetic peptide
  Seed: RNLPFEKSTVM
RQLPFEKSTVA

SEQ ID NO: 6194 - protein, 11 aa, Artificial Sequence
  Description of Artificial Sequence: Synthetic peptide
  Seed: RNLPFEKSTVM
RGLPFEKSTVM

SEQ ID NO: 6195 - protein, 11 aa, Artificial Sequence
  Description of Artificial Sequence: Synthetic peptide
  Seed: RNLPFEKSTVM
RQLPFEKSTVI

SEQ ID NO: 6196 - protein, 11 aa, Artificial Sequence
  Description of Artificial Sequence: Synthetic peptide
  Seed: RNLPFEKSTVM
RQLPFEKSTVL

SEQ ID NO: 6197 - protein, 11 aa, Artificial Sequence
  Description of Artificial Sequence: Synthetic peptide
  Seed: RNLPFEKSTVM
RQLPFEKSTVM

SEQ ID NO: 6198 - protein, 11 aa, Artificial Sequence
  Description of Artificial Sequence: Synthetic peptide
  Seed: RNLPFEKSTVM
RQLPFEKSTVF

SEQ ID NO: 6199 - protein, 11 aa, Artificial Sequence
  Description of Artificial Sequence: Synthetic peptide
  Seed: RNLPFEKSTVM
RQLPFEKSTVV

SEQ ID NO: 6200 - protein, 9 aa, Artificial Sequence
  Description of Artificial Sequence: Synthetic peptide
  Seed: RMMESARPE
RVMESARPY

SEQ ID NO: 6201 - protein, 11 aa, Artificial Sequence
  Description of Artificial Sequence: Synthetic peptide
  Seed: RNLPFEKSTVM
RELPFEKSTVA

SEQ ID NO: 6202 - protein, 9 aa, Artificial Sequence
  Description of Artificial Sequence: Synthetic peptide
  Seed: RMMESARPE
RVMESARPW

SEQ ID NO: 6203 - protein, 11 aa, Artificial Sequence
  Description of Artificial Sequence: Synthetic peptide
  Seed: RNLPFEKSTVM
RELPFEKSTVI

SEQ ID NO: 6204 - protein, 11 aa, Artificial Sequence
  Description of Artificial Sequence: Synthetic peptide
  Seed: RNLPFEKSTVM
RELPFEKSTVL

SEQ ID NO: 6205 - protein, 11 aa, Artificial Sequence
  Description of Artificial Sequence: Synthetic peptide
  Seed: RNLPFEKSTVM
RELPFEKSTVM

SEQ ID NO: 6206 - protein, 11 aa, Artificial Sequence
  Description of Artificial Sequence: Synthetic peptide
  Seed: RNLPFEKSTVM
RELPFEKSTVF

SEQ ID NO: 6207 - protein, 9 aa, Artificial Sequence
  Description of Artificial Sequence: Synthetic peptide
  Seed: RMMESARPE
RVMESARPF

SEQ ID NO: 6208 - protein, 11 aa, Artificial Sequence
  Description of Artificial Sequence: Synthetic peptide
  Seed: RNLPFEKSTVM
RELPFEKSTVV

SEQ ID NO: 6209 - protein, 11 aa, Artificial Sequence
  Description of Artificial Sequence: Synthetic peptide
  Seed: RNLPFEKSTVM
RGLPFEKSTVA

SEQ ID NO: 6210 - protein, 11 aa, Artificial Sequence
  Description of Artificial Sequence: Synthetic peptide
  Seed: RNLPFEKSTVM
RGLPFEKSTVI

SEQ ID NO: 6211 - protein, 11 aa, Artificial Sequence
  Description of Artificial Sequence: Synthetic peptide
  Seed: RNLPFEKSTVM
RGLPFEKSTVL

SEQ ID NO: 6212 - protein, 11 aa, Artificial Sequence
  Description of Artificial Sequence: Synthetic peptide
  Seed: RNLPFERATIM
RALPFERATIY

SEQ ID NO: 6213 - protein, 9 aa, Artificial Sequence
  Description of Artificial Sequence: Synthetic peptide
  Seed: RMMESARPE
RSMESARPV

SEQ ID NO: 6214 - protein, 11 aa, Artificial Sequence
  Description of Artificial Sequence: Synthetic peptide
  Seed: RNLPFERATIM
RALPFERATIV

SEQ ID NO: 6215 - protein, 11 aa, Artificial Sequence
  Description of Artificial Sequence: Synthetic peptide
  Seed: RNLPFERATIM
RMLPFERATIY

SEQ ID NO: 6216 - protein, 11 aa, Artificial Sequence
  Description of Artificial Sequence: Synthetic peptide
  Seed: RNLPFERATIM
RFLPFERATIA

SEQ ID NO: 6217 - protein, 11 aa, Artificial Sequence
  Description of Artificial Sequence: Synthetic peptide
  Seed: RNLPFERATIM
RFLPFERATII

SEQ ID NO: 6218 - protein, 11 aa, Artificial Sequence
  Description of Artificial Sequence: Synthetic peptide
  Seed: RNLPFERATIM
RFLPFERATIL

SEQ ID NO: 6219 - protein, 11 aa, Artificial Sequence
  Description of Artificial Sequence: Synthetic peptide
  Seed: RNLPFERATIM
RFLPFERATIM

SEQ ID NO: 6220 - protein, 11 aa, Artificial Sequence
  Description of Artificial Sequence: Synthetic peptide
  Seed: RNLPFERATIM
RFLPFERATIF

SEQ ID NO: 6221 - protein, 11 aa, Artificial Sequence
  Description of Artificial Sequence: Synthetic peptide
  Seed: RNLPFERATIM
RFLPFERATIY

SEQ ID NO: 6222 - protein, 11 aa, Artificial Sequence
  Description of Artificial Sequence: Synthetic peptide
  Seed: RNLPFERATIM
RFLPFERATIV

SEQ ID NO: 6223 - protein, 11 aa, Artificial Sequence
  Description of Artificial Sequence: Synthetic peptide
  Seed: RNLPFERATIM
RPLPFERATIA

SEQ ID NO: 6224 - protein, 11 aa, Artificial Sequence
  Description of Artificial Sequence: Synthetic peptide
  Seed: RNLPFERATIM
RPLPFERATIC

SEQ ID NO: 6225 - protein, 11 aa, Artificial Sequence
  Description of Artificial Sequence: Synthetic peptide
  Seed: RNLPFERATIM
RPLPFERATII

SEQ ID NO: 6226 - protein, 11 aa, Artificial Sequence
  Description of Artificial Sequence: Synthetic peptide
  Seed: RNLPFERATIM
RPLPFERATIL

SEQ ID NO: 6227 - protein, 9 aa, Artificial Sequence
  Description of Artificial Sequence: Synthetic peptide
  Seed: RMMESARPE
RMMESARPT

SEQ ID NO: 6228 - protein, 11 aa, Artificial Sequence
  Description of Artificial Sequence: Synthetic peptide
  Seed: RNLPFERATIM
RPLPFERATIM

SEQ ID NO: 6229 - protein, 11 aa, Artificial Sequence
  Description of Artificial Sequence: Synthetic peptide
  Seed: RNLPFERATIM
RPLPFERATIF

SEQ ID NO: 6230 - protein, 11 aa, Artificial Sequence
  Description of Artificial Sequence: Synthetic peptide
  Seed: RNLPFERATIM
RPLPFERATIV

SEQ ID NO: 6231 - protein, 11 aa, Artificial Sequence
  Description of Artificial Sequence: Synthetic peptide
  Seed: RNLPFERATIM
RSLPFERATIA

SEQ ID NO: 6232 - protein, 11 aa, Artificial Sequence
  Description of Artificial Sequence: Synthetic peptide
  Seed: RNLPFERATIM
RSLPFERATII

SEQ ID NO: 6233 - protein, 11 aa, Artificial Sequence
  Description of Artificial Sequence: Synthetic peptide
  Seed: RNLPFERATIM
RMLPFERATIV

SEQ ID NO: 6234 - protein, 9 aa, Artificial Sequence
  Description of Artificial Sequence: Synthetic peptide
  Seed: RMMESARPE
RMMESARPW

SEQ ID NO: 6235 - protein, 11 aa, Artificial Sequence
  Description of Artificial Sequence: Synthetic peptide
  Seed: RNLPFERATIM
RSLPFERATIM

SEQ ID NO: 6236 - protein, 11 aa, Artificial Sequence
  Description of Artificial Sequence: Synthetic peptide
  Seed: RNLPFERATIM
RMLPFERATIW

SEQ ID NO: 6237 - protein, 9 aa, Artificial Sequence
  Description of Artificial Sequence: Synthetic peptide
  Seed: RMMESARPE
RFMESARPI

SEQ ID NO: 6238 - protein, 11 aa, Artificial Sequence
  Description of Artificial Sequence: Synthetic peptide
  Seed: RNLPFERATIM
RKLPFERATIA

SEQ ID NO: 6239 - protein, 11 aa, Artificial Sequence
  Description of Artificial Sequence: Synthetic peptide
  Seed: RNLPFERATIM
RKLPFERATII

SEQ ID NO: 6240 - protein, 11 aa, Artificial Sequence
  Description of Artificial Sequence: Synthetic peptide
  Seed: RNLPFERATIM
RKLPFERATIL

SEQ ID NO: 6241 - protein, 9 aa, Artificial Sequence
  Description of Artificial Sequence: Synthetic peptide
  Seed: RMMESARPE
RFMESARPH

SEQ ID NO: 6242 - protein, 9 aa, Artificial Sequence
  Description of Artificial Sequence: Synthetic peptide
  Seed: RMMESARPE
RMMESARPV

SEQ ID NO: 6243 - protein, 11 aa, Artificial Sequence
  Description of Artificial Sequence: Synthetic peptide
  Seed: RNLPFERATIM
RKLPFERATIF

SEQ ID NO: 6244 - protein, 9 aa, Artificial Sequence
  Description of Artificial Sequence: Synthetic peptide
  Seed: RMMESARPE
RMMESARPY

SEQ ID NO: 6245 - protein, 11 aa, Artificial Sequence
  Description of Artificial Sequence: Synthetic peptide
  Seed: RNLPFERATIM
RKLPFERATIY

SEQ ID NO: 6246 - protein, 11 aa, Artificial Sequence
  Description of Artificial Sequence: Synthetic peptide
  Seed: RNLPFERATIM
RKLPFERATIV

SEQ ID NO: 6247 - protein, 11 aa, Artificial Sequence
  Description of Artificial Sequence: Synthetic peptide
  Seed: RNLPFERATIM
RMLPFERATIA

SEQ ID NO: 6248 - protein, 11 aa, Artificial Sequence
  Description of Artificial Sequence: Synthetic peptide
  Seed: RNLPFERATIM
RMLPFERATIH

SEQ ID NO: 6249 - protein, 11 aa, Artificial Sequence
  Description of Artificial Sequence: Synthetic peptide
  Seed: RNLPFERATIM
RMLPFERATII

SEQ ID NO: 6250 - protein, 11 aa, Artificial Sequence
  Description of Artificial Sequence: Synthetic peptide
  Seed: RNLPFERATIM
RMLPFERATIL

SEQ ID NO: 6251 - protein, 11 aa, Artificial Sequence
  Description of Artificial Sequence: Synthetic peptide
  Seed: RNLPFERATIM
RMLPFERATIM

SEQ ID NO: 6252 - protein, 11 aa, Artificial Sequence
  Description of Artificial Sequence: Synthetic peptide
  Seed: RNLPFERATIM
RMLPFERATIF

SEQ ID NO: 6253 - protein, 11 aa, Artificial Sequence
  Description of Artificial Sequence: Synthetic peptide
  Seed: RNLPFERATIM
RSLPFERATIL

SEQ ID NO: 6254 - protein, 11 aa, Artificial Sequence
  Description of Artificial Sequence: Synthetic peptide
  Seed: RNLPFERATIM
RSLPFERATIF

SEQ ID NO: 6255 - protein, 11 aa, Artificial Sequence
  Description of Artificial Sequence: Synthetic peptide
  Seed: RNLPFERATIM
RLLPFERATIY

SEQ ID NO: 6256 - protein, 11 aa, Artificial Sequence
  Description of Artificial Sequence: Synthetic peptide
  Seed: RNLPFERATIM
RYLPFERATIM

SEQ ID NO: 6257 - protein, 11 aa, Artificial Sequence
  Description of Artificial Sequence: Synthetic peptide
  Seed: RNLPFERATIM
RYLPFERATIY

SEQ ID NO: 6258 - protein, 11 aa, Artificial Sequence
  Description of Artificial Sequence: Synthetic peptide
  Seed: RNLPFERATIM
RYLPFERATIV

SEQ ID NO: 6259 - protein, 11 aa, Artificial Sequence
  Description of Artificial Sequence: Synthetic peptide
  Seed: RNLPFERATIM
RVLPFERATIA

SEQ ID NO: 6260 - protein, 11 aa, Artificial Sequence
  Description of Artificial Sequence: Synthetic peptide
  Seed: RNLPFERATIM
RVLPFERATII

SEQ ID NO: 6261 - protein, 11 aa, Artificial Sequence
  Description of Artificial Sequence: Synthetic peptide
  Seed: RNLPFERATIM
RVLPFERATIL

SEQ ID NO: 6262 - protein, 11 aa, Artificial Sequence
  Description of Artificial Sequence: Synthetic peptide
  Seed: RNLPFERATIM
RVLPFERATIM

SEQ ID NO: 6263 - protein, 11 aa, Artificial Sequence
  Description of Artificial Sequence: Synthetic peptide
  Seed: RNLPFERATIM
RVLPFERATIF

SEQ ID NO: 6264 - protein, 9 aa, Artificial Sequence
  Description of Artificial Sequence: Synthetic peptide
  Seed: RMMESARPE
RMMESARPF

SEQ ID NO: 6265 - protein, 11 aa, Artificial Sequence
  Description of Artificial Sequence: Synthetic peptide
  Seed: RNLPFERATIM
RVLPFERATIY

SEQ ID NO: 6266 - protein, 11 aa, Artificial Sequence
  Description of Artificial Sequence: Synthetic peptide
  Seed: RNLPFERATIM
RVLPFERATIV

SEQ ID NO: 6267 - protein, 10 aa, Artificial Sequence
  Description of Artificial Sequence: Synthetic peptide
  Seed: RNLPFERATV
RRLPFERATA

SEQ ID NO: 6268 - protein, 10 aa, Artificial Sequence
  Description of Artificial Sequence: Synthetic peptide
  Seed: RNLPFERATV
RRLPFERATC

SEQ ID NO: 6269 - protein, 10 aa, Artificial Sequence
  Description of Artificial Sequence: Synthetic peptide
  Seed: RNLPFERATV
RRLPFERATG

SEQ ID NO: 6270 - protein, 10 aa, Artificial Sequence
  Description of Artificial Sequence: Synthetic peptide
  Seed: RNLPFERATV
RRLPFERATI

SEQ ID NO: 6271 - protein, 9 aa, Artificial Sequence
  Description of Artificial Sequence: Synthetic peptide
  Seed: RMMESARPE
RMMESARPM

SEQ ID NO: 6272 - protein, 10 aa, Artificial Sequence
  Description of Artificial Sequence: Synthetic peptide
  Seed: RNLPFERATV
RRLPFERATL

SEQ ID NO: 6273 - protein, 10 aa, Artificial Sequence
  Description of Artificial Sequence: Synthetic peptide
  Seed: RNLPFERATV
RRLPFERATK

SEQ ID NO: 6274 - protein, 11 aa, Artificial Sequence
  Description of Artificial Sequence: Synthetic peptide
  Seed: RNLPFERATIM
RYLPFERATIF

SEQ ID NO: 6275 - protein, 9 aa, Artificial Sequence
  Description of Artificial Sequence: Synthetic peptide
  Seed: RMMESARPE
RMMESARPP

SEQ ID NO: 6276 - protein, 11 aa, Artificial Sequence
  Description of Artificial Sequence: Synthetic peptide
  Seed: RNLPFERATIM
RSLPFERATIY

SEQ ID NO: 6277 - protein, 11 aa, Artificial Sequence
  Description of Artificial Sequence: Synthetic peptide
  Seed: RNLPFERATIM
RYLPFERATIL

SEQ ID NO: 6278 - protein, 11 aa, Artificial Sequence
  Description of Artificial Sequence: Synthetic peptide
  Seed: RNLPFERATIM
RSLPFERATIV

SEQ ID NO: 6279 - protein, 11 aa, Artificial Sequence
  Description of Artificial Sequence: Synthetic peptide
  Seed: RNLPFERATIM
RTLPFERATIA

SEQ ID NO: 6280 - protein, 11 aa, Artificial Sequence
  Description of Artificial Sequence: Synthetic peptide
  Seed: RNLPFERATIM
RTLPFERATII

SEQ ID NO: 6281 - protein, 11 aa, Artificial Sequence
  Description of Artificial Sequence: Synthetic peptide
  Seed: RNLPFERATIM
RTLPFERATIL

SEQ ID NO: 6282 - protein, 11 aa, Artificial Sequence
  Description of Artificial Sequence: Synthetic peptide
  Seed: RNLPFERATIM
RTLPFERATIM

SEQ ID NO: 6283 - protein, 11 aa, Artificial Sequence
  Description of Artificial Sequence: Synthetic peptide
  Seed: RNLPFERATIM
RTLPFERATIF

SEQ ID NO: 6284 - protein, 11 aa, Artificial Sequence
  Description of Artificial Sequence: Synthetic peptide
  Seed: RNLPFERATIM
RTLPFERATIY

SEQ ID NO: 6285 - protein, 11 aa, Artificial Sequence
  Description of Artificial Sequence: Synthetic peptide
  Seed: RNLPFERATIM
RTLPFERATIV

SEQ ID NO: 6286 - protein, 11 aa, Artificial Sequence
  Description of Artificial Sequence: Synthetic peptide
  Seed: RNLPFERATIM
RWLPFERATIA

SEQ ID NO: 6287 - protein, 9 aa, Artificial Sequence
  Description of Artificial Sequence: Synthetic peptide
  Seed: RMMESARPE
RMMESARPS

SEQ ID NO: 6288 - protein, 11 aa, Artificial Sequence
  Description of Artificial Sequence: Synthetic peptide
  Seed: RNLPFERATIM
RWLPFERATII

SEQ ID NO: 6289 - protein, 11 aa, Artificial Sequence
  Description of Artificial Sequence: Synthetic peptide
  Seed: RNLPFERATIM
RWLPFERATIL

SEQ ID NO: 6290 - protein, 11 aa, Artificial Sequence
  Description of Artificial Sequence: Synthetic peptide
  Seed: RNLPFERATIM
RWLPFERATIM

SEQ ID NO: 6291 - protein, 11 aa, Artificial Sequence
  Description of Artificial Sequence: Synthetic peptide
  Seed: RNLPFERATIM
RWLPFERATIF

SEQ ID NO: 6292 - protein, 11 aa, Artificial Sequence
  Description of Artificial Sequence: Synthetic peptide
  Seed: RNLPFERATIM
RWLPFERATIV

SEQ ID NO: 6293 - protein, 11 aa, Artificial Sequence
  Description of Artificial Sequence: Synthetic peptide
  Seed: RNLPFERATIM
RYLPFERATIA

SEQ ID NO: 6294 - protein, 10 aa, Artificial Sequence
  Description of Artificial Sequence: Synthetic peptide
  Seed: RSGGNTNQQR
RFGGNTNQQR

SEQ ID NO: 6295 - protein, 11 aa, Artificial Sequence
  Description of Artificial Sequence: Synthetic peptide
  Seed: RNLPFERATIM
RLLPFERATIV

SEQ ID NO: 6296 - protein, 11 aa, Artificial Sequence
  Description of Artificial Sequence: Synthetic peptide
  Seed: RNLPFERATIM
RLLPFERATIF

SEQ ID NO: 6297 - protein, 11 aa, Artificial Sequence
  Description of Artificial Sequence: Synthetic peptide
  Seed: RNLPFERATIM
RRLPFERATIA

SEQ ID NO: 6298 - protein, 11 aa, Artificial Sequence
  Description of Artificial Sequence: Synthetic peptide
  Seed: RNLPFERATIM
RDLPFERATIM

SEQ ID NO: 6299 - protein, 11 aa, Artificial Sequence
  Description of Artificial Sequence: Synthetic peptide
  Seed: RNLPFERATIM
RDLPFERATIV

SEQ ID NO: 6300 - protein, 11 aa, Artificial Sequence
  Description of Artificial Sequence: Synthetic peptide
  Seed: RNLPFERATIM
RCLPFERATIA

SEQ ID NO: 6301 - protein, 11 aa, Artificial Sequence
  Description of Artificial Sequence: Synthetic peptide
  Seed: RNLPFERATIM
RCLPFERATII

SEQ ID NO: 6302 - protein, 11 aa, Artificial Sequence
  Description of Artificial Sequence: Synthetic peptide
  Seed: RNLPFERATIM
RCLPFERATIL

SEQ ID NO: 6303 - protein, 9 aa, Artificial Sequence
  Description of Artificial Sequence: Synthetic peptide
  Seed: RMMESARPE
RSMESARPL

SEQ ID NO: 6304 - protein, 11 aa, Artificial Sequence
  Description of Artificial Sequence: Synthetic peptide
  Seed: RNLPFERATIM
RCLPFERATIM

SEQ ID NO: 6305 - protein, 11 aa, Artificial Sequence
  Description of Artificial Sequence: Synthetic peptide
  Seed: RNLPFERATIM
RCLPFERATIF

SEQ ID NO: 6306 - protein, 11 aa, Artificial Sequence
  Description of Artificial Sequence: Synthetic peptide
  Seed: RNLPFERATIM
RCLPFERATIV

SEQ ID NO: 6307 - protein, 11 aa, Artificial Sequence
  Description of Artificial Sequence: Synthetic peptide
  Seed: RNLPFERATIM
RQLPFERATIA

SEQ ID NO: 6308 - protein, 11 aa, Artificial Sequence
  Description of Artificial Sequence: Synthetic peptide
  Seed: RNLPFERATIM
RQLPFERATIH

SEQ ID NO: 6309 - protein, 9 aa, Artificial Sequence
  Description of Artificial Sequence: Synthetic peptide
  Seed: RMMESARPE
RSMESARPI

SEQ ID NO: 6310 - protein, 9 aa, Artificial Sequence
  Description of Artificial Sequence: Synthetic peptide
  Seed: RMMESARPE
RSMESARPH

SEQ ID NO: 6311 - protein, 11 aa, Artificial Sequence
  Description of Artificial Sequence: Synthetic peptide
  Seed: RNLPFERATIM
RQLPFERATII

SEQ ID NO: 6312 - protein, 11 aa, Artificial Sequence
  Description of Artificial Sequence: Synthetic peptide
  Seed: RNLPFERATIM
RQLPFERATIL

SEQ ID NO: 6313 - protein, 11 aa, Artificial Sequence
  Description of Artificial Sequence: Synthetic peptide
  Seed: RNLPFERATIM
RQLPFERATIM

SEQ ID NO: 6314 - protein, 9 aa, Artificial Sequence
  Description of Artificial Sequence: Synthetic peptide
  Seed: RMMESARPE
RSMESARPA

SEQ ID NO: 6315 - protein, 9 aa, Artificial Sequence
  Description of Artificial Sequence: Synthetic peptide
  Seed: RMMESARPE
RPMESARPY

SEQ ID NO: 6316 - protein, 11 aa, Artificial Sequence
  Description of Artificial Sequence: Synthetic peptide
  Seed: RNLPFERATIM
RDLPFERATIF

SEQ ID NO: 6317 - protein, 11 aa, Artificial Sequence
  Description of Artificial Sequence: Synthetic peptide
  Seed: RNLPFERATIM
RDLPFERATIL

SEQ ID NO: 6318 - protein, 11 aa, Artificial Sequence
  Description of Artificial Sequence: Synthetic peptide
  Seed: RNLPFERATIM
RQLPFERATIW

SEQ ID NO: 6319 - protein, 11 aa, Artificial Sequence
  Description of Artificial Sequence: Synthetic peptide
  Seed: RNLPFERATIM
RDLPFERATII

SEQ ID NO: 6320 - protein, 11 aa, Artificial Sequence
  Description of Artificial Sequence: Synthetic peptide
  Seed: RNLPFERATIM
RRLPFERATII

SEQ ID NO: 6321 - protein, 11 aa, Artificial Sequence
  Description of Artificial Sequence: Synthetic peptide
  Seed: RNLPFERATIM
RRLPFERATIL

SEQ ID NO: 6322 - protein, 11 aa, Artificial Sequence
  Description of Artificial Sequence: Synthetic peptide
  Seed: RNLPFERATIM
RRLPFERATIM

SEQ ID NO: 6323 - protein, 11 aa, Artificial Sequence
  Description of Artificial Sequence: Synthetic peptide
  Seed: RNLPFERATIM
RRLPFERATIF

SEQ ID NO: 6324 - protein, 9 aa, Artificial Sequence
  Description of Artificial Sequence: Synthetic peptide
  Seed: RMMESARPE
RSMESARPY

SEQ ID NO: 6325 - protein, 11 aa, Artificial Sequence
  Description of Artificial Sequence: Synthetic peptide
  Seed: RNLPFERATIM
RRLPFERATIY

SEQ ID NO: 6326 - protein, 11 aa, Artificial Sequence
  Description of Artificial Sequence: Synthetic peptide
  Seed: RNLPFERATIM
RRLPFERATIV

SEQ ID NO: 6327 - protein, 11 aa, Artificial Sequence
  Description of Artificial Sequence: Synthetic peptide
  Seed: RNLPFERATIM
RNLPFERATIA

SEQ ID NO: 6328 - protein, 11 aa, Artificial Sequence
  Description of Artificial Sequence: Synthetic peptide
  Seed: RNLPFERATIM
RNLPFERATII

SEQ ID NO: 6329 - protein, 11 aa, Artificial Sequence
  Description of Artificial Sequence: Synthetic peptide
  Seed: RNLPFERATIM
RNLPFERATIL

SEQ ID NO: 6330 - protein, 9 aa, Artificial Sequence
  Description of Artificial Sequence: Synthetic peptide
  Seed: RMMESARPE
RSMESARPW

SEQ ID NO: 6331 - protein, 9 aa, Artificial Sequence
  Description of Artificial Sequence: Synthetic peptide
  Seed: RMMESARPE
RSMESARPF

SEQ ID NO: 6332 - protein, 11 aa, Artificial Sequence
  Description of Artificial Sequence: Synthetic peptide
  Seed: RNLPFERATIM
RNLPFERATIF

SEQ ID NO: 6333 - protein, 11 aa, Artificial Sequence
  Description of Artificial Sequence: Synthetic peptide
  Seed: RNLPFERATIM
RNLPFERATIY

SEQ ID NO: 6334 - protein, 11 aa, Artificial Sequence
  Description of Artificial Sequence: Synthetic peptide
  Seed: RNLPFERATIM
RNLPFERATIV

SEQ ID NO: 6335 - protein, 9 aa, Artificial Sequence
  Description of Artificial Sequence: Synthetic peptide
  Seed: RMMESARPE
RSMESARPM

SEQ ID NO: 6336 - protein, 11 aa, Artificial Sequence
  Description of Artificial Sequence: Synthetic peptide
  Seed: RNLPFERATIM
RDLPFERATIA

SEQ ID NO: 6337 - protein, 11 aa, Artificial Sequence
  Description of Artificial Sequence: Synthetic peptide
  Seed: RNLPFERATIM
RQLPFERATIF

SEQ ID NO: 6338 - protein, 9 aa, Artificial Sequence
  Description of Artificial Sequence: Synthetic peptide
  Seed: RMMESARPE
RPMESARPF

SEQ ID NO: 6339 - protein, 9 aa, Artificial Sequence
  Description of Artificial Sequence: Synthetic peptide
  Seed: RMMESARPE
RFMESARPL

SEQ ID NO: 6340 - protein, 11 aa, Artificial Sequence
  Description of Artificial Sequence: Synthetic peptide
  Seed: RNLPFERATIM
RHLPFERATII

SEQ ID NO: 6341 - protein, 9 aa, Artificial Sequence
  Description of Artificial Sequence: Synthetic peptide
  Seed: RMMESARPE
RFMESARPF

SEQ ID NO: 6342 - protein, 9 aa, Artificial Sequence
  Description of Artificial Sequence: Synthetic peptide
  Seed: RMMESARPE
RFMESARPM

SEQ ID NO: 6343 - protein, 11 aa, Artificial Sequence
  Description of Artificial Sequence: Synthetic peptide
  Seed: RNLPFERATIM
RHLPFERATIM

SEQ ID NO: 6344 - protein, 11 aa, Artificial Sequence
  Description of Artificial Sequence: Synthetic peptide
  Seed: RNLPFERATIM
RHLPFERATIF

SEQ ID NO: 6345 - protein, 11 aa, Artificial Sequence
  Description of Artificial Sequence: Synthetic peptide
  Seed: RNLPFERATIM
RHLPFERATIY

SEQ ID NO: 6346 - protein, 11 aa, Artificial Sequence
  Description of Artificial Sequence: Synthetic peptide
  Seed: RNLPFERATIM
RHLPFERATIV

SEQ ID NO: 6347 - protein, 11 aa, Artificial Sequence
  Description of Artificial Sequence: Synthetic peptide
  Seed: RNLPFERATIM
RILPFERATIA

SEQ ID NO: 6348 - protein, 11 aa, Artificial Sequence
  Description of Artificial Sequence: Synthetic peptide
  Seed: RNLPFERATIM
RILPFERATII

SEQ ID NO: 6349 - protein, 11 aa, Artificial Sequence
  Description of Artificial Sequence: Synthetic peptide
  Seed: RNLPFERATIM
RILPFERATIL

SEQ ID NO: 6350 - protein, 11 aa, Artificial Sequence
  Description of Artificial Sequence: Synthetic peptide
  Seed: RNLPFERATIM
RILPFERATIM

SEQ ID NO: 6351 - protein, 11 aa, Artificial Sequence
  Description of Artificial Sequence: Synthetic peptide
  Seed: RNLPFERATIM
RILPFERATIF

SEQ ID NO: 6352 - protein, 11 aa, Artificial Sequence
  Description of Artificial Sequence: Synthetic peptide
  Seed: RNLPFERATIM
RILPFERATIY

SEQ ID NO: 6353 - protein, 11 aa, Artificial Sequence
  Description of Artificial Sequence: Synthetic peptide
  Seed: RNLPFERATIM
RILPFERATIV

SEQ ID NO: 6354 - protein, 11 aa, Artificial Sequence
  Description of Artificial Sequence: Synthetic peptide
  Seed: RNLPFERATIM
RLLPFERATIA

SEQ ID NO: 6355 - protein, 11 aa, Artificial Sequence
  Description of Artificial Sequence: Synthetic peptide
  Seed: RNLPFERATIM
RLLPFERATII

SEQ ID NO: 6356 - protein, 11 aa, Artificial Sequence
  Description of Artificial Sequence: Synthetic peptide
  Seed: RNLPFERATIM
RLLPFERATIL

SEQ ID NO: 6357 - protein, 11 aa, Artificial Sequence
  Description of Artificial Sequence: Synthetic peptide
  Seed: RNLPFERATIM
RLLPFERATIM

SEQ ID NO: 6358 - protein, 11 aa, Artificial Sequence
  Description of Artificial Sequence: Synthetic peptide
  Seed: RNLPFERATIM
RHLPFERATIL

SEQ ID NO: 6359 - protein, 11 aa, Artificial Sequence
  Description of Artificial Sequence: Synthetic peptide
  Seed: RNLPFERATIM
RHLPFERATIA

SEQ ID NO: 6360 - protein, 11 aa, Artificial Sequence
  Description of Artificial Sequence: Synthetic peptide
  Seed: RNLPFERATIM
RQLPFERATIY

SEQ ID NO: 6361 - protein, 11 aa, Artificial Sequence
  Description of Artificial Sequence: Synthetic peptide
  Seed: RNLPFERATIM
RGLPFERATIV

SEQ ID NO: 6362 - protein, 11 aa, Artificial Sequence
  Description of Artificial Sequence: Synthetic peptide
  Seed: RNLPFERATIM
RQLPFERATIV

SEQ ID NO: 6363 - protein, 11 aa, Artificial Sequence
  Description of Artificial Sequence: Synthetic peptide
  Seed: RNLPFERATIM
RELPFERATIA

SEQ ID NO: 6364 - protein, 9 aa, Artificial Sequence
  Description of Artificial Sequence: Synthetic peptide
  Seed: RMMESARPE
RPMESARPM

SEQ ID NO: 6365 - protein, 11 aa, Artificial Sequence
  Description of Artificial Sequence: Synthetic peptide
  Seed: RNLPFERATIM
RELPFERATII

SEQ ID NO: 6366 - protein, 11 aa, Artificial Sequence
  Description of Artificial Sequence: Synthetic peptide
  Seed: RNLPFERATIM
RELPFERATIL

SEQ ID NO: 6367 - protein, 11 aa, Artificial Sequence
  Description of Artificial Sequence: Synthetic peptide
  Seed: RNLPFERATIM
RELPFERATIM

SEQ ID NO: 6368 - protein, 11 aa, Artificial Sequence
  Description of Artificial Sequence: Synthetic peptide
  Seed: RNLPFERATIM
RELPFERATIF

SEQ ID NO: 6369 - protein, 11 aa, Artificial Sequence
  Description of Artificial Sequence: Synthetic peptide
  Seed: RNLPFERATIM
RELPFERATIY

SEQ ID NO: 6370 - protein, 11 aa, Artificial Sequence
  Description of Artificial Sequence: Synthetic peptide
  Seed: RNLPFERATIM
RELPFERATIV

SEQ ID NO: 6371 - protein, 11 aa, Artificial Sequence
  Description of Artificial Sequence: Synthetic peptide
  Seed: RNLPFERATIM
RGLPFERATIA

SEQ ID NO: 6372 - protein, 11 aa, Artificial Sequence
  Description of Artificial Sequence: Synthetic peptide
  Seed: RNLPFERATIM
RGLPFERATII

SEQ ID NO: 6373 - protein, 9 aa, Artificial Sequence
  Description of Artificial Sequence: Synthetic peptide
  Seed: RMMESARPE
RFMESARPY

SEQ ID NO: 6374 - protein, 11 aa, Artificial Sequence
  Description of Artificial Sequence: Synthetic peptide
  Seed: RNLPFERATIM
RGLPFERATIL

SEQ ID NO: 6375 - protein, 11 aa, Artificial Sequence
  Description of Artificial Sequence: Synthetic peptide
  Seed: RNLPFERATIM
RGLPFERATIM

SEQ ID NO: 6376 - protein, 11 aa, Artificial Sequence
  Description of Artificial Sequence: Synthetic peptide
  Seed: RNLPFERATIM
RGLPFERATIF

SEQ ID NO: 6377 - protein, 9 aa, Artificial Sequence
  Description of Artificial Sequence: Synthetic peptide
  Seed: RMMESARPE
RFMESARPW

SEQ ID NO: 6378 - protein, 11 aa, Artificial Sequence
  Description of Artificial Sequence: Synthetic peptide
  Seed: RNLPFERATIM
RGLPFERATIY

SEQ ID NO: 6379 - protein, 11 aa, Artificial Sequence
  Description of Artificial Sequence: Synthetic peptide
  Seed: RNLPFERATIM
RYLPFERATII

SEQ ID NO: 6380 - protein, 9 aa, Artificial Sequence
  Description of Artificial Sequence: Synthetic peptide
  Seed: RSRYWAIRT
RIRYWAIRS

SEQ ID NO: 6381 - protein, 10 aa, Artificial Sequence
  Description of Artificial Sequence: Synthetic peptide
  Seed: RSGGNTNQQR
RTGGNTNQQR

SEQ ID NO: 6382 - protein, 8 aa, Artificial Sequence
  Description of Artificial Sequence: Synthetic peptide
  Seed: RTRIAYER
RSRIAYEP

SEQ ID NO: 6383 - protein, 8 aa, Artificial Sequence
  Description of Artificial Sequence: Synthetic peptide
  Seed: RTRIAYER
RFRIAYEV

SEQ ID NO: 6384 - protein, 8 aa, Artificial Sequence
  Description of Artificial Sequence: Synthetic peptide
  Seed: RTRIAYER
RSRIAYEA

SEQ ID NO: 6385 - protein, 8 aa, Artificial Sequence
  Description of Artificial Sequence: Synthetic peptide
  Seed: RTRIAYER
RSRIAYER

SEQ ID NO: 6386 - protein, 8 aa, Artificial Sequence
  Description of Artificial Sequence: Synthetic peptide
  Seed: RTRIAYER
RSRIAYEG

SEQ ID NO: 6387 - protein, 8 aa, Artificial Sequence
  Description of Artificial Sequence: Synthetic peptide
  Seed: RTRIAYER
RSRIAYEI

SEQ ID NO: 6388 - protein, 8 aa, Artificial Sequence
  Description of Artificial Sequence: Synthetic peptide
  Seed: RTRIAYER
RSRIAYEL

SEQ ID NO: 6389 - protein, 8 aa, Artificial Sequence
  Description of Artificial Sequence: Synthetic peptide
  Seed: RTRIAYER
RSRIAYEK

SEQ ID NO: 6390 - protein, 8 aa, Artificial Sequence
  Description of Artificial Sequence: Synthetic peptide
  Seed: RTRIAYER
RSRIAYEM

SEQ ID NO: 6391 - protein, 8 aa, Artificial Sequence
  Description of Artificial Sequence: Synthetic peptide
  Seed: RTRIAYER
RSRIAYEF

SEQ ID NO: 6392 - protein, 8 aa, Artificial Sequence
  Description of Artificial Sequence: Synthetic peptide
  Seed: RTRIAYER
RSRIAYES

SEQ ID NO: 6393 - protein, 8 aa, Artificial Sequence
  Description of Artificial Sequence: Synthetic peptide
  Seed: RTRIAYER
RFRIAYEL

SEQ ID NO: 6394 - protein, 8 aa, Artificial Sequence
  Description of Artificial Sequence: Synthetic peptide
  Seed: RTRIAYER
RSRIAYET

SEQ ID NO: 6395 - protein, 8 aa, Artificial Sequence
  Description of Artificial Sequence: Synthetic peptide
  Seed: RTRIAYER
RSRIAYEY

SEQ ID NO: 6396 - protein, 8 aa, Artificial Sequence
  Description of Artificial Sequence: Synthetic peptide
  Seed: RTRIAYER
RSRIAYEV

SEQ ID NO: 6397 - protein, 8 aa, Artificial Sequence
  Description of Artificial Sequence: Synthetic peptide
  Seed: RTRIAYER
RTRIAYEA

SEQ ID NO: 6398 - protein, 8 aa, Artificial Sequence
  Description of Artificial Sequence: Synthetic peptide
  Seed: RTRIAYER
RTRIAYEN

SEQ ID NO: 6399 - protein, 8 aa, Artificial Sequence
  Description of Artificial Sequence: Synthetic peptide
  Seed: RTRIAYER
RTRIAYEC

SEQ ID NO: 6400 - protein, 8 aa, Artificial Sequence
  Description of Artificial Sequence: Synthetic peptide
  Seed: RTRIAYER
RTRIAYEQ

SEQ ID NO: 6401 - protein, 8 aa, Artificial Sequence
  Description of Artificial Sequence: Synthetic peptide
  Seed: RTRIAYER
RTRIAYEE

SEQ ID NO: 6402 - protein, 8 aa, Artificial Sequence
  Description of Artificial Sequence: Synthetic peptide
  Seed: RTRIAYER
RTRIAYEG

SEQ ID NO: 6403 - protein, 8 aa, Artificial Sequence
  Description of Artificial Sequence: Synthetic peptide
  Seed: RTRIAYER
RFRIAYEK

SEQ ID NO: 6404 - protein, 8 aa, Artificial Sequence
  Description of Artificial Sequence: Synthetic peptide
  Seed: RTRIAYER
RFRIAYEI

SEQ ID NO: 6405 - protein, 10 aa, Artificial Sequence
  Description of Artificial Sequence: Synthetic peptide
  Seed: RSGGNTNQQR
RWGGNTNQQR

SEQ ID NO: 6406 - protein, 8 aa, Artificial Sequence
  Description of Artificial Sequence: Synthetic peptide
  Seed: RTRIAYER
RMRIAYEA

SEQ ID NO: 6407 - protein, 8 aa, Artificial Sequence
  Description of Artificial Sequence: Synthetic peptide
  Seed: RTRIAYER
RIRIAYEK

SEQ ID NO: 6408 - protein, 8 aa, Artificial Sequence
  Description of Artificial Sequence: Synthetic peptide
  Seed: RTRIAYER
RIRIAYEM

SEQ ID NO: 6409 - protein, 8 aa, Artificial Sequence
  Description of Artificial Sequence: Synthetic peptide
  Seed: RTRIAYER
RIRIAYEF

SEQ ID NO: 6410 - protein, 8 aa, Artificial Sequence
  Description of Artificial Sequence: Synthetic peptide
  Seed: RTRIAYER
RIRIAYEY

SEQ ID NO: 6411 - protein, 8 aa, Artificial Sequence
  Description of Artificial Sequence: Synthetic peptide
  Seed: RTRIAYER
RIRIAYEV

SEQ ID NO: 6412 - protein, 8 aa, Artificial Sequence
  Description of Artificial Sequence: Synthetic peptide
  Seed: RTRIAYER
RLRIAYEA

SEQ ID NO: 6413 - protein, 8 aa, Artificial Sequence
  Description of Artificial Sequence: Synthetic peptide
  Seed: RTRIAYER
RLRIAYER

SEQ ID NO: 6414 - protein, 8 aa, Artificial Sequence
  Description of Artificial Sequence: Synthetic peptide
  Seed: RTRIAYER
RLRIAYEK

SEQ ID NO: 6415 - protein, 8 aa, Artificial Sequence
  Description of Artificial Sequence: Synthetic peptide
  Seed: RTRIAYER
RKRIAYER

SEQ ID NO: 6416 - protein, 8 aa, Artificial Sequence
  Description of Artificial Sequence: Synthetic peptide
  Seed: RTRIAYER
RMRIAYER

SEQ ID NO: 6417 - protein, 8 aa, Artificial Sequence
  Description of Artificial Sequence: Synthetic peptide
  Seed: RTRIAYER
RFRIAYER

SEQ ID NO: 6418 - protein, 8 aa, Artificial Sequence
  Description of Artificial Sequence: Synthetic peptide
  Seed: RTRIAYER
RMRIAYEI

SEQ ID NO: 6419 - protein, 8 aa, Artificial Sequence
  Description of Artificial Sequence: Synthetic peptide
  Seed: RTRIAYER
RMRIAYEL

SEQ ID NO: 6420 - protein, 8 aa, Artificial Sequence
  Description of Artificial Sequence: Synthetic peptide
  Seed: RTRIAYER
RMRIAYEK

SEQ ID NO: 6421 - protein, 8 aa, Artificial Sequence
  Description of Artificial Sequence: Synthetic peptide
  Seed: RTRIAYER
RMRIAYEM

SEQ ID NO: 6422 - protein, 8 aa, Artificial Sequence
  Description of Artificial Sequence: Synthetic peptide
  Seed: RTRIAYER
RMRIAYEF

SEQ ID NO: 6423 - protein, 8 aa, Artificial Sequence
  Description of Artificial Sequence: Synthetic peptide
  Seed: RTRIAYER
RMRIAYES

SEQ ID NO: 6424 - protein, 8 aa, Artificial Sequence
  Description of Artificial Sequence: Synthetic peptide
  Seed: RTRIAYER
RMRIAYEY

SEQ ID NO: 6425 - protein, 8 aa, Artificial Sequence
  Description of Artificial Sequence: Synthetic peptide
  Seed: RTRIAYER
RMRIAYEV

SEQ ID NO: 6426 - protein, 8 aa, Artificial Sequence
  Description of Artificial Sequence: Synthetic peptide
  Seed: RTRIAYER
RFRIAYEA

SEQ ID NO: 6427 - protein, 8 aa, Artificial Sequence
  Description of Artificial Sequence: Synthetic peptide
  Seed: RTRIAYER
RTRIAYEH

SEQ ID NO: 6428 - protein, 8 aa, Artificial Sequence
  Description of Artificial Sequence: Synthetic peptide
  Seed: RTRIAYER
RTRIAYEI

SEQ ID NO: 6429 - protein, 8 aa, Artificial Sequence
  Description of Artificial Sequence: Synthetic peptide
  Seed: RTRIAYER
RTRIAYEL

SEQ ID NO: 6430 - protein, 9 aa, Artificial Sequence
  Description of Artificial Sequence: Synthetic peptide
  Seed: RTRIAYERM
RARIAYERN

SEQ ID NO: 6431 - protein, 8 aa, Artificial Sequence
  Description of Artificial Sequence: Synthetic peptide
  Seed: RTRIAYER
RVRIAYEM

SEQ ID NO: 6432 - protein, 8 aa, Artificial Sequence
  Description of Artificial Sequence: Synthetic peptide
  Seed: RTRIAYER
RVRIAYEF

SEQ ID NO: 6433 - protein, 8 aa, Artificial Sequence
  Description of Artificial Sequence: Synthetic peptide
  Seed: RTRIAYER
RVRIAYEP

SEQ ID NO: 6434 - protein, 8 aa, Artificial Sequence
  Description of Artificial Sequence: Synthetic peptide
  Seed: RTRIAYER
RVRIAYES

SEQ ID NO: 6435 - protein, 8 aa, Artificial Sequence
  Description of Artificial Sequence: Synthetic peptide
  Seed: RTRIAYER
RVRIAYET

SEQ ID NO: 6436 - protein, 8 aa, Artificial Sequence
  Description of Artificial Sequence: Synthetic peptide
  Seed: RTRIAYER
RVRIAYEY

SEQ ID NO: 6437 - protein, 8 aa, Artificial Sequence
  Description of Artificial Sequence: Synthetic peptide
  Seed: RTRIAYER
RVRIAYEV

SEQ ID NO: 6438 - protein, 9 aa, Artificial Sequence
  Description of Artificial Sequence: Synthetic peptide
  Seed: RTRIAYERM
RARIAYERA

SEQ ID NO: 6439 - protein, 9 aa, Artificial Sequence
  Description of Artificial Sequence: Synthetic peptide
  Seed: RTRIAYERM
RARIAYERR

SEQ ID NO: 6440 - protein, 9 aa, Artificial Sequence
  Description of Artificial Sequence: Synthetic peptide
  Seed: RTRIAYERM
RARIAYERC

SEQ ID NO: 6441 - protein, 8 aa, Artificial Sequence
  Description of Artificial Sequence: Synthetic peptide
  Seed: RTRIAYER
RTRIAYEK

SEQ ID NO: 6442 - protein, 9 aa, Artificial Sequence
  Description of Artificial Sequence: Synthetic peptide
  Seed: RTRIAYERM
RARIAYERQ

SEQ ID NO: 6443 - protein, 9 aa, Artificial Sequence
  Description of Artificial Sequence: Synthetic peptide
  Seed: RTRIAYERM
RARIAYERE

SEQ ID NO: 6444 - protein, 9 aa, Artificial Sequence
  Description of Artificial Sequence: Synthetic peptide
  Seed: RTRIAYERM
RARIAYERG

SEQ ID NO: 6445 - protein, 9 aa, Artificial Sequence
  Description of Artificial Sequence: Synthetic peptide
  Seed: RTRIAYERM
RARIAYERH

SEQ ID NO: 6446 - protein, 9 aa, Artificial Sequence
  Description of Artificial Sequence: Synthetic peptide
  Seed: RTRIAYERM
RARIAYERI

SEQ ID NO: 6447 - protein, 9 aa, Artificial Sequence
  Description of Artificial Sequence: Synthetic peptide
  Seed: RTRIAYERM
RARIAYERL

SEQ ID NO: 6448 - protein, 9 aa, Artificial Sequence
  Description of Artificial Sequence: Synthetic peptide
  Seed: RTRIAYERM
RARIAYERK

SEQ ID NO: 6449 - protein, 9 aa, Artificial Sequence
  Description of Artificial Sequence: Synthetic peptide
  Seed: RTRIAYERM
RARIAYERM

SEQ ID NO: 6450 - protein, 9 aa, Artificial Sequence
  Description of Artificial Sequence: Synthetic peptide
  Seed: RTRIAYERM
RARIAYERF

SEQ ID NO: 6451 - protein, 8 aa, Artificial Sequence
  Description of Artificial Sequence: Synthetic peptide
  Seed: RTRIAYER
RVRIAYEK

SEQ ID NO: 6452 - protein, 8 aa, Artificial Sequence
  Description of Artificial Sequence: Synthetic peptide
  Seed: RTRIAYER
RVRIAYEL

SEQ ID NO: 6453 - protein, 8 aa, Artificial Sequence
  Description of Artificial Sequence: Synthetic peptide
  Seed: RTRIAYER
RVRIAYEI

SEQ ID NO: 6454 - protein, 8 aa, Artificial Sequence
  Description of Artificial Sequence: Synthetic peptide
  Seed: RTRIAYER
RVRIAYEG

SEQ ID NO: 6455 - protein, 8 aa, Artificial Sequence
  Description of Artificial Sequence: Synthetic peptide
  Seed: RTRIAYER
RTRIAYEM

SEQ ID NO: 6456 - protein, 8 aa, Artificial Sequence
  Description of Artificial Sequence: Synthetic peptide
  Seed: RTRIAYER
RTRIAYEF

SEQ ID NO: 6457 - protein, 8 aa, Artificial Sequence
  Description of Artificial Sequence: Synthetic peptide
  Seed: RTRIAYER
RTRIAYEP

SEQ ID NO: 6458 - protein, 8 aa, Artificial Sequence
  Description of Artificial Sequence: Synthetic peptide
  Seed: RTRIAYER
RTRIAYES

SEQ ID NO: 6459 - protein, 8 aa, Artificial Sequence
  Description of Artificial Sequence: Synthetic peptide
  Seed: RTRIAYER
RTRIAYET

SEQ ID NO: 6460 - protein, 8 aa, Artificial Sequence
  Description of Artificial Sequence: Synthetic peptide
  Seed: RTRIAYER
RTRIAYEY

SEQ ID NO: 6461 - protein, 8 aa, Artificial Sequence
  Description of Artificial Sequence: Synthetic peptide
  Seed: RTRIAYER
RTRIAYEV

SEQ ID NO: 6462 - protein, 8 aa, Artificial Sequence
  Description of Artificial Sequence: Synthetic peptide
  Seed: RTRIAYER
RWRIAYEA

SEQ ID NO: 6463 - protein, 8 aa, Artificial Sequence
  Description of Artificial Sequence: Synthetic peptide
  Seed: RTRIAYER
RWRIAYER

SEQ ID NO: 6464 - protein, 8 aa, Artificial Sequence
  Description of Artificial Sequence: Synthetic peptide
  Seed: RTRIAYER
RWRIAYEK

SEQ ID NO: 6465 - protein, 8 aa, Artificial Sequence
  Description of Artificial Sequence: Synthetic peptide
  Seed: RTRIAYER
RYRIAYEA

SEQ ID NO: 6466 - protein, 8 aa, Artificial Sequence
  Description of Artificial Sequence: Synthetic peptide
  Seed: RTRIAYER
RYRIAYER

SEQ ID NO: 6467 - protein, 8 aa, Artificial Sequence
  Description of Artificial Sequence: Synthetic peptide
  Seed: RTRIAYER
RYRIAYEI

SEQ ID NO: 6468 - protein, 8 aa, Artificial Sequence
  Description of Artificial Sequence: Synthetic peptide
  Seed: RTRIAYER
RYRIAYEL

SEQ ID NO: 6469 - protein, 8 aa, Artificial Sequence
  Description of Artificial Sequence: Synthetic peptide
  Seed: RTRIAYER
RYRIAYEK

SEQ ID NO: 6470 - protein, 8 aa, Artificial Sequence
  Description of Artificial Sequence: Synthetic peptide
  Seed: RTRIAYER
RYRIAYEM

SEQ ID NO: 6471 - protein, 8 aa, Artificial Sequence
  Description of Artificial Sequence: Synthetic peptide
  Seed: RTRIAYER
RYRIAYEV

SEQ ID NO: 6472 - protein, 8 aa, Artificial Sequence
  Description of Artificial Sequence: Synthetic peptide
  Seed: RTRIAYER
RVRIAYEA

SEQ ID NO: 6473 - protein, 8 aa, Artificial Sequence
  Description of Artificial Sequence: Synthetic peptide
  Seed: RTRIAYER
RVRIAYER

SEQ ID NO: 6474 - protein, 8 aa, Artificial Sequence
  Description of Artificial Sequence: Synthetic peptide
  Seed: RTRIAYER
RIRIAYEL

SEQ ID NO: 6475 - protein, 8 aa, Artificial Sequence
  Description of Artificial Sequence: Synthetic peptide
  Seed: RTRIAYER
RIRIAYEI

SEQ ID NO: 6476 - protein, 8 aa, Artificial Sequence
  Description of Artificial Sequence: Synthetic peptide
  Seed: RTRIAYER
RIRIAYER

SEQ ID NO: 6477 - protein, 10 aa, Artificial Sequence
  Description of Artificial Sequence: Synthetic peptide
  Seed: RTRALVRTGM
RWRALVRTGP

SEQ ID NO: 6478 - protein, 10 aa, Artificial Sequence
  Description of Artificial Sequence: Synthetic peptide
  Seed: RTRALVRTGM
RWRALVRTGR

SEQ ID NO: 6479 - protein, 10 aa, Artificial Sequence
  Description of Artificial Sequence: Synthetic peptide
  Seed: RTRALVRTGM
RWRALVRTGC

SEQ ID NO: 6480 - protein, 10 aa, Artificial Sequence
  Description of Artificial Sequence: Synthetic peptide
  Seed: RTRALVRTGM
RWRALVRTGG

SEQ ID NO: 6481 - protein, 10 aa, Artificial Sequence
  Description of Artificial Sequence: Synthetic peptide
  Seed: RTRALVRTGM
RWRALVRTGH

SEQ ID NO: 6482 - protein, 10 aa, Artificial Sequence
  Description of Artificial Sequence: Synthetic peptide
  Seed: RTRALVRTGM
RWRALVRTGI

SEQ ID NO: 6483 - protein, 10 aa, Artificial Sequence
  Description of Artificial Sequence: Synthetic peptide
  Seed: RTRALVRTGM
RWRALVRTGL

SEQ ID NO: 6484 - protein, 10 aa, Artificial Sequence
  Description of Artificial Sequence: Synthetic peptide
  Seed: RTRALVRTGM
RWRALVRTGK

SEQ ID NO: 6485 - protein, 10 aa, Artificial Sequence
  Description of Artificial Sequence: Synthetic peptide
  Seed: RTRALVRTGM
RWRALVRTGM

SEQ ID NO: 6486 - protein, 10 aa, Artificial Sequence
  Description of Artificial Sequence: Synthetic peptide
  Seed: RTRALVRTGM
RWRALVRTGF

SEQ ID NO: 6487 - protein, 10 aa, Artificial Sequence
  Description of Artificial Sequence: Synthetic peptide
  Seed: RTRALVRTGM
RWRALVRTGS

SEQ ID NO: 6488 - protein, 10 aa, Artificial Sequence
  Description of Artificial Sequence: Synthetic peptide
  Seed: RTRALVRTGM
RYRALVRTGG

SEQ ID NO: 6489 - protein, 10 aa, Artificial Sequence
  Description of Artificial Sequence: Synthetic peptide
  Seed: RTRALVRTGM
RWRALVRTGT

SEQ ID NO: 6490 - protein, 10 aa, Artificial Sequence
  Description of Artificial Sequence: Synthetic peptide
  Seed: RTRALVRTGM
RWRALVRTGW

SEQ ID NO: 6491 - protein, 10 aa, Artificial Sequence
  Description of Artificial Sequence: Synthetic peptide
  Seed: RTRALVRTGM
RWRALVRTGY

SEQ ID NO: 6492 - protein, 10 aa, Artificial Sequence
  Description of Artificial Sequence: Synthetic peptide
  Seed: RTRALVRTGM
RWRALVRTGV

SEQ ID NO: 6493 - protein, 10 aa, Artificial Sequence
  Description of Artificial Sequence: Synthetic peptide
  Seed: RTRALVRTGM
RYRALVRTGA

SEQ ID NO: 6494 - protein, 10 aa, Artificial Sequence
  Description of Artificial Sequence: Synthetic peptide
  Seed: RTRALVRTGM
RYRALVRTGR

SEQ ID NO: 6495 - protein, 10 aa, Artificial Sequence
  Description of Artificial Sequence: Synthetic peptide
  Seed: RTRALVRTGM
RYRALVRTGN

SEQ ID NO: 6496 - protein, 10 aa, Artificial Sequence
  Description of Artificial Sequence: Synthetic peptide
  Seed: RTRALVRTGM
RYRALVRTGC

SEQ ID NO: 6497 - protein, 10 aa, Artificial Sequence
  Description of Artificial Sequence: Synthetic peptide
  Seed: RTRALVRTGM
RYRALVRTGQ

SEQ ID NO: 6498 - protein, 10 aa, Artificial Sequence
  Description of Artificial Sequence: Synthetic peptide
  Seed: RTRALVRTGM
RWRALVRTGA

SEQ ID NO: 6499 - protein, 10 aa, Artificial Sequence
  Description of Artificial Sequence: Synthetic peptide
  Seed: RTRALVRTGM
RTRALVRTGV

SEQ ID NO: 6500 - protein, 10 aa, Artificial Sequence
  Description of Artificial Sequence: Synthetic peptide
  Seed: RTRALVRTGM
RTRALVRTGY

SEQ ID NO: 6501 - protein, 10 aa, Artificial Sequence
  Description of Artificial Sequence: Synthetic peptide
  Seed: RTRALVRTGM
RTRALVRTGW

SEQ ID NO: 6502 - protein, 10 aa, Artificial Sequence
  Description of Artificial Sequence: Synthetic peptide
  Seed: RTRALVRTGM
RSRALVRTGW

SEQ ID NO: 6503 - protein, 10 aa, Artificial Sequence
  Description of Artificial Sequence: Synthetic peptide
  Seed: RTRALVRTGM
RSRALVRTGY

SEQ ID NO: 6504 - protein, 10 aa, Artificial Sequence
  Description of Artificial Sequence: Synthetic peptide
  Seed: RTRALVRTGM
RSRALVRTGV

SEQ ID NO: 6505 - protein, 10 aa, Artificial Sequence
  Description of Artificial Sequence: Synthetic peptide
  Seed: RTRALVRTGM
RTRALVRTGA

SEQ ID NO: 6506 - protein, 10 aa, Artificial Sequence
  Description of Artificial Sequence: Synthetic peptide
  Seed: RTRALVRTGM
RTRALVRTGR

SEQ ID NO: 6507 - protein, 10 aa, Artificial Sequence
  Description of Artificial Sequence: Synthetic peptide
  Seed: RTRALVRTGM
RTRALVRTGN

SEQ ID NO: 6508 - protein, 10 aa, Artificial Sequence
  Description of Artificial Sequence: Synthetic peptide
  Seed: RTRALVRTGM
RTRALVRTGD

SEQ ID NO: 6509 - protein, 10 aa, Artificial Sequence
  Description of Artificial Sequence: Synthetic peptide
  Seed: RTRALVRTGM
RTRALVRTGC

SEQ ID NO: 6510 - protein, 10 aa, Artificial Sequence
  Description of Artificial Sequence: Synthetic peptide
  Seed: RTRALVRTGM
RTRALVRTGQ

SEQ ID NO: 6511 - protein, 10 aa, Artificial Sequence
  Description of Artificial Sequence: Synthetic peptide
  Seed: RTRALVRTGM
RTRALVRTGE

SEQ ID NO: 6512 - protein, 10 aa, Artificial Sequence
  Description of Artificial Sequence: Synthetic peptide
  Seed: RTRALVRTGM
RTRALVRTGG

SEQ ID NO: 6513 - protein, 10 aa, Artificial Sequence
  Description of Artificial Sequence: Synthetic peptide
  Seed: RTRALVRTGM
RTRALVRTGH

SEQ ID NO: 6514 - protein, 10 aa, Artificial Sequence
  Description of Artificial Sequence: Synthetic peptide
  Seed: RTRALVRTGM
RTRALVRTGI

SEQ ID NO: 6515 - protein, 10 aa, Artificial Sequence
  Description of Artificial Sequence: Synthetic peptide
  Seed: RTRALVRTGM
RTRALVRTGL

SEQ ID NO: 6516 - protein, 10 aa, Artificial Sequence
  Description of Artificial Sequence: Synthetic peptide
  Seed: RTRALVRTGM
RTRALVRTGK

SEQ ID NO: 6517 - protein, 10 aa, Artificial Sequence
  Description of Artificial Sequence: Synthetic peptide
  Seed: RTRALVRTGM
RTRALVRTGF

SEQ ID NO: 6518 - protein, 10 aa, Artificial Sequence
  Description of Artificial Sequence: Synthetic peptide
  Seed: RTRALVRTGM
RTRALVRTGP

SEQ ID NO: 6519 - protein, 10 aa, Artificial Sequence
  Description of Artificial Sequence: Synthetic peptide
  Seed: RTRALVRTGM
RTRALVRTGS

SEQ ID NO: 6520 - protein, 10 aa, Artificial Sequence
  Description of Artificial Sequence: Synthetic peptide
  Seed: RTRALVRTGM
RTRALVRTGT

SEQ ID NO: 6521 - protein, 10 aa, Artificial Sequence
  Description of Artificial Sequence: Synthetic peptide
  Seed: RTRALVRTGM
RYRALVRTGE

SEQ ID NO: 6522 - protein, 10 aa, Artificial Sequence
  Description of Artificial Sequence: Synthetic peptide
  Seed: RTRALVRTGM
RYRALVRTGH

SEQ ID NO: 6523 - protein, 8 aa, Artificial Sequence
  Description of Artificial Sequence: Synthetic peptide
  Seed: RTRIAYER
RIRIAYEA

SEQ ID NO: 6524 - protein, 8 aa, Artificial Sequence
  Description of Artificial Sequence: Synthetic peptide
  Seed: RTRIAYER
RARIAYEK

SEQ ID NO: 6525 - protein, 10 aa, Artificial Sequence
  Description of Artificial Sequence: Synthetic peptide
  Seed: RTRALVRTGM
RVRALVRTGF

SEQ ID NO: 6526 - protein, 10 aa, Artificial Sequence
  Description of Artificial Sequence: Synthetic peptide
  Seed: RTRALVRTGM
RVRALVRTGP

SEQ ID NO: 6527 - protein, 10 aa, Artificial Sequence
  Description of Artificial Sequence: Synthetic peptide
  Seed: RTRALVRTGM
RVRALVRTGS

SEQ ID NO: 6528 - protein, 10 aa, Artificial Sequence
  Description of Artificial Sequence: Synthetic peptide
  Seed: RTRALVRTGM
RVRALVRTGT

SEQ ID NO: 6529 - protein, 10 aa, Artificial Sequence
  Description of Artificial Sequence: Synthetic peptide
  Seed: RTRALVRTGM
RVRALVRTGW

SEQ ID NO: 6530 - protein, 10 aa, Artificial Sequence
  Description of Artificial Sequence: Synthetic peptide
  Seed: RTRALVRTGM
RVRALVRTGY

SEQ ID NO: 6531 - protein, 10 aa, Artificial Sequence
  Description of Artificial Sequence: Synthetic peptide
  Seed: RTRALVRTGM
RVRALVRTGV

SEQ ID NO: 6532 - protein, 8 aa, Artificial Sequence
  Description of Artificial Sequence: Synthetic peptide
  Seed: RTRIAYER
RARIAYEA

SEQ ID NO: 6533 - protein, 8 aa, Artificial Sequence
  Description of Artificial Sequence: Synthetic peptide
  Seed: RTRIAYER
RARIAYER

SEQ ID NO: 6534 - protein, 8 aa, Artificial Sequence
  Description of Artificial Sequence: Synthetic peptide
  Seed: RTRIAYER
RARIAYEV

SEQ ID NO: 6535 - protein, 10 aa, Artificial Sequence
  Description of Artificial Sequence: Synthetic peptide
  Seed: RTRALVRTGM
RYRALVRTGI

SEQ ID NO: 6536 - protein, 8 aa, Artificial Sequence
  Description of Artificial Sequence: Synthetic peptide
  Seed: RTRIAYER
RRRIAYER

SEQ ID NO: 6537 - protein, 8 aa, Artificial Sequence
  Description of Artificial Sequence: Synthetic peptide
  Seed: RTRIAYER
RRRIAYEK

SEQ ID NO: 6538 - protein, 8 aa, Artificial Sequence
  Description of Artificial Sequence: Synthetic peptide
  Seed: RTRIAYER
RNRIAYER

SEQ ID NO: 6539 - protein, 8 aa, Artificial Sequence
  Description of Artificial Sequence: Synthetic peptide
  Seed: RTRIAYER
RCRIAYER

SEQ ID NO: 6540 - protein, 8 aa, Artificial Sequence
  Description of Artificial Sequence: Synthetic peptide
  Seed: RTRIAYER
RQRIAYER

SEQ ID NO: 6541 - protein, 8 aa, Artificial Sequence
  Description of Artificial Sequence: Synthetic peptide
  Seed: RTRIAYER
RQRIAYEK

SEQ ID NO: 6542 - protein, 8 aa, Artificial Sequence
  Description of Artificial Sequence: Synthetic peptide
  Seed: RTRIAYER
RGRIAYER

SEQ ID NO: 6543 - protein, 8 aa, Artificial Sequence
  Description of Artificial Sequence: Synthetic peptide
  Seed: RTRIAYER
RGRIAYEK

SEQ ID NO: 6544 - protein, 8 aa, Artificial Sequence
  Description of Artificial Sequence: Synthetic peptide
  Seed: RTRIAYER
RHRIAYER

SEQ ID NO: 6545 - protein, 10 aa, Artificial Sequence
  Description of Artificial Sequence: Synthetic peptide
  Seed: RTRALVRTGM
RVRALVRTGM

SEQ ID NO: 6546 - protein, 10 aa, Artificial Sequence
  Description of Artificial Sequence: Synthetic peptide
  Seed: RTRALVRTGM
RVRALVRTGK

SEQ ID NO: 6547 - protein, 10 aa, Artificial Sequence
  Description of Artificial Sequence: Synthetic peptide
  Seed: RTRALVRTGM
RVRALVRTGL

SEQ ID NO: 6548 - protein, 10 aa, Artificial Sequence
  Description of Artificial Sequence: Synthetic peptide
  Seed: RTRALVRTGM
RVRALVRTGI

SEQ ID NO: 6549 - protein, 10 aa, Artificial Sequence
  Description of Artificial Sequence: Synthetic peptide
  Seed: RTRALVRTGM
RYRALVRTGL

SEQ ID NO: 6550 - protein, 10 aa, Artificial Sequence
  Description of Artificial Sequence: Synthetic peptide
  Seed: RTRALVRTGM
RYRALVRTGK

SEQ ID NO: 6551 - protein, 10 aa, Artificial Sequence
  Description of Artificial Sequence: Synthetic peptide
  Seed: RTRALVRTGM
RYRALVRTGM

SEQ ID NO: 6552 - protein, 10 aa, Artificial Sequence
  Description of Artificial Sequence: Synthetic peptide
  Seed: RTRALVRTGM
RYRALVRTGF

SEQ ID NO: 6553 - protein, 10 aa, Artificial Sequence
  Description of Artificial Sequence: Synthetic peptide
  Seed: RTRALVRTGM
RYRALVRTGP

SEQ ID NO: 6554 - protein, 10 aa, Artificial Sequence
  Description of Artificial Sequence: Synthetic peptide
  Seed: RTRALVRTGM
RYRALVRTGS

SEQ ID NO: 6555 - protein, 10 aa, Artificial Sequence
  Description of Artificial Sequence: Synthetic peptide
  Seed: RTRALVRTGM
RYRALVRTGT

SEQ ID NO: 6556 - protein, 10 aa, Artificial Sequence
  Description of Artificial Sequence: Synthetic peptide
  Seed: RTRALVRTGM
RYRALVRTGW

SEQ ID NO: 6557 - protein, 10 aa, Artificial Sequence
  Description of Artificial Sequence: Synthetic peptide
  Seed: RTRALVRTGM
RYRALVRTGY

SEQ ID NO: 6558 - protein, 10 aa, Artificial Sequence
  Description of Artificial Sequence: Synthetic peptide
  Seed: RTRALVRTGM
RYRALVRTGV

SEQ ID NO: 6559 - protein, 10 aa, Artificial Sequence
  Description of Artificial Sequence: Synthetic peptide
  Seed: RTRALVRTGM
RVRALVRTGA

SEQ ID NO: 6560 - protein, 10 aa, Artificial Sequence
  Description of Artificial Sequence: Synthetic peptide
  Seed: RTRALVRTGM
RVRALVRTGR

SEQ ID NO: 6561 - protein, 10 aa, Artificial Sequence
  Description of Artificial Sequence: Synthetic peptide
  Seed: RTRALVRTGM
RVRALVRTGN

SEQ ID NO: 6562 - protein, 10 aa, Artificial Sequence
  Description of Artificial Sequence: Synthetic peptide
  Seed: RTRALVRTGM
RVRALVRTGD

SEQ ID NO: 6563 - protein, 10 aa, Artificial Sequence
  Description of Artificial Sequence: Synthetic peptide
  Seed: RTRALVRTGM
RVRALVRTGC

SEQ ID NO: 6564 - protein, 10 aa, Artificial Sequence
  Description of Artificial Sequence: Synthetic peptide
  Seed: RTRALVRTGM
RVRALVRTGQ

SEQ ID NO: 6565 - protein, 10 aa, Artificial Sequence
  Description of Artificial Sequence: Synthetic peptide
  Seed: RTRALVRTGM
RVRALVRTGE

SEQ ID NO: 6566 - protein, 10 aa, Artificial Sequence
  Description of Artificial Sequence: Synthetic peptide
  Seed: RTRALVRTGM
RVRALVRTGG

SEQ ID NO: 6567 - protein, 10 aa, Artificial Sequence
  Description of Artificial Sequence: Synthetic peptide
  Seed: RTRALVRTGM
RVRALVRTGH

SEQ ID NO: 6568 - protein, 9 aa, Artificial Sequence
  Description of Artificial Sequence: Synthetic peptide
  Seed: RTRIAYERM
RARIAYERP

SEQ ID NO: 6569 - protein, 9 aa, Artificial Sequence
  Description of Artificial Sequence: Synthetic peptide
  Seed: RTRIAYERM
RARIAYERS

SEQ ID NO: 6570 - protein, 9 aa, Artificial Sequence
  Description of Artificial Sequence: Synthetic peptide
  Seed: RTRIAYERM
RARIAYERT

SEQ ID NO: 6571 - protein, 9 aa, Artificial Sequence
  Description of Artificial Sequence: Synthetic peptide
  Seed: RTRIAYERM
RSRIAYERI

SEQ ID NO: 6572 - protein, 9 aa, Artificial Sequence
  Description of Artificial Sequence: Synthetic peptide
  Seed: RTRIAYERM
RPRIAYERK

SEQ ID NO: 6573 - protein, 9 aa, Artificial Sequence
  Description of Artificial Sequence: Synthetic peptide
  Seed: RTRIAYERM
RSRIAYERA

SEQ ID NO: 6574 - protein, 9 aa, Artificial Sequence
  Description of Artificial Sequence: Synthetic peptide
  Seed: RTRIAYERM
RSRIAYERR

SEQ ID NO: 6575 - protein, 9 aa, Artificial Sequence
  Description of Artificial Sequence: Synthetic peptide
  Seed: RTRIAYERM
RSRIAYERN

SEQ ID NO: 6576 - protein, 9 aa, Artificial Sequence
  Description of Artificial Sequence: Synthetic peptide
  Seed: RTRIAYERM
RSRIAYERC

SEQ ID NO: 6577 - protein, 9 aa, Artificial Sequence
  Description of Artificial Sequence: Synthetic peptide
  Seed: RTRIAYERM
RSRIAYERQ

SEQ ID NO: 6578 - protein, 9 aa, Artificial Sequence
  Description of Artificial Sequence: Synthetic peptide
  Seed: RTRIAYERM
RSRIAYERE

SEQ ID NO: 6579 - protein, 9 aa, Artificial Sequence
  Description of Artificial Sequence: Synthetic peptide
  Seed: RTRIAYERM
RSRIAYERG

SEQ ID NO: 6580 - protein, 9 aa, Artificial Sequence
  Description of Artificial Sequence: Synthetic peptide
  Seed: RTRIAYERM
RSRIAYERH

SEQ ID NO: 6581 - protein, 9 aa, Artificial Sequence
  Description of Artificial Sequence: Synthetic peptide
  Seed: RTRIAYERM
RSRIAYERL

SEQ ID NO: 6582 - protein, 9 aa, Artificial Sequence
  Description of Artificial Sequence: Synthetic peptide
  Seed: RTRIAYERM
RTRIAYERR

SEQ ID NO: 6583 - protein, 9 aa, Artificial Sequence
  Description of Artificial Sequence: Synthetic peptide
  Seed: RTRIAYERM
RSRIAYERK

SEQ ID NO: 6584 - protein, 9 aa, Artificial Sequence
  Description of Artificial Sequence: Synthetic peptide
  Seed: RTRIAYERM
RSRIAYERM

SEQ ID NO: 6585 - protein, 9 aa, Artificial Sequence
  Description of Artificial Sequence: Synthetic peptide
  Seed: RTRIAYERM
RSRIAYERF

SEQ ID NO: 6586 - protein, 9 aa, Artificial Sequence
  Description of Artificial Sequence: Synthetic peptide
  Seed: RTRIAYERM
RSRIAYERP

SEQ ID NO: 6587 - protein, 9 aa, Artificial Sequence
  Description of Artificial Sequence: Synthetic peptide
  Seed: RTRIAYERM
RSRIAYERS

SEQ ID NO: 6588 - protein, 9 aa, Artificial Sequence
  Description of Artificial Sequence: Synthetic peptide
  Seed: RTRIAYERM
RSRIAYERT

SEQ ID NO: 6589 - protein, 9 aa, Artificial Sequence
  Description of Artificial Sequence: Synthetic peptide
  Seed: RTRIAYERM
RSRIAYERW

SEQ ID NO: 6590 - protein, 9 aa, Artificial Sequence
  Description of Artificial Sequence: Synthetic peptide
  Seed: RTRIAYERM
RSRIAYERY

SEQ ID NO: 6591 - protein, 9 aa, Artificial Sequence
  Description of Artificial Sequence: Synthetic peptide
  Seed: RTRIAYERM
RSRIAYERV

SEQ ID NO: 6592 - protein, 9 aa, Artificial Sequence
  Description of Artificial Sequence: Synthetic peptide
  Seed: RTRIAYERM
RFRIAYERV

SEQ ID NO: 6593 - protein, 9 aa, Artificial Sequence
  Description of Artificial Sequence: Synthetic peptide
  Seed: RTRIAYERM
RFRIAYERY

SEQ ID NO: 6594 - protein, 9 aa, Artificial Sequence
  Description of Artificial Sequence: Synthetic peptide
  Seed: RTRIAYERM
RFRIAYERT

SEQ ID NO: 6595 - protein, 9 aa, Artificial Sequence
  Description of Artificial Sequence: Synthetic peptide
  Seed: RTRIAYERM
RFRIAYERS

SEQ ID NO: 6596 - protein, 9 aa, Artificial Sequence
  Description of Artificial Sequence: Synthetic peptide
  Seed: RTRIAYERM
RMRIAYERS

SEQ ID NO: 6597 - protein, 9 aa, Artificial Sequence
  Description of Artificial Sequence: Synthetic peptide
  Seed: RTRIAYERM
RMRIAYERT

SEQ ID NO: 6598 - protein, 9 aa, Artificial Sequence
  Description of Artificial Sequence: Synthetic peptide
  Seed: RTRIAYERM
RMRIAYERW

SEQ ID NO: 6599 - protein, 9 aa, Artificial Sequence
  Description of Artificial Sequence: Synthetic peptide
  Seed: RTRIAYERM
RMRIAYERY

SEQ ID NO: 6600 - protein, 9 aa, Artificial Sequence
  Description of Artificial Sequence: Synthetic peptide
  Seed: RTRIAYERM
RMRIAYERV

SEQ ID NO: 6601 - protein, 9 aa, Artificial Sequence
  Description of Artificial Sequence: Synthetic peptide
  Seed: RTRIAYERM
RFRIAYERA

SEQ ID NO: 6602 - protein, 9 aa, Artificial Sequence
  Description of Artificial Sequence: Synthetic peptide
  Seed: RTRIAYERM
RFRIAYERR

SEQ ID NO: 6603 - protein, 9 aa, Artificial Sequence
  Description of Artificial Sequence: Synthetic peptide
  Seed: RTRIAYERM
RFRIAYERN

SEQ ID NO: 6604 - protein, 9 aa, Artificial Sequence
  Description of Artificial Sequence: Synthetic peptide
  Seed: RTRIAYERM
RFRIAYERC

SEQ ID NO: 6605 - protein, 9 aa, Artificial Sequence
  Description of Artificial Sequence: Synthetic peptide
  Seed: RTRIAYERM
RFRIAYERQ

SEQ ID NO: 6606 - protein, 9 aa, Artificial Sequence
  Description of Artificial Sequence: Synthetic peptide
  Seed: RTRIAYERM
RFRIAYERE

SEQ ID NO: 6607 - protein, 9 aa, Artificial Sequence
  Description of Artificial Sequence: Synthetic peptide
  Seed: RTRIAYERM
RFRIAYERG

SEQ ID NO: 6608 - protein, 9 aa, Artificial Sequence
  Description of Artificial Sequence: Synthetic peptide
  Seed: RTRIAYERM
RFRIAYERH

SEQ ID NO: 6609 - protein, 9 aa, Artificial Sequence
  Description of Artificial Sequence: Synthetic peptide
  Seed: RTRIAYERM
RFRIAYERI

SEQ ID NO: 6610 - protein, 9 aa, Artificial Sequence
  Description of Artificial Sequence: Synthetic peptide
  Seed: RTRIAYERM
RFRIAYERL

SEQ ID NO: 6611 - protein, 9 aa, Artificial Sequence
  Description of Artificial Sequence: Synthetic peptide
  Seed: RTRIAYERM
RFRIAYERK

SEQ ID NO: 6612 - protein, 9 aa, Artificial Sequence
  Description of Artificial Sequence: Synthetic peptide
  Seed: RTRIAYERM
RFRIAYERM

SEQ ID NO: 6613 - protein, 9 aa, Artificial Sequence
  Description of Artificial Sequence: Synthetic peptide
  Seed: RTRIAYERM
RFRIAYERF

SEQ ID NO: 6614 - protein, 9 aa, Artificial Sequence
  Description of Artificial Sequence: Synthetic peptide
  Seed: RTRIAYERM
RFRIAYERP

SEQ ID NO: 6615 - protein, 9 aa, Artificial Sequence
  Description of Artificial Sequence: Synthetic peptide
  Seed: RTRIAYERM
RTRIAYERA

SEQ ID NO: 6616 - protein, 9 aa, Artificial Sequence
  Description of Artificial Sequence: Synthetic peptide
  Seed: RTRIAYERM
RTRIAYERN

SEQ ID NO: 6617 - protein, 9 aa, Artificial Sequence
  Description of Artificial Sequence: Synthetic peptide
  Seed: RTRIAYERM
RMRIAYERF

SEQ ID NO: 6618 - protein, 9 aa, Artificial Sequence
  Description of Artificial Sequence: Synthetic peptide
  Seed: RTRIAYERM
RYRIAYERC

SEQ ID NO: 6619 - protein, 9 aa, Artificial Sequence
  Description of Artificial Sequence: Synthetic peptide
  Seed: RTRIAYERM
RWRIAYERF

SEQ ID NO: 6620 - protein, 9 aa, Artificial Sequence
  Description of Artificial Sequence: Synthetic peptide
  Seed: RTRIAYERM
RWRIAYERP

SEQ ID NO: 6621 - protein, 9 aa, Artificial Sequence
  Description of Artificial Sequence: Synthetic peptide
  Seed: RTRIAYERM
RWRIAYERS

SEQ ID NO: 6622 - protein, 9 aa, Artificial Sequence
  Description of Artificial Sequence: Synthetic peptide
  Seed: RTRIAYERM
RWRIAYERT

SEQ ID NO: 6623 - protein, 9 aa, Artificial Sequence
  Description of Artificial Sequence: Synthetic peptide
  Seed: RTRIAYERM
RWRIAYERY

SEQ ID NO: 6624 - protein, 9 aa, Artificial Sequence
  Description of Artificial Sequence: Synthetic peptide
  Seed: RTRIAYERM
RWRIAYERV

SEQ ID NO: 6625 - protein, 9 aa, Artificial Sequence
  Description of Artificial Sequence: Synthetic peptide
  Seed: RTRIAYERM
RYRIAYERA

SEQ ID NO: 6626 - protein, 9 aa, Artificial Sequence
  Description of Artificial Sequence: Synthetic peptide
  Seed: RTRIAYERM
RYRIAYERR

SEQ ID NO: 6627 - protein, 9 aa, Artificial Sequence
  Description of Artificial Sequence: Synthetic peptide
  Seed: RTRIAYERM
RYRIAYERN

SEQ ID NO: 6628 - protein, 9 aa, Artificial Sequence
  Description of Artificial Sequence: Synthetic peptide
  Seed: RTRIAYERM
RYRIAYERQ

SEQ ID NO: 6629 - protein, 9 aa, Artificial Sequence
  Description of Artificial Sequence: Synthetic peptide
  Seed: RTRIAYERM
RTRIAYERD

SEQ ID NO: 6630 - protein, 9 aa, Artificial Sequence
  Description of Artificial Sequence: Synthetic peptide
  Seed: RTRIAYERM
RYRIAYERE

SEQ ID NO: 6631 - protein, 9 aa, Artificial Sequence
  Description of Artificial Sequence: Synthetic peptide
  Seed: RTRIAYERM
RYRIAYERG

SEQ ID NO: 6632 - protein, 9 aa, Artificial Sequence
  Description of Artificial Sequence: Synthetic peptide
  Seed: RTRIAYERM
RYRIAYERH

SEQ ID NO: 6633 - protein, 9 aa, Artificial Sequence
  Description of Artificial Sequence: Synthetic peptide
  Seed: RTRIAYERM
RYRIAYERI

SEQ ID NO: 6634 - protein, 9 aa, Artificial Sequence
  Description of Artificial Sequence: Synthetic peptide
  Seed: RTRIAYERM
RYRIAYERL

SEQ ID NO: 6635 - protein, 9 aa, Artificial Sequence
  Description of Artificial Sequence: Synthetic peptide
  Seed: RTRIAYERM
RYRIAYERK

SEQ ID NO: 6636 - protein, 9 aa, Artificial Sequence
  Description of Artificial Sequence: Synthetic peptide
  Seed: RTRIAYERM
RYRIAYERM

SEQ ID NO: 6637 - protein, 9 aa, Artificial Sequence
  Description of Artificial Sequence: Synthetic peptide
  Seed: RTRIAYERM
RYRIAYERF

SEQ ID NO: 6638 - protein, 9 aa, Artificial Sequence
  Description of Artificial Sequence: Synthetic peptide
  Seed: RTRIAYERM
RYRIAYERP

SEQ ID NO: 6639 - protein, 9 aa, Artificial Sequence
  Description of Artificial Sequence: Synthetic peptide
  Seed: RTRIAYERM
RWRIAYERM

SEQ ID NO: 6640 - protein, 9 aa, Artificial Sequence
  Description of Artificial Sequence: Synthetic peptide
  Seed: RTRIAYERM
RWRIAYERK

SEQ ID NO: 6641 - protein, 9 aa, Artificial Sequence
  Description of Artificial Sequence: Synthetic peptide
  Seed: RTRIAYERM
RWRIAYERL

SEQ ID NO: 6642 - protein, 9 aa, Artificial Sequence
  Description of Artificial Sequence: Synthetic peptide
  Seed: RTRIAYERM
RWRIAYERI

SEQ ID NO: 6643 - protein, 9 aa, Artificial Sequence
  Description of Artificial Sequence: Synthetic peptide
  Seed: RTRIAYERM
RTRIAYERC

SEQ ID NO: 6644 - protein, 9 aa, Artificial Sequence
  Description of Artificial Sequence: Synthetic peptide
  Seed: RTRIAYERM
RTRIAYERQ

SEQ ID NO: 6645 - protein, 9 aa, Artificial Sequence
  Description of Artificial Sequence: Synthetic peptide
  Seed: RTRIAYERM
RTRIAYERE

SEQ ID NO: 6646 - protein, 9 aa, Artificial Sequence
  Description of Artificial Sequence: Synthetic peptide
  Seed: RTRIAYERM
RTRIAYERG

SEQ ID NO: 6647 - protein, 9 aa, Artificial Sequence
  Description of Artificial Sequence: Synthetic peptide
  Seed: RTRIAYERM
RTRIAYERH

SEQ ID NO: 6648 - protein, 9 aa, Artificial Sequence
  Description of Artificial Sequence: Synthetic peptide
  Seed: RTRIAYERM
RTRIAYERI

SEQ ID NO: 6649 - protein, 9 aa, Artificial Sequence
  Description of Artificial Sequence: Synthetic peptide
  Seed: RTRIAYERM
RTRIAYERL

SEQ ID NO: 6650 - protein, 9 aa, Artificial Sequence
  Description of Artificial Sequence: Synthetic peptide
  Seed: RTRIAYERM
RTRIAYERK

SEQ ID NO: 6651 - protein, 9 aa, Artificial Sequence
  Description of Artificial Sequence: Synthetic peptide
  Seed: RTRIAYERM
RTRIAYERF

SEQ ID NO: 6652 - protein, 9 aa, Artificial Sequence
  Description of Artificial Sequence: Synthetic peptide
  Seed: RTRIAYERM
RTRIAYERP

SEQ ID NO: 6653 - protein, 9 aa, Artificial Sequence
  Description of Artificial Sequence: Synthetic peptide
  Seed: RTRIAYERM
RTRIAYERS

SEQ ID NO: 6654 - protein, 9 aa, Artificial Sequence
  Description of Artificial Sequence: Synthetic peptide
  Seed: RTRIAYERM
RTRIAYERT

SEQ ID NO: 6655 - protein, 9 aa, Artificial Sequence
  Description of Artificial Sequence: Synthetic peptide
  Seed: RTRIAYERM
RTRIAYERW

SEQ ID NO: 6656 - protein, 9 aa, Artificial Sequence
  Description of Artificial Sequence: Synthetic peptide
  Seed: RTRIAYERM
RTRIAYERY

SEQ ID NO: 6657 - protein, 9 aa, Artificial Sequence
  Description of Artificial Sequence: Synthetic peptide
  Seed: RTRIAYERM
RTRIAYERV

SEQ ID NO: 6658 - protein, 9 aa, Artificial Sequence
  Description of Artificial Sequence: Synthetic peptide
  Seed: RTRIAYERM
RWRIAYERA

SEQ ID NO: 6659 - protein, 9 aa, Artificial Sequence
  Description of Artificial Sequence: Synthetic peptide
  Seed: RTRIAYERM
RWRIAYERR

SEQ ID NO: 6660 - protein, 9 aa, Artificial Sequence
  Description of Artificial Sequence: Synthetic peptide
  Seed: RTRIAYERM
RWRIAYERC

SEQ ID NO: 6661 - protein, 9 aa, Artificial Sequence
  Description of Artificial Sequence: Synthetic peptide
  Seed: RTRIAYERM
RWRIAYERG

SEQ ID NO: 6662 - protein, 9 aa, Artificial Sequence
  Description of Artificial Sequence: Synthetic peptide
  Seed: RTRIAYERM
RMRIAYERP

SEQ ID NO: 6663 - protein, 9 aa, Artificial Sequence
  Description of Artificial Sequence: Synthetic peptide
  Seed: RTRIAYERM
RMRIAYERM

SEQ ID NO: 6664 - protein, 9 aa, Artificial Sequence
  Description of Artificial Sequence: Synthetic peptide
  Seed: RTRIAYERM
RARIAYERW

SEQ ID NO: 6665 - protein, 9 aa, Artificial Sequence
  Description of Artificial Sequence: Synthetic peptide
  Seed: RTRIAYERM
RGRIAYERL

SEQ ID NO: 6666 - protein, 9 aa, Artificial Sequence
  Description of Artificial Sequence: Synthetic peptide
  Seed: RTRIAYERM
RQRIAYERM

SEQ ID NO: 6667 - protein, 9 aa, Artificial Sequence
  Description of Artificial Sequence: Synthetic peptide
  Seed: RTRIAYERM
RQRIAYERF

SEQ ID NO: 6668 - protein, 9 aa, Artificial Sequence
  Description of Artificial Sequence: Synthetic peptide
  Seed: RTRIAYERM
RQRIAYERS

SEQ ID NO: 6669 - protein, 9 aa, Artificial Sequence
  Description of Artificial Sequence: Synthetic peptide
  Seed: RTRIAYERM
RQRIAYERT

SEQ ID NO: 6670 - protein, 9 aa, Artificial Sequence
  Description of Artificial Sequence: Synthetic peptide
  Seed: RTRIAYERM
RQRIAYERY

SEQ ID NO: 6671 - protein, 9 aa, Artificial Sequence
  Description of Artificial Sequence: Synthetic peptide
  Seed: RTRIAYERM
RQRIAYERV

SEQ ID NO: 6672 - protein, 9 aa, Artificial Sequence
  Description of Artificial Sequence: Synthetic peptide
  Seed: RTRIAYERM
RGRIAYERA

SEQ ID NO: 6673 - protein, 9 aa, Artificial Sequence
  Description of Artificial Sequence: Synthetic peptide
  Seed: RTRIAYERM
RGRIAYERR

SEQ ID NO: 6674 - protein, 9 aa, Artificial Sequence
  Description of Artificial Sequence: Synthetic peptide
  Seed: RTRIAYERM
RGRIAYERI

SEQ ID NO: 6675 - protein, 9 aa, Artificial Sequence
  Description of Artificial Sequence: Synthetic peptide
  Seed: RTRIAYERM
RGRIAYERK

SEQ ID NO: 6676 - protein, 9 aa, Artificial Sequence
  Description of Artificial Sequence: Synthetic peptide
  Seed: RTRIAYERM
RIRIAYERC

SEQ ID NO: 6677 - protein, 9 aa, Artificial Sequence
  Description of Artificial Sequence: Synthetic peptide
  Seed: RTRIAYERM
RGRIAYERM

SEQ ID NO: 6678 - protein, 9 aa, Artificial Sequence
  Description of Artificial Sequence: Synthetic peptide
  Seed: RTRIAYERM
RGRIAYERS

SEQ ID NO: 6679 - protein, 9 aa, Artificial Sequence
  Description of Artificial Sequence: Synthetic peptide
  Seed: RTRIAYERM
RGRIAYERT

SEQ ID NO: 6680 - protein, 9 aa, Artificial Sequence
  Description of Artificial Sequence: Synthetic peptide
  Seed: RTRIAYERM
RGRIAYERW

SEQ ID NO: 6681 - protein, 9 aa, Artificial Sequence
  Description of Artificial Sequence: Synthetic peptide
  Seed: RTRIAYERM
RGRIAYERY

SEQ ID NO: 6682 - protein, 9 aa, Artificial Sequence
  Description of Artificial Sequence: Synthetic peptide
  Seed: RTRIAYERM
RGRIAYERV

SEQ ID NO: 6683 - protein, 9 aa, Artificial Sequence
  Description of Artificial Sequence: Synthetic peptide
  Seed: RTRIAYERM
RHRIAYERK

SEQ ID NO: 6684 - protein, 9 aa, Artificial Sequence
  Description of Artificial Sequence: Synthetic peptide
  Seed: RTRIAYERM
RIRIAYERA

SEQ ID NO: 6685 - protein, 9 aa, Artificial Sequence
  Description of Artificial Sequence: Synthetic peptide
  Seed: RTRIAYERM
RIRIAYERR

SEQ ID NO: 6686 - protein, 9 aa, Artificial Sequence
  Description of Artificial Sequence: Synthetic peptide
  Seed: RTRIAYERM
RQRIAYERK

SEQ ID NO: 6687 - protein, 9 aa, Artificial Sequence
  Description of Artificial Sequence: Synthetic peptide
  Seed: RTRIAYERM
RQRIAYERL

SEQ ID NO: 6688 - protein, 9 aa, Artificial Sequence
  Description of Artificial Sequence: Synthetic peptide
  Seed: RTRIAYERM
RQRIAYERI

SEQ ID NO: 6689 - protein, 9 aa, Artificial Sequence
  Description of Artificial Sequence: Synthetic peptide
  Seed: RTRIAYERM
RQRIAYERG

SEQ ID NO: 6690 - protein, 9 aa, Artificial Sequence
  Description of Artificial Sequence: Synthetic peptide
  Seed: RTRIAYERM
RARIAYERY

SEQ ID NO: 6691 - protein, 9 aa, Artificial Sequence
  Description of Artificial Sequence: Synthetic peptide
  Seed: RTRIAYERM
RARIAYERV

SEQ ID NO: 6692 - protein, 9 aa, Artificial Sequence
  Description of Artificial Sequence: Synthetic peptide
  Seed: RTRIAYERM
RRRIAYERK

SEQ ID NO: 6693 - protein, 9 aa, Artificial Sequence
  Description of Artificial Sequence: Synthetic peptide
  Seed: RTRIAYERM
RNRIAYERA

SEQ ID NO: 6694 - protein, 9 aa, Artificial Sequence
  Description of Artificial Sequence: Synthetic peptide
  Seed: RTRIAYERM
RNRIAYERR

SEQ ID NO: 6695 - protein, 9 aa, Artificial Sequence
  Description of Artificial Sequence: Synthetic peptide
  Seed: RTRIAYERM
RNRIAYERI

SEQ ID NO: 6696 - protein, 9 aa, Artificial Sequence
  Description of Artificial Sequence: Synthetic peptide
  Seed: RTRIAYERM
RNRIAYERL

SEQ ID NO: 6697 - protein, 9 aa, Artificial Sequence
  Description of Artificial Sequence: Synthetic peptide
  Seed: RTRIAYERM
RNRIAYERK

SEQ ID NO: 6698 - protein, 9 aa, Artificial Sequence
  Description of Artificial Sequence: Synthetic peptide
  Seed: RTRIAYERM
RNRIAYERM

SEQ ID NO: 6699 - protein, 9 aa, Artificial Sequence
  Description of Artificial Sequence: Synthetic peptide
  Seed: RTRIAYERM
RNRIAYERS

SEQ ID NO: 6700 - protein, 9 aa, Artificial Sequence
  Description of Artificial Sequence: Synthetic peptide
  Seed: RTRIAYERM
RNRIAYERY

SEQ ID NO: 6701 - protein, 9 aa, Artificial Sequence
  Description of Artificial Sequence: Synthetic peptide
  Seed: RTRIAYERM
RNRIAYERV

SEQ ID NO: 6702 - protein, 9 aa, Artificial Sequence
  Description of Artificial Sequence: Synthetic peptide
  Seed: RTRIAYERM
RCRIAYERA

SEQ ID NO: 6703 - protein, 9 aa, Artificial Sequence
  Description of Artificial Sequence: Synthetic peptide
  Seed: RTRIAYERM
RCRIAYERK

SEQ ID NO: 6704 - protein, 9 aa, Artificial Sequence
  Description of Artificial Sequence: Synthetic peptide
  Seed: RTRIAYERM
RCRIAYERV

SEQ ID NO: 6705 - protein, 9 aa, Artificial Sequence
  Description of Artificial Sequence: Synthetic peptide
  Seed: RTRIAYERM
RQRIAYERA

SEQ ID NO: 6706 - protein, 9 aa, Artificial Sequence
  Description of Artificial Sequence: Synthetic peptide
  Seed: RTRIAYERM
RQRIAYERR

SEQ ID NO: 6707 - protein, 9 aa, Artificial Sequence
  Description of Artificial Sequence: Synthetic peptide
  Seed: RTRIAYERM
RQRIAYERC

SEQ ID NO: 6708 - protein, 9 aa, Artificial Sequence
  Description of Artificial Sequence: Synthetic peptide
  Seed: RTRIAYERM
RQRIAYERQ

SEQ ID NO: 6709 - protein, 9 aa, Artificial Sequence
  Description of Artificial Sequence: Synthetic peptide
  Seed: RTRIAYERM
RIRIAYERN

SEQ ID NO: 6710 - protein, 9 aa, Artificial Sequence
  Description of Artificial Sequence: Synthetic peptide
  Seed: RTRIAYERM
RIRIAYERQ

SEQ ID NO: 6711 - protein, 9 aa, Artificial Sequence
  Description of Artificial Sequence: Synthetic peptide
  Seed: RTRIAYERM
RMRIAYERK

SEQ ID NO: 6712 - protein, 9 aa, Artificial Sequence
  Description of Artificial Sequence: Synthetic peptide
  Seed: RTRIAYERM
RKRIAYERK

SEQ ID NO: 6713 - protein, 9 aa, Artificial Sequence
  Description of Artificial Sequence: Synthetic peptide
  Seed: RTRIAYERM
RLRIAYERK

SEQ ID NO: 6714 - protein, 9 aa, Artificial Sequence
  Description of Artificial Sequence: Synthetic peptide
  Seed: RTRIAYERM
RLRIAYERM

SEQ ID NO: 6715 - protein, 9 aa, Artificial Sequence
  Description of Artificial Sequence: Synthetic peptide
  Seed: RTRIAYERM
RLRIAYERF

SEQ ID NO: 6716 - protein, 9 aa, Artificial Sequence
  Description of Artificial Sequence: Synthetic peptide
  Seed: RTRIAYERM
RLRIAYERP

SEQ ID NO: 6717 - protein, 9 aa, Artificial Sequence
  Description of Artificial Sequence: Synthetic peptide
  Seed: RTRIAYERM
RLRIAYERS

SEQ ID NO: 6718 - protein, 9 aa, Artificial Sequence
  Description of Artificial Sequence: Synthetic peptide
  Seed: RTRIAYERM
RLRIAYERT

SEQ ID NO: 6719 - protein, 9 aa, Artificial Sequence
  Description of Artificial Sequence: Synthetic peptide
  Seed: RTRIAYERM
RLRIAYERW

SEQ ID NO: 6720 - protein, 9 aa, Artificial Sequence
  Description of Artificial Sequence: Synthetic peptide
  Seed: RTRIAYERM
RLRIAYERY

SEQ ID NO: 6721 - protein, 9 aa, Artificial Sequence
  Description of Artificial Sequence: Synthetic peptide
  Seed: RTRIAYERM
RLRIAYERV

SEQ ID NO: 6722 - protein, 9 aa, Artificial Sequence
  Description of Artificial Sequence: Synthetic peptide
  Seed: RTRIAYERM
RMRIAYERA

SEQ ID NO: 6723 - protein, 9 aa, Artificial Sequence
  Description of Artificial Sequence: Synthetic peptide
  Seed: RTRIAYERM
RIRIAYERE

SEQ ID NO: 6724 - protein, 9 aa, Artificial Sequence
  Description of Artificial Sequence: Synthetic peptide
  Seed: RTRIAYERM
RMRIAYERR

SEQ ID NO: 6725 - protein, 9 aa, Artificial Sequence
  Description of Artificial Sequence: Synthetic peptide
  Seed: RTRIAYERM
RMRIAYERN

SEQ ID NO: 6726 - protein, 9 aa, Artificial Sequence
  Description of Artificial Sequence: Synthetic peptide
  Seed: RTRIAYERM
RMRIAYERC

SEQ ID NO: 6727 - protein, 9 aa, Artificial Sequence
  Description of Artificial Sequence: Synthetic peptide
  Seed: RTRIAYERM
RMRIAYERQ

SEQ ID NO: 6728 - protein, 9 aa, Artificial Sequence
  Description of Artificial Sequence: Synthetic peptide
  Seed: RTRIAYERM
RMRIAYERE

SEQ ID NO: 6729 - protein, 9 aa, Artificial Sequence
  Description of Artificial Sequence: Synthetic peptide
  Seed: RTRIAYERM
RMRIAYERG

SEQ ID NO: 6730 - protein, 9 aa, Artificial Sequence
  Description of Artificial Sequence: Synthetic peptide
  Seed: RTRIAYERM
RMRIAYERH

SEQ ID NO: 6731 - protein, 9 aa, Artificial Sequence
  Description of Artificial Sequence: Synthetic peptide
  Seed: RTRIAYERM
RMRIAYERI

SEQ ID NO: 6732 - protein, 9 aa, Artificial Sequence
  Description of Artificial Sequence: Synthetic peptide
  Seed: RTRIAYERM
RMRIAYERL

SEQ ID NO: 6733 - protein, 9 aa, Artificial Sequence
  Description of Artificial Sequence: Synthetic peptide
  Seed: RTRIAYERM
RLRIAYERL

SEQ ID NO: 6734 - protein, 9 aa, Artificial Sequence
  Description of Artificial Sequence: Synthetic peptide
  Seed: RTRIAYERM
RLRIAYERI

SEQ ID NO: 6735 - protein, 9 aa, Artificial Sequence
  Description of Artificial Sequence: Synthetic peptide
  Seed: RTRIAYERM
RLRIAYERH

SEQ ID NO: 6736 - protein, 9 aa, Artificial Sequence
  Description of Artificial Sequence: Synthetic peptide
  Seed: RTRIAYERM
RLRIAYERG

SEQ ID NO: 6737 - protein, 9 aa, Artificial Sequence
  Description of Artificial Sequence: Synthetic peptide
  Seed: RTRIAYERM
RIRIAYERG

SEQ ID NO: 6738 - protein, 9 aa, Artificial Sequence
  Description of Artificial Sequence: Synthetic peptide
  Seed: RTRIAYERM
RIRIAYERH

SEQ ID NO: 6739 - protein, 9 aa, Artificial Sequence
  Description of Artificial Sequence: Synthetic peptide
  Seed: RTRIAYERM
RIRIAYERI

SEQ ID NO: 6740 - protein, 9 aa, Artificial Sequence
  Description of Artificial Sequence: Synthetic peptide
  Seed: RTRIAYERM
RIRIAYERL

SEQ ID NO: 6741 - protein, 9 aa, Artificial Sequence
  Description of Artificial Sequence: Synthetic peptide
  Seed: RTRIAYERM
RIRIAYERK

SEQ ID NO: 6742 - protein, 9 aa, Artificial Sequence
  Description of Artificial Sequence: Synthetic peptide
  Seed: RTRIAYERM
RIRIAYERM

SEQ ID NO: 6743 - protein, 9 aa, Artificial Sequence
  Description of Artificial Sequence: Synthetic peptide
  Seed: RTRIAYERM
RIRIAYERF

SEQ ID NO: 6744 - protein, 9 aa, Artificial Sequence
  Description of Artificial Sequence: Synthetic peptide
  Seed: RTRIAYERM
RIRIAYERP

SEQ ID NO: 6745 - protein, 9 aa, Artificial Sequence
  Description of Artificial Sequence: Synthetic peptide
  Seed: RTRIAYERM
RIRIAYERS

SEQ ID NO: 6746 - protein, 9 aa, Artificial Sequence
  Description of Artificial Sequence: Synthetic peptide
  Seed: RTRIAYERM
RIRIAYERT

SEQ ID NO: 6747 - protein, 9 aa, Artificial Sequence
  Description of Artificial Sequence: Synthetic peptide
  Seed: RTRIAYERM
RIRIAYERW

SEQ ID NO: 6748 - protein, 9 aa, Artificial Sequence
  Description of Artificial Sequence: Synthetic peptide
  Seed: RTRIAYERM
RIRIAYERY

SEQ ID NO: 6749 - protein, 9 aa, Artificial Sequence
  Description of Artificial Sequence: Synthetic peptide
  Seed: RTRIAYERM
RIRIAYERV

SEQ ID NO: 6750 - protein, 9 aa, Artificial Sequence
  Description of Artificial Sequence: Synthetic peptide
  Seed: RTRIAYERM
RLRIAYERA

SEQ ID NO: 6751 - protein, 9 aa, Artificial Sequence
  Description of Artificial Sequence: Synthetic peptide
  Seed: RTRIAYERM
RLRIAYERR

SEQ ID NO: 6752 - protein, 9 aa, Artificial Sequence
  Description of Artificial Sequence: Synthetic peptide
  Seed: RTRIAYERM
RLRIAYERN

SEQ ID NO: 6753 - protein, 9 aa, Artificial Sequence
  Description of Artificial Sequence: Synthetic peptide
  Seed: RTRIAYERM
RLRIAYERC

SEQ ID NO: 6754 - protein, 9 aa, Artificial Sequence
  Description of Artificial Sequence: Synthetic peptide
  Seed: RTRIAYERM
RLRIAYERQ

SEQ ID NO: 6755 - protein, 9 aa, Artificial Sequence
  Description of Artificial Sequence: Synthetic peptide
  Seed: RTRIAYERM
RLRIAYERE

SEQ ID NO: 6756 - protein, 10 aa, Artificial Sequence
  Description of Artificial Sequence: Synthetic peptide
  Seed: RTRALVRTGM
RSRALVRTGT

SEQ ID NO: 6757 - protein, 10 aa, Artificial Sequence
  Description of Artificial Sequence: Synthetic peptide
  Seed: RTRALVRTGM
RSRALVRTGS

SEQ ID NO: 6758 - protein, 10 aa, Artificial Sequence
  Description of Artificial Sequence: Synthetic peptide
  Seed: RTRALVRTGM
RSRALVRTGP

SEQ ID NO: 6759 - protein, 9 aa, Artificial Sequence
  Description of Artificial Sequence: Synthetic peptide
  Seed: RTRALVRTG
RVRALVRTG

SEQ ID NO: 6760 - protein, 9 aa, Artificial Sequence
  Description of Artificial Sequence: Synthetic peptide
  Seed: RTRALVRTG
RYRALVRTY

SEQ ID NO: 6761 - protein, 9 aa, Artificial Sequence
  Description of Artificial Sequence: Synthetic peptide
  Seed: RTRALVRTG
RYRALVRTV

SEQ ID NO: 6762 - protein, 9 aa, Artificial Sequence
  Description of Artificial Sequence: Synthetic peptide
  Seed: RTRALVRTG
RVRALVRTA

SEQ ID NO: 6763 - protein, 9 aa, Artificial Sequence
  Description of Artificial Sequence: Synthetic peptide
  Seed: RTRALVRTG
RVRALVRTR

SEQ ID NO: 6764 - protein, 9 aa, Artificial Sequence
  Description of Artificial Sequence: Synthetic peptide
  Seed: RTRALVRTG
RVRALVRTN

SEQ ID NO: 6765 - protein, 9 aa, Artificial Sequence
  Description of Artificial Sequence: Synthetic peptide
  Seed: RTRALVRTG
RVRALVRTD

SEQ ID NO: 6766 - protein, 9 aa, Artificial Sequence
  Description of Artificial Sequence: Synthetic peptide
  Seed: RTRALVRTG
RVRALVRTC

SEQ ID NO: 6767 - protein, 9 aa, Artificial Sequence
  Description of Artificial Sequence: Synthetic peptide
  Seed: RTRALVRTG
RVRALVRTQ

SEQ ID NO: 6768 - protein, 9 aa, Artificial Sequence
  Description of Artificial Sequence: Synthetic peptide
  Seed: RTRALVRTG
RVRALVRTE

SEQ ID NO: 6769 - protein, 9 aa, Artificial Sequence
  Description of Artificial Sequence: Synthetic peptide
  Seed: RTRALVRTG
RVRALVRTH

SEQ ID NO: 6770 - protein, 9 aa, Artificial Sequence
  Description of Artificial Sequence: Synthetic peptide
  Seed: RTRALVRTG
RVRALVRTV

SEQ ID NO: 6771 - protein, 9 aa, Artificial Sequence
  Description of Artificial Sequence: Synthetic peptide
  Seed: RTRALVRTG
RVRALVRTI

SEQ ID NO: 6772 - protein, 9 aa, Artificial Sequence
  Description of Artificial Sequence: Synthetic peptide
  Seed: RTRALVRTG
RVRALVRTL

SEQ ID NO: 6773 - protein, 9 aa, Artificial Sequence
  Description of Artificial Sequence: Synthetic peptide
  Seed: RTRALVRTG
RVRALVRTK

SEQ ID NO: 6774 - protein, 9 aa, Artificial Sequence
  Description of Artificial Sequence: Synthetic peptide
  Seed: RTRALVRTG
RVRALVRTM

SEQ ID NO: 6775 - protein, 9 aa, Artificial Sequence
  Description of Artificial Sequence: Synthetic peptide
  Seed: RTRALVRTG
RVRALVRTF

SEQ ID NO: 6776 - protein, 9 aa, Artificial Sequence
  Description of Artificial Sequence: Synthetic peptide
  Seed: RTRALVRTG
RVRALVRTP

SEQ ID NO: 6777 - protein, 9 aa, Artificial Sequence
  Description of Artificial Sequence: Synthetic peptide
  Seed: RTRALVRTG
RVRALVRTS

SEQ ID NO: 6778 - protein, 9 aa, Artificial Sequence
  Description of Artificial Sequence: Synthetic peptide
  Seed: RTRALVRTG
RVRALVRTT

SEQ ID NO: 6779 - protein, 9 aa, Artificial Sequence
  Description of Artificial Sequence: Synthetic peptide
  Seed: RTRALVRTG
RVRALVRTW

SEQ ID NO: 6780 - protein, 9 aa, Artificial Sequence
  Description of Artificial Sequence: Synthetic peptide
  Seed: RTRALVRTG
RYRALVRTT

SEQ ID NO: 6781 - protein, 9 aa, Artificial Sequence
  Description of Artificial Sequence: Synthetic peptide
  Seed: RTRALVRTG
RYRALVRTS

SEQ ID NO: 6782 - protein, 9 aa, Artificial Sequence
  Description of Artificial Sequence: Synthetic peptide
  Seed: RTRALVRTG
RYRALVRTP

SEQ ID NO: 6783 - protein, 9 aa, Artificial Sequence
  Description of Artificial Sequence: Synthetic peptide
  Seed: RTRALVRTG
RYRALVRTF

SEQ ID NO: 6784 - protein, 9 aa, Artificial Sequence
  Description of Artificial Sequence: Synthetic peptide
  Seed: RTRALVRTG
RWRALVRTF

SEQ ID NO: 6785 - protein, 9 aa, Artificial Sequence
  Description of Artificial Sequence: Synthetic peptide
  Seed: RTRALVRTG
RWRALVRTP

SEQ ID NO: 6786 - protein, 9 aa, Artificial Sequence
  Description of Artificial Sequence: Synthetic peptide
  Seed: RTRALVRTG
RWRALVRTS

SEQ ID NO: 6787 - protein, 9 aa, Artificial Sequence
  Description of Artificial Sequence: Synthetic peptide
  Seed: RTRALVRTG
RWRALVRTT

SEQ ID NO: 6788 - protein, 9 aa, Artificial Sequence
  Description of Artificial Sequence: Synthetic peptide
  Seed: RTRALVRTG
RWRALVRTY

SEQ ID NO: 6789 - protein, 9 aa, Artificial Sequence
  Description of Artificial Sequence: Synthetic peptide
  Seed: RTRALVRTG
RWRALVRTV

SEQ ID NO: 6790 - protein, 9 aa, Artificial Sequence
  Description of Artificial Sequence: Synthetic peptide
  Seed: RTRALVRTG
RYRALVRTA

SEQ ID NO: 6791 - protein, 9 aa, Artificial Sequence
  Description of Artificial Sequence: Synthetic peptide
  Seed: RTRALVRTG
RYRALVRTR

SEQ ID NO: 6792 - protein, 9 aa, Artificial Sequence
  Description of Artificial Sequence: Synthetic peptide
  Seed: RTRALVRTG
RYRALVRTN

SEQ ID NO: 6793 - protein, 9 aa, Artificial Sequence
  Description of Artificial Sequence: Synthetic peptide
  Seed: RTRALVRTG
RYRALVRTD

SEQ ID NO: 6794 - protein, 9 aa, Artificial Sequence
  Description of Artificial Sequence: Synthetic peptide
  Seed: RTRALVRTG
RYRALVRTC

SEQ ID NO: 6795 - protein, 9 aa, Artificial Sequence
  Description of Artificial Sequence: Synthetic peptide
  Seed: RTRALVRTG
RYRALVRTQ

SEQ ID NO: 6796 - protein, 9 aa, Artificial Sequence
  Description of Artificial Sequence: Synthetic peptide
  Seed: RTRALVRTG
RYRALVRTE

SEQ ID NO: 6797 - protein, 9 aa, Artificial Sequence
  Description of Artificial Sequence: Synthetic peptide
  Seed: RTRALVRTG
RYRALVRTG

SEQ ID NO: 6798 - protein, 9 aa, Artificial Sequence
  Description of Artificial Sequence: Synthetic peptide
  Seed: RTRALVRTG
RYRALVRTH

SEQ ID NO: 6799 - protein, 9 aa, Artificial Sequence
  Description of Artificial Sequence: Synthetic peptide
  Seed: RTRALVRTG
RYRALVRTI

SEQ ID NO: 6800 - protein, 9 aa, Artificial Sequence
  Description of Artificial Sequence: Synthetic peptide
  Seed: RTRALVRTG
RYRALVRTL

SEQ ID NO: 6801 - protein, 9 aa, Artificial Sequence
  Description of Artificial Sequence: Synthetic peptide
  Seed: RTRALVRTG
RYRALVRTK

SEQ ID NO: 6802 - protein, 9 aa, Artificial Sequence
  Description of Artificial Sequence: Synthetic peptide
  Seed: RTRALVRTG
RYRALVRTM

SEQ ID NO: 6803 - protein, 9 aa, Artificial Sequence
  Description of Artificial Sequence: Synthetic peptide
  Seed: RTRALVRTG
RVRALVRTY

SEQ ID NO: 6804 - protein, 10 aa, Artificial Sequence
  Description of Artificial Sequence: Synthetic peptide
  Seed: RTRALVRTGM
RARALVRTGA

SEQ ID NO: 6805 - protein, 9 aa, Artificial Sequence
  Description of Artificial Sequence: Synthetic peptide
  Seed: RTRALVRTG
RWRALVRTK

SEQ ID NO: 6806 - protein, 10 aa, Artificial Sequence
  Description of Artificial Sequence: Synthetic peptide
  Seed: RTRALVRTGM
RRRALVRTGV

SEQ ID NO: 6807 - protein, 10 aa, Artificial Sequence
  Description of Artificial Sequence: Synthetic peptide
  Seed: RTRALVRTGM
RRRALVRTGI

SEQ ID NO: 6808 - protein, 10 aa, Artificial Sequence
  Description of Artificial Sequence: Synthetic peptide
  Seed: RTRALVRTGM
RRRALVRTGL

SEQ ID NO: 6809 - protein, 10 aa, Artificial Sequence
  Description of Artificial Sequence: Synthetic peptide
  Seed: RTRALVRTGM
RRRALVRTGK

SEQ ID NO: 6810 - protein, 10 aa, Artificial Sequence
  Description of Artificial Sequence: Synthetic peptide
  Seed: RTRALVRTGM
RRRALVRTGM

SEQ ID NO: 6811 - protein, 10 aa, Artificial Sequence
  Description of Artificial Sequence: Synthetic peptide
  Seed: RTRALVRTGM
RRRALVRTGF

SEQ ID NO: 6812 - protein, 10 aa, Artificial Sequence
  Description of Artificial Sequence: Synthetic peptide
  Seed: RTRALVRTGM
RRRALVRTGS

SEQ ID NO: 6813 - protein, 10 aa, Artificial Sequence
  Description of Artificial Sequence: Synthetic peptide
  Seed: RTRALVRTGM
RRRALVRTGT

SEQ ID NO: 6814 - protein, 10 aa, Artificial Sequence
  Description of Artificial Sequence: Synthetic peptide
  Seed: RTRALVRTGM
RRRALVRTGW

SEQ ID NO: 6815 - protein, 10 aa, Artificial Sequence
  Description of Artificial Sequence: Synthetic peptide
  Seed: RTRALVRTGM
RRRALVRTGY

SEQ ID NO: 6816 - protein, 10 aa, Artificial Sequence
  Description of Artificial Sequence: Synthetic peptide
  Seed: RTRALVRTGM
RNRALVRTGA

SEQ ID NO: 6817 - protein, 10 aa, Artificial Sequence
  Description of Artificial Sequence: Synthetic peptide
  Seed: RTRALVRTGM
RARALVRTGR

SEQ ID NO: 6818 - protein, 10 aa, Artificial Sequence
  Description of Artificial Sequence: Synthetic peptide
  Seed: RTRALVRTGM
RNRALVRTGR

SEQ ID NO: 6819 - protein, 10 aa, Artificial Sequence
  Description of Artificial Sequence: Synthetic peptide
  Seed: RTRALVRTGM
RNRALVRTGH

SEQ ID NO: 6820 - protein, 10 aa, Artificial Sequence
  Description of Artificial Sequence: Synthetic peptide
  Seed: RTRALVRTGM
RNRALVRTGI

SEQ ID NO: 6821 - protein, 10 aa, Artificial Sequence
  Description of Artificial Sequence: Synthetic peptide
  Seed: RTRALVRTGM
RNRALVRTGL

SEQ ID NO: 6822 - protein, 10 aa, Artificial Sequence
  Description of Artificial Sequence: Synthetic peptide
  Seed: RTRALVRTGM
RNRALVRTGK

SEQ ID NO: 6823 - protein, 10 aa, Artificial Sequence
  Description of Artificial Sequence: Synthetic peptide
  Seed: RTRALVRTGM
RNRALVRTGM

SEQ ID NO: 6824 - protein, 10 aa, Artificial Sequence
  Description of Artificial Sequence: Synthetic peptide
  Seed: RTRALVRTGM
RNRALVRTGF

SEQ ID NO: 6825 - protein, 10 aa, Artificial Sequence
  Description of Artificial Sequence: Synthetic peptide
  Seed: RTRALVRTGM
RNRALVRTGS

SEQ ID NO: 6826 - protein, 10 aa, Artificial Sequence
  Description of Artificial Sequence: Synthetic peptide
  Seed: RTRALVRTGM
RNRALVRTGW

SEQ ID NO: 6827 - protein, 10 aa, Artificial Sequence
  Description of Artificial Sequence: Synthetic peptide
  Seed: RTRALVRTGM
RRRALVRTGH

SEQ ID NO: 6828 - protein, 10 aa, Artificial Sequence
  Description of Artificial Sequence: Synthetic peptide
  Seed: RTRALVRTGM
RRRALVRTGG

SEQ ID NO: 6829 - protein, 10 aa, Artificial Sequence
  Description of Artificial Sequence: Synthetic peptide
  Seed: RTRALVRTGM
RRRALVRTGQ

SEQ ID NO: 6830 - protein, 10 aa, Artificial Sequence
  Description of Artificial Sequence: Synthetic peptide
  Seed: RTRALVRTGM
RRRALVRTGC

SEQ ID NO: 6831 - protein, 10 aa, Artificial Sequence
  Description of Artificial Sequence: Synthetic peptide
  Seed: RTRALVRTGM
RARALVRTGN

SEQ ID NO: 6832 - protein, 10 aa, Artificial Sequence
  Description of Artificial Sequence: Synthetic peptide
  Seed: RTRALVRTGM
RARALVRTGC

SEQ ID NO: 6833 - protein, 10 aa, Artificial Sequence
  Description of Artificial Sequence: Synthetic peptide
  Seed: RTRALVRTGM
RARALVRTGQ

SEQ ID NO: 6834 - protein, 10 aa, Artificial Sequence
  Description of Artificial Sequence: Synthetic peptide
  Seed: RTRALVRTGM
RARALVRTGE

SEQ ID NO: 6835 - protein, 10 aa, Artificial Sequence
  Description of Artificial Sequence: Synthetic peptide
  Seed: RTRALVRTGM
RARALVRTGG

SEQ ID NO: 6836 - protein, 10 aa, Artificial Sequence
  Description of Artificial Sequence: Synthetic peptide
  Seed: RTRALVRTGM
RARALVRTGH

SEQ ID NO: 6837 - protein, 10 aa, Artificial Sequence
  Description of Artificial Sequence: Synthetic peptide
  Seed: RTRALVRTGM
RARALVRTGI

SEQ ID NO: 6838 - protein, 10 aa, Artificial Sequence
  Description of Artificial Sequence: Synthetic peptide
  Seed: RTRALVRTGM
RARALVRTGL

SEQ ID NO: 6839 - protein, 10 aa, Artificial Sequence
  Description of Artificial Sequence: Synthetic peptide
  Seed: RTRALVRTGM
RARALVRTGK

SEQ ID NO: 6840 - protein, 10 aa, Artificial Sequence
  Description of Artificial Sequence: Synthetic peptide
  Seed: RTRALVRTGM
RARALVRTGM

SEQ ID NO: 6841 - protein, 10 aa, Artificial Sequence
  Description of Artificial Sequence: Synthetic peptide
  Seed: RTRALVRTGM
RARALVRTGF

SEQ ID NO: 6842 - protein, 10 aa, Artificial Sequence
  Description of Artificial Sequence: Synthetic peptide
  Seed: RTRALVRTGM
RARALVRTGP

SEQ ID NO: 6843 - protein, 10 aa, Artificial Sequence
  Description of Artificial Sequence: Synthetic peptide
  Seed: RTRALVRTGM
RARALVRTGS

SEQ ID NO: 6844 - protein, 10 aa, Artificial Sequence
  Description of Artificial Sequence: Synthetic peptide
  Seed: RTRALVRTGM
RARALVRTGT

SEQ ID NO: 6845 - protein, 10 aa, Artificial Sequence
  Description of Artificial Sequence: Synthetic peptide
  Seed: RTRALVRTGM
RARALVRTGW

SEQ ID NO: 6846 - protein, 10 aa, Artificial Sequence
  Description of Artificial Sequence: Synthetic peptide
  Seed: RTRALVRTGM
RARALVRTGY

SEQ ID NO: 6847 - protein, 10 aa, Artificial Sequence
  Description of Artificial Sequence: Synthetic peptide
  Seed: RTRALVRTGM
RARALVRTGV

SEQ ID NO: 6848 - protein, 10 aa, Artificial Sequence
  Description of Artificial Sequence: Synthetic peptide
  Seed: RTRALVRTGM
RRRALVRTGA

SEQ ID NO: 6849 - protein, 10 aa, Artificial Sequence
  Description of Artificial Sequence: Synthetic peptide
  Seed: RTRALVRTGM
RRRALVRTGR

SEQ ID NO: 6850 - protein, 9 aa, Artificial Sequence
  Description of Artificial Sequence: Synthetic peptide
  Seed: RTRALVRTG
RWRALVRTM

SEQ ID NO: 6851 - protein, 9 aa, Artificial Sequence
  Description of Artificial Sequence: Synthetic peptide
  Seed: RTRALVRTG
RWRALVRTL

SEQ ID NO: 6852 - protein, 10 aa, Artificial Sequence
  Description of Artificial Sequence: Synthetic peptide
  Seed: RTRALVRTGM
RNRALVRTGV

SEQ ID NO: 6853 - protein, 9 aa, Artificial Sequence
  Description of Artificial Sequence: Synthetic peptide
  Seed: RTRALVRTG
RFRALVRTL

SEQ ID NO: 6854 - protein, 9 aa, Artificial Sequence
  Description of Artificial Sequence: Synthetic peptide
  Seed: RTRALVRTG
RFRALVRTR

SEQ ID NO: 6855 - protein, 9 aa, Artificial Sequence
  Description of Artificial Sequence: Synthetic peptide
  Seed: RTRALVRTG
RFRALVRTN

SEQ ID NO: 6856 - protein, 9 aa, Artificial Sequence
  Description of Artificial Sequence: Synthetic peptide
  Seed: RTRALVRTG
RFRALVRTD

SEQ ID NO: 6857 - protein, 9 aa, Artificial Sequence
  Description of Artificial Sequence: Synthetic peptide
  Seed: RTRALVRTG
RFRALVRTC

SEQ ID NO: 6858 - protein, 9 aa, Artificial Sequence
  Description of Artificial Sequence: Synthetic peptide
  Seed: RTRALVRTG
RFRALVRTQ

SEQ ID NO: 6859 - protein, 9 aa, Artificial Sequence
  Description of Artificial Sequence: Synthetic peptide
  Seed: RTRALVRTG
RFRALVRTE

SEQ ID NO: 6860 - protein, 9 aa, Artificial Sequence
  Description of Artificial Sequence: Synthetic peptide
  Seed: RTRALVRTG
RFRALVRTG

SEQ ID NO: 6861 - protein, 9 aa, Artificial Sequence
  Description of Artificial Sequence: Synthetic peptide
  Seed: RTRALVRTG
RFRALVRTH

SEQ ID NO: 6862 - protein, 9 aa, Artificial Sequence
  Description of Artificial Sequence: Synthetic peptide
  Seed: RTRALVRTG
RFRALVRTI

SEQ ID NO: 6863 - protein, 9 aa, Artificial Sequence
  Description of Artificial Sequence: Synthetic peptide
  Seed: RTRALVRTG
RFRALVRTK

SEQ ID NO: 6864 - protein, 9 aa, Artificial Sequence
  Description of Artificial Sequence: Synthetic peptide
  Seed: RTRALVRTG
RSRALVRTN

SEQ ID NO: 6865 - protein, 9 aa, Artificial Sequence
  Description of Artificial Sequence: Synthetic peptide
  Seed: RTRALVRTG
RFRALVRTM

SEQ ID NO: 6866 - protein, 9 aa, Artificial Sequence
  Description of Artificial Sequence: Synthetic peptide
  Seed: RTRALVRTG
RFRALVRTF

SEQ ID NO: 6867 - protein, 9 aa, Artificial Sequence
  Description of Artificial Sequence: Synthetic peptide
  Seed: RTRALVRTG
RFRALVRTP

SEQ ID NO: 6868 - protein, 9 aa, Artificial Sequence
  Description of Artificial Sequence: Synthetic peptide
  Seed: RTRALVRTG
RFRALVRTS

SEQ ID NO: 6869 - protein, 9 aa, Artificial Sequence
  Description of Artificial Sequence: Synthetic peptide
  Seed: RTRALVRTG
RFRALVRTT

SEQ ID NO: 6870 - protein, 9 aa, Artificial Sequence
  Description of Artificial Sequence: Synthetic peptide
  Seed: RTRALVRTG
RFRALVRTY

SEQ ID NO: 6871 - protein, 9 aa, Artificial Sequence
  Description of Artificial Sequence: Synthetic peptide
  Seed: RTRALVRTG
RFRALVRTV

SEQ ID NO: 6872 - protein, 9 aa, Artificial Sequence
  Description of Artificial Sequence: Synthetic peptide
  Seed: RTRALVRTG
RPRALVRTK

SEQ ID NO: 6873 - protein, 9 aa, Artificial Sequence
  Description of Artificial Sequence: Synthetic peptide
  Seed: RTRALVRTG
RSRALVRTA

SEQ ID NO: 6874 - protein, 9 aa, Artificial Sequence
  Description of Artificial Sequence: Synthetic peptide
  Seed: RTRALVRTG
RFRALVRTA

SEQ ID NO: 6875 - protein, 9 aa, Artificial Sequence
  Description of Artificial Sequence: Synthetic peptide
  Seed: RTRALVRTG
RMRALVRTV

SEQ ID NO: 6876 - protein, 9 aa, Artificial Sequence
  Description of Artificial Sequence: Synthetic peptide
  Seed: RTRALVRTG
RMRALVRTY

SEQ ID NO: 6877 - protein, 9 aa, Artificial Sequence
  Description of Artificial Sequence: Synthetic peptide
  Seed: RTRALVRTG
RMRALVRTW

SEQ ID NO: 6878 - protein, 9 aa, Artificial Sequence
  Description of Artificial Sequence: Synthetic peptide
  Seed: RTRALVRTG
RLRALVRTV

SEQ ID NO: 6879 - protein, 9 aa, Artificial Sequence
  Description of Artificial Sequence: Synthetic peptide
  Seed: RTRALVRTG
RKRALVRTK

SEQ ID NO: 6880 - protein, 9 aa, Artificial Sequence
  Description of Artificial Sequence: Synthetic peptide
  Seed: RTRALVRTG
RMRALVRTA

SEQ ID NO: 6881 - protein, 9 aa, Artificial Sequence
  Description of Artificial Sequence: Synthetic peptide
  Seed: RTRALVRTG
RMRALVRTR

SEQ ID NO: 6882 - protein, 9 aa, Artificial Sequence
  Description of Artificial Sequence: Synthetic peptide
  Seed: RTRALVRTG
RMRALVRTN

SEQ ID NO: 6883 - protein, 9 aa, Artificial Sequence
  Description of Artificial Sequence: Synthetic peptide
  Seed: RTRALVRTG
RMRALVRTD

SEQ ID NO: 6884 - protein, 9 aa, Artificial Sequence
  Description of Artificial Sequence: Synthetic peptide
  Seed: RTRALVRTG
RMRALVRTC

SEQ ID NO: 6885 - protein, 9 aa, Artificial Sequence
  Description of Artificial Sequence: Synthetic peptide
  Seed: RTRALVRTG
RMRALVRTQ

SEQ ID NO: 6886 - protein, 9 aa, Artificial Sequence
  Description of Artificial Sequence: Synthetic peptide
  Seed: RTRALVRTG
RMRALVRTE

SEQ ID NO: 6887 - protein, 9 aa, Artificial Sequence
  Description of Artificial Sequence: Synthetic peptide
  Seed: RTRALVRTG
RMRALVRTG

SEQ ID NO: 6888 - protein, 9 aa, Artificial Sequence
  Description of Artificial Sequence: Synthetic peptide
  Seed: RTRALVRTG
RMRALVRTH

SEQ ID NO: 6889 - protein, 9 aa, Artificial Sequence
  Description of Artificial Sequence: Synthetic peptide
  Seed: RTRALVRTG
RMRALVRTI

SEQ ID NO: 6890 - protein, 9 aa, Artificial Sequence
  Description of Artificial Sequence: Synthetic peptide
  Seed: RTRALVRTG
RMRALVRTL

SEQ ID NO: 6891 - protein, 9 aa, Artificial Sequence
  Description of Artificial Sequence: Synthetic peptide
  Seed: RTRALVRTG
RMRALVRTK

SEQ ID NO: 6892 - protein, 9 aa, Artificial Sequence
  Description of Artificial Sequence: Synthetic peptide
  Seed: RTRALVRTG
RMRALVRTM

SEQ ID NO: 6893 - protein, 9 aa, Artificial Sequence
  Description of Artificial Sequence: Synthetic peptide
  Seed: RTRALVRTG
RMRALVRTF

SEQ ID NO: 6894 - protein, 9 aa, Artificial Sequence
  Description of Artificial Sequence: Synthetic peptide
  Seed: RTRALVRTG
RMRALVRTP

SEQ ID NO: 6895 - protein, 9 aa, Artificial Sequence
  Description of Artificial Sequence: Synthetic peptide
  Seed: RTRALVRTG
RMRALVRTS

SEQ ID NO: 6896 - protein, 9 aa, Artificial Sequence
  Description of Artificial Sequence: Synthetic peptide
  Seed: RTRALVRTG
RMRALVRTT

SEQ ID NO: 6897 - protein, 9 aa, Artificial Sequence
  Description of Artificial Sequence: Synthetic peptide
  Seed: RTRALVRTG
RSRALVRTR

SEQ ID NO: 6898 - protein, 9 aa, Artificial Sequence
  Description of Artificial Sequence: Synthetic peptide
  Seed: RTRALVRTG
RSRALVRTD

SEQ ID NO: 6899 - protein, 9 aa, Artificial Sequence
  Description of Artificial Sequence: Synthetic peptide
  Seed: RTRALVRTG
RWRALVRTI

SEQ ID NO: 6900 - protein, 9 aa, Artificial Sequence
  Description of Artificial Sequence: Synthetic peptide
  Seed: RTRALVRTG
RTRALVRTY

SEQ ID NO: 6901 - protein, 9 aa, Artificial Sequence
  Description of Artificial Sequence: Synthetic peptide
  Seed: RTRALVRTG
RTRALVRTI

SEQ ID NO: 6902 - protein, 9 aa, Artificial Sequence
  Description of Artificial Sequence: Synthetic peptide
  Seed: RTRALVRTG
RTRALVRTL

SEQ ID NO: 6903 - protein, 9 aa, Artificial Sequence
  Description of Artificial Sequence: Synthetic peptide
  Seed: RTRALVRTG
RTRALVRTK

SEQ ID NO: 6904 - protein, 9 aa, Artificial Sequence
  Description of Artificial Sequence: Synthetic peptide
  Seed: RTRALVRTG
RTRALVRTM

SEQ ID NO: 6905 - protein, 9 aa, Artificial Sequence
  Description of Artificial Sequence: Synthetic peptide
  Seed: RTRALVRTG
RTRALVRTF

SEQ ID NO: 6906 - protein, 9 aa, Artificial Sequence
  Description of Artificial Sequence: Synthetic peptide
  Seed: RTRALVRTG
RTRALVRTP

SEQ ID NO: 6907 - protein, 9 aa, Artificial Sequence
  Description of Artificial Sequence: Synthetic peptide
  Seed: RTRALVRTG
RTRALVRTS

SEQ ID NO: 6908 - protein, 9 aa, Artificial Sequence
  Description of Artificial Sequence: Synthetic peptide
  Seed: RTRALVRTG
RTRALVRTT

SEQ ID NO: 6909 - protein, 9 aa, Artificial Sequence
  Description of Artificial Sequence: Synthetic peptide
  Seed: RTRALVRTG
RTRALVRTW

SEQ ID NO: 6910 - protein, 9 aa, Artificial Sequence
  Description of Artificial Sequence: Synthetic peptide
  Seed: RTRALVRTG
RTRALVRTV

SEQ ID NO: 6911 - protein, 9 aa, Artificial Sequence
  Description of Artificial Sequence: Synthetic peptide
  Seed: RTRALVRTG
RSRALVRTC

SEQ ID NO: 6912 - protein, 9 aa, Artificial Sequence
  Description of Artificial Sequence: Synthetic peptide
  Seed: RTRALVRTG
RWRALVRTA

SEQ ID NO: 6913 - protein, 9 aa, Artificial Sequence
  Description of Artificial Sequence: Synthetic peptide
  Seed: RTRALVRTG
RWRALVRTR

SEQ ID NO: 6914 - protein, 9 aa, Artificial Sequence
  Description of Artificial Sequence: Synthetic peptide
  Seed: RTRALVRTG
RWRALVRTN

SEQ ID NO: 6915 - protein, 9 aa, Artificial Sequence
  Description of Artificial Sequence: Synthetic peptide
  Seed: RTRALVRTG
RWRALVRTD

SEQ ID NO: 6916 - protein, 9 aa, Artificial Sequence
  Description of Artificial Sequence: Synthetic peptide
  Seed: RTRALVRTG
RWRALVRTC

SEQ ID NO: 6917 - protein, 9 aa, Artificial Sequence
  Description of Artificial Sequence: Synthetic peptide
  Seed: RTRALVRTG
RWRALVRTQ

SEQ ID NO: 6918 - protein, 9 aa, Artificial Sequence
  Description of Artificial Sequence: Synthetic peptide
  Seed: RTRALVRTG
RWRALVRTE

SEQ ID NO: 6919 - protein, 9 aa, Artificial Sequence
  Description of Artificial Sequence: Synthetic peptide
  Seed: RTRALVRTG
RWRALVRTG

SEQ ID NO: 6920 - protein, 9 aa, Artificial Sequence
  Description of Artificial Sequence: Synthetic peptide
  Seed: RTRALVRTG
RWRALVRTH

SEQ ID NO: 6921 - protein, 9 aa, Artificial Sequence
  Description of Artificial Sequence: Synthetic peptide
  Seed: RTRALVRTG
RTRALVRTH

SEQ ID NO: 6922 - protein, 9 aa, Artificial Sequence
  Description of Artificial Sequence: Synthetic peptide
  Seed: RTRALVRTG
RTRALVRTE

SEQ ID NO: 6923 - protein, 9 aa, Artificial Sequence
  Description of Artificial Sequence: Synthetic peptide
  Seed: RTRALVRTG
RTRALVRTQ

SEQ ID NO: 6924 - protein, 9 aa, Artificial Sequence
  Description of Artificial Sequence: Synthetic peptide
  Seed: RTRALVRTG
RTRALVRTC

SEQ ID NO: 6925 - protein, 9 aa, Artificial Sequence
  Description of Artificial Sequence: Synthetic peptide
  Seed: RTRALVRTG
RSRALVRTQ

SEQ ID NO: 6926 - protein, 9 aa, Artificial Sequence
  Description of Artificial Sequence: Synthetic peptide
  Seed: RTRALVRTG
RSRALVRTE

SEQ ID NO: 6927 - protein, 9 aa, Artificial Sequence
  Description of Artificial Sequence: Synthetic peptide
  Seed: RTRALVRTG
RSRALVRTG

SEQ ID NO: 6928 - protein, 9 aa, Artificial Sequence
  Description of Artificial Sequence: Synthetic peptide
  Seed: RTRALVRTG
RSRALVRTH

SEQ ID NO: 6929 - protein, 9 aa, Artificial Sequence
  Description of Artificial Sequence: Synthetic peptide
  Seed: RTRALVRTG
RSRALVRTI

SEQ ID NO: 6930 - protein, 9 aa, Artificial Sequence
  Description of Artificial Sequence: Synthetic peptide
  Seed: RTRALVRTG
RSRALVRTL

SEQ ID NO: 6931 - protein, 9 aa, Artificial Sequence
  Description of Artificial Sequence: Synthetic peptide
  Seed: RTRALVRTG
RSRALVRTK

SEQ ID NO: 6932 - protein, 9 aa, Artificial Sequence
  Description of Artificial Sequence: Synthetic peptide
  Seed: RTRALVRTG
RSRALVRTM

SEQ ID NO: 6933 - protein, 9 aa, Artificial Sequence
  Description of Artificial Sequence: Synthetic peptide
  Seed: RTRALVRTG
RSRALVRTF

SEQ ID NO: 6934 - protein, 9 aa, Artificial Sequence
  Description of Artificial Sequence: Synthetic peptide
  Seed: RTRALVRTG
RSRALVRTP

SEQ ID NO: 6935 - protein, 9 aa, Artificial Sequence
  Description of Artificial Sequence: Synthetic peptide
  Seed: RTRALVRTG
RSRALVRTS

SEQ ID NO: 6936 - protein, 9 aa, Artificial Sequence
  Description of Artificial Sequence: Synthetic peptide
  Seed: RTRALVRTG
RSRALVRTT

SEQ ID NO: 6937 - protein, 9 aa, Artificial Sequence
  Description of Artificial Sequence: Synthetic peptide
  Seed: RTRALVRTG
RSRALVRTW

SEQ ID NO: 6938 - protein, 9 aa, Artificial Sequence
  Description of Artificial Sequence: Synthetic peptide
  Seed: RTRALVRTG
RSRALVRTY

SEQ ID NO: 6939 - protein, 9 aa, Artificial Sequence
  Description of Artificial Sequence: Synthetic peptide
  Seed: RTRALVRTG
RSRALVRTV

SEQ ID NO: 6940 - protein, 9 aa, Artificial Sequence
  Description of Artificial Sequence: Synthetic peptide
  Seed: RTRALVRTG
RTRALVRTA

SEQ ID NO: 6941 - protein, 9 aa, Artificial Sequence
  Description of Artificial Sequence: Synthetic peptide
  Seed: RTRALVRTG
RTRALVRTR

SEQ ID NO: 6942 - protein, 9 aa, Artificial Sequence
  Description of Artificial Sequence: Synthetic peptide
  Seed: RTRALVRTG
RTRALVRTN

SEQ ID NO: 6943 - protein, 9 aa, Artificial Sequence
  Description of Artificial Sequence: Synthetic peptide
  Seed: RTRALVRTG
RTRALVRTD

SEQ ID NO: 6944 - protein, 10 aa, Artificial Sequence
  Description of Artificial Sequence: Synthetic peptide
  Seed: RTRALVRTGM
RNRALVRTGY

SEQ ID NO: 6945 - protein, 10 aa, Artificial Sequence
  Description of Artificial Sequence: Synthetic peptide
  Seed: RTRALVRTGM
RDRALVRTGA

SEQ ID NO: 6946 - protein, 10 aa, Artificial Sequence
  Description of Artificial Sequence: Synthetic peptide
  Seed: RTRALVRTGM
RSRALVRTGF

SEQ ID NO: 6947 - protein, 10 aa, Artificial Sequence
  Description of Artificial Sequence: Synthetic peptide
  Seed: RTRALVRTGM
RMRALVRTGK

SEQ ID NO: 6948 - protein, 10 aa, Artificial Sequence
  Description of Artificial Sequence: Synthetic peptide
  Seed: RTRALVRTGM
RMRALVRTGR

SEQ ID NO: 6949 - protein, 10 aa, Artificial Sequence
  Description of Artificial Sequence: Synthetic peptide
  Seed: RTRALVRTGM
RMRALVRTGN

SEQ ID NO: 6950 - protein, 10 aa, Artificial Sequence
  Description of Artificial Sequence: Synthetic peptide
  Seed: RTRALVRTGM
RMRALVRTGC

SEQ ID NO: 6951 - protein, 10 aa, Artificial Sequence
  Description of Artificial Sequence: Synthetic peptide
  Seed: RTRALVRTGM
RMRALVRTGQ

SEQ ID NO: 6952 - protein, 10 aa, Artificial Sequence
  Description of Artificial Sequence: Synthetic peptide
  Seed: RTRALVRTGM
RMRALVRTGE

SEQ ID NO: 6953 - protein, 10 aa, Artificial Sequence
  Description of Artificial Sequence: Synthetic peptide
  Seed: RTRALVRTGM
RMRALVRTGG

SEQ ID NO: 6954 - protein, 10 aa, Artificial Sequence
  Description of Artificial Sequence: Synthetic peptide
  Seed: RTRALVRTGM
RMRALVRTGH

SEQ ID NO: 6955 - protein, 10 aa, Artificial Sequence
  Description of Artificial Sequence: Synthetic peptide
  Seed: RTRALVRTGM
RMRALVRTGI

SEQ ID NO: 6956 - protein, 10 aa, Artificial Sequence
  Description of Artificial Sequence: Synthetic peptide
  Seed: RTRALVRTGM
RMRALVRTGL

SEQ ID NO: 6957 - protein, 10 aa, Artificial Sequence
  Description of Artificial Sequence: Synthetic peptide
  Seed: RTRALVRTGM
RMRALVRTGM

SEQ ID NO: 6958 - protein, 10 aa, Artificial Sequence
  Description of Artificial Sequence: Synthetic peptide
  Seed: RTRALVRTGM
RFRALVRTGC

SEQ ID NO: 6959 - protein, 10 aa, Artificial Sequence
  Description of Artificial Sequence: Synthetic peptide
  Seed: RTRALVRTGM
RMRALVRTGF

SEQ ID NO: 6960 - protein, 10 aa, Artificial Sequence
  Description of Artificial Sequence: Synthetic peptide
  Seed: RTRALVRTGM
RMRALVRTGP

SEQ ID NO: 6961 - protein, 10 aa, Artificial Sequence
  Description of Artificial Sequence: Synthetic peptide
  Seed: RTRALVRTGM
RMRALVRTGS

SEQ ID NO: 6962 - protein, 10 aa, Artificial Sequence
  Description of Artificial Sequence: Synthetic peptide
  Seed: RTRALVRTGM
RMRALVRTGT

SEQ ID NO: 6963 - protein, 10 aa, Artificial Sequence
  Description of Artificial Sequence: Synthetic peptide
  Seed: RTRALVRTGM
RMRALVRTGW

SEQ ID NO: 6964 - protein, 10 aa, Artificial Sequence
  Description of Artificial Sequence: Synthetic peptide
  Seed: RTRALVRTGM
RMRALVRTGY

SEQ ID NO: 6965 - protein, 10 aa, Artificial Sequence
  Description of Artificial Sequence: Synthetic peptide
  Seed: RTRALVRTGM
RMRALVRTGV

SEQ ID NO: 6966 - protein, 10 aa, Artificial Sequence
  Description of Artificial Sequence: Synthetic peptide
  Seed: RTRALVRTGM
RFRALVRTGA

SEQ ID NO: 6967 - protein, 10 aa, Artificial Sequence
  Description of Artificial Sequence: Synthetic peptide
  Seed: RTRALVRTGM
RFRALVRTGR

SEQ ID NO: 6968 - protein, 10 aa, Artificial Sequence
  Description of Artificial Sequence: Synthetic peptide
  Seed: RTRALVRTGM
RMRALVRTGA

SEQ ID NO: 6969 - protein, 10 aa, Artificial Sequence
  Description of Artificial Sequence: Synthetic peptide
  Seed: RTRALVRTGM
RKRALVRTGV

SEQ ID NO: 6970 - protein, 10 aa, Artificial Sequence
  Description of Artificial Sequence: Synthetic peptide
  Seed: RTRALVRTGM
RKRALVRTGY

SEQ ID NO: 6971 - protein, 10 aa, Artificial Sequence
  Description of Artificial Sequence: Synthetic peptide
  Seed: RTRALVRTGM
RKRALVRTGW

SEQ ID NO: 6972 - protein, 10 aa, Artificial Sequence
  Description of Artificial Sequence: Synthetic peptide
  Seed: RTRALVRTGM
RLRALVRTGI

SEQ ID NO: 6973 - protein, 10 aa, Artificial Sequence
  Description of Artificial Sequence: Synthetic peptide
  Seed: RTRALVRTGM
RLRALVRTGL

SEQ ID NO: 6974 - protein, 10 aa, Artificial Sequence
  Description of Artificial Sequence: Synthetic peptide
  Seed: RTRALVRTGM
RLRALVRTGK

SEQ ID NO: 6975 - protein, 10 aa, Artificial Sequence
  Description of Artificial Sequence: Synthetic peptide
  Seed: RTRALVRTGM
RLRALVRTGM

SEQ ID NO: 6976 - protein, 10 aa, Artificial Sequence
  Description of Artificial Sequence: Synthetic peptide
  Seed: RTRALVRTGM
RLRALVRTGF

SEQ ID NO: 6977 - protein, 10 aa, Artificial Sequence
  Description of Artificial Sequence: Synthetic peptide
  Seed: RTRALVRTGM
RLRALVRTGP

SEQ ID NO: 6978 - protein, 10 aa, Artificial Sequence
  Description of Artificial Sequence: Synthetic peptide
  Seed: RTRALVRTGM
RLRALVRTGS

SEQ ID NO: 6979 - protein, 10 aa, Artificial Sequence
  Description of Artificial Sequence: Synthetic peptide
  Seed: RTRALVRTGM
RLRALVRTGT

SEQ ID NO: 6980 - protein, 10 aa, Artificial Sequence
  Description of Artificial Sequence: Synthetic peptide
  Seed: RTRALVRTGM
RLRALVRTGW

SEQ ID NO: 6981 - protein, 10 aa, Artificial Sequence
  Description of Artificial Sequence: Synthetic peptide
  Seed: RTRALVRTGM
RLRALVRTGY

SEQ ID NO: 6982 - protein, 10 aa, Artificial Sequence
  Description of Artificial Sequence: Synthetic peptide
  Seed: RTRALVRTGM
RLRALVRTGV

SEQ ID NO: 6983 - protein, 10 aa, Artificial Sequence
  Description of Artificial Sequence: Synthetic peptide
  Seed: RTRALVRTGM
RKRALVRTGA

SEQ ID NO: 6984 - protein, 10 aa, Artificial Sequence
  Description of Artificial Sequence: Synthetic peptide
  Seed: RTRALVRTGM
RKRALVRTGR

SEQ ID NO: 6985 - protein, 10 aa, Artificial Sequence
  Description of Artificial Sequence: Synthetic peptide
  Seed: RTRALVRTGM
RKRALVRTGH

SEQ ID NO: 6986 - protein, 10 aa, Artificial Sequence
  Description of Artificial Sequence: Synthetic peptide
  Seed: RTRALVRTGM
RKRALVRTGI

SEQ ID NO: 6987 - protein, 10 aa, Artificial Sequence
  Description of Artificial Sequence: Synthetic peptide
  Seed: RTRALVRTGM
RKRALVRTGL

SEQ ID NO: 6988 - protein, 10 aa, Artificial Sequence
  Description of Artificial Sequence: Synthetic peptide
  Seed: RTRALVRTGM
RKRALVRTGK

SEQ ID NO: 6989 - protein, 10 aa, Artificial Sequence
  Description of Artificial Sequence: Synthetic peptide
  Seed: RTRALVRTGM
RKRALVRTGM

SEQ ID NO: 6990 - protein, 10 aa, Artificial Sequence
  Description of Artificial Sequence: Synthetic peptide
  Seed: RTRALVRTGM
RKRALVRTGF

SEQ ID NO: 6991 - protein, 10 aa, Artificial Sequence
  Description of Artificial Sequence: Synthetic peptide
  Seed: RTRALVRTGM
RFRALVRTGN

SEQ ID NO: 6992 - protein, 10 aa, Artificial Sequence
  Description of Artificial Sequence: Synthetic peptide
  Seed: RTRALVRTGM
RFRALVRTGQ

SEQ ID NO: 6993 - protein, 10 aa, Artificial Sequence
  Description of Artificial Sequence: Synthetic peptide
  Seed: RTRALVRTGM
RLRALVRTGG

SEQ ID NO: 6994 - protein, 10 aa, Artificial Sequence
  Description of Artificial Sequence: Synthetic peptide
  Seed: RTRALVRTGM
RSRALVRTGR

SEQ ID NO: 6995 - protein, 10 aa, Artificial Sequence
  Description of Artificial Sequence: Synthetic peptide
  Seed: RTRALVRTGM
RPRALVRTGM

SEQ ID NO: 6996 - protein, 10 aa, Artificial Sequence
  Description of Artificial Sequence: Synthetic peptide
  Seed: RTRALVRTGM
RPRALVRTGF

SEQ ID NO: 6997 - protein, 10 aa, Artificial Sequence
  Description of Artificial Sequence: Synthetic peptide
  Seed: RTRALVRTGM
RPRALVRTGP

SEQ ID NO: 6998 - protein, 10 aa, Artificial Sequence
  Description of Artificial Sequence: Synthetic peptide
  Seed: RTRALVRTGM
RPRALVRTGS

SEQ ID NO: 6999 - protein, 10 aa, Artificial Sequence
  Description of Artificial Sequence: Synthetic peptide
  Seed: RTRALVRTGM
RPRALVRTGT

SEQ ID NO: 7000 - protein, 10 aa, Artificial Sequence
  Description of Artificial Sequence: Synthetic peptide
  Seed: RTRALVRTGM
RPRALVRTGW

SEQ ID NO: 7001 - protein, 10 aa, Artificial Sequence
  Description of Artificial Sequence: Synthetic peptide
  Seed: RTRALVRTGM
RPRALVRTGY

SEQ ID NO: 7002 - protein, 10 aa, Artificial Sequence
  Description of Artificial Sequence: Synthetic peptide
  Seed: RTRALVRTGM
RPRALVRTGV

SEQ ID NO: 7003 - protein, 10 aa, Artificial Sequence
  Description of Artificial Sequence: Synthetic peptide
  Seed: RTRALVRTGM
RSRALVRTGA

SEQ ID NO: 7004 - protein, 10 aa, Artificial Sequence
  Description of Artificial Sequence: Synthetic peptide
  Seed: RTRALVRTGM
RSRALVRTGN

SEQ ID NO: 7005 - protein, 10 aa, Artificial Sequence
  Description of Artificial Sequence: Synthetic peptide
  Seed: RTRALVRTGM
RFRALVRTGE

SEQ ID NO: 7006 - protein, 10 aa, Artificial Sequence
  Description of Artificial Sequence: Synthetic peptide
  Seed: RTRALVRTGM
RSRALVRTGC

SEQ ID NO: 7007 - protein, 10 aa, Artificial Sequence
  Description of Artificial Sequence: Synthetic peptide
  Seed: RTRALVRTGM
RSRALVRTGQ

SEQ ID NO: 7008 - protein, 10 aa, Artificial Sequence
  Description of Artificial Sequence: Synthetic peptide
  Seed: RTRALVRTGM
RSRALVRTGE

SEQ ID NO: 7009 - protein, 10 aa, Artificial Sequence
  Description of Artificial Sequence: Synthetic peptide
  Seed: RTRALVRTGM
RSRALVRTGG

SEQ ID NO: 7010 - protein, 10 aa, Artificial Sequence
  Description of Artificial Sequence: Synthetic peptide
  Seed: RTRALVRTGM
RSRALVRTGH

SEQ ID NO: 7011 - protein, 10 aa, Artificial Sequence
  Description of Artificial Sequence: Synthetic peptide
  Seed: RTRALVRTGM
RSRALVRTGI

SEQ ID NO: 7012 - protein, 10 aa, Artificial Sequence
  Description of Artificial Sequence: Synthetic peptide
  Seed: RTRALVRTGM
RSRALVRTGL

SEQ ID NO: 7013 - protein, 10 aa, Artificial Sequence
  Description of Artificial Sequence: Synthetic peptide
  Seed: RTRALVRTGM
RSRALVRTGK

SEQ ID NO: 7014 - protein, 10 aa, Artificial Sequence
  Description of Artificial Sequence: Synthetic peptide
  Seed: RTRALVRTGM
RSRALVRTGM

SEQ ID NO: 7015 - protein, 10 aa, Artificial Sequence
  Description of Artificial Sequence: Synthetic peptide
  Seed: RTRALVRTGM
RPRALVRTGK

SEQ ID NO: 7016 - protein, 10 aa, Artificial Sequence
  Description of Artificial Sequence: Synthetic peptide
  Seed: RTRALVRTGM
RPRALVRTGL

SEQ ID NO: 7017 - protein, 10 aa, Artificial Sequence
  Description of Artificial Sequence: Synthetic peptide
  Seed: RTRALVRTGM
RPRALVRTGI

SEQ ID NO: 7018 - protein, 10 aa, Artificial Sequence
  Description of Artificial Sequence: Synthetic peptide
  Seed: RTRALVRTGM
RPRALVRTGH

SEQ ID NO: 7019 - protein, 10 aa, Artificial Sequence
  Description of Artificial Sequence: Synthetic peptide
  Seed: RTRALVRTGM
RFRALVRTGG

SEQ ID NO: 7020 - protein, 10 aa, Artificial Sequence
  Description of Artificial Sequence: Synthetic peptide
  Seed: RTRALVRTGM
RFRALVRTGH

SEQ ID NO: 7021 - protein, 10 aa, Artificial Sequence
  Description of Artificial Sequence: Synthetic peptide
  Seed: RTRALVRTGM
RFRALVRTGI

SEQ ID NO: 7022 - protein, 10 aa, Artificial Sequence
  Description of Artificial Sequence: Synthetic peptide
  Seed: RTRALVRTGM
RFRALVRTGL

SEQ ID NO: 7023 - protein, 10 aa, Artificial Sequence
  Description of Artificial Sequence: Synthetic peptide
  Seed: RTRALVRTGM
RFRALVRTGK

SEQ ID NO: 7024 - protein, 10 aa, Artificial Sequence
  Description of Artificial Sequence: Synthetic peptide
  Seed: RTRALVRTGM
RFRALVRTGM

SEQ ID NO: 7025 - protein, 10 aa, Artificial Sequence
  Description of Artificial Sequence: Synthetic peptide
  Seed: RTRALVRTGM
RFRALVRTGF

SEQ ID NO: 7026 - protein, 10 aa, Artificial Sequence
  Description of Artificial Sequence: Synthetic peptide
  Seed: RTRALVRTGM
RFRALVRTGP

SEQ ID NO: 7027 - protein, 10 aa, Artificial Sequence
  Description of Artificial Sequence: Synthetic peptide
  Seed: RTRALVRTGM
RFRALVRTGS

SEQ ID NO: 7028 - protein, 10 aa, Artificial Sequence
  Description of Artificial Sequence: Synthetic peptide
  Seed: RTRALVRTGM
RFRALVRTGT

SEQ ID NO: 7029 - protein, 10 aa, Artificial Sequence
  Description of Artificial Sequence: Synthetic peptide
  Seed: RTRALVRTGM
RFRALVRTGW

SEQ ID NO: 7030 - protein, 10 aa, Artificial Sequence
  Description of Artificial Sequence: Synthetic peptide
  Seed: RTRALVRTGM
RFRALVRTGY

SEQ ID NO: 7031 - protein, 10 aa, Artificial Sequence
  Description of Artificial Sequence: Synthetic peptide
  Seed: RTRALVRTGM
RFRALVRTGV

SEQ ID NO: 7032 - protein, 10 aa, Artificial Sequence
  Description of Artificial Sequence: Synthetic peptide
  Seed: RTRALVRTGM
RPRALVRTGA

SEQ ID NO: 7033 - protein, 10 aa, Artificial Sequence
  Description of Artificial Sequence: Synthetic peptide
  Seed: RTRALVRTGM
RPRALVRTGR

SEQ ID NO: 7034 - protein, 10 aa, Artificial Sequence
  Description of Artificial Sequence: Synthetic peptide
  Seed: RTRALVRTGM
RPRALVRTGC

SEQ ID NO: 7035 - protein, 10 aa, Artificial Sequence
  Description of Artificial Sequence: Synthetic peptide
  Seed: RTRALVRTGM
RPRALVRTGQ

SEQ ID NO: 7036 - protein, 10 aa, Artificial Sequence
  Description of Artificial Sequence: Synthetic peptide
  Seed: RTRALVRTGM
RPRALVRTGE

SEQ ID NO: 7037 - protein, 10 aa, Artificial Sequence
  Description of Artificial Sequence: Synthetic peptide
  Seed: RTRALVRTGM
RPRALVRTGG

SEQ ID NO: 7038 - protein, 10 aa, Artificial Sequence
  Description of Artificial Sequence: Synthetic peptide
  Seed: RTRALVRTGM
RLRALVRTGH

SEQ ID NO: 7039 - protein, 10 aa, Artificial Sequence
  Description of Artificial Sequence: Synthetic peptide
  Seed: RTRALVRTGM
RLRALVRTGQ

SEQ ID NO: 7040 - protein, 10 aa, Artificial Sequence
  Description of Artificial Sequence: Synthetic peptide
  Seed: RTRALVRTGM
RDRALVRTGR

SEQ ID NO: 7041 - protein, 10 aa, Artificial Sequence
  Description of Artificial Sequence: Synthetic peptide
  Seed: RTRALVRTGM
RQRALVRTGW

SEQ ID NO: 7042 - protein, 10 aa, Artificial Sequence
  Description of Artificial Sequence: Synthetic peptide
  Seed: RTRALVRTGM
RQRALVRTGG

SEQ ID NO: 7043 - protein, 10 aa, Artificial Sequence
  Description of Artificial Sequence: Synthetic peptide
  Seed: RTRALVRTGM
RQRALVRTGH

SEQ ID NO: 7044 - protein, 10 aa, Artificial Sequence
  Description of Artificial Sequence: Synthetic peptide
  Seed: RTRALVRTGM
RQRALVRTGI

SEQ ID NO: 7045 - protein, 10 aa, Artificial Sequence
  Description of Artificial Sequence: Synthetic peptide
  Seed: RTRALVRTGM
RQRALVRTGL

SEQ ID NO: 7046 - protein, 10 aa, Artificial Sequence
  Description of Artificial Sequence: Synthetic peptide
  Seed: RTRALVRTGM
RQRALVRTGK

SEQ ID NO: 7047 - protein, 10 aa, Artificial Sequence
  Description of Artificial Sequence: Synthetic peptide
  Seed: RTRALVRTGM
RQRALVRTGM

SEQ ID NO: 7048 - protein, 10 aa, Artificial Sequence
  Description of Artificial Sequence: Synthetic peptide
  Seed: RTRALVRTGM
RQRALVRTGF

SEQ ID NO: 7049 - protein, 10 aa, Artificial Sequence
  Description of Artificial Sequence: Synthetic peptide
  Seed: RTRALVRTGM
RQRALVRTGS

SEQ ID NO: 7050 - protein, 10 aa, Artificial Sequence
  Description of Artificial Sequence: Synthetic peptide
  Seed: RTRALVRTGM
RQRALVRTGT

SEQ ID NO: 7051 - protein, 10 aa, Artificial Sequence
  Description of Artificial Sequence: Synthetic peptide
  Seed: RTRALVRTGM
RQRALVRTGY

SEQ ID NO: 7052 - protein, 10 aa, Artificial Sequence
  Description of Artificial Sequence: Synthetic peptide
  Seed: RTRALVRTGM
RERALVRTGY

SEQ ID NO: 7053 - protein, 10 aa, Artificial Sequence
  Description of Artificial Sequence: Synthetic peptide
  Seed: RTRALVRTGM
RQRALVRTGV

SEQ ID NO: 7054 - protein, 10 aa, Artificial Sequence
  Description of Artificial Sequence: Synthetic peptide
  Seed: RTRALVRTGM
RERALVRTGA

SEQ ID NO: 7055 - protein, 10 aa, Artificial Sequence
  Description of Artificial Sequence: Synthetic peptide
  Seed: RTRALVRTGM
RERALVRTGR

SEQ ID NO: 7056 - protein, 10 aa, Artificial Sequence
  Description of Artificial Sequence: Synthetic peptide
  Seed: RTRALVRTGM
RERALVRTGH

SEQ ID NO: 7057 - protein, 10 aa, Artificial Sequence
  Description of Artificial Sequence: Synthetic peptide
  Seed: RTRALVRTGM
RERALVRTGI

SEQ ID NO: 7058 - protein, 10 aa, Artificial Sequence
  Description of Artificial Sequence: Synthetic peptide
  Seed: RTRALVRTGM
RERALVRTGL

SEQ ID NO: 7059 - protein, 10 aa, Artificial Sequence
  Description of Artificial Sequence: Synthetic peptide
  Seed: RTRALVRTGM
RERALVRTGK

SEQ ID NO: 7060 - protein, 10 aa, Artificial Sequence
  Description of Artificial Sequence: Synthetic peptide
  Seed: RTRALVRTGM
RERALVRTGM

SEQ ID NO: 7061 - protein, 10 aa, Artificial Sequence
  Description of Artificial Sequence: Synthetic peptide
  Seed: RTRALVRTGM
RERALVRTGF

SEQ ID NO: 7062 - protein, 10 aa, Artificial Sequence
  Description of Artificial Sequence: Synthetic peptide
  Seed: RTRALVRTGM
RQRALVRTGC

SEQ ID NO: 7063 - protein, 10 aa, Artificial Sequence
  Description of Artificial Sequence: Synthetic peptide
  Seed: RTRALVRTGM
RQRALVRTGR

SEQ ID NO: 7064 - protein, 10 aa, Artificial Sequence
  Description of Artificial Sequence: Synthetic peptide
  Seed: RTRALVRTGM
RQRALVRTGA

SEQ ID NO: 7065 - protein, 10 aa, Artificial Sequence
  Description of Artificial Sequence: Synthetic peptide
  Seed: RTRALVRTGM
RCRALVRTGV

SEQ ID NO: 7066 - protein, 10 aa, Artificial Sequence
  Description of Artificial Sequence: Synthetic peptide
  Seed: RTRALVRTGM
RDRALVRTGH

SEQ ID NO: 7067 - protein, 10 aa, Artificial Sequence
  Description of Artificial Sequence: Synthetic peptide
  Seed: RTRALVRTGM
RDRALVRTGI

SEQ ID NO: 7068 - protein, 10 aa, Artificial Sequence
  Description of Artificial Sequence: Synthetic peptide
  Seed: RTRALVRTGM
RDRALVRTGL

SEQ ID NO: 7069 - protein, 10 aa, Artificial Sequence
  Description of Artificial Sequence: Synthetic peptide
  Seed: RTRALVRTGM
RDRALVRTGK

SEQ ID NO: 7070 - protein, 10 aa, Artificial Sequence
  Description of Artificial Sequence: Synthetic peptide
  Seed: RTRALVRTGM
RDRALVRTGM

SEQ ID NO: 7071 - protein, 10 aa, Artificial Sequence
  Description of Artificial Sequence: Synthetic peptide
  Seed: RTRALVRTGM
RDRALVRTGF

SEQ ID NO: 7072 - protein, 10 aa, Artificial Sequence
  Description of Artificial Sequence: Synthetic peptide
  Seed: RTRALVRTGM
RDRALVRTGW

SEQ ID NO: 7073 - protein, 10 aa, Artificial Sequence
  Description of Artificial Sequence: Synthetic peptide
  Seed: RTRALVRTGM
RDRALVRTGY

SEQ ID NO: 7074 - protein, 10 aa, Artificial Sequence
  Description of Artificial Sequence: Synthetic peptide
  Seed: RTRALVRTGM
RDRALVRTGV

SEQ ID NO: 7075 - protein, 10 aa, Artificial Sequence
  Description of Artificial Sequence: Synthetic peptide
  Seed: RTRALVRTGM
RCRALVRTGA

SEQ ID NO: 7076 - protein, 10 aa, Artificial Sequence
  Description of Artificial Sequence: Synthetic peptide
  Seed: RTRALVRTGM
RCRALVRTGR

SEQ ID NO: 7077 - protein, 10 aa, Artificial Sequence
  Description of Artificial Sequence: Synthetic peptide
  Seed: RTRALVRTGM
RCRALVRTGH

SEQ ID NO: 7078 - protein, 10 aa, Artificial Sequence
  Description of Artificial Sequence: Synthetic peptide
  Seed: RTRALVRTGM
RCRALVRTGI

SEQ ID NO: 7079 - protein, 10 aa, Artificial Sequence
  Description of Artificial Sequence: Synthetic peptide
  Seed: RTRALVRTGM
RCRALVRTGL

SEQ ID NO: 7080 - protein, 10 aa, Artificial Sequence
  Description of Artificial Sequence: Synthetic peptide
  Seed: RTRALVRTGM
RCRALVRTGK

SEQ ID NO: 7081 - protein, 10 aa, Artificial Sequence
  Description of Artificial Sequence: Synthetic peptide
  Seed: RTRALVRTGM
RCRALVRTGM

SEQ ID NO: 7082 - protein, 10 aa, Artificial Sequence
  Description of Artificial Sequence: Synthetic peptide
  Seed: RTRALVRTGM
RCRALVRTGF

SEQ ID NO: 7083 - protein, 10 aa, Artificial Sequence
  Description of Artificial Sequence: Synthetic peptide
  Seed: RTRALVRTGM
RCRALVRTGW

SEQ ID NO: 7084 - protein, 10 aa, Artificial Sequence
  Description of Artificial Sequence: Synthetic peptide
  Seed: RTRALVRTGM
RCRALVRTGY

SEQ ID NO: 7085 - protein, 10 aa, Artificial Sequence
  Description of Artificial Sequence: Synthetic peptide
  Seed: RTRALVRTGM
RERALVRTGW

SEQ ID NO: 7086 - protein, 10 aa, Artificial Sequence
  Description of Artificial Sequence: Synthetic peptide
  Seed: RTRALVRTGM
RERALVRTGV

SEQ ID NO: 7087 - protein, 10 aa, Artificial Sequence
  Description of Artificial Sequence: Synthetic peptide
  Seed: RTRALVRTGM
RLRALVRTGR

SEQ ID NO: 7088 - protein, 10 aa, Artificial Sequence
  Description of Artificial Sequence: Synthetic peptide
  Seed: RTRALVRTGM
RIRALVRTGL

SEQ ID NO: 7089 - protein, 10 aa, Artificial Sequence
  Description of Artificial Sequence: Synthetic peptide
  Seed: RTRALVRTGM
RIRALVRTGA

SEQ ID NO: 7090 - protein, 10 aa, Artificial Sequence
  Description of Artificial Sequence: Synthetic peptide
  Seed: RTRALVRTGM
RIRALVRTGR

SEQ ID NO: 7091 - protein, 10 aa, Artificial Sequence
  Description of Artificial Sequence: Synthetic peptide
  Seed: RTRALVRTGM
RIRALVRTGN

SEQ ID NO: 7092 - protein, 10 aa, Artificial Sequence
  Description of Artificial Sequence: Synthetic peptide
  Seed: RTRALVRTGM
RIRALVRTGC

SEQ ID NO: 7093 - protein, 10 aa, Artificial Sequence
  Description of Artificial Sequence: Synthetic peptide
  Seed: RTRALVRTGM
RIRALVRTGQ

SEQ ID NO: 7094 - protein, 10 aa, Artificial Sequence
  Description of Artificial Sequence: Synthetic peptide
  Seed: RTRALVRTGM
RIRALVRTGE

SEQ ID NO: 7095 - protein, 10 aa, Artificial Sequence
  Description of Artificial Sequence: Synthetic peptide
  Seed: RTRALVRTGM
RIRALVRTGG

SEQ ID NO: 7096 - protein, 10 aa, Artificial Sequence
  Description of Artificial Sequence: Synthetic peptide
  Seed: RTRALVRTGM
RIRALVRTGH

SEQ ID NO: 7097 - protein, 10 aa, Artificial Sequence
  Description of Artificial Sequence: Synthetic peptide
  Seed: RTRALVRTGM
RIRALVRTGI

SEQ ID NO: 7098 - protein, 10 aa, Artificial Sequence
  Description of Artificial Sequence: Synthetic peptide
  Seed: RTRALVRTGM
RIRALVRTGK

SEQ ID NO: 7099 - protein, 10 aa, Artificial Sequence
  Description of Artificial Sequence: Synthetic peptide
  Seed: RTRALVRTGM
RGRALVRTGA

SEQ ID NO: 7100 - protein, 10 aa, Artificial Sequence
  Description of Artificial Sequence: Synthetic peptide
  Seed: RTRALVRTGM
RIRALVRTGM

SEQ ID NO: 7101 - protein, 10 aa, Artificial Sequence
  Description of Artificial Sequence: Synthetic peptide
  Seed: RTRALVRTGM
RIRALVRTGF

SEQ ID NO: 7102 - protein, 10 aa, Artificial Sequence
  Description of Artificial Sequence: Synthetic peptide
  Seed: RTRALVRTGM
RIRALVRTGP

SEQ ID NO: 7103 - protein, 10 aa, Artificial Sequence
  Description of Artificial Sequence: Synthetic peptide
  Seed: RTRALVRTGM
RIRALVRTGS

SEQ ID NO: 7104 - protein, 10 aa, Artificial Sequence
  Description of Artificial Sequence: Synthetic peptide
  Seed: RTRALVRTGM
RIRALVRTGT

SEQ ID NO: 7105 - protein, 10 aa, Artificial Sequence
  Description of Artificial Sequence: Synthetic peptide
  Seed: RTRALVRTGM
RIRALVRTGW

SEQ ID NO: 7106 - protein, 10 aa, Artificial Sequence
  Description of Artificial Sequence: Synthetic peptide
  Seed: RTRALVRTGM
RIRALVRTGY

SEQ ID NO: 7107 - protein, 10 aa, Artificial Sequence
  Description of Artificial Sequence: Synthetic peptide
  Seed: RTRALVRTGM
RIRALVRTGV

SEQ ID NO: 7108 - protein, 10 aa, Artificial Sequence
  Description of Artificial Sequence: Synthetic peptide
  Seed: RTRALVRTGM
RLRALVRTGA

SEQ ID NO: 7109 - protein, 10 aa, Artificial Sequence
  Description of Artificial Sequence: Synthetic peptide
  Seed: RTRALVRTGM
RHRALVRTGV

SEQ ID NO: 7110 - protein, 10 aa, Artificial Sequence
  Description of Artificial Sequence: Synthetic peptide
  Seed: RTRALVRTGM
RHRALVRTGY

SEQ ID NO: 7111 - protein, 10 aa, Artificial Sequence
  Description of Artificial Sequence: Synthetic peptide
  Seed: RTRALVRTGM
RHRALVRTGW

SEQ ID NO: 7112 - protein, 10 aa, Artificial Sequence
  Description of Artificial Sequence: Synthetic peptide
  Seed: RTRALVRTGM
RHRALVRTGF

SEQ ID NO: 7113 - protein, 10 aa, Artificial Sequence
  Description of Artificial Sequence: Synthetic peptide
  Seed: RTRALVRTGM
RGRALVRTGR

SEQ ID NO: 7114 - protein, 10 aa, Artificial Sequence
  Description of Artificial Sequence: Synthetic peptide
  Seed: RTRALVRTGM
RGRALVRTGH

SEQ ID NO: 7115 - protein, 10 aa, Artificial Sequence
  Description of Artificial Sequence: Synthetic peptide
  Seed: RTRALVRTGM
RGRALVRTGI

SEQ ID NO: 7116 - protein, 10 aa, Artificial Sequence
  Description of Artificial Sequence: Synthetic peptide
  Seed: RTRALVRTGM
RGRALVRTGL

SEQ ID NO: 7117 - protein, 10 aa, Artificial Sequence
  Description of Artificial Sequence: Synthetic peptide
  Seed: RTRALVRTGM
RGRALVRTGK

SEQ ID NO: 7118 - protein, 10 aa, Artificial Sequence
  Description of Artificial Sequence: Synthetic peptide
  Seed: RTRALVRTGM
RGRALVRTGM

SEQ ID NO: 7119 - protein, 10 aa, Artificial Sequence
  Description of Artificial Sequence: Synthetic peptide
  Seed: RTRALVRTGM
RGRALVRTGF

SEQ ID NO: 7120 - protein, 10 aa, Artificial Sequence
  Description of Artificial Sequence: Synthetic peptide
  Seed: RTRALVRTGM
RGRALVRTGS

SEQ ID NO: 7121 - protein, 10 aa, Artificial Sequence
  Description of Artificial Sequence: Synthetic peptide
  Seed: RTRALVRTGM
RGRALVRTGT

SEQ ID NO: 7122 - protein, 10 aa, Artificial Sequence
  Description of Artificial Sequence: Synthetic peptide
  Seed: RTRALVRTGM
RGRALVRTGW

SEQ ID NO: 7123 - protein, 10 aa, Artificial Sequence
  Description of Artificial Sequence: Synthetic peptide
  Seed: RTRALVRTGM
RGRALVRTGY

SEQ ID NO: 7124 - protein, 10 aa, Artificial Sequence
  Description of Artificial Sequence: Synthetic peptide
  Seed: RTRALVRTGM
RGRALVRTGV

SEQ ID NO: 7125 - protein, 10 aa, Artificial Sequence
  Description of Artificial Sequence: Synthetic peptide
  Seed: RTRALVRTGM
RHRALVRTGA

SEQ ID NO: 7126 - protein, 10 aa, Artificial Sequence
  Description of Artificial Sequence: Synthetic peptide
  Seed: RTRALVRTGM
RHRALVRTGR

SEQ ID NO: 7127 - protein, 10 aa, Artificial Sequence
  Description of Artificial Sequence: Synthetic peptide
  Seed: RTRALVRTGM
RHRALVRTGH

SEQ ID NO: 7128 - protein, 10 aa, Artificial Sequence
  Description of Artificial Sequence: Synthetic peptide
  Seed: RTRALVRTGM
RHRALVRTGI

SEQ ID NO: 7129 - protein, 10 aa, Artificial Sequence
  Description of Artificial Sequence: Synthetic peptide
  Seed: RTRALVRTGM
RHRALVRTGL

SEQ ID NO: 7130 - protein, 10 aa, Artificial Sequence
  Description of Artificial Sequence: Synthetic peptide
  Seed: RTRALVRTGM
RHRALVRTGK

SEQ ID NO: 7131 - protein, 10 aa, Artificial Sequence
  Description of Artificial Sequence: Synthetic peptide
  Seed: RTRALVRTGM
RHRALVRTGM

SEQ ID NO: 7132 - protein, 9 aa, Artificial Sequence
  Description of Artificial Sequence: Synthetic peptide
  Seed: RTRIAYERM
RYRIAYERS

SEQ ID NO: 7133 - protein, 9 aa, Artificial Sequence
  Description of Artificial Sequence: Synthetic peptide
  Seed: RTRIAYERM
RYRIAYERT

SEQ ID NO: 7134 - protein, 9 aa, Artificial Sequence
  Description of Artificial Sequence: Synthetic peptide
  Seed: RTRIAYERM
RYRIAYERY

SEQ ID NO: 7135 - protein, 10 aa, Artificial Sequence
  Description of Artificial Sequence: Synthetic peptide
  Seed: RTRSGGNTNQ
RNRSGGNTNK

SEQ ID NO: 7136 - protein, 10 aa, Artificial Sequence
  Description of Artificial Sequence: Synthetic peptide
  Seed: RTRSGGNTNQ
RARSGGNTNK

SEQ ID NO: 7137 - protein, 10 aa, Artificial Sequence
  Description of Artificial Sequence: Synthetic peptide
  Seed: RTRSGGNTNQ
RARSGGNTNM

SEQ ID NO: 7138 - protein, 10 aa, Artificial Sequence
  Description of Artificial Sequence: Synthetic peptide
  Seed: RTRSGGNTNQ
RARSGGNTNF

SEQ ID NO: 7139 - protein, 10 aa, Artificial Sequence
  Description of Artificial Sequence: Synthetic peptide
  Seed: RTRSGGNTNQ
RARSGGNTNS

SEQ ID NO: 7140 - protein, 10 aa, Artificial Sequence
  Description of Artificial Sequence: Synthetic peptide
  Seed: RTRSGGNTNQ
RARSGGNTNT

SEQ ID NO: 7141 - protein, 10 aa, Artificial Sequence
  Description of Artificial Sequence: Synthetic peptide
  Seed: RTRSGGNTNQ
RARSGGNTNY

SEQ ID NO: 7142 - protein, 10 aa, Artificial Sequence
  Description of Artificial Sequence: Synthetic peptide
  Seed: RTRSGGNTNQ
RARSGGNTNV

SEQ ID NO: 7143 - protein, 10 aa, Artificial Sequence
  Description of Artificial Sequence: Synthetic peptide
  Seed: RTRSGGNTNQ
RNRSGGNTNA

SEQ ID NO: 7144 - protein, 10 aa, Artificial Sequence
  Description of Artificial Sequence: Synthetic peptide
  Seed: RTRSGGNTNQ
RNRSGGNTNI

SEQ ID NO: 7145 - protein, 10 aa, Artificial Sequence
  Description of Artificial Sequence: Synthetic peptide
  Seed: RTRSGGNTNQ
RNRSGGNTNM

SEQ ID NO: 7146 - protein, 10 aa, Artificial Sequence
  Description of Artificial Sequence: Synthetic peptide
  Seed: RTRSGGNTNQ
RGRSGGNTNA

SEQ ID NO: 7147 - protein, 10 aa, Artificial Sequence
  Description of Artificial Sequence: Synthetic peptide
  Seed: RTRSGGNTNQ
RNRSGGNTNV

SEQ ID NO: 7148 - protein, 10 aa, Artificial Sequence
  Description of Artificial Sequence: Synthetic peptide
  Seed: RTRSGGNTNQ
RCRSGGNTNK

SEQ ID NO: 7149 - protein, 10 aa, Artificial Sequence
  Description of Artificial Sequence: Synthetic peptide
  Seed: RTRSGGNTNQ
RQRSGGNTNA

SEQ ID NO: 7150 - protein, 10 aa, Artificial Sequence
  Description of Artificial Sequence: Synthetic peptide
  Seed: RTRSGGNTNQ
RQRSGGNTNR

SEQ ID NO: 7151 - protein, 10 aa, Artificial Sequence
  Description of Artificial Sequence: Synthetic peptide
  Seed: RTRSGGNTNQ
RQRSGGNTNI

SEQ ID NO: 7152 - protein, 10 aa, Artificial Sequence
  Description of Artificial Sequence: Synthetic peptide
  Seed: RTRSGGNTNQ
RQRSGGNTNL

SEQ ID NO: 7153 - protein, 10 aa, Artificial Sequence
  Description of Artificial Sequence: Synthetic peptide
  Seed: RTRSGGNTNQ
RQRSGGNTNK

SEQ ID NO: 7154 - protein, 10 aa, Artificial Sequence
  Description of Artificial Sequence: Synthetic peptide
  Seed: RTRSGGNTNQ
RQRSGGNTNM

SEQ ID NO: 7155 - protein, 10 aa, Artificial Sequence
  Description of Artificial Sequence: Synthetic peptide
  Seed: RTRSGGNTNQ
RQRSGGNTNY

SEQ ID NO: 7156 - protein, 10 aa, Artificial Sequence
  Description of Artificial Sequence: Synthetic peptide
  Seed: RTRSGGNTNQ
RARSGGNTNL

SEQ ID NO: 7157 - protein, 10 aa, Artificial Sequence
  Description of Artificial Sequence: Synthetic peptide
  Seed: RTRSGGNTNQ
RARSGGNTNI

SEQ ID NO: 7158 - protein, 10 aa, Artificial Sequence
  Description of Artificial Sequence: Synthetic peptide
  Seed: RTRSGGNTNQ
RARSGGNTNG

SEQ ID NO: 7159 - protein, 10 aa, Artificial Sequence
  Description of Artificial Sequence: Synthetic peptide
  Seed: RTRSGGNTNQ
RARSGGNTNR

SEQ ID NO: 7160 - protein, 9 aa, Artificial Sequence
  Description of Artificial Sequence: Synthetic peptide
  Seed: RTRSGGNTN
RVRSGGNTN

SEQ ID NO: 7161 - protein, 9 aa, Artificial Sequence
  Description of Artificial Sequence: Synthetic peptide
  Seed: RTRSGGNTN
RVRSGGNTD

SEQ ID NO: 7162 - protein, 9 aa, Artificial Sequence
  Description of Artificial Sequence: Synthetic peptide
  Seed: RTRSGGNTN
RVRSGGNTC

SEQ ID NO: 7163 - protein, 9 aa, Artificial Sequence
  Description of Artificial Sequence: Synthetic peptide
  Seed: RTRSGGNTN
RVRSGGNTQ

SEQ ID NO: 7164 - protein, 9 aa, Artificial Sequence
  Description of Artificial Sequence: Synthetic peptide
  Seed: RTRSGGNTN
RVRSGGNTE

SEQ ID NO: 7165 - protein, 9 aa, Artificial Sequence
  Description of Artificial Sequence: Synthetic peptide
  Seed: RTRSGGNTN
RVRSGGNTG

SEQ ID NO: 7166 - protein, 9 aa, Artificial Sequence
  Description of Artificial Sequence: Synthetic peptide
  Seed: RTRSGGNTN
RVRSGGNTH

SEQ ID NO: 7167 - protein, 9 aa, Artificial Sequence
  Description of Artificial Sequence: Synthetic peptide
  Seed: RTRSGGNTN
RVRSGGNTI

SEQ ID NO: 7168 - protein, 9 aa, Artificial Sequence
  Description of Artificial Sequence: Synthetic peptide
  Seed: RTRSGGNTN
RVRSGGNTL

SEQ ID NO: 7169 - protein, 9 aa, Artificial Sequence
  Description of Artificial Sequence: Synthetic peptide
  Seed: RTRSGGNTN
RVRSGGNTK

SEQ ID NO: 7170 - protein, 9 aa, Artificial Sequence
  Description of Artificial Sequence: Synthetic peptide
  Seed: RTRSGGNTN
RVRSGGNTM

SEQ ID NO: 7171 - protein, 9 aa, Artificial Sequence
  Description of Artificial Sequence: Synthetic peptide
  Seed: RTRSGGNTN
RVRSGGNTF

SEQ ID NO: 7172 - protein, 9 aa, Artificial Sequence
  Description of Artificial Sequence: Synthetic peptide
  Seed: RTRSGGNTN
RVRSGGNTP

SEQ ID NO: 7173 - protein, 9 aa, Artificial Sequence
  Description of Artificial Sequence: Synthetic peptide
  Seed: RTRSGGNTN
RVRSGGNTS

SEQ ID NO: 7174 - protein, 9 aa, Artificial Sequence
  Description of Artificial Sequence: Synthetic peptide
  Seed: RTRSGGNTN
RVRSGGNTT

SEQ ID NO: 7175 - protein, 9 aa, Artificial Sequence
  Description of Artificial Sequence: Synthetic peptide
  Seed: RTRSGGNTN
RVRSGGNTW

SEQ ID NO: 7176 - protein, 9 aa, Artificial Sequence
  Description of Artificial Sequence: Synthetic peptide
  Seed: RTRSGGNTN
RVRSGGNTY

SEQ ID NO: 7177 - protein, 9 aa, Artificial Sequence
  Description of Artificial Sequence: Synthetic peptide
  Seed: RTRSGGNTN
RVRSGGNTV

SEQ ID NO: 7178 - protein, 10 aa, Artificial Sequence
  Description of Artificial Sequence: Synthetic peptide
  Seed: RTRSGGNTNQ
RARSGGNTNA

SEQ ID NO: 7179 - protein, 10 aa, Artificial Sequence
  Description of Artificial Sequence: Synthetic peptide
  Seed: RTRSGGNTNQ
RQRSGGNTNV

SEQ ID NO: 7180 - protein, 10 aa, Artificial Sequence
  Description of Artificial Sequence: Synthetic peptide
  Seed: RTRSGGNTNQ
RGRSGGNTNR

SEQ ID NO: 7181 - protein, 9 aa, Artificial Sequence
  Description of Artificial Sequence: Synthetic peptide
  Seed: RTRSGGNTN
RVRSGGNTA

SEQ ID NO: 7182 - protein, 10 aa, Artificial Sequence
  Description of Artificial Sequence: Synthetic peptide
  Seed: RTRSGGNTNQ
RLRSGGNTNV

SEQ ID NO: 7183 - protein, 10 aa, Artificial Sequence
  Description of Artificial Sequence: Synthetic peptide
  Seed: RTRSGGNTNQ
RLRSGGNTNR

SEQ ID NO: 7184 - protein, 10 aa, Artificial Sequence
  Description of Artificial Sequence: Synthetic peptide
  Seed: RTRSGGNTNQ
RLRSGGNTNG

SEQ ID NO: 7185 - protein, 10 aa, Artificial Sequence
  Description of Artificial Sequence: Synthetic peptide
  Seed: RTRSGGNTNQ
RLRSGGNTNI

SEQ ID NO: 7186 - protein, 10 aa, Artificial Sequence
  Description of Artificial Sequence: Synthetic peptide
  Seed: RTRSGGNTNQ
RLRSGGNTNL

SEQ ID NO: 7187 - protein, 10 aa, Artificial Sequence
  Description of Artificial Sequence: Synthetic peptide
  Seed: RTRSGGNTNQ
RLRSGGNTNK

SEQ ID NO: 7188 - protein, 10 aa, Artificial Sequence
  Description of Artificial Sequence: Synthetic peptide
  Seed: RTRSGGNTNQ
RLRSGGNTNM

SEQ ID NO: 7189 - protein, 10 aa, Artificial Sequence
  Description of Artificial Sequence: Synthetic peptide
  Seed: RTRSGGNTNQ
RLRSGGNTNF

SEQ ID NO: 7190 - protein, 10 aa, Artificial Sequence
  Description of Artificial Sequence: Synthetic peptide
  Seed: RTRSGGNTNQ
RLRSGGNTNS

SEQ ID NO: 7191 - protein, 10 aa, Artificial Sequence
  Description of Artificial Sequence: Synthetic peptide
  Seed: RTRSGGNTNQ
RLRSGGNTNY

SEQ ID NO: 7192 - protein, 10 aa, Artificial Sequence
  Description of Artificial Sequence: Synthetic peptide
  Seed: RTRSGGNTNQ
RKRSGGNTNK

SEQ ID NO: 7193 - protein, 10 aa, Artificial Sequence
  Description of Artificial Sequence: Synthetic peptide
  Seed: RTRSGGNTNQ
RGRSGGNTNI

SEQ ID NO: 7194 - protein, 10 aa, Artificial Sequence
  Description of Artificial Sequence: Synthetic peptide
  Seed: RTRSGGNTNQ
RMRSGGNTNA

SEQ ID NO: 7195 - protein, 10 aa, Artificial Sequence
  Description of Artificial Sequence: Synthetic peptide
  Seed: RTRSGGNTNQ
RMRSGGNTNR

SEQ ID NO: 7196 - protein, 10 aa, Artificial Sequence
  Description of Artificial Sequence: Synthetic peptide
  Seed: RTRSGGNTNQ
RMRSGGNTNN

SEQ ID NO: 7197 - protein, 10 aa, Artificial Sequence
  Description of Artificial Sequence: Synthetic peptide
  Seed: RTRSGGNTNQ
RMRSGGNTNC

SEQ ID NO: 7198 - protein, 10 aa, Artificial Sequence
  Description of Artificial Sequence: Synthetic peptide
  Seed: RTRSGGNTNQ
RMRSGGNTNQ

SEQ ID NO: 7199 - protein, 10 aa, Artificial Sequence
  Description of Artificial Sequence: Synthetic peptide
  Seed: RTRSGGNTNQ
RMRSGGNTNE

SEQ ID NO: 7200 - protein, 10 aa, Artificial Sequence
  Description of Artificial Sequence: Synthetic peptide
  Seed: RTRSGGNTNQ
RMRSGGNTNG

SEQ ID NO: 7201 - protein, 10 aa, Artificial Sequence
  Description of Artificial Sequence: Synthetic peptide
  Seed: RTRSGGNTNQ
RMRSGGNTNH

SEQ ID NO: 7202 - protein, 10 aa, Artificial Sequence
  Description of Artificial Sequence: Synthetic peptide
  Seed: RTRSGGNTNQ
RMRSGGNTNI

SEQ ID NO: 7203 - protein, 10 aa, Artificial Sequence
  Description of Artificial Sequence: Synthetic peptide
  Seed: RTRSGGNTNQ
RLRSGGNTNA

SEQ ID NO: 7204 - protein, 10 aa, Artificial Sequence
  Description of Artificial Sequence: Synthetic peptide
  Seed: RTRSGGNTNQ
RIRSGGNTNV

SEQ ID NO: 7205 - protein, 10 aa, Artificial Sequence
  Description of Artificial Sequence: Synthetic peptide
  Seed: RTRSGGNTNQ
RIRSGGNTNY

SEQ ID NO: 7206 - protein, 10 aa, Artificial Sequence
  Description of Artificial Sequence: Synthetic peptide
  Seed: RTRSGGNTNQ
RIRSGGNTNT

SEQ ID NO: 7207 - protein, 10 aa, Artificial Sequence
  Description of Artificial Sequence: Synthetic peptide
  Seed: RTRSGGNTNQ
RGRSGGNTNL

SEQ ID NO: 7208 - protein, 10 aa, Artificial Sequence
  Description of Artificial Sequence: Synthetic peptide
  Seed: RTRSGGNTNQ
RGRSGGNTNK

SEQ ID NO: 7209 - protein, 10 aa, Artificial Sequence
  Description of Artificial Sequence: Synthetic peptide
  Seed: RTRSGGNTNQ
RGRSGGNTNM

SEQ ID NO: 7210 - protein, 10 aa, Artificial Sequence
  Description of Artificial Sequence: Synthetic peptide
  Seed: RTRSGGNTNQ
RGRSGGNTNY

SEQ ID NO: 7211 - protein, 10 aa, Artificial Sequence
  Description of Artificial Sequence: Synthetic peptide
  Seed: RTRSGGNTNQ
RGRSGGNTNV

SEQ ID NO: 7212 - protein, 10 aa, Artificial Sequence
  Description of Artificial Sequence: Synthetic peptide
  Seed: RTRSGGNTNQ
RHRSGGNTNK

SEQ ID NO: 7213 - protein, 10 aa, Artificial Sequence
  Description of Artificial Sequence: Synthetic peptide
  Seed: RTRSGGNTNQ
RIRSGGNTNA

SEQ ID NO: 7214 - protein, 10 aa, Artificial Sequence
  Description of Artificial Sequence: Synthetic peptide
  Seed: RTRSGGNTNQ
RIRSGGNTNR

SEQ ID NO: 7215 - protein, 10 aa, Artificial Sequence
  Description of Artificial Sequence: Synthetic peptide
  Seed: RTRSGGNTNQ
RIRSGGNTNN

SEQ ID NO: 7216 - protein, 10 aa, Artificial Sequence
  Description of Artificial Sequence: Synthetic peptide
  Seed: RTRSGGNTNQ
RIRSGGNTNC

SEQ ID NO: 7217 - protein, 10 aa, Artificial Sequence
  Description of Artificial Sequence: Synthetic peptide
  Seed: RTRSGGNTNQ
RIRSGGNTNQ

SEQ ID NO: 7218 - protein, 10 aa, Artificial Sequence
  Description of Artificial Sequence: Synthetic peptide
  Seed: RTRSGGNTNQ
RIRSGGNTNG

SEQ ID NO: 7219 - protein, 10 aa, Artificial Sequence
  Description of Artificial Sequence: Synthetic peptide
  Seed: RTRSGGNTNQ
RIRSGGNTNI

SEQ ID NO: 7220 - protein, 10 aa, Artificial Sequence
  Description of Artificial Sequence: Synthetic peptide
  Seed: RTRSGGNTNQ
RIRSGGNTNL

SEQ ID NO: 7221 - protein, 10 aa, Artificial Sequence
  Description of Artificial Sequence: Synthetic peptide
  Seed: RTRSGGNTNQ
RIRSGGNTNK

SEQ ID NO: 7222 - protein, 10 aa, Artificial Sequence
  Description of Artificial Sequence: Synthetic peptide
  Seed: RTRSGGNTNQ
RIRSGGNTNM

SEQ ID NO: 7223 - protein, 10 aa, Artificial Sequence
  Description of Artificial Sequence: Synthetic peptide
  Seed: RTRSGGNTNQ
RIRSGGNTNF

SEQ ID NO: 7224 - protein, 10 aa, Artificial Sequence
  Description of Artificial Sequence: Synthetic peptide
  Seed: RTRSGGNTNQ
RIRSGGNTNP

SEQ ID NO: 7225 - protein, 10 aa, Artificial Sequence
  Description of Artificial Sequence: Synthetic peptide
  Seed: RTRSGGNTNQ
RIRSGGNTNS

SEQ ID NO: 7226 - protein, 9 aa, Artificial Sequence
  Description of Artificial Sequence: Synthetic peptide
  Seed: RTRSGGNTN
RVRSGGNTR

SEQ ID NO: 7227 - protein, 9 aa, Artificial Sequence
  Description of Artificial Sequence: Synthetic peptide
  Seed: RTRSGGNTN
RYRSGGNTV

SEQ ID NO: 7228 - protein, 10 aa, Artificial Sequence
  Description of Artificial Sequence: Synthetic peptide
  Seed: RTRSGGNTNQ
RMRSGGNTNK

SEQ ID NO: 7229 - protein, 9 aa, Artificial Sequence
  Description of Artificial Sequence: Synthetic peptide
  Seed: RTRSGGNTN
RSRSGGNTP

SEQ ID NO: 7230 - protein, 9 aa, Artificial Sequence
  Description of Artificial Sequence: Synthetic peptide
  Seed: RTRSGGNTN
RSRSGGNTQ

SEQ ID NO: 7231 - protein, 9 aa, Artificial Sequence
  Description of Artificial Sequence: Synthetic peptide
  Seed: RTRSGGNTN
RSRSGGNTE

SEQ ID NO: 7232 - protein, 9 aa, Artificial Sequence
  Description of Artificial Sequence: Synthetic peptide
  Seed: RTRSGGNTN
RSRSGGNTG

SEQ ID NO: 7233 - protein, 9 aa, Artificial Sequence
  Description of Artificial Sequence: Synthetic peptide
  Seed: RTRSGGNTN
RSRSGGNTH

SEQ ID NO: 7234 - protein, 9 aa, Artificial Sequence
  Description of Artificial Sequence: Synthetic peptide
  Seed: RTRSGGNTN
RSRSGGNTI

SEQ ID NO: 7235 - protein, 9 aa, Artificial Sequence
  Description of Artificial Sequence: Synthetic peptide
  Seed: RTRSGGNTN
RSRSGGNTL

SEQ ID NO: 7236 - protein, 9 aa, Artificial Sequence
  Description of Artificial Sequence: Synthetic peptide
  Seed: RTRSGGNTN
RSRSGGNTK

SEQ ID NO: 7237 - protein, 9 aa, Artificial Sequence
  Description of Artificial Sequence: Synthetic peptide
  Seed: RTRSGGNTN
RSRSGGNTM

SEQ ID NO: 7238 - protein, 9 aa, Artificial Sequence
  Description of Artificial Sequence: Synthetic peptide
  Seed: RTRSGGNTN
RSRSGGNTF

SEQ ID NO: 7239 - protein, 9 aa, Artificial Sequence
  Description of Artificial Sequence: Synthetic peptide
  Seed: RTRSGGNTN
RSRSGGNTS

SEQ ID NO: 7240 - protein, 9 aa, Artificial Sequence
  Description of Artificial Sequence: Synthetic peptide
  Seed: RTRSGGNTN
RTRSGGNTG

SEQ ID NO: 7241 - protein, 9 aa, Artificial Sequence
  Description of Artificial Sequence: Synthetic peptide
  Seed: RTRSGGNTN
RSRSGGNTT

SEQ ID NO: 7242 - protein, 9 aa, Artificial Sequence
  Description of Artificial Sequence: Synthetic peptide
  Seed: RTRSGGNTN
RSRSGGNTW

SEQ ID NO: 7243 - protein, 9 aa, Artificial Sequence
  Description of Artificial Sequence: Synthetic peptide
  Seed: RTRSGGNTN
RSRSGGNTY

SEQ ID NO: 7244 - protein, 9 aa, Artificial Sequence
  Description of Artificial Sequence: Synthetic peptide
  Seed: RTRSGGNTN
RSRSGGNTV

SEQ ID NO: 7245 - protein, 9 aa, Artificial Sequence
  Description of Artificial Sequence: Synthetic peptide
  Seed: RTRSGGNTN
RTRSGGNTA

SEQ ID NO: 7246 - protein, 9 aa, Artificial Sequence
  Description of Artificial Sequence: Synthetic peptide
  Seed: RTRSGGNTN
RTRSGGNTR

SEQ ID NO: 7247 - protein, 9 aa, Artificial Sequence
  Description of Artificial Sequence: Synthetic peptide
  Seed: RTRSGGNTN
RTRSGGNTD

SEQ ID NO: 7248 - protein, 9 aa, Artificial Sequence
  Description of Artificial Sequence: Synthetic peptide
  Seed: RTRSGGNTN
RTRSGGNTC

SEQ ID NO: 7249 - protein, 9 aa, Artificial Sequence
  Description of Artificial Sequence: Synthetic peptide
  Seed: RTRSGGNTN
RTRSGGNTQ

SEQ ID NO: 7250 - protein, 9 aa, Artificial Sequence
  Description of Artificial Sequence: Synthetic peptide
  Seed: RTRSGGNTN
RSRSGGNTC

SEQ ID NO: 7251 - protein, 9 aa, Artificial Sequence
  Description of Artificial Sequence: Synthetic peptide
  Seed: RTRSGGNTN
RSRSGGNTD

SEQ ID NO: 7252 - protein, 9 aa, Artificial Sequence
  Description of Artificial Sequence: Synthetic peptide
  Seed: RTRSGGNTN
RSRSGGNTN

SEQ ID NO: 7253 - protein, 9 aa, Artificial Sequence
  Description of Artificial Sequence: Synthetic peptide
  Seed: RTRSGGNTN
RSRSGGNTR

SEQ ID NO: 7254 - protein, 9 aa, Artificial Sequence
  Description of Artificial Sequence: Synthetic peptide
  Seed: RTRSGGNTN
RFRSGGNTR

SEQ ID NO: 7255 - protein, 9 aa, Artificial Sequence
  Description of Artificial Sequence: Synthetic peptide
  Seed: RTRSGGNTN
RFRSGGNTN

SEQ ID NO: 7256 - protein, 9 aa, Artificial Sequence
  Description of Artificial Sequence: Synthetic peptide
  Seed: RTRSGGNTN
RFRSGGNTC

SEQ ID NO: 7257 - protein, 9 aa, Artificial Sequence
  Description of Artificial Sequence: Synthetic peptide
  Seed: RTRSGGNTN
RFRSGGNTQ

SEQ ID NO: 7258 - protein, 9 aa, Artificial Sequence
  Description of Artificial Sequence: Synthetic peptide
  Seed: RTRSGGNTN
RFRSGGNTE

SEQ ID NO: 7259 - protein, 9 aa, Artificial Sequence
  Description of Artificial Sequence: Synthetic peptide
  Seed: RTRSGGNTN
RFRSGGNTG

SEQ ID NO: 7260 - protein, 9 aa, Artificial Sequence
  Description of Artificial Sequence: Synthetic peptide
  Seed: RTRSGGNTN
RFRSGGNTH

SEQ ID NO: 7261 - protein, 9 aa, Artificial Sequence
  Description of Artificial Sequence: Synthetic peptide
  Seed: RTRSGGNTN
RFRSGGNTI

SEQ ID NO: 7262 - protein, 9 aa, Artificial Sequence
  Description of Artificial Sequence: Synthetic peptide
  Seed: RTRSGGNTN
RFRSGGNTL

SEQ ID NO: 7263 - protein, 9 aa, Artificial Sequence
  Description of Artificial Sequence: Synthetic peptide
  Seed: RTRSGGNTN
RFRSGGNTK

SEQ ID NO: 7264 - protein, 9 aa, Artificial Sequence
  Description of Artificial Sequence: Synthetic peptide
  Seed: RTRSGGNTN
RFRSGGNTM

SEQ ID NO: 7265 - protein, 9 aa, Artificial Sequence
  Description of Artificial Sequence: Synthetic peptide
  Seed: RTRSGGNTN
RFRSGGNTF

SEQ ID NO: 7266 - protein, 9 aa, Artificial Sequence
  Description of Artificial Sequence: Synthetic peptide
  Seed: RTRSGGNTN
RFRSGGNTP

SEQ ID NO: 7267 - protein, 9 aa, Artificial Sequence
  Description of Artificial Sequence: Synthetic peptide
  Seed: RTRSGGNTN
RFRSGGNTS

SEQ ID NO: 7268 - protein, 9 aa, Artificial Sequence
  Description of Artificial Sequence: Synthetic peptide
  Seed: RTRSGGNTN
RFRSGGNTT

SEQ ID NO: 7269 - protein, 9 aa, Artificial Sequence
  Description of Artificial Sequence: Synthetic peptide
  Seed: RTRSGGNTN
RFRSGGNTY

SEQ ID NO: 7270 - protein, 9 aa, Artificial Sequence
  Description of Artificial Sequence: Synthetic peptide
  Seed: RTRSGGNTN
RFRSGGNTV

SEQ ID NO: 7271 - protein, 9 aa, Artificial Sequence
  Description of Artificial Sequence: Synthetic peptide
  Seed: RTRSGGNTN
RPRSGGNTK

SEQ ID NO: 7272 - protein, 9 aa, Artificial Sequence
  Description of Artificial Sequence: Synthetic peptide
  Seed: RTRSGGNTN
RSRSGGNTA

SEQ ID NO: 7273 - protein, 9 aa, Artificial Sequence
  Description of Artificial Sequence: Synthetic peptide
  Seed: RTRSGGNTN
RTRSGGNTE

SEQ ID NO: 7274 - protein, 9 aa, Artificial Sequence
  Description of Artificial Sequence: Synthetic peptide
  Seed: RTRSGGNTN
RTRSGGNTH

SEQ ID NO: 7275 - protein, 9 aa, Artificial Sequence
  Description of Artificial Sequence: Synthetic peptide
  Seed: RTRSGGNTN
RYRSGGNTY

SEQ ID NO: 7276 - protein, 9 aa, Artificial Sequence
  Description of Artificial Sequence: Synthetic peptide
  Seed: RTRSGGNTN
RYRSGGNTE

SEQ ID NO: 7277 - protein, 9 aa, Artificial Sequence
  Description of Artificial Sequence: Synthetic peptide
  Seed: RTRSGGNTN
RWRSGGNTS

SEQ ID NO: 7278 - protein, 9 aa, Artificial Sequence
  Description of Artificial Sequence: Synthetic peptide
  Seed: RTRSGGNTN
RWRSGGNTT

SEQ ID NO: 7279 - protein, 9 aa, Artificial Sequence
  Description of Artificial Sequence: Synthetic peptide
  Seed: RTRSGGNTN
RWRSGGNTY

SEQ ID NO: 7280 - protein, 9 aa, Artificial Sequence
  Description of Artificial Sequence: Synthetic peptide
  Seed: RTRSGGNTN
RWRSGGNTV

SEQ ID NO: 7281 - protein, 9 aa, Artificial Sequence
  Description of Artificial Sequence: Synthetic peptide
  Seed: RTRSGGNTN
RYRSGGNTA

SEQ ID NO: 7282 - protein, 9 aa, Artificial Sequence
  Description of Artificial Sequence: Synthetic peptide
  Seed: RTRSGGNTN
RYRSGGNTR

SEQ ID NO: 7283 - protein, 9 aa, Artificial Sequence
  Description of Artificial Sequence: Synthetic peptide
  Seed: RTRSGGNTN
RYRSGGNTN

SEQ ID NO: 7284 - protein, 9 aa, Artificial Sequence
  Description of Artificial Sequence: Synthetic peptide
  Seed: RTRSGGNTN
RYRSGGNTC

SEQ ID NO: 7285 - protein, 9 aa, Artificial Sequence
  Description of Artificial Sequence: Synthetic peptide
  Seed: RTRSGGNTN
RYRSGGNTQ

SEQ ID NO: 7286 - protein, 9 aa, Artificial Sequence
  Description of Artificial Sequence: Synthetic peptide
  Seed: RTRSGGNTN
RYRSGGNTG

SEQ ID NO: 7287 - protein, 9 aa, Artificial Sequence
  Description of Artificial Sequence: Synthetic peptide
  Seed: RTRSGGNTN
RTRSGGNTI

SEQ ID NO: 7288 - protein, 9 aa, Artificial Sequence
  Description of Artificial Sequence: Synthetic peptide
  Seed: RTRSGGNTN
RYRSGGNTH

SEQ ID NO: 7289 - protein, 9 aa, Artificial Sequence
  Description of Artificial Sequence: Synthetic peptide
  Seed: RTRSGGNTN
RYRSGGNTI

SEQ ID NO: 7290 - protein, 9 aa, Artificial Sequence
  Description of Artificial Sequence: Synthetic peptide
  Seed: RTRSGGNTN
RYRSGGNTL

SEQ ID NO: 7291 - protein, 9 aa, Artificial Sequence
  Description of Artificial Sequence: Synthetic peptide
  Seed: RTRSGGNTN
RYRSGGNTK

SEQ ID NO: 7292 - protein, 9 aa, Artificial Sequence
  Description of Artificial Sequence: Synthetic peptide
  Seed: RTRSGGNTN
RYRSGGNTM

SEQ ID NO: 7293 - protein, 9 aa, Artificial Sequence
  Description of Artificial Sequence: Synthetic peptide
  Seed: RTRSGGNTN
RYRSGGNTF

SEQ ID NO: 7294 - protein, 9 aa, Artificial Sequence
  Description of Artificial Sequence: Synthetic peptide
  Seed: RTRSGGNTN
RYRSGGNTP

SEQ ID NO: 7295 - protein, 9 aa, Artificial Sequence
  Description of Artificial Sequence: Synthetic peptide
  Seed: RTRSGGNTN
RYRSGGNTS

SEQ ID NO: 7296 - protein, 9 aa, Artificial Sequence
  Description of Artificial Sequence: Synthetic peptide
  Seed: RTRSGGNTN
RYRSGGNTT

SEQ ID NO: 7297 - protein, 9 aa, Artificial Sequence
  Description of Artificial Sequence: Synthetic peptide
  Seed: RTRSGGNTN
RWRSGGNTP

SEQ ID NO: 7298 - protein, 9 aa, Artificial Sequence
  Description of Artificial Sequence: Synthetic peptide
  Seed: RTRSGGNTN
RWRSGGNTF

SEQ ID NO: 7299 - protein, 9 aa, Artificial Sequence
  Description of Artificial Sequence: Synthetic peptide
  Seed: RTRSGGNTN
RWRSGGNTM

SEQ ID NO: 7300 - protein, 9 aa, Artificial Sequence
  Description of Artificial Sequence: Synthetic peptide
  Seed: RTRSGGNTN
RWRSGGNTK

SEQ ID NO: 7301 - protein, 9 aa, Artificial Sequence
  Description of Artificial Sequence: Synthetic peptide
  Seed: RTRSGGNTN
RTRSGGNTL

SEQ ID NO: 7302 - protein, 9 aa, Artificial Sequence
  Description of Artificial Sequence: Synthetic peptide
  Seed: RTRSGGNTN
RTRSGGNTK

SEQ ID NO: 7303 - protein, 9 aa, Artificial Sequence
  Description of Artificial Sequence: Synthetic peptide
  Seed: RTRSGGNTN
RTRSGGNTM

SEQ ID NO: 7304 - protein, 9 aa, Artificial Sequence
  Description of Artificial Sequence: Synthetic peptide
  Seed: RTRSGGNTN
RTRSGGNTF

SEQ ID NO: 7305 - protein, 9 aa, Artificial Sequence
  Description of Artificial Sequence: Synthetic peptide
  Seed: RTRSGGNTN
RTRSGGNTP

SEQ ID NO: 7306 - protein, 9 aa, Artificial Sequence
  Description of Artificial Sequence: Synthetic peptide
  Seed: RTRSGGNTN
RTRSGGNTW

SEQ ID NO: 7307 - protein, 9 aa, Artificial Sequence
  Description of Artificial Sequence: Synthetic peptide
  Seed: RTRSGGNTN
RTRSGGNTY

SEQ ID NO: 7308 - protein, 9 aa, Artificial Sequence
  Description of Artificial Sequence: Synthetic peptide
  Seed: RTRSGGNTN
RTRSGGNTV

SEQ ID NO: 7309 - protein, 9 aa, Artificial Sequence
  Description of Artificial Sequence: Synthetic peptide
  Seed: RTRSGGNTN
RWRSGGNTA

SEQ ID NO: 7310 - protein, 9 aa, Artificial Sequence
  Description of Artificial Sequence: Synthetic peptide
  Seed: RTRSGGNTN
RWRSGGNTR

SEQ ID NO: 7311 - protein, 9 aa, Artificial Sequence
  Description of Artificial Sequence: Synthetic peptide
  Seed: RTRSGGNTN
RWRSGGNTN

SEQ ID NO: 7312 - protein, 9 aa, Artificial Sequence
  Description of Artificial Sequence: Synthetic peptide
  Seed: RTRSGGNTN
RWRSGGNTC

SEQ ID NO: 7313 - protein, 9 aa, Artificial Sequence
  Description of Artificial Sequence: Synthetic peptide
  Seed: RTRSGGNTN
RWRSGGNTQ

SEQ ID NO: 7314 - protein, 9 aa, Artificial Sequence
  Description of Artificial Sequence: Synthetic peptide
  Seed: RTRSGGNTN
RWRSGGNTE

SEQ ID NO: 7315 - protein, 9 aa, Artificial Sequence
  Description of Artificial Sequence: Synthetic peptide
  Seed: RTRSGGNTN
RWRSGGNTG

SEQ ID NO: 7316 - protein, 9 aa, Artificial Sequence
  Description of Artificial Sequence: Synthetic peptide
  Seed: RTRSGGNTN
RWRSGGNTI

SEQ ID NO: 7317 - protein, 9 aa, Artificial Sequence
  Description of Artificial Sequence: Synthetic peptide
  Seed: RTRSGGNTN
RWRSGGNTL

SEQ ID NO: 7318 - protein, 10 aa, Artificial Sequence
  Description of Artificial Sequence: Synthetic peptide
  Seed: RTRSGGNTNQ
RMRSGGNTNL

SEQ ID NO: 7319 - protein, 10 aa, Artificial Sequence
  Description of Artificial Sequence: Synthetic peptide
  Seed: RTRSGGNTNQ
RMRSGGNTNM

SEQ ID NO: 7320 - protein, 9 aa, Artificial Sequence
  Description of Artificial Sequence: Synthetic peptide
  Seed: RTRSGGNTN
RMRSGGNTV

SEQ ID NO: 7321 - protein, 9 aa, Artificial Sequence
  Description of Artificial Sequence: Synthetic peptide
  Seed: RTSDMRAEI
RGSDMRAEY

SEQ ID NO: 7322 - protein, 9 aa, Artificial Sequence
  Description of Artificial Sequence: Synthetic peptide
  Seed: RTSDMRAEI
RQSDMRAEF

SEQ ID NO: 7323 - protein, 9 aa, Artificial Sequence
  Description of Artificial Sequence: Synthetic peptide
  Seed: RTSDMRAEI
RQSDMRAEW

SEQ ID NO: 7324 - protein, 9 aa, Artificial Sequence
  Description of Artificial Sequence: Synthetic peptide
  Seed: RTSDMRAEI
RQSDMRAEY

SEQ ID NO: 7325 - protein, 9 aa, Artificial Sequence
  Description of Artificial Sequence: Synthetic peptide
  Seed: RTSDMRAEI
RQSDMRAEV

SEQ ID NO: 7326 - protein, 9 aa, Artificial Sequence
  Description of Artificial Sequence: Synthetic peptide
  Seed: RTSDMRAEI
RGSDMRAEL

SEQ ID NO: 7327 - protein, 9 aa, Artificial Sequence
  Description of Artificial Sequence: Synthetic peptide
  Seed: RTSDMRAEI
RGSDMRAEK

SEQ ID NO: 7328 - protein, 9 aa, Artificial Sequence
  Description of Artificial Sequence: Synthetic peptide
  Seed: RTSDMRAEI
RGSDMRAEM

SEQ ID NO: 7329 - protein, 9 aa, Artificial Sequence
  Description of Artificial Sequence: Synthetic peptide
  Seed: RTSDMRAEI
RGSDMRAEF

SEQ ID NO: 7330 - protein, 9 aa, Artificial Sequence
  Description of Artificial Sequence: Synthetic peptide
  Seed: RTSDMRAEI
RGSDMRAEW

SEQ ID NO: 7331 - protein, 9 aa, Artificial Sequence
  Description of Artificial Sequence: Synthetic peptide
  Seed: RTSDMRAEI
RISDMRAEA

SEQ ID NO: 7332 - protein, 9 aa, Artificial Sequence
  Description of Artificial Sequence: Synthetic peptide
  Seed: RTSDMRAEI
RLSDMRAEL

SEQ ID NO: 7333 - protein, 9 aa, Artificial Sequence
  Description of Artificial Sequence: Synthetic peptide
  Seed: RTSDMRAEI
RISDMRAEI

SEQ ID NO: 7334 - protein, 9 aa, Artificial Sequence
  Description of Artificial Sequence: Synthetic peptide
  Seed: RTSDMRAEI
RISDMRAEL

SEQ ID NO: 7335 - protein, 9 aa, Artificial Sequence
  Description of Artificial Sequence: Synthetic peptide
  Seed: RTSDMRAEI
RISDMRAEK

SEQ ID NO: 7336 - protein, 9 aa, Artificial Sequence
  Description of Artificial Sequence: Synthetic peptide
  Seed: RTSDMRAEI
RISDMRAEM

SEQ ID NO: 7337 - protein, 9 aa, Artificial Sequence
  Description of Artificial Sequence: Synthetic peptide
  Seed: RTSDMRAEI
RISDMRAEF

SEQ ID NO: 7338 - protein, 9 aa, Artificial Sequence
  Description of Artificial Sequence: Synthetic peptide
  Seed: RTSDMRAEI
RISDMRAEW

SEQ ID NO: 7339 - protein, 9 aa, Artificial Sequence
  Description of Artificial Sequence: Synthetic peptide
  Seed: RTSDMRAEI
RISDMRAEY

SEQ ID NO: 7340 - protein, 9 aa, Artificial Sequence
  Description of Artificial Sequence: Synthetic peptide
  Seed: RTSDMRAEI
RISDMRAEV

SEQ ID NO: 7341 - protein, 9 aa, Artificial Sequence
  Description of Artificial Sequence: Synthetic peptide
  Seed: RTSDMRAEI
RLSDMRAEA

SEQ ID NO: 7342 - protein, 9 aa, Artificial Sequence
  Description of Artificial Sequence: Synthetic peptide
  Seed: RTSDMRAEI
RQSDMRAEM

SEQ ID NO: 7343 - protein, 9 aa, Artificial Sequence
  Description of Artificial Sequence: Synthetic peptide
  Seed: RTSDMRAEI
RQSDMRAEK

SEQ ID NO: 7344 - protein, 9 aa, Artificial Sequence
  Description of Artificial Sequence: Synthetic peptide
  Seed: RTSDMRAEI
RQSDMRAEL

SEQ ID NO: 7345 - protein, 9 aa, Artificial Sequence
  Description of Artificial Sequence: Synthetic peptide
  Seed: RTSDMRAEI
RQSDMRAEI

SEQ ID NO: 7346 - protein, 10 aa, Artificial Sequence
  Description of Artificial Sequence: Synthetic peptide
  Seed: RTRSGGNTNQ
RVRSGGNTNT

SEQ ID NO: 7347 - protein, 10 aa, Artificial Sequence
  Description of Artificial Sequence: Synthetic peptide
  Seed: RTRSGGNTNQ
RVRSGGNTNY

SEQ ID NO: 7348 - protein, 10 aa, Artificial Sequence
  Description of Artificial Sequence: Synthetic peptide
  Seed: RTRSGGNTNQ
RVRSGGNTNV

SEQ ID NO: 7349 - protein, 9 aa, Artificial Sequence
  Description of Artificial Sequence: Synthetic peptide
  Seed: RTSDMRAEI
RASDMRAEA

SEQ ID NO: 7350 - protein, 9 aa, Artificial Sequence
  Description of Artificial Sequence: Synthetic peptide
  Seed: RTSDMRAEI
RASDMRAEH

SEQ ID NO: 7351 - protein, 9 aa, Artificial Sequence
  Description of Artificial Sequence: Synthetic peptide
  Seed: RTSDMRAEI
RASDMRAEI

SEQ ID NO: 7352 - protein, 9 aa, Artificial Sequence
  Description of Artificial Sequence: Synthetic peptide
  Seed: RTSDMRAEI
RASDMRAEL

SEQ ID NO: 7353 - protein, 9 aa, Artificial Sequence
  Description of Artificial Sequence: Synthetic peptide
  Seed: RTSDMRAEI
RASDMRAEK

SEQ ID NO: 7354 - protein, 9 aa, Artificial Sequence
  Description of Artificial Sequence: Synthetic peptide
  Seed: RTSDMRAEI
RASDMRAEM

SEQ ID NO: 7355 - protein, 9 aa, Artificial Sequence
  Description of Artificial Sequence: Synthetic peptide
  Seed: RTSDMRAEI
RASDMRAEF

SEQ ID NO: 7356 - protein, 9 aa, Artificial Sequence
  Description of Artificial Sequence: Synthetic peptide
  Seed: RTSDMRAEI
RASDMRAEW

SEQ ID NO: 7357 - protein, 9 aa, Artificial Sequence
  Description of Artificial Sequence: Synthetic peptide
  Seed: RTSDMRAEI
RASDMRAEY

SEQ ID NO: 7358 - protein, 9 aa, Artificial Sequence
  Description of Artificial Sequence: Synthetic peptide
  Seed: RTSDMRAEI
RASDMRAEV

SEQ ID NO: 7359 - protein, 9 aa, Artificial Sequence
  Description of Artificial Sequence: Synthetic peptide
  Seed: RTSDMRAEI
RNSDMRAEK

SEQ ID NO: 7360 - protein, 9 aa, Artificial Sequence
  Description of Artificial Sequence: Synthetic peptide
  Seed: RTSDMRAEI
RCSDMRAEK

SEQ ID NO: 7361 - protein, 9 aa, Artificial Sequence
  Description of Artificial Sequence: Synthetic peptide
  Seed: RTSDMRAEI
RCSDMRAEM

SEQ ID NO: 7362 - protein, 9 aa, Artificial Sequence
  Description of Artificial Sequence: Synthetic peptide
  Seed: RTSDMRAEI
RCSDMRAEF

SEQ ID NO: 7363 - protein, 9 aa, Artificial Sequence
  Description of Artificial Sequence: Synthetic peptide
  Seed: RTSDMRAEI
RCSDMRAEY

SEQ ID NO: 7364 - protein, 9 aa, Artificial Sequence
  Description of Artificial Sequence: Synthetic peptide
  Seed: RTSDMRAEI
RQSDMRAEA

SEQ ID NO: 7365 - protein, 9 aa, Artificial Sequence
  Description of Artificial Sequence: Synthetic peptide
  Seed: RTSDMRAEI
RLSDMRAEI

SEQ ID NO: 7366 - protein, 9 aa, Artificial Sequence
  Description of Artificial Sequence: Synthetic peptide
  Seed: RTSDMRAEI
RLSDMRAEK

SEQ ID NO: 7367 - protein, 10 aa, Artificial Sequence
  Description of Artificial Sequence: Synthetic peptide
  Seed: RTRSGGNTNQ
RVRSGGNTNP

SEQ ID NO: 7368 - protein, 9 aa, Artificial Sequence
  Description of Artificial Sequence: Synthetic peptide
  Seed: RTSDMRAEI
RTSDMRAEM

SEQ ID NO: 7369 - protein, 9 aa, Artificial Sequence
  Description of Artificial Sequence: Synthetic peptide
  Seed: RTSDMRAEI
RSSDMRAEF

SEQ ID NO: 7370 - protein, 9 aa, Artificial Sequence
  Description of Artificial Sequence: Synthetic peptide
  Seed: RTSDMRAEI
RSSDMRAEW

SEQ ID NO: 7371 - protein, 9 aa, Artificial Sequence
  Description of Artificial Sequence: Synthetic peptide
  Seed: RTSDMRAEI
RSSDMRAEY

SEQ ID NO: 7372 - protein, 9 aa, Artificial Sequence
  Description of Artificial Sequence: Synthetic peptide
  Seed: RTSDMRAEI
RSSDMRAEV

SEQ ID NO: 7373 - protein, 9 aa, Artificial Sequence
  Description of Artificial Sequence: Synthetic peptide
  Seed: RTSDMRAEI
RTSDMRAEA

SEQ ID NO: 7374 - protein, 9 aa, Artificial Sequence
  Description of Artificial Sequence: Synthetic peptide
  Seed: RTSDMRAEI
RTSDMRAER

SEQ ID NO: 7375 - protein, 9 aa, Artificial Sequence
  Description of Artificial Sequence: Synthetic peptide
  Seed: RTSDMRAEI
RTSDMRAEG

SEQ ID NO: 7376 - protein, 9 aa, Artificial Sequence
  Description of Artificial Sequence: Synthetic peptide
  Seed: RTSDMRAEI
RTSDMRAEL

SEQ ID NO: 7377 - protein, 9 aa, Artificial Sequence
  Description of Artificial Sequence: Synthetic peptide
  Seed: RTSDMRAEI
RTSDMRAEK

SEQ ID NO: 7378 - protein, 9 aa, Artificial Sequence
  Description of Artificial Sequence: Synthetic peptide
  Seed: RTSDMRAEI
RTSDMRAEF

SEQ ID NO: 7379 - protein, 9 aa, Artificial Sequence
  Description of Artificial Sequence: Synthetic peptide
  Seed: RTSDMRAEI
RLSDMRAEM

SEQ ID NO: 7380 - protein, 9 aa, Artificial Sequence
  Description of Artificial Sequence: Synthetic peptide
  Seed: RTSDMRAEI
RTSDMRAES

SEQ ID NO: 7381 - protein, 9 aa, Artificial Sequence
  Description of Artificial Sequence: Synthetic peptide
  Seed: RTSDMRAEI
RTSDMRAEW

SEQ ID NO: 7382 - protein, 9 aa, Artificial Sequence
  Description of Artificial Sequence: Synthetic peptide
  Seed: RTSDMRAEI
RTSDMRAEY

SEQ ID NO: 7383 - protein, 9 aa, Artificial Sequence
  Description of Artificial Sequence: Synthetic peptide
  Seed: RTSDMRAEI
RTSDMRAEV

SEQ ID NO: 7384 - protein, 9 aa, Artificial Sequence
  Description of Artificial Sequence: Synthetic peptide
  Seed: RTSDMRAEI
RWSDMRAEK

SEQ ID NO: 7385 - protein, 9 aa, Artificial Sequence
  Description of Artificial Sequence: Synthetic peptide
  Seed: RTSDMRAEI
RYSDMRAEA

SEQ ID NO: 7386 - protein, 9 aa, Artificial Sequence
  Description of Artificial Sequence: Synthetic peptide
  Seed: RTSDMRAEI
RYSDMRAEK

SEQ ID NO: 7387 - protein, 9 aa, Artificial Sequence
  Description of Artificial Sequence: Synthetic peptide
  Seed: RTSDMRAEI
RVSDMRAEA

SEQ ID NO: 7388 - protein, 9 aa, Artificial Sequence
  Description of Artificial Sequence: Synthetic peptide
  Seed: RTSDMRAEI
RVSDMRAER

SEQ ID NO: 7389 - protein, 9 aa, Artificial Sequence
  Description of Artificial Sequence: Synthetic peptide
  Seed: RTSDMRAEI
RSSDMRAEM

SEQ ID NO: 7390 - protein, 9 aa, Artificial Sequence
  Description of Artificial Sequence: Synthetic peptide
  Seed: RTSDMRAEI
RSSDMRAEK

SEQ ID NO: 7391 - protein, 9 aa, Artificial Sequence
  Description of Artificial Sequence: Synthetic peptide
  Seed: RTSDMRAEI
RSSDMRAEL

SEQ ID NO: 7392 - protein, 9 aa, Artificial Sequence
  Description of Artificial Sequence: Synthetic peptide
  Seed: RTSDMRAEI
RSSDMRAEI

SEQ ID NO: 7393 - protein, 9 aa, Artificial Sequence
  Description of Artificial Sequence: Synthetic peptide
  Seed: RTSDMRAEI
RLSDMRAEF

SEQ ID NO: 7394 - protein, 9 aa, Artificial Sequence
  Description of Artificial Sequence: Synthetic peptide
  Seed: RTSDMRAEI
RLSDMRAEW

SEQ ID NO: 7395 - protein, 9 aa, Artificial Sequence
  Description of Artificial Sequence: Synthetic peptide
  Seed: RTSDMRAEI
RLSDMRAEY

SEQ ID NO: 7396 - protein, 9 aa, Artificial Sequence
  Description of Artificial Sequence: Synthetic peptide
  Seed: RTSDMRAEI
RLSDMRAEV

SEQ ID NO: 7397 - protein, 9 aa, Artificial Sequence
  Description of Artificial Sequence: Synthetic peptide
  Seed: RTSDMRAEI
RMSDMRAEA

SEQ ID NO: 7398 - protein, 9 aa, Artificial Sequence
  Description of Artificial Sequence: Synthetic peptide
  Seed: RTSDMRAEI
RMSDMRAER

SEQ ID NO: 7399 - protein, 9 aa, Artificial Sequence
  Description of Artificial Sequence: Synthetic peptide
  Seed: RTSDMRAEI
RMSDMRAEI

SEQ ID NO: 7400 - protein, 9 aa, Artificial Sequence
  Description of Artificial Sequence: Synthetic peptide
  Seed: RTSDMRAEI
RMSDMRAEL

SEQ ID NO: 7401 - protein, 9 aa, Artificial Sequence
  Description of Artificial Sequence: Synthetic peptide
  Seed: RTSDMRAEI
RMSDMRAEK

SEQ ID NO: 7402 - protein, 9 aa, Artificial Sequence
  Description of Artificial Sequence: Synthetic peptide
  Seed: RTSDMRAEI
RMSDMRAEM

SEQ ID NO: 7403 - protein, 9 aa, Artificial Sequence
  Description of Artificial Sequence: Synthetic peptide
  Seed: RTSDMRAEI
RMSDMRAEF

SEQ ID NO: 7404 - protein, 9 aa, Artificial Sequence
  Description of Artificial Sequence: Synthetic peptide
  Seed: RTSDMRAEI
RMSDMRAEW

SEQ ID NO: 7405 - protein, 9 aa, Artificial Sequence
  Description of Artificial Sequence: Synthetic peptide
  Seed: RTSDMRAEI
RMSDMRAEY

SEQ ID NO: 7406 - protein, 9 aa, Artificial Sequence
  Description of Artificial Sequence: Synthetic peptide
  Seed: RTSDMRAEI
RMSDMRAEV

SEQ ID NO: 7407 - protein, 9 aa, Artificial Sequence
  Description of Artificial Sequence: Synthetic peptide
  Seed: RTSDMRAEI
RFSDMRAEA

SEQ ID NO: 7408 - protein, 9 aa, Artificial Sequence
  Description of Artificial Sequence: Synthetic peptide
  Seed: RTSDMRAEI
RFSDMRAEK

SEQ ID NO: 7409 - protein, 9 aa, Artificial Sequence
  Description of Artificial Sequence: Synthetic peptide
  Seed: RTSDMRAEI
RFSDMRAEW

SEQ ID NO: 7410 - protein, 9 aa, Artificial Sequence
  Description of Artificial Sequence: Synthetic peptide
  Seed: RTSDMRAEI
RSSDMRAEA

SEQ ID NO: 7411 - protein, 9 aa, Artificial Sequence
  Description of Artificial Sequence: Synthetic peptide
  Seed: RTSDMRAEI
RSSDMRAER

SEQ ID NO: 7412 - protein, 10 aa, Artificial Sequence
  Description of Artificial Sequence: Synthetic peptide
  Seed: RTRSGGNTNQ
RVRSGGNTNS

SEQ ID NO: 7413 - protein, 10 aa, Artificial Sequence
  Description of Artificial Sequence: Synthetic peptide
  Seed: RTRSGGNTNQ
RVRSGGNTNF

SEQ ID NO: 7414 - protein, 10 aa, Artificial Sequence
  Description of Artificial Sequence: Synthetic peptide
  Seed: RTRSGGNTNQ
RMRSGGNTNF

SEQ ID NO: 7415 - protein, 10 aa, Artificial Sequence
  Description of Artificial Sequence: Synthetic peptide
  Seed: RTRSGGNTNQ
RSRSGGNTNM

SEQ ID NO: 7416 - protein, 10 aa, Artificial Sequence
  Description of Artificial Sequence: Synthetic peptide
  Seed: RTRSGGNTNQ
RSRSGGNTNN

SEQ ID NO: 7417 - protein, 10 aa, Artificial Sequence
  Description of Artificial Sequence: Synthetic peptide
  Seed: RTRSGGNTNQ
RSRSGGNTNC

SEQ ID NO: 7418 - protein, 10 aa, Artificial Sequence
  Description of Artificial Sequence: Synthetic peptide
  Seed: RTRSGGNTNQ
RSRSGGNTNQ

SEQ ID NO: 7419 - protein, 10 aa, Artificial Sequence
  Description of Artificial Sequence: Synthetic peptide
  Seed: RTRSGGNTNQ
RSRSGGNTNE

SEQ ID NO: 7420 - protein, 10 aa, Artificial Sequence
  Description of Artificial Sequence: Synthetic peptide
  Seed: RTRSGGNTNQ
RSRSGGNTNG

SEQ ID NO: 7421 - protein, 10 aa, Artificial Sequence
  Description of Artificial Sequence: Synthetic peptide
  Seed: RTRSGGNTNQ
RSRSGGNTNH

SEQ ID NO: 7422 - protein, 10 aa, Artificial Sequence
  Description of Artificial Sequence: Synthetic peptide
  Seed: RTRSGGNTNQ
RSRSGGNTNI

SEQ ID NO: 7423 - protein, 10 aa, Artificial Sequence
  Description of Artificial Sequence: Synthetic peptide
  Seed: RTRSGGNTNQ
RSRSGGNTNL

SEQ ID NO: 7424 - protein, 10 aa, Artificial Sequence
  Description of Artificial Sequence: Synthetic peptide
  Seed: RTRSGGNTNQ
RSRSGGNTNK

SEQ ID NO: 7425 - protein, 10 aa, Artificial Sequence
  Description of Artificial Sequence: Synthetic peptide
  Seed: RTRSGGNTNQ
RSRSGGNTNF

SEQ ID NO: 7426 - protein, 10 aa, Artificial Sequence
  Description of Artificial Sequence: Synthetic peptide
  Seed: RTRSGGNTNQ
RTRSGGNTNG

SEQ ID NO: 7427 - protein, 10 aa, Artificial Sequence
  Description of Artificial Sequence: Synthetic peptide
  Seed: RTRSGGNTNQ
RSRSGGNTNP

SEQ ID NO: 7428 - protein, 10 aa, Artificial Sequence
  Description of Artificial Sequence: Synthetic peptide
  Seed: RTRSGGNTNQ
RSRSGGNTNS

SEQ ID NO: 7429 - protein, 10 aa, Artificial Sequence
  Description of Artificial Sequence: Synthetic peptide
  Seed: RTRSGGNTNQ
RSRSGGNTNT

SEQ ID NO: 7430 - protein, 10 aa, Artificial Sequence
  Description of Artificial Sequence: Synthetic peptide
  Seed: RTRSGGNTNQ
RSRSGGNTNY

SEQ ID NO: 7431 - protein, 10 aa, Artificial Sequence
  Description of Artificial Sequence: Synthetic peptide
  Seed: RTRSGGNTNQ
RSRSGGNTNV

SEQ ID NO: 7432 - protein, 10 aa, Artificial Sequence
  Description of Artificial Sequence: Synthetic peptide
  Seed: RTRSGGNTNQ
RTRSGGNTNA

SEQ ID NO: 7433 - protein, 10 aa, Artificial Sequence
  Description of Artificial Sequence: Synthetic peptide
  Seed: RTRSGGNTNQ
RTRSGGNTNR

SEQ ID NO: 7434 - protein, 10 aa, Artificial Sequence
  Description of Artificial Sequence: Synthetic peptide
  Seed: RTRSGGNTNQ
RTRSGGNTNN

SEQ ID NO: 7435 - protein, 10 aa, Artificial Sequence
  Description of Artificial Sequence: Synthetic peptide
  Seed: RTRSGGNTNQ
RTRSGGNTNC

SEQ ID NO: 7436 - protein, 10 aa, Artificial Sequence
  Description of Artificial Sequence: Synthetic peptide
  Seed: RTRSGGNTNQ
RSRSGGNTNR

SEQ ID NO: 7437 - protein, 10 aa, Artificial Sequence
  Description of Artificial Sequence: Synthetic peptide
  Seed: RTRSGGNTNQ
RSRSGGNTNA

SEQ ID NO: 7438 - protein, 10 aa, Artificial Sequence
  Description of Artificial Sequence: Synthetic peptide
  Seed: RTRSGGNTNQ
RFRSGGNTNV

SEQ ID NO: 7439 - protein, 10 aa, Artificial Sequence
  Description of Artificial Sequence: Synthetic peptide
  Seed: RTRSGGNTNQ
RFRSGGNTNY

SEQ ID NO: 7440 - protein, 10 aa, Artificial Sequence
  Description of Artificial Sequence: Synthetic peptide
  Seed: RTRSGGNTNQ
RMRSGGNTNP

SEQ ID NO: 7441 - protein, 10 aa, Artificial Sequence
  Description of Artificial Sequence: Synthetic peptide
  Seed: RTRSGGNTNQ
RMRSGGNTNS

SEQ ID NO: 7442 - protein, 10 aa, Artificial Sequence
  Description of Artificial Sequence: Synthetic peptide
  Seed: RTRSGGNTNQ
RMRSGGNTNT

SEQ ID NO: 7443 - protein, 10 aa, Artificial Sequence
  Description of Artificial Sequence: Synthetic peptide
  Seed: RTRSGGNTNQ
RMRSGGNTNY

SEQ ID NO: 7444 - protein, 10 aa, Artificial Sequence
  Description of Artificial Sequence: Synthetic peptide
  Seed: RTRSGGNTNQ
RMRSGGNTNV

SEQ ID NO: 7445 - protein, 10 aa, Artificial Sequence
  Description of Artificial Sequence: Synthetic peptide
  Seed: RTRSGGNTNQ
RFRSGGNTNA

SEQ ID NO: 7446 - protein, 10 aa, Artificial Sequence
  Description of Artificial Sequence: Synthetic peptide
  Seed: RTRSGGNTNQ
RFRSGGNTNR

SEQ ID NO: 7447 - protein, 10 aa, Artificial Sequence
  Description of Artificial Sequence: Synthetic peptide
  Seed: RTRSGGNTNQ
RFRSGGNTNN

SEQ ID NO: 7448 - protein, 10 aa, Artificial Sequence
  Description of Artificial Sequence: Synthetic peptide
  Seed: RTRSGGNTNQ
RFRSGGNTNC

SEQ ID NO: 7449 - protein, 10 aa, Artificial Sequence
  Description of Artificial Sequence: Synthetic peptide
  Seed: RTRSGGNTNQ
RFRSGGNTNQ

SEQ ID NO: 7450 - protein, 10 aa, Artificial Sequence
  Description of Artificial Sequence: Synthetic peptide
  Seed: RTRSGGNTNQ
RFRSGGNTNG

SEQ ID NO: 7451 - protein, 10 aa, Artificial Sequence
  Description of Artificial Sequence: Synthetic peptide
  Seed: RTRSGGNTNQ
RFRSGGNTNI

SEQ ID NO: 7452 - protein, 10 aa, Artificial Sequence
  Description of Artificial Sequence: Synthetic peptide
  Seed: RTRSGGNTNQ
RFRSGGNTNL

SEQ ID NO: 7453 - protein, 10 aa, Artificial Sequence
  Description of Artificial Sequence: Synthetic peptide
  Seed: RTRSGGNTNQ
RFRSGGNTNK

SEQ ID NO: 7454 - protein, 10 aa, Artificial Sequence
  Description of Artificial Sequence: Synthetic peptide
  Seed: RTRSGGNTNQ
RFRSGGNTNM

SEQ ID NO: 7455 - protein, 10 aa, Artificial Sequence
  Description of Artificial Sequence: Synthetic peptide
  Seed: RTRSGGNTNQ
RFRSGGNTNF

SEQ ID NO: 7456 - protein, 10 aa, Artificial Sequence
  Description of Artificial Sequence: Synthetic peptide
  Seed: RTRSGGNTNQ
RFRSGGNTNP

SEQ ID NO: 7457 - protein, 10 aa, Artificial Sequence
  Description of Artificial Sequence: Synthetic peptide
  Seed: RTRSGGNTNQ
RFRSGGNTNS

SEQ ID NO: 7458 - protein, 10 aa, Artificial Sequence
  Description of Artificial Sequence: Synthetic peptide
  Seed: RTRSGGNTNQ
RFRSGGNTNT

SEQ ID NO: 7459 - protein, 10 aa, Artificial Sequence
  Description of Artificial Sequence: Synthetic peptide
  Seed: RTRSGGNTNQ
RTRSGGNTNE

SEQ ID NO: 7460 - protein, 10 aa, Artificial Sequence
  Description of Artificial Sequence: Synthetic peptide
  Seed: RTRSGGNTNQ
RTRSGGNTNH

SEQ ID NO: 7461 - protein, 10 aa, Artificial Sequence
  Description of Artificial Sequence: Synthetic peptide
  Seed: RTRSGGNTNQ
RVRSGGNTNM

SEQ ID NO: 7462 - protein, 10 aa, Artificial Sequence
  Description of Artificial Sequence: Synthetic peptide
  Seed: RTRSGGNTNQ
RVRSGGNTNA

SEQ ID NO: 7463 - protein, 10 aa, Artificial Sequence
  Description of Artificial Sequence: Synthetic peptide
  Seed: RTRSGGNTNQ
RYRSGGNTNL

SEQ ID NO: 7464 - protein, 10 aa, Artificial Sequence
  Description of Artificial Sequence: Synthetic peptide
  Seed: RTRSGGNTNQ
RYRSGGNTNK

SEQ ID NO: 7465 - protein, 10 aa, Artificial Sequence
  Description of Artificial Sequence: Synthetic peptide
  Seed: RTRSGGNTNQ
RYRSGGNTNM

SEQ ID NO: 7466 - protein, 10 aa, Artificial Sequence
  Description of Artificial Sequence: Synthetic peptide
  Seed: RTRSGGNTNQ
RYRSGGNTNF

SEQ ID NO: 7467 - protein, 10 aa, Artificial Sequence
  Description of Artificial Sequence: Synthetic peptide
  Seed: RTRSGGNTNQ
RYRSGGNTNP

SEQ ID NO: 7468 - protein, 10 aa, Artificial Sequence
  Description of Artificial Sequence: Synthetic peptide
  Seed: RTRSGGNTNQ
RYRSGGNTNS

SEQ ID NO: 7469 - protein, 10 aa, Artificial Sequence
  Description of Artificial Sequence: Synthetic peptide
  Seed: RTRSGGNTNQ
RYRSGGNTNT

SEQ ID NO: 7470 - protein, 10 aa, Artificial Sequence
  Description of Artificial Sequence: Synthetic peptide
  Seed: RTRSGGNTNQ
RYRSGGNTNY

SEQ ID NO: 7471 - protein, 10 aa, Artificial Sequence
  Description of Artificial Sequence: Synthetic peptide
  Seed: RTRSGGNTNQ
RYRSGGNTNV

SEQ ID NO: 7472 - protein, 10 aa, Artificial Sequence
  Description of Artificial Sequence: Synthetic peptide
  Seed: RTRSGGNTNQ
RVRSGGNTNR

SEQ ID NO: 7473 - protein, 10 aa, Artificial Sequence
  Description of Artificial Sequence: Synthetic peptide
  Seed: RTRSGGNTNQ
RTRSGGNTNI

SEQ ID NO: 7474 - protein, 10 aa, Artificial Sequence
  Description of Artificial Sequence: Synthetic peptide
  Seed: RTRSGGNTNQ
RVRSGGNTNN

SEQ ID NO: 7475 - protein, 10 aa, Artificial Sequence
  Description of Artificial Sequence: Synthetic peptide
  Seed: RTRSGGNTNQ
RVRSGGNTNC

SEQ ID NO: 7476 - protein, 10 aa, Artificial Sequence
  Description of Artificial Sequence: Synthetic peptide
  Seed: RTRSGGNTNQ
RVRSGGNTNQ

SEQ ID NO: 7477 - protein, 10 aa, Artificial Sequence
  Description of Artificial Sequence: Synthetic peptide
  Seed: RTRSGGNTNQ
RVRSGGNTNE

SEQ ID NO: 7478 - protein, 10 aa, Artificial Sequence
  Description of Artificial Sequence: Synthetic peptide
  Seed: RTRSGGNTNQ
RVRSGGNTNG

SEQ ID NO: 7479 - protein, 10 aa, Artificial Sequence
  Description of Artificial Sequence: Synthetic peptide
  Seed: RTRSGGNTNQ
RVRSGGNTNH

SEQ ID NO: 7480 - protein, 10 aa, Artificial Sequence
  Description of Artificial Sequence: Synthetic peptide
  Seed: RTRSGGNTNQ
RVRSGGNTNI

SEQ ID NO: 7481 - protein, 10 aa, Artificial Sequence
  Description of Artificial Sequence: Synthetic peptide
  Seed: RTRSGGNTNQ
RVRSGGNTNL

SEQ ID NO: 7482 - protein, 10 aa, Artificial Sequence
  Description of Artificial Sequence: Synthetic peptide
  Seed: RTRSGGNTNQ
RVRSGGNTNK

SEQ ID NO: 7483 - protein, 10 aa, Artificial Sequence
  Description of Artificial Sequence: Synthetic peptide
  Seed: RTRSGGNTNQ
RYRSGGNTNI

SEQ ID NO: 7484 - protein, 10 aa, Artificial Sequence
  Description of Artificial Sequence: Synthetic peptide
  Seed: RTRSGGNTNQ
RYRSGGNTNG

SEQ ID NO: 7485 - protein, 10 aa, Artificial Sequence
  Description of Artificial Sequence: Synthetic peptide
  Seed: RTRSGGNTNQ
RYRSGGNTNE

SEQ ID NO: 7486 - protein, 10 aa, Artificial Sequence
  Description of Artificial Sequence: Synthetic peptide
  Seed: RTRSGGNTNQ
RYRSGGNTNQ

SEQ ID NO: 7487 - protein, 10 aa, Artificial Sequence
  Description of Artificial Sequence: Synthetic peptide
  Seed: RTRSGGNTNQ
RTRSGGNTNL

SEQ ID NO: 7488 - protein, 10 aa, Artificial Sequence
  Description of Artificial Sequence: Synthetic peptide
  Seed: RTRSGGNTNQ
RTRSGGNTNM

SEQ ID NO: 7489 - protein, 10 aa, Artificial Sequence
  Description of Artificial Sequence: Synthetic peptide
  Seed: RTRSGGNTNQ
RTRSGGNTNF

SEQ ID NO: 7490 - protein, 10 aa, Artificial Sequence
  Description of Artificial Sequence: Synthetic peptide
  Seed: RTRSGGNTNQ
RTRSGGNTNP

SEQ ID NO: 7491 - protein, 10 aa, Artificial Sequence
  Description of Artificial Sequence: Synthetic peptide
  Seed: RTRSGGNTNQ
RTRSGGNTNS

SEQ ID NO: 7492 - protein, 10 aa, Artificial Sequence
  Description of Artificial Sequence: Synthetic peptide
  Seed: RTRSGGNTNQ
RTRSGGNTNT

SEQ ID NO: 7493 - protein, 10 aa, Artificial Sequence
  Description of Artificial Sequence: Synthetic peptide
  Seed: RTRSGGNTNQ
RTRSGGNTNY

SEQ ID NO: 7494 - protein, 10 aa, Artificial Sequence
  Description of Artificial Sequence: Synthetic peptide
  Seed: RTRSGGNTNQ
RTRSGGNTNV

SEQ ID NO: 7495 - protein, 10 aa, Artificial Sequence
  Description of Artificial Sequence: Synthetic peptide
  Seed: RTRSGGNTNQ
RWRSGGNTNA

SEQ ID NO: 7496 - protein, 10 aa, Artificial Sequence
  Description of Artificial Sequence: Synthetic peptide
  Seed: RTRSGGNTNQ
RWRSGGNTNI

SEQ ID NO: 7497 - protein, 10 aa, Artificial Sequence
  Description of Artificial Sequence: Synthetic peptide
  Seed: RTRSGGNTNQ
RWRSGGNTNL

SEQ ID NO: 7498 - protein, 10 aa, Artificial Sequence
  Description of Artificial Sequence: Synthetic peptide
  Seed: RTRSGGNTNQ
RWRSGGNTNK

SEQ ID NO: 7499 - protein, 10 aa, Artificial Sequence
  Description of Artificial Sequence: Synthetic peptide
  Seed: RTRSGGNTNQ
RWRSGGNTNM

SEQ ID NO: 7500 - protein, 10 aa, Artificial Sequence
  Description of Artificial Sequence: Synthetic peptide
  Seed: RTRSGGNTNQ
RWRSGGNTNV

SEQ ID NO: 7501 - protein, 10 aa, Artificial Sequence
  Description of Artificial Sequence: Synthetic peptide
  Seed: RTRSGGNTNQ
RYRSGGNTNA

SEQ ID NO: 7502 - protein, 10 aa, Artificial Sequence
  Description of Artificial Sequence: Synthetic peptide
  Seed: RTRSGGNTNQ
RYRSGGNTNR

SEQ ID NO: 7503 - protein, 10 aa, Artificial Sequence
  Description of Artificial Sequence: Synthetic peptide
  Seed: RTRSGGNTNQ
RYRSGGNTNN

SEQ ID NO: 7504 - protein, 10 aa, Artificial Sequence
  Description of Artificial Sequence: Synthetic peptide
  Seed: RTRSGGNTNQ
RYRSGGNTNC

SEQ ID NO: 7505 - protein, 9 aa, Artificial Sequence
  Description of Artificial Sequence: Synthetic peptide
  Seed: RTRSGGNTN
RFRSGGNTA

SEQ ID NO: 7506 - protein, 9 aa, Artificial Sequence
  Description of Artificial Sequence: Synthetic peptide
  Seed: RTRSGGNTN
RMRSGGNTY

SEQ ID NO: 7507 - protein, 9 aa, Artificial Sequence
  Description of Artificial Sequence: Synthetic peptide
  Seed: RTRIAYERM
RYRIAYERV

SEQ ID NO: 7508 - protein, 10 aa, Artificial Sequence
  Description of Artificial Sequence: Synthetic peptide
  Seed: RTRIAYERMC
RSRIAYERME

SEQ ID NO: 7509 - protein, 10 aa, Artificial Sequence
  Description of Artificial Sequence: Synthetic peptide
  Seed: RTRIAYERMC
RFRIAYERMS

SEQ ID NO: 7510 - protein, 10 aa, Artificial Sequence
  Description of Artificial Sequence: Synthetic peptide
  Seed: RTRIAYERMC
RFRIAYERMT

SEQ ID NO: 7511 - protein, 10 aa, Artificial Sequence
  Description of Artificial Sequence: Synthetic peptide
  Seed: RTRIAYERMC
RFRIAYERMY

SEQ ID NO: 7512 - protein, 10 aa, Artificial Sequence
  Description of Artificial Sequence: Synthetic peptide
  Seed: RTRIAYERMC
RFRIAYERMV

SEQ ID NO: 7513 - protein, 10 aa, Artificial Sequence
  Description of Artificial Sequence: Synthetic peptide
  Seed: RTRIAYERMC
RSRIAYERMA

SEQ ID NO: 7514 - protein, 10 aa, Artificial Sequence
  Description of Artificial Sequence: Synthetic peptide
  Seed: RTRIAYERMC
RSRIAYERMR

SEQ ID NO: 7515 - protein, 10 aa, Artificial Sequence
  Description of Artificial Sequence: Synthetic peptide
  Seed: RTRIAYERMC
RSRIAYERMN

SEQ ID NO: 7516 - protein, 10 aa, Artificial Sequence
  Description of Artificial Sequence: Synthetic peptide
  Seed: RTRIAYERMC
RSRIAYERMC

SEQ ID NO: 7517 - protein, 10 aa, Artificial Sequence
  Description of Artificial Sequence: Synthetic peptide
  Seed: RTRIAYERMC
RSRIAYERMQ

SEQ ID NO: 7518 - protein, 10 aa, Artificial Sequence
  Description of Artificial Sequence: Synthetic peptide
  Seed: RTRIAYERMC
RSRIAYERMG

SEQ ID NO: 7519 - protein, 10 aa, Artificial Sequence
  Description of Artificial Sequence: Synthetic peptide
  Seed: RTRIAYERMC
RSRIAYERMV

SEQ ID NO: 7520 - protein, 10 aa, Artificial Sequence
  Description of Artificial Sequence: Synthetic peptide
  Seed: RTRIAYERMC
RSRIAYERMH

SEQ ID NO: 7521 - protein, 10 aa, Artificial Sequence
  Description of Artificial Sequence: Synthetic peptide
  Seed: RTRIAYERMC
RSRIAYERMI

SEQ ID NO: 7522 - protein, 10 aa, Artificial Sequence
  Description of Artificial Sequence: Synthetic peptide
  Seed: RTRIAYERMC
RSRIAYERML

SEQ ID NO: 7523 - protein, 10 aa, Artificial Sequence
  Description of Artificial Sequence: Synthetic peptide
  Seed: RTRIAYERMC
RSRIAYERMK

SEQ ID NO: 7524 - protein, 10 aa, Artificial Sequence
  Description of Artificial Sequence: Synthetic peptide
  Seed: RTRIAYERMC
RSRIAYERMM

SEQ ID NO: 7525 - protein, 10 aa, Artificial Sequence
  Description of Artificial Sequence: Synthetic peptide
  Seed: RTRIAYERMC
RSRIAYERMF

SEQ ID NO: 7526 - protein, 10 aa, Artificial Sequence
  Description of Artificial Sequence: Synthetic peptide
  Seed: RTRIAYERMC
RSRIAYERMP

SEQ ID NO: 7527 - protein, 10 aa, Artificial Sequence
  Description of Artificial Sequence: Synthetic peptide
  Seed: RTRIAYERMC
RSRIAYERMS

SEQ ID NO: 7528 - protein, 10 aa, Artificial Sequence
  Description of Artificial Sequence: Synthetic peptide
  Seed: RTRIAYERMC
RSRIAYERMT

SEQ ID NO: 7529 - protein, 10 aa, Artificial Sequence
  Description of Artificial Sequence: Synthetic peptide
  Seed: RTRIAYERMC
RFRIAYERMP

SEQ ID NO: 7530 - protein, 10 aa, Artificial Sequence
  Description of Artificial Sequence: Synthetic peptide
  Seed: RTRIAYERMC
RFRIAYERMF

SEQ ID NO: 7531 - protein, 10 aa, Artificial Sequence
  Description of Artificial Sequence: Synthetic peptide
  Seed: RTRIAYERMC
RFRIAYERMM

SEQ ID NO: 7532 - protein, 10 aa, Artificial Sequence
  Description of Artificial Sequence: Synthetic peptide
  Seed: RTRIAYERMC
RFRIAYERMK

SEQ ID NO: 7533 - protein, 10 aa, Artificial Sequence
  Description of Artificial Sequence: Synthetic peptide
  Seed: RTRIAYERMC
RMRIAYERMH

SEQ ID NO: 7534 - protein, 10 aa, Artificial Sequence
  Description of Artificial Sequence: Synthetic peptide
  Seed: RTRIAYERMC
RMRIAYERMI

SEQ ID NO: 7535 - protein, 10 aa, Artificial Sequence
  Description of Artificial Sequence: Synthetic peptide
  Seed: RTRIAYERMC
RMRIAYERML

SEQ ID NO: 7536 - protein, 10 aa, Artificial Sequence
  Description of Artificial Sequence: Synthetic peptide
  Seed: RTRIAYERMC
RMRIAYERMK

SEQ ID NO: 7537 - protein, 10 aa, Artificial Sequence
  Description of Artificial Sequence: Synthetic peptide
  Seed: RTRIAYERMC
RMRIAYERMM

SEQ ID NO: 7538 - protein, 10 aa, Artificial Sequence
  Description of Artificial Sequence: Synthetic peptide
  Seed: RTRIAYERMC
RMRIAYERMF

SEQ ID NO: 7539 - protein, 10 aa, Artificial Sequence
  Description of Artificial Sequence: Synthetic peptide
  Seed: RTRIAYERMC
RMRIAYERMP

SEQ ID NO: 7540 - protein, 10 aa, Artificial Sequence
  Description of Artificial Sequence: Synthetic peptide
  Seed: RTRIAYERMC
RMRIAYERMS

SEQ ID NO: 7541 - protein, 10 aa, Artificial Sequence
  Description of Artificial Sequence: Synthetic peptide
  Seed: RTRIAYERMC
RMRIAYERMT

SEQ ID NO: 7542 - protein, 10 aa, Artificial Sequence
  Description of Artificial Sequence: Synthetic peptide
  Seed: RTRIAYERMC
RMRIAYERMY

SEQ ID NO: 7543 - protein, 10 aa, Artificial Sequence
  Description of Artificial Sequence: Synthetic peptide
  Seed: RTRIAYERMC
RMRIAYERMV

SEQ ID NO: 7544 - protein, 10 aa, Artificial Sequence
  Description of Artificial Sequence: Synthetic peptide
  Seed: RTRIAYERMC
RFRIAYERMA

SEQ ID NO: 7545 - protein, 10 aa, Artificial Sequence
  Description of Artificial Sequence: Synthetic peptide
  Seed: RTRIAYERMC
RFRIAYERMR

SEQ ID NO: 7546 - protein, 10 aa, Artificial Sequence
  Description of Artificial Sequence: Synthetic peptide
  Seed: RTRIAYERMC
RFRIAYERMC

SEQ ID NO: 7547 - protein, 10 aa, Artificial Sequence
  Description of Artificial Sequence: Synthetic peptide
  Seed: RTRIAYERMC
RFRIAYERMQ

SEQ ID NO: 7548 - protein, 10 aa, Artificial Sequence
  Description of Artificial Sequence: Synthetic peptide
  Seed: RTRIAYERMC
RFRIAYERME

SEQ ID NO: 7549 - protein, 10 aa, Artificial Sequence
  Description of Artificial Sequence: Synthetic peptide
  Seed: RTRIAYERMC
RFRIAYERMG

SEQ ID NO: 7550 - protein, 10 aa, Artificial Sequence
  Description of Artificial Sequence: Synthetic peptide
  Seed: RTRIAYERMC
RFRIAYERMI

SEQ ID NO: 7551 - protein, 10 aa, Artificial Sequence
  Description of Artificial Sequence: Synthetic peptide
  Seed: RTRIAYERMC
RFRIAYERML

SEQ ID NO: 7552 - protein, 10 aa, Artificial Sequence
  Description of Artificial Sequence: Synthetic peptide
  Seed: RTRIAYERMC
RSRIAYERMY

SEQ ID NO: 7553 - protein, 10 aa, Artificial Sequence
  Description of Artificial Sequence: Synthetic peptide
  Seed: RTRIAYERMC
RTRIAYERMA

SEQ ID NO: 7554 - protein, 10 aa, Artificial Sequence
  Description of Artificial Sequence: Synthetic peptide
  Seed: RTRIAYERMC
RMRIAYERME

SEQ ID NO: 7555 - protein, 10 aa, Artificial Sequence
  Description of Artificial Sequence: Synthetic peptide
  Seed: RTRIAYERMC
RYRIAYERMI

SEQ ID NO: 7556 - protein, 10 aa, Artificial Sequence
  Description of Artificial Sequence: Synthetic peptide
  Seed: RTRIAYERMC
RWRIAYERMM

SEQ ID NO: 7557 - protein, 10 aa, Artificial Sequence
  Description of Artificial Sequence: Synthetic peptide
  Seed: RTRIAYERMC
RWRIAYERMS

SEQ ID NO: 7558 - protein, 10 aa, Artificial Sequence
  Description of Artificial Sequence: Synthetic peptide
  Seed: RTRIAYERMC
RWRIAYERMV

SEQ ID NO: 7559 - protein, 10 aa, Artificial Sequence
  Description of Artificial Sequence: Synthetic peptide
  Seed: RTRIAYERMC
RYRIAYERMA

SEQ ID NO: 7560 - protein, 10 aa, Artificial Sequence
  Description of Artificial Sequence: Synthetic peptide
  Seed: RTRIAYERMC
RYRIAYERMR

SEQ ID NO: 7561 - protein, 10 aa, Artificial Sequence
  Description of Artificial Sequence: Synthetic peptide
  Seed: RTRIAYERMC
RYRIAYERMC

SEQ ID NO: 7562 - protein, 10 aa, Artificial Sequence
  Description of Artificial Sequence: Synthetic peptide
  Seed: RTRIAYERMC
RYRIAYERMQ

SEQ ID NO: 7563 - protein, 10 aa, Artificial Sequence
  Description of Artificial Sequence: Synthetic peptide
  Seed: RTRIAYERMC
RYRIAYERME

SEQ ID NO: 7564 - protein, 10 aa, Artificial Sequence
  Description of Artificial Sequence: Synthetic peptide
  Seed: RTRIAYERMC
RYRIAYERMG

SEQ ID NO: 7565 - protein, 10 aa, Artificial Sequence
  Description of Artificial Sequence: Synthetic peptide
  Seed: RTRIAYERMC
RYRIAYERML

SEQ ID NO: 7566 - protein, 10 aa, Artificial Sequence
  Description of Artificial Sequence: Synthetic peptide
  Seed: RTRIAYERMC
RTRIAYERMR

SEQ ID NO: 7567 - protein, 10 aa, Artificial Sequence
  Description of Artificial Sequence: Synthetic peptide
  Seed: RTRIAYERMC
RYRIAYERMK

SEQ ID NO: 7568 - protein, 10 aa, Artificial Sequence
  Description of Artificial Sequence: Synthetic peptide
  Seed: RTRIAYERMC
RYRIAYERMM

SEQ ID NO: 7569 - protein, 10 aa, Artificial Sequence
  Description of Artificial Sequence: Synthetic peptide
  Seed: RTRIAYERMC
RYRIAYERMF

SEQ ID NO: 7570 - protein, 10 aa, Artificial Sequence
  Description of Artificial Sequence: Synthetic peptide
  Seed: RTRIAYERMC
RYRIAYERMP

SEQ ID NO: 7571 - protein, 10 aa, Artificial Sequence
  Description of Artificial Sequence: Synthetic peptide
  Seed: RTRIAYERMC
RYRIAYERMS

SEQ ID NO: 7572 - protein, 10 aa, Artificial Sequence
  Description of Artificial Sequence: Synthetic peptide
  Seed: RTRIAYERMC
RYRIAYERMT

SEQ ID NO: 7573 - protein, 10 aa, Artificial Sequence
  Description of Artificial Sequence: Synthetic peptide
  Seed: RTRIAYERMC
RYRIAYERMY

SEQ ID NO: 7574 - protein, 10 aa, Artificial Sequence
  Description of Artificial Sequence: Synthetic peptide
  Seed: RTRIAYERMC
RYRIAYERMV

SEQ ID NO: 7575 - protein, 10 aa, Artificial Sequence
  Description of Artificial Sequence: Synthetic peptide
  Seed: RTRIAYERMC
RVRIAYERMA

SEQ ID NO: 7576 - protein, 10 aa, Artificial Sequence
  Description of Artificial Sequence: Synthetic peptide
  Seed: RTRIAYERMC
RWRIAYERMK

SEQ ID NO: 7577 - protein, 10 aa, Artificial Sequence
  Description of Artificial Sequence: Synthetic peptide
  Seed: RTRIAYERMC
RWRIAYERML

SEQ ID NO: 7578 - protein, 10 aa, Artificial Sequence
  Description of Artificial Sequence: Synthetic peptide
  Seed: RTRIAYERMC
RWRIAYERMI

SEQ ID NO: 7579 - protein, 10 aa, Artificial Sequence
  Description of Artificial Sequence: Synthetic peptide
  Seed: RTRIAYERMC
RWRIAYERMG

SEQ ID NO: 7580 - protein, 10 aa, Artificial Sequence
  Description of Artificial Sequence: Synthetic peptide
  Seed: RTRIAYERMC
RTRIAYERMN

SEQ ID NO: 7581 - protein, 10 aa, Artificial Sequence
  Description of Artificial Sequence: Synthetic peptide
  Seed: RTRIAYERMC
RTRIAYERMD

SEQ ID NO: 7582 - protein, 10 aa, Artificial Sequence
  Description of Artificial Sequence: Synthetic peptide
  Seed: RTRIAYERMC
RTRIAYERMQ

SEQ ID NO: 7583 - protein, 10 aa, Artificial Sequence
  Description of Artificial Sequence: Synthetic peptide
  Seed: RTRIAYERMC
RTRIAYERME

SEQ ID NO: 7584 - protein, 10 aa, Artificial Sequence
  Description of Artificial Sequence: Synthetic peptide
  Seed: RTRIAYERMC
RTRIAYERMG

SEQ ID NO: 7585 - protein, 10 aa, Artificial Sequence
  Description of Artificial Sequence: Synthetic peptide
  Seed: RTRIAYERMC
RTRIAYERMH

SEQ ID NO: 7586 - protein, 10 aa, Artificial Sequence
  Description of Artificial Sequence: Synthetic peptide
  Seed: RTRIAYERMC
RTRIAYERMI

SEQ ID NO: 7587 - protein, 10 aa, Artificial Sequence
  Description of Artificial Sequence: Synthetic peptide
  Seed: RTRIAYERMC
RTRIAYERML

SEQ ID NO: 7588 - protein, 10 aa, Artificial Sequence
  Description of Artificial Sequence: Synthetic peptide
  Seed: RTRIAYERMC
RTRIAYERMK

SEQ ID NO: 7589 - protein, 10 aa, Artificial Sequence
  Description of Artificial Sequence: Synthetic peptide
  Seed: RTRIAYERMC
RTRIAYERMM

SEQ ID NO: 7590 - protein, 10 aa, Artificial Sequence
  Description of Artificial Sequence: Synthetic peptide
  Seed: RTRIAYERMC
RTRIAYERMF

SEQ ID NO: 7591 - protein, 10 aa, Artificial Sequence
  Description of Artificial Sequence: Synthetic peptide
  Seed: RTRIAYERMC
RTRIAYERMP

SEQ ID NO: 7592 - protein, 10 aa, Artificial Sequence
  Description of Artificial Sequence: Synthetic peptide
  Seed: RTRIAYERMC
RTRIAYERMS

SEQ ID NO: 7593 - protein, 10 aa, Artificial Sequence
  Description of Artificial Sequence: Synthetic peptide
  Seed: RTRIAYERMC
RTRIAYERMT

SEQ ID NO: 7594 - protein, 10 aa, Artificial Sequence
  Description of Artificial Sequence: Synthetic peptide
  Seed: RTRIAYERMC
RTRIAYERMW

SEQ ID NO: 7595 - protein, 10 aa, Artificial Sequence
  Description of Artificial Sequence: Synthetic peptide
  Seed: RTRIAYERMC
RTRIAYERMY

SEQ ID NO: 7596 - protein, 10 aa, Artificial Sequence
  Description of Artificial Sequence: Synthetic peptide
  Seed: RTRIAYERMC
RTRIAYERMV

SEQ ID NO: 7597 - protein, 10 aa, Artificial Sequence
  Description of Artificial Sequence: Synthetic peptide
  Seed: RTRIAYERMC
RWRIAYERMA

SEQ ID NO: 7598 - protein, 10 aa, Artificial Sequence
  Description of Artificial Sequence: Synthetic peptide
  Seed: RTRIAYERMC
RWRIAYERMR

SEQ ID NO: 7599 - protein, 10 aa, Artificial Sequence
  Description of Artificial Sequence: Synthetic peptide
  Seed: RTRIAYERMC
RMRIAYERMG

SEQ ID NO: 7600 - protein, 10 aa, Artificial Sequence
  Description of Artificial Sequence: Synthetic peptide
  Seed: RTRIAYERMC
RMRIAYERMQ

SEQ ID NO: 7601 - protein, 10 aa, Artificial Sequence
  Description of Artificial Sequence: Synthetic peptide
  Seed: RTRIAYERMC
RVRIAYERMN

SEQ ID NO: 7602 - protein, 10 aa, Artificial Sequence
  Description of Artificial Sequence: Synthetic peptide
  Seed: RTRIAYERMC
RARIAYERMY

SEQ ID NO: 7603 - protein, 10 aa, Artificial Sequence
  Description of Artificial Sequence: Synthetic peptide
  Seed: RTRIAYERMC
RARIAYERMG

SEQ ID NO: 7604 - protein, 10 aa, Artificial Sequence
  Description of Artificial Sequence: Synthetic peptide
  Seed: RTRIAYERMC
RARIAYERMI

SEQ ID NO: 7605 - protein, 10 aa, Artificial Sequence
  Description of Artificial Sequence: Synthetic peptide
  Seed: RTRIAYERMC
RARIAYERML

SEQ ID NO: 7606 - protein, 10 aa, Artificial Sequence
  Description of Artificial Sequence: Synthetic peptide
  Seed: RTRIAYERMC
RARIAYERMK

SEQ ID NO: 7607 - protein, 10 aa, Artificial Sequence
  Description of Artificial Sequence: Synthetic peptide
  Seed: RTRIAYERMC
RARIAYERMM

SEQ ID NO: 7608 - protein, 10 aa, Artificial Sequence
  Description of Artificial Sequence: Synthetic peptide
  Seed: RTRIAYERMC
RARIAYERMF

SEQ ID NO: 7609 - protein, 10 aa, Artificial Sequence
  Description of Artificial Sequence: Synthetic peptide
  Seed: RTRIAYERMC
RARIAYERMP

SEQ ID NO: 7610 - protein, 10 aa, Artificial Sequence
  Description of Artificial Sequence: Synthetic peptide
  Seed: RTRIAYERMC
RARIAYERMS

SEQ ID NO: 7611 - protein, 10 aa, Artificial Sequence
  Description of Artificial Sequence: Synthetic peptide
  Seed: RTRIAYERMC
RARIAYERMT

SEQ ID NO: 7612 - protein, 10 aa, Artificial Sequence
  Description of Artificial Sequence: Synthetic peptide
  Seed: RTRIAYERMC
RARIAYERMV

SEQ ID NO: 7613 - protein, 10 aa, Artificial Sequence
  Description of Artificial Sequence: Synthetic peptide
  Seed: RTRIAYERMC
RQRIAYERMM

SEQ ID NO: 7614 - protein, 10 aa, Artificial Sequence
  Description of Artificial Sequence: Synthetic peptide
  Seed: RTRIAYERMC
RNRIAYERMA

SEQ ID NO: 7615 - protein, 10 aa, Artificial Sequence
  Description of Artificial Sequence: Synthetic peptide
  Seed: RTRIAYERMC
RNRIAYERMI

SEQ ID NO: 7616 - protein, 10 aa, Artificial Sequence
  Description of Artificial Sequence: Synthetic peptide
  Seed: RTRIAYERMC
RNRIAYERMK

SEQ ID NO: 7617 - protein, 10 aa, Artificial Sequence
  Description of Artificial Sequence: Synthetic peptide
  Seed: RTRIAYERMC
RNRIAYERMV

SEQ ID NO: 7618 - protein, 10 aa, Artificial Sequence
  Description of Artificial Sequence: Synthetic peptide
  Seed: RTRIAYERMC
RCRIAYERMK

SEQ ID NO: 7619 - protein, 10 aa, Artificial Sequence
  Description of Artificial Sequence: Synthetic peptide
  Seed: RTRIAYERMC
RQRIAYERMA

SEQ ID NO: 7620 - protein, 10 aa, Artificial Sequence
  Description of Artificial Sequence: Synthetic peptide
  Seed: RTRIAYERMC
RQRIAYERMR

SEQ ID NO: 7621 - protein, 10 aa, Artificial Sequence
  Description of Artificial Sequence: Synthetic peptide
  Seed: RTRIAYERMC
RQRIAYERMI

SEQ ID NO: 7622 - protein, 10 aa, Artificial Sequence
  Description of Artificial Sequence: Synthetic peptide
  Seed: RTRIAYERMC
RQRIAYERML

SEQ ID NO: 7623 - protein, 10 aa, Artificial Sequence
  Description of Artificial Sequence: Synthetic peptide
  Seed: RTRIAYERMC
RARIAYERMQ

SEQ ID NO: 7624 - protein, 10 aa, Artificial Sequence
  Description of Artificial Sequence: Synthetic peptide
  Seed: RTRIAYERMC
RARIAYERMR

SEQ ID NO: 7625 - protein, 10 aa, Artificial Sequence
  Description of Artificial Sequence: Synthetic peptide
  Seed: RTRIAYERMC
RARIAYERMA

SEQ ID NO: 7626 - protein, 9 aa, Artificial Sequence
  Description of Artificial Sequence: Synthetic peptide
  Seed: RTRIAYERM
RVRIAYERV

SEQ ID NO: 7627 - protein, 9 aa, Artificial Sequence
  Description of Artificial Sequence: Synthetic peptide
  Seed: RTRIAYERM
RVRIAYERA

SEQ ID NO: 7628 - protein, 9 aa, Artificial Sequence
  Description of Artificial Sequence: Synthetic peptide
  Seed: RTRIAYERM
RVRIAYERR

SEQ ID NO: 7629 - protein, 9 aa, Artificial Sequence
  Description of Artificial Sequence: Synthetic peptide
  Seed: RTRIAYERM
RVRIAYERN

SEQ ID NO: 7630 - protein, 9 aa, Artificial Sequence
  Description of Artificial Sequence: Synthetic peptide
  Seed: RTRIAYERM
RVRIAYERD

SEQ ID NO: 7631 - protein, 9 aa, Artificial Sequence
  Description of Artificial Sequence: Synthetic peptide
  Seed: RTRIAYERM
RVRIAYERC

SEQ ID NO: 7632 - protein, 9 aa, Artificial Sequence
  Description of Artificial Sequence: Synthetic peptide
  Seed: RTRIAYERM
RVRIAYERQ

SEQ ID NO: 7633 - protein, 9 aa, Artificial Sequence
  Description of Artificial Sequence: Synthetic peptide
  Seed: RTRIAYERM
RVRIAYERE

SEQ ID NO: 7634 - protein, 9 aa, Artificial Sequence
  Description of Artificial Sequence: Synthetic peptide
  Seed: RTRIAYERM
RVRIAYERG

SEQ ID NO: 7635 - protein, 9 aa, Artificial Sequence
  Description of Artificial Sequence: Synthetic peptide
  Seed: RTRIAYERM
RVRIAYERH

SEQ ID NO: 7636 - protein, 9 aa, Artificial Sequence
  Description of Artificial Sequence: Synthetic peptide
  Seed: RTRIAYERM
RVRIAYERI

SEQ ID NO: 7637 - protein, 9 aa, Artificial Sequence
  Description of Artificial Sequence: Synthetic peptide
  Seed: RTRIAYERM
RVRIAYERL

SEQ ID NO: 7638 - protein, 9 aa, Artificial Sequence
  Description of Artificial Sequence: Synthetic peptide
  Seed: RTRIAYERM
RVRIAYERK

SEQ ID NO: 7639 - protein, 9 aa, Artificial Sequence
  Description of Artificial Sequence: Synthetic peptide
  Seed: RTRIAYERM
RVRIAYERM

SEQ ID NO: 7640 - protein, 9 aa, Artificial Sequence
  Description of Artificial Sequence: Synthetic peptide
  Seed: RTRIAYERM
RVRIAYERF

SEQ ID NO: 7641 - protein, 9 aa, Artificial Sequence
  Description of Artificial Sequence: Synthetic peptide
  Seed: RTRIAYERM
RVRIAYERP

SEQ ID NO: 7642 - protein, 9 aa, Artificial Sequence
  Description of Artificial Sequence: Synthetic peptide
  Seed: RTRIAYERM
RVRIAYERS

SEQ ID NO: 7643 - protein, 9 aa, Artificial Sequence
  Description of Artificial Sequence: Synthetic peptide
  Seed: RTRIAYERM
RVRIAYERT

SEQ ID NO: 7644 - protein, 9 aa, Artificial Sequence
  Description of Artificial Sequence: Synthetic peptide
  Seed: RTRIAYERM
RVRIAYERW

SEQ ID NO: 7645 - protein, 9 aa, Artificial Sequence
  Description of Artificial Sequence: Synthetic peptide
  Seed: RTRIAYERM
RVRIAYERY

SEQ ID NO: 7646 - protein, 10 aa, Artificial Sequence
  Description of Artificial Sequence: Synthetic peptide
  Seed: RTRIAYERMC
RQRIAYERMK

SEQ ID NO: 7647 - protein, 10 aa, Artificial Sequence
  Description of Artificial Sequence: Synthetic peptide
  Seed: RTRIAYERMC
RQRIAYERMS

SEQ ID NO: 7648 - protein, 10 aa, Artificial Sequence
  Description of Artificial Sequence: Synthetic peptide
  Seed: RTRIAYERMC
RMRIAYERMC

SEQ ID NO: 7649 - protein, 10 aa, Artificial Sequence
  Description of Artificial Sequence: Synthetic peptide
  Seed: RTRIAYERMC
RLRIAYERMK

SEQ ID NO: 7650 - protein, 10 aa, Artificial Sequence
  Description of Artificial Sequence: Synthetic peptide
  Seed: RTRIAYERMC
RIRIAYERMS

SEQ ID NO: 7651 - protein, 10 aa, Artificial Sequence
  Description of Artificial Sequence: Synthetic peptide
  Seed: RTRIAYERMC
RIRIAYERMT

SEQ ID NO: 7652 - protein, 10 aa, Artificial Sequence
  Description of Artificial Sequence: Synthetic peptide
  Seed: RTRIAYERMC
RIRIAYERMY

SEQ ID NO: 7653 - protein, 10 aa, Artificial Sequence
  Description of Artificial Sequence: Synthetic peptide
  Seed: RTRIAYERMC
RIRIAYERMV

SEQ ID NO: 7654 - protein, 10 aa, Artificial Sequence
  Description of Artificial Sequence: Synthetic peptide
  Seed: RTRIAYERMC
RLRIAYERMA

SEQ ID NO: 7655 - protein, 10 aa, Artificial Sequence
  Description of Artificial Sequence: Synthetic peptide
  Seed: RTRIAYERMC
RLRIAYERMR

SEQ ID NO: 7656 - protein, 10 aa, Artificial Sequence
  Description of Artificial Sequence: Synthetic peptide
  Seed: RTRIAYERMC
RLRIAYERMG

SEQ ID NO: 7657 - protein, 10 aa, Artificial Sequence
  Description of Artificial Sequence: Synthetic peptide
  Seed: RTRIAYERMC
RLRIAYERMI

SEQ ID NO: 7658 - protein, 10 aa, Artificial Sequence
  Description of Artificial Sequence: Synthetic peptide
  Seed: RTRIAYERMC
RLRIAYERML

SEQ ID NO: 7659 - protein, 10 aa, Artificial Sequence
  Description of Artificial Sequence: Synthetic peptide
  Seed: RTRIAYERMC
RLRIAYERMM

SEQ ID NO: 7660 - protein, 10 aa, Artificial Sequence
  Description of Artificial Sequence: Synthetic peptide
  Seed: RTRIAYERMC
RQRIAYERMY

SEQ ID NO: 7661 - protein, 10 aa, Artificial Sequence
  Description of Artificial Sequence: Synthetic peptide
  Seed: RTRIAYERMC
RLRIAYERMF

SEQ ID NO: 7662 - protein, 10 aa, Artificial Sequence
  Description of Artificial Sequence: Synthetic peptide
  Seed: RTRIAYERMC
RLRIAYERMP

SEQ ID NO: 7663 - protein, 10 aa, Artificial Sequence
  Description of Artificial Sequence: Synthetic peptide
  Seed: RTRIAYERMC
RLRIAYERMS

SEQ ID NO: 7664 - protein, 10 aa, Artificial Sequence
  Description of Artificial Sequence: Synthetic peptide
  Seed: RTRIAYERMC
RLRIAYERMT

SEQ ID NO: 7665 - protein, 10 aa, Artificial Sequence
  Description of Artificial Sequence: Synthetic peptide
  Seed: RTRIAYERMC
RLRIAYERMY

SEQ ID NO: 7666 - protein, 10 aa, Artificial Sequence
  Description of Artificial Sequence: Synthetic peptide
  Seed: RTRIAYERMC
RLRIAYERMV

SEQ ID NO: 7667 - protein, 10 aa, Artificial Sequence
  Description of Artificial Sequence: Synthetic peptide
  Seed: RTRIAYERMC
RMRIAYERMA

SEQ ID NO: 7668 - protein, 10 aa, Artificial Sequence
  Description of Artificial Sequence: Synthetic peptide
  Seed: RTRIAYERMC
RMRIAYERMR

SEQ ID NO: 7669 - protein, 10 aa, Artificial Sequence
  Description of Artificial Sequence: Synthetic peptide
  Seed: RTRIAYERMC
RMRIAYERMN

SEQ ID NO: 7670 - protein, 10 aa, Artificial Sequence
  Description of Artificial Sequence: Synthetic peptide
  Seed: RTRIAYERMC
RIRIAYERMP

SEQ ID NO: 7671 - protein, 10 aa, Artificial Sequence
  Description of Artificial Sequence: Synthetic peptide
  Seed: RTRIAYERMC
RIRIAYERMF

SEQ ID NO: 7672 - protein, 10 aa, Artificial Sequence
  Description of Artificial Sequence: Synthetic peptide
  Seed: RTRIAYERMC
RIRIAYERMM

SEQ ID NO: 7673 - protein, 10 aa, Artificial Sequence
  Description of Artificial Sequence: Synthetic peptide
  Seed: RTRIAYERMC
RIRIAYERMK

SEQ ID NO: 7674 - protein, 10 aa, Artificial Sequence
  Description of Artificial Sequence: Synthetic peptide
  Seed: RTRIAYERMC
RQRIAYERMV

SEQ ID NO: 7675 - protein, 10 aa, Artificial Sequence
  Description of Artificial Sequence: Synthetic peptide
  Seed: RTRIAYERMC
RGRIAYERMA

SEQ ID NO: 7676 - protein, 10 aa, Artificial Sequence
  Description of Artificial Sequence: Synthetic peptide
  Seed: RTRIAYERMC
RGRIAYERMR

SEQ ID NO: 7677 - protein, 10 aa, Artificial Sequence
  Description of Artificial Sequence: Synthetic peptide
  Seed: RTRIAYERMC
RGRIAYERMI

SEQ ID NO: 7678 - protein, 10 aa, Artificial Sequence
  Description of Artificial Sequence: Synthetic peptide
  Seed: RTRIAYERMC
RGRIAYERML

SEQ ID NO: 7679 - protein, 10 aa, Artificial Sequence
  Description of Artificial Sequence: Synthetic peptide
  Seed: RTRIAYERMC
RGRIAYERMK

SEQ ID NO: 7680 - protein, 10 aa, Artificial Sequence
  Description of Artificial Sequence: Synthetic peptide
  Seed: RTRIAYERMC
RGRIAYERMM

SEQ ID NO: 7681 - protein, 10 aa, Artificial Sequence
  Description of Artificial Sequence: Synthetic peptide
  Seed: RTRIAYERMC
RGRIAYERMY

SEQ ID NO: 7682 - protein, 10 aa, Artificial Sequence
  Description of Artificial Sequence: Synthetic peptide
  Seed: RTRIAYERMC
RGRIAYERMV

SEQ ID NO: 7683 - protein, 10 aa, Artificial Sequence
  Description of Artificial Sequence: Synthetic peptide
  Seed: RTRIAYERMC
RHRIAYERMK

SEQ ID NO: 7684 - protein, 10 aa, Artificial Sequence
  Description of Artificial Sequence: Synthetic peptide
  Seed: RTRIAYERMC
RIRIAYERMA

SEQ ID NO: 7685 - protein, 10 aa, Artificial Sequence
  Description of Artificial Sequence: Synthetic peptide
  Seed: RTRIAYERMC
RIRIAYERMR

SEQ ID NO: 7686 - protein, 10 aa, Artificial Sequence
  Description of Artificial Sequence: Synthetic peptide
  Seed: RTRIAYERMC
RIRIAYERMN

SEQ ID NO: 7687 - protein, 10 aa, Artificial Sequence
  Description of Artificial Sequence: Synthetic peptide
  Seed: RTRIAYERMC
RIRIAYERMC

SEQ ID NO: 7688 - protein, 10 aa, Artificial Sequence
  Description of Artificial Sequence: Synthetic peptide
  Seed: RTRIAYERMC
RIRIAYERMQ

SEQ ID NO: 7689 - protein, 10 aa, Artificial Sequence
  Description of Artificial Sequence: Synthetic peptide
  Seed: RTRIAYERMC
RIRIAYERME

SEQ ID NO: 7690 - protein, 10 aa, Artificial Sequence
  Description of Artificial Sequence: Synthetic peptide
  Seed: RTRIAYERMC
RIRIAYERMG

SEQ ID NO: 7691 - protein, 10 aa, Artificial Sequence
  Description of Artificial Sequence: Synthetic peptide
  Seed: RTRIAYERMC
RIRIAYERMI

SEQ ID NO: 7692 - protein, 10 aa, Artificial Sequence
  Description of Artificial Sequence: Synthetic peptide
  Seed: RTRIAYERMC
RIRIAYERML

SEQ ID NO: 7693 - protein, 10 aa, Artificial Sequence
  Description of Artificial Sequence: Synthetic peptide
  Seed: RTRIAYERMC
RVRIAYERMR

SEQ ID NO: 7694 - protein, 10 aa, Artificial Sequence
  Description of Artificial Sequence: Synthetic peptide
  Seed: RTRIAYERMC
RVRIAYERMC

SEQ ID NO: 7695 - protein, 9 aa, Artificial Sequence
  Description of Artificial Sequence: Synthetic peptide
  Seed: RTRSGGNTN
RMRSGGNTW

SEQ ID NO: 7696 - protein, 9 aa, Artificial Sequence
  Description of Artificial Sequence: Synthetic peptide
  Seed: RTRSGGNTN
RHRSGGNTK

SEQ ID NO: 7697 - protein, 9 aa, Artificial Sequence
  Description of Artificial Sequence: Synthetic peptide
  Seed: RTRSGGNTN
RGRSGGNTL

SEQ ID NO: 7698 - protein, 9 aa, Artificial Sequence
  Description of Artificial Sequence: Synthetic peptide
  Seed: RTRSGGNTN
RGRSGGNTK

SEQ ID NO: 7699 - protein, 9 aa, Artificial Sequence
  Description of Artificial Sequence: Synthetic peptide
  Seed: RTRSGGNTN
RGRSGGNTM

SEQ ID NO: 7700 - protein, 9 aa, Artificial Sequence
  Description of Artificial Sequence: Synthetic peptide
  Seed: RTRSGGNTN
RGRSGGNTF

SEQ ID NO: 7701 - protein, 9 aa, Artificial Sequence
  Description of Artificial Sequence: Synthetic peptide
  Seed: RTRSGGNTN
RGRSGGNTS

SEQ ID NO: 7702 - protein, 9 aa, Artificial Sequence
  Description of Artificial Sequence: Synthetic peptide
  Seed: RTRSGGNTN
RGRSGGNTT

SEQ ID NO: 7703 - protein, 9 aa, Artificial Sequence
  Description of Artificial Sequence: Synthetic peptide
  Seed: RTRSGGNTN
RGRSGGNTY

SEQ ID NO: 7704 - protein, 9 aa, Artificial Sequence
  Description of Artificial Sequence: Synthetic peptide
  Seed: RTRSGGNTN
RGRSGGNTV

SEQ ID NO: 7705 - protein, 9 aa, Artificial Sequence
  Description of Artificial Sequence: Synthetic peptide
  Seed: RTRSGGNTN
RHRSGGNTR

SEQ ID NO: 7706 - protein, 9 aa, Artificial Sequence
  Description of Artificial Sequence: Synthetic peptide
  Seed: RTRSGGNTN
RIRSGGNTA

SEQ ID NO: 7707 - protein, 9 aa, Artificial Sequence
  Description of Artificial Sequence: Synthetic peptide
  Seed: RTRSGGNTN
RIRSGGNTK

SEQ ID NO: 7708 - protein, 9 aa, Artificial Sequence
  Description of Artificial Sequence: Synthetic peptide
  Seed: RTRSGGNTN
RIRSGGNTR

SEQ ID NO: 7709 - protein, 9 aa, Artificial Sequence
  Description of Artificial Sequence: Synthetic peptide
  Seed: RTRSGGNTN
RIRSGGNTN

SEQ ID NO: 7710 - protein, 9 aa, Artificial Sequence
  Description of Artificial Sequence: Synthetic peptide
  Seed: RTRSGGNTN
RIRSGGNTD

SEQ ID NO: 7711 - protein, 9 aa, Artificial Sequence
  Description of Artificial Sequence: Synthetic peptide
  Seed: RTRSGGNTN
RIRSGGNTC

SEQ ID NO: 7712 - protein, 9 aa, Artificial Sequence
  Description of Artificial Sequence: Synthetic peptide
  Seed: RTRSGGNTN
RIRSGGNTQ

SEQ ID NO: 7713 - protein, 9 aa, Artificial Sequence
  Description of Artificial Sequence: Synthetic peptide
  Seed: RTRSGGNTN
RIRSGGNTE

SEQ ID NO: 7714 - protein, 9 aa, Artificial Sequence
  Description of Artificial Sequence: Synthetic peptide
  Seed: RTRSGGNTN
RIRSGGNTG

SEQ ID NO: 7715 - protein, 9 aa, Artificial Sequence
  Description of Artificial Sequence: Synthetic peptide
  Seed: RTRSGGNTN
RIRSGGNTH

SEQ ID NO: 7716 - protein, 9 aa, Artificial Sequence
  Description of Artificial Sequence: Synthetic peptide
  Seed: RTRSGGNTN
RIRSGGNTI

SEQ ID NO: 7717 - protein, 9 aa, Artificial Sequence
  Description of Artificial Sequence: Synthetic peptide
  Seed: RTRSGGNTN
RGRSGGNTI

SEQ ID NO: 7718 - protein, 9 aa, Artificial Sequence
  Description of Artificial Sequence: Synthetic peptide
  Seed: RTRSGGNTN
RGRSGGNTH

SEQ ID NO: 7719 - protein, 9 aa, Artificial Sequence
  Description of Artificial Sequence: Synthetic peptide
  Seed: RTRSGGNTN
RGRSGGNTG

SEQ ID NO: 7720 - protein, 9 aa, Artificial Sequence
  Description of Artificial Sequence: Synthetic peptide
  Seed: RTRSGGNTN
RGRSGGNTQ

SEQ ID NO: 7721 - protein, 9 aa, Artificial Sequence
  Description of Artificial Sequence: Synthetic peptide
  Seed: RTRSGGNTN
RQRSGGNTR

SEQ ID NO: 7722 - protein, 9 aa, Artificial Sequence
  Description of Artificial Sequence: Synthetic peptide
  Seed: RTRSGGNTN
RQRSGGNTN

SEQ ID NO: 7723 - protein, 9 aa, Artificial Sequence
  Description of Artificial Sequence: Synthetic peptide
  Seed: RTRSGGNTN
RQRSGGNTC

SEQ ID NO: 7724 - protein, 9 aa, Artificial Sequence
  Description of Artificial Sequence: Synthetic peptide
  Seed: RTRSGGNTN
RQRSGGNTQ

SEQ ID NO: 7725 - protein, 9 aa, Artificial Sequence
  Description of Artificial Sequence: Synthetic peptide
  Seed: RTRSGGNTN
RQRSGGNTE

SEQ ID NO: 7726 - protein, 9 aa, Artificial Sequence
  Description of Artificial Sequence: Synthetic peptide
  Seed: RTRSGGNTN
RQRSGGNTG

SEQ ID NO: 7727 - protein, 9 aa, Artificial Sequence
  Description of Artificial Sequence: Synthetic peptide
  Seed: RTRSGGNTN
RQRSGGNTI

SEQ ID NO: 7728 - protein, 9 aa, Artificial Sequence
  Description of Artificial Sequence: Synthetic peptide
  Seed: RTRSGGNTN
RQRSGGNTL

SEQ ID NO: 7729 - protein, 9 aa, Artificial Sequence
  Description of Artificial Sequence: Synthetic peptide
  Seed: RTRSGGNTN
RQRSGGNTK

SEQ ID NO: 7730 - protein, 9 aa, Artificial Sequence
  Description of Artificial Sequence: Synthetic peptide
  Seed: RTRSGGNTN
RQRSGGNTM

SEQ ID NO: 7731 - protein, 9 aa, Artificial Sequence
  Description of Artificial Sequence: Synthetic peptide
  Seed: RTRSGGNTN
RQRSGGNTF

SEQ ID NO: 7732 - protein, 9 aa, Artificial Sequence
  Description of Artificial Sequence: Synthetic peptide
  Seed: RTRSGGNTN
RQRSGGNTP

SEQ ID NO: 7733 - protein, 9 aa, Artificial Sequence
  Description of Artificial Sequence: Synthetic peptide
  Seed: RTRSGGNTN
RQRSGGNTS

SEQ ID NO: 7734 - protein, 9 aa, Artificial Sequence
  Description of Artificial Sequence: Synthetic peptide
  Seed: RTRSGGNTN
RQRSGGNTT

SEQ ID NO: 7735 - protein, 9 aa, Artificial Sequence
  Description of Artificial Sequence: Synthetic peptide
  Seed: RTRSGGNTN
RQRSGGNTY

SEQ ID NO: 7736 - protein, 9 aa, Artificial Sequence
  Description of Artificial Sequence: Synthetic peptide
  Seed: RTRSGGNTN
RQRSGGNTV

SEQ ID NO: 7737 - protein, 9 aa, Artificial Sequence
  Description of Artificial Sequence: Synthetic peptide
  Seed: RTRSGGNTN
RERSGGNTK

SEQ ID NO: 7738 - protein, 9 aa, Artificial Sequence
  Description of Artificial Sequence: Synthetic peptide
  Seed: RTRSGGNTN
RGRSGGNTA

SEQ ID NO: 7739 - protein, 9 aa, Artificial Sequence
  Description of Artificial Sequence: Synthetic peptide
  Seed: RTRSGGNTN
RGRSGGNTR

SEQ ID NO: 7740 - protein, 9 aa, Artificial Sequence
  Description of Artificial Sequence: Synthetic peptide
  Seed: RTRSGGNTN
RIRSGGNTL

SEQ ID NO: 7741 - protein, 9 aa, Artificial Sequence
  Description of Artificial Sequence: Synthetic peptide
  Seed: RTRSGGNTN
RIRSGGNTM

SEQ ID NO: 7742 - protein, 9 aa, Artificial Sequence
  Description of Artificial Sequence: Synthetic peptide
  Seed: RTRSGGNTN
RCRSGGNTV

SEQ ID NO: 7743 - protein, 9 aa, Artificial Sequence
  Description of Artificial Sequence: Synthetic peptide
  Seed: RTRSGGNTN
RMRSGGNTE

SEQ ID NO: 7744 - protein, 9 aa, Artificial Sequence
  Description of Artificial Sequence: Synthetic peptide
  Seed: RTRSGGNTN
RLRSGGNTY

SEQ ID NO: 7745 - protein, 9 aa, Artificial Sequence
  Description of Artificial Sequence: Synthetic peptide
  Seed: RTRSGGNTN
RLRSGGNTV

SEQ ID NO: 7746 - protein, 9 aa, Artificial Sequence
  Description of Artificial Sequence: Synthetic peptide
  Seed: RTRSGGNTN
RKRSGGNTK

SEQ ID NO: 7747 - protein, 9 aa, Artificial Sequence
  Description of Artificial Sequence: Synthetic peptide
  Seed: RTRSGGNTN
RMRSGGNTA

SEQ ID NO: 7748 - protein, 9 aa, Artificial Sequence
  Description of Artificial Sequence: Synthetic peptide
  Seed: RTRSGGNTN
RMRSGGNTR

SEQ ID NO: 7749 - protein, 9 aa, Artificial Sequence
  Description of Artificial Sequence: Synthetic peptide
  Seed: RTRSGGNTN
RMRSGGNTN

SEQ ID NO: 7750 - protein, 9 aa, Artificial Sequence
  Description of Artificial Sequence: Synthetic peptide
  Seed: RTRSGGNTN
RMRSGGNTD

SEQ ID NO: 7751 - protein, 9 aa, Artificial Sequence
  Description of Artificial Sequence: Synthetic peptide
  Seed: RTRSGGNTN
RMRSGGNTC

SEQ ID NO: 7752 - protein, 9 aa, Artificial Sequence
  Description of Artificial Sequence: Synthetic peptide
  Seed: RTRSGGNTN
RMRSGGNTQ

SEQ ID NO: 7753 - protein, 9 aa, Artificial Sequence
  Description of Artificial Sequence: Synthetic peptide
  Seed: RTRSGGNTN
RMRSGGNTG

SEQ ID NO: 7754 - protein, 9 aa, Artificial Sequence
  Description of Artificial Sequence: Synthetic peptide
  Seed: RTRSGGNTN
RIRSGGNTF

SEQ ID NO: 7755 - protein, 9 aa, Artificial Sequence
  Description of Artificial Sequence: Synthetic peptide
  Seed: RTRSGGNTN
RMRSGGNTH

SEQ ID NO: 7756 - protein, 9 aa, Artificial Sequence
  Description of Artificial Sequence: Synthetic peptide
  Seed: RTRSGGNTN
RMRSGGNTI

SEQ ID NO: 7757 - protein, 9 aa, Artificial Sequence
  Description of Artificial Sequence: Synthetic peptide
  Seed: RTRSGGNTN
RMRSGGNTL

SEQ ID NO: 7758 - protein, 9 aa, Artificial Sequence
  Description of Artificial Sequence: Synthetic peptide
  Seed: RTRSGGNTN
RMRSGGNTK

SEQ ID NO: 7759 - protein, 9 aa, Artificial Sequence
  Description of Artificial Sequence: Synthetic peptide
  Seed: RTRSGGNTN
RMRSGGNTM

SEQ ID NO: 7760 - protein, 9 aa, Artificial Sequence
  Description of Artificial Sequence: Synthetic peptide
  Seed: RTRSGGNTN
RMRSGGNTF

SEQ ID NO: 7761 - protein, 9 aa, Artificial Sequence
  Description of Artificial Sequence: Synthetic peptide
  Seed: RTRSGGNTN
RMRSGGNTP

SEQ ID NO: 7762 - protein, 9 aa, Artificial Sequence
  Description of Artificial Sequence: Synthetic peptide
  Seed: RTRSGGNTN
RMRSGGNTS

SEQ ID NO: 7763 - protein, 9 aa, Artificial Sequence
  Description of Artificial Sequence: Synthetic peptide
  Seed: RTRSGGNTN
RMRSGGNTT

SEQ ID NO: 7764 - protein, 9 aa, Artificial Sequence
  Description of Artificial Sequence: Synthetic peptide
  Seed: RTRSGGNTN
RLRSGGNTW

SEQ ID NO: 7765 - protein, 9 aa, Artificial Sequence
  Description of Artificial Sequence: Synthetic peptide
  Seed: RTRSGGNTN
RLRSGGNTT

SEQ ID NO: 7766 - protein, 9 aa, Artificial Sequence
  Description of Artificial Sequence: Synthetic peptide
  Seed: RTRSGGNTN
RLRSGGNTS

SEQ ID NO: 7767 - protein, 9 aa, Artificial Sequence
  Description of Artificial Sequence: Synthetic peptide
  Seed: RTRSGGNTN
RLRSGGNTP

SEQ ID NO: 7768 - protein, 9 aa, Artificial Sequence
  Description of Artificial Sequence: Synthetic peptide
  Seed: RTRSGGNTN
RIRSGGNTP

SEQ ID NO: 7769 - protein, 9 aa, Artificial Sequence
  Description of Artificial Sequence: Synthetic peptide
  Seed: RTRSGGNTN
RIRSGGNTS

SEQ ID NO: 7770 - protein, 9 aa, Artificial Sequence
  Description of Artificial Sequence: Synthetic peptide
  Seed: RTRSGGNTN
RIRSGGNTT

SEQ ID NO: 7771 - protein, 9 aa, Artificial Sequence
  Description of Artificial Sequence: Synthetic peptide
  Seed: RTRSGGNTN
RIRSGGNTW

SEQ ID NO: 7772 - protein, 9 aa, Artificial Sequence
  Description of Artificial Sequence: Synthetic peptide
  Seed: RTRSGGNTN
RIRSGGNTY

SEQ ID NO: 7773 - protein, 9 aa, Artificial Sequence
  Description of Artificial Sequence: Synthetic peptide
  Seed: RTRSGGNTN
RIRSGGNTV

SEQ ID NO: 7774 - protein, 9 aa, Artificial Sequence
  Description of Artificial Sequence: Synthetic peptide
  Seed: RTRSGGNTN
RLRSGGNTA

SEQ ID NO: 7775 - protein, 9 aa, Artificial Sequence
  Description of Artificial Sequence: Synthetic peptide
  Seed: RTRSGGNTN
RLRSGGNTR

SEQ ID NO: 7776 - protein, 9 aa, Artificial Sequence
  Description of Artificial Sequence: Synthetic peptide
  Seed: RTRSGGNTN
RLRSGGNTN

SEQ ID NO: 7777 - protein, 9 aa, Artificial Sequence
  Description of Artificial Sequence: Synthetic peptide
  Seed: RTRSGGNTN
RLRSGGNTC

SEQ ID NO: 7778 - protein, 9 aa, Artificial Sequence
  Description of Artificial Sequence: Synthetic peptide
  Seed: RTRSGGNTN
RLRSGGNTQ

SEQ ID NO: 7779 - protein, 9 aa, Artificial Sequence
  Description of Artificial Sequence: Synthetic peptide
  Seed: RTRSGGNTN
RLRSGGNTE

SEQ ID NO: 7780 - protein, 9 aa, Artificial Sequence
  Description of Artificial Sequence: Synthetic peptide
  Seed: RTRSGGNTN
RLRSGGNTG

SEQ ID NO: 7781 - protein, 9 aa, Artificial Sequence
  Description of Artificial Sequence: Synthetic peptide
  Seed: RTRSGGNTN
RLRSGGNTH

SEQ ID NO: 7782 - protein, 9 aa, Artificial Sequence
  Description of Artificial Sequence: Synthetic peptide
  Seed: RTRSGGNTN
RLRSGGNTI

SEQ ID NO: 7783 - protein, 9 aa, Artificial Sequence
  Description of Artificial Sequence: Synthetic peptide
  Seed: RTRSGGNTN
RLRSGGNTL

SEQ ID NO: 7784 - protein, 9 aa, Artificial Sequence
  Description of Artificial Sequence: Synthetic peptide
  Seed: RTRSGGNTN
RLRSGGNTK

SEQ ID NO: 7785 - protein, 9 aa, Artificial Sequence
  Description of Artificial Sequence: Synthetic peptide
  Seed: RTRSGGNTN
RLRSGGNTM

SEQ ID NO: 7786 - protein, 9 aa, Artificial Sequence
  Description of Artificial Sequence: Synthetic peptide
  Seed: RTRSGGNTN
RLRSGGNTF

SEQ ID NO: 7787 - protein, 9 aa, Artificial Sequence
  Description of Artificial Sequence: Synthetic peptide
  Seed: RTRSGGNTN
RQRSGGNTA

SEQ ID NO: 7788 - protein, 9 aa, Artificial Sequence
  Description of Artificial Sequence: Synthetic peptide
  Seed: RTRSGGNTN
RCRSGGNTY

SEQ ID NO: 7789 - protein, 10 aa, Artificial Sequence
  Description of Artificial Sequence: Synthetic peptide
  Seed: RTRIAYERMC
RVRIAYERMQ

SEQ ID NO: 7790 - protein, 8 aa, Artificial Sequence
  Description of Artificial Sequence: Synthetic peptide
  Seed: RTRSGGNT
RTRSGGNR

SEQ ID NO: 7791 - protein, 8 aa, Artificial Sequence
  Description of Artificial Sequence: Synthetic peptide
  Seed: RTRSGGNT
RSRSGGNA

SEQ ID NO: 7792 - protein, 8 aa, Artificial Sequence
  Description of Artificial Sequence: Synthetic peptide
  Seed: RTRSGGNT
RSRSGGNI

SEQ ID NO: 7793 - protein, 8 aa, Artificial Sequence
  Description of Artificial Sequence: Synthetic peptide
  Seed: RTRSGGNT
RSRSGGNL

SEQ ID NO: 7794 - protein, 8 aa, Artificial Sequence
  Description of Artificial Sequence: Synthetic peptide
  Seed: RTRSGGNT
RSRSGGNK

SEQ ID NO: 7795 - protein, 8 aa, Artificial Sequence
  Description of Artificial Sequence: Synthetic peptide
  Seed: RTRSGGNT
RSRSGGNM

SEQ ID NO: 7796 - protein, 8 aa, Artificial Sequence
  Description of Artificial Sequence: Synthetic peptide
  Seed: RTRSGGNT
RSRSGGNF

SEQ ID NO: 7797 - protein, 8 aa, Artificial Sequence
  Description of Artificial Sequence: Synthetic peptide
  Seed: RTRSGGNT
RSRSGGNY

SEQ ID NO: 7798 - protein, 8 aa, Artificial Sequence
  Description of Artificial Sequence: Synthetic peptide
  Seed: RTRSGGNT
RSRSGGNV

SEQ ID NO: 7799 - protein, 8 aa, Artificial Sequence
  Description of Artificial Sequence: Synthetic peptide
  Seed: RTRSGGNT
RTRSGGNA

SEQ ID NO: 7800 - protein, 8 aa, Artificial Sequence
  Description of Artificial Sequence: Synthetic peptide
  Seed: RTRSGGNT
RTRSGGNI

SEQ ID NO: 7801 - protein, 8 aa, Artificial Sequence
  Description of Artificial Sequence: Synthetic peptide
  Seed: RTRSGGNT
RVRSGGNA

SEQ ID NO: 7802 - protein, 8 aa, Artificial Sequence
  Description of Artificial Sequence: Synthetic peptide
  Seed: RTRSGGNT
RTRSGGNL

SEQ ID NO: 7803 - protein, 8 aa, Artificial Sequence
  Description of Artificial Sequence: Synthetic peptide
  Seed: RTRSGGNT
RTRSGGNK

SEQ ID NO: 7804 - protein, 8 aa, Artificial Sequence
  Description of Artificial Sequence: Synthetic peptide
  Seed: RTRSGGNT
RTRSGGNM

SEQ ID NO: 7805 - protein, 8 aa, Artificial Sequence
  Description of Artificial Sequence: Synthetic peptide
  Seed: RTRSGGNT
RTRSGGNF

SEQ ID NO: 7806 - protein, 8 aa, Artificial Sequence
  Description of Artificial Sequence: Synthetic peptide
  Seed: RTRSGGNT
RTRSGGNP

SEQ ID NO: 7807 - protein, 8 aa, Artificial Sequence
  Description of Artificial Sequence: Synthetic peptide
  Seed: RTRSGGNT
RTRSGGNS

SEQ ID NO: 7808 - protein, 8 aa, Artificial Sequence
  Description of Artificial Sequence: Synthetic peptide
  Seed: RTRSGGNT
RTRSGGNY

SEQ ID NO: 7809 - protein, 8 aa, Artificial Sequence
  Description of Artificial Sequence: Synthetic peptide
  Seed: RTRSGGNT
RTRSGGNV

SEQ ID NO: 7810 - protein, 8 aa, Artificial Sequence
  Description of Artificial Sequence: Synthetic peptide
  Seed: RTRSGGNT
RWRSGGNK

SEQ ID NO: 7811 - protein, 8 aa, Artificial Sequence
  Description of Artificial Sequence: Synthetic peptide
  Seed: RTRSGGNT
RFRSGGNK

SEQ ID NO: 7812 - protein, 8 aa, Artificial Sequence
  Description of Artificial Sequence: Synthetic peptide
  Seed: RTRSGGNT
RMRSGGNY

SEQ ID NO: 7813 - protein, 8 aa, Artificial Sequence
  Description of Artificial Sequence: Synthetic peptide
  Seed: RTRSGGNT
RMRSGGNK

SEQ ID NO: 7814 - protein, 8 aa, Artificial Sequence
  Description of Artificial Sequence: Synthetic peptide
  Seed: RTRSGGNT
RMRSGGNA

SEQ ID NO: 7815 - protein, 10 aa, Artificial Sequence
  Description of Artificial Sequence: Synthetic peptide
  Seed: RTRIAYERMC
RVRIAYERME

SEQ ID NO: 7816 - protein, 10 aa, Artificial Sequence
  Description of Artificial Sequence: Synthetic peptide
  Seed: RTRIAYERMC
RVRIAYERMG

SEQ ID NO: 7817 - protein, 10 aa, Artificial Sequence
  Description of Artificial Sequence: Synthetic peptide
  Seed: RTRIAYERMC
RVRIAYERMH

SEQ ID NO: 7818 - protein, 10 aa, Artificial Sequence
  Description of Artificial Sequence: Synthetic peptide
  Seed: RTRIAYERMC
RVRIAYERMI

SEQ ID NO: 7819 - protein, 10 aa, Artificial Sequence
  Description of Artificial Sequence: Synthetic peptide
  Seed: RTRIAYERMC
RVRIAYERML

SEQ ID NO: 7820 - protein, 10 aa, Artificial Sequence
  Description of Artificial Sequence: Synthetic peptide
  Seed: RTRIAYERMC
RVRIAYERMK

SEQ ID NO: 7821 - protein, 10 aa, Artificial Sequence
  Description of Artificial Sequence: Synthetic peptide
  Seed: RTRIAYERMC
RVRIAYERMM

SEQ ID NO: 7822 - protein, 10 aa, Artificial Sequence
  Description of Artificial Sequence: Synthetic peptide
  Seed: RTRIAYERMC
RVRIAYERMF

SEQ ID NO: 7823 - protein, 10 aa, Artificial Sequence
  Description of Artificial Sequence: Synthetic peptide
  Seed: RTRIAYERMC
RVRIAYERMP

SEQ ID NO: 7824 - protein, 10 aa, Artificial Sequence
  Description of Artificial Sequence: Synthetic peptide
  Seed: RTRIAYERMC
RVRIAYERMS

SEQ ID NO: 7825 - protein, 10 aa, Artificial Sequence
  Description of Artificial Sequence: Synthetic peptide
  Seed: RTRIAYERMC
RVRIAYERMT

SEQ ID NO: 7826 - protein, 10 aa, Artificial Sequence
  Description of Artificial Sequence: Synthetic peptide
  Seed: RTRIAYERMC
RVRIAYERMY

SEQ ID NO: 7827 - protein, 10 aa, Artificial Sequence
  Description of Artificial Sequence: Synthetic peptide
  Seed: RTRIAYERMC
RVRIAYERMV

SEQ ID NO: 7828 - protein, 8 aa, Artificial Sequence
  Description of Artificial Sequence: Synthetic peptide
  Seed: RTRSGGNT
RARSGGNK

SEQ ID NO: 7829 - protein, 8 aa, Artificial Sequence
  Description of Artificial Sequence: Synthetic peptide
  Seed: RTRSGGNT
RQRSGGNK

SEQ ID NO: 7830 - protein, 8 aa, Artificial Sequence
  Description of Artificial Sequence: Synthetic peptide
  Seed: RTRSGGNT
RIRSGGNA

SEQ ID NO: 7831 - protein, 8 aa, Artificial Sequence
  Description of Artificial Sequence: Synthetic peptide
  Seed: RTRSGGNT
RIRSGGNK

SEQ ID NO: 7832 - protein, 8 aa, Artificial Sequence
  Description of Artificial Sequence: Synthetic peptide
  Seed: RTRSGGNT
RIRSGGNV

SEQ ID NO: 7833 - protein, 8 aa, Artificial Sequence
  Description of Artificial Sequence: Synthetic peptide
  Seed: RTRSGGNT
RLRSGGNK

SEQ ID NO: 7834 - protein, 8 aa, Artificial Sequence
  Description of Artificial Sequence: Synthetic peptide
  Seed: RTRSGGNT
RYRSGGNK

SEQ ID NO: 7835 - protein, 8 aa, Artificial Sequence
  Description of Artificial Sequence: Synthetic peptide
  Seed: RTRSGGNT
RVRSGGNI

SEQ ID NO: 7836 - protein, 9 aa, Artificial Sequence
  Description of Artificial Sequence: Synthetic peptide
  Seed: RTRSGGNTN
RCRSGGNTM

SEQ ID NO: 7837 - protein, 9 aa, Artificial Sequence
  Description of Artificial Sequence: Synthetic peptide
  Seed: RTRSGGNTN
RNRSGGNTM

SEQ ID NO: 7838 - protein, 9 aa, Artificial Sequence
  Description of Artificial Sequence: Synthetic peptide
  Seed: RTRSGGNTN
RARSGGNTY

SEQ ID NO: 7839 - protein, 9 aa, Artificial Sequence
  Description of Artificial Sequence: Synthetic peptide
  Seed: RTRSGGNTN
RARSGGNTV

SEQ ID NO: 7840 - protein, 9 aa, Artificial Sequence
  Description of Artificial Sequence: Synthetic peptide
  Seed: RTRSGGNTN
RRRSGGNTK

SEQ ID NO: 7841 - protein, 9 aa, Artificial Sequence
  Description of Artificial Sequence: Synthetic peptide
  Seed: RTRSGGNTN
RNRSGGNTA

SEQ ID NO: 7842 - protein, 9 aa, Artificial Sequence
  Description of Artificial Sequence: Synthetic peptide
  Seed: RTRSGGNTN
RNRSGGNTR

SEQ ID NO: 7843 - protein, 9 aa, Artificial Sequence
  Description of Artificial Sequence: Synthetic peptide
  Seed: RTRSGGNTN
RNRSGGNTG

SEQ ID NO: 7844 - protein, 9 aa, Artificial Sequence
  Description of Artificial Sequence: Synthetic peptide
  Seed: RTRSGGNTN
RNRSGGNTI

SEQ ID NO: 7845 - protein, 9 aa, Artificial Sequence
  Description of Artificial Sequence: Synthetic peptide
  Seed: RTRSGGNTN
RNRSGGNTL

SEQ ID NO: 7846 - protein, 9 aa, Artificial Sequence
  Description of Artificial Sequence: Synthetic peptide
  Seed: RTRSGGNTN
RNRSGGNTK

SEQ ID NO: 7847 - protein, 9 aa, Artificial Sequence
  Description of Artificial Sequence: Synthetic peptide
  Seed: RTRSGGNTN
RNRSGGNTF

SEQ ID NO: 7848 - protein, 8 aa, Artificial Sequence
  Description of Artificial Sequence: Synthetic peptide
  Seed: RTRSGGNT
RVRSGGNL

SEQ ID NO: 7849 - protein, 9 aa, Artificial Sequence
  Description of Artificial Sequence: Synthetic peptide
  Seed: RTRSGGNTN
RNRSGGNTS

SEQ ID NO: 7850 - protein, 9 aa, Artificial Sequence
  Description of Artificial Sequence: Synthetic peptide
  Seed: RTRSGGNTN
RNRSGGNTT

SEQ ID NO: 7851 - protein, 9 aa, Artificial Sequence
  Description of Artificial Sequence: Synthetic peptide
  Seed: RTRSGGNTN
RNRSGGNTY

SEQ ID NO: 7852 - protein, 9 aa, Artificial Sequence
  Description of Artificial Sequence: Synthetic peptide
  Seed: RTRSGGNTN
RNRSGGNTV

SEQ ID NO: 7853 - protein, 9 aa, Artificial Sequence
  Description of Artificial Sequence: Synthetic peptide
  Seed: RTRSGGNTN
RCRSGGNTA

SEQ ID NO: 7854 - protein, 9 aa, Artificial Sequence
  Description of Artificial Sequence: Synthetic peptide
  Seed: RTRSGGNTN
RCRSGGNTR

SEQ ID NO: 7855 - protein, 9 aa, Artificial Sequence
  Description of Artificial Sequence: Synthetic peptide
  Seed: RTRSGGNTN
RCRSGGNTI

SEQ ID NO: 7856 - protein, 9 aa, Artificial Sequence
  Description of Artificial Sequence: Synthetic peptide
  Seed: RTRSGGNTN
RCRSGGNTL

SEQ ID NO: 7857 - protein, 9 aa, Artificial Sequence
  Description of Artificial Sequence: Synthetic peptide
  Seed: RTRSGGNTN
RCRSGGNTK

SEQ ID NO: 7858 - protein, 9 aa, Artificial Sequence
  Description of Artificial Sequence: Synthetic peptide
  Seed: RTRSGGNTN
RARSGGNTW

SEQ ID NO: 7859 - protein, 9 aa, Artificial Sequence
  Description of Artificial Sequence: Synthetic peptide
  Seed: RTRSGGNTN
RARSGGNTT

SEQ ID NO: 7860 - protein, 9 aa, Artificial Sequence
  Description of Artificial Sequence: Synthetic peptide
  Seed: RTRSGGNTN
RARSGGNTS

SEQ ID NO: 7861 - protein, 9 aa, Artificial Sequence
  Description of Artificial Sequence: Synthetic peptide
  Seed: RTRSGGNTN
RARSGGNTP

SEQ ID NO: 7862 - protein, 8 aa, Artificial Sequence
  Description of Artificial Sequence: Synthetic peptide
  Seed: RTRSGGNT
RVRSGGNK

SEQ ID NO: 7863 - protein, 8 aa, Artificial Sequence
  Description of Artificial Sequence: Synthetic peptide
  Seed: RTRSGGNT
RVRSGGNM

SEQ ID NO: 7864 - protein, 8 aa, Artificial Sequence
  Description of Artificial Sequence: Synthetic peptide
  Seed: RTRSGGNT
RVRSGGNF

SEQ ID NO: 7865 - protein, 8 aa, Artificial Sequence
  Description of Artificial Sequence: Synthetic peptide
  Seed: RTRSGGNT
RVRSGGNP

SEQ ID NO: 7866 - protein, 8 aa, Artificial Sequence
  Description of Artificial Sequence: Synthetic peptide
  Seed: RTRSGGNT
RVRSGGNY

SEQ ID NO: 7867 - protein, 8 aa, Artificial Sequence
  Description of Artificial Sequence: Synthetic peptide
  Seed: RTRSGGNT
RVRSGGNV

SEQ ID NO: 7868 - protein, 9 aa, Artificial Sequence
  Description of Artificial Sequence: Synthetic peptide
  Seed: RTRSGGNTN
RARSGGNTA

SEQ ID NO: 7869 - protein, 9 aa, Artificial Sequence
  Description of Artificial Sequence: Synthetic peptide
  Seed: RTRSGGNTN
RARSGGNTR

SEQ ID NO: 7870 - protein, 9 aa, Artificial Sequence
  Description of Artificial Sequence: Synthetic peptide
  Seed: RTRSGGNTN
RARSGGNTN

SEQ ID NO: 7871 - protein, 9 aa, Artificial Sequence
  Description of Artificial Sequence: Synthetic peptide
  Seed: RTRSGGNTN
RARSGGNTC

SEQ ID NO: 7872 - protein, 9 aa, Artificial Sequence
  Description of Artificial Sequence: Synthetic peptide
  Seed: RTRSGGNTN
RARSGGNTQ

SEQ ID NO: 7873 - protein, 9 aa, Artificial Sequence
  Description of Artificial Sequence: Synthetic peptide
  Seed: RTRSGGNTN
RARSGGNTE

SEQ ID NO: 7874 - protein, 9 aa, Artificial Sequence
  Description of Artificial Sequence: Synthetic peptide
  Seed: RTRSGGNTN
RARSGGNTG

SEQ ID NO: 7875 - protein, 9 aa, Artificial Sequence
  Description of Artificial Sequence: Synthetic peptide
  Seed: RTRSGGNTN
RARSGGNTH

SEQ ID NO: 7876 - protein, 9 aa, Artificial Sequence
  Description of Artificial Sequence: Synthetic peptide
  Seed: RTRSGGNTN
RARSGGNTI

SEQ ID NO: 7877 - protein, 9 aa, Artificial Sequence
  Description of Artificial Sequence: Synthetic peptide
  Seed: RTRSGGNTN
RARSGGNTL

SEQ ID NO: 7878 - protein, 9 aa, Artificial Sequence
  Description of Artificial Sequence: Synthetic peptide
  Seed: RTRSGGNTN
RARSGGNTK

SEQ ID NO: 7879 - protein, 9 aa, Artificial Sequence
  Description of Artificial Sequence: Synthetic peptide
  Seed: RTRSGGNTN
RARSGGNTM

SEQ ID NO: 7880 - protein, 9 aa, Artificial Sequence
  Description of Artificial Sequence: Synthetic peptide
  Seed: RTRSGGNTN
RARSGGNTF

SEQ ID NO: 7881 - protein, 9 aa, Artificial Sequence
  Description of Artificial Sequence: Synthetic peptide
  Seed: RTRALVRTG
RLRALVRTY

SEQ ID NO: 7882 - protein, 9 aa, Artificial Sequence
  Description of Artificial Sequence: Synthetic peptide
  Seed: RTRALVRTG
RLRALVRTW

SEQ ID NO: 7883 - protein, 9 aa, Artificial Sequence
  Description of Artificial Sequence: Synthetic peptide
  Seed: RTRALVRTG
RLRALVRTT

SEQ ID NO: 7884 - protein, 10 aa, Artificial Sequence
  Description of Artificial Sequence: Synthetic peptide
  Seed: RSRYWAIRTR
RGRYWAIRTW

SEQ ID NO: 7885 - protein, 10 aa, Artificial Sequence
  Description of Artificial Sequence: Synthetic peptide
  Seed: RSRYWAIRTR
RGRYWAIRTG

SEQ ID NO: 7886 - protein, 10 aa, Artificial Sequence
  Description of Artificial Sequence: Synthetic peptide
  Seed: RSRYWAIRTR
RGRYWAIRTH

SEQ ID NO: 7887 - protein, 10 aa, Artificial Sequence
  Description of Artificial Sequence: Synthetic peptide
  Seed: RSRYWAIRTR
RGRYWAIRTI

SEQ ID NO: 7888 - protein, 10 aa, Artificial Sequence
  Description of Artificial Sequence: Synthetic peptide
  Seed: RSRYWAIRTR
RGRYWAIRTL

SEQ ID NO: 7889 - protein, 10 aa, Artificial Sequence
  Description of Artificial Sequence: Synthetic peptide
  Seed: RSRYWAIRTR
RGRYWAIRTK

SEQ ID NO: 7890 - protein, 10 aa, Artificial Sequence
  Description of Artificial Sequence: Synthetic peptide
  Seed: RSRYWAIRTR
RGRYWAIRTM

SEQ ID NO: 7891 - protein, 10 aa, Artificial Sequence
  Description of Artificial Sequence: Synthetic peptide
  Seed: RSRYWAIRTR
RGRYWAIRTF

SEQ ID NO: 7892 - protein, 10 aa, Artificial Sequence
  Description of Artificial Sequence: Synthetic peptide
  Seed: RSRYWAIRTR
RGRYWAIRTS

SEQ ID NO: 7893 - protein, 10 aa, Artificial Sequence
  Description of Artificial Sequence: Synthetic peptide
  Seed: RSRYWAIRTR
RGRYWAIRTT

SEQ ID NO: 7894 - protein, 10 aa, Artificial Sequence
  Description of Artificial Sequence: Synthetic peptide
  Seed: RSRYWAIRTR
RGRYWAIRTY

SEQ ID NO: 7895 - protein, 10 aa, Artificial Sequence
  Description of Artificial Sequence: Synthetic peptide
  Seed: RSRYWAIRTR
RHRYWAIRTL

SEQ ID NO: 7896 - protein, 10 aa, Artificial Sequence
  Description of Artificial Sequence: Synthetic peptide
  Seed: RSRYWAIRTR
RGRYWAIRTV

SEQ ID NO: 7897 - protein, 10 aa, Artificial Sequence
  Description of Artificial Sequence: Synthetic peptide
  Seed: RSRYWAIRTR
RHRYWAIRTA

SEQ ID NO: 7898 - protein, 10 aa, Artificial Sequence
  Description of Artificial Sequence: Synthetic peptide
  Seed: RSRYWAIRTR
RHRYWAIRTR

SEQ ID NO: 7899 - protein, 10 aa, Artificial Sequence
  Description of Artificial Sequence: Synthetic peptide
  Seed: RSRYWAIRTR
RHRYWAIRTN

SEQ ID NO: 7900 - protein, 10 aa, Artificial Sequence
  Description of Artificial Sequence: Synthetic peptide
  Seed: RSRYWAIRTR
RHRYWAIRTC

SEQ ID NO: 7901 - protein, 10 aa, Artificial Sequence
  Description of Artificial Sequence: Synthetic peptide
  Seed: RSRYWAIRTR
RHRYWAIRTQ

SEQ ID NO: 7902 - protein, 10 aa, Artificial Sequence
  Description of Artificial Sequence: Synthetic peptide
  Seed: RSRYWAIRTR
RHRYWAIRTE

SEQ ID NO: 7903 - protein, 10 aa, Artificial Sequence
  Description of Artificial Sequence: Synthetic peptide
  Seed: RSRYWAIRTR
RHRYWAIRTG

SEQ ID NO: 7904 - protein, 10 aa, Artificial Sequence
  Description of Artificial Sequence: Synthetic peptide
  Seed: RSRYWAIRTR
RHRYWAIRTH

SEQ ID NO: 7905 - protein, 10 aa, Artificial Sequence
  Description of Artificial Sequence: Synthetic peptide
  Seed: RSRYWAIRTR
RGRYWAIRTE

SEQ ID NO: 7906 - protein, 10 aa, Artificial Sequence
  Description of Artificial Sequence: Synthetic peptide
  Seed: RSRYWAIRTR
RGRYWAIRTQ

SEQ ID NO: 7907 - protein, 10 aa, Artificial Sequence
  Description of Artificial Sequence: Synthetic peptide
  Seed: RSRYWAIRTR
RGRYWAIRTC

SEQ ID NO: 7908 - protein, 10 aa, Artificial Sequence
  Description of Artificial Sequence: Synthetic peptide
  Seed: RSRYWAIRTR
RGRYWAIRTN

SEQ ID NO: 7909 - protein, 10 aa, Artificial Sequence
  Description of Artificial Sequence: Synthetic peptide
  Seed: RSRYWAIRTR
RERYWAIRTR

SEQ ID NO: 7910 - protein, 10 aa, Artificial Sequence
  Description of Artificial Sequence: Synthetic peptide
  Seed: RSRYWAIRTR
RERYWAIRTN

SEQ ID NO: 7911 - protein, 10 aa, Artificial Sequence
  Description of Artificial Sequence: Synthetic peptide
  Seed: RSRYWAIRTR
RERYWAIRTC

SEQ ID NO: 7912 - protein, 10 aa, Artificial Sequence
  Description of Artificial Sequence: Synthetic peptide
  Seed: RSRYWAIRTR
RERYWAIRTQ

SEQ ID NO: 7913 - protein, 10 aa, Artificial Sequence
  Description of Artificial Sequence: Synthetic peptide
  Seed: RSRYWAIRTR
RERYWAIRTE

SEQ ID NO: 7914 - protein, 10 aa, Artificial Sequence
  Description of Artificial Sequence: Synthetic peptide
  Seed: RSRYWAIRTR
RERYWAIRTG

SEQ ID NO: 7915 - protein, 10 aa, Artificial Sequence
  Description of Artificial Sequence: Synthetic peptide
  Seed: RSRYWAIRTR
RERYWAIRTH

SEQ ID NO: 7916 - protein, 10 aa, Artificial Sequence
  Description of Artificial Sequence: Synthetic peptide
  Seed: RSRYWAIRTR
RERYWAIRTI

SEQ ID NO: 7917 - protein, 10 aa, Artificial Sequence
  Description of Artificial Sequence: Synthetic peptide
  Seed: RSRYWAIRTR
RERYWAIRTL

SEQ ID NO: 7918 - protein, 10 aa, Artificial Sequence
  Description of Artificial Sequence: Synthetic peptide
  Seed: RSRYWAIRTR
RERYWAIRTK

SEQ ID NO: 7919 - protein, 10 aa, Artificial Sequence
  Description of Artificial Sequence: Synthetic peptide
  Seed: RSRYWAIRTR
RERYWAIRTM

SEQ ID NO: 7920 - protein, 10 aa, Artificial Sequence
  Description of Artificial Sequence: Synthetic peptide
  Seed: RSRYWAIRTR
RERYWAIRTF

SEQ ID NO: 7921 - protein, 10 aa, Artificial Sequence
  Description of Artificial Sequence: Synthetic peptide
  Seed: RSRYWAIRTR
RERYWAIRTS

SEQ ID NO: 7922 - protein, 10 aa, Artificial Sequence
  Description of Artificial Sequence: Synthetic peptide
  Seed: RSRYWAIRTR
RERYWAIRTT

SEQ ID NO: 7923 - protein, 10 aa, Artificial Sequence
  Description of Artificial Sequence: Synthetic peptide
  Seed: RSRYWAIRTR
RERYWAIRTW

SEQ ID NO: 7924 - protein, 10 aa, Artificial Sequence
  Description of Artificial Sequence: Synthetic peptide
  Seed: RSRYWAIRTR
RERYWAIRTY

SEQ ID NO: 7925 - protein, 10 aa, Artificial Sequence
  Description of Artificial Sequence: Synthetic peptide
  Seed: RSRYWAIRTR
RERYWAIRTV

SEQ ID NO: 7926 - protein, 10 aa, Artificial Sequence
  Description of Artificial Sequence: Synthetic peptide
  Seed: RSRYWAIRTR
RGRYWAIRTA

SEQ ID NO: 7927 - protein, 10 aa, Artificial Sequence
  Description of Artificial Sequence: Synthetic peptide
  Seed: RSRYWAIRTR
RGRYWAIRTR

SEQ ID NO: 7928 - protein, 10 aa, Artificial Sequence
  Description of Artificial Sequence: Synthetic peptide
  Seed: RSRYWAIRTR
RHRYWAIRTI

SEQ ID NO: 7929 - protein, 10 aa, Artificial Sequence
  Description of Artificial Sequence: Synthetic peptide
  Seed: RSRYWAIRTR
RHRYWAIRTK

SEQ ID NO: 7930 - protein, 10 aa, Artificial Sequence
  Description of Artificial Sequence: Synthetic peptide
  Seed: RSRYWAIRTR
RQRYWAIRTV

SEQ ID NO: 7931 - protein, 10 aa, Artificial Sequence
  Description of Artificial Sequence: Synthetic peptide
  Seed: RSRYWAIRTR
RLRYWAIRTH

SEQ ID NO: 7932 - protein, 10 aa, Artificial Sequence
  Description of Artificial Sequence: Synthetic peptide
  Seed: RSRYWAIRTR
RIRYWAIRTY

SEQ ID NO: 7933 - protein, 10 aa, Artificial Sequence
  Description of Artificial Sequence: Synthetic peptide
  Seed: RSRYWAIRTR
RIRYWAIRTV

SEQ ID NO: 7934 - protein, 10 aa, Artificial Sequence
  Description of Artificial Sequence: Synthetic peptide
  Seed: RSRYWAIRTR
RLRYWAIRTA

SEQ ID NO: 7935 - protein, 10 aa, Artificial Sequence
  Description of Artificial Sequence: Synthetic peptide
  Seed: RSRYWAIRTR
RLRYWAIRTR

SEQ ID NO: 7936 - protein, 10 aa, Artificial Sequence
  Description of Artificial Sequence: Synthetic peptide
  Seed: RSRYWAIRTR
RLRYWAIRTN

SEQ ID NO: 7937 - protein, 10 aa, Artificial Sequence
  Description of Artificial Sequence: Synthetic peptide
  Seed: RSRYWAIRTR
RLRYWAIRTC

SEQ ID NO: 7938 - protein, 10 aa, Artificial Sequence
  Description of Artificial Sequence: Synthetic peptide
  Seed: RSRYWAIRTR
RLRYWAIRTQ

SEQ ID NO: 7939 - protein, 10 aa, Artificial Sequence
  Description of Artificial Sequence: Synthetic peptide
  Seed: RSRYWAIRTR
RLRYWAIRTE

SEQ ID NO: 7940 - protein, 10 aa, Artificial Sequence
  Description of Artificial Sequence: Synthetic peptide
  Seed: RSRYWAIRTR
RLRYWAIRTG

SEQ ID NO: 7941 - protein, 10 aa, Artificial Sequence
  Description of Artificial Sequence: Synthetic peptide
  Seed: RSRYWAIRTR
RLRYWAIRTI

SEQ ID NO: 7942 - protein, 10 aa, Artificial Sequence
  Description of Artificial Sequence: Synthetic peptide
  Seed: RSRYWAIRTR
RHRYWAIRTM

SEQ ID NO: 7943 - protein, 10 aa, Artificial Sequence
  Description of Artificial Sequence: Synthetic peptide
  Seed: RSRYWAIRTR
RLRYWAIRTL

SEQ ID NO: 7944 - protein, 10 aa, Artificial Sequence
  Description of Artificial Sequence: Synthetic peptide
  Seed: RSRYWAIRTR
RLRYWAIRTK

SEQ ID NO: 7945 - protein, 10 aa, Artificial Sequence
  Description of Artificial Sequence: Synthetic peptide
  Seed: RSRYWAIRTR
RLRYWAIRTM

SEQ ID NO: 7946 - protein, 10 aa, Artificial Sequence
  Description of Artificial Sequence: Synthetic peptide
  Seed: RSRYWAIRTR
RLRYWAIRTF

SEQ ID NO: 7947 - protein, 10 aa, Artificial Sequence
  Description of Artificial Sequence: Synthetic peptide
  Seed: RSRYWAIRTR
RLRYWAIRTP

SEQ ID NO: 7948 - protein, 10 aa, Artificial Sequence
  Description of Artificial Sequence: Synthetic peptide
  Seed: RSRYWAIRTR
RLRYWAIRTS

SEQ ID NO: 7949 - protein, 10 aa, Artificial Sequence
  Description of Artificial Sequence: Synthetic peptide
  Seed: RSRYWAIRTR
RLRYWAIRTT

SEQ ID NO: 7950 - protein, 10 aa, Artificial Sequence
  Description of Artificial Sequence: Synthetic peptide
  Seed: RSRYWAIRTR
RLRYWAIRTW

SEQ ID NO: 7951 - protein, 10 aa, Artificial Sequence
  Description of Artificial Sequence: Synthetic peptide
  Seed: RSRYWAIRTR
RLRYWAIRTY

SEQ ID NO: 7952 - protein, 10 aa, Artificial Sequence
  Description of Artificial Sequence: Synthetic peptide
  Seed: RSRYWAIRTR
RIRYWAIRTW

SEQ ID NO: 7953 - protein, 10 aa, Artificial Sequence
  Description of Artificial Sequence: Synthetic peptide
  Seed: RSRYWAIRTR
RIRYWAIRTT

SEQ ID NO: 7954 - protein, 10 aa, Artificial Sequence
  Description of Artificial Sequence: Synthetic peptide
  Seed: RSRYWAIRTR
RIRYWAIRTS

SEQ ID NO: 7955 - protein, 10 aa, Artificial Sequence
  Description of Artificial Sequence: Synthetic peptide
  Seed: RSRYWAIRTR
RIRYWAIRTP

SEQ ID NO: 7956 - protein, 10 aa, Artificial Sequence
  Description of Artificial Sequence: Synthetic peptide
  Seed: RSRYWAIRTR
RHRYWAIRTF

SEQ ID NO: 7957 - protein, 10 aa, Artificial Sequence
  Description of Artificial Sequence: Synthetic peptide
  Seed: RSRYWAIRTR
RHRYWAIRTS

SEQ ID NO: 7958 - protein, 10 aa, Artificial Sequence
  Description of Artificial Sequence: Synthetic peptide
  Seed: RSRYWAIRTR
RHRYWAIRTT

SEQ ID NO: 7959 - protein, 10 aa, Artificial Sequence
  Description of Artificial Sequence: Synthetic peptide
  Seed: RSRYWAIRTR
RHRYWAIRTW

SEQ ID NO: 7960 - protein, 10 aa, Artificial Sequence
  Description of Artificial Sequence: Synthetic peptide
  Seed: RSRYWAIRTR
RHRYWAIRTY

SEQ ID NO: 7961 - protein, 10 aa, Artificial Sequence
  Description of Artificial Sequence: Synthetic peptide
  Seed: RSRYWAIRTR
RHRYWAIRTV

SEQ ID NO: 7962 - protein, 10 aa, Artificial Sequence
  Description of Artificial Sequence: Synthetic peptide
  Seed: RSRYWAIRTR
RIRYWAIRTA

SEQ ID NO: 7963 - protein, 10 aa, Artificial Sequence
  Description of Artificial Sequence: Synthetic peptide
  Seed: RSRYWAIRTR
RIRYWAIRTR

SEQ ID NO: 7964 - protein, 10 aa, Artificial Sequence
  Description of Artificial Sequence: Synthetic peptide
  Seed: RSRYWAIRTR
RIRYWAIRTN

SEQ ID NO: 7965 - protein, 10 aa, Artificial Sequence
  Description of Artificial Sequence: Synthetic peptide
  Seed: RSRYWAIRTR
RIRYWAIRTC

SEQ ID NO: 7966 - protein, 10 aa, Artificial Sequence
  Description of Artificial Sequence: Synthetic peptide
  Seed: RSRYWAIRTR
RIRYWAIRTQ

SEQ ID NO: 7967 - protein, 10 aa, Artificial Sequence
  Description of Artificial Sequence: Synthetic peptide
  Seed: RSRYWAIRTR
RIRYWAIRTE

SEQ ID NO: 7968 - protein, 10 aa, Artificial Sequence
  Description of Artificial Sequence: Synthetic peptide
  Seed: RSRYWAIRTR
RIRYWAIRTG

SEQ ID NO: 7969 - protein, 10 aa, Artificial Sequence
  Description of Artificial Sequence: Synthetic peptide
  Seed: RSRYWAIRTR
RIRYWAIRTH

SEQ ID NO: 7970 - protein, 10 aa, Artificial Sequence
  Description of Artificial Sequence: Synthetic peptide
  Seed: RSRYWAIRTR
RIRYWAIRTI

SEQ ID NO: 7971 - protein, 10 aa, Artificial Sequence
  Description of Artificial Sequence: Synthetic peptide
  Seed: RSRYWAIRTR
RIRYWAIRTL

SEQ ID NO: 7972 - protein, 10 aa, Artificial Sequence
  Description of Artificial Sequence: Synthetic peptide
  Seed: RSRYWAIRTR
RIRYWAIRTK

SEQ ID NO: 7973 - protein, 10 aa, Artificial Sequence
  Description of Artificial Sequence: Synthetic peptide
  Seed: RSRYWAIRTR
RIRYWAIRTM

SEQ ID NO: 7974 - protein, 10 aa, Artificial Sequence
  Description of Artificial Sequence: Synthetic peptide
  Seed: RSRYWAIRTR
RIRYWAIRTF

SEQ ID NO: 7975 - protein, 10 aa, Artificial Sequence
  Description of Artificial Sequence: Synthetic peptide
  Seed: RSRYWAIRTR
RERYWAIRTA

SEQ ID NO: 7976 - protein, 10 aa, Artificial Sequence
  Description of Artificial Sequence: Synthetic peptide
  Seed: RSRYWAIRTR
RQRYWAIRTY

SEQ ID NO: 7977 - protein, 10 aa, Artificial Sequence
  Description of Artificial Sequence: Synthetic peptide
  Seed: RSRYWAIRTR
RKRYWAIRTA

SEQ ID NO: 7978 - protein, 10 aa, Artificial Sequence
  Description of Artificial Sequence: Synthetic peptide
  Seed: RSRYWAIRTR
RNRYWAIRTF

SEQ ID NO: 7979 - protein, 10 aa, Artificial Sequence
  Description of Artificial Sequence: Synthetic peptide
  Seed: RSRYWAIRTR
RNRYWAIRTC

SEQ ID NO: 7980 - protein, 10 aa, Artificial Sequence
  Description of Artificial Sequence: Synthetic peptide
  Seed: RSRYWAIRTR
RNRYWAIRTQ

SEQ ID NO: 7981 - protein, 10 aa, Artificial Sequence
  Description of Artificial Sequence: Synthetic peptide
  Seed: RSRYWAIRTR
RNRYWAIRTE

SEQ ID NO: 7982 - protein, 10 aa, Artificial Sequence
  Description of Artificial Sequence: Synthetic peptide
  Seed: RSRYWAIRTR
RNRYWAIRTG

SEQ ID NO: 7983 - protein, 10 aa, Artificial Sequence
  Description of Artificial Sequence: Synthetic peptide
  Seed: RSRYWAIRTR
RNRYWAIRTH

SEQ ID NO: 7984 - protein, 10 aa, Artificial Sequence
  Description of Artificial Sequence: Synthetic peptide
  Seed: RSRYWAIRTR
RNRYWAIRTI

SEQ ID NO: 7985 - protein, 10 aa, Artificial Sequence
  Description of Artificial Sequence: Synthetic peptide
  Seed: RSRYWAIRTR
RNRYWAIRTL

SEQ ID NO: 7986 - protein, 10 aa, Artificial Sequence
  Description of Artificial Sequence: Synthetic peptide
  Seed: RSRYWAIRTR
RNRYWAIRTK

SEQ ID NO: 7987 - protein, 10 aa, Artificial Sequence
  Description of Artificial Sequence: Synthetic peptide
  Seed: RSRYWAIRTR
RNRYWAIRTM

SEQ ID NO: 7988 - protein, 10 aa, Artificial Sequence
  Description of Artificial Sequence: Synthetic peptide
  Seed: RSRYWAIRTR
RNRYWAIRTS

SEQ ID NO: 7989 - protein, 10 aa, Artificial Sequence
  Description of Artificial Sequence: Synthetic peptide
  Seed: RSRYWAIRTR
RDRYWAIRTG

SEQ ID NO: 7990 - protein, 10 aa, Artificial Sequence
  Description of Artificial Sequence: Synthetic peptide
  Seed: RSRYWAIRTR
RNRYWAIRTT

SEQ ID NO: 7991 - protein, 10 aa, Artificial Sequence
  Description of Artificial Sequence: Synthetic peptide
  Seed: RSRYWAIRTR
RNRYWAIRTW

SEQ ID NO: 7992 - protein, 10 aa, Artificial Sequence
  Description of Artificial Sequence: Synthetic peptide
  Seed: RSRYWAIRTR
RNRYWAIRTY

SEQ ID NO: 7993 - protein, 10 aa, Artificial Sequence
  Description of Artificial Sequence: Synthetic peptide
  Seed: RSRYWAIRTR
RNRYWAIRTV

SEQ ID NO: 7994 - protein, 10 aa, Artificial Sequence
  Description of Artificial Sequence: Synthetic peptide
  Seed: RSRYWAIRTR
RDRYWAIRTA

SEQ ID NO: 7995 - protein, 10 aa, Artificial Sequence
  Description of Artificial Sequence: Synthetic peptide
  Seed: RSRYWAIRTR
RDRYWAIRTR

SEQ ID NO: 7996 - protein, 10 aa, Artificial Sequence
  Description of Artificial Sequence: Synthetic peptide
  Seed: RSRYWAIRTR
RDRYWAIRTN

SEQ ID NO: 7997 - protein, 10 aa, Artificial Sequence
  Description of Artificial Sequence: Synthetic peptide
  Seed: RSRYWAIRTR
RDRYWAIRTC

SEQ ID NO: 7998 - protein, 10 aa, Artificial Sequence
  Description of Artificial Sequence: Synthetic peptide
  Seed: RSRYWAIRTR
RDRYWAIRTQ

SEQ ID NO: 7999 - protein, 10 aa, Artificial Sequence
  Description of Artificial Sequence: Synthetic peptide
  Seed: RSRYWAIRTR
RNRYWAIRTN

SEQ ID NO: 8000 - protein, 10 aa, Artificial Sequence
  Description of Artificial Sequence: Synthetic peptide
  Seed: RSRYWAIRTR
RNRYWAIRTR

SEQ ID NO: 8001 - protein, 10 aa, Artificial Sequence
  Description of Artificial Sequence: Synthetic peptide
  Seed: RSRYWAIRTR
RNRYWAIRTA

SEQ ID NO: 8002 - protein, 10 aa, Artificial Sequence
  Description of Artificial Sequence: Synthetic peptide
  Seed: RSRYWAIRTR
RRRYWAIRTV

SEQ ID NO: 8003 - protein, 10 aa, Artificial Sequence
  Description of Artificial Sequence: Synthetic peptide
  Seed: RSRYWAIRTR
RARYWAIRTV

SEQ ID NO: 8004 - protein, 10 aa, Artificial Sequence
  Description of Artificial Sequence: Synthetic peptide
  Seed: RSRYWAIRTR
RRRYWAIRTA

SEQ ID NO: 8005 - protein, 10 aa, Artificial Sequence
  Description of Artificial Sequence: Synthetic peptide
  Seed: RSRYWAIRTR
RRRYWAIRTR

SEQ ID NO: 8006 - protein, 10 aa, Artificial Sequence
  Description of Artificial Sequence: Synthetic peptide
  Seed: RSRYWAIRTR
RRRYWAIRTN

SEQ ID NO: 8007 - protein, 10 aa, Artificial Sequence
  Description of Artificial Sequence: Synthetic peptide
  Seed: RSRYWAIRTR
RRRYWAIRTC

SEQ ID NO: 8008 - protein, 10 aa, Artificial Sequence
  Description of Artificial Sequence: Synthetic peptide
  Seed: RSRYWAIRTR
RRRYWAIRTQ

SEQ ID NO: 8009 - protein, 10 aa, Artificial Sequence
  Description of Artificial Sequence: Synthetic peptide
  Seed: RSRYWAIRTR
RRRYWAIRTE

SEQ ID NO: 8010 - protein, 10 aa, Artificial Sequence
  Description of Artificial Sequence: Synthetic peptide
  Seed: RSRYWAIRTR
RRRYWAIRTG

SEQ ID NO: 8011 - protein, 10 aa, Artificial Sequence
  Description of Artificial Sequence: Synthetic peptide
  Seed: RSRYWAIRTR
RRRYWAIRTH

SEQ ID NO: 8012 - protein, 10 aa, Artificial Sequence
  Description of Artificial Sequence: Synthetic peptide
  Seed: RSRYWAIRTR
RRRYWAIRTI

SEQ ID NO: 8013 - protein, 10 aa, Artificial Sequence
  Description of Artificial Sequence: Synthetic peptide
  Seed: RSRYWAIRTR
RRRYWAIRTL

SEQ ID NO: 8014 - protein, 10 aa, Artificial Sequence
  Description of Artificial Sequence: Synthetic peptide
  Seed: RSRYWAIRTR
RRRYWAIRTK

SEQ ID NO: 8015 - protein, 10 aa, Artificial Sequence
  Description of Artificial Sequence: Synthetic peptide
  Seed: RSRYWAIRTR
RRRYWAIRTM

SEQ ID NO: 8016 - protein, 10 aa, Artificial Sequence
  Description of Artificial Sequence: Synthetic peptide
  Seed: RSRYWAIRTR
RRRYWAIRTF

SEQ ID NO: 8017 - protein, 10 aa, Artificial Sequence
  Description of Artificial Sequence: Synthetic peptide
  Seed: RSRYWAIRTR
RRRYWAIRTP

SEQ ID NO: 8018 - protein, 10 aa, Artificial Sequence
  Description of Artificial Sequence: Synthetic peptide
  Seed: RSRYWAIRTR
RRRYWAIRTS

SEQ ID NO: 8019 - protein, 10 aa, Artificial Sequence
  Description of Artificial Sequence: Synthetic peptide
  Seed: RSRYWAIRTR
RRRYWAIRTT

SEQ ID NO: 8020 - protein, 10 aa, Artificial Sequence
  Description of Artificial Sequence: Synthetic peptide
  Seed: RSRYWAIRTR
RRRYWAIRTW

SEQ ID NO: 8021 - protein, 10 aa, Artificial Sequence
  Description of Artificial Sequence: Synthetic peptide
  Seed: RSRYWAIRTR
RRRYWAIRTY

SEQ ID NO: 8022 - protein, 10 aa, Artificial Sequence
  Description of Artificial Sequence: Synthetic peptide
  Seed: RSRYWAIRTR
RDRYWAIRTE

SEQ ID NO: 8023 - protein, 10 aa, Artificial Sequence
  Description of Artificial Sequence: Synthetic peptide
  Seed: RSRYWAIRTR
RDRYWAIRTH

SEQ ID NO: 8024 - protein, 10 aa, Artificial Sequence
  Description of Artificial Sequence: Synthetic peptide
  Seed: RSRYWAIRTR
RQRYWAIRTW

SEQ ID NO: 8025 - protein, 10 aa, Artificial Sequence
  Description of Artificial Sequence: Synthetic peptide
  Seed: RSRYWAIRTR
RQRYWAIRTE

SEQ ID NO: 8026 - protein, 10 aa, Artificial Sequence
  Description of Artificial Sequence: Synthetic peptide
  Seed: RSRYWAIRTR
RCRYWAIRTT

SEQ ID NO: 8027 - protein, 10 aa, Artificial Sequence
  Description of Artificial Sequence: Synthetic peptide
  Seed: RSRYWAIRTR
RCRYWAIRTW

SEQ ID NO: 8028 - protein, 10 aa, Artificial Sequence
  Description of Artificial Sequence: Synthetic peptide
  Seed: RSRYWAIRTR
RCRYWAIRTY

SEQ ID NO: 8029 - protein, 10 aa, Artificial Sequence
  Description of Artificial Sequence: Synthetic peptide
  Seed: RSRYWAIRTR
RCRYWAIRTV

SEQ ID NO: 8030 - protein, 10 aa, Artificial Sequence
  Description of Artificial Sequence: Synthetic peptide
  Seed: RSRYWAIRTR
RQRYWAIRTA

SEQ ID NO: 8031 - protein, 10 aa, Artificial Sequence
  Description of Artificial Sequence: Synthetic peptide
  Seed: RSRYWAIRTR
RQRYWAIRTR

SEQ ID NO: 8032 - protein, 10 aa, Artificial Sequence
  Description of Artificial Sequence: Synthetic peptide
  Seed: RSRYWAIRTR
RQRYWAIRTN

SEQ ID NO: 8033 - protein, 10 aa, Artificial Sequence
  Description of Artificial Sequence: Synthetic peptide
  Seed: RSRYWAIRTR
RQRYWAIRTC

SEQ ID NO: 8034 - protein, 10 aa, Artificial Sequence
  Description of Artificial Sequence: Synthetic peptide
  Seed: RSRYWAIRTR
RQRYWAIRTQ

SEQ ID NO: 8035 - protein, 10 aa, Artificial Sequence
  Description of Artificial Sequence: Synthetic peptide
  Seed: RSRYWAIRTR
RQRYWAIRTG

SEQ ID NO: 8036 - protein, 10 aa, Artificial Sequence
  Description of Artificial Sequence: Synthetic peptide
  Seed: RSRYWAIRTR
RDRYWAIRTI

SEQ ID NO: 8037 - protein, 10 aa, Artificial Sequence
  Description of Artificial Sequence: Synthetic peptide
  Seed: RSRYWAIRTR
RQRYWAIRTH

SEQ ID NO: 8038 - protein, 10 aa, Artificial Sequence
  Description of Artificial Sequence: Synthetic peptide
  Seed: RSRYWAIRTR
RQRYWAIRTI

SEQ ID NO: 8039 - protein, 10 aa, Artificial Sequence
  Description of Artificial Sequence: Synthetic peptide
  Seed: RSRYWAIRTR
RQRYWAIRTL

SEQ ID NO: 8040 - protein, 10 aa, Artificial Sequence
  Description of Artificial Sequence: Synthetic peptide
  Seed: RSRYWAIRTR
RQRYWAIRTK

SEQ ID NO: 8041 - protein, 10 aa, Artificial Sequence
  Description of Artificial Sequence: Synthetic peptide
  Seed: RSRYWAIRTR
RQRYWAIRTM

SEQ ID NO: 8042 - protein, 10 aa, Artificial Sequence
  Description of Artificial Sequence: Synthetic peptide
  Seed: RSRYWAIRTR
RQRYWAIRTF

SEQ ID NO: 8043 - protein, 10 aa, Artificial Sequence
  Description of Artificial Sequence: Synthetic peptide
  Seed: RSRYWAIRTR
RQRYWAIRTP

SEQ ID NO: 8044 - protein, 10 aa, Artificial Sequence
  Description of Artificial Sequence: Synthetic peptide
  Seed: RSRYWAIRTR
RQRYWAIRTS

SEQ ID NO: 8045 - protein, 10 aa, Artificial Sequence
  Description of Artificial Sequence: Synthetic peptide
  Seed: RSRYWAIRTR
RQRYWAIRTT

SEQ ID NO: 8046 - protein, 10 aa, Artificial Sequence
  Description of Artificial Sequence: Synthetic peptide
  Seed: RSRYWAIRTR
RCRYWAIRTS

SEQ ID NO: 8047 - protein, 10 aa, Artificial Sequence
  Description of Artificial Sequence: Synthetic peptide
  Seed: RSRYWAIRTR
RCRYWAIRTF

SEQ ID NO: 8048 - protein, 10 aa, Artificial Sequence
  Description of Artificial Sequence: Synthetic peptide
  Seed: RSRYWAIRTR
RCRYWAIRTM

SEQ ID NO: 8049 - protein, 10 aa, Artificial Sequence
  Description of Artificial Sequence: Synthetic peptide
  Seed: RSRYWAIRTR
RCRYWAIRTK

SEQ ID NO: 8050 - protein, 10 aa, Artificial Sequence
  Description of Artificial Sequence: Synthetic peptide
  Seed: RSRYWAIRTR
RDRYWAIRTL

SEQ ID NO: 8051 - protein, 10 aa, Artificial Sequence
  Description of Artificial Sequence: Synthetic peptide
  Seed: RSRYWAIRTR
RDRYWAIRTK

SEQ ID NO: 8052 - protein, 10 aa, Artificial Sequence
  Description of Artificial Sequence: Synthetic peptide
  Seed: RSRYWAIRTR
RDRYWAIRTM

SEQ ID NO: 8053 - protein, 10 aa, Artificial Sequence
  Description of Artificial Sequence: Synthetic peptide
  Seed: RSRYWAIRTR
RDRYWAIRTF

SEQ ID NO: 8054 - protein, 10 aa, Artificial Sequence
  Description of Artificial Sequence: Synthetic peptide
  Seed: RSRYWAIRTR
RDRYWAIRTS

SEQ ID NO: 8055 - protein, 10 aa, Artificial Sequence
  Description of Artificial Sequence: Synthetic peptide
  Seed: RSRYWAIRTR
RDRYWAIRTT

SEQ ID NO: 8056 - protein, 10 aa, Artificial Sequence
  Description of Artificial Sequence: Synthetic peptide
  Seed: RSRYWAIRTR
RDRYWAIRTW

SEQ ID NO: 8057 - protein, 10 aa, Artificial Sequence
  Description of Artificial Sequence: Synthetic peptide
  Seed: RSRYWAIRTR
RDRYWAIRTY

SEQ ID NO: 8058 - protein, 10 aa, Artificial Sequence
  Description of Artificial Sequence: Synthetic peptide
  Seed: RSRYWAIRTR
RDRYWAIRTV

SEQ ID NO: 8059 - protein, 10 aa, Artificial Sequence
  Description of Artificial Sequence: Synthetic peptide
  Seed: RSRYWAIRTR
RCRYWAIRTA

SEQ ID NO: 8060 - protein, 10 aa, Artificial Sequence
  Description of Artificial Sequence: Synthetic peptide
  Seed: RSRYWAIRTR
RCRYWAIRTR

SEQ ID NO: 8061 - protein, 10 aa, Artificial Sequence
  Description of Artificial Sequence: Synthetic peptide
  Seed: RSRYWAIRTR
RCRYWAIRTN

SEQ ID NO: 8062 - protein, 10 aa, Artificial Sequence
  Description of Artificial Sequence: Synthetic peptide
  Seed: RSRYWAIRTR
RCRYWAIRTC

SEQ ID NO: 8063 - protein, 10 aa, Artificial Sequence
  Description of Artificial Sequence: Synthetic peptide
  Seed: RSRYWAIRTR
RCRYWAIRTQ

SEQ ID NO: 8064 - protein, 10 aa, Artificial Sequence
  Description of Artificial Sequence: Synthetic peptide
  Seed: RSRYWAIRTR
RCRYWAIRTE

SEQ ID NO: 8065 - protein, 10 aa, Artificial Sequence
  Description of Artificial Sequence: Synthetic peptide
  Seed: RSRYWAIRTR
RCRYWAIRTG

SEQ ID NO: 8066 - protein, 10 aa, Artificial Sequence
  Description of Artificial Sequence: Synthetic peptide
  Seed: RSRYWAIRTR
RCRYWAIRTH

SEQ ID NO: 8067 - protein, 10 aa, Artificial Sequence
  Description of Artificial Sequence: Synthetic peptide
  Seed: RSRYWAIRTR
RCRYWAIRTI

SEQ ID NO: 8068 - protein, 10 aa, Artificial Sequence
  Description of Artificial Sequence: Synthetic peptide
  Seed: RSRYWAIRTR
RCRYWAIRTL

SEQ ID NO: 8069 - protein, 10 aa, Artificial Sequence
  Description of Artificial Sequence: Synthetic peptide
  Seed: RSRYWAIRTR
RLRYWAIRTV

SEQ ID NO: 8070 - protein, 10 aa, Artificial Sequence
  Description of Artificial Sequence: Synthetic peptide
  Seed: RSRYWAIRTR
RKRYWAIRTR

SEQ ID NO: 8071 - protein, 10 aa, Artificial Sequence
  Description of Artificial Sequence: Synthetic peptide
  Seed: RSRYWAIRTR
RARYWAIRTW

SEQ ID NO: 8072 - protein, 10 aa, Artificial Sequence
  Description of Artificial Sequence: Synthetic peptide
  Seed: RSRYWAIRTR
RWRYWAIRTY

SEQ ID NO: 8073 - protein, 10 aa, Artificial Sequence
  Description of Artificial Sequence: Synthetic peptide
  Seed: RSRYWAIRTR
RWRYWAIRTI

SEQ ID NO: 8074 - protein, 10 aa, Artificial Sequence
  Description of Artificial Sequence: Synthetic peptide
  Seed: RSRYWAIRTR
RWRYWAIRTL

SEQ ID NO: 8075 - protein, 10 aa, Artificial Sequence
  Description of Artificial Sequence: Synthetic peptide
  Seed: RSRYWAIRTR
RWRYWAIRTK

SEQ ID NO: 8076 - protein, 10 aa, Artificial Sequence
  Description of Artificial Sequence: Synthetic peptide
  Seed: RSRYWAIRTR
RWRYWAIRTM

SEQ ID NO: 8077 - protein, 10 aa, Artificial Sequence
  Description of Artificial Sequence: Synthetic peptide
  Seed: RSRYWAIRTR
RWRYWAIRTF

SEQ ID NO: 8078 - protein, 10 aa, Artificial Sequence
  Description of Artificial Sequence: Synthetic peptide
  Seed: RSRYWAIRTR
RWRYWAIRTP

SEQ ID NO: 8079 - protein, 10 aa, Artificial Sequence
  Description of Artificial Sequence: Synthetic peptide
  Seed: RSRYWAIRTR
RWRYWAIRTS

SEQ ID NO: 8080 - protein, 10 aa, Artificial Sequence
  Description of Artificial Sequence: Synthetic peptide
  Seed: RSRYWAIRTR
RWRYWAIRTT

SEQ ID NO: 8081 - protein, 10 aa, Artificial Sequence
  Description of Artificial Sequence: Synthetic peptide
  Seed: RSRYWAIRTR
RWRYWAIRTW

SEQ ID NO: 8082 - protein, 10 aa, Artificial Sequence
  Description of Artificial Sequence: Synthetic peptide
  Seed: RSRYWAIRTR
RWRYWAIRTV

SEQ ID NO: 8083 - protein, 10 aa, Artificial Sequence
  Description of Artificial Sequence: Synthetic peptide
  Seed: RSRYWAIRTR
RYRYWAIRTK

SEQ ID NO: 8084 - protein, 10 aa, Artificial Sequence
  Description of Artificial Sequence: Synthetic peptide
  Seed: RSRYWAIRTR
RYRYWAIRTA

SEQ ID NO: 8085 - protein, 10 aa, Artificial Sequence
  Description of Artificial Sequence: Synthetic peptide
  Seed: RSRYWAIRTR
RYRYWAIRTR

SEQ ID NO: 8086 - protein, 10 aa, Artificial Sequence
  Description of Artificial Sequence: Synthetic peptide
  Seed: RSRYWAIRTR
RYRYWAIRTN

SEQ ID NO: 8087 - protein, 10 aa, Artificial Sequence
  Description of Artificial Sequence: Synthetic peptide
  Seed: RSRYWAIRTR
RYRYWAIRTC

SEQ ID NO: 8088 - protein, 10 aa, Artificial Sequence
  Description of Artificial Sequence: Synthetic peptide
  Seed: RSRYWAIRTR
RYRYWAIRTQ

SEQ ID NO: 8089 - protein, 10 aa, Artificial Sequence
  Description of Artificial Sequence: Synthetic peptide
  Seed: RSRYWAIRTR
RYRYWAIRTE

SEQ ID NO: 8090 - protein, 10 aa, Artificial Sequence
  Description of Artificial Sequence: Synthetic peptide
  Seed: RSRYWAIRTR
RYRYWAIRTG

SEQ ID NO: 8091 - protein, 10 aa, Artificial Sequence
  Description of Artificial Sequence: Synthetic peptide
  Seed: RSRYWAIRTR
RYRYWAIRTH

SEQ ID NO: 8092 - protein, 10 aa, Artificial Sequence
  Description of Artificial Sequence: Synthetic peptide
  Seed: RSRYWAIRTR
RYRYWAIRTI

SEQ ID NO: 8093 - protein, 10 aa, Artificial Sequence
  Description of Artificial Sequence: Synthetic peptide
  Seed: RSRYWAIRTR
RWRYWAIRTH

SEQ ID NO: 8094 - protein, 10 aa, Artificial Sequence
  Description of Artificial Sequence: Synthetic peptide
  Seed: RSRYWAIRTR
RWRYWAIRTG

SEQ ID NO: 8095 - protein, 10 aa, Artificial Sequence
  Description of Artificial Sequence: Synthetic peptide
  Seed: RSRYWAIRTR
RWRYWAIRTE

SEQ ID NO: 8096 - protein, 10 aa, Artificial Sequence
  Description of Artificial Sequence: Synthetic peptide
  Seed: RSRYWAIRTR
RWRYWAIRTQ

SEQ ID NO: 8097 - protein, 10 aa, Artificial Sequence
  Description of Artificial Sequence: Synthetic peptide
  Seed: RSRYWAIRTR
RTRYWAIRTQ

SEQ ID NO: 8098 - protein, 10 aa, Artificial Sequence
  Description of Artificial Sequence: Synthetic peptide
  Seed: RSRYWAIRTR
RTRYWAIRTE

SEQ ID NO: 8099 - protein, 10 aa, Artificial Sequence
  Description of Artificial Sequence: Synthetic peptide
  Seed: RSRYWAIRTR
RTRYWAIRTG

SEQ ID NO: 8100 - protein, 10 aa, Artificial Sequence
  Description of Artificial Sequence: Synthetic peptide
  Seed: RSRYWAIRTR
RTRYWAIRTH

SEQ ID NO: 8101 - protein, 10 aa, Artificial Sequence
  Description of Artificial Sequence: Synthetic peptide
  Seed: RSRYWAIRTR
RTRYWAIRTI

SEQ ID NO: 8102 - protein, 10 aa, Artificial Sequence
  Description of Artificial Sequence: Synthetic peptide
  Seed: RSRYWAIRTR
RTRYWAIRTL

SEQ ID NO: 8103 - protein, 10 aa, Artificial Sequence
  Description of Artificial Sequence: Synthetic peptide
  Seed: RSRYWAIRTR
RTRYWAIRTK

SEQ ID NO: 8104 - protein, 10 aa, Artificial Sequence
  Description of Artificial Sequence: Synthetic peptide
  Seed: RSRYWAIRTR
RTRYWAIRTM

SEQ ID NO: 8105 - protein, 10 aa, Artificial Sequence
  Description of Artificial Sequence: Synthetic peptide
  Seed: RSRYWAIRTR
RTRYWAIRTF

SEQ ID NO: 8106 - protein, 10 aa, Artificial Sequence
  Description of Artificial Sequence: Synthetic peptide
  Seed: RSRYWAIRTR
RTRYWAIRTP

SEQ ID NO: 8107 - protein, 10 aa, Artificial Sequence
  Description of Artificial Sequence: Synthetic peptide
  Seed: RSRYWAIRTR
RTRYWAIRTS

SEQ ID NO: 8108 - protein, 10 aa, Artificial Sequence
  Description of Artificial Sequence: Synthetic peptide
  Seed: RSRYWAIRTR
RTRYWAIRTT

SEQ ID NO: 8109 - protein, 10 aa, Artificial Sequence
  Description of Artificial Sequence: Synthetic peptide
  Seed: RSRYWAIRTR
RTRYWAIRTW

SEQ ID NO: 8110 - protein, 10 aa, Artificial Sequence
  Description of Artificial Sequence: Synthetic peptide
  Seed: RSRYWAIRTR
RTRYWAIRTY

SEQ ID NO: 8111 - protein, 10 aa, Artificial Sequence
  Description of Artificial Sequence: Synthetic peptide
  Seed: RSRYWAIRTR
RTRYWAIRTV

SEQ ID NO: 8112 - protein, 10 aa, Artificial Sequence
  Description of Artificial Sequence: Synthetic peptide
  Seed: RSRYWAIRTR
RWRYWAIRTA

SEQ ID NO: 8113 - protein, 10 aa, Artificial Sequence
  Description of Artificial Sequence: Synthetic peptide
  Seed: RSRYWAIRTR
RWRYWAIRTR

SEQ ID NO: 8114 - protein, 10 aa, Artificial Sequence
  Description of Artificial Sequence: Synthetic peptide
  Seed: RSRYWAIRTR
RWRYWAIRTN

SEQ ID NO: 8115 - protein, 10 aa, Artificial Sequence
  Description of Artificial Sequence: Synthetic peptide
  Seed: RSRYWAIRTR
RWRYWAIRTC

SEQ ID NO: 8116 - protein, 10 aa, Artificial Sequence
  Description of Artificial Sequence: Synthetic peptide
  Seed: RSRYWAIRTR
RYRYWAIRTL

SEQ ID NO: 8117 - protein, 10 aa, Artificial Sequence
  Description of Artificial Sequence: Synthetic peptide
  Seed: RSRYWAIRTR
RYRYWAIRTM

SEQ ID NO: 8118 - protein, 10 aa, Artificial Sequence
  Description of Artificial Sequence: Synthetic peptide
  Seed: RSRYWAIRTR
RTRYWAIRTD

SEQ ID NO: 8119 - protein, 11 aa, Artificial Sequence
  Description of Artificial Sequence: Synthetic peptide
  Seed: RSRYWAIRTRS
RARYWAIRTRE

SEQ ID NO: 8120 - protein, 10 aa, Artificial Sequence
  Description of Artificial Sequence: Synthetic peptide
  Seed: RSRYWAIRTR
RVRYWAIRTW

SEQ ID NO: 8121 - protein, 10 aa, Artificial Sequence
  Description of Artificial Sequence: Synthetic peptide
  Seed: RSRYWAIRTR
RVRYWAIRTY

SEQ ID NO: 8122 - protein, 10 aa, Artificial Sequence
  Description of Artificial Sequence: Synthetic peptide
  Seed: RSRYWAIRTR
RVRYWAIRTV

SEQ ID NO: 8123 - protein, 11 aa, Artificial Sequence
  Description of Artificial Sequence: Synthetic peptide
  Seed: RSRYWAIRTRS
RARYWAIRTRA

SEQ ID NO: 8124 - protein, 11 aa, Artificial Sequence
  Description of Artificial Sequence: Synthetic peptide
  Seed: RSRYWAIRTRS
RARYWAIRTRR

SEQ ID NO: 8125 - protein, 11 aa, Artificial Sequence
  Description of Artificial Sequence: Synthetic peptide
  Seed: RSRYWAIRTRS
RARYWAIRTRN

SEQ ID NO: 8126 - protein, 11 aa, Artificial Sequence
  Description of Artificial Sequence: Synthetic peptide
  Seed: RSRYWAIRTRS
RARYWAIRTRD

SEQ ID NO: 8127 - protein, 11 aa, Artificial Sequence
  Description of Artificial Sequence: Synthetic peptide
  Seed: RSRYWAIRTRS
RARYWAIRTRC

SEQ ID NO: 8128 - protein, 11 aa, Artificial Sequence
  Description of Artificial Sequence: Synthetic peptide
  Seed: RSRYWAIRTRS
RARYWAIRTRQ

SEQ ID NO: 8129 - protein, 11 aa, Artificial Sequence
  Description of Artificial Sequence: Synthetic peptide
  Seed: RSRYWAIRTRS
RARYWAIRTRG

SEQ ID NO: 8130 - protein, 10 aa, Artificial Sequence
  Description of Artificial Sequence: Synthetic peptide
  Seed: RSRYWAIRTR
RYRYWAIRTF

SEQ ID NO: 8131 - protein, 11 aa, Artificial Sequence
  Description of Artificial Sequence: Synthetic peptide
  Seed: RSRYWAIRTRS
RARYWAIRTRH

SEQ ID NO: 8132 - protein, 11 aa, Artificial Sequence
  Description of Artificial Sequence: Synthetic peptide
  Seed: RSRYWAIRTRS
RARYWAIRTRI

SEQ ID NO: 8133 - protein, 11 aa, Artificial Sequence
  Description of Artificial Sequence: Synthetic peptide
  Seed: RSRYWAIRTRS
RARYWAIRTRL

SEQ ID NO: 8134 - protein, 11 aa, Artificial Sequence
  Description of Artificial Sequence: Synthetic peptide
  Seed: RSRYWAIRTRS
RARYWAIRTRK

SEQ ID NO: 8135 - protein, 11 aa, Artificial Sequence
  Description of Artificial Sequence: Synthetic peptide
  Seed: RSRYWAIRTRS
RARYWAIRTRM

SEQ ID NO: 8136 - protein, 11 aa, Artificial Sequence
  Description of Artificial Sequence: Synthetic peptide
  Seed: RSRYWAIRTRS
RARYWAIRTRF

SEQ ID NO: 8137 - protein, 11 aa, Artificial Sequence
  Description of Artificial Sequence: Synthetic peptide
  Seed: RSRYWAIRTRS
RARYWAIRTRP

SEQ ID NO: 8138 - protein, 11 aa, Artificial Sequence
  Description of Artificial Sequence: Synthetic peptide
  Seed: RSRYWAIRTRS
RARYWAIRTRS

SEQ ID NO: 8139 - protein, 11 aa, Artificial Sequence
  Description of Artificial Sequence: Synthetic peptide
  Seed: RSRYWAIRTRS
RARYWAIRTRT

SEQ ID NO: 8140 - protein, 10 aa, Artificial Sequence
  Description of Artificial Sequence: Synthetic peptide
  Seed: RSRYWAIRTR
RVRYWAIRTT

SEQ ID NO: 8141 - protein, 10 aa, Artificial Sequence
  Description of Artificial Sequence: Synthetic peptide
  Seed: RSRYWAIRTR
RVRYWAIRTS

SEQ ID NO: 8142 - protein, 10 aa, Artificial Sequence
  Description of Artificial Sequence: Synthetic peptide
  Seed: RSRYWAIRTR
RVRYWAIRTP

SEQ ID NO: 8143 - protein, 10 aa, Artificial Sequence
  Description of Artificial Sequence: Synthetic peptide
  Seed: RSRYWAIRTR
RVRYWAIRTF

SEQ ID NO: 8144 - protein, 10 aa, Artificial Sequence
  Description of Artificial Sequence: Synthetic peptide
  Seed: RSRYWAIRTR
RYRYWAIRTP

SEQ ID NO: 8145 - protein, 10 aa, Artificial Sequence
  Description of Artificial Sequence: Synthetic peptide
  Seed: RSRYWAIRTR
RYRYWAIRTS

SEQ ID NO: 8146 - protein, 10 aa, Artificial Sequence
  Description of Artificial Sequence: Synthetic peptide
  Seed: RSRYWAIRTR
RYRYWAIRTT

SEQ ID NO: 8147 - protein, 10 aa, Artificial Sequence
  Description of Artificial Sequence: Synthetic peptide
  Seed: RSRYWAIRTR
RYRYWAIRTW

SEQ ID NO: 8148 - protein, 10 aa, Artificial Sequence
  Description of Artificial Sequence: Synthetic peptide
  Seed: RSRYWAIRTR
RYRYWAIRTY

SEQ ID NO: 8149 - protein, 10 aa, Artificial Sequence
  Description of Artificial Sequence: Synthetic peptide
  Seed: RSRYWAIRTR
RYRYWAIRTV

SEQ ID NO: 8150 - protein, 10 aa, Artificial Sequence
  Description of Artificial Sequence: Synthetic peptide
  Seed: RSRYWAIRTR
RVRYWAIRTA

SEQ ID NO: 8151 - protein, 10 aa, Artificial Sequence
  Description of Artificial Sequence: Synthetic peptide
  Seed: RSRYWAIRTR
RVRYWAIRTR

SEQ ID NO: 8152 - protein, 10 aa, Artificial Sequence
  Description of Artificial Sequence: Synthetic peptide
  Seed: RSRYWAIRTR
RVRYWAIRTN

SEQ ID NO: 8153 - protein, 10 aa, Artificial Sequence
  Description of Artificial Sequence: Synthetic peptide
  Seed: RSRYWAIRTR
RVRYWAIRTD

SEQ ID NO: 8154 - protein, 10 aa, Artificial Sequence
  Description of Artificial Sequence: Synthetic peptide
  Seed: RSRYWAIRTR
RVRYWAIRTC

SEQ ID NO: 8155 - protein, 10 aa, Artificial Sequence
  Description of Artificial Sequence: Synthetic peptide
  Seed: RSRYWAIRTR
RVRYWAIRTQ

SEQ ID NO: 8156 - protein, 10 aa, Artificial Sequence
  Description of Artificial Sequence: Synthetic peptide
  Seed: RSRYWAIRTR
RVRYWAIRTE

SEQ ID NO: 8157 - protein, 10 aa, Artificial Sequence
  Description of Artificial Sequence: Synthetic peptide
  Seed: RSRYWAIRTR
RVRYWAIRTG

SEQ ID NO: 8158 - protein, 10 aa, Artificial Sequence
  Description of Artificial Sequence: Synthetic peptide
  Seed: RSRYWAIRTR
RVRYWAIRTH

SEQ ID NO: 8159 - protein, 10 aa, Artificial Sequence
  Description of Artificial Sequence: Synthetic peptide
  Seed: RSRYWAIRTR
RVRYWAIRTI

SEQ ID NO: 8160 - protein, 10 aa, Artificial Sequence
  Description of Artificial Sequence: Synthetic peptide
  Seed: RSRYWAIRTR
RVRYWAIRTL

SEQ ID NO: 8161 - protein, 10 aa, Artificial Sequence
  Description of Artificial Sequence: Synthetic peptide
  Seed: RSRYWAIRTR
RVRYWAIRTK

SEQ ID NO: 8162 - protein, 10 aa, Artificial Sequence
  Description of Artificial Sequence: Synthetic peptide
  Seed: RSRYWAIRTR
RVRYWAIRTM

SEQ ID NO: 8163 - protein, 10 aa, Artificial Sequence
  Description of Artificial Sequence: Synthetic peptide
  Seed: RSRYWAIRTR
RTRYWAIRTC

SEQ ID NO: 8164 - protein, 10 aa, Artificial Sequence
  Description of Artificial Sequence: Synthetic peptide
  Seed: RSRYWAIRTR
RTRYWAIRTN

SEQ ID NO: 8165 - protein, 10 aa, Artificial Sequence
  Description of Artificial Sequence: Synthetic peptide
  Seed: RSRYWAIRTR
RKRYWAIRTN

SEQ ID NO: 8166 - protein, 10 aa, Artificial Sequence
  Description of Artificial Sequence: Synthetic peptide
  Seed: RSRYWAIRTR
RMRYWAIRTY

SEQ ID NO: 8167 - protein, 10 aa, Artificial Sequence
  Description of Artificial Sequence: Synthetic peptide
  Seed: RSRYWAIRTR
RMRYWAIRTI

SEQ ID NO: 8168 - protein, 10 aa, Artificial Sequence
  Description of Artificial Sequence: Synthetic peptide
  Seed: RSRYWAIRTR
RMRYWAIRTL

SEQ ID NO: 8169 - protein, 10 aa, Artificial Sequence
  Description of Artificial Sequence: Synthetic peptide
  Seed: RSRYWAIRTR
RMRYWAIRTK

SEQ ID NO: 8170 - protein, 10 aa, Artificial Sequence
  Description of Artificial Sequence: Synthetic peptide
  Seed: RSRYWAIRTR
RMRYWAIRTM

SEQ ID NO: 8171 - protein, 10 aa, Artificial Sequence
  Description of Artificial Sequence: Synthetic peptide
  Seed: RSRYWAIRTR
RMRYWAIRTF

SEQ ID NO: 8172 - protein, 10 aa, Artificial Sequence
  Description of Artificial Sequence: Synthetic peptide
  Seed: RSRYWAIRTR
RMRYWAIRTP

SEQ ID NO: 8173 - protein, 10 aa, Artificial Sequence
  Description of Artificial Sequence: Synthetic peptide
  Seed: RSRYWAIRTR
RMRYWAIRTS

SEQ ID NO: 8174 - protein, 10 aa, Artificial Sequence
  Description of Artificial Sequence: Synthetic peptide
  Seed: RSRYWAIRTR
RMRYWAIRTT

SEQ ID NO: 8175 - protein, 10 aa, Artificial Sequence
  Description of Artificial Sequence: Synthetic peptide
  Seed: RSRYWAIRTR
RMRYWAIRTW

SEQ ID NO: 8176 - protein, 10 aa, Artificial Sequence
  Description of Artificial Sequence: Synthetic peptide
  Seed: RSRYWAIRTR
RMRYWAIRTV

SEQ ID NO: 8177 - protein, 10 aa, Artificial Sequence
  Description of Artificial Sequence: Synthetic peptide
  Seed: RSRYWAIRTR
RFRYWAIRTK

SEQ ID NO: 8178 - protein, 10 aa, Artificial Sequence
  Description of Artificial Sequence: Synthetic peptide
  Seed: RSRYWAIRTR
RFRYWAIRTA

SEQ ID NO: 8179 - protein, 10 aa, Artificial Sequence
  Description of Artificial Sequence: Synthetic peptide
  Seed: RSRYWAIRTR
RFRYWAIRTR

SEQ ID NO: 8180 - protein, 10 aa, Artificial Sequence
  Description of Artificial Sequence: Synthetic peptide
  Seed: RSRYWAIRTR
RFRYWAIRTN

SEQ ID NO: 8181 - protein, 10 aa, Artificial Sequence
  Description of Artificial Sequence: Synthetic peptide
  Seed: RSRYWAIRTR
RFRYWAIRTC

SEQ ID NO: 8182 - protein, 10 aa, Artificial Sequence
  Description of Artificial Sequence: Synthetic peptide
  Seed: RSRYWAIRTR
RFRYWAIRTQ

SEQ ID NO: 8183 - protein, 10 aa, Artificial Sequence
  Description of Artificial Sequence: Synthetic peptide
  Seed: RSRYWAIRTR
RFRYWAIRTE

SEQ ID NO: 8184 - protein, 10 aa, Artificial Sequence
  Description of Artificial Sequence: Synthetic peptide
  Seed: RSRYWAIRTR
RFRYWAIRTG

SEQ ID NO: 8185 - protein, 10 aa, Artificial Sequence
  Description of Artificial Sequence: Synthetic peptide
  Seed: RSRYWAIRTR
RFRYWAIRTH

SEQ ID NO: 8186 - protein, 10 aa, Artificial Sequence
  Description of Artificial Sequence: Synthetic peptide
  Seed: RSRYWAIRTR
RFRYWAIRTI

SEQ ID NO: 8187 - protein, 10 aa, Artificial Sequence
  Description of Artificial Sequence: Synthetic peptide
  Seed: RSRYWAIRTR
RMRYWAIRTH

SEQ ID NO: 8188 - protein, 10 aa, Artificial Sequence
  Description of Artificial Sequence: Synthetic peptide
  Seed: RSRYWAIRTR
RMRYWAIRTG

SEQ ID NO: 8189 - protein, 10 aa, Artificial Sequence
  Description of Artificial Sequence: Synthetic peptide
  Seed: RSRYWAIRTR
RMRYWAIRTE

SEQ ID NO: 8190 - protein, 10 aa, Artificial Sequence
  Description of Artificial Sequence: Synthetic peptide
  Seed: RSRYWAIRTR
RMRYWAIRTQ

SEQ ID NO: 8191 - protein, 10 aa, Artificial Sequence
  Description of Artificial Sequence: Synthetic peptide
  Seed: RSRYWAIRTR
RKRYWAIRTC

SEQ ID NO: 8192 - protein, 10 aa, Artificial Sequence
  Description of Artificial Sequence: Synthetic peptide
  Seed: RSRYWAIRTR
RKRYWAIRTQ

SEQ ID NO: 8193 - protein, 10 aa, Artificial Sequence
  Description of Artificial Sequence: Synthetic peptide
  Seed: RSRYWAIRTR
RKRYWAIRTE

SEQ ID NO: 8194 - protein, 10 aa, Artificial Sequence
  Description of Artificial Sequence: Synthetic peptide
  Seed: RSRYWAIRTR
RKRYWAIRTG

SEQ ID NO: 8195 - protein, 10 aa, Artificial Sequence
  Description of Artificial Sequence: Synthetic peptide
  Seed: RSRYWAIRTR
RKRYWAIRTH

SEQ ID NO: 8196 - protein, 10 aa, Artificial Sequence
  Description of Artificial Sequence: Synthetic peptide
  Seed: RSRYWAIRTR
RKRYWAIRTI

SEQ ID NO: 8197 - protein, 10 aa, Artificial Sequence
  Description of Artificial Sequence: Synthetic peptide
  Seed: RSRYWAIRTR
RKRYWAIRTL

SEQ ID NO: 8198 - protein, 10 aa, Artificial Sequence
  Description of Artificial Sequence: Synthetic peptide
  Seed: RSRYWAIRTR
RKRYWAIRTK

SEQ ID NO: 8199 - protein, 10 aa, Artificial Sequence
  Description of Artificial Sequence: Synthetic peptide
  Seed: RSRYWAIRTR
RKRYWAIRTM

SEQ ID NO: 8200 - protein, 10 aa, Artificial Sequence
  Description of Artificial Sequence: Synthetic peptide
  Seed: RSRYWAIRTR
RKRYWAIRTF

SEQ ID NO: 8201 - protein, 10 aa, Artificial Sequence
  Description of Artificial Sequence: Synthetic peptide
  Seed: RSRYWAIRTR
RKRYWAIRTS

SEQ ID NO: 8202 - protein, 10 aa, Artificial Sequence
  Description of Artificial Sequence: Synthetic peptide
  Seed: RSRYWAIRTR
RKRYWAIRTT

SEQ ID NO: 8203 - protein, 10 aa, Artificial Sequence
  Description of Artificial Sequence: Synthetic peptide
  Seed: RSRYWAIRTR
RKRYWAIRTW

SEQ ID NO: 8204 - protein, 10 aa, Artificial Sequence
  Description of Artificial Sequence: Synthetic peptide
  Seed: RSRYWAIRTR
RKRYWAIRTY

SEQ ID NO: 8205 - protein, 10 aa, Artificial Sequence
  Description of Artificial Sequence: Synthetic peptide
  Seed: RSRYWAIRTR
RKRYWAIRTV

SEQ ID NO: 8206 - protein, 10 aa, Artificial Sequence
  Description of Artificial Sequence: Synthetic peptide
  Seed: RSRYWAIRTR
RMRYWAIRTA

SEQ ID NO: 8207 - protein, 10 aa, Artificial Sequence
  Description of Artificial Sequence: Synthetic peptide
  Seed: RSRYWAIRTR
RMRYWAIRTR

SEQ ID NO: 8208 - protein, 10 aa, Artificial Sequence
  Description of Artificial Sequence: Synthetic peptide
  Seed: RSRYWAIRTR
RMRYWAIRTN

SEQ ID NO: 8209 - protein, 10 aa, Artificial Sequence
  Description of Artificial Sequence: Synthetic peptide
  Seed: RSRYWAIRTR
RMRYWAIRTC

SEQ ID NO: 8210 - protein, 10 aa, Artificial Sequence
  Description of Artificial Sequence: Synthetic peptide
  Seed: RSRYWAIRTR
RFRYWAIRTL

SEQ ID NO: 8211 - protein, 10 aa, Artificial Sequence
  Description of Artificial Sequence: Synthetic peptide
  Seed: RSRYWAIRTR
RFRYWAIRTM

SEQ ID NO: 8212 - protein, 10 aa, Artificial Sequence
  Description of Artificial Sequence: Synthetic peptide
  Seed: RSRYWAIRTR
RTRYWAIRTR

SEQ ID NO: 8213 - protein, 10 aa, Artificial Sequence
  Description of Artificial Sequence: Synthetic peptide
  Seed: RSRYWAIRTR
RSRYWAIRTL

SEQ ID NO: 8214 - protein, 10 aa, Artificial Sequence
  Description of Artificial Sequence: Synthetic peptide
  Seed: RSRYWAIRTR
RPRYWAIRTV

SEQ ID NO: 8215 - protein, 10 aa, Artificial Sequence
  Description of Artificial Sequence: Synthetic peptide
  Seed: RSRYWAIRTR
RSRYWAIRTA

SEQ ID NO: 8216 - protein, 10 aa, Artificial Sequence
  Description of Artificial Sequence: Synthetic peptide
  Seed: RSRYWAIRTR
RSRYWAIRTN

SEQ ID NO: 8217 - protein, 10 aa, Artificial Sequence
  Description of Artificial Sequence: Synthetic peptide
  Seed: RSRYWAIRTR
RSRYWAIRTC

SEQ ID NO: 8218 - protein, 10 aa, Artificial Sequence
  Description of Artificial Sequence: Synthetic peptide
  Seed: RSRYWAIRTR
RSRYWAIRTQ

SEQ ID NO: 8219 - protein, 10 aa, Artificial Sequence
  Description of Artificial Sequence: Synthetic peptide
  Seed: RSRYWAIRTR
RSRYWAIRTE

SEQ ID NO: 8220 - protein, 10 aa, Artificial Sequence
  Description of Artificial Sequence: Synthetic peptide
  Seed: RSRYWAIRTR
RSRYWAIRTG

SEQ ID NO: 8221 - protein, 10 aa, Artificial Sequence
  Description of Artificial Sequence: Synthetic peptide
  Seed: RSRYWAIRTR
RSRYWAIRTH

SEQ ID NO: 8222 - protein, 10 aa, Artificial Sequence
  Description of Artificial Sequence: Synthetic peptide
  Seed: RSRYWAIRTR
RSRYWAIRTI

SEQ ID NO: 8223 - protein, 10 aa, Artificial Sequence
  Description of Artificial Sequence: Synthetic peptide
  Seed: RSRYWAIRTR
RFRYWAIRTF

SEQ ID NO: 8224 - protein, 10 aa, Artificial Sequence
  Description of Artificial Sequence: Synthetic peptide
  Seed: RSRYWAIRTR
RSRYWAIRTM

SEQ ID NO: 8225 - protein, 10 aa, Artificial Sequence
  Description of Artificial Sequence: Synthetic peptide
  Seed: RSRYWAIRTR
RSRYWAIRTF

SEQ ID NO: 8226 - protein, 10 aa, Artificial Sequence
  Description of Artificial Sequence: Synthetic peptide
  Seed: RSRYWAIRTR
RSRYWAIRTP

SEQ ID NO: 8227 - protein, 10 aa, Artificial Sequence
  Description of Artificial Sequence: Synthetic peptide
  Seed: RSRYWAIRTR
RSRYWAIRTS

SEQ ID NO: 8228 - protein, 10 aa, Artificial Sequence
  Description of Artificial Sequence: Synthetic peptide
  Seed: RSRYWAIRTR
RSRYWAIRTT

SEQ ID NO: 8229 - protein, 10 aa, Artificial Sequence
  Description of Artificial Sequence: Synthetic peptide
  Seed: RSRYWAIRTR
RSRYWAIRTW

SEQ ID NO: 8230 - protein, 10 aa, Artificial Sequence
  Description of Artificial Sequence: Synthetic peptide
  Seed: RSRYWAIRTR
RSRYWAIRTY

SEQ ID NO: 8231 - protein, 10 aa, Artificial Sequence
  Description of Artificial Sequence: Synthetic peptide
  Seed: RSRYWAIRTR
RSRYWAIRTV

SEQ ID NO: 8232 - protein, 10 aa, Artificial Sequence
  Description of Artificial Sequence: Synthetic peptide
  Seed: RSRYWAIRTR
RTRYWAIRTA

SEQ ID NO: 8233 - protein, 10 aa, Artificial Sequence
  Description of Artificial Sequence: Synthetic peptide
  Seed: RSRYWAIRTR
RPRYWAIRTY

SEQ ID NO: 8234 - protein, 10 aa, Artificial Sequence
  Description of Artificial Sequence: Synthetic peptide
  Seed: RSRYWAIRTR
RPRYWAIRTW

SEQ ID NO: 8235 - protein, 10 aa, Artificial Sequence
  Description of Artificial Sequence: Synthetic peptide
  Seed: RSRYWAIRTR
RPRYWAIRTT

SEQ ID NO: 8236 - protein, 10 aa, Artificial Sequence
  Description of Artificial Sequence: Synthetic peptide
  Seed: RSRYWAIRTR
RPRYWAIRTS

SEQ ID NO: 8237 - protein, 10 aa, Artificial Sequence
  Description of Artificial Sequence: Synthetic peptide
  Seed: RSRYWAIRTR
RFRYWAIRTP

SEQ ID NO: 8238 - protein, 10 aa, Artificial Sequence
  Description of Artificial Sequence: Synthetic peptide
  Seed: RSRYWAIRTR
RFRYWAIRTS

SEQ ID NO: 8239 - protein, 10 aa, Artificial Sequence
  Description of Artificial Sequence: Synthetic peptide
  Seed: RSRYWAIRTR
RFRYWAIRTT

SEQ ID NO: 8240 - protein, 10 aa, Artificial Sequence
  Description of Artificial Sequence: Synthetic peptide
  Seed: RSRYWAIRTR
RFRYWAIRTW

SEQ ID NO: 8241 - protein, 10 aa, Artificial Sequence
  Description of Artificial Sequence: Synthetic peptide
  Seed: RSRYWAIRTR
RFRYWAIRTY

SEQ ID NO: 8242 - protein, 10 aa, Artificial Sequence
  Description of Artificial Sequence: Synthetic peptide
  Seed: RSRYWAIRTR
RFRYWAIRTV

SEQ ID NO: 8243 - protein, 10 aa, Artificial Sequence
  Description of Artificial Sequence: Synthetic peptide
  Seed: RSRYWAIRTR
RPRYWAIRTA

SEQ ID NO: 8244 - protein, 10 aa, Artificial Sequence
  Description of Artificial Sequence: Synthetic peptide
  Seed: RSRYWAIRTR
RPRYWAIRTR

SEQ ID NO: 8245 - protein, 10 aa, Artificial Sequence
  Description of Artificial Sequence: Synthetic peptide
  Seed: RSRYWAIRTR
RPRYWAIRTN

SEQ ID NO: 8246 - protein, 10 aa, Artificial Sequence
  Description of Artificial Sequence: Synthetic peptide
  Seed: RSRYWAIRTR
RPRYWAIRTC

SEQ ID NO: 8247 - protein, 10 aa, Artificial Sequence
  Description of Artificial Sequence: Synthetic peptide
  Seed: RSRYWAIRTR
RPRYWAIRTQ

SEQ ID NO: 8248 - protein, 10 aa, Artificial Sequence
  Description of Artificial Sequence: Synthetic peptide
  Seed: RSRYWAIRTR
RPRYWAIRTE

SEQ ID NO: 8249 - protein, 10 aa, Artificial Sequence
  Description of Artificial Sequence: Synthetic peptide
  Seed: RSRYWAIRTR
RPRYWAIRTG

SEQ ID NO: 8250 - protein, 10 aa, Artificial Sequence
  Description of Artificial Sequence: Synthetic peptide
  Seed: RSRYWAIRTR
RPRYWAIRTH

SEQ ID NO: 8251 - protein, 10 aa, Artificial Sequence
  Description of Artificial Sequence: Synthetic peptide
  Seed: RSRYWAIRTR
RPRYWAIRTI

SEQ ID NO: 8252 - protein, 10 aa, Artificial Sequence
  Description of Artificial Sequence: Synthetic peptide
  Seed: RSRYWAIRTR
RPRYWAIRTL

SEQ ID NO: 8253 - protein, 10 aa, Artificial Sequence
  Description of Artificial Sequence: Synthetic peptide
  Seed: RSRYWAIRTR
RPRYWAIRTK

SEQ ID NO: 8254 - protein, 10 aa, Artificial Sequence
  Description of Artificial Sequence: Synthetic peptide
  Seed: RSRYWAIRTR
RPRYWAIRTM

SEQ ID NO: 8255 - protein, 10 aa, Artificial Sequence
  Description of Artificial Sequence: Synthetic peptide
  Seed: RSRYWAIRTR
RPRYWAIRTF

SEQ ID NO: 8256 - protein, 10 aa, Artificial Sequence
  Description of Artificial Sequence: Synthetic peptide
  Seed: RSRYWAIRTR
RARYWAIRTY

SEQ ID NO: 8257 - protein, 10 aa, Artificial Sequence
  Description of Artificial Sequence: Synthetic peptide
  Seed: RSRYWAIRTR
RARYWAIRTT

SEQ ID NO: 8258 - protein, 11 aa, Artificial Sequence
  Description of Artificial Sequence: Synthetic peptide
  Seed: RSRYWAIRTRS
RARYWAIRTRY

SEQ ID NO: 8259 - protein, 9 aa, Artificial Sequence
  Description of Artificial Sequence: Synthetic peptide
  Seed: RSRYWAIRT
RARYWAIRY

SEQ ID NO: 8260 - protein, 9 aa, Artificial Sequence
  Description of Artificial Sequence: Synthetic peptide
  Seed: RSRYWAIRT
RARYWAIRH

SEQ ID NO: 8261 - protein, 9 aa, Artificial Sequence
  Description of Artificial Sequence: Synthetic peptide
  Seed: RSRYWAIRT
RARYWAIRI

SEQ ID NO: 8262 - protein, 9 aa, Artificial Sequence
  Description of Artificial Sequence: Synthetic peptide
  Seed: RSRYWAIRT
RARYWAIRL

SEQ ID NO: 8263 - protein, 9 aa, Artificial Sequence
  Description of Artificial Sequence: Synthetic peptide
  Seed: RSRYWAIRT
RARYWAIRK

SEQ ID NO: 8264 - protein, 9 aa, Artificial Sequence
  Description of Artificial Sequence: Synthetic peptide
  Seed: RSRYWAIRT
RARYWAIRM

SEQ ID NO: 8265 - protein, 9 aa, Artificial Sequence
  Description of Artificial Sequence: Synthetic peptide
  Seed: RSRYWAIRT
RARYWAIRF

SEQ ID NO: 8266 - protein, 9 aa, Artificial Sequence
  Description of Artificial Sequence: Synthetic peptide
  Seed: RSRYWAIRT
RARYWAIRP

SEQ ID NO: 8267 - protein, 9 aa, Artificial Sequence
  Description of Artificial Sequence: Synthetic peptide
  Seed: RSRYWAIRT
RARYWAIRS

SEQ ID NO: 8268 - protein, 9 aa, Artificial Sequence
  Description of Artificial Sequence: Synthetic peptide
  Seed: RSRYWAIRT
RARYWAIRT

SEQ ID NO: 8269 - protein, 9 aa, Artificial Sequence
  Description of Artificial Sequence: Synthetic peptide
  Seed: RSRYWAIRT
RARYWAIRV

SEQ ID NO: 8270 - protein, 9 aa, Artificial Sequence
  Description of Artificial Sequence: Synthetic peptide
  Seed: RSRYWAIRT
RNRYWAIRP

SEQ ID NO: 8271 - protein, 9 aa, Artificial Sequence
  Description of Artificial Sequence: Synthetic peptide
  Seed: RSRYWAIRT
RRRYWAIRK

SEQ ID NO: 8272 - protein, 9 aa, Artificial Sequence
  Description of Artificial Sequence: Synthetic peptide
  Seed: RSRYWAIRT
RNRYWAIRA

SEQ ID NO: 8273 - protein, 9 aa, Artificial Sequence
  Description of Artificial Sequence: Synthetic peptide
  Seed: RSRYWAIRT
RNRYWAIRR

SEQ ID NO: 8274 - protein, 9 aa, Artificial Sequence
  Description of Artificial Sequence: Synthetic peptide
  Seed: RSRYWAIRT
RNRYWAIRC

SEQ ID NO: 8275 - protein, 9 aa, Artificial Sequence
  Description of Artificial Sequence: Synthetic peptide
  Seed: RSRYWAIRT
RNRYWAIRG

SEQ ID NO: 8276 - protein, 9 aa, Artificial Sequence
  Description of Artificial Sequence: Synthetic peptide
  Seed: RSRYWAIRT
RNRYWAIRI

SEQ ID NO: 8277 - protein, 9 aa, Artificial Sequence
  Description of Artificial Sequence: Synthetic peptide
  Seed: RSRYWAIRT
RNRYWAIRL

SEQ ID NO: 8278 - protein, 9 aa, Artificial Sequence
  Description of Artificial Sequence: Synthetic peptide
  Seed: RSRYWAIRT
RNRYWAIRK

SEQ ID NO: 8279 - protein, 9 aa, Artificial Sequence
  Description of Artificial Sequence: Synthetic peptide
  Seed: RSRYWAIRT
RNRYWAIRM

SEQ ID NO: 8280 - protein, 9 aa, Artificial Sequence
  Description of Artificial Sequence: Synthetic peptide
  Seed: RSRYWAIRT
RARYWAIRG

SEQ ID NO: 8281 - protein, 9 aa, Artificial Sequence
  Description of Artificial Sequence: Synthetic peptide
  Seed: RSRYWAIRT
RARYWAIRE

SEQ ID NO: 8282 - protein, 9 aa, Artificial Sequence
  Description of Artificial Sequence: Synthetic peptide
  Seed: RSRYWAIRT
RARYWAIRQ

SEQ ID NO: 8283 - protein, 9 aa, Artificial Sequence
  Description of Artificial Sequence: Synthetic peptide
  Seed: RSRYWAIRT
RARYWAIRC

SEQ ID NO: 8284 - protein, 8 aa, Artificial Sequence
  Description of Artificial Sequence: Synthetic peptide
  Seed: RSRYWAIR
RYRYWAIY

SEQ ID NO: 8285 - protein, 8 aa, Artificial Sequence
  Description of Artificial Sequence: Synthetic peptide
  Seed: RSRYWAIR
RYRYWAIV

SEQ ID NO: 8286 - protein, 8 aa, Artificial Sequence
  Description of Artificial Sequence: Synthetic peptide
  Seed: RSRYWAIR
RVRYWAIA

SEQ ID NO: 8287 - protein, 8 aa, Artificial Sequence
  Description of Artificial Sequence: Synthetic peptide
  Seed: RSRYWAIR
RVRYWAIR

SEQ ID NO: 8288 - protein, 8 aa, Artificial Sequence
  Description of Artificial Sequence: Synthetic peptide
  Seed: RSRYWAIR
RVRYWAIN

SEQ ID NO: 8289 - protein, 8 aa, Artificial Sequence
  Description of Artificial Sequence: Synthetic peptide
  Seed: RSRYWAIR
RVRYWAIG

SEQ ID NO: 8290 - protein, 8 aa, Artificial Sequence
  Description of Artificial Sequence: Synthetic peptide
  Seed: RSRYWAIR
RVRYWAII

SEQ ID NO: 8291 - protein, 8 aa, Artificial Sequence
  Description of Artificial Sequence: Synthetic peptide
  Seed: RSRYWAIR
RVRYWAIL

SEQ ID NO: 8292 - protein, 8 aa, Artificial Sequence
  Description of Artificial Sequence: Synthetic peptide
  Seed: RSRYWAIR
RVRYWAIK

SEQ ID NO: 8293 - protein, 8 aa, Artificial Sequence
  Description of Artificial Sequence: Synthetic peptide
  Seed: RSRYWAIR
RVRYWAIM

SEQ ID NO: 8294 - protein, 8 aa, Artificial Sequence
  Description of Artificial Sequence: Synthetic peptide
  Seed: RSRYWAIR
RVRYWAIF

SEQ ID NO: 8295 - protein, 8 aa, Artificial Sequence
  Description of Artificial Sequence: Synthetic peptide
  Seed: RSRYWAIR
RVRYWAIP

SEQ ID NO: 8296 - protein, 8 aa, Artificial Sequence
  Description of Artificial Sequence: Synthetic peptide
  Seed: RSRYWAIR
RVRYWAIS

SEQ ID NO: 8297 - protein, 8 aa, Artificial Sequence
  Description of Artificial Sequence: Synthetic peptide
  Seed: RSRYWAIR
RVRYWAIT

SEQ ID NO: 8298 - protein, 8 aa, Artificial Sequence
  Description of Artificial Sequence: Synthetic peptide
  Seed: RSRYWAIR
RVRYWAIY

SEQ ID NO: 8299 - protein, 8 aa, Artificial Sequence
  Description of Artificial Sequence: Synthetic peptide
  Seed: RSRYWAIR
RVRYWAIV

SEQ ID NO: 8300 - protein, 9 aa, Artificial Sequence
  Description of Artificial Sequence: Synthetic peptide
  Seed: RSRYWAIRT
RARYWAIRA

SEQ ID NO: 8301 - protein, 9 aa, Artificial Sequence
  Description of Artificial Sequence: Synthetic peptide
  Seed: RSRYWAIRT
RARYWAIRR

SEQ ID NO: 8302 - protein, 9 aa, Artificial Sequence
  Description of Artificial Sequence: Synthetic peptide
  Seed: RSRYWAIRT
RARYWAIRN

SEQ ID NO: 8303 - protein, 9 aa, Artificial Sequence
  Description of Artificial Sequence: Synthetic peptide
  Seed: RSRYWAIRT
RNRYWAIRF

SEQ ID NO: 8304 - protein, 9 aa, Artificial Sequence
  Description of Artificial Sequence: Synthetic peptide
  Seed: RSRYWAIRT
RNRYWAIRS

SEQ ID NO: 8305 - protein, 8 aa, Artificial Sequence
  Description of Artificial Sequence: Synthetic peptide
  Seed: RSRYWAIR
RYRYWAIP

SEQ ID NO: 8306 - protein, 9 aa, Artificial Sequence
  Description of Artificial Sequence: Synthetic peptide
  Seed: RSRYWAIRT
RGRYWAIRE

SEQ ID NO: 8307 - protein, 9 aa, Artificial Sequence
  Description of Artificial Sequence: Synthetic peptide
  Seed: RSRYWAIRT
RQRYWAIRT

SEQ ID NO: 8308 - protein, 9 aa, Artificial Sequence
  Description of Artificial Sequence: Synthetic peptide
  Seed: RSRYWAIRT
RQRYWAIRY

SEQ ID NO: 8309 - protein, 9 aa, Artificial Sequence
  Description of Artificial Sequence: Synthetic peptide
  Seed: RSRYWAIRT
RQRYWAIRV

SEQ ID NO: 8310 - protein, 9 aa, Artificial Sequence
  Description of Artificial Sequence: Synthetic peptide
  Seed: RSRYWAIRT
RERYWAIRK

SEQ ID NO: 8311 - protein, 9 aa, Artificial Sequence
  Description of Artificial Sequence: Synthetic peptide
  Seed: RSRYWAIRT
RGRYWAIRA

SEQ ID NO: 8312 - protein, 9 aa, Artificial Sequence
  Description of Artificial Sequence: Synthetic peptide
  Seed: RSRYWAIRT
RGRYWAIRR

SEQ ID NO: 8313 - protein, 9 aa, Artificial Sequence
  Description of Artificial Sequence: Synthetic peptide
  Seed: RSRYWAIRT
RGRYWAIRN

SEQ ID NO: 8314 - protein, 9 aa, Artificial Sequence
  Description of Artificial Sequence: Synthetic peptide
  Seed: RSRYWAIRT
RGRYWAIRC

SEQ ID NO: 8315 - protein, 9 aa, Artificial Sequence
  Description of Artificial Sequence: Synthetic peptide
  Seed: RSRYWAIRT
RGRYWAIRQ

SEQ ID NO: 8316 - protein, 9 aa, Artificial Sequence
  Description of Artificial Sequence: Synthetic peptide
  Seed: RSRYWAIRT
RGRYWAIRG

SEQ ID NO: 8317 - protein, 9 aa, Artificial Sequence
  Description of Artificial Sequence: Synthetic peptide
  Seed: RSRYWAIRT
RNRYWAIRT

SEQ ID NO: 8318 - protein, 9 aa, Artificial Sequence
  Description of Artificial Sequence: Synthetic peptide
  Seed: RSRYWAIRT
RGRYWAIRH

SEQ ID NO: 8319 - protein, 9 aa, Artificial Sequence
  Description of Artificial Sequence: Synthetic peptide
  Seed: RSRYWAIRT
RGRYWAIRI

SEQ ID NO: 8320 - protein, 9 aa, Artificial Sequence
  Description of Artificial Sequence: Synthetic peptide
  Seed: RSRYWAIRT
RGRYWAIRL

SEQ ID NO: 8321 - protein, 9 aa, Artificial Sequence
  Description of Artificial Sequence: Synthetic peptide
  Seed: RSRYWAIRT
RGRYWAIRK

SEQ ID NO: 8322 - protein, 9 aa, Artificial Sequence
  Description of Artificial Sequence: Synthetic peptide
  Seed: RSRYWAIRT
RGRYWAIRM

SEQ ID NO: 8323 - protein, 9 aa, Artificial Sequence
  Description of Artificial Sequence: Synthetic peptide
  Seed: RSRYWAIRT
RGRYWAIRF

SEQ ID NO: 8324 - protein, 9 aa, Artificial Sequence
  Description of Artificial Sequence: Synthetic peptide
  Seed: RSRYWAIRT
RGRYWAIRP

SEQ ID NO: 8325 - protein, 9 aa, Artificial Sequence
  Description of Artificial Sequence: Synthetic peptide
  Seed: RSRYWAIRT
RGRYWAIRS

SEQ ID NO: 8326 - protein, 9 aa, Artificial Sequence
  Description of Artificial Sequence: Synthetic peptide
  Seed: RSRYWAIRT
RGRYWAIRT

SEQ ID NO: 8327 - protein, 9 aa, Artificial Sequence
  Description of Artificial Sequence: Synthetic peptide
  Seed: RSRYWAIRT
RQRYWAIRS

SEQ ID NO: 8328 - protein, 9 aa, Artificial Sequence
  Description of Artificial Sequence: Synthetic peptide
  Seed: RSRYWAIRT
RQRYWAIRP

SEQ ID NO: 8329 - protein, 9 aa, Artificial Sequence
  Description of Artificial Sequence: Synthetic peptide
  Seed: RSRYWAIRT
RQRYWAIRF

SEQ ID NO: 8330 - protein, 9 aa, Artificial Sequence
  Description of Artificial Sequence: Synthetic peptide
  Seed: RSRYWAIRT
RQRYWAIRM

SEQ ID NO: 8331 - protein, 9 aa, Artificial Sequence
  Description of Artificial Sequence: Synthetic peptide
  Seed: RSRYWAIRT
RNRYWAIRY

SEQ ID NO: 8332 - protein, 9 aa, Artificial Sequence
  Description of Artificial Sequence: Synthetic peptide
  Seed: RSRYWAIRT
RNRYWAIRV

SEQ ID NO: 8333 - protein, 9 aa, Artificial Sequence
  Description of Artificial Sequence: Synthetic peptide
  Seed: RSRYWAIRT
RCRYWAIRA

SEQ ID NO: 8334 - protein, 9 aa, Artificial Sequence
  Description of Artificial Sequence: Synthetic peptide
  Seed: RSRYWAIRT
RCRYWAIRI

SEQ ID NO: 8335 - protein, 9 aa, Artificial Sequence
  Description of Artificial Sequence: Synthetic peptide
  Seed: RSRYWAIRT
RCRYWAIRL

SEQ ID NO: 8336 - protein, 9 aa, Artificial Sequence
  Description of Artificial Sequence: Synthetic peptide
  Seed: RSRYWAIRT
RCRYWAIRK

SEQ ID NO: 8337 - protein, 9 aa, Artificial Sequence
  Description of Artificial Sequence: Synthetic peptide
  Seed: RSRYWAIRT
RCRYWAIRM

SEQ ID NO: 8338 - protein, 9 aa, Artificial Sequence
  Description of Artificial Sequence: Synthetic peptide
  Seed: RSRYWAIRT
RCRYWAIRV

SEQ ID NO: 8339 - protein, 9 aa, Artificial Sequence
  Description of Artificial Sequence: Synthetic peptide
  Seed: RSRYWAIRT
RQRYWAIRA

SEQ ID NO: 8340 - protein, 9 aa, Artificial Sequence
  Description of Artificial Sequence: Synthetic peptide
  Seed: RSRYWAIRT
RQRYWAIRR

SEQ ID NO: 8341 - protein, 9 aa, Artificial Sequence
  Description of Artificial Sequence: Synthetic peptide
  Seed: RSRYWAIRT
RQRYWAIRN

SEQ ID NO: 8342 - protein, 9 aa, Artificial Sequence
  Description of Artificial Sequence: Synthetic peptide
  Seed: RSRYWAIRT
RQRYWAIRC

SEQ ID NO: 8343 - protein, 9 aa, Artificial Sequence
  Description of Artificial Sequence: Synthetic peptide
  Seed: RSRYWAIRT
RQRYWAIRQ

SEQ ID NO: 8344 - protein, 9 aa, Artificial Sequence
  Description of Artificial Sequence: Synthetic peptide
  Seed: RSRYWAIRT
RQRYWAIRE

SEQ ID NO: 8345 - protein, 9 aa, Artificial Sequence
  Description of Artificial Sequence: Synthetic peptide
  Seed: RSRYWAIRT
RQRYWAIRG

SEQ ID NO: 8346 - protein, 9 aa, Artificial Sequence
  Description of Artificial Sequence: Synthetic peptide
  Seed: RSRYWAIRT
RQRYWAIRH

SEQ ID NO: 8347 - protein, 9 aa, Artificial Sequence
  Description of Artificial Sequence: Synthetic peptide
  Seed: RSRYWAIRT
RQRYWAIRI

SEQ ID NO: 8348 - protein, 9 aa, Artificial Sequence
  Description of Artificial Sequence: Synthetic peptide
  Seed: RSRYWAIRT
RQRYWAIRL

SEQ ID NO: 8349 - protein, 9 aa, Artificial Sequence
  Description of Artificial Sequence: Synthetic peptide
  Seed: RSRYWAIRT
RQRYWAIRK

SEQ ID NO: 8350 - protein, 8 aa, Artificial Sequence
  Description of Artificial Sequence: Synthetic peptide
  Seed: RSRYWAIR
RYRYWAIS

SEQ ID NO: 8351 - protein, 8 aa, Artificial Sequence
  Description of Artificial Sequence: Synthetic peptide
  Seed: RSRYWAIR
RYRYWAIM

SEQ ID NO: 8352 - protein, 9 aa, Artificial Sequence
  Description of Artificial Sequence: Synthetic peptide
  Seed: RSRYWAIRT
RGRYWAIRV

SEQ ID NO: 8353 - protein, 8 aa, Artificial Sequence
  Description of Artificial Sequence: Synthetic peptide
  Seed: RSRYWAIR
RMRYWAIA

SEQ ID NO: 8354 - protein, 8 aa, Artificial Sequence
  Description of Artificial Sequence: Synthetic peptide
  Seed: RSRYWAIR
RIRYWAIK

SEQ ID NO: 8355 - protein, 8 aa, Artificial Sequence
  Description of Artificial Sequence: Synthetic peptide
  Seed: RSRYWAIR
RIRYWAIM

SEQ ID NO: 8356 - protein, 8 aa, Artificial Sequence
  Description of Artificial Sequence: Synthetic peptide
  Seed: RSRYWAIR
RIRYWAIF

SEQ ID NO: 8357 - protein, 8 aa, Artificial Sequence
  Description of Artificial Sequence: Synthetic peptide
  Seed: RSRYWAIR
RIRYWAIY

SEQ ID NO: 8358 - protein, 8 aa, Artificial Sequence
  Description of Artificial Sequence: Synthetic peptide
  Seed: RSRYWAIR
RIRYWAIV

SEQ ID NO: 8359 - protein, 8 aa, Artificial Sequence
  Description of Artificial Sequence: Synthetic peptide
  Seed: RSRYWAIR
RLRYWAIA

SEQ ID NO: 8360 - protein, 8 aa, Artificial Sequence
  Description of Artificial Sequence: Synthetic peptide
  Seed: RSRYWAIR
RLRYWAIR

SEQ ID NO: 8361 - protein, 8 aa, Artificial Sequence
  Description of Artificial Sequence: Synthetic peptide
  Seed: RSRYWAIR
RLRYWAIK

SEQ ID NO: 8362 - protein, 8 aa, Artificial Sequence
  Description of Artificial Sequence: Synthetic peptide
  Seed: RSRYWAIR
RKRYWAIK

SEQ ID NO: 8363 - protein, 8 aa, Artificial Sequence
  Description of Artificial Sequence: Synthetic peptide
  Seed: RSRYWAIR
RMRYWAIR

SEQ ID NO: 8364 - protein, 8 aa, Artificial Sequence
  Description of Artificial Sequence: Synthetic peptide
  Seed: RSRYWAIR
RFRYWAIL

SEQ ID NO: 8365 - protein, 8 aa, Artificial Sequence
  Description of Artificial Sequence: Synthetic peptide
  Seed: RSRYWAIR
RMRYWAII

SEQ ID NO: 8366 - protein, 8 aa, Artificial Sequence
  Description of Artificial Sequence: Synthetic peptide
  Seed: RSRYWAIR
RMRYWAIL

SEQ ID NO: 8367 - protein, 8 aa, Artificial Sequence
  Description of Artificial Sequence: Synthetic peptide
  Seed: RSRYWAIR
RMRYWAIK

SEQ ID NO: 8368 - protein, 8 aa, Artificial Sequence
  Description of Artificial Sequence: Synthetic peptide
  Seed: RSRYWAIR
RMRYWAIM

SEQ ID NO: 8369 - protein, 8 aa, Artificial Sequence
  Description of Artificial Sequence: Synthetic peptide
  Seed: RSRYWAIR
RMRYWAIF

SEQ ID NO: 8370 - protein, 8 aa, Artificial Sequence
  Description of Artificial Sequence: Synthetic peptide
  Seed: RSRYWAIR
RMRYWAIS

SEQ ID NO: 8371 - protein, 8 aa, Artificial Sequence
  Description of Artificial Sequence: Synthetic peptide
  Seed: RSRYWAIR
RMRYWAIY

SEQ ID NO: 8372 - protein, 8 aa, Artificial Sequence
  Description of Artificial Sequence: Synthetic peptide
  Seed: RSRYWAIR
RMRYWAIV

SEQ ID NO: 8373 - protein, 8 aa, Artificial Sequence
  Description of Artificial Sequence: Synthetic peptide
  Seed: RSRYWAIR
RFRYWAIA

SEQ ID NO: 8374 - protein, 8 aa, Artificial Sequence
  Description of Artificial Sequence: Synthetic peptide
  Seed: RSRYWAIR
RIRYWAIL

SEQ ID NO: 8375 - protein, 8 aa, Artificial Sequence
  Description of Artificial Sequence: Synthetic peptide
  Seed: RSRYWAIR
RIRYWAII

SEQ ID NO: 8376 - protein, 8 aa, Artificial Sequence
  Description of Artificial Sequence: Synthetic peptide
  Seed: RSRYWAIR
RIRYWAIR

SEQ ID NO: 8377 - protein, 8 aa, Artificial Sequence
  Description of Artificial Sequence: Synthetic peptide
  Seed: RSRYWAIR
RIRYWAIA

SEQ ID NO: 8378 - protein, 10 aa, Artificial Sequence
  Description of Artificial Sequence: Synthetic peptide
  Seed: RSGGNTNQQR
RYGGNTNQQR

SEQ ID NO: 8379 - protein, 10 aa, Artificial Sequence
  Description of Artificial Sequence: Synthetic peptide
  Seed: RSGGNTNQQR
RVGGNTNQQR

SEQ ID NO: 8380 - protein, 8 aa, Artificial Sequence
  Description of Artificial Sequence: Synthetic peptide
  Seed: RSRYWAIR
RARYWAIA

SEQ ID NO: 8381 - protein, 8 aa, Artificial Sequence
  Description of Artificial Sequence: Synthetic peptide
  Seed: RSRYWAIR
RARYWAIR

SEQ ID NO: 8382 - protein, 8 aa, Artificial Sequence
  Description of Artificial Sequence: Synthetic peptide
  Seed: RSRYWAIR
RARYWAII

SEQ ID NO: 8383 - protein, 8 aa, Artificial Sequence
  Description of Artificial Sequence: Synthetic peptide
  Seed: RSRYWAIR
RARYWAIL

SEQ ID NO: 8384 - protein, 8 aa, Artificial Sequence
  Description of Artificial Sequence: Synthetic peptide
  Seed: RSRYWAIR
RARYWAIK

SEQ ID NO: 8385 - protein, 8 aa, Artificial Sequence
  Description of Artificial Sequence: Synthetic peptide
  Seed: RSRYWAIR
RARYWAIM

SEQ ID NO: 8386 - protein, 8 aa, Artificial Sequence
  Description of Artificial Sequence: Synthetic peptide
  Seed: RSRYWAIR
RARYWAIF

SEQ ID NO: 8387 - protein, 8 aa, Artificial Sequence
  Description of Artificial Sequence: Synthetic peptide
  Seed: RSRYWAIR
RARYWAIY

SEQ ID NO: 8388 - protein, 8 aa, Artificial Sequence
  Description of Artificial Sequence: Synthetic peptide
  Seed: RSRYWAIR
RARYWAIV

SEQ ID NO: 8389 - protein, 8 aa, Artificial Sequence
  Description of Artificial Sequence: Synthetic peptide
  Seed: RSRYWAIR
RRRYWAIK

SEQ ID NO: 8390 - protein, 8 aa, Artificial Sequence
  Description of Artificial Sequence: Synthetic peptide
  Seed: RSRYWAIR
RNRYWAIR

SEQ ID NO: 8391 - protein, 8 aa, Artificial Sequence
  Description of Artificial Sequence: Synthetic peptide
  Seed: RSRYWAIR
RNRYWAIK

SEQ ID NO: 8392 - protein, 8 aa, Artificial Sequence
  Description of Artificial Sequence: Synthetic peptide
  Seed: RSRYWAIR
RQRYWAIR

SEQ ID NO: 8393 - protein, 8 aa, Artificial Sequence
  Description of Artificial Sequence: Synthetic peptide
  Seed: RSRYWAIR
RQRYWAIK

SEQ ID NO: 8394 - protein, 8 aa, Artificial Sequence
  Description of Artificial Sequence: Synthetic peptide
  Seed: RSRYWAIR
RGRYWAIR

SEQ ID NO: 8395 - protein, 8 aa, Artificial Sequence
  Description of Artificial Sequence: Synthetic peptide
  Seed: RSRYWAIR
RGRYWAIK

SEQ ID NO: 8396 - protein, 8 aa, Artificial Sequence
  Description of Artificial Sequence: Synthetic peptide
  Seed: RSRYWAIR
RHRYWAIK

SEQ ID NO: 8397 - protein, 8 aa, Artificial Sequence
  Description of Artificial Sequence: Synthetic peptide
  Seed: RSRYWAIR
RFRYWAIR

SEQ ID NO: 8398 - protein, 8 aa, Artificial Sequence
  Description of Artificial Sequence: Synthetic peptide
  Seed: RSRYWAIR
RFRYWAIK

SEQ ID NO: 8399 - protein, 8 aa, Artificial Sequence
  Description of Artificial Sequence: Synthetic peptide
  Seed: RSRYWAIR
RYRYWAIK

SEQ ID NO: 8400 - protein, 8 aa, Artificial Sequence
  Description of Artificial Sequence: Synthetic peptide
  Seed: RSRYWAIR
RTRYWAIT

SEQ ID NO: 8401 - protein, 8 aa, Artificial Sequence
  Description of Artificial Sequence: Synthetic peptide
  Seed: RSRYWAIR
RTRYWAIG

SEQ ID NO: 8402 - protein, 8 aa, Artificial Sequence
  Description of Artificial Sequence: Synthetic peptide
  Seed: RSRYWAIR
RTRYWAIH

SEQ ID NO: 8403 - protein, 8 aa, Artificial Sequence
  Description of Artificial Sequence: Synthetic peptide
  Seed: RSRYWAIR
RTRYWAII

SEQ ID NO: 8404 - protein, 8 aa, Artificial Sequence
  Description of Artificial Sequence: Synthetic peptide
  Seed: RSRYWAIR
RTRYWAIL

SEQ ID NO: 8405 - protein, 8 aa, Artificial Sequence
  Description of Artificial Sequence: Synthetic peptide
  Seed: RSRYWAIR
RTRYWAIK

SEQ ID NO: 8406 - protein, 8 aa, Artificial Sequence
  Description of Artificial Sequence: Synthetic peptide
  Seed: RSRYWAIR
RTRYWAIM

SEQ ID NO: 8407 - protein, 8 aa, Artificial Sequence
  Description of Artificial Sequence: Synthetic peptide
  Seed: RSRYWAIR
RTRYWAIF

SEQ ID NO: 8408 - protein, 8 aa, Artificial Sequence
  Description of Artificial Sequence: Synthetic peptide
  Seed: RSRYWAIR
RTRYWAIP

SEQ ID NO: 8409 - protein, 8 aa, Artificial Sequence
  Description of Artificial Sequence: Synthetic peptide
  Seed: RSRYWAIR
RTRYWAIS

SEQ ID NO: 8410 - protein, 8 aa, Artificial Sequence
  Description of Artificial Sequence: Synthetic peptide
  Seed: RSRYWAIR
RTRYWAIW

SEQ ID NO: 8411 - protein, 8 aa, Artificial Sequence
  Description of Artificial Sequence: Synthetic peptide
  Seed: RSRYWAIR
RFRYWAIM

SEQ ID NO: 8412 - protein, 8 aa, Artificial Sequence
  Description of Artificial Sequence: Synthetic peptide
  Seed: RSRYWAIR
RTRYWAIY

SEQ ID NO: 8413 - protein, 8 aa, Artificial Sequence
  Description of Artificial Sequence: Synthetic peptide
  Seed: RSRYWAIR
RTRYWAIV

SEQ ID NO: 8414 - protein, 8 aa, Artificial Sequence
  Description of Artificial Sequence: Synthetic peptide
  Seed: RSRYWAIR
RWRYWAIA

SEQ ID NO: 8415 - protein, 8 aa, Artificial Sequence
  Description of Artificial Sequence: Synthetic peptide
  Seed: RSRYWAIR
RWRYWAIR

SEQ ID NO: 8416 - protein, 8 aa, Artificial Sequence
  Description of Artificial Sequence: Synthetic peptide
  Seed: RSRYWAIR
RWRYWAIK

SEQ ID NO: 8417 - protein, 8 aa, Artificial Sequence
  Description of Artificial Sequence: Synthetic peptide
  Seed: RSRYWAIR
RYRYWAIA

SEQ ID NO: 8418 - protein, 8 aa, Artificial Sequence
  Description of Artificial Sequence: Synthetic peptide
  Seed: RSRYWAIR
RYRYWAIR

SEQ ID NO: 8419 - protein, 8 aa, Artificial Sequence
  Description of Artificial Sequence: Synthetic peptide
  Seed: RSRYWAIR
RYRYWAII

SEQ ID NO: 8420 - protein, 8 aa, Artificial Sequence
  Description of Artificial Sequence: Synthetic peptide
  Seed: RSRYWAIR
RYRYWAIL

SEQ ID NO: 8421 - protein, 8 aa, Artificial Sequence
  Description of Artificial Sequence: Synthetic peptide
  Seed: RSRYWAIR
RTRYWAIE

SEQ ID NO: 8422 - protein, 8 aa, Artificial Sequence
  Description of Artificial Sequence: Synthetic peptide
  Seed: RSRYWAIR
RTRYWAIQ

SEQ ID NO: 8423 - protein, 8 aa, Artificial Sequence
  Description of Artificial Sequence: Synthetic peptide
  Seed: RSRYWAIR
RTRYWAIC

SEQ ID NO: 8424 - protein, 8 aa, Artificial Sequence
  Description of Artificial Sequence: Synthetic peptide
  Seed: RSRYWAIR
RTRYWAIN

SEQ ID NO: 8425 - protein, 8 aa, Artificial Sequence
  Description of Artificial Sequence: Synthetic peptide
  Seed: RSRYWAIR
RFRYWAIY

SEQ ID NO: 8426 - protein, 8 aa, Artificial Sequence
  Description of Artificial Sequence: Synthetic peptide
  Seed: RSRYWAIR
RFRYWAIV

SEQ ID NO: 8427 - protein, 8 aa, Artificial Sequence
  Description of Artificial Sequence: Synthetic peptide
  Seed: RSRYWAIR
RSRYWAIA

SEQ ID NO: 8428 - protein, 8 aa, Artificial Sequence
  Description of Artificial Sequence: Synthetic peptide
  Seed: RSRYWAIR
RSRYWAIN

SEQ ID NO: 8429 - protein, 8 aa, Artificial Sequence
  Description of Artificial Sequence: Synthetic peptide
  Seed: RSRYWAIR
RSRYWAIQ

SEQ ID NO: 8430 - protein, 8 aa, Artificial Sequence
  Description of Artificial Sequence: Synthetic peptide
  Seed: RSRYWAIR
RSRYWAIG

SEQ ID NO: 8431 - protein, 8 aa, Artificial Sequence
  Description of Artificial Sequence: Synthetic peptide
  Seed: RSRYWAIR
RSRYWAIH

SEQ ID NO: 8432 - protein, 8 aa, Artificial Sequence
  Description of Artificial Sequence: Synthetic peptide
  Seed: RSRYWAIR
RSRYWAII

SEQ ID NO: 8433 - protein, 8 aa, Artificial Sequence
  Description of Artificial Sequence: Synthetic peptide
  Seed: RSRYWAIR
RSRYWAIL

SEQ ID NO: 8434 - protein, 8 aa, Artificial Sequence
  Description of Artificial Sequence: Synthetic peptide
  Seed: RSRYWAIR
RSRYWAIM

SEQ ID NO: 8435 - protein, 8 aa, Artificial Sequence
  Description of Artificial Sequence: Synthetic peptide
  Seed: RSRYWAIR
RSRYWAIF

SEQ ID NO: 8436 - protein, 8 aa, Artificial Sequence
  Description of Artificial Sequence: Synthetic peptide
  Seed: RSRYWAIR
RSRYWAIP

SEQ ID NO: 8437 - protein, 8 aa, Artificial Sequence
  Description of Artificial Sequence: Synthetic peptide
  Seed: RSRYWAIR
RSRYWAIS

SEQ ID NO: 8438 - protein, 8 aa, Artificial Sequence
  Description of Artificial Sequence: Synthetic peptide
  Seed: RSRYWAIR
RSRYWAIT

SEQ ID NO: 8439 - protein, 8 aa, Artificial Sequence
  Description of Artificial Sequence: Synthetic peptide
  Seed: RSRYWAIR
RSRYWAIY

SEQ ID NO: 8440 - protein, 8 aa, Artificial Sequence
  Description of Artificial Sequence: Synthetic peptide
  Seed: RSRYWAIR
RSRYWAIV

SEQ ID NO: 8441 - protein, 8 aa, Artificial Sequence
  Description of Artificial Sequence: Synthetic peptide
  Seed: RSRYWAIR
RTRYWAIA

SEQ ID NO: 8442 - protein, 8 aa, Artificial Sequence
  Description of Artificial Sequence: Synthetic peptide
  Seed: RSRYWAIR
RTRYWAIR

SEQ ID NO: 8443 - protein, 9 aa, Artificial Sequence
  Description of Artificial Sequence: Synthetic peptide
  Seed: RSRYWAIRT
RGRYWAIRY

SEQ ID NO: 8444 - protein, 9 aa, Artificial Sequence
  Description of Artificial Sequence: Synthetic peptide
  Seed: RSRYWAIRT
RHRYWAIRA

SEQ ID NO: 8445 - protein, 10 aa, Artificial Sequence
  Description of Artificial Sequence: Synthetic peptide
  Seed: RSRYWAIRTR
RARYWAIRTS

SEQ ID NO: 8446 - protein, 9 aa, Artificial Sequence
  Description of Artificial Sequence: Synthetic peptide
  Seed: RSRYWAIRT
RWRYWAIRM

SEQ ID NO: 8447 - protein, 9 aa, Artificial Sequence
  Description of Artificial Sequence: Synthetic peptide
  Seed: RSRYWAIRT
RWRYWAIRN

SEQ ID NO: 8448 - protein, 9 aa, Artificial Sequence
  Description of Artificial Sequence: Synthetic peptide
  Seed: RSRYWAIRT
RWRYWAIRC

SEQ ID NO: 8449 - protein, 9 aa, Artificial Sequence
  Description of Artificial Sequence: Synthetic peptide
  Seed: RSRYWAIRT
RWRYWAIRQ

SEQ ID NO: 8450 - protein, 9 aa, Artificial Sequence
  Description of Artificial Sequence: Synthetic peptide
  Seed: RSRYWAIRT
RWRYWAIRE

SEQ ID NO: 8451 - protein, 9 aa, Artificial Sequence
  Description of Artificial Sequence: Synthetic peptide
  Seed: RSRYWAIRT
RWRYWAIRG

SEQ ID NO: 8452 - protein, 9 aa, Artificial Sequence
  Description of Artificial Sequence: Synthetic peptide
  Seed: RSRYWAIRT
RWRYWAIRH

SEQ ID NO: 8453 - protein, 9 aa, Artificial Sequence
  Description of Artificial Sequence: Synthetic peptide
  Seed: RSRYWAIRT
RWRYWAIRI

SEQ ID NO: 8454 - protein, 9 aa, Artificial Sequence
  Description of Artificial Sequence: Synthetic peptide
  Seed: RSRYWAIRT
RWRYWAIRL

SEQ ID NO: 8455 - protein, 9 aa, Artificial Sequence
  Description of Artificial Sequence: Synthetic peptide
  Seed: RSRYWAIRT
RWRYWAIRK

SEQ ID NO: 8456 - protein, 9 aa, Artificial Sequence
  Description of Artificial Sequence: Synthetic peptide
  Seed: RSRYWAIRT
RWRYWAIRF

SEQ ID NO: 8457 - protein, 9 aa, Artificial Sequence
  Description of Artificial Sequence: Synthetic peptide
  Seed: RSRYWAIRT
RYRYWAIRE

SEQ ID NO: 8458 - protein, 9 aa, Artificial Sequence
  Description of Artificial Sequence: Synthetic peptide
  Seed: RSRYWAIRT
RWRYWAIRP

SEQ ID NO: 8459 - protein, 9 aa, Artificial Sequence
  Description of Artificial Sequence: Synthetic peptide
  Seed: RSRYWAIRT
RWRYWAIRS

SEQ ID NO: 8460 - protein, 9 aa, Artificial Sequence
  Description of Artificial Sequence: Synthetic peptide
  Seed: RSRYWAIRT
RWRYWAIRT

SEQ ID NO: 8461 - protein, 9 aa, Artificial Sequence
  Description of Artificial Sequence: Synthetic peptide
  Seed: RSRYWAIRT
RWRYWAIRY

SEQ ID NO: 8462 - protein, 9 aa, Artificial Sequence
  Description of Artificial Sequence: Synthetic peptide
  Seed: RSRYWAIRT
RWRYWAIRV

SEQ ID NO: 8463 - protein, 9 aa, Artificial Sequence
  Description of Artificial Sequence: Synthetic peptide
  Seed: RSRYWAIRT
RYRYWAIRA

SEQ ID NO: 8464 - protein, 9 aa, Artificial Sequence
  Description of Artificial Sequence: Synthetic peptide
  Seed: RSRYWAIRT
RYRYWAIRR

SEQ ID NO: 8465 - protein, 9 aa, Artificial Sequence
  Description of Artificial Sequence: Synthetic peptide
  Seed: RSRYWAIRT
RYRYWAIRN

SEQ ID NO: 8466 - protein, 9 aa, Artificial Sequence
  Description of Artificial Sequence: Synthetic peptide
  Seed: RSRYWAIRT
RYRYWAIRC

SEQ ID NO: 8467 - protein, 9 aa, Artificial Sequence
  Description of Artificial Sequence: Synthetic peptide
  Seed: RSRYWAIRT
RWRYWAIRR

SEQ ID NO: 8468 - protein, 9 aa, Artificial Sequence
  Description of Artificial Sequence: Synthetic peptide
  Seed: RSRYWAIRT
RWRYWAIRA

SEQ ID NO: 8469 - protein, 9 aa, Artificial Sequence
  Description of Artificial Sequence: Synthetic peptide
  Seed: RSRYWAIRT
RTRYWAIRV

SEQ ID NO: 8470 - protein, 9 aa, Artificial Sequence
  Description of Artificial Sequence: Synthetic peptide
  Seed: RSRYWAIRT
RTRYWAIRY

SEQ ID NO: 8471 - protein, 9 aa, Artificial Sequence
  Description of Artificial Sequence: Synthetic peptide
  Seed: RSRYWAIRT
RSRYWAIRV

SEQ ID NO: 8472 - protein, 9 aa, Artificial Sequence
  Description of Artificial Sequence: Synthetic peptide
  Seed: RSRYWAIRT
RTRYWAIRA

SEQ ID NO: 8473 - protein, 9 aa, Artificial Sequence
  Description of Artificial Sequence: Synthetic peptide
  Seed: RSRYWAIRT
RTRYWAIRR

SEQ ID NO: 8474 - protein, 9 aa, Artificial Sequence
  Description of Artificial Sequence: Synthetic peptide
  Seed: RSRYWAIRT
RTRYWAIRN

SEQ ID NO: 8475 - protein, 9 aa, Artificial Sequence
  Description of Artificial Sequence: Synthetic peptide
  Seed: RSRYWAIRT
RTRYWAIRD

SEQ ID NO: 8476 - protein, 9 aa, Artificial Sequence
  Description of Artificial Sequence: Synthetic peptide
  Seed: RSRYWAIRT
RTRYWAIRC

SEQ ID NO: 8477 - protein, 9 aa, Artificial Sequence
  Description of Artificial Sequence: Synthetic peptide
  Seed: RSRYWAIRT
RTRYWAIRQ

SEQ ID NO: 8478 - protein, 9 aa, Artificial Sequence
  Description of Artificial Sequence: Synthetic peptide
  Seed: RSRYWAIRT
RTRYWAIRE

SEQ ID NO: 8479 - protein, 9 aa, Artificial Sequence
  Description of Artificial Sequence: Synthetic peptide
  Seed: RSRYWAIRT
RTRYWAIRG

SEQ ID NO: 8480 - protein, 9 aa, Artificial Sequence
  Description of Artificial Sequence: Synthetic peptide
  Seed: RSRYWAIRT
RTRYWAIRH

SEQ ID NO: 8481 - protein, 9 aa, Artificial Sequence
  Description of Artificial Sequence: Synthetic peptide
  Seed: RSRYWAIRT
RTRYWAIRI

SEQ ID NO: 8482 - protein, 9 aa, Artificial Sequence
  Description of Artificial Sequence: Synthetic peptide
  Seed: RSRYWAIRT
RTRYWAIRL

SEQ ID NO: 8483 - protein, 9 aa, Artificial Sequence
  Description of Artificial Sequence: Synthetic peptide
  Seed: RSRYWAIRT
RTRYWAIRK

SEQ ID NO: 8484 - protein, 9 aa, Artificial Sequence
  Description of Artificial Sequence: Synthetic peptide
  Seed: RSRYWAIRT
RTRYWAIRM

SEQ ID NO: 8485 - protein, 9 aa, Artificial Sequence
  Description of Artificial Sequence: Synthetic peptide
  Seed: RSRYWAIRT
RTRYWAIRF

SEQ ID NO: 8486 - protein, 9 aa, Artificial Sequence
  Description of Artificial Sequence: Synthetic peptide
  Seed: RSRYWAIRT
RTRYWAIRP

SEQ ID NO: 8487 - protein, 9 aa, Artificial Sequence
  Description of Artificial Sequence: Synthetic peptide
  Seed: RSRYWAIRT
RTRYWAIRS

SEQ ID NO: 8488 - protein, 9 aa, Artificial Sequence
  Description of Artificial Sequence: Synthetic peptide
  Seed: RSRYWAIRT
RTRYWAIRT

SEQ ID NO: 8489 - protein, 9 aa, Artificial Sequence
  Description of Artificial Sequence: Synthetic peptide
  Seed: RSRYWAIRT
RTRYWAIRW

SEQ ID NO: 8490 - protein, 9 aa, Artificial Sequence
  Description of Artificial Sequence: Synthetic peptide
  Seed: RSRYWAIRT
RYRYWAIRQ

SEQ ID NO: 8491 - protein, 9 aa, Artificial Sequence
  Description of Artificial Sequence: Synthetic peptide
  Seed: RSRYWAIRT
RYRYWAIRG

SEQ ID NO: 8492 - protein, 9 aa, Artificial Sequence
  Description of Artificial Sequence: Synthetic peptide
  Seed: RSRYWAIRT
RSRYWAIRW

SEQ ID NO: 8493 - protein, 10 aa, Artificial Sequence
  Description of Artificial Sequence: Synthetic peptide
  Seed: RSRYWAIRTR
RARYWAIRTC

SEQ ID NO: 8494 - protein, 9 aa, Artificial Sequence
  Description of Artificial Sequence: Synthetic peptide
  Seed: RSRYWAIRT
RVRYWAIRF

SEQ ID NO: 8495 - protein, 9 aa, Artificial Sequence
  Description of Artificial Sequence: Synthetic peptide
  Seed: RSRYWAIRT
RVRYWAIRP

SEQ ID NO: 8496 - protein, 9 aa, Artificial Sequence
  Description of Artificial Sequence: Synthetic peptide
  Seed: RSRYWAIRT
RVRYWAIRS

SEQ ID NO: 8497 - protein, 9 aa, Artificial Sequence
  Description of Artificial Sequence: Synthetic peptide
  Seed: RSRYWAIRT
RVRYWAIRT

SEQ ID NO: 8498 - protein, 9 aa, Artificial Sequence
  Description of Artificial Sequence: Synthetic peptide
  Seed: RSRYWAIRT
RVRYWAIRY

SEQ ID NO: 8499 - protein, 9 aa, Artificial Sequence
  Description of Artificial Sequence: Synthetic peptide
  Seed: RSRYWAIRT
RVRYWAIRV

SEQ ID NO: 8500 - protein, 10 aa, Artificial Sequence
  Description of Artificial Sequence: Synthetic peptide
  Seed: RSRYWAIRTR
RARYWAIRTA

SEQ ID NO: 8501 - protein, 10 aa, Artificial Sequence
  Description of Artificial Sequence: Synthetic peptide
  Seed: RSRYWAIRTR
RARYWAIRTR

SEQ ID NO: 8502 - protein, 10 aa, Artificial Sequence
  Description of Artificial Sequence: Synthetic peptide
  Seed: RSRYWAIRTR
RARYWAIRTN

SEQ ID NO: 8503 - protein, 10 aa, Artificial Sequence
  Description of Artificial Sequence: Synthetic peptide
  Seed: RSRYWAIRTR
RARYWAIRTQ

SEQ ID NO: 8504 - protein, 9 aa, Artificial Sequence
  Description of Artificial Sequence: Synthetic peptide
  Seed: RSRYWAIRT
RYRYWAIRH

SEQ ID NO: 8505 - protein, 10 aa, Artificial Sequence
  Description of Artificial Sequence: Synthetic peptide
  Seed: RSRYWAIRTR
RARYWAIRTE

SEQ ID NO: 8506 - protein, 10 aa, Artificial Sequence
  Description of Artificial Sequence: Synthetic peptide
  Seed: RSRYWAIRTR
RARYWAIRTG

SEQ ID NO: 8507 - protein, 10 aa, Artificial Sequence
  Description of Artificial Sequence: Synthetic peptide
  Seed: RSRYWAIRTR
RARYWAIRTH

SEQ ID NO: 8508 - protein, 10 aa, Artificial Sequence
  Description of Artificial Sequence: Synthetic peptide
  Seed: RSRYWAIRTR
RARYWAIRTI

SEQ ID NO: 8509 - protein, 10 aa, Artificial Sequence
  Description of Artificial Sequence: Synthetic peptide
  Seed: RSRYWAIRTR
RARYWAIRTL

SEQ ID NO: 8510 - protein, 10 aa, Artificial Sequence
  Description of Artificial Sequence: Synthetic peptide
  Seed: RSRYWAIRTR
RARYWAIRTK

SEQ ID NO: 8511 - protein, 10 aa, Artificial Sequence
  Description of Artificial Sequence: Synthetic peptide
  Seed: RSRYWAIRTR
RARYWAIRTM

SEQ ID NO: 8512 - protein, 10 aa, Artificial Sequence
  Description of Artificial Sequence: Synthetic peptide
  Seed: RSRYWAIRTR
RARYWAIRTF

SEQ ID NO: 8513 - protein, 10 aa, Artificial Sequence
  Description of Artificial Sequence: Synthetic peptide
  Seed: RSRYWAIRTR
RARYWAIRTP

SEQ ID NO: 8514 - protein, 9 aa, Artificial Sequence
  Description of Artificial Sequence: Synthetic peptide
  Seed: RSRYWAIRT
RVRYWAIRM

SEQ ID NO: 8515 - protein, 9 aa, Artificial Sequence
  Description of Artificial Sequence: Synthetic peptide
  Seed: RSRYWAIRT
RVRYWAIRK

SEQ ID NO: 8516 - protein, 9 aa, Artificial Sequence
  Description of Artificial Sequence: Synthetic peptide
  Seed: RSRYWAIRT
RVRYWAIRL

SEQ ID NO: 8517 - protein, 9 aa, Artificial Sequence
  Description of Artificial Sequence: Synthetic peptide
  Seed: RSRYWAIRT
RVRYWAIRI

SEQ ID NO: 8518 - protein, 9 aa, Artificial Sequence
  Description of Artificial Sequence: Synthetic peptide
  Seed: RSRYWAIRT
RYRYWAIRI

SEQ ID NO: 8519 - protein, 9 aa, Artificial Sequence
  Description of Artificial Sequence: Synthetic peptide
  Seed: RSRYWAIRT
RYRYWAIRL

SEQ ID NO: 8520 - protein, 9 aa, Artificial Sequence
  Description of Artificial Sequence: Synthetic peptide
  Seed: RSRYWAIRT
RYRYWAIRK

SEQ ID NO: 8521 - protein, 9 aa, Artificial Sequence
  Description of Artificial Sequence: Synthetic peptide
  Seed: RSRYWAIRT
RYRYWAIRM

SEQ ID NO: 8522 - protein, 9 aa, Artificial Sequence
  Description of Artificial Sequence: Synthetic peptide
  Seed: RSRYWAIRT
RYRYWAIRF

SEQ ID NO: 8523 - protein, 9 aa, Artificial Sequence
  Description of Artificial Sequence: Synthetic peptide
  Seed: RSRYWAIRT
RYRYWAIRP

SEQ ID NO: 8524 - protein, 9 aa, Artificial Sequence
  Description of Artificial Sequence: Synthetic peptide
  Seed: RSRYWAIRT
RYRYWAIRS

SEQ ID NO: 8525 - protein, 9 aa, Artificial Sequence
  Description of Artificial Sequence: Synthetic peptide
  Seed: RSRYWAIRT
RYRYWAIRT

SEQ ID NO: 8526 - protein, 9 aa, Artificial Sequence
  Description of Artificial Sequence: Synthetic peptide
  Seed: RSRYWAIRT
RYRYWAIRY

SEQ ID NO: 8527 - protein, 9 aa, Artificial Sequence
  Description of Artificial Sequence: Synthetic peptide
  Seed: RSRYWAIRT
RYRYWAIRV

SEQ ID NO: 8528 - protein, 9 aa, Artificial Sequence
  Description of Artificial Sequence: Synthetic peptide
  Seed: RSRYWAIRT
RVRYWAIRA

SEQ ID NO: 8529 - protein, 9 aa, Artificial Sequence
  Description of Artificial Sequence: Synthetic peptide
  Seed: RSRYWAIRT
RVRYWAIRR

SEQ ID NO: 8530 - protein, 9 aa, Artificial Sequence
  Description of Artificial Sequence: Synthetic peptide
  Seed: RSRYWAIRT
RVRYWAIRN

SEQ ID NO: 8531 - protein, 9 aa, Artificial Sequence
  Description of Artificial Sequence: Synthetic peptide
  Seed: RSRYWAIRT
RVRYWAIRD

SEQ ID NO: 8532 - protein, 9 aa, Artificial Sequence
  Description of Artificial Sequence: Synthetic peptide
  Seed: RSRYWAIRT
RVRYWAIRC

SEQ ID NO: 8533 - protein, 9 aa, Artificial Sequence
  Description of Artificial Sequence: Synthetic peptide
  Seed: RSRYWAIRT
RVRYWAIRQ

SEQ ID NO: 8534 - protein, 9 aa, Artificial Sequence
  Description of Artificial Sequence: Synthetic peptide
  Seed: RSRYWAIRT
RVRYWAIRE

SEQ ID NO: 8535 - protein, 9 aa, Artificial Sequence
  Description of Artificial Sequence: Synthetic peptide
  Seed: RSRYWAIRT
RVRYWAIRG

SEQ ID NO: 8536 - protein, 9 aa, Artificial Sequence
  Description of Artificial Sequence: Synthetic peptide
  Seed: RSRYWAIRT
RVRYWAIRH

SEQ ID NO: 8537 - protein, 9 aa, Artificial Sequence
  Description of Artificial Sequence: Synthetic peptide
  Seed: RSRYWAIRT
RSRYWAIRY

SEQ ID NO: 8538 - protein, 9 aa, Artificial Sequence
  Description of Artificial Sequence: Synthetic peptide
  Seed: RSRYWAIRT
RSRYWAIRS

SEQ ID NO: 8539 - protein, 9 aa, Artificial Sequence
  Description of Artificial Sequence: Synthetic peptide
  Seed: RSRYWAIRT
RHRYWAIRR

SEQ ID NO: 8540 - protein, 9 aa, Artificial Sequence
  Description of Artificial Sequence: Synthetic peptide
  Seed: RSRYWAIRT
RLRYWAIRP

SEQ ID NO: 8541 - protein, 9 aa, Artificial Sequence
  Description of Artificial Sequence: Synthetic peptide
  Seed: RSRYWAIRT
RLRYWAIRQ

SEQ ID NO: 8542 - protein, 9 aa, Artificial Sequence
  Description of Artificial Sequence: Synthetic peptide
  Seed: RSRYWAIRT
RLRYWAIRE

SEQ ID NO: 8543 - protein, 9 aa, Artificial Sequence
  Description of Artificial Sequence: Synthetic peptide
  Seed: RSRYWAIRT
RLRYWAIRG

SEQ ID NO: 8544 - protein, 9 aa, Artificial Sequence
  Description of Artificial Sequence: Synthetic peptide
  Seed: RSRYWAIRT
RLRYWAIRH

SEQ ID NO: 8545 - protein, 9 aa, Artificial Sequence
  Description of Artificial Sequence: Synthetic peptide
  Seed: RSRYWAIRT
RLRYWAIRI

SEQ ID NO: 8546 - protein, 9 aa, Artificial Sequence
  Description of Artificial Sequence: Synthetic peptide
  Seed: RSRYWAIRT
RLRYWAIRL

SEQ ID NO: 8547 - protein, 9 aa, Artificial Sequence
  Description of Artificial Sequence: Synthetic peptide
  Seed: RSRYWAIRT
RLRYWAIRK

SEQ ID NO: 8548 - protein, 9 aa, Artificial Sequence
  Description of Artificial Sequence: Synthetic peptide
  Seed: RSRYWAIRT
RLRYWAIRM

SEQ ID NO: 8549 - protein, 9 aa, Artificial Sequence
  Description of Artificial Sequence: Synthetic peptide
  Seed: RSRYWAIRT
RLRYWAIRF

SEQ ID NO: 8550 - protein, 9 aa, Artificial Sequence
  Description of Artificial Sequence: Synthetic peptide
  Seed: RSRYWAIRT
RLRYWAIRS

SEQ ID NO: 8551 - protein, 9 aa, Artificial Sequence
  Description of Artificial Sequence: Synthetic peptide
  Seed: RSRYWAIRT
RMRYWAIRE

SEQ ID NO: 8552 - protein, 9 aa, Artificial Sequence
  Description of Artificial Sequence: Synthetic peptide
  Seed: RSRYWAIRT
RLRYWAIRT

SEQ ID NO: 8553 - protein, 9 aa, Artificial Sequence
  Description of Artificial Sequence: Synthetic peptide
  Seed: RSRYWAIRT
RLRYWAIRY

SEQ ID NO: 8554 - protein, 9 aa, Artificial Sequence
  Description of Artificial Sequence: Synthetic peptide
  Seed: RSRYWAIRT
RLRYWAIRV

SEQ ID NO: 8555 - protein, 9 aa, Artificial Sequence
  Description of Artificial Sequence: Synthetic peptide
  Seed: RSRYWAIRT
RKRYWAIRK

SEQ ID NO: 8556 - protein, 9 aa, Artificial Sequence
  Description of Artificial Sequence: Synthetic peptide
  Seed: RSRYWAIRT
RMRYWAIRA

SEQ ID NO: 8557 - protein, 9 aa, Artificial Sequence
  Description of Artificial Sequence: Synthetic peptide
  Seed: RSRYWAIRT
RMRYWAIRR

SEQ ID NO: 8558 - protein, 9 aa, Artificial Sequence
  Description of Artificial Sequence: Synthetic peptide
  Seed: RSRYWAIRT
RMRYWAIRN

SEQ ID NO: 8559 - protein, 9 aa, Artificial Sequence
  Description of Artificial Sequence: Synthetic peptide
  Seed: RSRYWAIRT
RMRYWAIRD

SEQ ID NO: 8560 - protein, 9 aa, Artificial Sequence
  Description of Artificial Sequence: Synthetic peptide
  Seed: RSRYWAIRT
RMRYWAIRC

SEQ ID NO: 8561 - protein, 9 aa, Artificial Sequence
  Description of Artificial Sequence: Synthetic peptide
  Seed: RSRYWAIRT
RLRYWAIRC

SEQ ID NO: 8562 - protein, 9 aa, Artificial Sequence
  Description of Artificial Sequence: Synthetic peptide
  Seed: RSRYWAIRT
RLRYWAIRN

SEQ ID NO: 8563 - protein, 9 aa, Artificial Sequence
  Description of Artificial Sequence: Synthetic peptide
  Seed: RSRYWAIRT
RLRYWAIRR

SEQ ID NO: 8564 - protein, 9 aa, Artificial Sequence
  Description of Artificial Sequence: Synthetic peptide
  Seed: RSRYWAIRT
RLRYWAIRA

SEQ ID NO: 8565 - protein, 9 aa, Artificial Sequence
  Description of Artificial Sequence: Synthetic peptide
  Seed: RSRYWAIRT
RHRYWAIRK

SEQ ID NO: 8566 - protein, 9 aa, Artificial Sequence
  Description of Artificial Sequence: Synthetic peptide
  Seed: RSRYWAIRT
RIRYWAIRA

SEQ ID NO: 8567 - protein, 9 aa, Artificial Sequence
  Description of Artificial Sequence: Synthetic peptide
  Seed: RSRYWAIRT
RIRYWAIRR

SEQ ID NO: 8568 - protein, 9 aa, Artificial Sequence
  Description of Artificial Sequence: Synthetic peptide
  Seed: RSRYWAIRT
RIRYWAIRN

SEQ ID NO: 8569 - protein, 9 aa, Artificial Sequence
  Description of Artificial Sequence: Synthetic peptide
  Seed: RSRYWAIRT
RIRYWAIRC

SEQ ID NO: 8570 - protein, 9 aa, Artificial Sequence
  Description of Artificial Sequence: Synthetic peptide
  Seed: RSRYWAIRT
RIRYWAIRQ

SEQ ID NO: 8571 - protein, 9 aa, Artificial Sequence
  Description of Artificial Sequence: Synthetic peptide
  Seed: RSRYWAIRT
RIRYWAIRE

SEQ ID NO: 8572 - protein, 9 aa, Artificial Sequence
  Description of Artificial Sequence: Synthetic peptide
  Seed: RSRYWAIRT
RIRYWAIRG

SEQ ID NO: 8573 - protein, 9 aa, Artificial Sequence
  Description of Artificial Sequence: Synthetic peptide
  Seed: RSRYWAIRT
RIRYWAIRH

SEQ ID NO: 8574 - protein, 9 aa, Artificial Sequence
  Description of Artificial Sequence: Synthetic peptide
  Seed: RSRYWAIRT
RIRYWAIRI

SEQ ID NO: 8575 - protein, 9 aa, Artificial Sequence
  Description of Artificial Sequence: Synthetic peptide
  Seed: RSRYWAIRT
RIRYWAIRL

SEQ ID NO: 8576 - protein, 9 aa, Artificial Sequence
  Description of Artificial Sequence: Synthetic peptide
  Seed: RSRYWAIRT
RIRYWAIRK

SEQ ID NO: 8577 - protein, 9 aa, Artificial Sequence
  Description of Artificial Sequence: Synthetic peptide
  Seed: RSRYWAIRT
RIRYWAIRM

SEQ ID NO: 8578 - protein, 9 aa, Artificial Sequence
  Description of Artificial Sequence: Synthetic peptide
  Seed: RSRYWAIRT
RIRYWAIRF

SEQ ID NO: 8579 - protein, 9 aa, Artificial Sequence
  Description of Artificial Sequence: Synthetic peptide
  Seed: RSRYWAIRT
RIRYWAIRP

SEQ ID NO: 8580 - protein, 11 aa, Artificial Sequence
  Description of Artificial Sequence: Synthetic peptide
  Seed: RMIGGIGRFYI
RFIGGIGRFYV

SEQ ID NO: 8581 - protein, 9 aa, Artificial Sequence
  Description of Artificial Sequence: Synthetic peptide
  Seed: RSRYWAIRT
RIRYWAIRT

SEQ ID NO: 8582 - protein, 9 aa, Artificial Sequence
  Description of Artificial Sequence: Synthetic peptide
  Seed: RSRYWAIRT
RIRYWAIRY

SEQ ID NO: 8583 - protein, 9 aa, Artificial Sequence
  Description of Artificial Sequence: Synthetic peptide
  Seed: RSRYWAIRT
RIRYWAIRV

SEQ ID NO: 8584 - protein, 9 aa, Artificial Sequence
  Description of Artificial Sequence: Synthetic peptide
  Seed: RSRYWAIRT
RMRYWAIRQ

SEQ ID NO: 8585 - protein, 9 aa, Artificial Sequence
  Description of Artificial Sequence: Synthetic peptide
  Seed: RSRYWAIRT
RMRYWAIRG

SEQ ID NO: 8586 - protein, 9 aa, Artificial Sequence
  Description of Artificial Sequence: Synthetic peptide
  Seed: RSRYWAIRT
RSRYWAIRP

SEQ ID NO: 8587 - protein, 9 aa, Artificial Sequence
  Description of Artificial Sequence: Synthetic peptide
  Seed: RSRYWAIRT
RSRYWAIRD

SEQ ID NO: 8588 - protein, 9 aa, Artificial Sequence
  Description of Artificial Sequence: Synthetic peptide
  Seed: RSRYWAIRT
RFRYWAIRP

SEQ ID NO: 8589 - protein, 9 aa, Artificial Sequence
  Description of Artificial Sequence: Synthetic peptide
  Seed: RSRYWAIRT
RFRYWAIRS

SEQ ID NO: 8590 - protein, 9 aa, Artificial Sequence
  Description of Artificial Sequence: Synthetic peptide
  Seed: RSRYWAIRT
RFRYWAIRT

SEQ ID NO: 8591 - protein, 9 aa, Artificial Sequence
  Description of Artificial Sequence: Synthetic peptide
  Seed: RSRYWAIRT
RFRYWAIRY

SEQ ID NO: 8592 - protein, 9 aa, Artificial Sequence
  Description of Artificial Sequence: Synthetic peptide
  Seed: RSRYWAIRT
RFRYWAIRV

SEQ ID NO: 8593 - protein, 9 aa, Artificial Sequence
  Description of Artificial Sequence: Synthetic peptide
  Seed: RSRYWAIRT
RPRYWAIRK

SEQ ID NO: 8594 - protein, 9 aa, Artificial Sequence
  Description of Artificial Sequence: Synthetic peptide
  Seed: RSRYWAIRT
RSRYWAIRA

SEQ ID NO: 8595 - protein, 9 aa, Artificial Sequence
  Description of Artificial Sequence: Synthetic peptide
  Seed: RSRYWAIRT
RSRYWAIRR

SEQ ID NO: 8596 - protein, 9 aa, Artificial Sequence
  Description of Artificial Sequence: Synthetic peptide
  Seed: RSRYWAIRT
RSRYWAIRN

SEQ ID NO: 8597 - protein, 9 aa, Artificial Sequence
  Description of Artificial Sequence: Synthetic peptide
  Seed: RSRYWAIRT
RSRYWAIRC

SEQ ID NO: 8598 - protein, 9 aa, Artificial Sequence
  Description of Artificial Sequence: Synthetic peptide
  Seed: RSRYWAIRT
RMRYWAIRH

SEQ ID NO: 8599 - protein, 9 aa, Artificial Sequence
  Description of Artificial Sequence: Synthetic peptide
  Seed: RSRYWAIRT
RSRYWAIRQ

SEQ ID NO: 8600 - protein, 9 aa, Artificial Sequence
  Description of Artificial Sequence: Synthetic peptide
  Seed: RSRYWAIRT
RSRYWAIRE

SEQ ID NO: 8601 - protein, 9 aa, Artificial Sequence
  Description of Artificial Sequence: Synthetic peptide
  Seed: RSRYWAIRT
RSRYWAIRG

SEQ ID NO: 8602 - protein, 9 aa, Artificial Sequence
  Description of Artificial Sequence: Synthetic peptide
  Seed: RSRYWAIRT
RSRYWAIRH

SEQ ID NO: 8603 - protein, 9 aa, Artificial Sequence
  Description of Artificial Sequence: Synthetic peptide
  Seed: RSRYWAIRT
RSRYWAIRI

SEQ ID NO: 8604 - protein, 9 aa, Artificial Sequence
  Description of Artificial Sequence: Synthetic peptide
  Seed: RSRYWAIRT
RSRYWAIRL

SEQ ID NO: 8605 - protein, 9 aa, Artificial Sequence
  Description of Artificial Sequence: Synthetic peptide
  Seed: RSRYWAIRT
RSRYWAIRK

SEQ ID NO: 8606 - protein, 9 aa, Artificial Sequence
  Description of Artificial Sequence: Synthetic peptide
  Seed: RSRYWAIRT
RSRYWAIRM

SEQ ID NO: 8607 - protein, 9 aa, Artificial Sequence
  Description of Artificial Sequence: Synthetic peptide
  Seed: RSRYWAIRT
RSRYWAIRF

SEQ ID NO: 8608 - protein, 9 aa, Artificial Sequence
  Description of Artificial Sequence: Synthetic peptide
  Seed: RSRYWAIRT
RFRYWAIRF

SEQ ID NO: 8609 - protein, 9 aa, Artificial Sequence
  Description of Artificial Sequence: Synthetic peptide
  Seed: RSRYWAIRT
RFRYWAIRM

SEQ ID NO: 8610 - protein, 9 aa, Artificial Sequence
  Description of Artificial Sequence: Synthetic peptide
  Seed: RSRYWAIRT
RFRYWAIRK

SEQ ID NO: 8611 - protein, 9 aa, Artificial Sequence
  Description of Artificial Sequence: Synthetic peptide
  Seed: RSRYWAIRT
RFRYWAIRL

SEQ ID NO: 8612 - protein, 9 aa, Artificial Sequence
  Description of Artificial Sequence: Synthetic peptide
  Seed: RSRYWAIRT
RMRYWAIRI

SEQ ID NO: 8613 - protein, 9 aa, Artificial Sequence
  Description of Artificial Sequence: Synthetic peptide
  Seed: RSRYWAIRT
RMRYWAIRL

SEQ ID NO: 8614 - protein, 9 aa, Artificial Sequence
  Description of Artificial Sequence: Synthetic peptide
  Seed: RSRYWAIRT
RMRYWAIRK

SEQ ID NO: 8615 - protein, 9 aa, Artificial Sequence
  Description of Artificial Sequence: Synthetic peptide
  Seed: RSRYWAIRT
RMRYWAIRM

SEQ ID NO: 8616 - protein, 9 aa, Artificial Sequence
  Description of Artificial Sequence: Synthetic peptide
  Seed: RSRYWAIRT
RMRYWAIRF

SEQ ID NO: 8617 - protein, 9 aa, Artificial Sequence
  Description of Artificial Sequence: Synthetic peptide
  Seed: RSRYWAIRT
RMRYWAIRP

SEQ ID NO: 8618 - protein, 9 aa, Artificial Sequence
  Description of Artificial Sequence: Synthetic peptide
  Seed: RSRYWAIRT
RMRYWAIRS

SEQ ID NO: 8619 - protein, 9 aa, Artificial Sequence
  Description of Artificial Sequence: Synthetic peptide
  Seed: RSRYWAIRT
RMRYWAIRT

SEQ ID NO: 8620 - protein, 9 aa, Artificial Sequence
  Description of Artificial Sequence: Synthetic peptide
  Seed: RSRYWAIRT
RMRYWAIRY

SEQ ID NO: 8621 - protein, 9 aa, Artificial Sequence
  Description of Artificial Sequence: Synthetic peptide
  Seed: RSRYWAIRT
RMRYWAIRV

SEQ ID NO: 8622 - protein, 9 aa, Artificial Sequence
  Description of Artificial Sequence: Synthetic peptide
  Seed: RSRYWAIRT
RFRYWAIRA

SEQ ID NO: 8623 - protein, 9 aa, Artificial Sequence
  Description of Artificial Sequence: Synthetic peptide
  Seed: RSRYWAIRT
RFRYWAIRR

SEQ ID NO: 8624 - protein, 9 aa, Artificial Sequence
  Description of Artificial Sequence: Synthetic peptide
  Seed: RSRYWAIRT
RFRYWAIRN

SEQ ID NO: 8625 - protein, 9 aa, Artificial Sequence
  Description of Artificial Sequence: Synthetic peptide
  Seed: RSRYWAIRT
RFRYWAIRC

SEQ ID NO: 8626 - protein, 9 aa, Artificial Sequence
  Description of Artificial Sequence: Synthetic peptide
  Seed: RSRYWAIRT
RFRYWAIRQ

SEQ ID NO: 8627 - protein, 9 aa, Artificial Sequence
  Description of Artificial Sequence: Synthetic peptide
  Seed: RSRYWAIRT
RFRYWAIRE

SEQ ID NO: 8628 - protein, 9 aa, Artificial Sequence
  Description of Artificial Sequence: Synthetic peptide
  Seed: RSRYWAIRT
RFRYWAIRG

SEQ ID NO: 8629 - protein, 9 aa, Artificial Sequence
  Description of Artificial Sequence: Synthetic peptide
  Seed: RSRYWAIRT
RFRYWAIRH

SEQ ID NO: 8630 - protein, 9 aa, Artificial Sequence
  Description of Artificial Sequence: Synthetic peptide
  Seed: RSRYWAIRT
RFRYWAIRI

SEQ ID NO: 8631 - protein, 11 aa, Artificial Sequence
  Description of Artificial Sequence: Synthetic peptide
  Seed: RSRYWAIRTRS
RARYWAIRTRW

SEQ ID NO: 8632 - protein, 11 aa, Artificial Sequence
  Description of Artificial Sequence: Synthetic peptide
  Seed: RSRYWAIRTRS
RARYWAIRTRV

SEQ ID NO: 8633 - protein, 9 aa, Artificial Sequence
  Description of Artificial Sequence: Synthetic peptide
  Seed: RTRALVRTG
RLRALVRTS

SEQ ID NO: 8634 - protein, 10 aa, Artificial Sequence
  Description of Artificial Sequence: Synthetic peptide
  Seed: RTGMDPRMCS
RTGMDPRMCG

SEQ ID NO: 8635 - protein, 10 aa, Artificial Sequence
  Description of Artificial Sequence: Synthetic peptide
  Seed: RTGMDPRMCS
RSGMDPRMCI

SEQ ID NO: 8636 - protein, 10 aa, Artificial Sequence
  Description of Artificial Sequence: Synthetic peptide
  Seed: RTGMDPRMCS
RSGMDPRMCL

SEQ ID NO: 8637 - protein, 10 aa, Artificial Sequence
  Description of Artificial Sequence: Synthetic peptide
  Seed: RTGMDPRMCS
RSGMDPRMCM

SEQ ID NO: 8638 - protein, 10 aa, Artificial Sequence
  Description of Artificial Sequence: Synthetic peptide
  Seed: RTGMDPRMCS
RSGMDPRMCS

SEQ ID NO: 8639 - protein, 10 aa, Artificial Sequence
  Description of Artificial Sequence: Synthetic peptide
  Seed: RTGMDPRMCS
RSGMDPRMCY

SEQ ID NO: 8640 - protein, 10 aa, Artificial Sequence
  Description of Artificial Sequence: Synthetic peptide
  Seed: RTGMDPRMCS
RSGMDPRMCV

SEQ ID NO: 8641 - protein, 10 aa, Artificial Sequence
  Description of Artificial Sequence: Synthetic peptide
  Seed: RTGMDPRMCS
RTGMDPRMCA

SEQ ID NO: 8642 - protein, 10 aa, Artificial Sequence
  Description of Artificial Sequence: Synthetic peptide
  Seed: RTGMDPRMCS
RTGMDPRMCR

SEQ ID NO: 8643 - protein, 10 aa, Artificial Sequence
  Description of Artificial Sequence: Synthetic peptide
  Seed: RTGMDPRMCS
RTGMDPRMCI

SEQ ID NO: 8644 - protein, 10 aa, Artificial Sequence
  Description of Artificial Sequence: Synthetic peptide
  Seed: RTGMDPRMCS
RYGMDPRMCV

SEQ ID NO: 8645 - protein, 10 aa, Artificial Sequence
  Description of Artificial Sequence: Synthetic peptide
  Seed: RTGMDPRMCS
RTGMDPRMCL

SEQ ID NO: 8646 - protein, 10 aa, Artificial Sequence
  Description of Artificial Sequence: Synthetic peptide
  Seed: RTGMDPRMCS
RTGMDPRMCK

SEQ ID NO: 8647 - protein, 10 aa, Artificial Sequence
  Description of Artificial Sequence: Synthetic peptide
  Seed: RTGMDPRMCS
RTGMDPRMCM

SEQ ID NO: 8648 - protein, 10 aa, Artificial Sequence
  Description of Artificial Sequence: Synthetic peptide
  Seed: RTGMDPRMCS
RTGMDPRMCY

SEQ ID NO: 8649 - protein, 10 aa, Artificial Sequence
  Description of Artificial Sequence: Synthetic peptide
  Seed: RTGMDPRMCS
RTGMDPRMCV

SEQ ID NO: 8650 - protein, 10 aa, Artificial Sequence
  Description of Artificial Sequence: Synthetic peptide
  Seed: RTGMDPRMCS
RWGMDPRMCA

SEQ ID NO: 8651 - protein, 10 aa, Artificial Sequence
  Description of Artificial Sequence: Synthetic peptide
  Seed: RTGMDPRMCS
RWGMDPRMCK

SEQ ID NO: 8652 - protein, 10 aa, Artificial Sequence
  Description of Artificial Sequence: Synthetic peptide
  Seed: RTGMDPRMCS
RYGMDPRMCA

SEQ ID NO: 8653 - protein, 10 aa, Artificial Sequence
  Description of Artificial Sequence: Synthetic peptide
  Seed: RTGMDPRMCS
RYGMDPRMCI

SEQ ID NO: 8654 - protein, 10 aa, Artificial Sequence
  Description of Artificial Sequence: Synthetic peptide
  Seed: RTGMDPRMCS
RSGMDPRMCR

SEQ ID NO: 8655 - protein, 10 aa, Artificial Sequence
  Description of Artificial Sequence: Synthetic peptide
  Seed: RTGMDPRMCS
RSGMDPRMCA

SEQ ID NO: 8656 - protein, 10 aa, Artificial Sequence
  Description of Artificial Sequence: Synthetic peptide
  Seed: RTGMDPRMCS
RPGMDPRMCK

SEQ ID NO: 8657 - protein, 10 aa, Artificial Sequence
  Description of Artificial Sequence: Synthetic peptide
  Seed: RTGMDPRMCS
RFGMDPRMCV

SEQ ID NO: 8658 - protein, 10 aa, Artificial Sequence
  Description of Artificial Sequence: Synthetic peptide
  Seed: RTGMDPRMCS
RGGMDPRMCK

SEQ ID NO: 8659 - protein, 10 aa, Artificial Sequence
  Description of Artificial Sequence: Synthetic peptide
  Seed: RTGMDPRMCS
RHGMDPRMCK

SEQ ID NO: 8660 - protein, 10 aa, Artificial Sequence
  Description of Artificial Sequence: Synthetic peptide
  Seed: RTGMDPRMCS
RIGMDPRMCA

SEQ ID NO: 8661 - protein, 10 aa, Artificial Sequence
  Description of Artificial Sequence: Synthetic peptide
  Seed: RTGMDPRMCS
RIGMDPRMCI

SEQ ID NO: 8662 - protein, 10 aa, Artificial Sequence
  Description of Artificial Sequence: Synthetic peptide
  Seed: RTGMDPRMCS
RIGMDPRMCK

SEQ ID NO: 8663 - protein, 10 aa, Artificial Sequence
  Description of Artificial Sequence: Synthetic peptide
  Seed: RTGMDPRMCS
RIGMDPRMCV

SEQ ID NO: 8664 - protein, 10 aa, Artificial Sequence
  Description of Artificial Sequence: Synthetic peptide
  Seed: RTGMDPRMCS
RLGMDPRMCA

SEQ ID NO: 8665 - protein, 10 aa, Artificial Sequence
  Description of Artificial Sequence: Synthetic peptide
  Seed: RTGMDPRMCS
RLGMDPRMCK

SEQ ID NO: 8666 - protein, 10 aa, Artificial Sequence
  Description of Artificial Sequence: Synthetic peptide
  Seed: RTGMDPRMCS
RKGMDPRMCK

SEQ ID NO: 8667 - protein, 10 aa, Artificial Sequence
  Description of Artificial Sequence: Synthetic peptide
  Seed: RTGMDPRMCS
RMGMDPRMCA

SEQ ID NO: 8668 - protein, 10 aa, Artificial Sequence
  Description of Artificial Sequence: Synthetic peptide
  Seed: RTGMDPRMCS
RMGMDPRMCR

SEQ ID NO: 8669 - protein, 10 aa, Artificial Sequence
  Description of Artificial Sequence: Synthetic peptide
  Seed: RTGMDPRMCS
RMGMDPRMCI

SEQ ID NO: 8670 - protein, 10 aa, Artificial Sequence
  Description of Artificial Sequence: Synthetic peptide
  Seed: RTGMDPRMCS
RMGMDPRMCL

SEQ ID NO: 8671 - protein, 10 aa, Artificial Sequence
  Description of Artificial Sequence: Synthetic peptide
  Seed: RTGMDPRMCS
RMGMDPRMCK

SEQ ID NO: 8672 - protein, 10 aa, Artificial Sequence
  Description of Artificial Sequence: Synthetic peptide
  Seed: RTGMDPRMCS
RMGMDPRMCM

SEQ ID NO: 8673 - protein, 10 aa, Artificial Sequence
  Description of Artificial Sequence: Synthetic peptide
  Seed: RTGMDPRMCS
RMGMDPRMCY

SEQ ID NO: 8674 - protein, 10 aa, Artificial Sequence
  Description of Artificial Sequence: Synthetic peptide
  Seed: RTGMDPRMCS
RMGMDPRMCV

SEQ ID NO: 8675 - protein, 10 aa, Artificial Sequence
  Description of Artificial Sequence: Synthetic peptide
  Seed: RTGMDPRMCS
RFGMDPRMCA

SEQ ID NO: 8676 - protein, 10 aa, Artificial Sequence
  Description of Artificial Sequence: Synthetic peptide
  Seed: RTGMDPRMCS
RFGMDPRMCK

SEQ ID NO: 8677 - protein, 10 aa, Artificial Sequence
  Description of Artificial Sequence: Synthetic peptide
  Seed: RTGMDPRMCS
RYGMDPRMCK

SEQ ID NO: 8678 - protein, 10 aa, Artificial Sequence
  Description of Artificial Sequence: Synthetic peptide
  Seed: RTGMDPRMCS
RVGMDPRMCA

SEQ ID NO: 8679 - protein, 10 aa, Artificial Sequence
  Description of Artificial Sequence: Synthetic peptide
  Seed: RTGMDPRMCS
RQGMDPRMCK

SEQ ID NO: 8680 - protein, 8 aa, Artificial Sequence
  Description of Artificial Sequence: Synthetic peptide
  Seed: RTRALVRT
RMRALVRM

SEQ ID NO: 8681 - protein, 8 aa, Artificial Sequence
  Description of Artificial Sequence: Synthetic peptide
  Seed: RTRALVRT
RIRALVRY

SEQ ID NO: 8682 - protein, 8 aa, Artificial Sequence
  Description of Artificial Sequence: Synthetic peptide
  Seed: RTRALVRT
RIRALVRV

SEQ ID NO: 8683 - protein, 8 aa, Artificial Sequence
  Description of Artificial Sequence: Synthetic peptide
  Seed: RTRALVRT
RLRALVRA

SEQ ID NO: 8684 - protein, 8 aa, Artificial Sequence
  Description of Artificial Sequence: Synthetic peptide
  Seed: RTRALVRT
RLRALVRK

SEQ ID NO: 8685 - protein, 8 aa, Artificial Sequence
  Description of Artificial Sequence: Synthetic peptide
  Seed: RTRALVRT
RMRALVRA

SEQ ID NO: 8686 - protein, 8 aa, Artificial Sequence
  Description of Artificial Sequence: Synthetic peptide
  Seed: RTRALVRT
RMRALVRR

SEQ ID NO: 8687 - protein, 8 aa, Artificial Sequence
  Description of Artificial Sequence: Synthetic peptide
  Seed: RTRALVRT
RMRALVRI

SEQ ID NO: 8688 - protein, 8 aa, Artificial Sequence
  Description of Artificial Sequence: Synthetic peptide
  Seed: RTRALVRT
RMRALVRL

SEQ ID NO: 8689 - protein, 8 aa, Artificial Sequence
  Description of Artificial Sequence: Synthetic peptide
  Seed: RTRALVRT
RMRALVRK

SEQ ID NO: 8690 - protein, 8 aa, Artificial Sequence
  Description of Artificial Sequence: Synthetic peptide
  Seed: RTRALVRT
RMRALVRF

SEQ ID NO: 8691 - protein, 10 aa, Artificial Sequence
  Description of Artificial Sequence: Synthetic peptide
  Seed: RTGMDPRMCS
RVGMDPRMCG

SEQ ID NO: 8692 - protein, 8 aa, Artificial Sequence
  Description of Artificial Sequence: Synthetic peptide
  Seed: RTRALVRT
RMRALVRP

SEQ ID NO: 8693 - protein, 8 aa, Artificial Sequence
  Description of Artificial Sequence: Synthetic peptide
  Seed: RTRALVRT
RMRALVRS

SEQ ID NO: 8694 - protein, 8 aa, Artificial Sequence
  Description of Artificial Sequence: Synthetic peptide
  Seed: RTRALVRT
RMRALVRY

SEQ ID NO: 8695 - protein, 8 aa, Artificial Sequence
  Description of Artificial Sequence: Synthetic peptide
  Seed: RTRALVRT
RMRALVRV

SEQ ID NO: 8696 - protein, 8 aa, Artificial Sequence
  Description of Artificial Sequence: Synthetic peptide
  Seed: RTRALVRT
RFRALVRA

SEQ ID NO: 8697 - protein, 8 aa, Artificial Sequence
  Description of Artificial Sequence: Synthetic peptide
  Seed: RTRALVRT
RFRALVRI

SEQ ID NO: 8698 - protein, 8 aa, Artificial Sequence
  Description of Artificial Sequence: Synthetic peptide
  Seed: RTRALVRT
RFRALVRL

SEQ ID NO: 8699 - protein, 8 aa, Artificial Sequence
  Description of Artificial Sequence: Synthetic peptide
  Seed: RTRALVRT
RFRALVRK

SEQ ID NO: 8700 - protein, 8 aa, Artificial Sequence
  Description of Artificial Sequence: Synthetic peptide
  Seed: RTRALVRT
RFRALVRM

SEQ ID NO: 8701 - protein, 8 aa, Artificial Sequence
  Description of Artificial Sequence: Synthetic peptide
  Seed: RTRALVRT
RIRALVRS

SEQ ID NO: 8702 - protein, 8 aa, Artificial Sequence
  Description of Artificial Sequence: Synthetic peptide
  Seed: RTRALVRT
RIRALVRP

SEQ ID NO: 8703 - protein, 8 aa, Artificial Sequence
  Description of Artificial Sequence: Synthetic peptide
  Seed: RTRALVRT
RIRALVRF

SEQ ID NO: 8704 - protein, 8 aa, Artificial Sequence
  Description of Artificial Sequence: Synthetic peptide
  Seed: RTRALVRT
RIRALVRM

SEQ ID NO: 8705 - protein, 10 aa, Artificial Sequence
  Description of Artificial Sequence: Synthetic peptide
  Seed: RTGMDPRMCS
RVGMDPRMCI

SEQ ID NO: 8706 - protein, 10 aa, Artificial Sequence
  Description of Artificial Sequence: Synthetic peptide
  Seed: RTGMDPRMCS
RVGMDPRMCL

SEQ ID NO: 8707 - protein, 10 aa, Artificial Sequence
  Description of Artificial Sequence: Synthetic peptide
  Seed: RTGMDPRMCS
RVGMDPRMCK

SEQ ID NO: 8708 - protein, 10 aa, Artificial Sequence
  Description of Artificial Sequence: Synthetic peptide
  Seed: RTGMDPRMCS
RVGMDPRMCM

SEQ ID NO: 8709 - protein, 10 aa, Artificial Sequence
  Description of Artificial Sequence: Synthetic peptide
  Seed: RTGMDPRMCS
RVGMDPRMCS

SEQ ID NO: 8710 - protein, 10 aa, Artificial Sequence
  Description of Artificial Sequence: Synthetic peptide
  Seed: RTGMDPRMCS
RVGMDPRMCY

SEQ ID NO: 8711 - protein, 10 aa, Artificial Sequence
  Description of Artificial Sequence: Synthetic peptide
  Seed: RTGMDPRMCS
RVGMDPRMCV

SEQ ID NO: 8712 - protein, 8 aa, Artificial Sequence
  Description of Artificial Sequence: Synthetic peptide
  Seed: RTRALVRT
RARALVRA

SEQ ID NO: 8713 - protein, 8 aa, Artificial Sequence
  Description of Artificial Sequence: Synthetic peptide
  Seed: RTRALVRT
RARALVRL

SEQ ID NO: 8714 - protein, 8 aa, Artificial Sequence
  Description of Artificial Sequence: Synthetic peptide
  Seed: RTRALVRT
RARALVRK

SEQ ID NO: 8715 - protein, 8 aa, Artificial Sequence
  Description of Artificial Sequence: Synthetic peptide
  Seed: RTRALVRT
RARALVRY

SEQ ID NO: 8716 - protein, 8 aa, Artificial Sequence
  Description of Artificial Sequence: Synthetic peptide
  Seed: RTRALVRT
RARALVRV

SEQ ID NO: 8717 - protein, 8 aa, Artificial Sequence
  Description of Artificial Sequence: Synthetic peptide
  Seed: RTRALVRT
RRRALVRK

SEQ ID NO: 8718 - protein, 8 aa, Artificial Sequence
  Description of Artificial Sequence: Synthetic peptide
  Seed: RTRALVRT
RQRALVRK

SEQ ID NO: 8719 - protein, 8 aa, Artificial Sequence
  Description of Artificial Sequence: Synthetic peptide
  Seed: RTRALVRT
RGRALVRK

SEQ ID NO: 8720 - protein, 8 aa, Artificial Sequence
  Description of Artificial Sequence: Synthetic peptide
  Seed: RTRALVRT
RIRALVRA

SEQ ID NO: 8721 - protein, 8 aa, Artificial Sequence
  Description of Artificial Sequence: Synthetic peptide
  Seed: RTRALVRT
RIRALVRI

SEQ ID NO: 8722 - protein, 8 aa, Artificial Sequence
  Description of Artificial Sequence: Synthetic peptide
  Seed: RTRALVRT
RIRALVRL

SEQ ID NO: 8723 - protein, 8 aa, Artificial Sequence
  Description of Artificial Sequence: Synthetic peptide
  Seed: RTRALVRT
RIRALVRK

SEQ ID NO: 8724 - protein, 10 aa, Artificial Sequence
  Description of Artificial Sequence: Synthetic peptide
  Seed: RTGMDPRMCS
REGMDPRMCK

SEQ ID NO: 8725 - protein, 10 aa, Artificial Sequence
  Description of Artificial Sequence: Synthetic peptide
  Seed: RTGMDPRMCS
RQGMDPRMCA

SEQ ID NO: 8726 - protein, 8 aa, Artificial Sequence
  Description of Artificial Sequence: Synthetic peptide
  Seed: RTRALVRT
RFRALVRV

SEQ ID NO: 8727 - protein, 9 aa, Artificial Sequence
  Description of Artificial Sequence: Synthetic peptide
  Seed: RSYEQMETG
RSYEQMETV

SEQ ID NO: 8728 - protein, 9 aa, Artificial Sequence
  Description of Artificial Sequence: Synthetic peptide
  Seed: RSYEQMETG
RFYEQMETW

SEQ ID NO: 8729 - protein, 9 aa, Artificial Sequence
  Description of Artificial Sequence: Synthetic peptide
  Seed: RSYEQMETG
RPYEQMETW

SEQ ID NO: 8730 - protein, 9 aa, Artificial Sequence
  Description of Artificial Sequence: Synthetic peptide
  Seed: RSYEQMETG
RSYEQMETC

SEQ ID NO: 8731 - protein, 9 aa, Artificial Sequence
  Description of Artificial Sequence: Synthetic peptide
  Seed: RSYEQMETG
RSYEQMETI

SEQ ID NO: 8732 - protein, 9 aa, Artificial Sequence
  Description of Artificial Sequence: Synthetic peptide
  Seed: RSYEQMETG
RSYEQMETL

SEQ ID NO: 8733 - protein, 9 aa, Artificial Sequence
  Description of Artificial Sequence: Synthetic peptide
  Seed: RSYEQMETG
RSYEQMETM

SEQ ID NO: 8734 - protein, 9 aa, Artificial Sequence
  Description of Artificial Sequence: Synthetic peptide
  Seed: RSYEQMETG
RSYEQMETF

SEQ ID NO: 8735 - protein, 9 aa, Artificial Sequence
  Description of Artificial Sequence: Synthetic peptide
  Seed: RSYEQMETG
RSYEQMETW

SEQ ID NO: 8736 - protein, 9 aa, Artificial Sequence
  Description of Artificial Sequence: Synthetic peptide
  Seed: RSYEQMETG
RSYEQMETY

SEQ ID NO: 8737 - protein, 9 aa, Artificial Sequence
  Description of Artificial Sequence: Synthetic peptide
  Seed: RSYEQMETG
RTYEQMETI

SEQ ID NO: 8738 - protein, 9 aa, Artificial Sequence
  Description of Artificial Sequence: Synthetic peptide
  Seed: RSYEQMETG
RVYEQMETW

SEQ ID NO: 8739 - protein, 9 aa, Artificial Sequence
  Description of Artificial Sequence: Synthetic peptide
  Seed: RSYEQMETG
RTYEQMETL

SEQ ID NO: 8740 - protein, 9 aa, Artificial Sequence
  Description of Artificial Sequence: Synthetic peptide
  Seed: RSYEQMETG
RTYEQMETM

SEQ ID NO: 8741 - protein, 9 aa, Artificial Sequence
  Description of Artificial Sequence: Synthetic peptide
  Seed: RSYEQMETG
RTYEQMETF

SEQ ID NO: 8742 - protein, 9 aa, Artificial Sequence
  Description of Artificial Sequence: Synthetic peptide
  Seed: RSYEQMETG
RTYEQMETW

SEQ ID NO: 8743 - protein, 9 aa, Artificial Sequence
  Description of Artificial Sequence: Synthetic peptide
  Seed: RSYEQMETG
RTYEQMETY

SEQ ID NO: 8744 - protein, 9 aa, Artificial Sequence
  Description of Artificial Sequence: Synthetic peptide
  Seed: RSYEQMETG
RTYEQMETV

SEQ ID NO: 8745 - protein, 9 aa, Artificial Sequence
  Description of Artificial Sequence: Synthetic peptide
  Seed: RSYEQMETG
RWYEQMETW

SEQ ID NO: 8746 - protein, 9 aa, Artificial Sequence
  Description of Artificial Sequence: Synthetic peptide
  Seed: RSYEQMETG
RYYEQMETW

SEQ ID NO: 8747 - protein, 9 aa, Artificial Sequence
  Description of Artificial Sequence: Synthetic peptide
  Seed: RSYEQMETG
RVYEQMETI

SEQ ID NO: 8748 - protein, 9 aa, Artificial Sequence
  Description of Artificial Sequence: Synthetic peptide
  Seed: RSYEQMETG
RMYEQMETY

SEQ ID NO: 8749 - protein, 9 aa, Artificial Sequence
  Description of Artificial Sequence: Synthetic peptide
  Seed: RSYEQMETG
RMYEQMETW

SEQ ID NO: 8750 - protein, 9 aa, Artificial Sequence
  Description of Artificial Sequence: Synthetic peptide
  Seed: RSYEQMETG
RMYEQMETF

SEQ ID NO: 8751 - protein, 9 aa, Artificial Sequence
  Description of Artificial Sequence: Synthetic peptide
  Seed: RSYEQMETG
RLYEQMETW

SEQ ID NO: 8752 - protein, 11 aa, Artificial Sequence
  Description of Artificial Sequence: Synthetic peptide
  Seed: RSRYWAIRTRS
RVRYWAIRTRY

SEQ ID NO: 8753 - protein, 11 aa, Artificial Sequence
  Description of Artificial Sequence: Synthetic peptide
  Seed: RSRYWAIRTRS
RVRYWAIRTRV

SEQ ID NO: 8754 - protein, 9 aa, Artificial Sequence
  Description of Artificial Sequence: Synthetic peptide
  Seed: RSYEQMETG
RAYEQMETI

SEQ ID NO: 8755 - protein, 9 aa, Artificial Sequence
  Description of Artificial Sequence: Synthetic peptide
  Seed: RSYEQMETG
RAYEQMETL

SEQ ID NO: 8756 - protein, 9 aa, Artificial Sequence
  Description of Artificial Sequence: Synthetic peptide
  Seed: RSYEQMETG
RAYEQMETM

SEQ ID NO: 8757 - protein, 9 aa, Artificial Sequence
  Description of Artificial Sequence: Synthetic peptide
  Seed: RSYEQMETG
RAYEQMETF

SEQ ID NO: 8758 - protein, 9 aa, Artificial Sequence
  Description of Artificial Sequence: Synthetic peptide
  Seed: RSYEQMETG
RAYEQMETW

SEQ ID NO: 8759 - protein, 9 aa, Artificial Sequence
  Description of Artificial Sequence: Synthetic peptide
  Seed: RSYEQMETG
RAYEQMETY

SEQ ID NO: 8760 - protein, 9 aa, Artificial Sequence
  Description of Artificial Sequence: Synthetic peptide
  Seed: RSYEQMETG
RAYEQMETV

SEQ ID NO: 8761 - protein, 9 aa, Artificial Sequence
  Description of Artificial Sequence: Synthetic peptide
  Seed: RSYEQMETG
RNYEQMETW

SEQ ID NO: 8762 - protein, 9 aa, Artificial Sequence
  Description of Artificial Sequence: Synthetic peptide
  Seed: RSYEQMETG
RCYEQMETF

SEQ ID NO: 8763 - protein, 9 aa, Artificial Sequence
  Description of Artificial Sequence: Synthetic peptide
  Seed: RSYEQMETG
RCYEQMETW

SEQ ID NO: 8764 - protein, 9 aa, Artificial Sequence
  Description of Artificial Sequence: Synthetic peptide
  Seed: RSYEQMETG
RQYEQMETW

SEQ ID NO: 8765 - protein, 9 aa, Artificial Sequence
  Description of Artificial Sequence: Synthetic peptide
  Seed: RSYEQMETG
RGYEQMETF

SEQ ID NO: 8766 - protein, 9 aa, Artificial Sequence
  Description of Artificial Sequence: Synthetic peptide
  Seed: RSYEQMETG
RGYEQMETW

SEQ ID NO: 8767 - protein, 9 aa, Artificial Sequence
  Description of Artificial Sequence: Synthetic peptide
  Seed: RSYEQMETG
RGYEQMETY

SEQ ID NO: 8768 - protein, 9 aa, Artificial Sequence
  Description of Artificial Sequence: Synthetic peptide
  Seed: RSYEQMETG
RIYEQMETF

SEQ ID NO: 8769 - protein, 9 aa, Artificial Sequence
  Description of Artificial Sequence: Synthetic peptide
  Seed: RSYEQMETG
RIYEQMETW

SEQ ID NO: 8770 - protein, 9 aa, Artificial Sequence
  Description of Artificial Sequence: Synthetic peptide
  Seed: RSYEQMETG
RLYEQMETF

SEQ ID NO: 8771 - protein, 9 aa, Artificial Sequence
  Description of Artificial Sequence: Synthetic peptide
  Seed: RSYEQMETG
RVYEQMETF

SEQ ID NO: 8772 - protein, 9 aa, Artificial Sequence
  Description of Artificial Sequence: Synthetic peptide
  Seed: RSYEQMETG
RVYEQMETY

SEQ ID NO: 8773 - protein, 10 aa, Artificial Sequence
  Description of Artificial Sequence: Synthetic peptide
  Seed: RTGMDPRMCS
RCGMDPRMCK

SEQ ID NO: 8774 - protein, 10 aa, Artificial Sequence
  Description of Artificial Sequence: Synthetic peptide
  Seed: RTEIIRMMES
RVEIIRMMEI

SEQ ID NO: 8775 - protein, 10 aa, Artificial Sequence
  Description of Artificial Sequence: Synthetic peptide
  Seed: RTEIIRMMES
RTEIIRMMEM

SEQ ID NO: 8776 - protein, 10 aa, Artificial Sequence
  Description of Artificial Sequence: Synthetic peptide
  Seed: RTEIIRMMES
RTEIIRMMEY

SEQ ID NO: 8777 - protein, 10 aa, Artificial Sequence
  Description of Artificial Sequence: Synthetic peptide
  Seed: RTEIIRMMES
RTEIIRMMEV

SEQ ID NO: 8778 - protein, 10 aa, Artificial Sequence
  Description of Artificial Sequence: Synthetic peptide
  Seed: RTEIIRMMES
RWEIIRMMEK

SEQ ID NO: 8779 - protein, 10 aa, Artificial Sequence
  Description of Artificial Sequence: Synthetic peptide
  Seed: RTEIIRMMES
RYEIIRMMEA

SEQ ID NO: 8780 - protein, 10 aa, Artificial Sequence
  Description of Artificial Sequence: Synthetic peptide
  Seed: RTEIIRMMES
RYEIIRMMEI

SEQ ID NO: 8781 - protein, 10 aa, Artificial Sequence
  Description of Artificial Sequence: Synthetic peptide
  Seed: RTEIIRMMES
RYEIIRMMEK

SEQ ID NO: 8782 - protein, 10 aa, Artificial Sequence
  Description of Artificial Sequence: Synthetic peptide
  Seed: RTEIIRMMES
RYEIIRMMEV

SEQ ID NO: 8783 - protein, 10 aa, Artificial Sequence
  Description of Artificial Sequence: Synthetic peptide
  Seed: RTEIIRMMES
RVEIIRMMEA

SEQ ID NO: 8784 - protein, 10 aa, Artificial Sequence
  Description of Artificial Sequence: Synthetic peptide
  Seed: RTEIIRMMES
RVEIIRMMEL

SEQ ID NO: 8785 - protein, 10 aa, Artificial Sequence
  Description of Artificial Sequence: Synthetic peptide
  Seed: RTEIIRMMES
RAEIIRMMEA

SEQ ID NO: 8786 - protein, 10 aa, Artificial Sequence
  Description of Artificial Sequence: Synthetic peptide
  Seed: RTEIIRMMES
RVEIIRMMEK

SEQ ID NO: 8787 - protein, 10 aa, Artificial Sequence
  Description of Artificial Sequence: Synthetic peptide
  Seed: RTEIIRMMES
RVEIIRMMEM

SEQ ID NO: 8788 - protein, 10 aa, Artificial Sequence
  Description of Artificial Sequence: Synthetic peptide
  Seed: RTEIIRMMES
RVEIIRMMEV

SEQ ID NO: 8789 - protein, 10 aa, Artificial Sequence
  Description of Artificial Sequence: Synthetic peptide
  Seed: RTGMDPRMCS
RAGMDPRMCA

SEQ ID NO: 8790 - protein, 10 aa, Artificial Sequence
  Description of Artificial Sequence: Synthetic peptide
  Seed: RTGMDPRMCS
RAGMDPRMCK

SEQ ID NO: 8791 - protein, 10 aa, Artificial Sequence
  Description of Artificial Sequence: Synthetic peptide
  Seed: RTGMDPRMCS
RAGMDPRMCV

SEQ ID NO: 8792 - protein, 10 aa, Artificial Sequence
  Description of Artificial Sequence: Synthetic peptide
  Seed: RTGMDPRMCS
RRGMDPRMCK

SEQ ID NO: 8793 - protein, 10 aa, Artificial Sequence
  Description of Artificial Sequence: Synthetic peptide
  Seed: RTGMDPRMCS
RNGMDPRMCK

SEQ ID NO: 8794 - protein, 10 aa, Artificial Sequence
  Description of Artificial Sequence: Synthetic peptide
  Seed: RTGMDPRMCS
RDGMDPRMCK

SEQ ID NO: 8795 - protein, 10 aa, Artificial Sequence
  Description of Artificial Sequence: Synthetic peptide
  Seed: RTEIIRMMES
RTEIIRMMEK

SEQ ID NO: 8796 - protein, 10 aa, Artificial Sequence
  Description of Artificial Sequence: Synthetic peptide
  Seed: RTEIIRMMES
RTEIIRMMEL

SEQ ID NO: 8797 - protein, 10 aa, Artificial Sequence
  Description of Artificial Sequence: Synthetic peptide
  Seed: RTEIIRMMES
RTEIIRMMEI

SEQ ID NO: 8798 - protein, 10 aa, Artificial Sequence
  Description of Artificial Sequence: Synthetic peptide
  Seed: RTEIIRMMES
RAEIIRMMEK

SEQ ID NO: 8799 - protein, 10 aa, Artificial Sequence
  Description of Artificial Sequence: Synthetic peptide
  Seed: RTEIIRMMES
RAEIIRMMEV

SEQ ID NO: 8800 - protein, 10 aa, Artificial Sequence
  Description of Artificial Sequence: Synthetic peptide
  Seed: RTEIIRMMES
RQEIIRMMEK

SEQ ID NO: 8801 - protein, 10 aa, Artificial Sequence
  Description of Artificial Sequence: Synthetic peptide
  Seed: RTEIIRMMES
RGEIIRMMEK

SEQ ID NO: 8802 - protein, 10 aa, Artificial Sequence
  Description of Artificial Sequence: Synthetic peptide
  Seed: RTEIIRMMES
RIEIIRMMEA

SEQ ID NO: 8803 - protein, 10 aa, Artificial Sequence
  Description of Artificial Sequence: Synthetic peptide
  Seed: RTEIIRMMES
RIEIIRMMEK

SEQ ID NO: 8804 - protein, 10 aa, Artificial Sequence
  Description of Artificial Sequence: Synthetic peptide
  Seed: RTEIIRMMES
RLEIIRMMEK

SEQ ID NO: 8805 - protein, 10 aa, Artificial Sequence
  Description of Artificial Sequence: Synthetic peptide
  Seed: RTEIIRMMES
RMEIIRMMEA

SEQ ID NO: 8806 - protein, 10 aa, Artificial Sequence
  Description of Artificial Sequence: Synthetic peptide
  Seed: RTEIIRMMES
RMEIIRMMEK

SEQ ID NO: 8807 - protein, 10 aa, Artificial Sequence
  Description of Artificial Sequence: Synthetic peptide
  Seed: RTEIIRMMES
RMEIIRMMEV

SEQ ID NO: 8808 - protein, 10 aa, Artificial Sequence
  Description of Artificial Sequence: Synthetic peptide
  Seed: RTEIIRMMES
RFEIIRMMEA

SEQ ID NO: 8809 - protein, 10 aa, Artificial Sequence
  Description of Artificial Sequence: Synthetic peptide
  Seed: RTEIIRMMES
RFEIIRMMEK

SEQ ID NO: 8810 - protein, 10 aa, Artificial Sequence
  Description of Artificial Sequence: Synthetic peptide
  Seed: RTEIIRMMES
RSEIIRMMEA

SEQ ID NO: 8811 - protein, 10 aa, Artificial Sequence
  Description of Artificial Sequence: Synthetic peptide
  Seed: RTEIIRMMES
RSEIIRMMEI

SEQ ID NO: 8812 - protein, 10 aa, Artificial Sequence
  Description of Artificial Sequence: Synthetic peptide
  Seed: RTEIIRMMES
RSEIIRMMEL

SEQ ID NO: 8813 - protein, 10 aa, Artificial Sequence
  Description of Artificial Sequence: Synthetic peptide
  Seed: RTEIIRMMES
RSEIIRMMEK

SEQ ID NO: 8814 - protein, 10 aa, Artificial Sequence
  Description of Artificial Sequence: Synthetic peptide
  Seed: RTEIIRMMES
RSEIIRMMEM

SEQ ID NO: 8815 - protein, 10 aa, Artificial Sequence
  Description of Artificial Sequence: Synthetic peptide
  Seed: RTEIIRMMES
RSEIIRMMEV

SEQ ID NO: 8816 - protein, 10 aa, Artificial Sequence
  Description of Artificial Sequence: Synthetic peptide
  Seed: RTEIIRMMES
RTEIIRMMEA

SEQ ID NO: 8817 - protein, 8 aa, Artificial Sequence
  Description of Artificial Sequence: Synthetic peptide
  Seed: RTRALVRT
RFRALVRY

SEQ ID NO: 8818 - protein, 8 aa, Artificial Sequence
  Description of Artificial Sequence: Synthetic peptide
  Seed: RTRALVRT
RSRALVRA

SEQ ID NO: 8819 - protein, 11 aa, Artificial Sequence
  Description of Artificial Sequence: Synthetic peptide
  Seed: RSRYWAIRTRS
RVRYWAIRTRT

SEQ ID NO: 8820 - protein, 9 aa, Artificial Sequence
  Description of Artificial Sequence: Synthetic peptide
  Seed: RTRALVRTG
RQRALVRTV

SEQ ID NO: 8821 - protein, 9 aa, Artificial Sequence
  Description of Artificial Sequence: Synthetic peptide
  Seed: RTRALVRTG
RQRALVRTI

SEQ ID NO: 8822 - protein, 9 aa, Artificial Sequence
  Description of Artificial Sequence: Synthetic peptide
  Seed: RTRALVRTG
RQRALVRTL

SEQ ID NO: 8823 - protein, 9 aa, Artificial Sequence
  Description of Artificial Sequence: Synthetic peptide
  Seed: RTRALVRTG
RQRALVRTK

SEQ ID NO: 8824 - protein, 9 aa, Artificial Sequence
  Description of Artificial Sequence: Synthetic peptide
  Seed: RTRALVRTG
RQRALVRTM

SEQ ID NO: 8825 - protein, 9 aa, Artificial Sequence
  Description of Artificial Sequence: Synthetic peptide
  Seed: RTRALVRTG
RQRALVRTF

SEQ ID NO: 8826 - protein, 9 aa, Artificial Sequence
  Description of Artificial Sequence: Synthetic peptide
  Seed: RTRALVRTG
RQRALVRTP

SEQ ID NO: 8827 - protein, 9 aa, Artificial Sequence
  Description of Artificial Sequence: Synthetic peptide
  Seed: RTRALVRTG
RQRALVRTS

SEQ ID NO: 8828 - protein, 9 aa, Artificial Sequence
  Description of Artificial Sequence: Synthetic peptide
  Seed: RTRALVRTG
RQRALVRTT

SEQ ID NO: 8829 - protein, 9 aa, Artificial Sequence
  Description of Artificial Sequence: Synthetic peptide
  Seed: RTRALVRTG
RQRALVRTY

SEQ ID NO: 8830 - protein, 9 aa, Artificial Sequence
  Description of Artificial Sequence: Synthetic peptide
  Seed: RTRALVRTG
RERALVRTK

SEQ ID NO: 8831 - protein, 9 aa, Artificial Sequence
  Description of Artificial Sequence: Synthetic peptide
  Seed: RTRALVRTG
RGRALVRTK

SEQ ID NO: 8832 - protein, 9 aa, Artificial Sequence
  Description of Artificial Sequence: Synthetic peptide
  Seed: RTRALVRTG
RGRALVRTA

SEQ ID NO: 8833 - protein, 9 aa, Artificial Sequence
  Description of Artificial Sequence: Synthetic peptide
  Seed: RTRALVRTG
RGRALVRTR

SEQ ID NO: 8834 - protein, 9 aa, Artificial Sequence
  Description of Artificial Sequence: Synthetic peptide
  Seed: RTRALVRTG
RGRALVRTN

SEQ ID NO: 8835 - protein, 9 aa, Artificial Sequence
  Description of Artificial Sequence: Synthetic peptide
  Seed: RTRALVRTG
RGRALVRTC

SEQ ID NO: 8836 - protein, 9 aa, Artificial Sequence
  Description of Artificial Sequence: Synthetic peptide
  Seed: RTRALVRTG
RGRALVRTQ

SEQ ID NO: 8837 - protein, 9 aa, Artificial Sequence
  Description of Artificial Sequence: Synthetic peptide
  Seed: RTRALVRTG
RGRALVRTE

SEQ ID NO: 8838 - protein, 9 aa, Artificial Sequence
  Description of Artificial Sequence: Synthetic peptide
  Seed: RTRALVRTG
RGRALVRTG

SEQ ID NO: 8839 - protein, 9 aa, Artificial Sequence
  Description of Artificial Sequence: Synthetic peptide
  Seed: RTRALVRTG
RGRALVRTH

SEQ ID NO: 8840 - protein, 9 aa, Artificial Sequence
  Description of Artificial Sequence: Synthetic peptide
  Seed: RTRALVRTG
RGRALVRTI

SEQ ID NO: 8841 - protein, 9 aa, Artificial Sequence
  Description of Artificial Sequence: Synthetic peptide
  Seed: RTRALVRTG
RQRALVRTH

SEQ ID NO: 8842 - protein, 9 aa, Artificial Sequence
  Description of Artificial Sequence: Synthetic peptide
  Seed: RTRALVRTG
RQRALVRTG

SEQ ID NO: 8843 - protein, 9 aa, Artificial Sequence
  Description of Artificial Sequence: Synthetic peptide
  Seed: RTRALVRTG
RQRALVRTE

SEQ ID NO: 8844 - protein, 9 aa, Artificial Sequence
  Description of Artificial Sequence: Synthetic peptide
  Seed: RTRALVRTG
RQRALVRTQ

SEQ ID NO: 8845 - protein, 9 aa, Artificial Sequence
  Description of Artificial Sequence: Synthetic peptide
  Seed: RTRALVRTG
RNRALVRTP

SEQ ID NO: 8846 - protein, 9 aa, Artificial Sequence
  Description of Artificial Sequence: Synthetic peptide
  Seed: RTRALVRTG
RNRALVRTS

SEQ ID NO: 8847 - protein, 9 aa, Artificial Sequence
  Description of Artificial Sequence: Synthetic peptide
  Seed: RTRALVRTG
RNRALVRTT

SEQ ID NO: 8848 - protein, 9 aa, Artificial Sequence
  Description of Artificial Sequence: Synthetic peptide
  Seed: RTRALVRTG
RNRALVRTY

SEQ ID NO: 8849 - protein, 9 aa, Artificial Sequence
  Description of Artificial Sequence: Synthetic peptide
  Seed: RTRALVRTG
RNRALVRTV

SEQ ID NO: 8850 - protein, 9 aa, Artificial Sequence
  Description of Artificial Sequence: Synthetic peptide
  Seed: RTRALVRTG
RDRALVRTK

SEQ ID NO: 8851 - protein, 9 aa, Artificial Sequence
  Description of Artificial Sequence: Synthetic peptide
  Seed: RTRALVRTG
RCRALVRTA

SEQ ID NO: 8852 - protein, 9 aa, Artificial Sequence
  Description of Artificial Sequence: Synthetic peptide
  Seed: RTRALVRTG
RCRALVRTR

SEQ ID NO: 8853 - protein, 9 aa, Artificial Sequence
  Description of Artificial Sequence: Synthetic peptide
  Seed: RTRALVRTG
RCRALVRTI

SEQ ID NO: 8854 - protein, 9 aa, Artificial Sequence
  Description of Artificial Sequence: Synthetic peptide
  Seed: RTRALVRTG
RCRALVRTL

SEQ ID NO: 8855 - protein, 9 aa, Artificial Sequence
  Description of Artificial Sequence: Synthetic peptide
  Seed: RTRALVRTG
RCRALVRTK

SEQ ID NO: 8856 - protein, 9 aa, Artificial Sequence
  Description of Artificial Sequence: Synthetic peptide
  Seed: RTRALVRTG
RCRALVRTM

SEQ ID NO: 8857 - protein, 9 aa, Artificial Sequence
  Description of Artificial Sequence: Synthetic peptide
  Seed: RTRALVRTG
RCRALVRTS

SEQ ID NO: 8858 - protein, 9 aa, Artificial Sequence
  Description of Artificial Sequence: Synthetic peptide
  Seed: RTRALVRTG
RCRALVRTY

SEQ ID NO: 8859 - protein, 9 aa, Artificial Sequence
  Description of Artificial Sequence: Synthetic peptide
  Seed: RTRALVRTG
RCRALVRTV

SEQ ID NO: 8860 - protein, 9 aa, Artificial Sequence
  Description of Artificial Sequence: Synthetic peptide
  Seed: RTRALVRTG
RQRALVRTA

SEQ ID NO: 8861 - protein, 9 aa, Artificial Sequence
  Description of Artificial Sequence: Synthetic peptide
  Seed: RTRALVRTG
RQRALVRTR

SEQ ID NO: 8862 - protein, 9 aa, Artificial Sequence
  Description of Artificial Sequence: Synthetic peptide
  Seed: RTRALVRTG
RQRALVRTN

SEQ ID NO: 8863 - protein, 9 aa, Artificial Sequence
  Description of Artificial Sequence: Synthetic peptide
  Seed: RTRALVRTG
RQRALVRTC

SEQ ID NO: 8864 - protein, 9 aa, Artificial Sequence
  Description of Artificial Sequence: Synthetic peptide
  Seed: RTRALVRTG
RGRALVRTL

SEQ ID NO: 8865 - protein, 9 aa, Artificial Sequence
  Description of Artificial Sequence: Synthetic peptide
  Seed: RTRALVRTG
RGRALVRTM

SEQ ID NO: 8866 - protein, 9 aa, Artificial Sequence
  Description of Artificial Sequence: Synthetic peptide
  Seed: RTRALVRTG
RNRALVRTM

SEQ ID NO: 8867 - protein, 9 aa, Artificial Sequence
  Description of Artificial Sequence: Synthetic peptide
  Seed: RTRALVRTG
RLRALVRTC

SEQ ID NO: 8868 - protein, 9 aa, Artificial Sequence
  Description of Artificial Sequence: Synthetic peptide
  Seed: RTRALVRTG
RIRALVRTS

SEQ ID NO: 8869 - protein, 9 aa, Artificial Sequence
  Description of Artificial Sequence: Synthetic peptide
  Seed: RTRALVRTG
RIRALVRTT

SEQ ID NO: 8870 - protein, 9 aa, Artificial Sequence
  Description of Artificial Sequence: Synthetic peptide
  Seed: RTRALVRTG
RIRALVRTW

SEQ ID NO: 8871 - protein, 9 aa, Artificial Sequence
  Description of Artificial Sequence: Synthetic peptide
  Seed: RTRALVRTG
RIRALVRTY

SEQ ID NO: 8872 - protein, 9 aa, Artificial Sequence
  Description of Artificial Sequence: Synthetic peptide
  Seed: RTRALVRTG
RIRALVRTV

SEQ ID NO: 8873 - protein, 9 aa, Artificial Sequence
  Description of Artificial Sequence: Synthetic peptide
  Seed: RTRALVRTG
RLRALVRTA

SEQ ID NO: 8874 - protein, 9 aa, Artificial Sequence
  Description of Artificial Sequence: Synthetic peptide
  Seed: RTRALVRTG
RLRALVRTR

SEQ ID NO: 8875 - protein, 9 aa, Artificial Sequence
  Description of Artificial Sequence: Synthetic peptide
  Seed: RTRALVRTG
RLRALVRTN

SEQ ID NO: 8876 - protein, 9 aa, Artificial Sequence
  Description of Artificial Sequence: Synthetic peptide
  Seed: RTRALVRTG
RLRALVRTD

SEQ ID NO: 8877 - protein, 9 aa, Artificial Sequence
  Description of Artificial Sequence: Synthetic peptide
  Seed: RTRALVRTG
RLRALVRTQ

SEQ ID NO: 8878 - protein, 9 aa, Artificial Sequence
  Description of Artificial Sequence: Synthetic peptide
  Seed: RTRALVRTG
RGRALVRTF

SEQ ID NO: 8879 - protein, 9 aa, Artificial Sequence
  Description of Artificial Sequence: Synthetic peptide
  Seed: RTRALVRTG
RLRALVRTE

SEQ ID NO: 8880 - protein, 9 aa, Artificial Sequence
  Description of Artificial Sequence: Synthetic peptide
  Seed: RTRALVRTG
RLRALVRTG

SEQ ID NO: 8881 - protein, 9 aa, Artificial Sequence
  Description of Artificial Sequence: Synthetic peptide
  Seed: RTRALVRTG
RLRALVRTH

SEQ ID NO: 8882 - protein, 9 aa, Artificial Sequence
  Description of Artificial Sequence: Synthetic peptide
  Seed: RTRALVRTG
RLRALVRTI

SEQ ID NO: 8883 - protein, 9 aa, Artificial Sequence
  Description of Artificial Sequence: Synthetic peptide
  Seed: RTRALVRTG
RLRALVRTL

SEQ ID NO: 8884 - protein, 9 aa, Artificial Sequence
  Description of Artificial Sequence: Synthetic peptide
  Seed: RTRALVRTG
RLRALVRTK

SEQ ID NO: 8885 - protein, 9 aa, Artificial Sequence
  Description of Artificial Sequence: Synthetic peptide
  Seed: RTRALVRTG
RLRALVRTM

SEQ ID NO: 8886 - protein, 9 aa, Artificial Sequence
  Description of Artificial Sequence: Synthetic peptide
  Seed: RTRALVRTG
RLRALVRTF

SEQ ID NO: 8887 - protein, 9 aa, Artificial Sequence
  Description of Artificial Sequence: Synthetic peptide
  Seed: RTRALVRTG
RLRALVRTP

SEQ ID NO: 8888 - protein, 9 aa, Artificial Sequence
  Description of Artificial Sequence: Synthetic peptide
  Seed: RTRALVRTG
RIRALVRTP

SEQ ID NO: 8889 - protein, 9 aa, Artificial Sequence
  Description of Artificial Sequence: Synthetic peptide
  Seed: RTRALVRTG
RIRALVRTF

SEQ ID NO: 8890 - protein, 9 aa, Artificial Sequence
  Description of Artificial Sequence: Synthetic peptide
  Seed: RTRALVRTG
RIRALVRTM

SEQ ID NO: 8891 - protein, 9 aa, Artificial Sequence
  Description of Artificial Sequence: Synthetic peptide
  Seed: RTRALVRTG
RIRALVRTK

SEQ ID NO: 8892 - protein, 9 aa, Artificial Sequence
  Description of Artificial Sequence: Synthetic peptide
  Seed: RTRALVRTG
RGRALVRTP

SEQ ID NO: 8893 - protein, 9 aa, Artificial Sequence
  Description of Artificial Sequence: Synthetic peptide
  Seed: RTRALVRTG
RGRALVRTS

SEQ ID NO: 8894 - protein, 9 aa, Artificial Sequence
  Description of Artificial Sequence: Synthetic peptide
  Seed: RTRALVRTG
RGRALVRTT

SEQ ID NO: 8895 - protein, 9 aa, Artificial Sequence
  Description of Artificial Sequence: Synthetic peptide
  Seed: RTRALVRTG
RGRALVRTY

SEQ ID NO: 8896 - protein, 9 aa, Artificial Sequence
  Description of Artificial Sequence: Synthetic peptide
  Seed: RTRALVRTG
RGRALVRTV

SEQ ID NO: 8897 - protein, 9 aa, Artificial Sequence
  Description of Artificial Sequence: Synthetic peptide
  Seed: RTRALVRTG
RHRALVRTA

SEQ ID NO: 8898 - protein, 9 aa, Artificial Sequence
  Description of Artificial Sequence: Synthetic peptide
  Seed: RTRALVRTG
RHRALVRTR

SEQ ID NO: 8899 - protein, 9 aa, Artificial Sequence
  Description of Artificial Sequence: Synthetic peptide
  Seed: RTRALVRTG
RHRALVRTK

SEQ ID NO: 8900 - protein, 9 aa, Artificial Sequence
  Description of Artificial Sequence: Synthetic peptide
  Seed: RTRALVRTG
RIRALVRTA

SEQ ID NO: 8901 - protein, 9 aa, Artificial Sequence
  Description of Artificial Sequence: Synthetic peptide
  Seed: RTRALVRTG
RIRALVRTR

SEQ ID NO: 8902 - protein, 9 aa, Artificial Sequence
  Description of Artificial Sequence: Synthetic peptide
  Seed: RTRALVRTG
RIRALVRTN

SEQ ID NO: 8903 - protein, 9 aa, Artificial Sequence
  Description of Artificial Sequence: Synthetic peptide
  Seed: RTRALVRTG
RIRALVRTD

SEQ ID NO: 8904 - protein, 9 aa, Artificial Sequence
  Description of Artificial Sequence: Synthetic peptide
  Seed: RTRALVRTG
RIRALVRTC

SEQ ID NO: 8905 - protein, 9 aa, Artificial Sequence
  Description of Artificial Sequence: Synthetic peptide
  Seed: RTRALVRTG
RIRALVRTQ

SEQ ID NO: 8906 - protein, 9 aa, Artificial Sequence
  Description of Artificial Sequence: Synthetic peptide
  Seed: RTRALVRTG
RIRALVRTE

SEQ ID NO: 8907 - protein, 9 aa, Artificial Sequence
  Description of Artificial Sequence: Synthetic peptide
  Seed: RTRALVRTG
RIRALVRTG

SEQ ID NO: 8908 - protein, 9 aa, Artificial Sequence
  Description of Artificial Sequence: Synthetic peptide
  Seed: RTRALVRTG
RIRALVRTH

SEQ ID NO: 8909 - protein, 9 aa, Artificial Sequence
  Description of Artificial Sequence: Synthetic peptide
  Seed: RTRALVRTG
RIRALVRTI

SEQ ID NO: 8910 - protein, 9 aa, Artificial Sequence
  Description of Artificial Sequence: Synthetic peptide
  Seed: RTRALVRTG
RIRALVRTL

SEQ ID NO: 8911 - protein, 9 aa, Artificial Sequence
  Description of Artificial Sequence: Synthetic peptide
  Seed: RTRALVRTG
RNRALVRTF

SEQ ID NO: 8912 - protein, 9 aa, Artificial Sequence
  Description of Artificial Sequence: Synthetic peptide
  Seed: RTRALVRTG
RNRALVRTK

SEQ ID NO: 8913 - protein, 8 aa, Artificial Sequence
  Description of Artificial Sequence: Synthetic peptide
  Seed: RTRALVRT
RSRALVRR

SEQ ID NO: 8914 - protein, 8 aa, Artificial Sequence
  Description of Artificial Sequence: Synthetic peptide
  Seed: RTRALVRT
RWRALVRK

SEQ ID NO: 8915 - protein, 8 aa, Artificial Sequence
  Description of Artificial Sequence: Synthetic peptide
  Seed: RTRALVRT
RTRALVRK

SEQ ID NO: 8916 - protein, 8 aa, Artificial Sequence
  Description of Artificial Sequence: Synthetic peptide
  Seed: RTRALVRT
RTRALVRM

SEQ ID NO: 8917 - protein, 8 aa, Artificial Sequence
  Description of Artificial Sequence: Synthetic peptide
  Seed: RTRALVRT
RTRALVRF

SEQ ID NO: 8918 - protein, 8 aa, Artificial Sequence
  Description of Artificial Sequence: Synthetic peptide
  Seed: RTRALVRT
RTRALVRP

SEQ ID NO: 8919 - protein, 8 aa, Artificial Sequence
  Description of Artificial Sequence: Synthetic peptide
  Seed: RTRALVRT
RTRALVRS

SEQ ID NO: 8920 - protein, 8 aa, Artificial Sequence
  Description of Artificial Sequence: Synthetic peptide
  Seed: RTRALVRT
RTRALVRW

SEQ ID NO: 8921 - protein, 8 aa, Artificial Sequence
  Description of Artificial Sequence: Synthetic peptide
  Seed: RTRALVRT
RTRALVRY

SEQ ID NO: 8922 - protein, 8 aa, Artificial Sequence
  Description of Artificial Sequence: Synthetic peptide
  Seed: RTRALVRT
RTRALVRV

SEQ ID NO: 8923 - protein, 8 aa, Artificial Sequence
  Description of Artificial Sequence: Synthetic peptide
  Seed: RTRALVRT
RWRALVRA

SEQ ID NO: 8924 - protein, 8 aa, Artificial Sequence
  Description of Artificial Sequence: Synthetic peptide
  Seed: RTRALVRT
RWRALVRV

SEQ ID NO: 8925 - protein, 8 aa, Artificial Sequence
  Description of Artificial Sequence: Synthetic peptide
  Seed: RTRALVRT
RVRALVRA

SEQ ID NO: 8926 - protein, 8 aa, Artificial Sequence
  Description of Artificial Sequence: Synthetic peptide
  Seed: RTRALVRT
RYRALVRA

SEQ ID NO: 8927 - protein, 8 aa, Artificial Sequence
  Description of Artificial Sequence: Synthetic peptide
  Seed: RTRALVRT
RYRALVRI

SEQ ID NO: 8928 - protein, 8 aa, Artificial Sequence
  Description of Artificial Sequence: Synthetic peptide
  Seed: RTRALVRT
RYRALVRL

SEQ ID NO: 8929 - protein, 8 aa, Artificial Sequence
  Description of Artificial Sequence: Synthetic peptide
  Seed: RTRALVRT
RYRALVRK

SEQ ID NO: 8930 - protein, 8 aa, Artificial Sequence
  Description of Artificial Sequence: Synthetic peptide
  Seed: RTRALVRT
RYRALVRM

SEQ ID NO: 8931 - protein, 8 aa, Artificial Sequence
  Description of Artificial Sequence: Synthetic peptide
  Seed: RTRALVRT
RYRALVRF

SEQ ID NO: 8932 - protein, 8 aa, Artificial Sequence
  Description of Artificial Sequence: Synthetic peptide
  Seed: RTRALVRT
RYRALVRP

SEQ ID NO: 8933 - protein, 8 aa, Artificial Sequence
  Description of Artificial Sequence: Synthetic peptide
  Seed: RTRALVRT
RYRALVRS

SEQ ID NO: 8934 - protein, 8 aa, Artificial Sequence
  Description of Artificial Sequence: Synthetic peptide
  Seed: RTRALVRT
RYRALVRY

SEQ ID NO: 8935 - protein, 8 aa, Artificial Sequence
  Description of Artificial Sequence: Synthetic peptide
  Seed: RTRALVRT
RTRALVRL

SEQ ID NO: 8936 - protein, 8 aa, Artificial Sequence
  Description of Artificial Sequence: Synthetic peptide
  Seed: RTRALVRT
RTRALVRI

SEQ ID NO: 8937 - protein, 8 aa, Artificial Sequence
  Description of Artificial Sequence: Synthetic peptide
  Seed: RTRALVRT
RTRALVRH

SEQ ID NO: 8938 - protein, 8 aa, Artificial Sequence
  Description of Artificial Sequence: Synthetic peptide
  Seed: RTRALVRT
RTRALVRG

SEQ ID NO: 8939 - protein, 8 aa, Artificial Sequence
  Description of Artificial Sequence: Synthetic peptide
  Seed: RTRALVRT
RSRALVRN

SEQ ID NO: 8940 - protein, 8 aa, Artificial Sequence
  Description of Artificial Sequence: Synthetic peptide
  Seed: RTRALVRT
RSRALVRQ

SEQ ID NO: 8941 - protein, 8 aa, Artificial Sequence
  Description of Artificial Sequence: Synthetic peptide
  Seed: RTRALVRT
RSRALVRG

SEQ ID NO: 8942 - protein, 8 aa, Artificial Sequence
  Description of Artificial Sequence: Synthetic peptide
  Seed: RTRALVRT
RSRALVRI

SEQ ID NO: 8943 - protein, 8 aa, Artificial Sequence
  Description of Artificial Sequence: Synthetic peptide
  Seed: RTRALVRT
RSRALVRL

SEQ ID NO: 8944 - protein, 8 aa, Artificial Sequence
  Description of Artificial Sequence: Synthetic peptide
  Seed: RTRALVRT
RSRALVRK

SEQ ID NO: 8945 - protein, 8 aa, Artificial Sequence
  Description of Artificial Sequence: Synthetic peptide
  Seed: RTRALVRT
RSRALVRM

SEQ ID NO: 8946 - protein, 8 aa, Artificial Sequence
  Description of Artificial Sequence: Synthetic peptide
  Seed: RTRALVRT
RSRALVRF

SEQ ID NO: 8947 - protein, 8 aa, Artificial Sequence
  Description of Artificial Sequence: Synthetic peptide
  Seed: RTRALVRT
RSRALVRP

SEQ ID NO: 8948 - protein, 8 aa, Artificial Sequence
  Description of Artificial Sequence: Synthetic peptide
  Seed: RTRALVRT
RSRALVRS

SEQ ID NO: 8949 - protein, 8 aa, Artificial Sequence
  Description of Artificial Sequence: Synthetic peptide
  Seed: RTRALVRT
RSRALVRT

SEQ ID NO: 8950 - protein, 8 aa, Artificial Sequence
  Description of Artificial Sequence: Synthetic peptide
  Seed: RTRALVRT
RSRALVRY

SEQ ID NO: 8951 - protein, 8 aa, Artificial Sequence
  Description of Artificial Sequence: Synthetic peptide
  Seed: RTRALVRT
RSRALVRV

SEQ ID NO: 8952 - protein, 8 aa, Artificial Sequence
  Description of Artificial Sequence: Synthetic peptide
  Seed: RTRALVRT
RTRALVRR

SEQ ID NO: 8953 - protein, 8 aa, Artificial Sequence
  Description of Artificial Sequence: Synthetic peptide
  Seed: RTRALVRT
RTRALVRN

SEQ ID NO: 8954 - protein, 8 aa, Artificial Sequence
  Description of Artificial Sequence: Synthetic peptide
  Seed: RTRALVRT
RTRALVRC

SEQ ID NO: 8955 - protein, 8 aa, Artificial Sequence
  Description of Artificial Sequence: Synthetic peptide
  Seed: RTRALVRT
RTRALVRQ

SEQ ID NO: 8956 - protein, 8 aa, Artificial Sequence
  Description of Artificial Sequence: Synthetic peptide
  Seed: RTRALVRT
RTRALVRE

SEQ ID NO: 8957 - protein, 8 aa, Artificial Sequence
  Description of Artificial Sequence: Synthetic peptide
  Seed: RTRALVRT
RYRALVRV

SEQ ID NO: 8958 - protein, 8 aa, Artificial Sequence
  Description of Artificial Sequence: Synthetic peptide
  Seed: RTRALVRT
RVRALVRR

SEQ ID NO: 8959 - protein, 9 aa, Artificial Sequence
  Description of Artificial Sequence: Synthetic peptide
  Seed: RTRALVRTG
RNRALVRTL

SEQ ID NO: 8960 - protein, 9 aa, Artificial Sequence
  Description of Artificial Sequence: Synthetic peptide
  Seed: RTRALVRTG
RARALVRTW

SEQ ID NO: 8961 - protein, 9 aa, Artificial Sequence
  Description of Artificial Sequence: Synthetic peptide
  Seed: RTRALVRTG
RARALVRTH

SEQ ID NO: 8962 - protein, 9 aa, Artificial Sequence
  Description of Artificial Sequence: Synthetic peptide
  Seed: RTRALVRTG
RARALVRTI

SEQ ID NO: 8963 - protein, 9 aa, Artificial Sequence
  Description of Artificial Sequence: Synthetic peptide
  Seed: RTRALVRTG
RARALVRTL

SEQ ID NO: 8964 - protein, 9 aa, Artificial Sequence
  Description of Artificial Sequence: Synthetic peptide
  Seed: RTRALVRTG
RARALVRTK

SEQ ID NO: 8965 - protein, 9 aa, Artificial Sequence
  Description of Artificial Sequence: Synthetic peptide
  Seed: RTRALVRTG
RARALVRTM

SEQ ID NO: 8966 - protein, 9 aa, Artificial Sequence
  Description of Artificial Sequence: Synthetic peptide
  Seed: RTRALVRTG
RARALVRTF

SEQ ID NO: 8967 - protein, 9 aa, Artificial Sequence
  Description of Artificial Sequence: Synthetic peptide
  Seed: RTRALVRTG
RARALVRTP

SEQ ID NO: 8968 - protein, 9 aa, Artificial Sequence
  Description of Artificial Sequence: Synthetic peptide
  Seed: RTRALVRTG
RARALVRTS

SEQ ID NO: 8969 - protein, 9 aa, Artificial Sequence
  Description of Artificial Sequence: Synthetic peptide
  Seed: RTRALVRTG
RARALVRTT

SEQ ID NO: 8970 - protein, 9 aa, Artificial Sequence
  Description of Artificial Sequence: Synthetic peptide
  Seed: RTRALVRTG
RARALVRTY

SEQ ID NO: 8971 - protein, 8 aa, Artificial Sequence
  Description of Artificial Sequence: Synthetic peptide
  Seed: RTRALVRT
RVRALVRN

SEQ ID NO: 8972 - protein, 9 aa, Artificial Sequence
  Description of Artificial Sequence: Synthetic peptide
  Seed: RTRALVRTG
RARALVRTV

SEQ ID NO: 8973 - protein, 9 aa, Artificial Sequence
  Description of Artificial Sequence: Synthetic peptide
  Seed: RTRALVRTG
RRRALVRTK

SEQ ID NO: 8974 - protein, 9 aa, Artificial Sequence
  Description of Artificial Sequence: Synthetic peptide
  Seed: RTRALVRTG
RNRALVRTA

SEQ ID NO: 8975 - protein, 9 aa, Artificial Sequence
  Description of Artificial Sequence: Synthetic peptide
  Seed: RTRALVRTG
RNRALVRTR

SEQ ID NO: 8976 - protein, 9 aa, Artificial Sequence
  Description of Artificial Sequence: Synthetic peptide
  Seed: RTRALVRTG
RNRALVRTC

SEQ ID NO: 8977 - protein, 9 aa, Artificial Sequence
  Description of Artificial Sequence: Synthetic peptide
  Seed: RTRALVRTG
RNRALVRTQ

SEQ ID NO: 8978 - protein, 9 aa, Artificial Sequence
  Description of Artificial Sequence: Synthetic peptide
  Seed: RTRALVRTG
RNRALVRTE

SEQ ID NO: 8979 - protein, 9 aa, Artificial Sequence
  Description of Artificial Sequence: Synthetic peptide
  Seed: RTRALVRTG
RNRALVRTG

SEQ ID NO: 8980 - protein, 9 aa, Artificial Sequence
  Description of Artificial Sequence: Synthetic peptide
  Seed: RTRALVRTG
RNRALVRTI

SEQ ID NO: 8981 - protein, 9 aa, Artificial Sequence
  Description of Artificial Sequence: Synthetic peptide
  Seed: RTRALVRTG
RARALVRTG

SEQ ID NO: 8982 - protein, 9 aa, Artificial Sequence
  Description of Artificial Sequence: Synthetic peptide
  Seed: RTRALVRTG
RARALVRTE

SEQ ID NO: 8983 - protein, 9 aa, Artificial Sequence
  Description of Artificial Sequence: Synthetic peptide
  Seed: RTRALVRTG
RARALVRTQ

SEQ ID NO: 8984 - protein, 9 aa, Artificial Sequence
  Description of Artificial Sequence: Synthetic peptide
  Seed: RTRALVRTG
RARALVRTC

SEQ ID NO: 8985 - protein, 8 aa, Artificial Sequence
  Description of Artificial Sequence: Synthetic peptide
  Seed: RTRALVRT
RVRALVRC

SEQ ID NO: 8986 - protein, 8 aa, Artificial Sequence
  Description of Artificial Sequence: Synthetic peptide
  Seed: RTRALVRT
RVRALVRQ

SEQ ID NO: 8987 - protein, 8 aa, Artificial Sequence
  Description of Artificial Sequence: Synthetic peptide
  Seed: RTRALVRT
RVRALVRE

SEQ ID NO: 8988 - protein, 8 aa, Artificial Sequence
  Description of Artificial Sequence: Synthetic peptide
  Seed: RTRALVRT
RVRALVRG

SEQ ID NO: 8989 - protein, 8 aa, Artificial Sequence
  Description of Artificial Sequence: Synthetic peptide
  Seed: RTRALVRT
RVRALVRH

SEQ ID NO: 8990 - protein, 8 aa, Artificial Sequence
  Description of Artificial Sequence: Synthetic peptide
  Seed: RTRALVRT
RVRALVRI

SEQ ID NO: 8991 - protein, 8 aa, Artificial Sequence
  Description of Artificial Sequence: Synthetic peptide
  Seed: RTRALVRT
RVRALVRL

SEQ ID NO: 8992 - protein, 8 aa, Artificial Sequence
  Description of Artificial Sequence: Synthetic peptide
  Seed: RTRALVRT
RVRALVRK

SEQ ID NO: 8993 - protein, 8 aa, Artificial Sequence
  Description of Artificial Sequence: Synthetic peptide
  Seed: RTRALVRT
RVRALVRM

SEQ ID NO: 8994 - protein, 8 aa, Artificial Sequence
  Description of Artificial Sequence: Synthetic peptide
  Seed: RTRALVRT
RVRALVRF

SEQ ID NO: 8995 - protein, 8 aa, Artificial Sequence
  Description of Artificial Sequence: Synthetic peptide
  Seed: RTRALVRT
RVRALVRP

SEQ ID NO: 8996 - protein, 8 aa, Artificial Sequence
  Description of Artificial Sequence: Synthetic peptide
  Seed: RTRALVRT
RVRALVRS

SEQ ID NO: 8997 - protein, 8 aa, Artificial Sequence
  Description of Artificial Sequence: Synthetic peptide
  Seed: RTRALVRT
RVRALVRT

SEQ ID NO: 8998 - protein, 8 aa, Artificial Sequence
  Description of Artificial Sequence: Synthetic peptide
  Seed: RTRALVRT
RVRALVRY

SEQ ID NO: 8999 - protein, 8 aa, Artificial Sequence
  Description of Artificial Sequence: Synthetic peptide
  Seed: RTRALVRT
RVRALVRV

SEQ ID NO: 9000 - protein, 9 aa, Artificial Sequence
  Description of Artificial Sequence: Synthetic peptide
  Seed: RTRALVRTG
RARALVRTA

SEQ ID NO: 9001 - protein, 9 aa, Artificial Sequence
  Description of Artificial Sequence: Synthetic peptide
  Seed: RTRALVRTG
RARALVRTR

SEQ ID NO: 9002 - protein, 9 aa, Artificial Sequence
  Description of Artificial Sequence: Synthetic peptide
  Seed: RTRALVRTG
RARALVRTN

SEQ ID NO: 9003 - protein, 9 aa, Artificial Sequence
  Description of Artificial Sequence: Synthetic peptide
  Seed: RTRALVRTG
RARALVRTD

SEQ ID NO: 9004 - protein, 11 aa, Artificial Sequence
  Description of Artificial Sequence: Synthetic peptide
  Seed: RSRYWAIRTRS
RVRYWAIRTRW

SEQ ID NO: 9005 - protein, 11 aa, Artificial Sequence
  Description of Artificial Sequence: Synthetic peptide
  Seed: RSRYWAIRTRS
RVRYWAIRTRS

SEQ ID NO: 9006 - protein, 11 aa, Artificial Sequence
  Description of Artificial Sequence: Synthetic peptide
  Seed: RSRYWAIRTRS
RRRYWAIRTRA

SEQ ID NO: 9007 - protein, 11 aa, Artificial Sequence
  Description of Artificial Sequence: Synthetic peptide
  Seed: RSRYWAIRTRS
RGRYWAIRTRG

SEQ ID NO: 9008 - protein, 11 aa, Artificial Sequence
  Description of Artificial Sequence: Synthetic peptide
  Seed: RSRYWAIRTRS
RERYWAIRTRY

SEQ ID NO: 9009 - protein, 11 aa, Artificial Sequence
  Description of Artificial Sequence: Synthetic peptide
  Seed: RSRYWAIRTRS
RERYWAIRTRV

SEQ ID NO: 9010 - protein, 11 aa, Artificial Sequence
  Description of Artificial Sequence: Synthetic peptide
  Seed: RSRYWAIRTRS
RGRYWAIRTRA

SEQ ID NO: 9011 - protein, 11 aa, Artificial Sequence
  Description of Artificial Sequence: Synthetic peptide
  Seed: RSRYWAIRTRS
RGRYWAIRTRR

SEQ ID NO: 9012 - protein, 11 aa, Artificial Sequence
  Description of Artificial Sequence: Synthetic peptide
  Seed: RSRYWAIRTRS
RGRYWAIRTRN

SEQ ID NO: 9013 - protein, 11 aa, Artificial Sequence
  Description of Artificial Sequence: Synthetic peptide
  Seed: RSRYWAIRTRS
RGRYWAIRTRD

SEQ ID NO: 9014 - protein, 11 aa, Artificial Sequence
  Description of Artificial Sequence: Synthetic peptide
  Seed: RSRYWAIRTRS
RGRYWAIRTRC

SEQ ID NO: 9015 - protein, 11 aa, Artificial Sequence
  Description of Artificial Sequence: Synthetic peptide
  Seed: RSRYWAIRTRS
RGRYWAIRTRQ

SEQ ID NO: 9016 - protein, 11 aa, Artificial Sequence
  Description of Artificial Sequence: Synthetic peptide
  Seed: RSRYWAIRTRS
RGRYWAIRTRE

SEQ ID NO: 9017 - protein, 11 aa, Artificial Sequence
  Description of Artificial Sequence: Synthetic peptide
  Seed: RSRYWAIRTRS
RGRYWAIRTRH

SEQ ID NO: 9018 - protein, 11 aa, Artificial Sequence
  Description of Artificial Sequence: Synthetic peptide
  Seed: RSRYWAIRTRS
RGRYWAIRTRV

SEQ ID NO: 9019 - protein, 11 aa, Artificial Sequence
  Description of Artificial Sequence: Synthetic peptide
  Seed: RSRYWAIRTRS
RGRYWAIRTRI

SEQ ID NO: 9020 - protein, 11 aa, Artificial Sequence
  Description of Artificial Sequence: Synthetic peptide
  Seed: RSRYWAIRTRS
RGRYWAIRTRL

SEQ ID NO: 9021 - protein, 11 aa, Artificial Sequence
  Description of Artificial Sequence: Synthetic peptide
  Seed: RSRYWAIRTRS
RGRYWAIRTRK

SEQ ID NO: 9022 - protein, 11 aa, Artificial Sequence
  Description of Artificial Sequence: Synthetic peptide
  Seed: RSRYWAIRTRS
RGRYWAIRTRM

SEQ ID NO: 9023 - protein, 11 aa, Artificial Sequence
  Description of Artificial Sequence: Synthetic peptide
  Seed: RSRYWAIRTRS
RGRYWAIRTRF

SEQ ID NO: 9024 - protein, 11 aa, Artificial Sequence
  Description of Artificial Sequence: Synthetic peptide
  Seed: RSRYWAIRTRS
RGRYWAIRTRP

SEQ ID NO: 9025 - protein, 11 aa, Artificial Sequence
  Description of Artificial Sequence: Synthetic peptide
  Seed: RSRYWAIRTRS
RGRYWAIRTRS

SEQ ID NO: 9026 - protein, 11 aa, Artificial Sequence
  Description of Artificial Sequence: Synthetic peptide
  Seed: RSRYWAIRTRS
RGRYWAIRTRT

SEQ ID NO: 9027 - protein, 11 aa, Artificial Sequence
  Description of Artificial Sequence: Synthetic peptide
  Seed: RSRYWAIRTRS
RGRYWAIRTRW

SEQ ID NO: 9028 - protein, 11 aa, Artificial Sequence
  Description of Artificial Sequence: Synthetic peptide
  Seed: RSRYWAIRTRS
RERYWAIRTRW

SEQ ID NO: 9029 - protein, 11 aa, Artificial Sequence
  Description of Artificial Sequence: Synthetic peptide
  Seed: RSRYWAIRTRS
RERYWAIRTRT

SEQ ID NO: 9030 - protein, 11 aa, Artificial Sequence
  Description of Artificial Sequence: Synthetic peptide
  Seed: RSRYWAIRTRS
RERYWAIRTRS

SEQ ID NO: 9031 - protein, 11 aa, Artificial Sequence
  Description of Artificial Sequence: Synthetic peptide
  Seed: RSRYWAIRTRS
RERYWAIRTRP

SEQ ID NO: 9032 - protein, 11 aa, Artificial Sequence
  Description of Artificial Sequence: Synthetic peptide
  Seed: RSRYWAIRTRS
RQRYWAIRTRS

SEQ ID NO: 9033 - protein, 11 aa, Artificial Sequence
  Description of Artificial Sequence: Synthetic peptide
  Seed: RSRYWAIRTRS
RQRYWAIRTRT

SEQ ID NO: 9034 - protein, 11 aa, Artificial Sequence
  Description of Artificial Sequence: Synthetic peptide
  Seed: RSRYWAIRTRS
RQRYWAIRTRW

SEQ ID NO: 9035 - protein, 11 aa, Artificial Sequence
  Description of Artificial Sequence: Synthetic peptide
  Seed: RSRYWAIRTRS
RQRYWAIRTRY

SEQ ID NO: 9036 - protein, 11 aa, Artificial Sequence
  Description of Artificial Sequence: Synthetic peptide
  Seed: RSRYWAIRTRS
RQRYWAIRTRV

SEQ ID NO: 9037 - protein, 11 aa, Artificial Sequence
  Description of Artificial Sequence: Synthetic peptide
  Seed: RSRYWAIRTRS
RERYWAIRTRA

SEQ ID NO: 9038 - protein, 11 aa, Artificial Sequence
  Description of Artificial Sequence: Synthetic peptide
  Seed: RSRYWAIRTRS
RERYWAIRTRR

SEQ ID NO: 9039 - protein, 11 aa, Artificial Sequence
  Description of Artificial Sequence: Synthetic peptide
  Seed: RSRYWAIRTRS
RERYWAIRTRN

SEQ ID NO: 9040 - protein, 11 aa, Artificial Sequence
  Description of Artificial Sequence: Synthetic peptide
  Seed: RSRYWAIRTRS
RERYWAIRTRD

SEQ ID NO: 9041 - protein, 11 aa, Artificial Sequence
  Description of Artificial Sequence: Synthetic peptide
  Seed: RSRYWAIRTRS
RERYWAIRTRC

SEQ ID NO: 9042 - protein, 11 aa, Artificial Sequence
  Description of Artificial Sequence: Synthetic peptide
  Seed: RSRYWAIRTRS
RERYWAIRTRQ

SEQ ID NO: 9043 - protein, 11 aa, Artificial Sequence
  Description of Artificial Sequence: Synthetic peptide
  Seed: RSRYWAIRTRS
RERYWAIRTRE

SEQ ID NO: 9044 - protein, 11 aa, Artificial Sequence
  Description of Artificial Sequence: Synthetic peptide
  Seed: RSRYWAIRTRS
RERYWAIRTRG

SEQ ID NO: 9045 - protein, 11 aa, Artificial Sequence
  Description of Artificial Sequence: Synthetic peptide
  Seed: RSRYWAIRTRS
RERYWAIRTRH

SEQ ID NO: 9046 - protein, 11 aa, Artificial Sequence
  Description of Artificial Sequence: Synthetic peptide
  Seed: RSRYWAIRTRS
RERYWAIRTRI

SEQ ID NO: 9047 - protein, 11 aa, Artificial Sequence
  Description of Artificial Sequence: Synthetic peptide
  Seed: RSRYWAIRTRS
RERYWAIRTRL

SEQ ID NO: 9048 - protein, 11 aa, Artificial Sequence
  Description of Artificial Sequence: Synthetic peptide
  Seed: RSRYWAIRTRS
RERYWAIRTRK

SEQ ID NO: 9049 - protein, 11 aa, Artificial Sequence
  Description of Artificial Sequence: Synthetic peptide
  Seed: RSRYWAIRTRS
RERYWAIRTRM

SEQ ID NO: 9050 - protein, 11 aa, Artificial Sequence
  Description of Artificial Sequence: Synthetic peptide
  Seed: RSRYWAIRTRS
RERYWAIRTRF

SEQ ID NO: 9051 - protein, 11 aa, Artificial Sequence
  Description of Artificial Sequence: Synthetic peptide
  Seed: RSRYWAIRTRS
RGRYWAIRTRY

SEQ ID NO: 9052 - protein, 11 aa, Artificial Sequence
  Description of Artificial Sequence: Synthetic peptide
  Seed: RSRYWAIRTRS
RHRYWAIRTRA

SEQ ID NO: 9053 - protein, 11 aa, Artificial Sequence
  Description of Artificial Sequence: Synthetic peptide
  Seed: RSRYWAIRTRS
RQRYWAIRTRF

SEQ ID NO: 9054 - protein, 11 aa, Artificial Sequence
  Description of Artificial Sequence: Synthetic peptide
  Seed: RSRYWAIRTRS
RIRYWAIRTRP

SEQ ID NO: 9055 - protein, 11 aa, Artificial Sequence
  Description of Artificial Sequence: Synthetic peptide
  Seed: RSRYWAIRTRS
RIRYWAIRTRQ

SEQ ID NO: 9056 - protein, 11 aa, Artificial Sequence
  Description of Artificial Sequence: Synthetic peptide
  Seed: RSRYWAIRTRS
RIRYWAIRTRE

SEQ ID NO: 9057 - protein, 11 aa, Artificial Sequence
  Description of Artificial Sequence: Synthetic peptide
  Seed: RSRYWAIRTRS
RIRYWAIRTRG

SEQ ID NO: 9058 - protein, 11 aa, Artificial Sequence
  Description of Artificial Sequence: Synthetic peptide
  Seed: RSRYWAIRTRS
RIRYWAIRTRH

SEQ ID NO: 9059 - protein, 11 aa, Artificial Sequence
  Description of Artificial Sequence: Synthetic peptide
  Seed: RSRYWAIRTRS
RIRYWAIRTRI

SEQ ID NO: 9060 - protein, 11 aa, Artificial Sequence
  Description of Artificial Sequence: Synthetic peptide
  Seed: RSRYWAIRTRS
RIRYWAIRTRL

SEQ ID NO: 9061 - protein, 11 aa, Artificial Sequence
  Description of Artificial Sequence: Synthetic peptide
  Seed: RSRYWAIRTRS
RIRYWAIRTRK

SEQ ID NO: 9062 - protein, 11 aa, Artificial Sequence
  Description of Artificial Sequence: Synthetic peptide
  Seed: RSRYWAIRTRS
RIRYWAIRTRM

SEQ ID NO: 9063 - protein, 11 aa, Artificial Sequence
  Description of Artificial Sequence: Synthetic peptide
  Seed: RSRYWAIRTRS
RIRYWAIRTRF

SEQ ID NO: 9064 - protein, 11 aa, Artificial Sequence
  Description of Artificial Sequence: Synthetic peptide
  Seed: RSRYWAIRTRS
RIRYWAIRTRS

SEQ ID NO: 9065 - protein, 11 aa, Artificial Sequence
  Description of Artificial Sequence: Synthetic peptide
  Seed: RSRYWAIRTRS
RHRYWAIRTRR

SEQ ID NO: 9066 - protein, 11 aa, Artificial Sequence
  Description of Artificial Sequence: Synthetic peptide
  Seed: RSRYWAIRTRS
RIRYWAIRTRT

SEQ ID NO: 9067 - protein, 11 aa, Artificial Sequence
  Description of Artificial Sequence: Synthetic peptide
  Seed: RSRYWAIRTRS
RIRYWAIRTRW

SEQ ID NO: 9068 - protein, 11 aa, Artificial Sequence
  Description of Artificial Sequence: Synthetic peptide
  Seed: RSRYWAIRTRS
RIRYWAIRTRY

SEQ ID NO: 9069 - protein, 11 aa, Artificial Sequence
  Description of Artificial Sequence: Synthetic peptide
  Seed: RSRYWAIRTRS
RIRYWAIRTRV

SEQ ID NO: 9070 - protein, 11 aa, Artificial Sequence
  Description of Artificial Sequence: Synthetic peptide
  Seed: RSRYWAIRTRS
RLRYWAIRTRA

SEQ ID NO: 9071 - protein, 11 aa, Artificial Sequence
  Description of Artificial Sequence: Synthetic peptide
  Seed: RSRYWAIRTRS
RLRYWAIRTRR

SEQ ID NO: 9072 - protein, 11 aa, Artificial Sequence
  Description of Artificial Sequence: Synthetic peptide
  Seed: RSRYWAIRTRS
RLRYWAIRTRN

SEQ ID NO: 9073 - protein, 11 aa, Artificial Sequence
  Description of Artificial Sequence: Synthetic peptide
  Seed: RSRYWAIRTRS
RLRYWAIRTRD

SEQ ID NO: 9074 - protein, 11 aa, Artificial Sequence
  Description of Artificial Sequence: Synthetic peptide
  Seed: RSRYWAIRTRS
RLRYWAIRTRC

SEQ ID NO: 9075 - protein, 11 aa, Artificial Sequence
  Description of Artificial Sequence: Synthetic peptide
  Seed: RSRYWAIRTRS
RIRYWAIRTRC

SEQ ID NO: 9076 - protein, 11 aa, Artificial Sequence
  Description of Artificial Sequence: Synthetic peptide
  Seed: RSRYWAIRTRS
RIRYWAIRTRD

SEQ ID NO: 9077 - protein, 11 aa, Artificial Sequence
  Description of Artificial Sequence: Synthetic peptide
  Seed: RSRYWAIRTRS
RIRYWAIRTRN

SEQ ID NO: 9078 - protein, 11 aa, Artificial Sequence
  Description of Artificial Sequence: Synthetic peptide
  Seed: RSRYWAIRTRS
RIRYWAIRTRR

SEQ ID NO: 9079 - protein, 11 aa, Artificial Sequence
  Description of Artificial Sequence: Synthetic peptide
  Seed: RSRYWAIRTRS
RHRYWAIRTRN

SEQ ID NO: 9080 - protein, 11 aa, Artificial Sequence
  Description of Artificial Sequence: Synthetic peptide
  Seed: RSRYWAIRTRS
RHRYWAIRTRD

SEQ ID NO: 9081 - protein, 11 aa, Artificial Sequence
  Description of Artificial Sequence: Synthetic peptide
  Seed: RSRYWAIRTRS
RHRYWAIRTRC

SEQ ID NO: 9082 - protein, 11 aa, Artificial Sequence
  Description of Artificial Sequence: Synthetic peptide
  Seed: RSRYWAIRTRS
RHRYWAIRTRQ

SEQ ID NO: 9083 - protein, 11 aa, Artificial Sequence
  Description of Artificial Sequence: Synthetic peptide
  Seed: RSRYWAIRTRS
RHRYWAIRTRE

SEQ ID NO: 9084 - protein, 11 aa, Artificial Sequence
  Description of Artificial Sequence: Synthetic peptide
  Seed: RSRYWAIRTRS
RHRYWAIRTRG

SEQ ID NO: 9085 - protein, 11 aa, Artificial Sequence
  Description of Artificial Sequence: Synthetic peptide
  Seed: RSRYWAIRTRS
RHRYWAIRTRH

SEQ ID NO: 9086 - protein, 11 aa, Artificial Sequence
  Description of Artificial Sequence: Synthetic peptide
  Seed: RSRYWAIRTRS
RHRYWAIRTRI

SEQ ID NO: 9087 - protein, 11 aa, Artificial Sequence
  Description of Artificial Sequence: Synthetic peptide
  Seed: RSRYWAIRTRS
RHRYWAIRTRL

SEQ ID NO: 9088 - protein, 11 aa, Artificial Sequence
  Description of Artificial Sequence: Synthetic peptide
  Seed: RSRYWAIRTRS
RHRYWAIRTRK

SEQ ID NO: 9089 - protein, 11 aa, Artificial Sequence
  Description of Artificial Sequence: Synthetic peptide
  Seed: RSRYWAIRTRS
RHRYWAIRTRM

SEQ ID NO: 9090 - protein, 11 aa, Artificial Sequence
  Description of Artificial Sequence: Synthetic peptide
  Seed: RSRYWAIRTRS
RHRYWAIRTRF

SEQ ID NO: 9091 - protein, 11 aa, Artificial Sequence
  Description of Artificial Sequence: Synthetic peptide
  Seed: RSRYWAIRTRS
RHRYWAIRTRP

SEQ ID NO: 9092 - protein, 11 aa, Artificial Sequence
  Description of Artificial Sequence: Synthetic peptide
  Seed: RSRYWAIRTRS
RHRYWAIRTRS

SEQ ID NO: 9093 - protein, 11 aa, Artificial Sequence
  Description of Artificial Sequence: Synthetic peptide
  Seed: RSRYWAIRTRS
RHRYWAIRTRT

SEQ ID NO: 9094 - protein, 11 aa, Artificial Sequence
  Description of Artificial Sequence: Synthetic peptide
  Seed: RSRYWAIRTRS
RHRYWAIRTRW

SEQ ID NO: 9095 - protein, 11 aa, Artificial Sequence
  Description of Artificial Sequence: Synthetic peptide
  Seed: RSRYWAIRTRS
RHRYWAIRTRY

SEQ ID NO: 9096 - protein, 11 aa, Artificial Sequence
  Description of Artificial Sequence: Synthetic peptide
  Seed: RSRYWAIRTRS
RHRYWAIRTRV

SEQ ID NO: 9097 - protein, 11 aa, Artificial Sequence
  Description of Artificial Sequence: Synthetic peptide
  Seed: RSRYWAIRTRS
RIRYWAIRTRA

SEQ ID NO: 9098 - protein, 11 aa, Artificial Sequence
  Description of Artificial Sequence: Synthetic peptide
  Seed: RSRYWAIRTRS
RQRYWAIRTRP

SEQ ID NO: 9099 - protein, 11 aa, Artificial Sequence
  Description of Artificial Sequence: Synthetic peptide
  Seed: RSRYWAIRTRS
RQRYWAIRTRM

SEQ ID NO: 9100 - protein, 11 aa, Artificial Sequence
  Description of Artificial Sequence: Synthetic peptide
  Seed: RSRYWAIRTRS
RLRYWAIRTRE

SEQ ID NO: 9101 - protein, 11 aa, Artificial Sequence
  Description of Artificial Sequence: Synthetic peptide
  Seed: RSRYWAIRTRS
RNRYWAIRTRF

SEQ ID NO: 9102 - protein, 11 aa, Artificial Sequence
  Description of Artificial Sequence: Synthetic peptide
  Seed: RSRYWAIRTRS
RNRYWAIRTRC

SEQ ID NO: 9103 - protein, 11 aa, Artificial Sequence
  Description of Artificial Sequence: Synthetic peptide
  Seed: RSRYWAIRTRS
RNRYWAIRTRQ

SEQ ID NO: 9104 - protein, 11 aa, Artificial Sequence
  Description of Artificial Sequence: Synthetic peptide
  Seed: RSRYWAIRTRS
RNRYWAIRTRE

SEQ ID NO: 9105 - protein, 11 aa, Artificial Sequence
  Description of Artificial Sequence: Synthetic peptide
  Seed: RSRYWAIRTRS
RNRYWAIRTRG

SEQ ID NO: 9106 - protein, 11 aa, Artificial Sequence
  Description of Artificial Sequence: Synthetic peptide
  Seed: RSRYWAIRTRS
RNRYWAIRTRH

SEQ ID NO: 9107 - protein, 11 aa, Artificial Sequence
  Description of Artificial Sequence: Synthetic peptide
  Seed: RSRYWAIRTRS
RNRYWAIRTRI

SEQ ID NO: 9108 - protein, 11 aa, Artificial Sequence
  Description of Artificial Sequence: Synthetic peptide
  Seed: RSRYWAIRTRS
RNRYWAIRTRL

SEQ ID NO: 9109 - protein, 11 aa, Artificial Sequence
  Description of Artificial Sequence: Synthetic peptide
  Seed: RSRYWAIRTRS
RNRYWAIRTRK

SEQ ID NO: 9110 - protein, 11 aa, Artificial Sequence
  Description of Artificial Sequence: Synthetic peptide
  Seed: RSRYWAIRTRS
RNRYWAIRTRM

SEQ ID NO: 9111 - protein, 11 aa, Artificial Sequence
  Description of Artificial Sequence: Synthetic peptide
  Seed: RSRYWAIRTRS
RNRYWAIRTRP

SEQ ID NO: 9112 - protein, 11 aa, Artificial Sequence
  Description of Artificial Sequence: Synthetic peptide
  Seed: RSRYWAIRTRS
RDRYWAIRTRQ

SEQ ID NO: 9113 - protein, 11 aa, Artificial Sequence
  Description of Artificial Sequence: Synthetic peptide
  Seed: RSRYWAIRTRS
RNRYWAIRTRS

SEQ ID NO: 9114 - protein, 11 aa, Artificial Sequence
  Description of Artificial Sequence: Synthetic peptide
  Seed: RSRYWAIRTRS
RNRYWAIRTRT

SEQ ID NO: 9115 - protein, 11 aa, Artificial Sequence
  Description of Artificial Sequence: Synthetic peptide
  Seed: RSRYWAIRTRS
RNRYWAIRTRW

SEQ ID NO: 9116 - protein, 11 aa, Artificial Sequence
  Description of Artificial Sequence: Synthetic peptide
  Seed: RSRYWAIRTRS
RNRYWAIRTRY

SEQ ID NO: 9117 - protein, 11 aa, Artificial Sequence
  Description of Artificial Sequence: Synthetic peptide
  Seed: RSRYWAIRTRS
RNRYWAIRTRV

SEQ ID NO: 9118 - protein, 11 aa, Artificial Sequence
  Description of Artificial Sequence: Synthetic peptide
  Seed: RSRYWAIRTRS
RDRYWAIRTRA

SEQ ID NO: 9119 - protein, 11 aa, Artificial Sequence
  Description of Artificial Sequence: Synthetic peptide
  Seed: RSRYWAIRTRS
RDRYWAIRTRR

SEQ ID NO: 9120 - protein, 11 aa, Artificial Sequence
  Description of Artificial Sequence: Synthetic peptide
  Seed: RSRYWAIRTRS
RDRYWAIRTRN

SEQ ID NO: 9121 - protein, 11 aa, Artificial Sequence
  Description of Artificial Sequence: Synthetic peptide
  Seed: RSRYWAIRTRS
RDRYWAIRTRD

SEQ ID NO: 9122 - protein, 11 aa, Artificial Sequence
  Description of Artificial Sequence: Synthetic peptide
  Seed: RSRYWAIRTRS
RNRYWAIRTRD

SEQ ID NO: 9123 - protein, 11 aa, Artificial Sequence
  Description of Artificial Sequence: Synthetic peptide
  Seed: RSRYWAIRTRS
RNRYWAIRTRN

SEQ ID NO: 9124 - protein, 11 aa, Artificial Sequence
  Description of Artificial Sequence: Synthetic peptide
  Seed: RSRYWAIRTRS
RNRYWAIRTRR

SEQ ID NO: 9125 - protein, 11 aa, Artificial Sequence
  Description of Artificial Sequence: Synthetic peptide
  Seed: RSRYWAIRTRS
RNRYWAIRTRA

SEQ ID NO: 9126 - protein, 11 aa, Artificial Sequence
  Description of Artificial Sequence: Synthetic peptide
  Seed: RSRYWAIRTRS
RRRYWAIRTRR

SEQ ID NO: 9127 - protein, 11 aa, Artificial Sequence
  Description of Artificial Sequence: Synthetic peptide
  Seed: RSRYWAIRTRS
RRRYWAIRTRN

SEQ ID NO: 9128 - protein, 11 aa, Artificial Sequence
  Description of Artificial Sequence: Synthetic peptide
  Seed: RSRYWAIRTRS
RRRYWAIRTRD

SEQ ID NO: 9129 - protein, 11 aa, Artificial Sequence
  Description of Artificial Sequence: Synthetic peptide
  Seed: RSRYWAIRTRS
RRRYWAIRTRC

SEQ ID NO: 9130 - protein, 11 aa, Artificial Sequence
  Description of Artificial Sequence: Synthetic peptide
  Seed: RSRYWAIRTRS
RRRYWAIRTRQ

SEQ ID NO: 9131 - protein, 11 aa, Artificial Sequence
  Description of Artificial Sequence: Synthetic peptide
  Seed: RSRYWAIRTRS
RRRYWAIRTRE

SEQ ID NO: 9132 - protein, 11 aa, Artificial Sequence
  Description of Artificial Sequence: Synthetic peptide
  Seed: RSRYWAIRTRS
RRRYWAIRTRG

SEQ ID NO: 9133 - protein, 11 aa, Artificial Sequence
  Description of Artificial Sequence: Synthetic peptide
  Seed: RSRYWAIRTRS
RRRYWAIRTRH

SEQ ID NO: 9134 - protein, 11 aa, Artificial Sequence
  Description of Artificial Sequence: Synthetic peptide
  Seed: RSRYWAIRTRS
RRRYWAIRTRI

SEQ ID NO: 9135 - protein, 11 aa, Artificial Sequence
  Description of Artificial Sequence: Synthetic peptide
  Seed: RSRYWAIRTRS
RRRYWAIRTRL

SEQ ID NO: 9136 - protein, 11 aa, Artificial Sequence
  Description of Artificial Sequence: Synthetic peptide
  Seed: RSRYWAIRTRS
RRRYWAIRTRK

SEQ ID NO: 9137 - protein, 11 aa, Artificial Sequence
  Description of Artificial Sequence: Synthetic peptide
  Seed: RSRYWAIRTRS
RRRYWAIRTRM

SEQ ID NO: 9138 - protein, 11 aa, Artificial Sequence
  Description of Artificial Sequence: Synthetic peptide
  Seed: RSRYWAIRTRS
RRRYWAIRTRF

SEQ ID NO: 9139 - protein, 11 aa, Artificial Sequence
  Description of Artificial Sequence: Synthetic peptide
  Seed: RSRYWAIRTRS
RRRYWAIRTRP

SEQ ID NO: 9140 - protein, 11 aa, Artificial Sequence
  Description of Artificial Sequence: Synthetic peptide
  Seed: RSRYWAIRTRS
RRRYWAIRTRS

SEQ ID NO: 9141 - protein, 11 aa, Artificial Sequence
  Description of Artificial Sequence: Synthetic peptide
  Seed: RSRYWAIRTRS
RRRYWAIRTRT

SEQ ID NO: 9142 - protein, 11 aa, Artificial Sequence
  Description of Artificial Sequence: Synthetic peptide
  Seed: RSRYWAIRTRS
RRRYWAIRTRW

SEQ ID NO: 9143 - protein, 11 aa, Artificial Sequence
  Description of Artificial Sequence: Synthetic peptide
  Seed: RSRYWAIRTRS
RRRYWAIRTRY

SEQ ID NO: 9144 - protein, 11 aa, Artificial Sequence
  Description of Artificial Sequence: Synthetic peptide
  Seed: RSRYWAIRTRS
RRRYWAIRTRV

SEQ ID NO: 9145 - protein, 11 aa, Artificial Sequence
  Description of Artificial Sequence: Synthetic peptide
  Seed: RSRYWAIRTRS
RDRYWAIRTRC

SEQ ID NO: 9146 - protein, 11 aa, Artificial Sequence
  Description of Artificial Sequence: Synthetic peptide
  Seed: RSRYWAIRTRS
RDRYWAIRTRE

SEQ ID NO: 9147 - protein, 11 aa, Artificial Sequence
  Description of Artificial Sequence: Synthetic peptide
  Seed: RSRYWAIRTRS
RQRYWAIRTRK

SEQ ID NO: 9148 - protein, 11 aa, Artificial Sequence
  Description of Artificial Sequence: Synthetic peptide
  Seed: RSRYWAIRTRS
RQRYWAIRTRA

SEQ ID NO: 9149 - protein, 11 aa, Artificial Sequence
  Description of Artificial Sequence: Synthetic peptide
  Seed: RSRYWAIRTRS
RCRYWAIRTRK

SEQ ID NO: 9150 - protein, 11 aa, Artificial Sequence
  Description of Artificial Sequence: Synthetic peptide
  Seed: RSRYWAIRTRS
RCRYWAIRTRM

SEQ ID NO: 9151 - protein, 11 aa, Artificial Sequence
  Description of Artificial Sequence: Synthetic peptide
  Seed: RSRYWAIRTRS
RCRYWAIRTRF

SEQ ID NO: 9152 - protein, 11 aa, Artificial Sequence
  Description of Artificial Sequence: Synthetic peptide
  Seed: RSRYWAIRTRS
RCRYWAIRTRP

SEQ ID NO: 9153 - protein, 11 aa, Artificial Sequence
  Description of Artificial Sequence: Synthetic peptide
  Seed: RSRYWAIRTRS
RCRYWAIRTRS

SEQ ID NO: 9154 - protein, 11 aa, Artificial Sequence
  Description of Artificial Sequence: Synthetic peptide
  Seed: RSRYWAIRTRS
RCRYWAIRTRT

SEQ ID NO: 9155 - protein, 11 aa, Artificial Sequence
  Description of Artificial Sequence: Synthetic peptide
  Seed: RSRYWAIRTRS
RCRYWAIRTRW

SEQ ID NO: 9156 - protein, 11 aa, Artificial Sequence
  Description of Artificial Sequence: Synthetic peptide
  Seed: RSRYWAIRTRS
RCRYWAIRTRY

SEQ ID NO: 9157 - protein, 11 aa, Artificial Sequence
  Description of Artificial Sequence: Synthetic peptide
  Seed: RSRYWAIRTRS
RCRYWAIRTRV

SEQ ID NO: 9158 - protein, 11 aa, Artificial Sequence
  Description of Artificial Sequence: Synthetic peptide
  Seed: RSRYWAIRTRS
RQRYWAIRTRR

SEQ ID NO: 9159 - protein, 11 aa, Artificial Sequence
  Description of Artificial Sequence: Synthetic peptide
  Seed: RSRYWAIRTRS
RDRYWAIRTRG

SEQ ID NO: 9160 - protein, 11 aa, Artificial Sequence
  Description of Artificial Sequence: Synthetic peptide
  Seed: RSRYWAIRTRS
RQRYWAIRTRN

SEQ ID NO: 9161 - protein, 11 aa, Artificial Sequence
  Description of Artificial Sequence: Synthetic peptide
  Seed: RSRYWAIRTRS
RQRYWAIRTRD

SEQ ID NO: 9162 - protein, 11 aa, Artificial Sequence
  Description of Artificial Sequence: Synthetic peptide
  Seed: RSRYWAIRTRS
RQRYWAIRTRC

SEQ ID NO: 9163 - protein, 11 aa, Artificial Sequence
  Description of Artificial Sequence: Synthetic peptide
  Seed: RSRYWAIRTRS
RQRYWAIRTRQ

SEQ ID NO: 9164 - protein, 11 aa, Artificial Sequence
  Description of Artificial Sequence: Synthetic peptide
  Seed: RSRYWAIRTRS
RQRYWAIRTRE

SEQ ID NO: 9165 - protein, 11 aa, Artificial Sequence
  Description of Artificial Sequence: Synthetic peptide
  Seed: RSRYWAIRTRS
RQRYWAIRTRG

SEQ ID NO: 9166 - protein, 11 aa, Artificial Sequence
  Description of Artificial Sequence: Synthetic peptide
  Seed: RSRYWAIRTRS
RQRYWAIRTRH

SEQ ID NO: 9167 - protein, 11 aa, Artificial Sequence
  Description of Artificial Sequence: Synthetic peptide
  Seed: RSRYWAIRTRS
RQRYWAIRTRI

SEQ ID NO: 9168 - protein, 11 aa, Artificial Sequence
  Description of Artificial Sequence: Synthetic peptide
  Seed: RSRYWAIRTRS
RQRYWAIRTRL

SEQ ID NO: 9169 - protein, 11 aa, Artificial Sequence
  Description of Artificial Sequence: Synthetic peptide
  Seed: RSRYWAIRTRS
RCRYWAIRTRL

SEQ ID NO: 9170 - protein, 11 aa, Artificial Sequence
  Description of Artificial Sequence: Synthetic peptide
  Seed: RSRYWAIRTRS
RCRYWAIRTRI

SEQ ID NO: 9171 - protein, 11 aa, Artificial Sequence
  Description of Artificial Sequence: Synthetic peptide
  Seed: RSRYWAIRTRS
RCRYWAIRTRH

SEQ ID NO: 9172 - protein, 11 aa, Artificial Sequence
  Description of Artificial Sequence: Synthetic peptide
  Seed: RSRYWAIRTRS
RCRYWAIRTRG

SEQ ID NO: 9173 - protein, 11 aa, Artificial Sequence
  Description of Artificial Sequence: Synthetic peptide
  Seed: RSRYWAIRTRS
RDRYWAIRTRH

SEQ ID NO: 9174 - protein, 11 aa, Artificial Sequence
  Description of Artificial Sequence: Synthetic peptide
  Seed: RSRYWAIRTRS
RDRYWAIRTRI

SEQ ID NO: 9175 - protein, 11 aa, Artificial Sequence
  Description of Artificial Sequence: Synthetic peptide
  Seed: RSRYWAIRTRS
RDRYWAIRTRL

SEQ ID NO: 9176 - protein, 11 aa, Artificial Sequence
  Description of Artificial Sequence: Synthetic peptide
  Seed: RSRYWAIRTRS
RDRYWAIRTRK

SEQ ID NO: 9177 - protein, 11 aa, Artificial Sequence
  Description of Artificial Sequence: Synthetic peptide
  Seed: RSRYWAIRTRS
RDRYWAIRTRM

SEQ ID NO: 9178 - protein, 11 aa, Artificial Sequence
  Description of Artificial Sequence: Synthetic peptide
  Seed: RSRYWAIRTRS
RDRYWAIRTRF

SEQ ID NO: 9179 - protein, 11 aa, Artificial Sequence
  Description of Artificial Sequence: Synthetic peptide
  Seed: RSRYWAIRTRS
RDRYWAIRTRP

SEQ ID NO: 9180 - protein, 11 aa, Artificial Sequence
  Description of Artificial Sequence: Synthetic peptide
  Seed: RSRYWAIRTRS
RDRYWAIRTRS

SEQ ID NO: 9181 - protein, 11 aa, Artificial Sequence
  Description of Artificial Sequence: Synthetic peptide
  Seed: RSRYWAIRTRS
RDRYWAIRTRT

SEQ ID NO: 9182 - protein, 11 aa, Artificial Sequence
  Description of Artificial Sequence: Synthetic peptide
  Seed: RSRYWAIRTRS
RDRYWAIRTRW

SEQ ID NO: 9183 - protein, 11 aa, Artificial Sequence
  Description of Artificial Sequence: Synthetic peptide
  Seed: RSRYWAIRTRS
RDRYWAIRTRY

SEQ ID NO: 9184 - protein, 11 aa, Artificial Sequence
  Description of Artificial Sequence: Synthetic peptide
  Seed: RSRYWAIRTRS
RDRYWAIRTRV

SEQ ID NO: 9185 - protein, 11 aa, Artificial Sequence
  Description of Artificial Sequence: Synthetic peptide
  Seed: RSRYWAIRTRS
RCRYWAIRTRA

SEQ ID NO: 9186 - protein, 11 aa, Artificial Sequence
  Description of Artificial Sequence: Synthetic peptide
  Seed: RSRYWAIRTRS
RCRYWAIRTRR

SEQ ID NO: 9187 - protein, 11 aa, Artificial Sequence
  Description of Artificial Sequence: Synthetic peptide
  Seed: RSRYWAIRTRS
RCRYWAIRTRN

SEQ ID NO: 9188 - protein, 11 aa, Artificial Sequence
  Description of Artificial Sequence: Synthetic peptide
  Seed: RSRYWAIRTRS
RCRYWAIRTRD

SEQ ID NO: 9189 - protein, 11 aa, Artificial Sequence
  Description of Artificial Sequence: Synthetic peptide
  Seed: RSRYWAIRTRS
RCRYWAIRTRC

SEQ ID NO: 9190 - protein, 11 aa, Artificial Sequence
  Description of Artificial Sequence: Synthetic peptide
  Seed: RSRYWAIRTRS
RCRYWAIRTRQ

SEQ ID NO: 9191 - protein, 11 aa, Artificial Sequence
  Description of Artificial Sequence: Synthetic peptide
  Seed: RSRYWAIRTRS
RCRYWAIRTRE

SEQ ID NO: 9192 - protein, 11 aa, Artificial Sequence
  Description of Artificial Sequence: Synthetic peptide
  Seed: RSRYWAIRTRS
RLRYWAIRTRQ

SEQ ID NO: 9193 - protein, 11 aa, Artificial Sequence
  Description of Artificial Sequence: Synthetic peptide
  Seed: RSRYWAIRTRS
RLRYWAIRTRG

SEQ ID NO: 9194 - protein, 11 aa, Artificial Sequence
  Description of Artificial Sequence: Synthetic peptide
  Seed: RSRYWAIRTRS
RVRYWAIRTRP

SEQ ID NO: 9195 - protein, 11 aa, Artificial Sequence
  Description of Artificial Sequence: Synthetic peptide
  Seed: RSRYWAIRTRS
RTRYWAIRTRT

SEQ ID NO: 9196 - protein, 11 aa, Artificial Sequence
  Description of Artificial Sequence: Synthetic peptide
  Seed: RSRYWAIRTRS
RTRYWAIRTRG

SEQ ID NO: 9197 - protein, 11 aa, Artificial Sequence
  Description of Artificial Sequence: Synthetic peptide
  Seed: RSRYWAIRTRS
RTRYWAIRTRH

SEQ ID NO: 9198 - protein, 11 aa, Artificial Sequence
  Description of Artificial Sequence: Synthetic peptide
  Seed: RSRYWAIRTRS
RTRYWAIRTRI

SEQ ID NO: 9199 - protein, 11 aa, Artificial Sequence
  Description of Artificial Sequence: Synthetic peptide
  Seed: RSRYWAIRTRS
RTRYWAIRTRL

SEQ ID NO: 9200 - protein, 11 aa, Artificial Sequence
  Description of Artificial Sequence: Synthetic peptide
  Seed: RSRYWAIRTRS
RTRYWAIRTRK

SEQ ID NO: 9201 - protein, 11 aa, Artificial Sequence
  Description of Artificial Sequence: Synthetic peptide
  Seed: RSRYWAIRTRS
RTRYWAIRTRM

SEQ ID NO: 9202 - protein, 11 aa, Artificial Sequence
  Description of Artificial Sequence: Synthetic peptide
  Seed: RSRYWAIRTRS
RTRYWAIRTRF

SEQ ID NO: 9203 - protein, 11 aa, Artificial Sequence
  Description of Artificial Sequence: Synthetic peptide
  Seed: RSRYWAIRTRS
RTRYWAIRTRP

SEQ ID NO: 9204 - protein, 11 aa, Artificial Sequence
  Description of Artificial Sequence: Synthetic peptide
  Seed: RSRYWAIRTRS
RTRYWAIRTRS

SEQ ID NO: 9205 - protein, 11 aa, Artificial Sequence
  Description of Artificial Sequence: Synthetic peptide
  Seed: RSRYWAIRTRS
RTRYWAIRTRW

SEQ ID NO: 9206 - protein, 11 aa, Artificial Sequence
  Description of Artificial Sequence: Synthetic peptide
  Seed: RSRYWAIRTRS
RWRYWAIRTRH

SEQ ID NO: 9207 - protein, 11 aa, Artificial Sequence
  Description of Artificial Sequence: Synthetic peptide
  Seed: RSRYWAIRTRS
RTRYWAIRTRY

SEQ ID NO: 9208 - protein, 11 aa, Artificial Sequence
  Description of Artificial Sequence: Synthetic peptide
  Seed: RSRYWAIRTRS
RTRYWAIRTRV

SEQ ID NO: 9209 - protein, 11 aa, Artificial Sequence
  Description of Artificial Sequence: Synthetic peptide
  Seed: RSRYWAIRTRS
RWRYWAIRTRA

SEQ ID NO: 9210 - protein, 11 aa, Artificial Sequence
  Description of Artificial Sequence: Synthetic peptide
  Seed: RSRYWAIRTRS
RWRYWAIRTRR

SEQ ID NO: 9211 - protein, 11 aa, Artificial Sequence
  Description of Artificial Sequence: Synthetic peptide
  Seed: RSRYWAIRTRS
RWRYWAIRTRN

SEQ ID NO: 9212 - protein, 11 aa, Artificial Sequence
  Description of Artificial Sequence: Synthetic peptide
  Seed: RSRYWAIRTRS
RWRYWAIRTRD

SEQ ID NO: 9213 - protein, 11 aa, Artificial Sequence
  Description of Artificial Sequence: Synthetic peptide
  Seed: RSRYWAIRTRS
RWRYWAIRTRC

SEQ ID NO: 9214 - protein, 11 aa, Artificial Sequence
  Description of Artificial Sequence: Synthetic peptide
  Seed: RSRYWAIRTRS
RWRYWAIRTRQ

SEQ ID NO: 9215 - protein, 11 aa, Artificial Sequence
  Description of Artificial Sequence: Synthetic peptide
  Seed: RSRYWAIRTRS
RWRYWAIRTRE

SEQ ID NO: 9216 - protein, 11 aa, Artificial Sequence
  Description of Artificial Sequence: Synthetic peptide
  Seed: RSRYWAIRTRS
RTRYWAIRTRE

SEQ ID NO: 9217 - protein, 11 aa, Artificial Sequence
  Description of Artificial Sequence: Synthetic peptide
  Seed: RSRYWAIRTRS
RTRYWAIRTRQ

SEQ ID NO: 9218 - protein, 11 aa, Artificial Sequence
  Description of Artificial Sequence: Synthetic peptide
  Seed: RSRYWAIRTRS
RTRYWAIRTRC

SEQ ID NO: 9219 - protein, 11 aa, Artificial Sequence
  Description of Artificial Sequence: Synthetic peptide
  Seed: RSRYWAIRTRS
RTRYWAIRTRD

SEQ ID NO: 9220 - protein, 11 aa, Artificial Sequence
  Description of Artificial Sequence: Synthetic peptide
  Seed: RSRYWAIRTRS
RSRYWAIRTRD

SEQ ID NO: 9221 - protein, 11 aa, Artificial Sequence
  Description of Artificial Sequence: Synthetic peptide
  Seed: RSRYWAIRTRS
RSRYWAIRTRC

SEQ ID NO: 9222 - protein, 11 aa, Artificial Sequence
  Description of Artificial Sequence: Synthetic peptide
  Seed: RSRYWAIRTRS
RSRYWAIRTRQ

SEQ ID NO: 9223 - protein, 11 aa, Artificial Sequence
  Description of Artificial Sequence: Synthetic peptide
  Seed: RSRYWAIRTRS
RSRYWAIRTRE

SEQ ID NO: 9224 - protein, 11 aa, Artificial Sequence
  Description of Artificial Sequence: Synthetic peptide
  Seed: RSRYWAIRTRS
RSRYWAIRTRG

SEQ ID NO: 9225 - protein, 11 aa, Artificial Sequence
  Description of Artificial Sequence: Synthetic peptide
  Seed: RSRYWAIRTRS
RSRYWAIRTRH

SEQ ID NO: 9226 - protein, 11 aa, Artificial Sequence
  Description of Artificial Sequence: Synthetic peptide
  Seed: RSRYWAIRTRS
RSRYWAIRTRI

SEQ ID NO: 9227 - protein, 11 aa, Artificial Sequence
  Description of Artificial Sequence: Synthetic peptide
  Seed: RSRYWAIRTRS
RSRYWAIRTRL

SEQ ID NO: 9228 - protein, 11 aa, Artificial Sequence
  Description of Artificial Sequence: Synthetic peptide
  Seed: RSRYWAIRTRS
RSRYWAIRTRK

SEQ ID NO: 9229 - protein, 11 aa, Artificial Sequence
  Description of Artificial Sequence: Synthetic peptide
  Seed: RSRYWAIRTRS
RSRYWAIRTRM

SEQ ID NO: 9230 - protein, 11 aa, Artificial Sequence
  Description of Artificial Sequence: Synthetic peptide
  Seed: RSRYWAIRTRS
RSRYWAIRTRF

SEQ ID NO: 9231 - protein, 11 aa, Artificial Sequence
  Description of Artificial Sequence: Synthetic peptide
  Seed: RSRYWAIRTRS
RSRYWAIRTRP

SEQ ID NO: 9232 - protein, 11 aa, Artificial Sequence
  Description of Artificial Sequence: Synthetic peptide
  Seed: RSRYWAIRTRS
RSRYWAIRTRT

SEQ ID NO: 9233 - protein, 11 aa, Artificial Sequence
  Description of Artificial Sequence: Synthetic peptide
  Seed: RSRYWAIRTRS
RSRYWAIRTRW

SEQ ID NO: 9234 - protein, 11 aa, Artificial Sequence
  Description of Artificial Sequence: Synthetic peptide
  Seed: RSRYWAIRTRS
RSRYWAIRTRY

SEQ ID NO: 9235 - protein, 11 aa, Artificial Sequence
  Description of Artificial Sequence: Synthetic peptide
  Seed: RSRYWAIRTRS
RSRYWAIRTRV

SEQ ID NO: 9236 - protein, 11 aa, Artificial Sequence
  Description of Artificial Sequence: Synthetic peptide
  Seed: RSRYWAIRTRS
RTRYWAIRTRA

SEQ ID NO: 9237 - protein, 11 aa, Artificial Sequence
  Description of Artificial Sequence: Synthetic peptide
  Seed: RSRYWAIRTRS
RTRYWAIRTRR

SEQ ID NO: 9238 - protein, 11 aa, Artificial Sequence
  Description of Artificial Sequence: Synthetic peptide
  Seed: RSRYWAIRTRS
RTRYWAIRTRN

SEQ ID NO: 9239 - protein, 11 aa, Artificial Sequence
  Description of Artificial Sequence: Synthetic peptide
  Seed: RSRYWAIRTRS
RWRYWAIRTRG

SEQ ID NO: 9240 - protein, 11 aa, Artificial Sequence
  Description of Artificial Sequence: Synthetic peptide
  Seed: RSRYWAIRTRS
RWRYWAIRTRI

SEQ ID NO: 9241 - protein, 11 aa, Artificial Sequence
  Description of Artificial Sequence: Synthetic peptide
  Seed: RSRYWAIRTRS
RSRYWAIRTRR

SEQ ID NO: 9242 - protein, 11 aa, Artificial Sequence
  Description of Artificial Sequence: Synthetic peptide
  Seed: RSRYWAIRTRS
RVRYWAIRTRD

SEQ ID NO: 9243 - protein, 11 aa, Artificial Sequence
  Description of Artificial Sequence: Synthetic peptide
  Seed: RSRYWAIRTRS
RYRYWAIRTRP

SEQ ID NO: 9244 - protein, 11 aa, Artificial Sequence
  Description of Artificial Sequence: Synthetic peptide
  Seed: RSRYWAIRTRS
RYRYWAIRTRS

SEQ ID NO: 9245 - protein, 11 aa, Artificial Sequence
  Description of Artificial Sequence: Synthetic peptide
  Seed: RSRYWAIRTRS
RYRYWAIRTRT

SEQ ID NO: 9246 - protein, 11 aa, Artificial Sequence
  Description of Artificial Sequence: Synthetic peptide
  Seed: RSRYWAIRTRS
RYRYWAIRTRW

SEQ ID NO: 9247 - protein, 11 aa, Artificial Sequence
  Description of Artificial Sequence: Synthetic peptide
  Seed: RSRYWAIRTRS
RYRYWAIRTRY

SEQ ID NO: 9248 - protein, 11 aa, Artificial Sequence
  Description of Artificial Sequence: Synthetic peptide
  Seed: RSRYWAIRTRS
RYRYWAIRTRV

SEQ ID NO: 9249 - protein, 11 aa, Artificial Sequence
  Description of Artificial Sequence: Synthetic peptide
  Seed: RSRYWAIRTRS
RVRYWAIRTRA

SEQ ID NO: 9250 - protein, 11 aa, Artificial Sequence
  Description of Artificial Sequence: Synthetic peptide
  Seed: RSRYWAIRTRS
RVRYWAIRTRR

SEQ ID NO: 9251 - protein, 11 aa, Artificial Sequence
  Description of Artificial Sequence: Synthetic peptide
  Seed: RSRYWAIRTRS
RVRYWAIRTRN

SEQ ID NO: 9252 - protein, 11 aa, Artificial Sequence
  Description of Artificial Sequence: Synthetic peptide
  Seed: RSRYWAIRTRS
RVRYWAIRTRC

SEQ ID NO: 9253 - protein, 11 aa, Artificial Sequence
  Description of Artificial Sequence: Synthetic peptide
  Seed: RSRYWAIRTRS
RWRYWAIRTRL

SEQ ID NO: 9254 - protein, 11 aa, Artificial Sequence
  Description of Artificial Sequence: Synthetic peptide
  Seed: RSRYWAIRTRS
RVRYWAIRTRQ

SEQ ID NO: 9255 - protein, 11 aa, Artificial Sequence
  Description of Artificial Sequence: Synthetic peptide
  Seed: RSRYWAIRTRS
RVRYWAIRTRE

SEQ ID NO: 9256 - protein, 11 aa, Artificial Sequence
  Description of Artificial Sequence: Synthetic peptide
  Seed: RSRYWAIRTRS
RVRYWAIRTRG

SEQ ID NO: 9257 - protein, 11 aa, Artificial Sequence
  Description of Artificial Sequence: Synthetic peptide
  Seed: RSRYWAIRTRS
RVRYWAIRTRH

SEQ ID NO: 9258 - protein, 11 aa, Artificial Sequence
  Description of Artificial Sequence: Synthetic peptide
  Seed: RSRYWAIRTRS
RVRYWAIRTRI

SEQ ID NO: 9259 - protein, 11 aa, Artificial Sequence
  Description of Artificial Sequence: Synthetic peptide
  Seed: RSRYWAIRTRS
RVRYWAIRTRL

SEQ ID NO: 9260 - protein, 11 aa, Artificial Sequence
  Description of Artificial Sequence: Synthetic peptide
  Seed: RSRYWAIRTRS
RVRYWAIRTRK

SEQ ID NO: 9261 - protein, 11 aa, Artificial Sequence
  Description of Artificial Sequence: Synthetic peptide
  Seed: RSRYWAIRTRS
RVRYWAIRTRM

SEQ ID NO: 9262 - protein, 11 aa, Artificial Sequence
  Description of Artificial Sequence: Synthetic peptide
  Seed: RSRYWAIRTRS
RVRYWAIRTRF

SEQ ID NO: 9263 - protein, 11 aa, Artificial Sequence
  Description of Artificial Sequence: Synthetic peptide
  Seed: RSRYWAIRTRS
RYRYWAIRTRF

SEQ ID NO: 9264 - protein, 11 aa, Artificial Sequence
  Description of Artificial Sequence: Synthetic peptide
  Seed: RSRYWAIRTRS
RYRYWAIRTRM

SEQ ID NO: 9265 - protein, 11 aa, Artificial Sequence
  Description of Artificial Sequence: Synthetic peptide
  Seed: RSRYWAIRTRS
RYRYWAIRTRK

SEQ ID NO: 9266 - protein, 11 aa, Artificial Sequence
  Description of Artificial Sequence: Synthetic peptide
  Seed: RSRYWAIRTRS
RYRYWAIRTRL

SEQ ID NO: 9267 - protein, 11 aa, Artificial Sequence
  Description of Artificial Sequence: Synthetic peptide
  Seed: RSRYWAIRTRS
RWRYWAIRTRK

SEQ ID NO: 9268 - protein, 11 aa, Artificial Sequence
  Description of Artificial Sequence: Synthetic peptide
  Seed: RSRYWAIRTRS
RWRYWAIRTRM

SEQ ID NO: 9269 - protein, 11 aa, Artificial Sequence
  Description of Artificial Sequence: Synthetic peptide
  Seed: RSRYWAIRTRS
RWRYWAIRTRF

SEQ ID NO: 9270 - protein, 11 aa, Artificial Sequence
  Description of Artificial Sequence: Synthetic peptide
  Seed: RSRYWAIRTRS
RWRYWAIRTRP

SEQ ID NO: 9271 - protein, 11 aa, Artificial Sequence
  Description of Artificial Sequence: Synthetic peptide
  Seed: RSRYWAIRTRS
RWRYWAIRTRS

SEQ ID NO: 9272 - protein, 11 aa, Artificial Sequence
  Description of Artificial Sequence: Synthetic peptide
  Seed: RSRYWAIRTRS
RWRYWAIRTRT

SEQ ID NO: 9273 - protein, 11 aa, Artificial Sequence
  Description of Artificial Sequence: Synthetic peptide
  Seed: RSRYWAIRTRS
RWRYWAIRTRW

SEQ ID NO: 9274 - protein, 11 aa, Artificial Sequence
  Description of Artificial Sequence: Synthetic peptide
  Seed: RSRYWAIRTRS
RWRYWAIRTRY

SEQ ID NO: 9275 - protein, 11 aa, Artificial Sequence
  Description of Artificial Sequence: Synthetic peptide
  Seed: RSRYWAIRTRS
RWRYWAIRTRV

SEQ ID NO: 9276 - protein, 11 aa, Artificial Sequence
  Description of Artificial Sequence: Synthetic peptide
  Seed: RSRYWAIRTRS
RYRYWAIRTRA

SEQ ID NO: 9277 - protein, 11 aa, Artificial Sequence
  Description of Artificial Sequence: Synthetic peptide
  Seed: RSRYWAIRTRS
RYRYWAIRTRR

SEQ ID NO: 9278 - protein, 11 aa, Artificial Sequence
  Description of Artificial Sequence: Synthetic peptide
  Seed: RSRYWAIRTRS
RYRYWAIRTRN

SEQ ID NO: 9279 - protein, 11 aa, Artificial Sequence
  Description of Artificial Sequence: Synthetic peptide
  Seed: RSRYWAIRTRS
RYRYWAIRTRD

SEQ ID NO: 9280 - protein, 11 aa, Artificial Sequence
  Description of Artificial Sequence: Synthetic peptide
  Seed: RSRYWAIRTRS
RYRYWAIRTRC

SEQ ID NO: 9281 - protein, 11 aa, Artificial Sequence
  Description of Artificial Sequence: Synthetic peptide
  Seed: RSRYWAIRTRS
RYRYWAIRTRQ

SEQ ID NO: 9282 - protein, 11 aa, Artificial Sequence
  Description of Artificial Sequence: Synthetic peptide
  Seed: RSRYWAIRTRS
RYRYWAIRTRE

SEQ ID NO: 9283 - protein, 11 aa, Artificial Sequence
  Description of Artificial Sequence: Synthetic peptide
  Seed: RSRYWAIRTRS
RYRYWAIRTRG

SEQ ID NO: 9284 - protein, 11 aa, Artificial Sequence
  Description of Artificial Sequence: Synthetic peptide
  Seed: RSRYWAIRTRS
RYRYWAIRTRH

SEQ ID NO: 9285 - protein, 11 aa, Artificial Sequence
  Description of Artificial Sequence: Synthetic peptide
  Seed: RSRYWAIRTRS
RYRYWAIRTRI

SEQ ID NO: 9286 - protein, 11 aa, Artificial Sequence
  Description of Artificial Sequence: Synthetic peptide
  Seed: RSRYWAIRTRS
RSRYWAIRTRN

SEQ ID NO: 9287 - protein, 11 aa, Artificial Sequence
  Description of Artificial Sequence: Synthetic peptide
  Seed: RSRYWAIRTRS
RSRYWAIRTRA

SEQ ID NO: 9288 - protein, 11 aa, Artificial Sequence
  Description of Artificial Sequence: Synthetic peptide
  Seed: RSRYWAIRTRS
RLRYWAIRTRH

SEQ ID NO: 9289 - protein, 11 aa, Artificial Sequence
  Description of Artificial Sequence: Synthetic peptide
  Seed: RSRYWAIRTRS
RMRYWAIRTRR

SEQ ID NO: 9290 - protein, 11 aa, Artificial Sequence
  Description of Artificial Sequence: Synthetic peptide
  Seed: RSRYWAIRTRS
RKRYWAIRTRM

SEQ ID NO: 9291 - protein, 11 aa, Artificial Sequence
  Description of Artificial Sequence: Synthetic peptide
  Seed: RSRYWAIRTRS
RKRYWAIRTRF

SEQ ID NO: 9292 - protein, 11 aa, Artificial Sequence
  Description of Artificial Sequence: Synthetic peptide
  Seed: RSRYWAIRTRS
RKRYWAIRTRP

SEQ ID NO: 9293 - protein, 11 aa, Artificial Sequence
  Description of Artificial Sequence: Synthetic peptide
  Seed: RSRYWAIRTRS
RKRYWAIRTRS

SEQ ID NO: 9294 - protein, 11 aa, Artificial Sequence
  Description of Artificial Sequence: Synthetic peptide
  Seed: RSRYWAIRTRS
RKRYWAIRTRT

SEQ ID NO: 9295 - protein, 11 aa, Artificial Sequence
  Description of Artificial Sequence: Synthetic peptide
  Seed: RSRYWAIRTRS
RKRYWAIRTRW

SEQ ID NO: 9296 - protein, 11 aa, Artificial Sequence
  Description of Artificial Sequence: Synthetic peptide
  Seed: RSRYWAIRTRS
RKRYWAIRTRY

SEQ ID NO: 9297 - protein, 11 aa, Artificial Sequence
  Description of Artificial Sequence: Synthetic peptide
  Seed: RSRYWAIRTRS
RKRYWAIRTRV

SEQ ID NO: 9298 - protein, 11 aa, Artificial Sequence
  Description of Artificial Sequence: Synthetic peptide
  Seed: RSRYWAIRTRS
RMRYWAIRTRA

SEQ ID NO: 9299 - protein, 11 aa, Artificial Sequence
  Description of Artificial Sequence: Synthetic peptide
  Seed: RSRYWAIRTRS
RMRYWAIRTRN

SEQ ID NO: 9300 - protein, 11 aa, Artificial Sequence
  Description of Artificial Sequence: Synthetic peptide
  Seed: RSRYWAIRTRS
RMRYWAIRTRF

SEQ ID NO: 9301 - protein, 11 aa, Artificial Sequence
  Description of Artificial Sequence: Synthetic peptide
  Seed: RSRYWAIRTRS
RMRYWAIRTRD

SEQ ID NO: 9302 - protein, 11 aa, Artificial Sequence
  Description of Artificial Sequence: Synthetic peptide
  Seed: RSRYWAIRTRS
RMRYWAIRTRC

SEQ ID NO: 9303 - protein, 11 aa, Artificial Sequence
  Description of Artificial Sequence: Synthetic peptide
  Seed: RSRYWAIRTRS
RMRYWAIRTRQ

SEQ ID NO: 9304 - protein, 11 aa, Artificial Sequence
  Description of Artificial Sequence: Synthetic peptide
  Seed: RSRYWAIRTRS
RMRYWAIRTRE

SEQ ID NO: 9305 - protein, 11 aa, Artificial Sequence
  Description of Artificial Sequence: Synthetic peptide
  Seed: RSRYWAIRTRS
RMRYWAIRTRG

SEQ ID NO: 9306 - protein, 11 aa, Artificial Sequence
  Description of Artificial Sequence: Synthetic peptide
  Seed: RSRYWAIRTRS
RMRYWAIRTRH

SEQ ID NO: 9307 - protein, 11 aa, Artificial Sequence
  Description of Artificial Sequence: Synthetic peptide
  Seed: RSRYWAIRTRS
RMRYWAIRTRI

SEQ ID NO: 9308 - protein, 11 aa, Artificial Sequence
  Description of Artificial Sequence: Synthetic peptide
  Seed: RSRYWAIRTRS
RMRYWAIRTRL

SEQ ID NO: 9309 - protein, 11 aa, Artificial Sequence
  Description of Artificial Sequence: Synthetic peptide
  Seed: RSRYWAIRTRS
RMRYWAIRTRK

SEQ ID NO: 9310 - protein, 11 aa, Artificial Sequence
  Description of Artificial Sequence: Synthetic peptide
  Seed: RSRYWAIRTRS
RKRYWAIRTRK

SEQ ID NO: 9311 - protein, 11 aa, Artificial Sequence
  Description of Artificial Sequence: Synthetic peptide
  Seed: RSRYWAIRTRS
RKRYWAIRTRL

SEQ ID NO: 9312 - protein, 11 aa, Artificial Sequence
  Description of Artificial Sequence: Synthetic peptide
  Seed: RSRYWAIRTRS
RKRYWAIRTRI

SEQ ID NO: 9313 - protein, 11 aa, Artificial Sequence
  Description of Artificial Sequence: Synthetic peptide
  Seed: RSRYWAIRTRS
RKRYWAIRTRH

SEQ ID NO: 9314 - protein, 11 aa, Artificial Sequence
  Description of Artificial Sequence: Synthetic peptide
  Seed: RSRYWAIRTRS
RLRYWAIRTRI

SEQ ID NO: 9315 - protein, 11 aa, Artificial Sequence
  Description of Artificial Sequence: Synthetic peptide
  Seed: RSRYWAIRTRS
RLRYWAIRTRL

SEQ ID NO: 9316 - protein, 11 aa, Artificial Sequence
  Description of Artificial Sequence: Synthetic peptide
  Seed: RSRYWAIRTRS
RLRYWAIRTRK

SEQ ID NO: 9317 - protein, 11 aa, Artificial Sequence
  Description of Artificial Sequence: Synthetic peptide
  Seed: RSRYWAIRTRS
RLRYWAIRTRM

SEQ ID NO: 9318 - protein, 11 aa, Artificial Sequence
  Description of Artificial Sequence: Synthetic peptide
  Seed: RSRYWAIRTRS
RLRYWAIRTRF

SEQ ID NO: 9319 - protein, 11 aa, Artificial Sequence
  Description of Artificial Sequence: Synthetic peptide
  Seed: RSRYWAIRTRS
RLRYWAIRTRP

SEQ ID NO: 9320 - protein, 11 aa, Artificial Sequence
  Description of Artificial Sequence: Synthetic peptide
  Seed: RSRYWAIRTRS
RLRYWAIRTRS

SEQ ID NO: 9321 - protein, 11 aa, Artificial Sequence
  Description of Artificial Sequence: Synthetic peptide
  Seed: RSRYWAIRTRS
RLRYWAIRTRT

SEQ ID NO: 9322 - protein, 11 aa, Artificial Sequence
  Description of Artificial Sequence: Synthetic peptide
  Seed: RSRYWAIRTRS
RLRYWAIRTRW

SEQ ID NO: 9323 - protein, 11 aa, Artificial Sequence
  Description of Artificial Sequence: Synthetic peptide
  Seed: RSRYWAIRTRS
RLRYWAIRTRY

SEQ ID NO: 9324 - protein, 11 aa, Artificial Sequence
  Description of Artificial Sequence: Synthetic peptide
  Seed: RSRYWAIRTRS
RLRYWAIRTRV

SEQ ID NO: 9325 - protein, 11 aa, Artificial Sequence
  Description of Artificial Sequence: Synthetic peptide
  Seed: RSRYWAIRTRS
RKRYWAIRTRA

SEQ ID NO: 9326 - protein, 11 aa, Artificial Sequence
  Description of Artificial Sequence: Synthetic peptide
  Seed: RSRYWAIRTRS
RKRYWAIRTRR

SEQ ID NO: 9327 - protein, 11 aa, Artificial Sequence
  Description of Artificial Sequence: Synthetic peptide
  Seed: RSRYWAIRTRS
RKRYWAIRTRN

SEQ ID NO: 9328 - protein, 11 aa, Artificial Sequence
  Description of Artificial Sequence: Synthetic peptide
  Seed: RSRYWAIRTRS
RKRYWAIRTRD

SEQ ID NO: 9329 - protein, 11 aa, Artificial Sequence
  Description of Artificial Sequence: Synthetic peptide
  Seed: RSRYWAIRTRS
RKRYWAIRTRC

SEQ ID NO: 9330 - protein, 11 aa, Artificial Sequence
  Description of Artificial Sequence: Synthetic peptide
  Seed: RSRYWAIRTRS
RKRYWAIRTRQ

SEQ ID NO: 9331 - protein, 11 aa, Artificial Sequence
  Description of Artificial Sequence: Synthetic peptide
  Seed: RSRYWAIRTRS
RKRYWAIRTRE

SEQ ID NO: 9332 - protein, 11 aa, Artificial Sequence
  Description of Artificial Sequence: Synthetic peptide
  Seed: RSRYWAIRTRS
RKRYWAIRTRG

SEQ ID NO: 9333 - protein, 11 aa, Artificial Sequence
  Description of Artificial Sequence: Synthetic peptide
  Seed: RSRYWAIRTRS
RMRYWAIRTRM

SEQ ID NO: 9334 - protein, 11 aa, Artificial Sequence
  Description of Artificial Sequence: Synthetic peptide
  Seed: RSRYWAIRTRS
RMRYWAIRTRP

SEQ ID NO: 9335 - protein, 11 aa, Artificial Sequence
  Description of Artificial Sequence: Synthetic peptide
  Seed: RSRYWAIRTRS
RPRYWAIRTRV

SEQ ID NO: 9336 - protein, 11 aa, Artificial Sequence
  Description of Artificial Sequence: Synthetic peptide
  Seed: RSRYWAIRTRS
RPRYWAIRTRH

SEQ ID NO: 9337 - protein, 11 aa, Artificial Sequence
  Description of Artificial Sequence: Synthetic peptide
  Seed: RSRYWAIRTRS
RFRYWAIRTRV

SEQ ID NO: 9338 - protein, 11 aa, Artificial Sequence
  Description of Artificial Sequence: Synthetic peptide
  Seed: RSRYWAIRTRS
RPRYWAIRTRA

SEQ ID NO: 9339 - protein, 11 aa, Artificial Sequence
  Description of Artificial Sequence: Synthetic peptide
  Seed: RSRYWAIRTRS
RPRYWAIRTRR

SEQ ID NO: 9340 - protein, 11 aa, Artificial Sequence
  Description of Artificial Sequence: Synthetic peptide
  Seed: RSRYWAIRTRS
RPRYWAIRTRN

SEQ ID NO: 9341 - protein, 11 aa, Artificial Sequence
  Description of Artificial Sequence: Synthetic peptide
  Seed: RSRYWAIRTRS
RPRYWAIRTRD

SEQ ID NO: 9342 - protein, 11 aa, Artificial Sequence
  Description of Artificial Sequence: Synthetic peptide
  Seed: RSRYWAIRTRS
RPRYWAIRTRC

SEQ ID NO: 9343 - protein, 11 aa, Artificial Sequence
  Description of Artificial Sequence: Synthetic peptide
  Seed: RSRYWAIRTRS
RPRYWAIRTRQ

SEQ ID NO: 9344 - protein, 11 aa, Artificial Sequence
  Description of Artificial Sequence: Synthetic peptide
  Seed: RSRYWAIRTRS
RPRYWAIRTRE

SEQ ID NO: 9345 - protein, 11 aa, Artificial Sequence
  Description of Artificial Sequence: Synthetic peptide
  Seed: RSRYWAIRTRS
RPRYWAIRTRG

SEQ ID NO: 9346 - protein, 11 aa, Artificial Sequence
  Description of Artificial Sequence: Synthetic peptide
  Seed: RSRYWAIRTRS
RPRYWAIRTRI

SEQ ID NO: 9347 - protein, 11 aa, Artificial Sequence
  Description of Artificial Sequence: Synthetic peptide
  Seed: RSRYWAIRTRS
RMRYWAIRTRS

SEQ ID NO: 9348 - protein, 11 aa, Artificial Sequence
  Description of Artificial Sequence: Synthetic peptide
  Seed: RSRYWAIRTRS
RPRYWAIRTRL

SEQ ID NO: 9349 - protein, 11 aa, Artificial Sequence
  Description of Artificial Sequence: Synthetic peptide
  Seed: RSRYWAIRTRS
RPRYWAIRTRK

SEQ ID NO: 9350 - protein, 11 aa, Artificial Sequence
  Description of Artificial Sequence: Synthetic peptide
  Seed: RSRYWAIRTRS
RPRYWAIRTRM

SEQ ID NO: 9351 - protein, 11 aa, Artificial Sequence
  Description of Artificial Sequence: Synthetic peptide
  Seed: RSRYWAIRTRS
RPRYWAIRTRF

SEQ ID NO: 9352 - protein, 11 aa, Artificial Sequence
  Description of Artificial Sequence: Synthetic peptide
  Seed: RSRYWAIRTRS
RPRYWAIRTRP

SEQ ID NO: 9353 - protein, 11 aa, Artificial Sequence
  Description of Artificial Sequence: Synthetic peptide
  Seed: RSRYWAIRTRS
RPRYWAIRTRS

SEQ ID NO: 9354 - protein, 11 aa, Artificial Sequence
  Description of Artificial Sequence: Synthetic peptide
  Seed: RSRYWAIRTRS
RPRYWAIRTRT

SEQ ID NO: 9355 - protein, 11 aa, Artificial Sequence
  Description of Artificial Sequence: Synthetic peptide
  Seed: RSRYWAIRTRS
RPRYWAIRTRW

SEQ ID NO: 9356 - protein, 11 aa, Artificial Sequence
  Description of Artificial Sequence: Synthetic peptide
  Seed: RSRYWAIRTRS
RPRYWAIRTRY

SEQ ID NO: 9357 - protein, 11 aa, Artificial Sequence
  Description of Artificial Sequence: Synthetic peptide
  Seed: RSRYWAIRTRS
RFRYWAIRTRY

SEQ ID NO: 9358 - protein, 11 aa, Artificial Sequence
  Description of Artificial Sequence: Synthetic peptide
  Seed: RSRYWAIRTRS
RFRYWAIRTRW

SEQ ID NO: 9359 - protein, 11 aa, Artificial Sequence
  Description of Artificial Sequence: Synthetic peptide
  Seed: RSRYWAIRTRS
RFRYWAIRTRT

SEQ ID NO: 9360 - protein, 11 aa, Artificial Sequence
  Description of Artificial Sequence: Synthetic peptide
  Seed: RSRYWAIRTRS
RFRYWAIRTRS

SEQ ID NO: 9361 - protein, 11 aa, Artificial Sequence
  Description of Artificial Sequence: Synthetic peptide
  Seed: RSRYWAIRTRS
RMRYWAIRTRT

SEQ ID NO: 9362 - protein, 11 aa, Artificial Sequence
  Description of Artificial Sequence: Synthetic peptide
  Seed: RSRYWAIRTRS
RMRYWAIRTRW

SEQ ID NO: 9363 - protein, 11 aa, Artificial Sequence
  Description of Artificial Sequence: Synthetic peptide
  Seed: RSRYWAIRTRS
RMRYWAIRTRY

SEQ ID NO: 9364 - protein, 11 aa, Artificial Sequence
  Description of Artificial Sequence: Synthetic peptide
  Seed: RSRYWAIRTRS
RMRYWAIRTRV

SEQ ID NO: 9365 - protein, 11 aa, Artificial Sequence
  Description of Artificial Sequence: Synthetic peptide
  Seed: RSRYWAIRTRS
RFRYWAIRTRA

SEQ ID NO: 9366 - protein, 11 aa, Artificial Sequence
  Description of Artificial Sequence: Synthetic peptide
  Seed: RSRYWAIRTRS
RFRYWAIRTRR

SEQ ID NO: 9367 - protein, 11 aa, Artificial Sequence
  Description of Artificial Sequence: Synthetic peptide
  Seed: RSRYWAIRTRS
RFRYWAIRTRN

SEQ ID NO: 9368 - protein, 11 aa, Artificial Sequence
  Description of Artificial Sequence: Synthetic peptide
  Seed: RSRYWAIRTRS
RFRYWAIRTRD

SEQ ID NO: 9369 - protein, 11 aa, Artificial Sequence
  Description of Artificial Sequence: Synthetic peptide
  Seed: RSRYWAIRTRS
RFRYWAIRTRC

SEQ ID NO: 9370 - protein, 11 aa, Artificial Sequence
  Description of Artificial Sequence: Synthetic peptide
  Seed: RSRYWAIRTRS
RFRYWAIRTRQ

SEQ ID NO: 9371 - protein, 11 aa, Artificial Sequence
  Description of Artificial Sequence: Synthetic peptide
  Seed: RSRYWAIRTRS
RFRYWAIRTRE

SEQ ID NO: 9372 - protein, 11 aa, Artificial Sequence
  Description of Artificial Sequence: Synthetic peptide
  Seed: RSRYWAIRTRS
RFRYWAIRTRG

SEQ ID NO: 9373 - protein, 11 aa, Artificial Sequence
  Description of Artificial Sequence: Synthetic peptide
  Seed: RSRYWAIRTRS
RFRYWAIRTRH

SEQ ID NO: 9374 - protein, 11 aa, Artificial Sequence
  Description of Artificial Sequence: Synthetic peptide
  Seed: RSRYWAIRTRS
RFRYWAIRTRI

SEQ ID NO: 9375 - protein, 11 aa, Artificial Sequence
  Description of Artificial Sequence: Synthetic peptide
  Seed: RSRYWAIRTRS
RFRYWAIRTRL

SEQ ID NO: 9376 - protein, 11 aa, Artificial Sequence
  Description of Artificial Sequence: Synthetic peptide
  Seed: RSRYWAIRTRS
RFRYWAIRTRK

SEQ ID NO: 9377 - protein, 11 aa, Artificial Sequence
  Description of Artificial Sequence: Synthetic peptide
  Seed: RSRYWAIRTRS
RFRYWAIRTRM

SEQ ID NO: 9378 - protein, 11 aa, Artificial Sequence
  Description of Artificial Sequence: Synthetic peptide
  Seed: RSRYWAIRTRS
RFRYWAIRTRF

SEQ ID NO: 9379 - protein, 11 aa, Artificial Sequence
  Description of Artificial Sequence: Synthetic peptide
  Seed: RSRYWAIRTRS
RFRYWAIRTRP

SEQ ID NO: 9380 - protein, 11 aa, Artificial Sequence
  Description of Artificial Sequence: Synthetic peptide
  Seed: RMIGGIGRFYI
RSIGGIGRFYA

SEQ ID NO: 9381 - protein, 9 aa, Artificial Sequence
  Description of Artificial Sequence: Synthetic peptide
  Seed: AAFEDLRLL
AAFEDLRLA

SEQ ID NO: 9382 - protein, 11 aa, Artificial Sequence
  Description of Artificial Sequence: Synthetic peptide
  Seed: RMIGGIGRFYI
RFIGGIGRFYY

SEQ ID NO: 9383 - protein, 11 aa, Artificial Sequence
  Description of Artificial Sequence: Synthetic peptide
  Seed: RGINDRNFWRG
RQINDRNFWRR

SEQ ID NO: 9384 - protein, 11 aa, Artificial Sequence
  Description of Artificial Sequence: Synthetic peptide
  Seed: RGINDRNFWRG
RCINDRNFWRM

SEQ ID NO: 9385 - protein, 11 aa, Artificial Sequence
  Description of Artificial Sequence: Synthetic peptide
  Seed: RGINDRNFWRG
RCINDRNFWRF

SEQ ID NO: 9386 - protein, 11 aa, Artificial Sequence
  Description of Artificial Sequence: Synthetic peptide
  Seed: RGINDRNFWRG
RCINDRNFWRP

SEQ ID NO: 9387 - protein, 11 aa, Artificial Sequence
  Description of Artificial Sequence: Synthetic peptide
  Seed: RGINDRNFWRG
RCINDRNFWRS

SEQ ID NO: 9388 - protein, 11 aa, Artificial Sequence
  Description of Artificial Sequence: Synthetic peptide
  Seed: RGINDRNFWRG
RCINDRNFWRT

SEQ ID NO: 9389 - protein, 11 aa, Artificial Sequence
  Description of Artificial Sequence: Synthetic peptide
  Seed: RGINDRNFWRG
RCINDRNFWRW

SEQ ID NO: 9390 - protein, 11 aa, Artificial Sequence
  Description of Artificial Sequence: Synthetic peptide
  Seed: RGINDRNFWRG
RCINDRNFWRY

SEQ ID NO: 9391 - protein, 11 aa, Artificial Sequence
  Description of Artificial Sequence: Synthetic peptide
  Seed: RGINDRNFWRG
RCINDRNFWRV

SEQ ID NO: 9392 - protein, 11 aa, Artificial Sequence
  Description of Artificial Sequence: Synthetic peptide
  Seed: RGINDRNFWRG
RQINDRNFWRA

SEQ ID NO: 9393 - protein, 11 aa, Artificial Sequence
  Description of Artificial Sequence: Synthetic peptide
  Seed: RGINDRNFWRG
RQINDRNFWRN

SEQ ID NO: 9394 - protein, 11 aa, Artificial Sequence
  Description of Artificial Sequence: Synthetic peptide
  Seed: RGINDRNFWRG
RQINDRNFWRF

SEQ ID NO: 9395 - protein, 11 aa, Artificial Sequence
  Description of Artificial Sequence: Synthetic peptide
  Seed: RGINDRNFWRG
RQINDRNFWRD

SEQ ID NO: 9396 - protein, 11 aa, Artificial Sequence
  Description of Artificial Sequence: Synthetic peptide
  Seed: RGINDRNFWRG
RQINDRNFWRC

SEQ ID NO: 9397 - protein, 11 aa, Artificial Sequence
  Description of Artificial Sequence: Synthetic peptide
  Seed: RGINDRNFWRG
RQINDRNFWRQ

SEQ ID NO: 9398 - protein, 11 aa, Artificial Sequence
  Description of Artificial Sequence: Synthetic peptide
  Seed: RGINDRNFWRG
RQINDRNFWRE

SEQ ID NO: 9399 - protein, 11 aa, Artificial Sequence
  Description of Artificial Sequence: Synthetic peptide
  Seed: RGINDRNFWRG
RQINDRNFWRG

SEQ ID NO: 9400 - protein, 11 aa, Artificial Sequence
  Description of Artificial Sequence: Synthetic peptide
  Seed: RGINDRNFWRG
RQINDRNFWRH

SEQ ID NO: 9401 - protein, 11 aa, Artificial Sequence
  Description of Artificial Sequence: Synthetic peptide
  Seed: RGINDRNFWRG
RQINDRNFWRI

SEQ ID NO: 9402 - protein, 11 aa, Artificial Sequence
  Description of Artificial Sequence: Synthetic peptide
  Seed: RGINDRNFWRG
RQINDRNFWRL

SEQ ID NO: 9403 - protein, 11 aa, Artificial Sequence
  Description of Artificial Sequence: Synthetic peptide
  Seed: RGINDRNFWRG
RQINDRNFWRK

SEQ ID NO: 9404 - protein, 11 aa, Artificial Sequence
  Description of Artificial Sequence: Synthetic peptide
  Seed: RGINDRNFWRG
RCINDRNFWRK

SEQ ID NO: 9405 - protein, 11 aa, Artificial Sequence
  Description of Artificial Sequence: Synthetic peptide
  Seed: RGINDRNFWRG
RCINDRNFWRL

SEQ ID NO: 9406 - protein, 11 aa, Artificial Sequence
  Description of Artificial Sequence: Synthetic peptide
  Seed: RGINDRNFWRG
RCINDRNFWRI

SEQ ID NO: 9407 - protein, 11 aa, Artificial Sequence
  Description of Artificial Sequence: Synthetic peptide
  Seed: RGINDRNFWRG
RCINDRNFWRH

SEQ ID NO: 9408 - protein, 11 aa, Artificial Sequence
  Description of Artificial Sequence: Synthetic peptide
  Seed: RGINDRNFWRG
RDINDRNFWRI

SEQ ID NO: 9409 - protein, 11 aa, Artificial Sequence
  Description of Artificial Sequence: Synthetic peptide
  Seed: RGINDRNFWRG
RDINDRNFWRL

SEQ ID NO: 9410 - protein, 11 aa, Artificial Sequence
  Description of Artificial Sequence: Synthetic peptide
  Seed: RGINDRNFWRG
RDINDRNFWRK

SEQ ID NO: 9411 - protein, 11 aa, Artificial Sequence
  Description of Artificial Sequence: Synthetic peptide
  Seed: RGINDRNFWRG
RDINDRNFWRM

SEQ ID NO: 9412 - protein, 11 aa, Artificial Sequence
  Description of Artificial Sequence: Synthetic peptide
  Seed: RGINDRNFWRG
RDINDRNFWRF

SEQ ID NO: 9413 - protein, 11 aa, Artificial Sequence
  Description of Artificial Sequence: Synthetic peptide
  Seed: RGINDRNFWRG
RDINDRNFWRP

SEQ ID NO: 9414 - protein, 11 aa, Artificial Sequence
  Description of Artificial Sequence: Synthetic peptide
  Seed: RGINDRNFWRG
RDINDRNFWRS

SEQ ID NO: 9415 - protein, 11 aa, Artificial Sequence
  Description of Artificial Sequence: Synthetic peptide
  Seed: RGINDRNFWRG
RDINDRNFWRT

SEQ ID NO: 9416 - protein, 11 aa, Artificial Sequence
  Description of Artificial Sequence: Synthetic peptide
  Seed: RGINDRNFWRG
RDINDRNFWRW

SEQ ID NO: 9417 - protein, 11 aa, Artificial Sequence
  Description of Artificial Sequence: Synthetic peptide
  Seed: RGINDRNFWRG
RDINDRNFWRY

SEQ ID NO: 9418 - protein, 11 aa, Artificial Sequence
  Description of Artificial Sequence: Synthetic peptide
  Seed: RGINDRNFWRG
RDINDRNFWRV

SEQ ID NO: 9419 - protein, 11 aa, Artificial Sequence
  Description of Artificial Sequence: Synthetic peptide
  Seed: RGINDRNFWRG
RCINDRNFWRA

SEQ ID NO: 9420 - protein, 11 aa, Artificial Sequence
  Description of Artificial Sequence: Synthetic peptide
  Seed: RGINDRNFWRG
RCINDRNFWRR

SEQ ID NO: 9421 - protein, 11 aa, Artificial Sequence
  Description of Artificial Sequence: Synthetic peptide
  Seed: RGINDRNFWRG
RCINDRNFWRN

SEQ ID NO: 9422 - protein, 11 aa, Artificial Sequence
  Description of Artificial Sequence: Synthetic peptide
  Seed: RGINDRNFWRG
RCINDRNFWRD

SEQ ID NO: 9423 - protein, 11 aa, Artificial Sequence
  Description of Artificial Sequence: Synthetic peptide
  Seed: RGINDRNFWRG
RCINDRNFWRC

SEQ ID NO: 9424 - protein, 11 aa, Artificial Sequence
  Description of Artificial Sequence: Synthetic peptide
  Seed: RGINDRNFWRG
RCINDRNFWRQ

SEQ ID NO: 9425 - protein, 11 aa, Artificial Sequence
  Description of Artificial Sequence: Synthetic peptide
  Seed: RGINDRNFWRG
RCINDRNFWRE

SEQ ID NO: 9426 - protein, 11 aa, Artificial Sequence
  Description of Artificial Sequence: Synthetic peptide
  Seed: RGINDRNFWRG
RCINDRNFWRG

SEQ ID NO: 9427 - protein, 11 aa, Artificial Sequence
  Description of Artificial Sequence: Synthetic peptide
  Seed: RGINDRNFWRG
RQINDRNFWRM

SEQ ID NO: 9428 - protein, 11 aa, Artificial Sequence
  Description of Artificial Sequence: Synthetic peptide
  Seed: RGINDRNFWRG
RQINDRNFWRP

SEQ ID NO: 9429 - protein, 11 aa, Artificial Sequence
  Description of Artificial Sequence: Synthetic peptide
  Seed: RGINDRNFWRG
RDINDRNFWRG

SEQ ID NO: 9430 - protein, 11 aa, Artificial Sequence
  Description of Artificial Sequence: Synthetic peptide
  Seed: RGINDRNFWRG
RGINDRNFWRI

SEQ ID NO: 9431 - protein, 11 aa, Artificial Sequence
  Description of Artificial Sequence: Synthetic peptide
  Seed: RGINDRNFWRG
REINDRNFWRV

SEQ ID NO: 9432 - protein, 11 aa, Artificial Sequence
  Description of Artificial Sequence: Synthetic peptide
  Seed: RGINDRNFWRG
RGINDRNFWRA

SEQ ID NO: 9433 - protein, 11 aa, Artificial Sequence
  Description of Artificial Sequence: Synthetic peptide
  Seed: RGINDRNFWRG
RGINDRNFWRR

SEQ ID NO: 9434 - protein, 11 aa, Artificial Sequence
  Description of Artificial Sequence: Synthetic peptide
  Seed: RGINDRNFWRG
RGINDRNFWRN

SEQ ID NO: 9435 - protein, 11 aa, Artificial Sequence
  Description of Artificial Sequence: Synthetic peptide
  Seed: RGINDRNFWRG
RGINDRNFWRD

SEQ ID NO: 9436 - protein, 11 aa, Artificial Sequence
  Description of Artificial Sequence: Synthetic peptide
  Seed: RGINDRNFWRG
RGINDRNFWRC

SEQ ID NO: 9437 - protein, 11 aa, Artificial Sequence
  Description of Artificial Sequence: Synthetic peptide
  Seed: RGINDRNFWRG
RGINDRNFWRQ

SEQ ID NO: 9438 - protein, 11 aa, Artificial Sequence
  Description of Artificial Sequence: Synthetic peptide
  Seed: RGINDRNFWRG
RGINDRNFWRE

SEQ ID NO: 9439 - protein, 11 aa, Artificial Sequence
  Description of Artificial Sequence: Synthetic peptide
  Seed: RGINDRNFWRG
RGINDRNFWRH

SEQ ID NO: 9440 - protein, 11 aa, Artificial Sequence
  Description of Artificial Sequence: Synthetic peptide
  Seed: RGINDRNFWRG
RGINDRNFWRL

SEQ ID NO: 9441 - protein, 11 aa, Artificial Sequence
  Description of Artificial Sequence: Synthetic peptide
  Seed: RGINDRNFWRG
RQINDRNFWRS

SEQ ID NO: 9442 - protein, 11 aa, Artificial Sequence
  Description of Artificial Sequence: Synthetic peptide
  Seed: RGINDRNFWRG
RGINDRNFWRK

SEQ ID NO: 9443 - protein, 11 aa, Artificial Sequence
  Description of Artificial Sequence: Synthetic peptide
  Seed: RGINDRNFWRG
RGINDRNFWRM

SEQ ID NO: 9444 - protein, 11 aa, Artificial Sequence
  Description of Artificial Sequence: Synthetic peptide
  Seed: RGINDRNFWRG
RGINDRNFWRF

SEQ ID NO: 9445 - protein, 11 aa, Artificial Sequence
  Description of Artificial Sequence: Synthetic peptide
  Seed: RGINDRNFWRG
RGINDRNFWRP

SEQ ID NO: 9446 - protein, 11 aa, Artificial Sequence
  Description of Artificial Sequence: Synthetic peptide
  Seed: RGINDRNFWRG
RGINDRNFWRS

SEQ ID NO: 9447 - protein, 11 aa, Artificial Sequence
  Description of Artificial Sequence: Synthetic peptide
  Seed: RGINDRNFWRG
RGINDRNFWRT

SEQ ID NO: 9448 - protein, 11 aa, Artificial Sequence
  Description of Artificial Sequence: Synthetic peptide
  Seed: RGINDRNFWRG
RGINDRNFWRW

SEQ ID NO: 9449 - protein, 11 aa, Artificial Sequence
  Description of Artificial Sequence: Synthetic peptide
  Seed: RGINDRNFWRG
RGINDRNFWRY

SEQ ID NO: 9450 - protein, 11 aa, Artificial Sequence
  Description of Artificial Sequence: Synthetic peptide
  Seed: RGINDRNFWRG
RGINDRNFWRV

SEQ ID NO: 9451 - protein, 11 aa, Artificial Sequence
  Description of Artificial Sequence: Synthetic peptide
  Seed: RGINDRNFWRG
REINDRNFWRY

SEQ ID NO: 9452 - protein, 11 aa, Artificial Sequence
  Description of Artificial Sequence: Synthetic peptide
  Seed: RGINDRNFWRG
REINDRNFWRW

SEQ ID NO: 9453 - protein, 11 aa, Artificial Sequence
  Description of Artificial Sequence: Synthetic peptide
  Seed: RGINDRNFWRG
REINDRNFWRT

SEQ ID NO: 9454 - protein, 11 aa, Artificial Sequence
  Description of Artificial Sequence: Synthetic peptide
  Seed: RGINDRNFWRG
REINDRNFWRS

SEQ ID NO: 9455 - protein, 11 aa, Artificial Sequence
  Description of Artificial Sequence: Synthetic peptide
  Seed: RGINDRNFWRG
RQINDRNFWRT

SEQ ID NO: 9456 - protein, 11 aa, Artificial Sequence
  Description of Artificial Sequence: Synthetic peptide
  Seed: RGINDRNFWRG
RQINDRNFWRW

SEQ ID NO: 9457 - protein, 11 aa, Artificial Sequence
  Description of Artificial Sequence: Synthetic peptide
  Seed: RGINDRNFWRG
RQINDRNFWRY

SEQ ID NO: 9458 - protein, 11 aa, Artificial Sequence
  Description of Artificial Sequence: Synthetic peptide
  Seed: RGINDRNFWRG
RQINDRNFWRV

SEQ ID NO: 9459 - protein, 11 aa, Artificial Sequence
  Description of Artificial Sequence: Synthetic peptide
  Seed: RGINDRNFWRG
REINDRNFWRA

SEQ ID NO: 9460 - protein, 11 aa, Artificial Sequence
  Description of Artificial Sequence: Synthetic peptide
  Seed: RGINDRNFWRG
REINDRNFWRR

SEQ ID NO: 9461 - protein, 11 aa, Artificial Sequence
  Description of Artificial Sequence: Synthetic peptide
  Seed: RGINDRNFWRG
REINDRNFWRN

SEQ ID NO: 9462 - protein, 11 aa, Artificial Sequence
  Description of Artificial Sequence: Synthetic peptide
  Seed: RGINDRNFWRG
REINDRNFWRD

SEQ ID NO: 9463 - protein, 11 aa, Artificial Sequence
  Description of Artificial Sequence: Synthetic peptide
  Seed: RGINDRNFWRG
REINDRNFWRC

SEQ ID NO: 9464 - protein, 11 aa, Artificial Sequence
  Description of Artificial Sequence: Synthetic peptide
  Seed: RGINDRNFWRG
REINDRNFWRQ

SEQ ID NO: 9465 - protein, 11 aa, Artificial Sequence
  Description of Artificial Sequence: Synthetic peptide
  Seed: RGINDRNFWRG
REINDRNFWRE

SEQ ID NO: 9466 - protein, 11 aa, Artificial Sequence
  Description of Artificial Sequence: Synthetic peptide
  Seed: RGINDRNFWRG
REINDRNFWRG

SEQ ID NO: 9467 - protein, 11 aa, Artificial Sequence
  Description of Artificial Sequence: Synthetic peptide
  Seed: RGINDRNFWRG
REINDRNFWRH

SEQ ID NO: 9468 - protein, 11 aa, Artificial Sequence
  Description of Artificial Sequence: Synthetic peptide
  Seed: RGINDRNFWRG
REINDRNFWRI

SEQ ID NO: 9469 - protein, 11 aa, Artificial Sequence
  Description of Artificial Sequence: Synthetic peptide
  Seed: RGINDRNFWRG
REINDRNFWRL

SEQ ID NO: 9470 - protein, 11 aa, Artificial Sequence
  Description of Artificial Sequence: Synthetic peptide
  Seed: RGINDRNFWRG
REINDRNFWRK

SEQ ID NO: 9471 - protein, 11 aa, Artificial Sequence
  Description of Artificial Sequence: Synthetic peptide
  Seed: RGINDRNFWRG
REINDRNFWRM

SEQ ID NO: 9472 - protein, 11 aa, Artificial Sequence
  Description of Artificial Sequence: Synthetic peptide
  Seed: RGINDRNFWRG
REINDRNFWRF

SEQ ID NO: 9473 - protein, 11 aa, Artificial Sequence
  Description of Artificial Sequence: Synthetic peptide
  Seed: RGINDRNFWRG
REINDRNFWRP

SEQ ID NO: 9474 - protein, 11 aa, Artificial Sequence
  Description of Artificial Sequence: Synthetic peptide
  Seed: RGINDRNFWRG
RDINDRNFWRH

SEQ ID NO: 9475 - protein, 11 aa, Artificial Sequence
  Description of Artificial Sequence: Synthetic peptide
  Seed: RGINDRNFWRG
RDINDRNFWRE

SEQ ID NO: 9476 - protein, 11 aa, Artificial Sequence
  Description of Artificial Sequence: Synthetic peptide
  Seed: RGINDRNFWRG
RHINDRNFWRR

SEQ ID NO: 9477 - protein, 11 aa, Artificial Sequence
  Description of Artificial Sequence: Synthetic peptide
  Seed: RGINDRNFWRG
RAINDRNFWRG

SEQ ID NO: 9478 - protein, 10 aa, Artificial Sequence
  Description of Artificial Sequence: Synthetic peptide
  Seed: RGINDRNFWR
RVINDRNFWK

SEQ ID NO: 9479 - protein, 10 aa, Artificial Sequence
  Description of Artificial Sequence: Synthetic peptide
  Seed: RGINDRNFWR
RVINDRNFWY

SEQ ID NO: 9480 - protein, 11 aa, Artificial Sequence
  Description of Artificial Sequence: Synthetic peptide
  Seed: RGINDRNFWRG
RAINDRNFWRA

SEQ ID NO: 9481 - protein, 11 aa, Artificial Sequence
  Description of Artificial Sequence: Synthetic peptide
  Seed: RGINDRNFWRG
RAINDRNFWRR

SEQ ID NO: 9482 - protein, 11 aa, Artificial Sequence
  Description of Artificial Sequence: Synthetic peptide
  Seed: RGINDRNFWRG
RAINDRNFWRN

SEQ ID NO: 9483 - protein, 11 aa, Artificial Sequence
  Description of Artificial Sequence: Synthetic peptide
  Seed: RGINDRNFWRG
RAINDRNFWRD

SEQ ID NO: 9484 - protein, 11 aa, Artificial Sequence
  Description of Artificial Sequence: Synthetic peptide
  Seed: RGINDRNFWRG
RAINDRNFWRC

SEQ ID NO: 9485 - protein, 11 aa, Artificial Sequence
  Description of Artificial Sequence: Synthetic peptide
  Seed: RGINDRNFWRG
RAINDRNFWRQ

SEQ ID NO: 9486 - protein, 11 aa, Artificial Sequence
  Description of Artificial Sequence: Synthetic peptide
  Seed: RGINDRNFWRG
RAINDRNFWRE

SEQ ID NO: 9487 - protein, 11 aa, Artificial Sequence
  Description of Artificial Sequence: Synthetic peptide
  Seed: RGINDRNFWRG
RAINDRNFWRH

SEQ ID NO: 9488 - protein, 11 aa, Artificial Sequence
  Description of Artificial Sequence: Synthetic peptide
  Seed: RGINDRNFWRG
RAINDRNFWRV

SEQ ID NO: 9489 - protein, 11 aa, Artificial Sequence
  Description of Artificial Sequence: Synthetic peptide
  Seed: RGINDRNFWRG
RAINDRNFWRI

SEQ ID NO: 9490 - protein, 11 aa, Artificial Sequence
  Description of Artificial Sequence: Synthetic peptide
  Seed: RGINDRNFWRG
RAINDRNFWRL

SEQ ID NO: 9491 - protein, 11 aa, Artificial Sequence
  Description of Artificial Sequence: Synthetic peptide
  Seed: RGINDRNFWRG
RAINDRNFWRK

SEQ ID NO: 9492 - protein, 11 aa, Artificial Sequence
  Description of Artificial Sequence: Synthetic peptide
  Seed: RGINDRNFWRG
RAINDRNFWRM

SEQ ID NO: 9493 - protein, 11 aa, Artificial Sequence
  Description of Artificial Sequence: Synthetic peptide
  Seed: RGINDRNFWRG
RAINDRNFWRF

SEQ ID NO: 9494 - protein, 11 aa, Artificial Sequence
  Description of Artificial Sequence: Synthetic peptide
  Seed: RGINDRNFWRG
RAINDRNFWRP

SEQ ID NO: 9495 - protein, 11 aa, Artificial Sequence
  Description of Artificial Sequence: Synthetic peptide
  Seed: RGINDRNFWRG
RAINDRNFWRS

SEQ ID NO: 9496 - protein, 11 aa, Artificial Sequence
  Description of Artificial Sequence: Synthetic peptide
  Seed: RGINDRNFWRG
RAINDRNFWRT

SEQ ID NO: 9497 - protein, 11 aa, Artificial Sequence
  Description of Artificial Sequence: Synthetic peptide
  Seed: RGINDRNFWRG
RAINDRNFWRW

SEQ ID NO: 9498 - protein, 10 aa, Artificial Sequence
  Description of Artificial Sequence: Synthetic peptide
  Seed: RGINDRNFWR
RVINDRNFWH

SEQ ID NO: 9499 - protein, 10 aa, Artificial Sequence
  Description of Artificial Sequence: Synthetic peptide
  Seed: RGINDRNFWR
RVINDRNFWR

SEQ ID NO: 9500 - protein, 10 aa, Artificial Sequence
  Description of Artificial Sequence: Synthetic peptide
  Seed: RGINDRNFWR
RYINDRNFWY

SEQ ID NO: 9501 - protein, 10 aa, Artificial Sequence
  Description of Artificial Sequence: Synthetic peptide
  Seed: RGINDRNFWR
RYINDRNFWK

SEQ ID NO: 9502 - protein, 10 aa, Artificial Sequence
  Description of Artificial Sequence: Synthetic peptide
  Seed: RGINDRNFWR
RFINDRNFWR

SEQ ID NO: 9503 - protein, 10 aa, Artificial Sequence
  Description of Artificial Sequence: Synthetic peptide
  Seed: RGINDRNFWR
RFINDRNFWH

SEQ ID NO: 9504 - protein, 10 aa, Artificial Sequence
  Description of Artificial Sequence: Synthetic peptide
  Seed: RGINDRNFWR
RFINDRNFWK

SEQ ID NO: 9505 - protein, 10 aa, Artificial Sequence
  Description of Artificial Sequence: Synthetic peptide
  Seed: RGINDRNFWR
RFINDRNFWY

SEQ ID NO: 9506 - protein, 10 aa, Artificial Sequence
  Description of Artificial Sequence: Synthetic peptide
  Seed: RGINDRNFWR
RPINDRNFWR

SEQ ID NO: 9507 - protein, 10 aa, Artificial Sequence
  Description of Artificial Sequence: Synthetic peptide
  Seed: RGINDRNFWR
RPINDRNFWK

SEQ ID NO: 9508 - protein, 10 aa, Artificial Sequence
  Description of Artificial Sequence: Synthetic peptide
  Seed: RGINDRNFWR
RSINDRNFWR

SEQ ID NO: 9509 - protein, 10 aa, Artificial Sequence
  Description of Artificial Sequence: Synthetic peptide
  Seed: RGINDRNFWR
RSINDRNFWH

SEQ ID NO: 9510 - protein, 10 aa, Artificial Sequence
  Description of Artificial Sequence: Synthetic peptide
  Seed: RGINDRNFWR
RSINDRNFWK

SEQ ID NO: 9511 - protein, 10 aa, Artificial Sequence
  Description of Artificial Sequence: Synthetic peptide
  Seed: RGINDRNFWR
RTINDRNFWR

SEQ ID NO: 9512 - protein, 10 aa, Artificial Sequence
  Description of Artificial Sequence: Synthetic peptide
  Seed: RGINDRNFWR
RTINDRNFWH

SEQ ID NO: 9513 - protein, 10 aa, Artificial Sequence
  Description of Artificial Sequence: Synthetic peptide
  Seed: RGINDRNFWR
RTINDRNFWK

SEQ ID NO: 9514 - protein, 10 aa, Artificial Sequence
  Description of Artificial Sequence: Synthetic peptide
  Seed: RGINDRNFWR
RTINDRNFWY

SEQ ID NO: 9515 - protein, 10 aa, Artificial Sequence
  Description of Artificial Sequence: Synthetic peptide
  Seed: RGINDRNFWR
RWINDRNFWR

SEQ ID NO: 9516 - protein, 10 aa, Artificial Sequence
  Description of Artificial Sequence: Synthetic peptide
  Seed: RGINDRNFWR
RWINDRNFWH

SEQ ID NO: 9517 - protein, 10 aa, Artificial Sequence
  Description of Artificial Sequence: Synthetic peptide
  Seed: RGINDRNFWR
RWINDRNFWK

SEQ ID NO: 9518 - protein, 10 aa, Artificial Sequence
  Description of Artificial Sequence: Synthetic peptide
  Seed: RGINDRNFWR
RWINDRNFWY

SEQ ID NO: 9519 - protein, 10 aa, Artificial Sequence
  Description of Artificial Sequence: Synthetic peptide
  Seed: RGINDRNFWR
RYINDRNFWR

SEQ ID NO: 9520 - protein, 10 aa, Artificial Sequence
  Description of Artificial Sequence: Synthetic peptide
  Seed: RGINDRNFWR
RYINDRNFWH

SEQ ID NO: 9521 - protein, 11 aa, Artificial Sequence
  Description of Artificial Sequence: Synthetic peptide
  Seed: RGINDRNFWRG
RAINDRNFWRY

SEQ ID NO: 9522 - protein, 11 aa, Artificial Sequence
  Description of Artificial Sequence: Synthetic peptide
  Seed: RGINDRNFWRG
RRINDRNFWRA

SEQ ID NO: 9523 - protein, 11 aa, Artificial Sequence
  Description of Artificial Sequence: Synthetic peptide
  Seed: RGINDRNFWRG
RDINDRNFWRQ

SEQ ID NO: 9524 - protein, 11 aa, Artificial Sequence
  Description of Artificial Sequence: Synthetic peptide
  Seed: RGINDRNFWRG
RNINDRNFWRP

SEQ ID NO: 9525 - protein, 11 aa, Artificial Sequence
  Description of Artificial Sequence: Synthetic peptide
  Seed: RGINDRNFWRG
RNINDRNFWRQ

SEQ ID NO: 9526 - protein, 11 aa, Artificial Sequence
  Description of Artificial Sequence: Synthetic peptide
  Seed: RGINDRNFWRG
RNINDRNFWRE

SEQ ID NO: 9527 - protein, 11 aa, Artificial Sequence
  Description of Artificial Sequence: Synthetic peptide
  Seed: RGINDRNFWRG
RNINDRNFWRG

SEQ ID NO: 9528 - protein, 11 aa, Artificial Sequence
  Description of Artificial Sequence: Synthetic peptide
  Seed: RGINDRNFWRG
RNINDRNFWRH

SEQ ID NO: 9529 - protein, 11 aa, Artificial Sequence
  Description of Artificial Sequence: Synthetic peptide
  Seed: RGINDRNFWRG
RNINDRNFWRI

SEQ ID NO: 9530 - protein, 11 aa, Artificial Sequence
  Description of Artificial Sequence: Synthetic peptide
  Seed: RGINDRNFWRG
RNINDRNFWRL

SEQ ID NO: 9531 - protein, 11 aa, Artificial Sequence
  Description of Artificial Sequence: Synthetic peptide
  Seed: RGINDRNFWRG
RNINDRNFWRK

SEQ ID NO: 9532 - protein, 11 aa, Artificial Sequence
  Description of Artificial Sequence: Synthetic peptide
  Seed: RGINDRNFWRG
RNINDRNFWRM

SEQ ID NO: 9533 - protein, 11 aa, Artificial Sequence
  Description of Artificial Sequence: Synthetic peptide
  Seed: RGINDRNFWRG
RNINDRNFWRF

SEQ ID NO: 9534 - protein, 11 aa, Artificial Sequence
  Description of Artificial Sequence: Synthetic peptide
  Seed: RGINDRNFWRG
RNINDRNFWRS

SEQ ID NO: 9535 - protein, 11 aa, Artificial Sequence
  Description of Artificial Sequence: Synthetic peptide
  Seed: RGINDRNFWRG
RRINDRNFWRR

SEQ ID NO: 9536 - protein, 11 aa, Artificial Sequence
  Description of Artificial Sequence: Synthetic peptide
  Seed: RGINDRNFWRG
RNINDRNFWRT

SEQ ID NO: 9537 - protein, 11 aa, Artificial Sequence
  Description of Artificial Sequence: Synthetic peptide
  Seed: RGINDRNFWRG
RNINDRNFWRW

SEQ ID NO: 9538 - protein, 11 aa, Artificial Sequence
  Description of Artificial Sequence: Synthetic peptide
  Seed: RGINDRNFWRG
RNINDRNFWRY

SEQ ID NO: 9539 - protein, 11 aa, Artificial Sequence
  Description of Artificial Sequence: Synthetic peptide
  Seed: RGINDRNFWRG
RNINDRNFWRV

SEQ ID NO: 9540 - protein, 11 aa, Artificial Sequence
  Description of Artificial Sequence: Synthetic peptide
  Seed: RGINDRNFWRG
RDINDRNFWRA

SEQ ID NO: 9541 - protein, 11 aa, Artificial Sequence
  Description of Artificial Sequence: Synthetic peptide
  Seed: RGINDRNFWRG
RDINDRNFWRR

SEQ ID NO: 9542 - protein, 11 aa, Artificial Sequence
  Description of Artificial Sequence: Synthetic peptide
  Seed: RGINDRNFWRG
RDINDRNFWRN

SEQ ID NO: 9543 - protein, 11 aa, Artificial Sequence
  Description of Artificial Sequence: Synthetic peptide
  Seed: RGINDRNFWRG
RDINDRNFWRD

SEQ ID NO: 9544 - protein, 11 aa, Artificial Sequence
  Description of Artificial Sequence: Synthetic peptide
  Seed: RGINDRNFWRG
RDINDRNFWRC

SEQ ID NO: 9545 - protein, 11 aa, Artificial Sequence
  Description of Artificial Sequence: Synthetic peptide
  Seed: RGINDRNFWRG
RNINDRNFWRC

SEQ ID NO: 9546 - protein, 11 aa, Artificial Sequence
  Description of Artificial Sequence: Synthetic peptide
  Seed: RGINDRNFWRG
RNINDRNFWRD

SEQ ID NO: 9547 - protein, 11 aa, Artificial Sequence
  Description of Artificial Sequence: Synthetic peptide
  Seed: RGINDRNFWRG
RNINDRNFWRN

SEQ ID NO: 9548 - protein, 11 aa, Artificial Sequence
  Description of Artificial Sequence: Synthetic peptide
  Seed: RGINDRNFWRG
RNINDRNFWRR

SEQ ID NO: 9549 - protein, 11 aa, Artificial Sequence
  Description of Artificial Sequence: Synthetic peptide
  Seed: RGINDRNFWRG
RRINDRNFWRN

SEQ ID NO: 9550 - protein, 11 aa, Artificial Sequence
  Description of Artificial Sequence: Synthetic peptide
  Seed: RGINDRNFWRG
RRINDRNFWRD

SEQ ID NO: 9551 - protein, 11 aa, Artificial Sequence
  Description of Artificial Sequence: Synthetic peptide
  Seed: RGINDRNFWRG
RRINDRNFWRC

SEQ ID NO: 9552 - protein, 11 aa, Artificial Sequence
  Description of Artificial Sequence: Synthetic peptide
  Seed: RGINDRNFWRG
RRINDRNFWRQ

SEQ ID NO: 9553 - protein, 11 aa, Artificial Sequence
  Description of Artificial Sequence: Synthetic peptide
  Seed: RGINDRNFWRG
RRINDRNFWRE

SEQ ID NO: 9554 - protein, 11 aa, Artificial Sequence
  Description of Artificial Sequence: Synthetic peptide
  Seed: RGINDRNFWRG
RRINDRNFWRG

SEQ ID NO: 9555 - protein, 11 aa, Artificial Sequence
  Description of Artificial Sequence: Synthetic peptide
  Seed: RGINDRNFWRG
RRINDRNFWRH

SEQ ID NO: 9556 - protein, 11 aa, Artificial Sequence
  Description of Artificial Sequence: Synthetic peptide
  Seed: RGINDRNFWRG
RRINDRNFWRI

SEQ ID NO: 9557 - protein, 11 aa, Artificial Sequence
  Description of Artificial Sequence: Synthetic peptide
  Seed: RGINDRNFWRG
RRINDRNFWRL

SEQ ID NO: 9558 - protein, 11 aa, Artificial Sequence
  Description of Artificial Sequence: Synthetic peptide
  Seed: RGINDRNFWRG
RRINDRNFWRK

SEQ ID NO: 9559 - protein, 11 aa, Artificial Sequence
  Description of Artificial Sequence: Synthetic peptide
  Seed: RGINDRNFWRG
RRINDRNFWRM

SEQ ID NO: 9560 - protein, 11 aa, Artificial Sequence
  Description of Artificial Sequence: Synthetic peptide
  Seed: RGINDRNFWRG
RRINDRNFWRF

SEQ ID NO: 9561 - protein, 11 aa, Artificial Sequence
  Description of Artificial Sequence: Synthetic peptide
  Seed: RGINDRNFWRG
RRINDRNFWRP

SEQ ID NO: 9562 - protein, 11 aa, Artificial Sequence
  Description of Artificial Sequence: Synthetic peptide
  Seed: RGINDRNFWRG
RRINDRNFWRS

SEQ ID NO: 9563 - protein, 11 aa, Artificial Sequence
  Description of Artificial Sequence: Synthetic peptide
  Seed: RGINDRNFWRG
RRINDRNFWRT

SEQ ID NO: 9564 - protein, 11 aa, Artificial Sequence
  Description of Artificial Sequence: Synthetic peptide
  Seed: RGINDRNFWRG
RRINDRNFWRW

SEQ ID NO: 9565 - protein, 11 aa, Artificial Sequence
  Description of Artificial Sequence: Synthetic peptide
  Seed: RGINDRNFWRG
RRINDRNFWRY

SEQ ID NO: 9566 - protein, 11 aa, Artificial Sequence
  Description of Artificial Sequence: Synthetic peptide
  Seed: RGINDRNFWRG
RRINDRNFWRV

SEQ ID NO: 9567 - protein, 11 aa, Artificial Sequence
  Description of Artificial Sequence: Synthetic peptide
  Seed: RGINDRNFWRG
RNINDRNFWRA

SEQ ID NO: 9568 - protein, 11 aa, Artificial Sequence
  Description of Artificial Sequence: Synthetic peptide
  Seed: RGINDRNFWRG
RHINDRNFWRA

SEQ ID NO: 9569 - protein, 11 aa, Artificial Sequence
  Description of Artificial Sequence: Synthetic peptide
  Seed: RGINDRNFWRG
RHINDRNFWRN

SEQ ID NO: 9570 - protein, 11 aa, Artificial Sequence
  Description of Artificial Sequence: Synthetic peptide
  Seed: RGINDRNFWRG
RWINDRNFWRI

SEQ ID NO: 9571 - protein, 11 aa, Artificial Sequence
  Description of Artificial Sequence: Synthetic peptide
  Seed: RGINDRNFWRG
RPINDRNFWRL

SEQ ID NO: 9572 - protein, 11 aa, Artificial Sequence
  Description of Artificial Sequence: Synthetic peptide
  Seed: RGINDRNFWRG
RPINDRNFWRR

SEQ ID NO: 9573 - protein, 11 aa, Artificial Sequence
  Description of Artificial Sequence: Synthetic peptide
  Seed: RGINDRNFWRG
RPINDRNFWRN

SEQ ID NO: 9574 - protein, 11 aa, Artificial Sequence
  Description of Artificial Sequence: Synthetic peptide
  Seed: RGINDRNFWRG
RPINDRNFWRD

SEQ ID NO: 9575 - protein, 11 aa, Artificial Sequence
  Description of Artificial Sequence: Synthetic peptide
  Seed: RGINDRNFWRG
RPINDRNFWRC

SEQ ID NO: 9576 - protein, 11 aa, Artificial Sequence
  Description of Artificial Sequence: Synthetic peptide
  Seed: RGINDRNFWRG
RPINDRNFWRQ

SEQ ID NO: 9577 - protein, 11 aa, Artificial Sequence
  Description of Artificial Sequence: Synthetic peptide
  Seed: RGINDRNFWRG
RPINDRNFWRE

SEQ ID NO: 9578 - protein, 11 aa, Artificial Sequence
  Description of Artificial Sequence: Synthetic peptide
  Seed: RGINDRNFWRG
RPINDRNFWRG

SEQ ID NO: 9579 - protein, 11 aa, Artificial Sequence
  Description of Artificial Sequence: Synthetic peptide
  Seed: RGINDRNFWRG
RPINDRNFWRH

SEQ ID NO: 9580 - protein, 11 aa, Artificial Sequence
  Description of Artificial Sequence: Synthetic peptide
  Seed: RGINDRNFWRG
RPINDRNFWRI

SEQ ID NO: 9581 - protein, 11 aa, Artificial Sequence
  Description of Artificial Sequence: Synthetic peptide
  Seed: RGINDRNFWRG
RPINDRNFWRK

SEQ ID NO: 9582 - protein, 11 aa, Artificial Sequence
  Description of Artificial Sequence: Synthetic peptide
  Seed: RGINDRNFWRG
RSINDRNFWRN

SEQ ID NO: 9583 - protein, 11 aa, Artificial Sequence
  Description of Artificial Sequence: Synthetic peptide
  Seed: RGINDRNFWRG
RPINDRNFWRM

SEQ ID NO: 9584 - protein, 11 aa, Artificial Sequence
  Description of Artificial Sequence: Synthetic peptide
  Seed: RGINDRNFWRG
RPINDRNFWRF

SEQ ID NO: 9585 - protein, 11 aa, Artificial Sequence
  Description of Artificial Sequence: Synthetic peptide
  Seed: RGINDRNFWRG
RPINDRNFWRP

SEQ ID NO: 9586 - protein, 11 aa, Artificial Sequence
  Description of Artificial Sequence: Synthetic peptide
  Seed: RGINDRNFWRG
RPINDRNFWRS

SEQ ID NO: 9587 - protein, 11 aa, Artificial Sequence
  Description of Artificial Sequence: Synthetic peptide
  Seed: RGINDRNFWRG
RPINDRNFWRT

SEQ ID NO: 9588 - protein, 11 aa, Artificial Sequence
  Description of Artificial Sequence: Synthetic peptide
  Seed: RGINDRNFWRG
RPINDRNFWRW

SEQ ID NO: 9589 - protein, 11 aa, Artificial Sequence
  Description of Artificial Sequence: Synthetic peptide
  Seed: RGINDRNFWRG
RPINDRNFWRY

SEQ ID NO: 9590 - protein, 11 aa, Artificial Sequence
  Description of Artificial Sequence: Synthetic peptide
  Seed: RGINDRNFWRG
RPINDRNFWRV

SEQ ID NO: 9591 - protein, 11 aa, Artificial Sequence
  Description of Artificial Sequence: Synthetic peptide
  Seed: RGINDRNFWRG
RSINDRNFWRA

SEQ ID NO: 9592 - protein, 11 aa, Artificial Sequence
  Description of Artificial Sequence: Synthetic peptide
  Seed: RGINDRNFWRG
RPINDRNFWRA

SEQ ID NO: 9593 - protein, 11 aa, Artificial Sequence
  Description of Artificial Sequence: Synthetic peptide
  Seed: RGINDRNFWRG
RFINDRNFWRV

SEQ ID NO: 9594 - protein, 11 aa, Artificial Sequence
  Description of Artificial Sequence: Synthetic peptide
  Seed: RGINDRNFWRG
RFINDRNFWRY

SEQ ID NO: 9595 - protein, 11 aa, Artificial Sequence
  Description of Artificial Sequence: Synthetic peptide
  Seed: RGINDRNFWRG
RFINDRNFWRW

SEQ ID NO: 9596 - protein, 11 aa, Artificial Sequence
  Description of Artificial Sequence: Synthetic peptide
  Seed: RGINDRNFWRG
RMINDRNFWRY

SEQ ID NO: 9597 - protein, 11 aa, Artificial Sequence
  Description of Artificial Sequence: Synthetic peptide
  Seed: RGINDRNFWRG
RMINDRNFWRV

SEQ ID NO: 9598 - protein, 11 aa, Artificial Sequence
  Description of Artificial Sequence: Synthetic peptide
  Seed: RGINDRNFWRG
RFINDRNFWRA

SEQ ID NO: 9599 - protein, 11 aa, Artificial Sequence
  Description of Artificial Sequence: Synthetic peptide
  Seed: RGINDRNFWRG
RFINDRNFWRR

SEQ ID NO: 9600 - protein, 11 aa, Artificial Sequence
  Description of Artificial Sequence: Synthetic peptide
  Seed: RGINDRNFWRG
RFINDRNFWRN

SEQ ID NO: 9601 - protein, 11 aa, Artificial Sequence
  Description of Artificial Sequence: Synthetic peptide
  Seed: RGINDRNFWRG
RFINDRNFWRD

SEQ ID NO: 9602 - protein, 11 aa, Artificial Sequence
  Description of Artificial Sequence: Synthetic peptide
  Seed: RGINDRNFWRG
RFINDRNFWRC

SEQ ID NO: 9603 - protein, 11 aa, Artificial Sequence
  Description of Artificial Sequence: Synthetic peptide
  Seed: RGINDRNFWRG
RFINDRNFWRQ

SEQ ID NO: 9604 - protein, 11 aa, Artificial Sequence
  Description of Artificial Sequence: Synthetic peptide
  Seed: RGINDRNFWRG
RFINDRNFWRE

SEQ ID NO: 9605 - protein, 11 aa, Artificial Sequence
  Description of Artificial Sequence: Synthetic peptide
  Seed: RGINDRNFWRG
RFINDRNFWRG

SEQ ID NO: 9606 - protein, 11 aa, Artificial Sequence
  Description of Artificial Sequence: Synthetic peptide
  Seed: RGINDRNFWRG
RFINDRNFWRH

SEQ ID NO: 9607 - protein, 11 aa, Artificial Sequence
  Description of Artificial Sequence: Synthetic peptide
  Seed: RGINDRNFWRG
RFINDRNFWRI

SEQ ID NO: 9608 - protein, 11 aa, Artificial Sequence
  Description of Artificial Sequence: Synthetic peptide
  Seed: RGINDRNFWRG
RFINDRNFWRL

SEQ ID NO: 9609 - protein, 11 aa, Artificial Sequence
  Description of Artificial Sequence: Synthetic peptide
  Seed: RGINDRNFWRG
RFINDRNFWRK

SEQ ID NO: 9610 - protein, 11 aa, Artificial Sequence
  Description of Artificial Sequence: Synthetic peptide
  Seed: RGINDRNFWRG
RFINDRNFWRM

SEQ ID NO: 9611 - protein, 11 aa, Artificial Sequence
  Description of Artificial Sequence: Synthetic peptide
  Seed: RGINDRNFWRG
RFINDRNFWRF

SEQ ID NO: 9612 - protein, 11 aa, Artificial Sequence
  Description of Artificial Sequence: Synthetic peptide
  Seed: RGINDRNFWRG
RFINDRNFWRP

SEQ ID NO: 9613 - protein, 11 aa, Artificial Sequence
  Description of Artificial Sequence: Synthetic peptide
  Seed: RGINDRNFWRG
RFINDRNFWRS

SEQ ID NO: 9614 - protein, 11 aa, Artificial Sequence
  Description of Artificial Sequence: Synthetic peptide
  Seed: RGINDRNFWRG
RFINDRNFWRT

SEQ ID NO: 9615 - protein, 11 aa, Artificial Sequence
  Description of Artificial Sequence: Synthetic peptide
  Seed: RGINDRNFWRG
RSINDRNFWRR

SEQ ID NO: 9616 - protein, 11 aa, Artificial Sequence
  Description of Artificial Sequence: Synthetic peptide
  Seed: RGINDRNFWRG
RSINDRNFWRD

SEQ ID NO: 9617 - protein, 11 aa, Artificial Sequence
  Description of Artificial Sequence: Synthetic peptide
  Seed: RGINDRNFWRG
RMINDRNFWRT

SEQ ID NO: 9618 - protein, 11 aa, Artificial Sequence
  Description of Artificial Sequence: Synthetic peptide
  Seed: RGINDRNFWRG
RTINDRNFWRW

SEQ ID NO: 9619 - protein, 11 aa, Artificial Sequence
  Description of Artificial Sequence: Synthetic peptide
  Seed: RGINDRNFWRG
RTINDRNFWRH

SEQ ID NO: 9620 - protein, 11 aa, Artificial Sequence
  Description of Artificial Sequence: Synthetic peptide
  Seed: RGINDRNFWRG
RTINDRNFWRI

SEQ ID NO: 9621 - protein, 11 aa, Artificial Sequence
  Description of Artificial Sequence: Synthetic peptide
  Seed: RGINDRNFWRG
RTINDRNFWRL

SEQ ID NO: 9622 - protein, 11 aa, Artificial Sequence
  Description of Artificial Sequence: Synthetic peptide
  Seed: RGINDRNFWRG
RTINDRNFWRK

SEQ ID NO: 9623 - protein, 11 aa, Artificial Sequence
  Description of Artificial Sequence: Synthetic peptide
  Seed: RGINDRNFWRG
RTINDRNFWRM

SEQ ID NO: 9624 - protein, 11 aa, Artificial Sequence
  Description of Artificial Sequence: Synthetic peptide
  Seed: RGINDRNFWRG
RTINDRNFWRF

SEQ ID NO: 9625 - protein, 11 aa, Artificial Sequence
  Description of Artificial Sequence: Synthetic peptide
  Seed: RGINDRNFWRG
RTINDRNFWRP

SEQ ID NO: 9626 - protein, 11 aa, Artificial Sequence
  Description of Artificial Sequence: Synthetic peptide
  Seed: RGINDRNFWRG
RTINDRNFWRS

SEQ ID NO: 9627 - protein, 11 aa, Artificial Sequence
  Description of Artificial Sequence: Synthetic peptide
  Seed: RGINDRNFWRG
RTINDRNFWRT

SEQ ID NO: 9628 - protein, 11 aa, Artificial Sequence
  Description of Artificial Sequence: Synthetic peptide
  Seed: RGINDRNFWRG
RTINDRNFWRY

SEQ ID NO: 9629 - protein, 11 aa, Artificial Sequence
  Description of Artificial Sequence: Synthetic peptide
  Seed: RGINDRNFWRG
RSINDRNFWRC

SEQ ID NO: 9630 - protein, 11 aa, Artificial Sequence
  Description of Artificial Sequence: Synthetic peptide
  Seed: RGINDRNFWRG
RTINDRNFWRV

SEQ ID NO: 9631 - protein, 11 aa, Artificial Sequence
  Description of Artificial Sequence: Synthetic peptide
  Seed: RGINDRNFWRG
RWINDRNFWRA

SEQ ID NO: 9632 - protein, 11 aa, Artificial Sequence
  Description of Artificial Sequence: Synthetic peptide
  Seed: RGINDRNFWRG
RWINDRNFWRR

SEQ ID NO: 9633 - protein, 11 aa, Artificial Sequence
  Description of Artificial Sequence: Synthetic peptide
  Seed: RGINDRNFWRG
RWINDRNFWRN

SEQ ID NO: 9634 - protein, 11 aa, Artificial Sequence
  Description of Artificial Sequence: Synthetic peptide
  Seed: RGINDRNFWRG
RWINDRNFWRD

SEQ ID NO: 9635 - protein, 11 aa, Artificial Sequence
  Description of Artificial Sequence: Synthetic peptide
  Seed: RGINDRNFWRG
RWINDRNFWRC

SEQ ID NO: 9636 - protein, 11 aa, Artificial Sequence
  Description of Artificial Sequence: Synthetic peptide
  Seed: RGINDRNFWRG
RWINDRNFWRQ

SEQ ID NO: 9637 - protein, 11 aa, Artificial Sequence
  Description of Artificial Sequence: Synthetic peptide
  Seed: RGINDRNFWRG
RWINDRNFWRE

SEQ ID NO: 9638 - protein, 11 aa, Artificial Sequence
  Description of Artificial Sequence: Synthetic peptide
  Seed: RGINDRNFWRG
RWINDRNFWRG

SEQ ID NO: 9639 - protein, 11 aa, Artificial Sequence
  Description of Artificial Sequence: Synthetic peptide
  Seed: RGINDRNFWRG
RTINDRNFWRG

SEQ ID NO: 9640 - protein, 11 aa, Artificial Sequence
  Description of Artificial Sequence: Synthetic peptide
  Seed: RGINDRNFWRG
RTINDRNFWRE

SEQ ID NO: 9641 - protein, 11 aa, Artificial Sequence
  Description of Artificial Sequence: Synthetic peptide
  Seed: RGINDRNFWRG
RTINDRNFWRQ

SEQ ID NO: 9642 - protein, 11 aa, Artificial Sequence
  Description of Artificial Sequence: Synthetic peptide
  Seed: RGINDRNFWRG
RTINDRNFWRC

SEQ ID NO: 9643 - protein, 11 aa, Artificial Sequence
  Description of Artificial Sequence: Synthetic peptide
  Seed: RGINDRNFWRG
RSINDRNFWRQ

SEQ ID NO: 9644 - protein, 11 aa, Artificial Sequence
  Description of Artificial Sequence: Synthetic peptide
  Seed: RGINDRNFWRG
RSINDRNFWRE

SEQ ID NO: 9645 - protein, 11 aa, Artificial Sequence
  Description of Artificial Sequence: Synthetic peptide
  Seed: RGINDRNFWRG
RSINDRNFWRG

SEQ ID NO: 9646 - protein, 11 aa, Artificial Sequence
  Description of Artificial Sequence: Synthetic peptide
  Seed: RGINDRNFWRG
RSINDRNFWRH

SEQ ID NO: 9647 - protein, 11 aa, Artificial Sequence
  Description of Artificial Sequence: Synthetic peptide
  Seed: RGINDRNFWRG
RSINDRNFWRI

SEQ ID NO: 9648 - protein, 11 aa, Artificial Sequence
  Description of Artificial Sequence: Synthetic peptide
  Seed: RGINDRNFWRG
RSINDRNFWRL

SEQ ID NO: 9649 - protein, 11 aa, Artificial Sequence
  Description of Artificial Sequence: Synthetic peptide
  Seed: RGINDRNFWRG
RSINDRNFWRK

SEQ ID NO: 9650 - protein, 11 aa, Artificial Sequence
  Description of Artificial Sequence: Synthetic peptide
  Seed: RGINDRNFWRG
RSINDRNFWRM

SEQ ID NO: 9651 - protein, 11 aa, Artificial Sequence
  Description of Artificial Sequence: Synthetic peptide
  Seed: RGINDRNFWRG
RSINDRNFWRF

SEQ ID NO: 9652 - protein, 11 aa, Artificial Sequence
  Description of Artificial Sequence: Synthetic peptide
  Seed: RGINDRNFWRG
RSINDRNFWRP

SEQ ID NO: 9653 - protein, 11 aa, Artificial Sequence
  Description of Artificial Sequence: Synthetic peptide
  Seed: RGINDRNFWRG
RSINDRNFWRS

SEQ ID NO: 9654 - protein, 11 aa, Artificial Sequence
  Description of Artificial Sequence: Synthetic peptide
  Seed: RGINDRNFWRG
RSINDRNFWRT

SEQ ID NO: 9655 - protein, 11 aa, Artificial Sequence
  Description of Artificial Sequence: Synthetic peptide
  Seed: RGINDRNFWRG
RSINDRNFWRW

SEQ ID NO: 9656 - protein, 11 aa, Artificial Sequence
  Description of Artificial Sequence: Synthetic peptide
  Seed: RGINDRNFWRG
RSINDRNFWRY

SEQ ID NO: 9657 - protein, 11 aa, Artificial Sequence
  Description of Artificial Sequence: Synthetic peptide
  Seed: RGINDRNFWRG
RSINDRNFWRV

SEQ ID NO: 9658 - protein, 11 aa, Artificial Sequence
  Description of Artificial Sequence: Synthetic peptide
  Seed: RGINDRNFWRG
RTINDRNFWRA

SEQ ID NO: 9659 - protein, 11 aa, Artificial Sequence
  Description of Artificial Sequence: Synthetic peptide
  Seed: RGINDRNFWRG
RTINDRNFWRR

SEQ ID NO: 9660 - protein, 11 aa, Artificial Sequence
  Description of Artificial Sequence: Synthetic peptide
  Seed: RGINDRNFWRG
RTINDRNFWRN

SEQ ID NO: 9661 - protein, 11 aa, Artificial Sequence
  Description of Artificial Sequence: Synthetic peptide
  Seed: RGINDRNFWRG
RTINDRNFWRD

SEQ ID NO: 9662 - protein, 11 aa, Artificial Sequence
  Description of Artificial Sequence: Synthetic peptide
  Seed: RGINDRNFWRG
RMINDRNFWRW

SEQ ID NO: 9663 - protein, 11 aa, Artificial Sequence
  Description of Artificial Sequence: Synthetic peptide
  Seed: RGINDRNFWRG
RMINDRNFWRS

SEQ ID NO: 9664 - protein, 11 aa, Artificial Sequence
  Description of Artificial Sequence: Synthetic peptide
  Seed: RGINDRNFWRG
RHINDRNFWRD

SEQ ID NO: 9665 - protein, 11 aa, Artificial Sequence
  Description of Artificial Sequence: Synthetic peptide
  Seed: RGINDRNFWRG
RIINDRNFWRT

SEQ ID NO: 9666 - protein, 11 aa, Artificial Sequence
  Description of Artificial Sequence: Synthetic peptide
  Seed: RGINDRNFWRG
RIINDRNFWRG

SEQ ID NO: 9667 - protein, 11 aa, Artificial Sequence
  Description of Artificial Sequence: Synthetic peptide
  Seed: RGINDRNFWRG
RIINDRNFWRH

SEQ ID NO: 9668 - protein, 11 aa, Artificial Sequence
  Description of Artificial Sequence: Synthetic peptide
  Seed: RGINDRNFWRG
RIINDRNFWRI

SEQ ID NO: 9669 - protein, 11 aa, Artificial Sequence
  Description of Artificial Sequence: Synthetic peptide
  Seed: RGINDRNFWRG
RIINDRNFWRL

SEQ ID NO: 9670 - protein, 11 aa, Artificial Sequence
  Description of Artificial Sequence: Synthetic peptide
  Seed: RGINDRNFWRG
RIINDRNFWRK

SEQ ID NO: 9671 - protein, 11 aa, Artificial Sequence
  Description of Artificial Sequence: Synthetic peptide
  Seed: RGINDRNFWRG
RIINDRNFWRM

SEQ ID NO: 9672 - protein, 11 aa, Artificial Sequence
  Description of Artificial Sequence: Synthetic peptide
  Seed: RGINDRNFWRG
RIINDRNFWRF

SEQ ID NO: 9673 - protein, 11 aa, Artificial Sequence
  Description of Artificial Sequence: Synthetic peptide
  Seed: RGINDRNFWRG
RIINDRNFWRP

SEQ ID NO: 9674 - protein, 11 aa, Artificial Sequence
  Description of Artificial Sequence: Synthetic peptide
  Seed: RGINDRNFWRG
RIINDRNFWRS

SEQ ID NO: 9675 - protein, 11 aa, Artificial Sequence
  Description of Artificial Sequence: Synthetic peptide
  Seed: RGINDRNFWRG
RIINDRNFWRW

SEQ ID NO: 9676 - protein, 11 aa, Artificial Sequence
  Description of Artificial Sequence: Synthetic peptide
  Seed: RGINDRNFWRG
RLINDRNFWRH

SEQ ID NO: 9677 - protein, 11 aa, Artificial Sequence
  Description of Artificial Sequence: Synthetic peptide
  Seed: RGINDRNFWRG
RIINDRNFWRY

SEQ ID NO: 9678 - protein, 11 aa, Artificial Sequence
  Description of Artificial Sequence: Synthetic peptide
  Seed: RGINDRNFWRG
RIINDRNFWRV

SEQ ID NO: 9679 - protein, 11 aa, Artificial Sequence
  Description of Artificial Sequence: Synthetic peptide
  Seed: RGINDRNFWRG
RLINDRNFWRA

SEQ ID NO: 9680 - protein, 11 aa, Artificial Sequence
  Description of Artificial Sequence: Synthetic peptide
  Seed: RGINDRNFWRG
RLINDRNFWRR

SEQ ID NO: 9681 - protein, 11 aa, Artificial Sequence
  Description of Artificial Sequence: Synthetic peptide
  Seed: RGINDRNFWRG
RLINDRNFWRN

SEQ ID NO: 9682 - protein, 11 aa, Artificial Sequence
  Description of Artificial Sequence: Synthetic peptide
  Seed: RGINDRNFWRG
RLINDRNFWRD

SEQ ID NO: 9683 - protein, 11 aa, Artificial Sequence
  Description of Artificial Sequence: Synthetic peptide
  Seed: RGINDRNFWRG
RLINDRNFWRC

SEQ ID NO: 9684 - protein, 11 aa, Artificial Sequence
  Description of Artificial Sequence: Synthetic peptide
  Seed: RGINDRNFWRG
RLINDRNFWRQ

SEQ ID NO: 9685 - protein, 11 aa, Artificial Sequence
  Description of Artificial Sequence: Synthetic peptide
  Seed: RGINDRNFWRG
RLINDRNFWRE

SEQ ID NO: 9686 - protein, 11 aa, Artificial Sequence
  Description of Artificial Sequence: Synthetic peptide
  Seed: RGINDRNFWRG
RIINDRNFWRE

SEQ ID NO: 9687 - protein, 11 aa, Artificial Sequence
  Description of Artificial Sequence: Synthetic peptide
  Seed: RGINDRNFWRG
RIINDRNFWRQ

SEQ ID NO: 9688 - protein, 11 aa, Artificial Sequence
  Description of Artificial Sequence: Synthetic peptide
  Seed: RGINDRNFWRG
RIINDRNFWRC

SEQ ID NO: 9689 - protein, 11 aa, Artificial Sequence
  Description of Artificial Sequence: Synthetic peptide
  Seed: RGINDRNFWRG
RIINDRNFWRD

SEQ ID NO: 9690 - protein, 11 aa, Artificial Sequence
  Description of Artificial Sequence: Synthetic peptide
  Seed: RGINDRNFWRG
RHINDRNFWRC

SEQ ID NO: 9691 - protein, 11 aa, Artificial Sequence
  Description of Artificial Sequence: Synthetic peptide
  Seed: RGINDRNFWRG
RHINDRNFWRQ

SEQ ID NO: 9692 - protein, 11 aa, Artificial Sequence
  Description of Artificial Sequence: Synthetic peptide
  Seed: RGINDRNFWRG
RHINDRNFWRE

SEQ ID NO: 9693 - protein, 11 aa, Artificial Sequence
  Description of Artificial Sequence: Synthetic peptide
  Seed: RGINDRNFWRG
RHINDRNFWRG

SEQ ID NO: 9694 - protein, 11 aa, Artificial Sequence
  Description of Artificial Sequence: Synthetic peptide
  Seed: RGINDRNFWRG
RHINDRNFWRH

SEQ ID NO: 9695 - protein, 11 aa, Artificial Sequence
  Description of Artificial Sequence: Synthetic peptide
  Seed: RGINDRNFWRG
RHINDRNFWRI

SEQ ID NO: 9696 - protein, 11 aa, Artificial Sequence
  Description of Artificial Sequence: Synthetic peptide
  Seed: RGINDRNFWRG
RHINDRNFWRL

SEQ ID NO: 9697 - protein, 11 aa, Artificial Sequence
  Description of Artificial Sequence: Synthetic peptide
  Seed: RGINDRNFWRG
RHINDRNFWRK

SEQ ID NO: 9698 - protein, 11 aa, Artificial Sequence
  Description of Artificial Sequence: Synthetic peptide
  Seed: RGINDRNFWRG
RHINDRNFWRM

SEQ ID NO: 9699 - protein, 11 aa, Artificial Sequence
  Description of Artificial Sequence: Synthetic peptide
  Seed: RGINDRNFWRG
RHINDRNFWRF

SEQ ID NO: 9700 - protein, 11 aa, Artificial Sequence
  Description of Artificial Sequence: Synthetic peptide
  Seed: RGINDRNFWRG
RHINDRNFWRP

SEQ ID NO: 9701 - protein, 11 aa, Artificial Sequence
  Description of Artificial Sequence: Synthetic peptide
  Seed: RGINDRNFWRG
RHINDRNFWRS

SEQ ID NO: 9702 - protein, 11 aa, Artificial Sequence
  Description of Artificial Sequence: Synthetic peptide
  Seed: RGINDRNFWRG
RHINDRNFWRT

SEQ ID NO: 9703 - protein, 11 aa, Artificial Sequence
  Description of Artificial Sequence: Synthetic peptide
  Seed: RGINDRNFWRG
RHINDRNFWRW

SEQ ID NO: 9704 - protein, 11 aa, Artificial Sequence
  Description of Artificial Sequence: Synthetic peptide
  Seed: RGINDRNFWRG
RHINDRNFWRY

SEQ ID NO: 9705 - protein, 11 aa, Artificial Sequence
  Description of Artificial Sequence: Synthetic peptide
  Seed: RGINDRNFWRG
RHINDRNFWRV

SEQ ID NO: 9706 - protein, 11 aa, Artificial Sequence
  Description of Artificial Sequence: Synthetic peptide
  Seed: RGINDRNFWRG
RIINDRNFWRA

SEQ ID NO: 9707 - protein, 11 aa, Artificial Sequence
  Description of Artificial Sequence: Synthetic peptide
  Seed: RGINDRNFWRG
RIINDRNFWRR

SEQ ID NO: 9708 - protein, 11 aa, Artificial Sequence
  Description of Artificial Sequence: Synthetic peptide
  Seed: RGINDRNFWRG
RIINDRNFWRN

SEQ ID NO: 9709 - protein, 11 aa, Artificial Sequence
  Description of Artificial Sequence: Synthetic peptide
  Seed: RGINDRNFWRG
RLINDRNFWRG

SEQ ID NO: 9710 - protein, 11 aa, Artificial Sequence
  Description of Artificial Sequence: Synthetic peptide
  Seed: RGINDRNFWRG
RLINDRNFWRI

SEQ ID NO: 9711 - protein, 11 aa, Artificial Sequence
  Description of Artificial Sequence: Synthetic peptide
  Seed: RGINDRNFWRG
RMINDRNFWRP

SEQ ID NO: 9712 - protein, 11 aa, Artificial Sequence
  Description of Artificial Sequence: Synthetic peptide
  Seed: RGINDRNFWRG
RMINDRNFWRD

SEQ ID NO: 9713 - protein, 11 aa, Artificial Sequence
  Description of Artificial Sequence: Synthetic peptide
  Seed: RGINDRNFWRG
RKINDRNFWRP

SEQ ID NO: 9714 - protein, 11 aa, Artificial Sequence
  Description of Artificial Sequence: Synthetic peptide
  Seed: RGINDRNFWRG
RKINDRNFWRS

SEQ ID NO: 9715 - protein, 11 aa, Artificial Sequence
  Description of Artificial Sequence: Synthetic peptide
  Seed: RGINDRNFWRG
RKINDRNFWRT

SEQ ID NO: 9716 - protein, 11 aa, Artificial Sequence
  Description of Artificial Sequence: Synthetic peptide
  Seed: RGINDRNFWRG
RKINDRNFWRW

SEQ ID NO: 9717 - protein, 11 aa, Artificial Sequence
  Description of Artificial Sequence: Synthetic peptide
  Seed: RGINDRNFWRG
RKINDRNFWRY

SEQ ID NO: 9718 - protein, 11 aa, Artificial Sequence
  Description of Artificial Sequence: Synthetic peptide
  Seed: RGINDRNFWRG
RKINDRNFWRV

SEQ ID NO: 9719 - protein, 11 aa, Artificial Sequence
  Description of Artificial Sequence: Synthetic peptide
  Seed: RGINDRNFWRG
RMINDRNFWRA

SEQ ID NO: 9720 - protein, 11 aa, Artificial Sequence
  Description of Artificial Sequence: Synthetic peptide
  Seed: RGINDRNFWRG
RMINDRNFWRR

SEQ ID NO: 9721 - protein, 11 aa, Artificial Sequence
  Description of Artificial Sequence: Synthetic peptide
  Seed: RGINDRNFWRG
RMINDRNFWRN

SEQ ID NO: 9722 - protein, 11 aa, Artificial Sequence
  Description of Artificial Sequence: Synthetic peptide
  Seed: RGINDRNFWRG
RMINDRNFWRC

SEQ ID NO: 9723 - protein, 11 aa, Artificial Sequence
  Description of Artificial Sequence: Synthetic peptide
  Seed: RGINDRNFWRG
RLINDRNFWRL

SEQ ID NO: 9724 - protein, 11 aa, Artificial Sequence
  Description of Artificial Sequence: Synthetic peptide
  Seed: RGINDRNFWRG
RMINDRNFWRQ

SEQ ID NO: 9725 - protein, 11 aa, Artificial Sequence
  Description of Artificial Sequence: Synthetic peptide
  Seed: RGINDRNFWRG
RMINDRNFWRE

SEQ ID NO: 9726 - protein, 11 aa, Artificial Sequence
  Description of Artificial Sequence: Synthetic peptide
  Seed: RGINDRNFWRG
RMINDRNFWRG

SEQ ID NO: 9727 - protein, 11 aa, Artificial Sequence
  Description of Artificial Sequence: Synthetic peptide
  Seed: RGINDRNFWRG
RMINDRNFWRH

SEQ ID NO: 9728 - protein, 11 aa, Artificial Sequence
  Description of Artificial Sequence: Synthetic peptide
  Seed: RGINDRNFWRG
RMINDRNFWRI

SEQ ID NO: 9729 - protein, 11 aa, Artificial Sequence
  Description of Artificial Sequence: Synthetic peptide
  Seed: RGINDRNFWRG
RMINDRNFWRL

SEQ ID NO: 9730 - protein, 11 aa, Artificial Sequence
  Description of Artificial Sequence: Synthetic peptide
  Seed: RGINDRNFWRG
RMINDRNFWRK

SEQ ID NO: 9731 - protein, 11 aa, Artificial Sequence
  Description of Artificial Sequence: Synthetic peptide
  Seed: RGINDRNFWRG
RMINDRNFWRM

SEQ ID NO: 9732 - protein, 11 aa, Artificial Sequence
  Description of Artificial Sequence: Synthetic peptide
  Seed: RGINDRNFWRG
RMINDRNFWRF

SEQ ID NO: 9733 - protein, 11 aa, Artificial Sequence
  Description of Artificial Sequence: Synthetic peptide
  Seed: RGINDRNFWRG
RKINDRNFWRF

SEQ ID NO: 9734 - protein, 11 aa, Artificial Sequence
  Description of Artificial Sequence: Synthetic peptide
  Seed: RGINDRNFWRG
RKINDRNFWRM

SEQ ID NO: 9735 - protein, 11 aa, Artificial Sequence
  Description of Artificial Sequence: Synthetic peptide
  Seed: RGINDRNFWRG
RKINDRNFWRK

SEQ ID NO: 9736 - protein, 11 aa, Artificial Sequence
  Description of Artificial Sequence: Synthetic peptide
  Seed: RGINDRNFWRG
RKINDRNFWRL

SEQ ID NO: 9737 - protein, 11 aa, Artificial Sequence
  Description of Artificial Sequence: Synthetic peptide
  Seed: RGINDRNFWRG
RLINDRNFWRK

SEQ ID NO: 9738 - protein, 11 aa, Artificial Sequence
  Description of Artificial Sequence: Synthetic peptide
  Seed: RGINDRNFWRG
RLINDRNFWRM

SEQ ID NO: 9739 - protein, 11 aa, Artificial Sequence
  Description of Artificial Sequence: Synthetic peptide
  Seed: RGINDRNFWRG
RLINDRNFWRF

SEQ ID NO: 9740 - protein, 11 aa, Artificial Sequence
  Description of Artificial Sequence: Synthetic peptide
  Seed: RGINDRNFWRG
RLINDRNFWRP

SEQ ID NO: 9741 - protein, 11 aa, Artificial Sequence
  Description of Artificial Sequence: Synthetic peptide
  Seed: RGINDRNFWRG
RLINDRNFWRS

SEQ ID NO: 9742 - protein, 11 aa, Artificial Sequence
  Description of Artificial Sequence: Synthetic peptide
  Seed: RGINDRNFWRG
RLINDRNFWRT

SEQ ID NO: 9743 - protein, 11 aa, Artificial Sequence
  Description of Artificial Sequence: Synthetic peptide
  Seed: RGINDRNFWRG
RLINDRNFWRW

SEQ ID NO: 9744 - protein, 11 aa, Artificial Sequence
  Description of Artificial Sequence: Synthetic peptide
  Seed: RGINDRNFWRG
RLINDRNFWRY

SEQ ID NO: 9745 - protein, 11 aa, Artificial Sequence
  Description of Artificial Sequence: Synthetic peptide
  Seed: RGINDRNFWRG
RLINDRNFWRV

SEQ ID NO: 9746 - protein, 11 aa, Artificial Sequence
  Description of Artificial Sequence: Synthetic peptide
  Seed: RGINDRNFWRG
RKINDRNFWRA

SEQ ID NO: 9747 - protein, 11 aa, Artificial Sequence
  Description of Artificial Sequence: Synthetic peptide
  Seed: RGINDRNFWRG
RKINDRNFWRR

SEQ ID NO: 9748 - protein, 11 aa, Artificial Sequence
  Description of Artificial Sequence: Synthetic peptide
  Seed: RGINDRNFWRG
RKINDRNFWRN

SEQ ID NO: 9749 - protein, 11 aa, Artificial Sequence
  Description of Artificial Sequence: Synthetic peptide
  Seed: RGINDRNFWRG
RKINDRNFWRD

SEQ ID NO: 9750 - protein, 11 aa, Artificial Sequence
  Description of Artificial Sequence: Synthetic peptide
  Seed: RGINDRNFWRG
RKINDRNFWRC

SEQ ID NO: 9751 - protein, 11 aa, Artificial Sequence
  Description of Artificial Sequence: Synthetic peptide
  Seed: RGINDRNFWRG
RKINDRNFWRQ

SEQ ID NO: 9752 - protein, 11 aa, Artificial Sequence
  Description of Artificial Sequence: Synthetic peptide
  Seed: RGINDRNFWRG
RKINDRNFWRE

SEQ ID NO: 9753 - protein, 11 aa, Artificial Sequence
  Description of Artificial Sequence: Synthetic peptide
  Seed: RGINDRNFWRG
RKINDRNFWRG

SEQ ID NO: 9754 - protein, 11 aa, Artificial Sequence
  Description of Artificial Sequence: Synthetic peptide
  Seed: RGINDRNFWRG
RKINDRNFWRH

SEQ ID NO: 9755 - protein, 11 aa, Artificial Sequence
  Description of Artificial Sequence: Synthetic peptide
  Seed: RGINDRNFWRG
RKINDRNFWRI

SEQ ID NO: 9756 - protein, 10 aa, Artificial Sequence
  Description of Artificial Sequence: Synthetic peptide
  Seed: RGINDRNFWR
RMINDRNFWY

SEQ ID NO: 9757 - protein, 10 aa, Artificial Sequence
  Description of Artificial Sequence: Synthetic peptide
  Seed: RGINDRNFWR
RMINDRNFWK

SEQ ID NO: 9758 - protein, 10 aa, Artificial Sequence
  Description of Artificial Sequence: Synthetic peptide
  Seed: RGINDRNFWR
RMINDRNFWH

SEQ ID NO: 9759 - protein, 10 aa, Artificial Sequence
  Description of Artificial Sequence: Synthetic peptide
  Seed: RFYIQMCTEL
RRYIQMCTEW

SEQ ID NO: 9760 - protein, 10 aa, Artificial Sequence
  Description of Artificial Sequence: Synthetic peptide
  Seed: RFYIQMCTEL
RAYIQMCTEM

SEQ ID NO: 9761 - protein, 10 aa, Artificial Sequence
  Description of Artificial Sequence: Synthetic peptide
  Seed: RFYIQMCTEL
RAYIQMCTEF

SEQ ID NO: 9762 - protein, 10 aa, Artificial Sequence
  Description of Artificial Sequence: Synthetic peptide
  Seed: RFYIQMCTEL
RAYIQMCTEW

SEQ ID NO: 9763 - protein, 10 aa, Artificial Sequence
  Description of Artificial Sequence: Synthetic peptide
  Seed: RFYIQMCTEL
RAYIQMCTEY

SEQ ID NO: 9764 - protein, 10 aa, Artificial Sequence
  Description of Artificial Sequence: Synthetic peptide
  Seed: RFYIQMCTEL
RAYIQMCTEV

SEQ ID NO: 9765 - protein, 10 aa, Artificial Sequence
  Description of Artificial Sequence: Synthetic peptide
  Seed: RFYIQMCTEL
RRYIQMCTEI

SEQ ID NO: 9766 - protein, 10 aa, Artificial Sequence
  Description of Artificial Sequence: Synthetic peptide
  Seed: RFYIQMCTEL
RRYIQMCTEL

SEQ ID NO: 9767 - protein, 10 aa, Artificial Sequence
  Description of Artificial Sequence: Synthetic peptide
  Seed: RFYIQMCTEL
RRYIQMCTEM

SEQ ID NO: 9768 - protein, 10 aa, Artificial Sequence
  Description of Artificial Sequence: Synthetic peptide
  Seed: RFYIQMCTEL
RRYIQMCTEF

SEQ ID NO: 9769 - protein, 10 aa, Artificial Sequence
  Description of Artificial Sequence: Synthetic peptide
  Seed: RFYIQMCTEL
RRYIQMCTEY

SEQ ID NO: 9770 - protein, 10 aa, Artificial Sequence
  Description of Artificial Sequence: Synthetic peptide
  Seed: RFYIQMCTEL
RDYIQMCTEM

SEQ ID NO: 9771 - protein, 10 aa, Artificial Sequence
  Description of Artificial Sequence: Synthetic peptide
  Seed: RFYIQMCTEL
RRYIQMCTEV

SEQ ID NO: 9772 - protein, 10 aa, Artificial Sequence
  Description of Artificial Sequence: Synthetic peptide
  Seed: RFYIQMCTEL
RNYIQMCTEI

SEQ ID NO: 9773 - protein, 10 aa, Artificial Sequence
  Description of Artificial Sequence: Synthetic peptide
  Seed: RFYIQMCTEL
RNYIQMCTEL

SEQ ID NO: 9774 - protein, 10 aa, Artificial Sequence
  Description of Artificial Sequence: Synthetic peptide
  Seed: RFYIQMCTEL
RNYIQMCTEM

SEQ ID NO: 9775 - protein, 10 aa, Artificial Sequence
  Description of Artificial Sequence: Synthetic peptide
  Seed: RFYIQMCTEL
RNYIQMCTEF

SEQ ID NO: 9776 - protein, 10 aa, Artificial Sequence
  Description of Artificial Sequence: Synthetic peptide
  Seed: RFYIQMCTEL
RNYIQMCTEW

SEQ ID NO: 9777 - protein, 10 aa, Artificial Sequence
  Description of Artificial Sequence: Synthetic peptide
  Seed: RFYIQMCTEL
RNYIQMCTEY

SEQ ID NO: 9778 - protein, 10 aa, Artificial Sequence
  Description of Artificial Sequence: Synthetic peptide
  Seed: RFYIQMCTEL
RNYIQMCTEV

SEQ ID NO: 9779 - protein, 10 aa, Artificial Sequence
  Description of Artificial Sequence: Synthetic peptide
  Seed: RFYIQMCTEL
RDYIQMCTEI

SEQ ID NO: 9780 - protein, 10 aa, Artificial Sequence
  Description of Artificial Sequence: Synthetic peptide
  Seed: RFYIQMCTEL
RAYIQMCTEL

SEQ ID NO: 9781 - protein, 10 aa, Artificial Sequence
  Description of Artificial Sequence: Synthetic peptide
  Seed: RFYIQMCTEL
RAYIQMCTEI

SEQ ID NO: 9782 - protein, 10 aa, Artificial Sequence
  Description of Artificial Sequence: Synthetic peptide
  Seed: RESRNPGNAE
RVSRNPGNAV

SEQ ID NO: 9783 - protein, 10 aa, Artificial Sequence
  Description of Artificial Sequence: Synthetic peptide
  Seed: RESRNPGNAE
RVSRNPGNAY

SEQ ID NO: 9784 - protein, 10 aa, Artificial Sequence
  Description of Artificial Sequence: Synthetic peptide
  Seed: RESRNPGNAE
RYSRNPGNAT

SEQ ID NO: 9785 - protein, 10 aa, Artificial Sequence
  Description of Artificial Sequence: Synthetic peptide
  Seed: RESRNPGNAE
RYSRNPGNAY

SEQ ID NO: 9786 - protein, 10 aa, Artificial Sequence
  Description of Artificial Sequence: Synthetic peptide
  Seed: RESRNPGNAE
RYSRNPGNAV

SEQ ID NO: 9787 - protein, 10 aa, Artificial Sequence
  Description of Artificial Sequence: Synthetic peptide
  Seed: RESRNPGNAE
RVSRNPGNAA

SEQ ID NO: 9788 - protein, 10 aa, Artificial Sequence
  Description of Artificial Sequence: Synthetic peptide
  Seed: RESRNPGNAE
RVSRNPGNAR

SEQ ID NO: 9789 - protein, 10 aa, Artificial Sequence
  Description of Artificial Sequence: Synthetic peptide
  Seed: RESRNPGNAE
RVSRNPGNAN

SEQ ID NO: 9790 - protein, 10 aa, Artificial Sequence
  Description of Artificial Sequence: Synthetic peptide
  Seed: RESRNPGNAE
RVSRNPGNAC

SEQ ID NO: 9791 - protein, 10 aa, Artificial Sequence
  Description of Artificial Sequence: Synthetic peptide
  Seed: RESRNPGNAE
RVSRNPGNAQ

SEQ ID NO: 9792 - protein, 10 aa, Artificial Sequence
  Description of Artificial Sequence: Synthetic peptide
  Seed: RESRNPGNAE
RVSRNPGNAE

SEQ ID NO: 9793 - protein, 10 aa, Artificial Sequence
  Description of Artificial Sequence: Synthetic peptide
  Seed: RESRNPGNAE
RVSRNPGNAG

SEQ ID NO: 9794 - protein, 10 aa, Artificial Sequence
  Description of Artificial Sequence: Synthetic peptide
  Seed: RESRNPGNAE
RVSRNPGNAH

SEQ ID NO: 9795 - protein, 10 aa, Artificial Sequence
  Description of Artificial Sequence: Synthetic peptide
  Seed: RESRNPGNAE
RVSRNPGNAI

SEQ ID NO: 9796 - protein, 10 aa, Artificial Sequence
  Description of Artificial Sequence: Synthetic peptide
  Seed: RESRNPGNAE
RVSRNPGNAL

SEQ ID NO: 9797 - protein, 10 aa, Artificial Sequence
  Description of Artificial Sequence: Synthetic peptide
  Seed: RESRNPGNAE
RVSRNPGNAK

SEQ ID NO: 9798 - protein, 10 aa, Artificial Sequence
  Description of Artificial Sequence: Synthetic peptide
  Seed: RESRNPGNAE
RVSRNPGNAM

SEQ ID NO: 9799 - protein, 10 aa, Artificial Sequence
  Description of Artificial Sequence: Synthetic peptide
  Seed: RESRNPGNAE
RVSRNPGNAF

SEQ ID NO: 9800 - protein, 10 aa, Artificial Sequence
  Description of Artificial Sequence: Synthetic peptide
  Seed: RESRNPGNAE
RVSRNPGNAP

SEQ ID NO: 9801 - protein, 10 aa, Artificial Sequence
  Description of Artificial Sequence: Synthetic peptide
  Seed: RESRNPGNAE
RVSRNPGNAS

SEQ ID NO: 9802 - protein, 10 aa, Artificial Sequence
  Description of Artificial Sequence: Synthetic peptide
  Seed: RESRNPGNAE
RVSRNPGNAT

SEQ ID NO: 9803 - protein, 10 aa, Artificial Sequence
  Description of Artificial Sequence: Synthetic peptide
  Seed: RFYIQMCTEL
RDYIQMCTEL

SEQ ID NO: 9804 - protein, 10 aa, Artificial Sequence
  Description of Artificial Sequence: Synthetic peptide
  Seed: RFYIQMCTEL
RDYIQMCTEF

SEQ ID NO: 9805 - protein, 10 aa, Artificial Sequence
  Description of Artificial Sequence: Synthetic peptide
  Seed: RESRNPGNAE
RYSRNPGNAP

SEQ ID NO: 9806 - protein, 10 aa, Artificial Sequence
  Description of Artificial Sequence: Synthetic peptide
  Seed: RFYIQMCTEL
RHYIQMCTEI

SEQ ID NO: 9807 - protein, 10 aa, Artificial Sequence
  Description of Artificial Sequence: Synthetic peptide
  Seed: RFYIQMCTEL
REYIQMCTEY

SEQ ID NO: 9808 - protein, 10 aa, Artificial Sequence
  Description of Artificial Sequence: Synthetic peptide
  Seed: RFYIQMCTEL
REYIQMCTEV

SEQ ID NO: 9809 - protein, 10 aa, Artificial Sequence
  Description of Artificial Sequence: Synthetic peptide
  Seed: RFYIQMCTEL
RGYIQMCTEI

SEQ ID NO: 9810 - protein, 10 aa, Artificial Sequence
  Description of Artificial Sequence: Synthetic peptide
  Seed: RFYIQMCTEL
RGYIQMCTEL

SEQ ID NO: 9811 - protein, 10 aa, Artificial Sequence
  Description of Artificial Sequence: Synthetic peptide
  Seed: RFYIQMCTEL
RGYIQMCTEM

SEQ ID NO: 9812 - protein, 10 aa, Artificial Sequence
  Description of Artificial Sequence: Synthetic peptide
  Seed: RFYIQMCTEL
RGYIQMCTEF

SEQ ID NO: 9813 - protein, 10 aa, Artificial Sequence
  Description of Artificial Sequence: Synthetic peptide
  Seed: RFYIQMCTEL
RGYIQMCTEW

SEQ ID NO: 9814 - protein, 10 aa, Artificial Sequence
  Description of Artificial Sequence: Synthetic peptide
  Seed: RFYIQMCTEL
RGYIQMCTEY

SEQ ID NO: 9815 - protein, 10 aa, Artificial Sequence
  Description of Artificial Sequence: Synthetic peptide
  Seed: RFYIQMCTEL
RGYIQMCTEV

SEQ ID NO: 9816 - protein, 10 aa, Artificial Sequence
  Description of Artificial Sequence: Synthetic peptide
  Seed: RFYIQMCTEL
RHYIQMCTEL

SEQ ID NO: 9817 - protein, 10 aa, Artificial Sequence
  Description of Artificial Sequence: Synthetic peptide
  Seed: RFYIQMCTEL
RDYIQMCTEW

SEQ ID NO: 9818 - protein, 10 aa, Artificial Sequence
  Description of Artificial Sequence: Synthetic peptide
  Seed: RFYIQMCTEL
RHYIQMCTEM

SEQ ID NO: 9819 - protein, 10 aa, Artificial Sequence
  Description of Artificial Sequence: Synthetic peptide
  Seed: RFYIQMCTEL
RHYIQMCTEF

SEQ ID NO: 9820 - protein, 10 aa, Artificial Sequence
  Description of Artificial Sequence: Synthetic peptide
  Seed: RFYIQMCTEL
RHYIQMCTEW

SEQ ID NO: 9821 - protein, 10 aa, Artificial Sequence
  Description of Artificial Sequence: Synthetic peptide
  Seed: RFYIQMCTEL
RHYIQMCTEY

SEQ ID NO: 9822 - protein, 10 aa, Artificial Sequence
  Description of Artificial Sequence: Synthetic peptide
  Seed: RFYIQMCTEL
RHYIQMCTEV

SEQ ID NO: 9823 - protein, 10 aa, Artificial Sequence
  Description of Artificial Sequence: Synthetic peptide
  Seed: RFYIQMCTEL
RIYIQMCTEI

SEQ ID NO: 9824 - protein, 10 aa, Artificial Sequence
  Description of Artificial Sequence: Synthetic peptide
  Seed: RFYIQMCTEL
RIYIQMCTEL

SEQ ID NO: 9825 - protein, 10 aa, Artificial Sequence
  Description of Artificial Sequence: Synthetic peptide
  Seed: RFYIQMCTEL
RIYIQMCTEM

SEQ ID NO: 9826 - protein, 10 aa, Artificial Sequence
  Description of Artificial Sequence: Synthetic peptide
  Seed: RFYIQMCTEL
RIYIQMCTEF

SEQ ID NO: 9827 - protein, 10 aa, Artificial Sequence
  Description of Artificial Sequence: Synthetic peptide
  Seed: RFYIQMCTEL
REYIQMCTEW

SEQ ID NO: 9828 - protein, 10 aa, Artificial Sequence
  Description of Artificial Sequence: Synthetic peptide
  Seed: RFYIQMCTEL
REYIQMCTEF

SEQ ID NO: 9829 - protein, 10 aa, Artificial Sequence
  Description of Artificial Sequence: Synthetic peptide
  Seed: RFYIQMCTEL
REYIQMCTEM

SEQ ID NO: 9830 - protein, 10 aa, Artificial Sequence
  Description of Artificial Sequence: Synthetic peptide
  Seed: RFYIQMCTEL
REYIQMCTEL

SEQ ID NO: 9831 - protein, 10 aa, Artificial Sequence
  Description of Artificial Sequence: Synthetic peptide
  Seed: RFYIQMCTEL
RDYIQMCTEY

SEQ ID NO: 9832 - protein, 10 aa, Artificial Sequence
  Description of Artificial Sequence: Synthetic peptide
  Seed: RFYIQMCTEL
RDYIQMCTEV

SEQ ID NO: 9833 - protein, 10 aa, Artificial Sequence
  Description of Artificial Sequence: Synthetic peptide
  Seed: RFYIQMCTEL
RCYIQMCTEI

SEQ ID NO: 9834 - protein, 10 aa, Artificial Sequence
  Description of Artificial Sequence: Synthetic peptide
  Seed: RFYIQMCTEL
RCYIQMCTEL

SEQ ID NO: 9835 - protein, 10 aa, Artificial Sequence
  Description of Artificial Sequence: Synthetic peptide
  Seed: RFYIQMCTEL
RCYIQMCTEM

SEQ ID NO: 9836 - protein, 10 aa, Artificial Sequence
  Description of Artificial Sequence: Synthetic peptide
  Seed: RFYIQMCTEL
RCYIQMCTEF

SEQ ID NO: 9837 - protein, 10 aa, Artificial Sequence
  Description of Artificial Sequence: Synthetic peptide
  Seed: RFYIQMCTEL
RCYIQMCTEW

SEQ ID NO: 9838 - protein, 10 aa, Artificial Sequence
  Description of Artificial Sequence: Synthetic peptide
  Seed: RFYIQMCTEL
RCYIQMCTEY

SEQ ID NO: 9839 - protein, 10 aa, Artificial Sequence
  Description of Artificial Sequence: Synthetic peptide
  Seed: RFYIQMCTEL
RCYIQMCTEV

SEQ ID NO: 9840 - protein, 10 aa, Artificial Sequence
  Description of Artificial Sequence: Synthetic peptide
  Seed: RFYIQMCTEL
RQYIQMCTEA

SEQ ID NO: 9841 - protein, 10 aa, Artificial Sequence
  Description of Artificial Sequence: Synthetic peptide
  Seed: RFYIQMCTEL
RQYIQMCTEH

SEQ ID NO: 9842 - protein, 10 aa, Artificial Sequence
  Description of Artificial Sequence: Synthetic peptide
  Seed: RFYIQMCTEL
RQYIQMCTEI

SEQ ID NO: 9843 - protein, 10 aa, Artificial Sequence
  Description of Artificial Sequence: Synthetic peptide
  Seed: RFYIQMCTEL
RQYIQMCTEL

SEQ ID NO: 9844 - protein, 10 aa, Artificial Sequence
  Description of Artificial Sequence: Synthetic peptide
  Seed: RFYIQMCTEL
RQYIQMCTEM

SEQ ID NO: 9845 - protein, 10 aa, Artificial Sequence
  Description of Artificial Sequence: Synthetic peptide
  Seed: RFYIQMCTEL
RQYIQMCTEF

SEQ ID NO: 9846 - protein, 10 aa, Artificial Sequence
  Description of Artificial Sequence: Synthetic peptide
  Seed: RFYIQMCTEL
RQYIQMCTEW

SEQ ID NO: 9847 - protein, 10 aa, Artificial Sequence
  Description of Artificial Sequence: Synthetic peptide
  Seed: RFYIQMCTEL
RQYIQMCTEY

SEQ ID NO: 9848 - protein, 10 aa, Artificial Sequence
  Description of Artificial Sequence: Synthetic peptide
  Seed: RFYIQMCTEL
RQYIQMCTEV

SEQ ID NO: 9849 - protein, 10 aa, Artificial Sequence
  Description of Artificial Sequence: Synthetic peptide
  Seed: RFYIQMCTEL
REYIQMCTEI

SEQ ID NO: 9850 - protein, 10 aa, Artificial Sequence
  Description of Artificial Sequence: Synthetic peptide
  Seed: RESRNPGNAE
RYSRNPGNAS

SEQ ID NO: 9851 - protein, 10 aa, Artificial Sequence
  Description of Artificial Sequence: Synthetic peptide
  Seed: RESRNPGNAE
RYSRNPGNAF

SEQ ID NO: 9852 - protein, 10 aa, Artificial Sequence
  Description of Artificial Sequence: Synthetic peptide
  Seed: RGINDRNFWR
RMINDRNFWR

SEQ ID NO: 9853 - protein, 10 aa, Artificial Sequence
  Description of Artificial Sequence: Synthetic peptide
  Seed: RESRNPGNAE
RSSRNPGNAH

SEQ ID NO: 9854 - protein, 10 aa, Artificial Sequence
  Description of Artificial Sequence: Synthetic peptide
  Seed: RESRNPGNAE
RPSRNPGNAY

SEQ ID NO: 9855 - protein, 10 aa, Artificial Sequence
  Description of Artificial Sequence: Synthetic peptide
  Seed: RESRNPGNAE
RPSRNPGNAV

SEQ ID NO: 9856 - protein, 10 aa, Artificial Sequence
  Description of Artificial Sequence: Synthetic peptide
  Seed: RESRNPGNAE
RSSRNPGNAA

SEQ ID NO: 9857 - protein, 10 aa, Artificial Sequence
  Description of Artificial Sequence: Synthetic peptide
  Seed: RESRNPGNAE
RSSRNPGNAR

SEQ ID NO: 9858 - protein, 10 aa, Artificial Sequence
  Description of Artificial Sequence: Synthetic peptide
  Seed: RESRNPGNAE
RSSRNPGNAN

SEQ ID NO: 9859 - protein, 10 aa, Artificial Sequence
  Description of Artificial Sequence: Synthetic peptide
  Seed: RESRNPGNAE
RSSRNPGNAC

SEQ ID NO: 9860 - protein, 10 aa, Artificial Sequence
  Description of Artificial Sequence: Synthetic peptide
  Seed: RESRNPGNAE
RSSRNPGNAQ

SEQ ID NO: 9861 - protein, 10 aa, Artificial Sequence
  Description of Artificial Sequence: Synthetic peptide
  Seed: RESRNPGNAE
RSSRNPGNAE

SEQ ID NO: 9862 - protein, 10 aa, Artificial Sequence
  Description of Artificial Sequence: Synthetic peptide
  Seed: RESRNPGNAE
RSSRNPGNAG

SEQ ID NO: 9863 - protein, 10 aa, Artificial Sequence
  Description of Artificial Sequence: Synthetic peptide
  Seed: RESRNPGNAE
RSSRNPGNAI

SEQ ID NO: 9864 - protein, 10 aa, Artificial Sequence
  Description of Artificial Sequence: Synthetic peptide
  Seed: RESRNPGNAE
RTSRNPGNAR

SEQ ID NO: 9865 - protein, 10 aa, Artificial Sequence
  Description of Artificial Sequence: Synthetic peptide
  Seed: RESRNPGNAE
RSSRNPGNAL

SEQ ID NO: 9866 - protein, 10 aa, Artificial Sequence
  Description of Artificial Sequence: Synthetic peptide
  Seed: RESRNPGNAE
RSSRNPGNAK

SEQ ID NO: 9867 - protein, 10 aa, Artificial Sequence
  Description of Artificial Sequence: Synthetic peptide
  Seed: RESRNPGNAE
RSSRNPGNAM

SEQ ID NO: 9868 - protein, 10 aa, Artificial Sequence
  Description of Artificial Sequence: Synthetic peptide
  Seed: RESRNPGNAE
RSSRNPGNAF

SEQ ID NO: 9869 - protein, 10 aa, Artificial Sequence
  Description of Artificial Sequence: Synthetic peptide
  Seed: RESRNPGNAE
RSSRNPGNAP

SEQ ID NO: 9870 - protein, 10 aa, Artificial Sequence
  Description of Artificial Sequence: Synthetic peptide
  Seed: RESRNPGNAE
RSSRNPGNAS

SEQ ID NO: 9871 - protein, 10 aa, Artificial Sequence
  Description of Artificial Sequence: Synthetic peptide
  Seed: RESRNPGNAE
RSSRNPGNAT

SEQ ID NO: 9872 - protein, 10 aa, Artificial Sequence
  Description of Artificial Sequence: Synthetic peptide
  Seed: RESRNPGNAE
RSSRNPGNAY

SEQ ID NO: 9873 - protein, 10 aa, Artificial Sequence
  Description of Artificial Sequence: Synthetic peptide
  Seed: RESRNPGNAE
RSSRNPGNAV

SEQ ID NO: 9874 - protein, 10 aa, Artificial Sequence
  Description of Artificial Sequence: Synthetic peptide
  Seed: RESRNPGNAE
RPSRNPGNAT

SEQ ID NO: 9875 - protein, 10 aa, Artificial Sequence
  Description of Artificial Sequence: Synthetic peptide
  Seed: RESRNPGNAE
RPSRNPGNAS

SEQ ID NO: 9876 - protein, 10 aa, Artificial Sequence
  Description of Artificial Sequence: Synthetic peptide
  Seed: RESRNPGNAE
RPSRNPGNAP

SEQ ID NO: 9877 - protein, 10 aa, Artificial Sequence
  Description of Artificial Sequence: Synthetic peptide
  Seed: RESRNPGNAE
RPSRNPGNAF

SEQ ID NO: 9878 - protein, 10 aa, Artificial Sequence
  Description of Artificial Sequence: Synthetic peptide
  Seed: RESRNPGNAE
RFSRNPGNAK

SEQ ID NO: 9879 - protein, 10 aa, Artificial Sequence
  Description of Artificial Sequence: Synthetic peptide
  Seed: RESRNPGNAE
RFSRNPGNAM

SEQ ID NO: 9880 - protein, 10 aa, Artificial Sequence
  Description of Artificial Sequence: Synthetic peptide
  Seed: RESRNPGNAE
RFSRNPGNAF

SEQ ID NO: 9881 - protein, 10 aa, Artificial Sequence
  Description of Artificial Sequence: Synthetic peptide
  Seed: RESRNPGNAE
RFSRNPGNAP

SEQ ID NO: 9882 - protein, 10 aa, Artificial Sequence
  Description of Artificial Sequence: Synthetic peptide
  Seed: RESRNPGNAE
RFSRNPGNAS

SEQ ID NO: 9883 - protein, 10 aa, Artificial Sequence
  Description of Artificial Sequence: Synthetic peptide
  Seed: RESRNPGNAE
RFSRNPGNAT

SEQ ID NO: 9884 - protein, 10 aa, Artificial Sequence
  Description of Artificial Sequence: Synthetic peptide
  Seed: RESRNPGNAE
RFSRNPGNAY

SEQ ID NO: 9885 - protein, 10 aa, Artificial Sequence
  Description of Artificial Sequence: Synthetic peptide
  Seed: RESRNPGNAE
RFSRNPGNAV

SEQ ID NO: 9886 - protein, 10 aa, Artificial Sequence
  Description of Artificial Sequence: Synthetic peptide
  Seed: RESRNPGNAE
RPSRNPGNAA

SEQ ID NO: 9887 - protein, 10 aa, Artificial Sequence
  Description of Artificial Sequence: Synthetic peptide
  Seed: RESRNPGNAE
RPSRNPGNAR

SEQ ID NO: 9888 - protein, 10 aa, Artificial Sequence
  Description of Artificial Sequence: Synthetic peptide
  Seed: RESRNPGNAE
RPSRNPGNAN

SEQ ID NO: 9889 - protein, 10 aa, Artificial Sequence
  Description of Artificial Sequence: Synthetic peptide
  Seed: RESRNPGNAE
RPSRNPGNAC

SEQ ID NO: 9890 - protein, 10 aa, Artificial Sequence
  Description of Artificial Sequence: Synthetic peptide
  Seed: RESRNPGNAE
RPSRNPGNAQ

SEQ ID NO: 9891 - protein, 10 aa, Artificial Sequence
  Description of Artificial Sequence: Synthetic peptide
  Seed: RESRNPGNAE
RPSRNPGNAE

SEQ ID NO: 9892 - protein, 10 aa, Artificial Sequence
  Description of Artificial Sequence: Synthetic peptide
  Seed: RESRNPGNAE
RPSRNPGNAG

SEQ ID NO: 9893 - protein, 10 aa, Artificial Sequence
  Description of Artificial Sequence: Synthetic peptide
  Seed: RESRNPGNAE
RPSRNPGNAI

SEQ ID NO: 9894 - protein, 10 aa, Artificial Sequence
  Description of Artificial Sequence: Synthetic peptide
  Seed: RESRNPGNAE
RPSRNPGNAL

SEQ ID NO: 9895 - protein, 10 aa, Artificial Sequence
  Description of Artificial Sequence: Synthetic peptide
  Seed: RESRNPGNAE
RPSRNPGNAK

SEQ ID NO: 9896 - protein, 10 aa, Artificial Sequence
  Description of Artificial Sequence: Synthetic peptide
  Seed: RESRNPGNAE
RPSRNPGNAM

SEQ ID NO: 9897 - protein, 10 aa, Artificial Sequence
  Description of Artificial Sequence: Synthetic peptide
  Seed: RESRNPGNAE
RTSRNPGNAA

SEQ ID NO: 9898 - protein, 10 aa, Artificial Sequence
  Description of Artificial Sequence: Synthetic peptide
  Seed: RESRNPGNAE
RTSRNPGNAN

SEQ ID NO: 9899 - protein, 10 aa, Artificial Sequence
  Description of Artificial Sequence: Synthetic peptide
  Seed: RESRNPGNAE
RYSRNPGNAM

SEQ ID NO: 9900 - protein, 10 aa, Artificial Sequence
  Description of Artificial Sequence: Synthetic peptide
  Seed: RESRNPGNAE
RYSRNPGNAA

SEQ ID NO: 9901 - protein, 10 aa, Artificial Sequence
  Description of Artificial Sequence: Synthetic peptide
  Seed: RESRNPGNAE
RWSRNPGNAL

SEQ ID NO: 9902 - protein, 10 aa, Artificial Sequence
  Description of Artificial Sequence: Synthetic peptide
  Seed: RESRNPGNAE
RWSRNPGNAK

SEQ ID NO: 9903 - protein, 10 aa, Artificial Sequence
  Description of Artificial Sequence: Synthetic peptide
  Seed: RESRNPGNAE
RWSRNPGNAM

SEQ ID NO: 9904 - protein, 10 aa, Artificial Sequence
  Description of Artificial Sequence: Synthetic peptide
  Seed: RESRNPGNAE
RWSRNPGNAF

SEQ ID NO: 9905 - protein, 10 aa, Artificial Sequence
  Description of Artificial Sequence: Synthetic peptide
  Seed: RESRNPGNAE
RWSRNPGNAP

SEQ ID NO: 9906 - protein, 10 aa, Artificial Sequence
  Description of Artificial Sequence: Synthetic peptide
  Seed: RESRNPGNAE
RWSRNPGNAS

SEQ ID NO: 9907 - protein, 10 aa, Artificial Sequence
  Description of Artificial Sequence: Synthetic peptide
  Seed: RESRNPGNAE
RWSRNPGNAT

SEQ ID NO: 9908 - protein, 10 aa, Artificial Sequence
  Description of Artificial Sequence: Synthetic peptide
  Seed: RESRNPGNAE
RWSRNPGNAY

SEQ ID NO: 9909 - protein, 10 aa, Artificial Sequence
  Description of Artificial Sequence: Synthetic peptide
  Seed: RESRNPGNAE
RWSRNPGNAV

SEQ ID NO: 9910 - protein, 10 aa, Artificial Sequence
  Description of Artificial Sequence: Synthetic peptide
  Seed: RESRNPGNAE
RYSRNPGNAR

SEQ ID NO: 9911 - protein, 10 aa, Artificial Sequence
  Description of Artificial Sequence: Synthetic peptide
  Seed: RESRNPGNAE
RTSRNPGNAC

SEQ ID NO: 9912 - protein, 10 aa, Artificial Sequence
  Description of Artificial Sequence: Synthetic peptide
  Seed: RESRNPGNAE
RYSRNPGNAN

SEQ ID NO: 9913 - protein, 10 aa, Artificial Sequence
  Description of Artificial Sequence: Synthetic peptide
  Seed: RESRNPGNAE
RYSRNPGNAC

SEQ ID NO: 9914 - protein, 10 aa, Artificial Sequence
  Description of Artificial Sequence: Synthetic peptide
  Seed: RESRNPGNAE
RYSRNPGNAQ

SEQ ID NO: 9915 - protein, 10 aa, Artificial Sequence
  Description of Artificial Sequence: Synthetic peptide
  Seed: RESRNPGNAE
RYSRNPGNAE

SEQ ID NO: 9916 - protein, 10 aa, Artificial Sequence
  Description of Artificial Sequence: Synthetic peptide
  Seed: RESRNPGNAE
RYSRNPGNAG

SEQ ID NO: 9917 - protein, 10 aa, Artificial Sequence
  Description of Artificial Sequence: Synthetic peptide
  Seed: RESRNPGNAE
RYSRNPGNAH

SEQ ID NO: 9918 - protein, 10 aa, Artificial Sequence
  Description of Artificial Sequence: Synthetic peptide
  Seed: RESRNPGNAE
RYSRNPGNAI

SEQ ID NO: 9919 - protein, 10 aa, Artificial Sequence
  Description of Artificial Sequence: Synthetic peptide
  Seed: RESRNPGNAE
RYSRNPGNAL

SEQ ID NO: 9920 - protein, 10 aa, Artificial Sequence
  Description of Artificial Sequence: Synthetic peptide
  Seed: RESRNPGNAE
RYSRNPGNAK

SEQ ID NO: 9921 - protein, 10 aa, Artificial Sequence
  Description of Artificial Sequence: Synthetic peptide
  Seed: RESRNPGNAE
RWSRNPGNAI

SEQ ID NO: 9922 - protein, 10 aa, Artificial Sequence
  Description of Artificial Sequence: Synthetic peptide
  Seed: RESRNPGNAE
RWSRNPGNAH

SEQ ID NO: 9923 - protein, 10 aa, Artificial Sequence
  Description of Artificial Sequence: Synthetic peptide
  Seed: RESRNPGNAE
RWSRNPGNAG

SEQ ID NO: 9924 - protein, 10 aa, Artificial Sequence
  Description of Artificial Sequence: Synthetic peptide
  Seed: RESRNPGNAE
RWSRNPGNAE

SEQ ID NO: 9925 - protein, 10 aa, Artificial Sequence
  Description of Artificial Sequence: Synthetic peptide
  Seed: RESRNPGNAE
RTSRNPGNAQ

SEQ ID NO: 9926 - protein, 10 aa, Artificial Sequence
  Description of Artificial Sequence: Synthetic peptide
  Seed: RESRNPGNAE
RTSRNPGNAE

SEQ ID NO: 9927 - protein, 10 aa, Artificial Sequence
  Description of Artificial Sequence: Synthetic peptide
  Seed: RESRNPGNAE
RTSRNPGNAG

SEQ ID NO: 9928 - protein, 10 aa, Artificial Sequence
  Description of Artificial Sequence: Synthetic peptide
  Seed: RESRNPGNAE
RTSRNPGNAH

SEQ ID NO: 9929 - protein, 10 aa, Artificial Sequence
  Description of Artificial Sequence: Synthetic peptide
  Seed: RESRNPGNAE
RTSRNPGNAI

SEQ ID NO: 9930 - protein, 10 aa, Artificial Sequence
  Description of Artificial Sequence: Synthetic peptide
  Seed: RESRNPGNAE
RTSRNPGNAL

SEQ ID NO: 9931 - protein, 10 aa, Artificial Sequence
  Description of Artificial Sequence: Synthetic peptide
  Seed: RESRNPGNAE
RTSRNPGNAK

SEQ ID NO: 9932 - protein, 10 aa, Artificial Sequence
  Description of Artificial Sequence: Synthetic peptide
  Seed: RESRNPGNAE
RTSRNPGNAM

SEQ ID NO: 9933 - protein, 10 aa, Artificial Sequence
  Description of Artificial Sequence: Synthetic peptide
  Seed: RESRNPGNAE
RTSRNPGNAF

SEQ ID NO: 9934 - protein, 10 aa, Artificial Sequence
  Description of Artificial Sequence: Synthetic peptide
  Seed: RESRNPGNAE
RTSRNPGNAP

SEQ ID NO: 9935 - protein, 10 aa, Artificial Sequence
  Description of Artificial Sequence: Synthetic peptide
  Seed: RESRNPGNAE
RTSRNPGNAS

SEQ ID NO: 9936 - protein, 10 aa, Artificial Sequence
  Description of Artificial Sequence: Synthetic peptide
  Seed: RESRNPGNAE
RTSRNPGNAT

SEQ ID NO: 9937 - protein, 10 aa, Artificial Sequence
  Description of Artificial Sequence: Synthetic peptide
  Seed: RESRNPGNAE
RTSRNPGNAY

SEQ ID NO: 9938 - protein, 10 aa, Artificial Sequence
  Description of Artificial Sequence: Synthetic peptide
  Seed: RESRNPGNAE
RTSRNPGNAV

SEQ ID NO: 9939 - protein, 10 aa, Artificial Sequence
  Description of Artificial Sequence: Synthetic peptide
  Seed: RESRNPGNAE
RWSRNPGNAA

SEQ ID NO: 9940 - protein, 10 aa, Artificial Sequence
  Description of Artificial Sequence: Synthetic peptide
  Seed: RESRNPGNAE
RWSRNPGNAR

SEQ ID NO: 9941 - protein, 10 aa, Artificial Sequence
  Description of Artificial Sequence: Synthetic peptide
  Seed: RESRNPGNAE
RWSRNPGNAN

SEQ ID NO: 9942 - protein, 10 aa, Artificial Sequence
  Description of Artificial Sequence: Synthetic peptide
  Seed: RESRNPGNAE
RWSRNPGNAC

SEQ ID NO: 9943 - protein, 10 aa, Artificial Sequence
  Description of Artificial Sequence: Synthetic peptide
  Seed: RESRNPGNAE
RWSRNPGNAQ

SEQ ID NO: 9944 - protein, 10 aa, Artificial Sequence
  Description of Artificial Sequence: Synthetic peptide
  Seed: RFYIQMCTEL
RIYIQMCTEW

SEQ ID NO: 9945 - protein, 10 aa, Artificial Sequence
  Description of Artificial Sequence: Synthetic peptide
  Seed: RFYIQMCTEL
RIYIQMCTEY

SEQ ID NO: 9946 - protein, 10 aa, Artificial Sequence
  Description of Artificial Sequence: Synthetic peptide
  Seed: RFYIQMCTEL
RIYIQMCTEV

SEQ ID NO: 9947 - protein, 9 aa, Artificial Sequence
  Description of Artificial Sequence: Synthetic peptide
  Seed: RGINDRNFW
RIINDRNFF

SEQ ID NO: 9948 - protein, 9 aa, Artificial Sequence
  Description of Artificial Sequence: Synthetic peptide
  Seed: RGINDRNFW
RAINDRNFL

SEQ ID NO: 9949 - protein, 9 aa, Artificial Sequence
  Description of Artificial Sequence: Synthetic peptide
  Seed: RGINDRNFW
RAINDRNFM

SEQ ID NO: 9950 - protein, 9 aa, Artificial Sequence
  Description of Artificial Sequence: Synthetic peptide
  Seed: RGINDRNFW
RAINDRNFF

SEQ ID NO: 9951 - protein, 9 aa, Artificial Sequence
  Description of Artificial Sequence: Synthetic peptide
  Seed: RGINDRNFW
RAINDRNFW

SEQ ID NO: 9952 - protein, 9 aa, Artificial Sequence
  Description of Artificial Sequence: Synthetic peptide
  Seed: RGINDRNFW
RAINDRNFY

SEQ ID NO: 9953 - protein, 9 aa, Artificial Sequence
  Description of Artificial Sequence: Synthetic peptide
  Seed: RGINDRNFW
RNINDRNFW

SEQ ID NO: 9954 - protein, 9 aa, Artificial Sequence
  Description of Artificial Sequence: Synthetic peptide
  Seed: RGINDRNFW
RCINDRNFW

SEQ ID NO: 9955 - protein, 9 aa, Artificial Sequence
  Description of Artificial Sequence: Synthetic peptide
  Seed: RGINDRNFW
RQINDRNFW

SEQ ID NO: 9956 - protein, 9 aa, Artificial Sequence
  Description of Artificial Sequence: Synthetic peptide
  Seed: RGINDRNFW
RIINDRNFM

SEQ ID NO: 9957 - protein, 9 aa, Artificial Sequence
  Description of Artificial Sequence: Synthetic peptide
  Seed: RGINDRNFW
RIINDRNFW

SEQ ID NO: 9958 - protein, 9 aa, Artificial Sequence
  Description of Artificial Sequence: Synthetic peptide
  Seed: RGINDRNFW
RSINDRNFF

SEQ ID NO: 9959 - protein, 9 aa, Artificial Sequence
  Description of Artificial Sequence: Synthetic peptide
  Seed: RGINDRNFW
RIINDRNFY

SEQ ID NO: 9960 - protein, 9 aa, Artificial Sequence
  Description of Artificial Sequence: Synthetic peptide
  Seed: RGINDRNFW
RLINDRNFW

SEQ ID NO: 9961 - protein, 9 aa, Artificial Sequence
  Description of Artificial Sequence: Synthetic peptide
  Seed: RGINDRNFW
RLINDRNFY

SEQ ID NO: 9962 - protein, 9 aa, Artificial Sequence
  Description of Artificial Sequence: Synthetic peptide
  Seed: RGINDRNFW
RMINDRNFF

SEQ ID NO: 9963 - protein, 9 aa, Artificial Sequence
  Description of Artificial Sequence: Synthetic peptide
  Seed: RGINDRNFW
RMINDRNFW

SEQ ID NO: 9964 - protein, 9 aa, Artificial Sequence
  Description of Artificial Sequence: Synthetic peptide
  Seed: RGINDRNFW
RMINDRNFY

SEQ ID NO: 9965 - protein, 9 aa, Artificial Sequence
  Description of Artificial Sequence: Synthetic peptide
  Seed: RGINDRNFW
RFINDRNFW

SEQ ID NO: 9966 - protein, 9 aa, Artificial Sequence
  Description of Artificial Sequence: Synthetic peptide
  Seed: RGINDRNFW
RSINDRNFI

SEQ ID NO: 9967 - protein, 9 aa, Artificial Sequence
  Description of Artificial Sequence: Synthetic peptide
  Seed: RGINDRNFW
RSINDRNFL

SEQ ID NO: 9968 - protein, 9 aa, Artificial Sequence
  Description of Artificial Sequence: Synthetic peptide
  Seed: RGINDRNFW
RAINDRNFI

SEQ ID NO: 9969 - protein, 11 aa, Artificial Sequence
  Description of Artificial Sequence: Synthetic peptide
  Seed: RFYIQMCTELK
RVYIQMCTELY

SEQ ID NO: 9970 - protein, 11 aa, Artificial Sequence
  Description of Artificial Sequence: Synthetic peptide
  Seed: RFYIQMCTELK
RVYIQMCTELK

SEQ ID NO: 9971 - protein, 11 aa, Artificial Sequence
  Description of Artificial Sequence: Synthetic peptide
  Seed: RFYIQMCTELK
RVYIQMCTELR

SEQ ID NO: 9972 - protein, 11 aa, Artificial Sequence
  Description of Artificial Sequence: Synthetic peptide
  Seed: RFYIQMCTELK
RKYIQMCTELR

SEQ ID NO: 9973 - protein, 11 aa, Artificial Sequence
  Description of Artificial Sequence: Synthetic peptide
  Seed: RFYIQMCTELK
RKYIQMCTELK

SEQ ID NO: 9974 - protein, 11 aa, Artificial Sequence
  Description of Artificial Sequence: Synthetic peptide
  Seed: RFYIQMCTELK
RMYIQMCTELR

SEQ ID NO: 9975 - protein, 11 aa, Artificial Sequence
  Description of Artificial Sequence: Synthetic peptide
  Seed: RFYIQMCTELK
RMYIQMCTELH

SEQ ID NO: 9976 - protein, 11 aa, Artificial Sequence
  Description of Artificial Sequence: Synthetic peptide
  Seed: RFYIQMCTELK
RMYIQMCTELK

SEQ ID NO: 9977 - protein, 11 aa, Artificial Sequence
  Description of Artificial Sequence: Synthetic peptide
  Seed: RFYIQMCTELK
RMYIQMCTELY

SEQ ID NO: 9978 - protein, 11 aa, Artificial Sequence
  Description of Artificial Sequence: Synthetic peptide
  Seed: RFYIQMCTELK
RFYIQMCTELR

SEQ ID NO: 9979 - protein, 11 aa, Artificial Sequence
  Description of Artificial Sequence: Synthetic peptide
  Seed: RFYIQMCTELK
RPYIQMCTELR

SEQ ID NO: 9980 - protein, 11 aa, Artificial Sequence
  Description of Artificial Sequence: Synthetic peptide
  Seed: RFYIQMCTELK
RPYIQMCTELK

SEQ ID NO: 9981 - protein, 11 aa, Artificial Sequence
  Description of Artificial Sequence: Synthetic peptide
  Seed: RFYIQMCTELK
RSYIQMCTELA

SEQ ID NO: 9982 - protein, 11 aa, Artificial Sequence
  Description of Artificial Sequence: Synthetic peptide
  Seed: RFYIQMCTELK
RSYIQMCTELR

SEQ ID NO: 9983 - protein, 11 aa, Artificial Sequence
  Description of Artificial Sequence: Synthetic peptide
  Seed: RFYIQMCTELK
RSYIQMCTELK

SEQ ID NO: 9984 - protein, 11 aa, Artificial Sequence
  Description of Artificial Sequence: Synthetic peptide
  Seed: RFYIQMCTELK
RTYIQMCTELA

SEQ ID NO: 9985 - protein, 11 aa, Artificial Sequence
  Description of Artificial Sequence: Synthetic peptide
  Seed: RFYIQMCTELK
RTYIQMCTELR

SEQ ID NO: 9986 - protein, 11 aa, Artificial Sequence
  Description of Artificial Sequence: Synthetic peptide
  Seed: RFYIQMCTELK
RTYIQMCTELK

SEQ ID NO: 9987 - protein, 11 aa, Artificial Sequence
  Description of Artificial Sequence: Synthetic peptide
  Seed: RFYIQMCTELK
RWYIQMCTELR

SEQ ID NO: 9988 - protein, 11 aa, Artificial Sequence
  Description of Artificial Sequence: Synthetic peptide
  Seed: RFYIQMCTELK
RWYIQMCTELK

SEQ ID NO: 9989 - protein, 11 aa, Artificial Sequence
  Description of Artificial Sequence: Synthetic peptide
  Seed: RFYIQMCTELK
RYYIQMCTELR

SEQ ID NO: 9990 - protein, 11 aa, Artificial Sequence
  Description of Artificial Sequence: Synthetic peptide
  Seed: RFYIQMCTELK
RYYIQMCTELK

SEQ ID NO: 9991 - protein, 9 aa, Artificial Sequence
  Description of Artificial Sequence: Synthetic peptide
  Seed: RGINDRNFW
RSINDRNFM

SEQ ID NO: 9992 - protein, 9 aa, Artificial Sequence
  Description of Artificial Sequence: Synthetic peptide
  Seed: RGINDRNFW
RSINDRNFW

SEQ ID NO: 9993 - protein, 10 aa, Artificial Sequence
  Description of Artificial Sequence: Synthetic peptide
  Seed: RFYIQMCTEL
RLYIQMCTEI

SEQ ID NO: 9994 - protein, 10 aa, Artificial Sequence
  Description of Artificial Sequence: Synthetic peptide
  Seed: RGINDRNFWR
RHINDRNFWK

SEQ ID NO: 9995 - protein, 10 aa, Artificial Sequence
  Description of Artificial Sequence: Synthetic peptide
  Seed: RGINDRNFWR
RCINDRNFWR

SEQ ID NO: 9996 - protein, 10 aa, Artificial Sequence
  Description of Artificial Sequence: Synthetic peptide
  Seed: RGINDRNFWR
RCINDRNFWK

SEQ ID NO: 9997 - protein, 10 aa, Artificial Sequence
  Description of Artificial Sequence: Synthetic peptide
  Seed: RGINDRNFWR
RQINDRNFWR

SEQ ID NO: 9998 - protein, 10 aa, Artificial Sequence
  Description of Artificial Sequence: Synthetic peptide
  Seed: RGINDRNFWR
RQINDRNFWH

SEQ ID NO: 9999 - protein, 10 aa, Artificial Sequence
  Description of Artificial Sequence: Synthetic peptide
  Seed: RGINDRNFWR
RQINDRNFWK

SEQ ID NO: 10000 - protein, 10 aa, Artificial Sequence
  Description of Artificial Sequence: Synthetic peptide
  Seed: RGINDRNFWR
REINDRNFWR

SEQ ID NO: 10001 - protein, 10 aa, Artificial Sequence
  Description of Artificial Sequence: Synthetic peptide
  Seed: RGINDRNFWR
REINDRNFWK

SEQ ID NO: 10002 - protein, 10 aa, Artificial Sequence
  Description of Artificial Sequence: Synthetic peptide
  Seed: RGINDRNFWR
RGINDRNFWK

SEQ ID NO: 10003 - protein, 10 aa, Artificial Sequence
  Description of Artificial Sequence: Synthetic peptide
  Seed: RGINDRNFWR
RHINDRNFWR

SEQ ID NO: 10004 - protein, 10 aa, Artificial Sequence
  Description of Artificial Sequence: Synthetic peptide
  Seed: RGINDRNFWR
RIINDRNFWR

SEQ ID NO: 10005 - protein, 9 aa, Artificial Sequence
  Description of Artificial Sequence: Synthetic peptide
  Seed: RGINDRNFW
RSINDRNFY

SEQ ID NO: 10006 - protein, 10 aa, Artificial Sequence
  Description of Artificial Sequence: Synthetic peptide
  Seed: RGINDRNFWR
RIINDRNFWH

SEQ ID NO: 10007 - protein, 10 aa, Artificial Sequence
  Description of Artificial Sequence: Synthetic peptide
  Seed: RGINDRNFWR
RIINDRNFWK

SEQ ID NO: 10008 - protein, 10 aa, Artificial Sequence
  Description of Artificial Sequence: Synthetic peptide
  Seed: RGINDRNFWR
RIINDRNFWY

SEQ ID NO: 10009 - protein, 10 aa, Artificial Sequence
  Description of Artificial Sequence: Synthetic peptide
  Seed: RGINDRNFWR
RLINDRNFWR

SEQ ID NO: 10010 - protein, 10 aa, Artificial Sequence
  Description of Artificial Sequence: Synthetic peptide
  Seed: RGINDRNFWR
RLINDRNFWH

SEQ ID NO: 10011 - protein, 10 aa, Artificial Sequence
  Description of Artificial Sequence: Synthetic peptide
  Seed: RGINDRNFWR
RLINDRNFWK

SEQ ID NO: 10012 - protein, 10 aa, Artificial Sequence
  Description of Artificial Sequence: Synthetic peptide
  Seed: RGINDRNFWR
RLINDRNFWY

SEQ ID NO: 10013 - protein, 10 aa, Artificial Sequence
  Description of Artificial Sequence: Synthetic peptide
  Seed: RGINDRNFWR
RKINDRNFWR

SEQ ID NO: 10014 - protein, 10 aa, Artificial Sequence
  Description of Artificial Sequence: Synthetic peptide
  Seed: RGINDRNFWR
RKINDRNFWK

SEQ ID NO: 10015 - protein, 10 aa, Artificial Sequence
  Description of Artificial Sequence: Synthetic peptide
  Seed: RGINDRNFWR
RDINDRNFWK

SEQ ID NO: 10016 - protein, 10 aa, Artificial Sequence
  Description of Artificial Sequence: Synthetic peptide
  Seed: RGINDRNFWR
RDINDRNFWR

SEQ ID NO: 10017 - protein, 10 aa, Artificial Sequence
  Description of Artificial Sequence: Synthetic peptide
  Seed: RGINDRNFWR
RNINDRNFWK

SEQ ID NO: 10018 - protein, 10 aa, Artificial Sequence
  Description of Artificial Sequence: Synthetic peptide
  Seed: RGINDRNFWR
RNINDRNFWR

SEQ ID NO: 10019 - protein, 9 aa, Artificial Sequence
  Description of Artificial Sequence: Synthetic peptide
  Seed: RGINDRNFW
RSINDRNFV

SEQ ID NO: 10020 - protein, 9 aa, Artificial Sequence
  Description of Artificial Sequence: Synthetic peptide
  Seed: RGINDRNFW
RTINDRNFI

SEQ ID NO: 10021 - protein, 9 aa, Artificial Sequence
  Description of Artificial Sequence: Synthetic peptide
  Seed: RGINDRNFW
RTINDRNFL

SEQ ID NO: 10022 - protein, 9 aa, Artificial Sequence
  Description of Artificial Sequence: Synthetic peptide
  Seed: RGINDRNFW
RTINDRNFM

SEQ ID NO: 10023 - protein, 9 aa, Artificial Sequence
  Description of Artificial Sequence: Synthetic peptide
  Seed: RGINDRNFW
RTINDRNFF

SEQ ID NO: 10024 - protein, 9 aa, Artificial Sequence
  Description of Artificial Sequence: Synthetic peptide
  Seed: RGINDRNFW
RTINDRNFW

SEQ ID NO: 10025 - protein, 9 aa, Artificial Sequence
  Description of Artificial Sequence: Synthetic peptide
  Seed: RGINDRNFW
RTINDRNFY

SEQ ID NO: 10026 - protein, 9 aa, Artificial Sequence
  Description of Artificial Sequence: Synthetic peptide
  Seed: RGINDRNFW
RTINDRNFV

SEQ ID NO: 10027 - protein, 9 aa, Artificial Sequence
  Description of Artificial Sequence: Synthetic peptide
  Seed: RGINDRNFW
RVINDRNFI

SEQ ID NO: 10028 - protein, 9 aa, Artificial Sequence
  Description of Artificial Sequence: Synthetic peptide
  Seed: RGINDRNFW
RVINDRNFL

SEQ ID NO: 10029 - protein, 9 aa, Artificial Sequence
  Description of Artificial Sequence: Synthetic peptide
  Seed: RGINDRNFW
RVINDRNFM

SEQ ID NO: 10030 - protein, 9 aa, Artificial Sequence
  Description of Artificial Sequence: Synthetic peptide
  Seed: RGINDRNFW
RVINDRNFF

SEQ ID NO: 10031 - protein, 9 aa, Artificial Sequence
  Description of Artificial Sequence: Synthetic peptide
  Seed: RGINDRNFW
RVINDRNFW

SEQ ID NO: 10032 - protein, 9 aa, Artificial Sequence
  Description of Artificial Sequence: Synthetic peptide
  Seed: RGINDRNFW
RVINDRNFY

SEQ ID NO: 10033 - protein, 10 aa, Artificial Sequence
  Description of Artificial Sequence: Synthetic peptide
  Seed: RGINDRNFWR
RAINDRNFWR

SEQ ID NO: 10034 - protein, 10 aa, Artificial Sequence
  Description of Artificial Sequence: Synthetic peptide
  Seed: RGINDRNFWR
RAINDRNFWH

SEQ ID NO: 10035 - protein, 10 aa, Artificial Sequence
  Description of Artificial Sequence: Synthetic peptide
  Seed: RGINDRNFWR
RAINDRNFWK

SEQ ID NO: 10036 - protein, 10 aa, Artificial Sequence
  Description of Artificial Sequence: Synthetic peptide
  Seed: RGINDRNFWR
RRINDRNFWR

SEQ ID NO: 10037 - protein, 10 aa, Artificial Sequence
  Description of Artificial Sequence: Synthetic peptide
  Seed: RGINDRNFWR
RRINDRNFWK

SEQ ID NO: 10038 - protein, 11 aa, Artificial Sequence
  Description of Artificial Sequence: Synthetic peptide
  Seed: RFYIQMCTELK
RLYIQMCTELY

SEQ ID NO: 10039 - protein, 11 aa, Artificial Sequence
  Description of Artificial Sequence: Synthetic peptide
  Seed: RFYIQMCTELK
RLYIQMCTELK

SEQ ID NO: 10040 - protein, 11 aa, Artificial Sequence
  Description of Artificial Sequence: Synthetic peptide
  Seed: RFYIQMCTELK
RLYIQMCTELR

SEQ ID NO: 10041 - protein, 10 aa, Artificial Sequence
  Description of Artificial Sequence: Synthetic peptide
  Seed: RFYIQMCTEL
RPYIQMCTEY

SEQ ID NO: 10042 - protein, 10 aa, Artificial Sequence
  Description of Artificial Sequence: Synthetic peptide
  Seed: RFYIQMCTEL
RFYIQMCTEW

SEQ ID NO: 10043 - protein, 10 aa, Artificial Sequence
  Description of Artificial Sequence: Synthetic peptide
  Seed: RFYIQMCTEL
RFYIQMCTEY

SEQ ID NO: 10044 - protein, 10 aa, Artificial Sequence
  Description of Artificial Sequence: Synthetic peptide
  Seed: RFYIQMCTEL
RFYIQMCTEV

SEQ ID NO: 10045 - protein, 10 aa, Artificial Sequence
  Description of Artificial Sequence: Synthetic peptide
  Seed: RFYIQMCTEL
RPYIQMCTEI

SEQ ID NO: 10046 - protein, 10 aa, Artificial Sequence
  Description of Artificial Sequence: Synthetic peptide
  Seed: RFYIQMCTEL
RPYIQMCTEL

SEQ ID NO: 10047 - protein, 10 aa, Artificial Sequence
  Description of Artificial Sequence: Synthetic peptide
  Seed: RFYIQMCTEL
RPYIQMCTEM

SEQ ID NO: 10048 - protein, 10 aa, Artificial Sequence
  Description of Artificial Sequence: Synthetic peptide
  Seed: RFYIQMCTEL
RPYIQMCTEF

SEQ ID NO: 10049 - protein, 10 aa, Artificial Sequence
  Description of Artificial Sequence: Synthetic peptide
  Seed: RFYIQMCTEL
RPYIQMCTEW

SEQ ID NO: 10050 - protein, 10 aa, Artificial Sequence
  Description of Artificial Sequence: Synthetic peptide
  Seed: RFYIQMCTEL
RPYIQMCTEV

SEQ ID NO: 10051 - protein, 11 aa, Artificial Sequence
  Description of Artificial Sequence: Synthetic peptide
  Seed: RFYIQMCTELK
RIYIQMCTELY

SEQ ID NO: 10052 - protein, 10 aa, Artificial Sequence
  Description of Artificial Sequence: Synthetic peptide
  Seed: RFYIQMCTEL
RSYIQMCTEI

SEQ ID NO: 10053 - protein, 10 aa, Artificial Sequence
  Description of Artificial Sequence: Synthetic peptide
  Seed: RFYIQMCTEL
RSYIQMCTEL

SEQ ID NO: 10054 - protein, 10 aa, Artificial Sequence
  Description of Artificial Sequence: Synthetic peptide
  Seed: RFYIQMCTEL
RSYIQMCTEM

SEQ ID NO: 10055 - protein, 10 aa, Artificial Sequence
  Description of Artificial Sequence: Synthetic peptide
  Seed: RFYIQMCTEL
RSYIQMCTEF

SEQ ID NO: 10056 - protein, 10 aa, Artificial Sequence
  Description of Artificial Sequence: Synthetic peptide
  Seed: RFYIQMCTEL
RSYIQMCTEW

SEQ ID NO: 10057 - protein, 10 aa, Artificial Sequence
  Description of Artificial Sequence: Synthetic peptide
  Seed: RFYIQMCTEL
RSYIQMCTEY

SEQ ID NO: 10058 - protein, 10 aa, Artificial Sequence
  Description of Artificial Sequence: Synthetic peptide
  Seed: RFYIQMCTEL
RSYIQMCTEV

SEQ ID NO: 10059 - protein, 10 aa, Artificial Sequence
  Description of Artificial Sequence: Synthetic peptide
  Seed: RFYIQMCTEL
RTYIQMCTEI

SEQ ID NO: 10060 - protein, 10 aa, Artificial Sequence
  Description of Artificial Sequence: Synthetic peptide
  Seed: RFYIQMCTEL
RTYIQMCTEL

SEQ ID NO: 10061 - protein, 10 aa, Artificial Sequence
  Description of Artificial Sequence: Synthetic peptide
  Seed: RFYIQMCTEL
RFYIQMCTEM

SEQ ID NO: 10062 - protein, 10 aa, Artificial Sequence
  Description of Artificial Sequence: Synthetic peptide
  Seed: RFYIQMCTEL
RMYIQMCTEV

SEQ ID NO: 10063 - protein, 10 aa, Artificial Sequence
  Description of Artificial Sequence: Synthetic peptide
  Seed: RFYIQMCTEL
RMYIQMCTEY

SEQ ID NO: 10064 - protein, 10 aa, Artificial Sequence
  Description of Artificial Sequence: Synthetic peptide
  Seed: RFYIQMCTEL
RLYIQMCTEL

SEQ ID NO: 10065 - protein, 10 aa, Artificial Sequence
  Description of Artificial Sequence: Synthetic peptide
  Seed: RFYIQMCTEL
RLYIQMCTEM

SEQ ID NO: 10066 - protein, 10 aa, Artificial Sequence
  Description of Artificial Sequence: Synthetic peptide
  Seed: RFYIQMCTEL
RLYIQMCTEF

SEQ ID NO: 10067 - protein, 10 aa, Artificial Sequence
  Description of Artificial Sequence: Synthetic peptide
  Seed: RFYIQMCTEL
RLYIQMCTEW

SEQ ID NO: 10068 - protein, 10 aa, Artificial Sequence
  Description of Artificial Sequence: Synthetic peptide
  Seed: RFYIQMCTEL
RLYIQMCTEY

SEQ ID NO: 10069 - protein, 10 aa, Artificial Sequence
  Description of Artificial Sequence: Synthetic peptide
  Seed: RFYIQMCTEL
RLYIQMCTEV

SEQ ID NO: 10070 - protein, 10 aa, Artificial Sequence
  Description of Artificial Sequence: Synthetic peptide
  Seed: RFYIQMCTEL
RKYIQMCTEI

SEQ ID NO: 10071 - protein, 10 aa, Artificial Sequence
  Description of Artificial Sequence: Synthetic peptide
  Seed: RFYIQMCTEL
RKYIQMCTEL

SEQ ID NO: 10072 - protein, 10 aa, Artificial Sequence
  Description of Artificial Sequence: Synthetic peptide
  Seed: RFYIQMCTEL
RKYIQMCTEM

SEQ ID NO: 10073 - protein, 10 aa, Artificial Sequence
  Description of Artificial Sequence: Synthetic peptide
  Seed: RFYIQMCTEL
RKYIQMCTEF

SEQ ID NO: 10074 - protein, 10 aa, Artificial Sequence
  Description of Artificial Sequence: Synthetic peptide
  Seed: RFYIQMCTEL
RKYIQMCTEW

SEQ ID NO: 10075 - protein, 10 aa, Artificial Sequence
  Description of Artificial Sequence: Synthetic peptide
  Seed: RFYIQMCTEL
RKYIQMCTEY

SEQ ID NO: 10076 - protein, 10 aa, Artificial Sequence
  Description of Artificial Sequence: Synthetic peptide
  Seed: RFYIQMCTEL
RKYIQMCTEV

SEQ ID NO: 10077 - protein, 10 aa, Artificial Sequence
  Description of Artificial Sequence: Synthetic peptide
  Seed: RFYIQMCTEL
RMYIQMCTEH

SEQ ID NO: 10078 - protein, 10 aa, Artificial Sequence
  Description of Artificial Sequence: Synthetic peptide
  Seed: RFYIQMCTEL
RMYIQMCTEI

SEQ ID NO: 10079 - protein, 10 aa, Artificial Sequence
  Description of Artificial Sequence: Synthetic peptide
  Seed: RFYIQMCTEL
RMYIQMCTEL

SEQ ID NO: 10080 - protein, 10 aa, Artificial Sequence
  Description of Artificial Sequence: Synthetic peptide
  Seed: RFYIQMCTEL
RMYIQMCTEM

SEQ ID NO: 10081 - protein, 10 aa, Artificial Sequence
  Description of Artificial Sequence: Synthetic peptide
  Seed: RFYIQMCTEL
RMYIQMCTEF

SEQ ID NO: 10082 - protein, 10 aa, Artificial Sequence
  Description of Artificial Sequence: Synthetic peptide
  Seed: RFYIQMCTEL
RMYIQMCTEW

SEQ ID NO: 10083 - protein, 10 aa, Artificial Sequence
  Description of Artificial Sequence: Synthetic peptide
  Seed: RFYIQMCTEL
RTYIQMCTEM

SEQ ID NO: 10084 - protein, 10 aa, Artificial Sequence
  Description of Artificial Sequence: Synthetic peptide
  Seed: RFYIQMCTEL
RTYIQMCTEF

SEQ ID NO: 10085 - protein, 10 aa, Artificial Sequence
  Description of Artificial Sequence: Synthetic peptide
  Seed: RFYIQMCTEL
RTYIQMCTEW

SEQ ID NO: 10086 - protein, 10 aa, Artificial Sequence
  Description of Artificial Sequence: Synthetic peptide
  Seed: RFYIQMCTEL
RVYIQMCTEV

SEQ ID NO: 10087 - protein, 11 aa, Artificial Sequence
  Description of Artificial Sequence: Synthetic peptide
  Seed: RFYIQMCTELK
RAYIQMCTELK

SEQ ID NO: 10088 - protein, 11 aa, Artificial Sequence
  Description of Artificial Sequence: Synthetic peptide
  Seed: RFYIQMCTELK
RRYIQMCTELR

SEQ ID NO: 10089 - protein, 11 aa, Artificial Sequence
  Description of Artificial Sequence: Synthetic peptide
  Seed: RFYIQMCTELK
RRYIQMCTELK

SEQ ID NO: 10090 - protein, 11 aa, Artificial Sequence
  Description of Artificial Sequence: Synthetic peptide
  Seed: RFYIQMCTELK
RNYIQMCTELR

SEQ ID NO: 10091 - protein, 11 aa, Artificial Sequence
  Description of Artificial Sequence: Synthetic peptide
  Seed: RFYIQMCTELK
RNYIQMCTELK

SEQ ID NO: 10092 - protein, 11 aa, Artificial Sequence
  Description of Artificial Sequence: Synthetic peptide
  Seed: RFYIQMCTELK
RDYIQMCTELR

SEQ ID NO: 10093 - protein, 11 aa, Artificial Sequence
  Description of Artificial Sequence: Synthetic peptide
  Seed: RFYIQMCTELK
RDYIQMCTELK

SEQ ID NO: 10094 - protein, 11 aa, Artificial Sequence
  Description of Artificial Sequence: Synthetic peptide
  Seed: RFYIQMCTELK
RCYIQMCTELR

SEQ ID NO: 10095 - protein, 11 aa, Artificial Sequence
  Description of Artificial Sequence: Synthetic peptide
  Seed: RFYIQMCTELK
RCYIQMCTELK

SEQ ID NO: 10096 - protein, 11 aa, Artificial Sequence
  Description of Artificial Sequence: Synthetic peptide
  Seed: RFYIQMCTELK
RQYIQMCTELR

SEQ ID NO: 10097 - protein, 11 aa, Artificial Sequence
  Description of Artificial Sequence: Synthetic peptide
  Seed: RFYIQMCTELK
RQYIQMCTELK

SEQ ID NO: 10098 - protein, 11 aa, Artificial Sequence
  Description of Artificial Sequence: Synthetic peptide
  Seed: RFYIQMCTELK
REYIQMCTELR

SEQ ID NO: 10099 - protein, 11 aa, Artificial Sequence
  Description of Artificial Sequence: Synthetic peptide
  Seed: RFYIQMCTELK
REYIQMCTELK

SEQ ID NO: 10100 - protein, 11 aa, Artificial Sequence
  Description of Artificial Sequence: Synthetic peptide
  Seed: RFYIQMCTELK
RGYIQMCTELR

SEQ ID NO: 10101 - protein, 11 aa, Artificial Sequence
  Description of Artificial Sequence: Synthetic peptide
  Seed: RFYIQMCTELK
RGYIQMCTELK

SEQ ID NO: 10102 - protein, 11 aa, Artificial Sequence
  Description of Artificial Sequence: Synthetic peptide
  Seed: RFYIQMCTELK
RHYIQMCTELR

SEQ ID NO: 10103 - protein, 11 aa, Artificial Sequence
  Description of Artificial Sequence: Synthetic peptide
  Seed: RFYIQMCTELK
RHYIQMCTELK

SEQ ID NO: 10104 - protein, 11 aa, Artificial Sequence
  Description of Artificial Sequence: Synthetic peptide
  Seed: RFYIQMCTELK
RIYIQMCTELR

SEQ ID NO: 10105 - protein, 11 aa, Artificial Sequence
  Description of Artificial Sequence: Synthetic peptide
  Seed: RFYIQMCTELK
RIYIQMCTELK

SEQ ID NO: 10106 - protein, 11 aa, Artificial Sequence
  Description of Artificial Sequence: Synthetic peptide
  Seed: RFYIQMCTELK
RAYIQMCTELR

SEQ ID NO: 10107 - protein, 10 aa, Artificial Sequence
  Description of Artificial Sequence: Synthetic peptide
  Seed: RFYIQMCTEL
RVYIQMCTEY

SEQ ID NO: 10108 - protein, 10 aa, Artificial Sequence
  Description of Artificial Sequence: Synthetic peptide
  Seed: RFYIQMCTEL
RTYIQMCTEY

SEQ ID NO: 10109 - protein, 10 aa, Artificial Sequence
  Description of Artificial Sequence: Synthetic peptide
  Seed: RFYIQMCTEL
RVYIQMCTEW

SEQ ID NO: 10110 - protein, 10 aa, Artificial Sequence
  Description of Artificial Sequence: Synthetic peptide
  Seed: RFYIQMCTEL
RTYIQMCTEV

SEQ ID NO: 10111 - protein, 10 aa, Artificial Sequence
  Description of Artificial Sequence: Synthetic peptide
  Seed: RFYIQMCTEL
RWYIQMCTEI

SEQ ID NO: 10112 - protein, 10 aa, Artificial Sequence
  Description of Artificial Sequence: Synthetic peptide
  Seed: RFYIQMCTEL
RWYIQMCTEL

SEQ ID NO: 10113 - protein, 10 aa, Artificial Sequence
  Description of Artificial Sequence: Synthetic peptide
  Seed: RFYIQMCTEL
RWYIQMCTEM

SEQ ID NO: 10114 - protein, 10 aa, Artificial Sequence
  Description of Artificial Sequence: Synthetic peptide
  Seed: RFYIQMCTEL
RWYIQMCTEF

SEQ ID NO: 10115 - protein, 10 aa, Artificial Sequence
  Description of Artificial Sequence: Synthetic peptide
  Seed: RFYIQMCTEL
RWYIQMCTEW

SEQ ID NO: 10116 - protein, 10 aa, Artificial Sequence
  Description of Artificial Sequence: Synthetic peptide
  Seed: RFYIQMCTEL
RWYIQMCTEY

SEQ ID NO: 10117 - protein, 10 aa, Artificial Sequence
  Description of Artificial Sequence: Synthetic peptide
  Seed: RFYIQMCTEL
RWYIQMCTEV

SEQ ID NO: 10118 - protein, 10 aa, Artificial Sequence
  Description of Artificial Sequence: Synthetic peptide
  Seed: RFYIQMCTEL
RYYIQMCTEI

SEQ ID NO: 10119 - protein, 10 aa, Artificial Sequence
  Description of Artificial Sequence: Synthetic peptide
  Seed: RFYIQMCTEL
RYYIQMCTEL

SEQ ID NO: 10120 - protein, 10 aa, Artificial Sequence
  Description of Artificial Sequence: Synthetic peptide
  Seed: RFYIQMCTEL
RYYIQMCTEM

SEQ ID NO: 10121 - protein, 10 aa, Artificial Sequence
  Description of Artificial Sequence: Synthetic peptide
  Seed: RFYIQMCTEL
RYYIQMCTEF

SEQ ID NO: 10122 - protein, 10 aa, Artificial Sequence
  Description of Artificial Sequence: Synthetic peptide
  Seed: RFYIQMCTEL
RYYIQMCTEW

SEQ ID NO: 10123 - protein, 10 aa, Artificial Sequence
  Description of Artificial Sequence: Synthetic peptide
  Seed: RFYIQMCTEL
RYYIQMCTEY

SEQ ID NO: 10124 - protein, 10 aa, Artificial Sequence
  Description of Artificial Sequence: Synthetic peptide
  Seed: RFYIQMCTEL
RYYIQMCTEV

SEQ ID NO: 10125 - protein, 10 aa, Artificial Sequence
  Description of Artificial Sequence: Synthetic peptide
  Seed: RFYIQMCTEL
RVYIQMCTEI

SEQ ID NO: 10126 - protein, 10 aa, Artificial Sequence
  Description of Artificial Sequence: Synthetic peptide
  Seed: RFYIQMCTEL
RVYIQMCTEL

SEQ ID NO: 10127 - protein, 10 aa, Artificial Sequence
  Description of Artificial Sequence: Synthetic peptide
  Seed: RFYIQMCTEL
RVYIQMCTEM

SEQ ID NO: 10128 - protein, 10 aa, Artificial Sequence
  Description of Artificial Sequence: Synthetic peptide
  Seed: RFYIQMCTEL
RVYIQMCTEF

SEQ ID NO: 10129 - protein, 11 aa, Artificial Sequence
  Description of Artificial Sequence: Synthetic peptide
  Seed: RGINDRNFWRG
RWINDRNFWRH

SEQ ID NO: 10130 - protein, 11 aa, Artificial Sequence
  Description of Artificial Sequence: Synthetic peptide
  Seed: RGINDRNFWRG
RWINDRNFWRL

SEQ ID NO: 10131 - protein, 10 aa, Artificial Sequence
  Description of Artificial Sequence: Synthetic peptide
  Seed: RESRNPGNAE
RFSRNPGNAI

SEQ ID NO: 10132 - protein, 9 aa, Artificial Sequence
  Description of Artificial Sequence: Synthetic peptide
  Seed: RGRGVFELS
RIRGVFELP

SEQ ID NO: 10133 - protein, 9 aa, Artificial Sequence
  Description of Artificial Sequence: Synthetic peptide
  Seed: RGRGVFELS
RIRGVFELQ

SEQ ID NO: 10134 - protein, 9 aa, Artificial Sequence
  Description of Artificial Sequence: Synthetic peptide
  Seed: RGRGVFELS
RIRGVFELE

SEQ ID NO: 10135 - protein, 9 aa, Artificial Sequence
  Description of Artificial Sequence: Synthetic peptide
  Seed: RGRGVFELS
RIRGVFELG

SEQ ID NO: 10136 - protein, 9 aa, Artificial Sequence
  Description of Artificial Sequence: Synthetic peptide
  Seed: RGRGVFELS
RIRGVFELH

SEQ ID NO: 10137 - protein, 9 aa, Artificial Sequence
  Description of Artificial Sequence: Synthetic peptide
  Seed: RGRGVFELS
RIRGVFELI

SEQ ID NO: 10138 - protein, 9 aa, Artificial Sequence
  Description of Artificial Sequence: Synthetic peptide
  Seed: RGRGVFELS
RIRGVFELL

SEQ ID NO: 10139 - protein, 9 aa, Artificial Sequence
  Description of Artificial Sequence: Synthetic peptide
  Seed: RGRGVFELS
RIRGVFELK

SEQ ID NO: 10140 - protein, 9 aa, Artificial Sequence
  Description of Artificial Sequence: Synthetic peptide
  Seed: RGRGVFELS
RIRGVFELM

SEQ ID NO: 10141 - protein, 9 aa, Artificial Sequence
  Description of Artificial Sequence: Synthetic peptide
  Seed: RGRGVFELS
RIRGVFELF

SEQ ID NO: 10142 - protein, 9 aa, Artificial Sequence
  Description of Artificial Sequence: Synthetic peptide
  Seed: RGRGVFELS
RIRGVFELS

SEQ ID NO: 10143 - protein, 9 aa, Artificial Sequence
  Description of Artificial Sequence: Synthetic peptide
  Seed: RGRGVFELS
RLRGVFELG

SEQ ID NO: 10144 - protein, 9 aa, Artificial Sequence
  Description of Artificial Sequence: Synthetic peptide
  Seed: RGRGVFELS
RIRGVFELT

SEQ ID NO: 10145 - protein, 9 aa, Artificial Sequence
  Description of Artificial Sequence: Synthetic peptide
  Seed: RGRGVFELS
RIRGVFELW

SEQ ID NO: 10146 - protein, 9 aa, Artificial Sequence
  Description of Artificial Sequence: Synthetic peptide
  Seed: RGRGVFELS
RIRGVFELY

SEQ ID NO: 10147 - protein, 9 aa, Artificial Sequence
  Description of Artificial Sequence: Synthetic peptide
  Seed: RGRGVFELS
RIRGVFELV

SEQ ID NO: 10148 - protein, 9 aa, Artificial Sequence
  Description of Artificial Sequence: Synthetic peptide
  Seed: RGRGVFELS
RLRGVFELA

SEQ ID NO: 10149 - protein, 9 aa, Artificial Sequence
  Description of Artificial Sequence: Synthetic peptide
  Seed: RGRGVFELS
RLRGVFELR

SEQ ID NO: 10150 - protein, 9 aa, Artificial Sequence
  Description of Artificial Sequence: Synthetic peptide
  Seed: RGRGVFELS
RLRGVFELN

SEQ ID NO: 10151 - protein, 9 aa, Artificial Sequence
  Description of Artificial Sequence: Synthetic peptide
  Seed: RGRGVFELS
RLRGVFELC

SEQ ID NO: 10152 - protein, 9 aa, Artificial Sequence
  Description of Artificial Sequence: Synthetic peptide
  Seed: RGRGVFELS
RLRGVFELQ

SEQ ID NO: 10153 - protein, 9 aa, Artificial Sequence
  Description of Artificial Sequence: Synthetic peptide
  Seed: RGRGVFELS
RIRGVFELC

SEQ ID NO: 10154 - protein, 9 aa, Artificial Sequence
  Description of Artificial Sequence: Synthetic peptide
  Seed: RGRGVFELS
RIRGVFELD

SEQ ID NO: 10155 - protein, 9 aa, Artificial Sequence
  Description of Artificial Sequence: Synthetic peptide
  Seed: RGRGVFELS
RIRGVFELN

SEQ ID NO: 10156 - protein, 9 aa, Artificial Sequence
  Description of Artificial Sequence: Synthetic peptide
  Seed: RGRGVFELS
RIRGVFELR

SEQ ID NO: 10157 - protein, 9 aa, Artificial Sequence
  Description of Artificial Sequence: Synthetic peptide
  Seed: RGRGVFELS
RGRGVFELN

SEQ ID NO: 10158 - protein, 9 aa, Artificial Sequence
  Description of Artificial Sequence: Synthetic peptide
  Seed: RGRGVFELS
RGRGVFELC

SEQ ID NO: 10159 - protein, 9 aa, Artificial Sequence
  Description of Artificial Sequence: Synthetic peptide
  Seed: RGRGVFELS
RGRGVFELQ

SEQ ID NO: 10160 - protein, 9 aa, Artificial Sequence
  Description of Artificial Sequence: Synthetic peptide
  Seed: RGRGVFELS
RGRGVFELE

SEQ ID NO: 10161 - protein, 9 aa, Artificial Sequence
  Description of Artificial Sequence: Synthetic peptide
  Seed: RGRGVFELS
RGRGVFELG

SEQ ID NO: 10162 - protein, 9 aa, Artificial Sequence
  Description of Artificial Sequence: Synthetic peptide
  Seed: RGRGVFELS
RGRGVFELH

SEQ ID NO: 10163 - protein, 9 aa, Artificial Sequence
  Description of Artificial Sequence: Synthetic peptide
  Seed: RGRGVFELS
RGRGVFELI

SEQ ID NO: 10164 - protein, 9 aa, Artificial Sequence
  Description of Artificial Sequence: Synthetic peptide
  Seed: RGRGVFELS
RGRGVFELL

SEQ ID NO: 10165 - protein, 9 aa, Artificial Sequence
  Description of Artificial Sequence: Synthetic peptide
  Seed: RGRGVFELS
RGRGVFELK

SEQ ID NO: 10166 - protein, 9 aa, Artificial Sequence
  Description of Artificial Sequence: Synthetic peptide
  Seed: RGRGVFELS
RGRGVFELM

SEQ ID NO: 10167 - protein, 9 aa, Artificial Sequence
  Description of Artificial Sequence: Synthetic peptide
  Seed: RGRGVFELS
RGRGVFELF

SEQ ID NO: 10168 - protein, 9 aa, Artificial Sequence
  Description of Artificial Sequence: Synthetic peptide
  Seed: RGRGVFELS
RGRGVFELP

SEQ ID NO: 10169 - protein, 9 aa, Artificial Sequence
  Description of Artificial Sequence: Synthetic peptide
  Seed: RGRGVFELS
RGRGVFELT

SEQ ID NO: 10170 - protein, 9 aa, Artificial Sequence
  Description of Artificial Sequence: Synthetic peptide
  Seed: RGRGVFELS
RGRGVFELY

SEQ ID NO: 10171 - protein, 9 aa, Artificial Sequence
  Description of Artificial Sequence: Synthetic peptide
  Seed: RGRGVFELS
RGRGVFELV

SEQ ID NO: 10172 - protein, 9 aa, Artificial Sequence
  Description of Artificial Sequence: Synthetic peptide
  Seed: RGRGVFELS
RHRGVFELA

SEQ ID NO: 10173 - protein, 9 aa, Artificial Sequence
  Description of Artificial Sequence: Synthetic peptide
  Seed: RGRGVFELS
RHRGVFELR

SEQ ID NO: 10174 - protein, 9 aa, Artificial Sequence
  Description of Artificial Sequence: Synthetic peptide
  Seed: RGRGVFELS
RHRGVFELK

SEQ ID NO: 10175 - protein, 9 aa, Artificial Sequence
  Description of Artificial Sequence: Synthetic peptide
  Seed: RGRGVFELS
RIRGVFELA

SEQ ID NO: 10176 - protein, 9 aa, Artificial Sequence
  Description of Artificial Sequence: Synthetic peptide
  Seed: RGRGVFELS
RLRGVFELE

SEQ ID NO: 10177 - protein, 9 aa, Artificial Sequence
  Description of Artificial Sequence: Synthetic peptide
  Seed: RGRGVFELS
RLRGVFELH

SEQ ID NO: 10178 - protein, 9 aa, Artificial Sequence
  Description of Artificial Sequence: Synthetic peptide
  Seed: RGRGVFELS
RGRGVFELA

SEQ ID NO: 10179 - protein, 9 aa, Artificial Sequence
  Description of Artificial Sequence: Synthetic peptide
  Seed: RGRGVFELS
RFRGVFELR

SEQ ID NO: 10180 - protein, 9 aa, Artificial Sequence
  Description of Artificial Sequence: Synthetic peptide
  Seed: RGRGVFELS
RMRGVFELM

SEQ ID NO: 10181 - protein, 9 aa, Artificial Sequence
  Description of Artificial Sequence: Synthetic peptide
  Seed: RGRGVFELS
RMRGVFELF

SEQ ID NO: 10182 - protein, 9 aa, Artificial Sequence
  Description of Artificial Sequence: Synthetic peptide
  Seed: RGRGVFELS
RMRGVFELP

SEQ ID NO: 10183 - protein, 9 aa, Artificial Sequence
  Description of Artificial Sequence: Synthetic peptide
  Seed: RGRGVFELS
RMRGVFELS

SEQ ID NO: 10184 - protein, 9 aa, Artificial Sequence
  Description of Artificial Sequence: Synthetic peptide
  Seed: RGRGVFELS
RMRGVFELT

SEQ ID NO: 10185 - protein, 9 aa, Artificial Sequence
  Description of Artificial Sequence: Synthetic peptide
  Seed: RGRGVFELS
RMRGVFELW

SEQ ID NO: 10186 - protein, 9 aa, Artificial Sequence
  Description of Artificial Sequence: Synthetic peptide
  Seed: RGRGVFELS
RMRGVFELY

SEQ ID NO: 10187 - protein, 9 aa, Artificial Sequence
  Description of Artificial Sequence: Synthetic peptide
  Seed: RGRGVFELS
RMRGVFELV

SEQ ID NO: 10188 - protein, 9 aa, Artificial Sequence
  Description of Artificial Sequence: Synthetic peptide
  Seed: RGRGVFELS
RFRGVFELA

SEQ ID NO: 10189 - protein, 9 aa, Artificial Sequence
  Description of Artificial Sequence: Synthetic peptide
  Seed: RGRGVFELS
RFRGVFELN

SEQ ID NO: 10190 - protein, 9 aa, Artificial Sequence
  Description of Artificial Sequence: Synthetic peptide
  Seed: RGRGVFELS
RLRGVFELI

SEQ ID NO: 10191 - protein, 9 aa, Artificial Sequence
  Description of Artificial Sequence: Synthetic peptide
  Seed: RGRGVFELS
RFRGVFELD

SEQ ID NO: 10192 - protein, 9 aa, Artificial Sequence
  Description of Artificial Sequence: Synthetic peptide
  Seed: RGRGVFELS
RFRGVFELC

SEQ ID NO: 10193 - protein, 9 aa, Artificial Sequence
  Description of Artificial Sequence: Synthetic peptide
  Seed: RGRGVFELS
RFRGVFELQ

SEQ ID NO: 10194 - protein, 9 aa, Artificial Sequence
  Description of Artificial Sequence: Synthetic peptide
  Seed: RGRGVFELS
RFRGVFELE

SEQ ID NO: 10195 - protein, 9 aa, Artificial Sequence
  Description of Artificial Sequence: Synthetic peptide
  Seed: RGRGVFELS
RFRGVFELG

SEQ ID NO: 10196 - protein, 9 aa, Artificial Sequence
  Description of Artificial Sequence: Synthetic peptide
  Seed: RGRGVFELS
RFRGVFELH

SEQ ID NO: 10197 - protein, 9 aa, Artificial Sequence
  Description of Artificial Sequence: Synthetic peptide
  Seed: RGRGVFELS
RFRGVFELI

SEQ ID NO: 10198 - protein, 9 aa, Artificial Sequence
  Description of Artificial Sequence: Synthetic peptide
  Seed: RGRGVFELS
RFRGVFELL

SEQ ID NO: 10199 - protein, 9 aa, Artificial Sequence
  Description of Artificial Sequence: Synthetic peptide
  Seed: RGRGVFELS
RFRGVFELK

SEQ ID NO: 10200 - protein, 9 aa, Artificial Sequence
  Description of Artificial Sequence: Synthetic peptide
  Seed: RGRGVFELS
RMRGVFELK

SEQ ID NO: 10201 - protein, 9 aa, Artificial Sequence
  Description of Artificial Sequence: Synthetic peptide
  Seed: RGRGVFELS
RMRGVFELL

SEQ ID NO: 10202 - protein, 9 aa, Artificial Sequence
  Description of Artificial Sequence: Synthetic peptide
  Seed: RGRGVFELS
RMRGVFELI

SEQ ID NO: 10203 - protein, 9 aa, Artificial Sequence
  Description of Artificial Sequence: Synthetic peptide
  Seed: RGRGVFELS
RMRGVFELH

SEQ ID NO: 10204 - protein, 9 aa, Artificial Sequence
  Description of Artificial Sequence: Synthetic peptide
  Seed: RGRGVFELS
RLRGVFELL

SEQ ID NO: 10205 - protein, 9 aa, Artificial Sequence
  Description of Artificial Sequence: Synthetic peptide
  Seed: RGRGVFELS
RLRGVFELK

SEQ ID NO: 10206 - protein, 9 aa, Artificial Sequence
  Description of Artificial Sequence: Synthetic peptide
  Seed: RGRGVFELS
RLRGVFELM

SEQ ID NO: 10207 - protein, 9 aa, Artificial Sequence
  Description of Artificial Sequence: Synthetic peptide
  Seed: RGRGVFELS
RLRGVFELF

SEQ ID NO: 10208 - protein, 9 aa, Artificial Sequence
  Description of Artificial Sequence: Synthetic peptide
  Seed: RGRGVFELS
RLRGVFELP

SEQ ID NO: 10209 - protein, 9 aa, Artificial Sequence
  Description of Artificial Sequence: Synthetic peptide
  Seed: RGRGVFELS
RLRGVFELS

SEQ ID NO: 10210 - protein, 9 aa, Artificial Sequence
  Description of Artificial Sequence: Synthetic peptide
  Seed: RGRGVFELS
RLRGVFELT

SEQ ID NO: 10211 - protein, 9 aa, Artificial Sequence
  Description of Artificial Sequence: Synthetic peptide
  Seed: RGRGVFELS
RLRGVFELY

SEQ ID NO: 10212 - protein, 9 aa, Artificial Sequence
  Description of Artificial Sequence: Synthetic peptide
  Seed: RGRGVFELS
RLRGVFELV

SEQ ID NO: 10213 - protein, 9 aa, Artificial Sequence
  Description of Artificial Sequence: Synthetic peptide
  Seed: RGRGVFELS
RKRGVFELA

SEQ ID NO: 10214 - protein, 9 aa, Artificial Sequence
  Description of Artificial Sequence: Synthetic peptide
  Seed: RGRGVFELS
RKRGVFELK

SEQ ID NO: 10215 - protein, 9 aa, Artificial Sequence
  Description of Artificial Sequence: Synthetic peptide
  Seed: RGRGVFELS
RMRGVFELA

SEQ ID NO: 10216 - protein, 9 aa, Artificial Sequence
  Description of Artificial Sequence: Synthetic peptide
  Seed: RGRGVFELS
RMRGVFELR

SEQ ID NO: 10217 - protein, 9 aa, Artificial Sequence
  Description of Artificial Sequence: Synthetic peptide
  Seed: RGRGVFELS
RMRGVFELN

SEQ ID NO: 10218 - protein, 9 aa, Artificial Sequence
  Description of Artificial Sequence: Synthetic peptide
  Seed: RGRGVFELS
RMRGVFELD

SEQ ID NO: 10219 - protein, 9 aa, Artificial Sequence
  Description of Artificial Sequence: Synthetic peptide
  Seed: RGRGVFELS
RMRGVFELC

SEQ ID NO: 10220 - protein, 9 aa, Artificial Sequence
  Description of Artificial Sequence: Synthetic peptide
  Seed: RGRGVFELS
RMRGVFELQ

SEQ ID NO: 10221 - protein, 9 aa, Artificial Sequence
  Description of Artificial Sequence: Synthetic peptide
  Seed: RGRGVFELS
RMRGVFELE

SEQ ID NO: 10222 - protein, 9 aa, Artificial Sequence
  Description of Artificial Sequence: Synthetic peptide
  Seed: RGRGVFELS
RMRGVFELG

SEQ ID NO: 10223 - protein, 9 aa, Artificial Sequence
  Description of Artificial Sequence: Synthetic peptide
  Seed: RGRGVFELS
RGRGVFELR

SEQ ID NO: 10224 - protein, 9 aa, Artificial Sequence
  Description of Artificial Sequence: Synthetic peptide
  Seed: RGRGVFELS
RERGVFELK

SEQ ID NO: 10225 - protein, 9 aa, Artificial Sequence
  Description of Artificial Sequence: Synthetic peptide
  Seed: RGRGVFELS
RFRGVFELF

SEQ ID NO: 10226 - protein, 9 aa, Artificial Sequence
  Description of Artificial Sequence: Synthetic peptide
  Seed: RGQLSTRGV
RVQLSTRGY

SEQ ID NO: 10227 - protein, 9 aa, Artificial Sequence
  Description of Artificial Sequence: Synthetic peptide
  Seed: RGQLSTRGV
RFQLSTRGF

SEQ ID NO: 10228 - protein, 9 aa, Artificial Sequence
  Description of Artificial Sequence: Synthetic peptide
  Seed: RGQLSTRGV
RSQLSTRGM

SEQ ID NO: 10229 - protein, 9 aa, Artificial Sequence
  Description of Artificial Sequence: Synthetic peptide
  Seed: RGQLSTRGV
RSQLSTRGF

SEQ ID NO: 10230 - protein, 9 aa, Artificial Sequence
  Description of Artificial Sequence: Synthetic peptide
  Seed: RGQLSTRGV
RSQLSTRGY

SEQ ID NO: 10231 - protein, 9 aa, Artificial Sequence
  Description of Artificial Sequence: Synthetic peptide
  Seed: RGQLSTRGV
RTQLSTRGF

SEQ ID NO: 10232 - protein, 9 aa, Artificial Sequence
  Description of Artificial Sequence: Synthetic peptide
  Seed: RGQLSTRGV
RTQLSTRGY

SEQ ID NO: 10233 - protein, 9 aa, Artificial Sequence
  Description of Artificial Sequence: Synthetic peptide
  Seed: RGQLSTRGV
RYQLSTRGF

SEQ ID NO: 10234 - protein, 9 aa, Artificial Sequence
  Description of Artificial Sequence: Synthetic peptide
  Seed: RGQLSTRGV
RVQLSTRGM

SEQ ID NO: 10235 - protein, 9 aa, Artificial Sequence
  Description of Artificial Sequence: Synthetic peptide
  Seed: RGQLSTRGV
RVQLSTRGF

SEQ ID NO: 10236 - protein, 9 aa, Artificial Sequence
  Description of Artificial Sequence: Synthetic peptide
  Seed: RGRGVFELS
RARGVFELA

SEQ ID NO: 10237 - protein, 9 aa, Artificial Sequence
  Description of Artificial Sequence: Synthetic peptide
  Seed: RGRGVFELS
RARGVFELM

SEQ ID NO: 10238 - protein, 9 aa, Artificial Sequence
  Description of Artificial Sequence: Synthetic peptide
  Seed: RGRGVFELS
RARGVFELR

SEQ ID NO: 10239 - protein, 9 aa, Artificial Sequence
  Description of Artificial Sequence: Synthetic peptide
  Seed: RGRGVFELS
RARGVFELN

SEQ ID NO: 10240 - protein, 9 aa, Artificial Sequence
  Description of Artificial Sequence: Synthetic peptide
  Seed: RGRGVFELS
RARGVFELC

SEQ ID NO: 10241 - protein, 9 aa, Artificial Sequence
  Description of Artificial Sequence: Synthetic peptide
  Seed: RGRGVFELS
RARGVFELQ

SEQ ID NO: 10242 - protein, 9 aa, Artificial Sequence
  Description of Artificial Sequence: Synthetic peptide
  Seed: RGRGVFELS
RARGVFELE

SEQ ID NO: 10243 - protein, 9 aa, Artificial Sequence
  Description of Artificial Sequence: Synthetic peptide
  Seed: RGRGVFELS
RARGVFELG

SEQ ID NO: 10244 - protein, 9 aa, Artificial Sequence
  Description of Artificial Sequence: Synthetic peptide
  Seed: RGRGVFELS
RARGVFELH

SEQ ID NO: 10245 - protein, 9 aa, Artificial Sequence
  Description of Artificial Sequence: Synthetic peptide
  Seed: RGRGVFELS
RARGVFELI

SEQ ID NO: 10246 - protein, 9 aa, Artificial Sequence
  Description of Artificial Sequence: Synthetic peptide
  Seed: RGRGVFELS
RARGVFELL

SEQ ID NO: 10247 - protein, 9 aa, Artificial Sequence
  Description of Artificial Sequence: Synthetic peptide
  Seed: RGQLSTRGV
RMQLSTRGY

SEQ ID NO: 10248 - protein, 9 aa, Artificial Sequence
  Description of Artificial Sequence: Synthetic peptide
  Seed: RGQLSTRGV
RMQLSTRGW

SEQ ID NO: 10249 - protein, 9 aa, Artificial Sequence
  Description of Artificial Sequence: Synthetic peptide
  Seed: RGQLSTRGV
RMQLSTRGF

SEQ ID NO: 10250 - protein, 9 aa, Artificial Sequence
  Description of Artificial Sequence: Synthetic peptide
  Seed: RGQLSTRGV
RMQLSTRGM

SEQ ID NO: 10251 - protein, 9 aa, Artificial Sequence
  Description of Artificial Sequence: Synthetic peptide
  Seed: RGQLSTRGV
REQLSTRGF

SEQ ID NO: 10252 - protein, 9 aa, Artificial Sequence
  Description of Artificial Sequence: Synthetic peptide
  Seed: RGQLSTRGV
REQLSTRGY

SEQ ID NO: 10253 - protein, 9 aa, Artificial Sequence
  Description of Artificial Sequence: Synthetic peptide
  Seed: RGQLSTRGV
RGQLSTRGY

SEQ ID NO: 10254 - protein, 9 aa, Artificial Sequence
  Description of Artificial Sequence: Synthetic peptide
  Seed: RGQLSTRGV
RHQLSTRGM

SEQ ID NO: 10255 - protein, 9 aa, Artificial Sequence
  Description of Artificial Sequence: Synthetic peptide
  Seed: RGQLSTRGV
RHQLSTRGF

SEQ ID NO: 10256 - protein, 9 aa, Artificial Sequence
  Description of Artificial Sequence: Synthetic peptide
  Seed: RGQLSTRGV
RHQLSTRGY

SEQ ID NO: 10257 - protein, 9 aa, Artificial Sequence
  Description of Artificial Sequence: Synthetic peptide
  Seed: RGQLSTRGV
RIQLSTRGF

SEQ ID NO: 10258 - protein, 9 aa, Artificial Sequence
  Description of Artificial Sequence: Synthetic peptide
  Seed: RGQLSTRGV
RIQLSTRGY

SEQ ID NO: 10259 - protein, 9 aa, Artificial Sequence
  Description of Artificial Sequence: Synthetic peptide
  Seed: RGQLSTRGV
RLQLSTRGM

SEQ ID NO: 10260 - protein, 9 aa, Artificial Sequence
  Description of Artificial Sequence: Synthetic peptide
  Seed: RGQLSTRGV
RLQLSTRGF

SEQ ID NO: 10261 - protein, 9 aa, Artificial Sequence
  Description of Artificial Sequence: Synthetic peptide
  Seed: RGQLSTRGV
RLQLSTRGY

SEQ ID NO: 10262 - protein, 9 aa, Artificial Sequence
  Description of Artificial Sequence: Synthetic peptide
  Seed: RGQLSTRGV
RKQLSTRGL

SEQ ID NO: 10263 - protein, 9 aa, Artificial Sequence
  Description of Artificial Sequence: Synthetic peptide
  Seed: RGQLSTRGV
RKQLSTRGM

SEQ ID NO: 10264 - protein, 9 aa, Artificial Sequence
  Description of Artificial Sequence: Synthetic peptide
  Seed: RGQLSTRGV
RKQLSTRGF

SEQ ID NO: 10265 - protein, 9 aa, Artificial Sequence
  Description of Artificial Sequence: Synthetic peptide
  Seed: RGQLSTRGV
RKQLSTRGY

SEQ ID NO: 10266 - protein, 9 aa, Artificial Sequence
  Description of Artificial Sequence: Synthetic peptide
  Seed: RGQLSTRGV
RMQLSTRGH

SEQ ID NO: 10267 - protein, 9 aa, Artificial Sequence
  Description of Artificial Sequence: Synthetic peptide
  Seed: RGQLSTRGV
RMQLSTRGI

SEQ ID NO: 10268 - protein, 9 aa, Artificial Sequence
  Description of Artificial Sequence: Synthetic peptide
  Seed: RGQLSTRGV
RMQLSTRGL

SEQ ID NO: 10269 - protein, 9 aa, Artificial Sequence
  Description of Artificial Sequence: Synthetic peptide
  Seed: RGRGVFELS
RARGVFELK

SEQ ID NO: 10270 - protein, 9 aa, Artificial Sequence
  Description of Artificial Sequence: Synthetic peptide
  Seed: RGRGVFELS
RARGVFELF

SEQ ID NO: 10271 - protein, 9 aa, Artificial Sequence
  Description of Artificial Sequence: Synthetic peptide
  Seed: RGRGVFELS
RQRGVFELV

SEQ ID NO: 10272 - protein, 9 aa, Artificial Sequence
  Description of Artificial Sequence: Synthetic peptide
  Seed: RGRGVFELS
RQRGVFELG

SEQ ID NO: 10273 - protein, 9 aa, Artificial Sequence
  Description of Artificial Sequence: Synthetic peptide
  Seed: RGRGVFELS
RCRGVFELS

SEQ ID NO: 10274 - protein, 9 aa, Artificial Sequence
  Description of Artificial Sequence: Synthetic peptide
  Seed: RGRGVFELS
RCRGVFELY

SEQ ID NO: 10275 - protein, 9 aa, Artificial Sequence
  Description of Artificial Sequence: Synthetic peptide
  Seed: RGRGVFELS
RCRGVFELV

SEQ ID NO: 10276 - protein, 9 aa, Artificial Sequence
  Description of Artificial Sequence: Synthetic peptide
  Seed: RGRGVFELS
RQRGVFELA

SEQ ID NO: 10277 - protein, 9 aa, Artificial Sequence
  Description of Artificial Sequence: Synthetic peptide
  Seed: RGRGVFELS
RQRGVFELR

SEQ ID NO: 10278 - protein, 9 aa, Artificial Sequence
  Description of Artificial Sequence: Synthetic peptide
  Seed: RGRGVFELS
RQRGVFELN

SEQ ID NO: 10279 - protein, 9 aa, Artificial Sequence
  Description of Artificial Sequence: Synthetic peptide
  Seed: RGRGVFELS
RQRGVFELC

SEQ ID NO: 10280 - protein, 9 aa, Artificial Sequence
  Description of Artificial Sequence: Synthetic peptide
  Seed: RGRGVFELS
RQRGVFELQ

SEQ ID NO: 10281 - protein, 9 aa, Artificial Sequence
  Description of Artificial Sequence: Synthetic peptide
  Seed: RGRGVFELS
RQRGVFELE

SEQ ID NO: 10282 - protein, 9 aa, Artificial Sequence
  Description of Artificial Sequence: Synthetic peptide
  Seed: RGRGVFELS
RQRGVFELH

SEQ ID NO: 10283 - protein, 9 aa, Artificial Sequence
  Description of Artificial Sequence: Synthetic peptide
  Seed: RGRGVFELS
RARGVFELP

SEQ ID NO: 10284 - protein, 9 aa, Artificial Sequence
  Description of Artificial Sequence: Synthetic peptide
  Seed: RGRGVFELS
RQRGVFELI

SEQ ID NO: 10285 - protein, 9 aa, Artificial Sequence
  Description of Artificial Sequence: Synthetic peptide
  Seed: RGRGVFELS
RQRGVFELL

SEQ ID NO: 10286 - protein, 9 aa, Artificial Sequence
  Description of Artificial Sequence: Synthetic peptide
  Seed: RGRGVFELS
RQRGVFELK

SEQ ID NO: 10287 - protein, 9 aa, Artificial Sequence
  Description of Artificial Sequence: Synthetic peptide
  Seed: RGRGVFELS
RQRGVFELM

SEQ ID NO: 10288 - protein, 9 aa, Artificial Sequence
  Description of Artificial Sequence: Synthetic peptide
  Seed: RGRGVFELS
RQRGVFELF

SEQ ID NO: 10289 - protein, 9 aa, Artificial Sequence
  Description of Artificial Sequence: Synthetic peptide
  Seed: RGRGVFELS
RQRGVFELP

SEQ ID NO: 10290 - protein, 9 aa, Artificial Sequence
  Description of Artificial Sequence: Synthetic peptide
  Seed: RGRGVFELS
RQRGVFELS

SEQ ID NO: 10291 - protein, 9 aa, Artificial Sequence
  Description of Artificial Sequence: Synthetic peptide
  Seed: RGRGVFELS
RQRGVFELT

SEQ ID NO: 10292 - protein, 9 aa, Artificial Sequence
  Description of Artificial Sequence: Synthetic peptide
  Seed: RGRGVFELS
RQRGVFELY

SEQ ID NO: 10293 - protein, 9 aa, Artificial Sequence
  Description of Artificial Sequence: Synthetic peptide
  Seed: RGRGVFELS
RCRGVFELM

SEQ ID NO: 10294 - protein, 9 aa, Artificial Sequence
  Description of Artificial Sequence: Synthetic peptide
  Seed: RGRGVFELS
RCRGVFELK

SEQ ID NO: 10295 - protein, 9 aa, Artificial Sequence
  Description of Artificial Sequence: Synthetic peptide
  Seed: RGRGVFELS
RCRGVFELL

SEQ ID NO: 10296 - protein, 9 aa, Artificial Sequence
  Description of Artificial Sequence: Synthetic peptide
  Seed: RGRGVFELS
RCRGVFELI

SEQ ID NO: 10297 - protein, 9 aa, Artificial Sequence
  Description of Artificial Sequence: Synthetic peptide
  Seed: RGRGVFELS
RARGVFELS

SEQ ID NO: 10298 - protein, 9 aa, Artificial Sequence
  Description of Artificial Sequence: Synthetic peptide
  Seed: RGRGVFELS
RARGVFELT

SEQ ID NO: 10299 - protein, 9 aa, Artificial Sequence
  Description of Artificial Sequence: Synthetic peptide
  Seed: RGRGVFELS
RARGVFELY

SEQ ID NO: 10300 - protein, 9 aa, Artificial Sequence
  Description of Artificial Sequence: Synthetic peptide
  Seed: RGRGVFELS
RARGVFELV

SEQ ID NO: 10301 - protein, 9 aa, Artificial Sequence
  Description of Artificial Sequence: Synthetic peptide
  Seed: RGRGVFELS
RRRGVFELK

SEQ ID NO: 10302 - protein, 9 aa, Artificial Sequence
  Description of Artificial Sequence: Synthetic peptide
  Seed: RGRGVFELS
RNRGVFELA

SEQ ID NO: 10303 - protein, 9 aa, Artificial Sequence
  Description of Artificial Sequence: Synthetic peptide
  Seed: RGRGVFELS
RNRGVFELR

SEQ ID NO: 10304 - protein, 9 aa, Artificial Sequence
  Description of Artificial Sequence: Synthetic peptide
  Seed: RGRGVFELS
RNRGVFELC

SEQ ID NO: 10305 - protein, 9 aa, Artificial Sequence
  Description of Artificial Sequence: Synthetic peptide
  Seed: RGRGVFELS
RNRGVFELG

SEQ ID NO: 10306 - protein, 9 aa, Artificial Sequence
  Description of Artificial Sequence: Synthetic peptide
  Seed: RGRGVFELS
RNRGVFELI

SEQ ID NO: 10307 - protein, 9 aa, Artificial Sequence
  Description of Artificial Sequence: Synthetic peptide
  Seed: RGRGVFELS
RNRGVFELL

SEQ ID NO: 10308 - protein, 9 aa, Artificial Sequence
  Description of Artificial Sequence: Synthetic peptide
  Seed: RGRGVFELS
RNRGVFELK

SEQ ID NO: 10309 - protein, 9 aa, Artificial Sequence
  Description of Artificial Sequence: Synthetic peptide
  Seed: RGRGVFELS
RNRGVFELM

SEQ ID NO: 10310 - protein, 9 aa, Artificial Sequence
  Description of Artificial Sequence: Synthetic peptide
  Seed: RGRGVFELS
RNRGVFELS

SEQ ID NO: 10311 - protein, 9 aa, Artificial Sequence
  Description of Artificial Sequence: Synthetic peptide
  Seed: RGRGVFELS
RNRGVFELT

SEQ ID NO: 10312 - protein, 9 aa, Artificial Sequence
  Description of Artificial Sequence: Synthetic peptide
  Seed: RGRGVFELS
RNRGVFELY

SEQ ID NO: 10313 - protein, 9 aa, Artificial Sequence
  Description of Artificial Sequence: Synthetic peptide
  Seed: RGRGVFELS
RNRGVFELV

SEQ ID NO: 10314 - protein, 9 aa, Artificial Sequence
  Description of Artificial Sequence: Synthetic peptide
  Seed: RGRGVFELS
RCRGVFELA

SEQ ID NO: 10315 - protein, 9 aa, Artificial Sequence
  Description of Artificial Sequence: Synthetic peptide
  Seed: RGRGVFELS
RCRGVFELR

SEQ ID NO: 10316 - protein, 9 aa, Artificial Sequence
  Description of Artificial Sequence: Synthetic peptide
  Seed: RGRGVFELS
RFRGVFELM

SEQ ID NO: 10317 - protein, 9 aa, Artificial Sequence
  Description of Artificial Sequence: Synthetic peptide
  Seed: RGRGVFELS
RFRGVFELP

SEQ ID NO: 10318 - protein, 11 aa, Artificial Sequence
  Description of Artificial Sequence: Synthetic peptide
  Seed: RGINDRNFWRG
RWINDRNFWRK

SEQ ID NO: 10319 - protein, 10 aa, Artificial Sequence
  Description of Artificial Sequence: Synthetic peptide
  Seed: RGTKVSPRGK
RATKVSPRGF

SEQ ID NO: 10320 - protein, 8 aa, Artificial Sequence
  Description of Artificial Sequence: Synthetic peptide
  Seed: RGTKVIPR
RYTKVIPR

SEQ ID NO: 10321 - protein, 8 aa, Artificial Sequence
  Description of Artificial Sequence: Synthetic peptide
  Seed: RGTKVIPR
RYTKVIPK

SEQ ID NO: 10322 - protein, 8 aa, Artificial Sequence
  Description of Artificial Sequence: Synthetic peptide
  Seed: RGTKVIPR
RVTKVIPR

SEQ ID NO: 10323 - protein, 10 aa, Artificial Sequence
  Description of Artificial Sequence: Synthetic peptide
  Seed: RGTKVSPRGK
RATKVSPRGA

SEQ ID NO: 10324 - protein, 10 aa, Artificial Sequence
  Description of Artificial Sequence: Synthetic peptide
  Seed: RGTKVSPRGK
RATKVSPRGC

SEQ ID NO: 10325 - protein, 10 aa, Artificial Sequence
  Description of Artificial Sequence: Synthetic peptide
  Seed: RGTKVSPRGK
RATKVSPRGI

SEQ ID NO: 10326 - protein, 10 aa, Artificial Sequence
  Description of Artificial Sequence: Synthetic peptide
  Seed: RGTKVSPRGK
RATKVSPRGL

SEQ ID NO: 10327 - protein, 10 aa, Artificial Sequence
  Description of Artificial Sequence: Synthetic peptide
  Seed: RGTKVSPRGK
RATKVSPRGK

SEQ ID NO: 10328 - protein, 10 aa, Artificial Sequence
  Description of Artificial Sequence: Synthetic peptide
  Seed: RGTKVSPRGK
RATKVSPRGM

SEQ ID NO: 10329 - protein, 10 aa, Artificial Sequence
  Description of Artificial Sequence: Synthetic peptide
  Seed: RGTKVSPRGK
RATKVSPRGS

SEQ ID NO: 10330 - protein, 10 aa, Artificial Sequence
  Description of Artificial Sequence: Synthetic peptide
  Seed: RGTKVSPRGK
RRTKVSPRGS

SEQ ID NO: 10331 - protein, 10 aa, Artificial Sequence
  Description of Artificial Sequence: Synthetic peptide
  Seed: RGTKVSPRGK
RATKVSPRGT

SEQ ID NO: 10332 - protein, 10 aa, Artificial Sequence
  Description of Artificial Sequence: Synthetic peptide
  Seed: RGTKVSPRGK
RATKVSPRGY

SEQ ID NO: 10333 - protein, 10 aa, Artificial Sequence
  Description of Artificial Sequence: Synthetic peptide
  Seed: RGTKVSPRGK
RATKVSPRGV

SEQ ID NO: 10334 - protein, 10 aa, Artificial Sequence
  Description of Artificial Sequence: Synthetic peptide
  Seed: RGTKVSPRGK
RRTKVSPRGA

SEQ ID NO: 10335 - protein, 10 aa, Artificial Sequence
  Description of Artificial Sequence: Synthetic peptide
  Seed: RGTKVSPRGK
RRTKVSPRGC

SEQ ID NO: 10336 - protein, 10 aa, Artificial Sequence
  Description of Artificial Sequence: Synthetic peptide
  Seed: RGTKVSPRGK
RRTKVSPRGI

SEQ ID NO: 10337 - protein, 10 aa, Artificial Sequence
  Description of Artificial Sequence: Synthetic peptide
  Seed: RGTKVSPRGK
RRTKVSPRGL

SEQ ID NO: 10338 - protein, 10 aa, Artificial Sequence
  Description of Artificial Sequence: Synthetic peptide
  Seed: RGTKVSPRGK
RRTKVSPRGK

SEQ ID NO: 10339 - protein, 10 aa, Artificial Sequence
  Description of Artificial Sequence: Synthetic peptide
  Seed: RGTKVSPRGK
RRTKVSPRGM

SEQ ID NO: 10340 - protein, 8 aa, Artificial Sequence
  Description of Artificial Sequence: Synthetic peptide
  Seed: RGTKVIPR
RWTKVIPK

SEQ ID NO: 10341 - protein, 8 aa, Artificial Sequence
  Description of Artificial Sequence: Synthetic peptide
  Seed: RGTKVIPR
RWTKVIPR

SEQ ID NO: 10342 - protein, 8 aa, Artificial Sequence
  Description of Artificial Sequence: Synthetic peptide
  Seed: RGTKVIPR
RTTKVIPK

SEQ ID NO: 10343 - protein, 8 aa, Artificial Sequence
  Description of Artificial Sequence: Synthetic peptide
  Seed: RGTKVIPR
RTTKVIPR

SEQ ID NO: 10344 - protein, 9 aa, Artificial Sequence
  Description of Artificial Sequence: Synthetic peptide
  Seed: RGRGVFELS
RVRGVFELF

SEQ ID NO: 10345 - protein, 9 aa, Artificial Sequence
  Description of Artificial Sequence: Synthetic peptide
  Seed: RGRGVFELS
RVRGVFELP

SEQ ID NO: 10346 - protein, 9 aa, Artificial Sequence
  Description of Artificial Sequence: Synthetic peptide
  Seed: RGRGVFELS
RVRGVFELS

SEQ ID NO: 10347 - protein, 9 aa, Artificial Sequence
  Description of Artificial Sequence: Synthetic peptide
  Seed: RGRGVFELS
RVRGVFELT

SEQ ID NO: 10348 - protein, 9 aa, Artificial Sequence
  Description of Artificial Sequence: Synthetic peptide
  Seed: RGRGVFELS
RVRGVFELW

SEQ ID NO: 10349 - protein, 9 aa, Artificial Sequence
  Description of Artificial Sequence: Synthetic peptide
  Seed: RGRGVFELS
RVRGVFELY

SEQ ID NO: 10350 - protein, 9 aa, Artificial Sequence
  Description of Artificial Sequence: Synthetic peptide
  Seed: RGRGVFELS
RVRGVFELV

SEQ ID NO: 10351 - protein, 8 aa, Artificial Sequence
  Description of Artificial Sequence: Synthetic peptide
  Seed: RGTKVIPR
RATKVIPR

SEQ ID NO: 10352 - protein, 8 aa, Artificial Sequence
  Description of Artificial Sequence: Synthetic peptide
  Seed: RGTKVIPR
RNTKVIPR

SEQ ID NO: 10353 - protein, 8 aa, Artificial Sequence
  Description of Artificial Sequence: Synthetic peptide
  Seed: RGTKVIPR
RCTKVIPR

SEQ ID NO: 10354 - protein, 8 aa, Artificial Sequence
  Description of Artificial Sequence: Synthetic peptide
  Seed: RGTKVIPR
RQTKVIPR

SEQ ID NO: 10355 - protein, 8 aa, Artificial Sequence
  Description of Artificial Sequence: Synthetic peptide
  Seed: RGTKVIPR
RHTKVIPR

SEQ ID NO: 10356 - protein, 8 aa, Artificial Sequence
  Description of Artificial Sequence: Synthetic peptide
  Seed: RGTKVIPR
RITKVIPR

SEQ ID NO: 10357 - protein, 8 aa, Artificial Sequence
  Description of Artificial Sequence: Synthetic peptide
  Seed: RGTKVIPR
RLTKVIPR

SEQ ID NO: 10358 - protein, 8 aa, Artificial Sequence
  Description of Artificial Sequence: Synthetic peptide
  Seed: RGTKVIPR
RMTKVIPR

SEQ ID NO: 10359 - protein, 8 aa, Artificial Sequence
  Description of Artificial Sequence: Synthetic peptide
  Seed: RGTKVIPR
RMTKVIPK

SEQ ID NO: 10360 - protein, 8 aa, Artificial Sequence
  Description of Artificial Sequence: Synthetic peptide
  Seed: RGTKVIPR
RFTKVIPR

SEQ ID NO: 10361 - protein, 8 aa, Artificial Sequence
  Description of Artificial Sequence: Synthetic peptide
  Seed: RGTKVIPR
RFTKVIPK

SEQ ID NO: 10362 - protein, 8 aa, Artificial Sequence
  Description of Artificial Sequence: Synthetic peptide
  Seed: RGTKVIPR
RSTKVIPR

SEQ ID NO: 10363 - protein, 10 aa, Artificial Sequence
  Description of Artificial Sequence: Synthetic peptide
  Seed: RGTKVSPRGK
RRTKVSPRGF

SEQ ID NO: 10364 - protein, 10 aa, Artificial Sequence
  Description of Artificial Sequence: Synthetic peptide
  Seed: RGTKVSPRGK
RRTKVSPRGT

SEQ ID NO: 10365 - protein, 9 aa, Artificial Sequence
  Description of Artificial Sequence: Synthetic peptide
  Seed: RGRGVFELS
RVRGVFELK

SEQ ID NO: 10366 - protein, 10 aa, Artificial Sequence
  Description of Artificial Sequence: Synthetic peptide
  Seed: RGTKVSPRGK
RQTKVSPRGA

SEQ ID NO: 10367 - protein, 10 aa, Artificial Sequence
  Description of Artificial Sequence: Synthetic peptide
  Seed: RGTKVSPRGK
RCTKVSPRGI

SEQ ID NO: 10368 - protein, 10 aa, Artificial Sequence
  Description of Artificial Sequence: Synthetic peptide
  Seed: RGTKVSPRGK
RCTKVSPRGL

SEQ ID NO: 10369 - protein, 10 aa, Artificial Sequence
  Description of Artificial Sequence: Synthetic peptide
  Seed: RGTKVSPRGK
RCTKVSPRGK

SEQ ID NO: 10370 - protein, 10 aa, Artificial Sequence
  Description of Artificial Sequence: Synthetic peptide
  Seed: RGTKVSPRGK
RCTKVSPRGM

SEQ ID NO: 10371 - protein, 10 aa, Artificial Sequence
  Description of Artificial Sequence: Synthetic peptide
  Seed: RGTKVSPRGK
RCTKVSPRGF

SEQ ID NO: 10372 - protein, 10 aa, Artificial Sequence
  Description of Artificial Sequence: Synthetic peptide
  Seed: RGTKVSPRGK
RCTKVSPRGS

SEQ ID NO: 10373 - protein, 10 aa, Artificial Sequence
  Description of Artificial Sequence: Synthetic peptide
  Seed: RGTKVSPRGK
RCTKVSPRGT

SEQ ID NO: 10374 - protein, 10 aa, Artificial Sequence
  Description of Artificial Sequence: Synthetic peptide
  Seed: RGTKVSPRGK
RCTKVSPRGY

SEQ ID NO: 10375 - protein, 10 aa, Artificial Sequence
  Description of Artificial Sequence: Synthetic peptide
  Seed: RGTKVSPRGK
RCTKVSPRGV

SEQ ID NO: 10376 - protein, 10 aa, Artificial Sequence
  Description of Artificial Sequence: Synthetic peptide
  Seed: RGTKVSPRGK
RQTKVSPRGC

SEQ ID NO: 10377 - protein, 10 aa, Artificial Sequence
  Description of Artificial Sequence: Synthetic peptide
  Seed: RGTKVSPRGK
RRTKVSPRGY

SEQ ID NO: 10378 - protein, 10 aa, Artificial Sequence
  Description of Artificial Sequence: Synthetic peptide
  Seed: RGTKVSPRGK
RQTKVSPRGI

SEQ ID NO: 10379 - protein, 10 aa, Artificial Sequence
  Description of Artificial Sequence: Synthetic peptide
  Seed: RGTKVSPRGK
RQTKVSPRGL

SEQ ID NO: 10380 - protein, 10 aa, Artificial Sequence
  Description of Artificial Sequence: Synthetic peptide
  Seed: RGTKVSPRGK
RQTKVSPRGK

SEQ ID NO: 10381 - protein, 10 aa, Artificial Sequence
  Description of Artificial Sequence: Synthetic peptide
  Seed: RGTKVSPRGK
RQTKVSPRGM

SEQ ID NO: 10382 - protein, 10 aa, Artificial Sequence
  Description of Artificial Sequence: Synthetic peptide
  Seed: RGTKVSPRGK
RQTKVSPRGS

SEQ ID NO: 10383 - protein, 10 aa, Artificial Sequence
  Description of Artificial Sequence: Synthetic peptide
  Seed: RGTKVSPRGK
RQTKVSPRGT

SEQ ID NO: 10384 - protein, 10 aa, Artificial Sequence
  Description of Artificial Sequence: Synthetic peptide
  Seed: RGTKVSPRGK
RQTKVSPRGY

SEQ ID NO: 10385 - protein, 10 aa, Artificial Sequence
  Description of Artificial Sequence: Synthetic peptide
  Seed: RGTKVSPRGK
RQTKVSPRGV

SEQ ID NO: 10386 - protein, 10 aa, Artificial Sequence
  Description of Artificial Sequence: Synthetic peptide
  Seed: RGTKVSPRGK
RETKVSPRGA

SEQ ID NO: 10387 - protein, 10 aa, Artificial Sequence
  Description of Artificial Sequence: Synthetic peptide
  Seed: RGTKVSPRGK
RCTKVSPRGC

SEQ ID NO: 10388 - protein, 10 aa, Artificial Sequence
  Description of Artificial Sequence: Synthetic peptide
  Seed: RGTKVSPRGK
RCTKVSPRGA

SEQ ID NO: 10389 - protein, 10 aa, Artificial Sequence
  Description of Artificial Sequence: Synthetic peptide
  Seed: RGTKVSPRGK
RDTKVSPRGV

SEQ ID NO: 10390 - protein, 10 aa, Artificial Sequence
  Description of Artificial Sequence: Synthetic peptide
  Seed: RGTKVSPRGK
RDTKVSPRGY

SEQ ID NO: 10391 - protein, 10 aa, Artificial Sequence
  Description of Artificial Sequence: Synthetic peptide
  Seed: RGTKVSPRGK
RRTKVSPRGV

SEQ ID NO: 10392 - protein, 10 aa, Artificial Sequence
  Description of Artificial Sequence: Synthetic peptide
  Seed: RGTKVSPRGK
RNTKVSPRGA

SEQ ID NO: 10393 - protein, 10 aa, Artificial Sequence
  Description of Artificial Sequence: Synthetic peptide
  Seed: RGTKVSPRGK
RNTKVSPRGC

SEQ ID NO: 10394 - protein, 10 aa, Artificial Sequence
  Description of Artificial Sequence: Synthetic peptide
  Seed: RGTKVSPRGK
RNTKVSPRGI

SEQ ID NO: 10395 - protein, 10 aa, Artificial Sequence
  Description of Artificial Sequence: Synthetic peptide
  Seed: RGTKVSPRGK
RNTKVSPRGL

SEQ ID NO: 10396 - protein, 10 aa, Artificial Sequence
  Description of Artificial Sequence: Synthetic peptide
  Seed: RGTKVSPRGK
RNTKVSPRGK

SEQ ID NO: 10397 - protein, 10 aa, Artificial Sequence
  Description of Artificial Sequence: Synthetic peptide
  Seed: RGTKVSPRGK
RNTKVSPRGM

SEQ ID NO: 10398 - protein, 10 aa, Artificial Sequence
  Description of Artificial Sequence: Synthetic peptide
  Seed: RGTKVSPRGK
RNTKVSPRGS

SEQ ID NO: 10399 - protein, 10 aa, Artificial Sequence
  Description of Artificial Sequence: Synthetic peptide
  Seed: RGTKVSPRGK
RNTKVSPRGT

SEQ ID NO: 10400 - protein, 10 aa, Artificial Sequence
  Description of Artificial Sequence: Synthetic peptide
  Seed: RGTKVSPRGK
RNTKVSPRGY

SEQ ID NO: 10401 - protein, 10 aa, Artificial Sequence
  Description of Artificial Sequence: Synthetic peptide
  Seed: RGTKVSPRGK
RNTKVSPRGV

SEQ ID NO: 10402 - protein, 10 aa, Artificial Sequence
  Description of Artificial Sequence: Synthetic peptide
  Seed: RGTKVSPRGK
RDTKVSPRGA

SEQ ID NO: 10403 - protein, 10 aa, Artificial Sequence
  Description of Artificial Sequence: Synthetic peptide
  Seed: RGTKVSPRGK
RDTKVSPRGC

SEQ ID NO: 10404 - protein, 10 aa, Artificial Sequence
  Description of Artificial Sequence: Synthetic peptide
  Seed: RGTKVSPRGK
RDTKVSPRGI

SEQ ID NO: 10405 - protein, 10 aa, Artificial Sequence
  Description of Artificial Sequence: Synthetic peptide
  Seed: RGTKVSPRGK
RDTKVSPRGL

SEQ ID NO: 10406 - protein, 10 aa, Artificial Sequence
  Description of Artificial Sequence: Synthetic peptide
  Seed: RGTKVSPRGK
RDTKVSPRGK

SEQ ID NO: 10407 - protein, 10 aa, Artificial Sequence
  Description of Artificial Sequence: Synthetic peptide
  Seed: RGTKVSPRGK
RDTKVSPRGM

SEQ ID NO: 10408 - protein, 10 aa, Artificial Sequence
  Description of Artificial Sequence: Synthetic peptide
  Seed: RGTKVSPRGK
RDTKVSPRGS

SEQ ID NO: 10409 - protein, 10 aa, Artificial Sequence
  Description of Artificial Sequence: Synthetic peptide
  Seed: RGTKVSPRGK
RDTKVSPRGT

SEQ ID NO: 10410 - protein, 9 aa, Artificial Sequence
  Description of Artificial Sequence: Synthetic peptide
  Seed: RGRGVFELS
RVRGVFELM

SEQ ID NO: 10411 - protein, 9 aa, Artificial Sequence
  Description of Artificial Sequence: Synthetic peptide
  Seed: RGRGVFELS
RVRGVFELL

SEQ ID NO: 10412 - protein, 9 aa, Artificial Sequence
  Description of Artificial Sequence: Synthetic peptide
  Seed: RGRGVFELS
RFRGVFELS

SEQ ID NO: 10413 - protein, 9 aa, Artificial Sequence
  Description of Artificial Sequence: Synthetic peptide
  Seed: RGRGVFELS
RTRGVFELH

SEQ ID NO: 10414 - protein, 9 aa, Artificial Sequence
  Description of Artificial Sequence: Synthetic peptide
  Seed: RGRGVFELS
RSRGVFELV

SEQ ID NO: 10415 - protein, 9 aa, Artificial Sequence
  Description of Artificial Sequence: Synthetic peptide
  Seed: RGRGVFELS
RTRGVFELA

SEQ ID NO: 10416 - protein, 9 aa, Artificial Sequence
  Description of Artificial Sequence: Synthetic peptide
  Seed: RGRGVFELS
RTRGVFELR

SEQ ID NO: 10417 - protein, 9 aa, Artificial Sequence
  Description of Artificial Sequence: Synthetic peptide
  Seed: RGRGVFELS
RTRGVFELN

SEQ ID NO: 10418 - protein, 9 aa, Artificial Sequence
  Description of Artificial Sequence: Synthetic peptide
  Seed: RGRGVFELS
RTRGVFELD

SEQ ID NO: 10419 - protein, 9 aa, Artificial Sequence
  Description of Artificial Sequence: Synthetic peptide
  Seed: RGRGVFELS
RTRGVFELC

SEQ ID NO: 10420 - protein, 9 aa, Artificial Sequence
  Description of Artificial Sequence: Synthetic peptide
  Seed: RGRGVFELS
RTRGVFELQ

SEQ ID NO: 10421 - protein, 9 aa, Artificial Sequence
  Description of Artificial Sequence: Synthetic peptide
  Seed: RGRGVFELS
RTRGVFELE

SEQ ID NO: 10422 - protein, 9 aa, Artificial Sequence
  Description of Artificial Sequence: Synthetic peptide
  Seed: RGRGVFELS
RTRGVFELG

SEQ ID NO: 10423 - protein, 9 aa, Artificial Sequence
  Description of Artificial Sequence: Synthetic peptide
  Seed: RGRGVFELS
RTRGVFELI

SEQ ID NO: 10424 - protein, 9 aa, Artificial Sequence
  Description of Artificial Sequence: Synthetic peptide
  Seed: RGRGVFELS
RWRGVFELA

SEQ ID NO: 10425 - protein, 9 aa, Artificial Sequence
  Description of Artificial Sequence: Synthetic peptide
  Seed: RGRGVFELS
RTRGVFELL

SEQ ID NO: 10426 - protein, 9 aa, Artificial Sequence
  Description of Artificial Sequence: Synthetic peptide
  Seed: RGRGVFELS
RTRGVFELK

SEQ ID NO: 10427 - protein, 9 aa, Artificial Sequence
  Description of Artificial Sequence: Synthetic peptide
  Seed: RGRGVFELS
RTRGVFELM

SEQ ID NO: 10428 - protein, 9 aa, Artificial Sequence
  Description of Artificial Sequence: Synthetic peptide
  Seed: RGRGVFELS
RTRGVFELF

SEQ ID NO: 10429 - protein, 9 aa, Artificial Sequence
  Description of Artificial Sequence: Synthetic peptide
  Seed: RGRGVFELS
RTRGVFELP

SEQ ID NO: 10430 - protein, 9 aa, Artificial Sequence
  Description of Artificial Sequence: Synthetic peptide
  Seed: RGRGVFELS
RTRGVFELS

SEQ ID NO: 10431 - protein, 9 aa, Artificial Sequence
  Description of Artificial Sequence: Synthetic peptide
  Seed: RGRGVFELS
RTRGVFELT

SEQ ID NO: 10432 - protein, 9 aa, Artificial Sequence
  Description of Artificial Sequence: Synthetic peptide
  Seed: RGRGVFELS
RTRGVFELW

SEQ ID NO: 10433 - protein, 9 aa, Artificial Sequence
  Description of Artificial Sequence: Synthetic peptide
  Seed: RGRGVFELS
RTRGVFELY

SEQ ID NO: 10434 - protein, 9 aa, Artificial Sequence
  Description of Artificial Sequence: Synthetic peptide
  Seed: RGRGVFELS
RSRGVFELY

SEQ ID NO: 10435 - protein, 9 aa, Artificial Sequence
  Description of Artificial Sequence: Synthetic peptide
  Seed: RGRGVFELS
RSRGVFELW

SEQ ID NO: 10436 - protein, 9 aa, Artificial Sequence
  Description of Artificial Sequence: Synthetic peptide
  Seed: RGRGVFELS
RSRGVFELT

SEQ ID NO: 10437 - protein, 9 aa, Artificial Sequence
  Description of Artificial Sequence: Synthetic peptide
  Seed: RGRGVFELS
RSRGVFELS

SEQ ID NO: 10438 - protein, 9 aa, Artificial Sequence
  Description of Artificial Sequence: Synthetic peptide
  Seed: RGRGVFELS
RFRGVFELT

SEQ ID NO: 10439 - protein, 9 aa, Artificial Sequence
  Description of Artificial Sequence: Synthetic peptide
  Seed: RGRGVFELS
RFRGVFELY

SEQ ID NO: 10440 - protein, 9 aa, Artificial Sequence
  Description of Artificial Sequence: Synthetic peptide
  Seed: RGRGVFELS
RFRGVFELV

SEQ ID NO: 10441 - protein, 9 aa, Artificial Sequence
  Description of Artificial Sequence: Synthetic peptide
  Seed: RGRGVFELS
RPRGVFELK

SEQ ID NO: 10442 - protein, 9 aa, Artificial Sequence
  Description of Artificial Sequence: Synthetic peptide
  Seed: RGRGVFELS
RSRGVFELA

SEQ ID NO: 10443 - protein, 9 aa, Artificial Sequence
  Description of Artificial Sequence: Synthetic peptide
  Seed: RGRGVFELS
RSRGVFELR

SEQ ID NO: 10444 - protein, 9 aa, Artificial Sequence
  Description of Artificial Sequence: Synthetic peptide
  Seed: RGRGVFELS
RSRGVFELN

SEQ ID NO: 10445 - protein, 9 aa, Artificial Sequence
  Description of Artificial Sequence: Synthetic peptide
  Seed: RGRGVFELS
RSRGVFELD

SEQ ID NO: 10446 - protein, 9 aa, Artificial Sequence
  Description of Artificial Sequence: Synthetic peptide
  Seed: RGRGVFELS
RSRGVFELC

SEQ ID NO: 10447 - protein, 9 aa, Artificial Sequence
  Description of Artificial Sequence: Synthetic peptide
  Seed: RGRGVFELS
RSRGVFELQ

SEQ ID NO: 10448 - protein, 9 aa, Artificial Sequence
  Description of Artificial Sequence: Synthetic peptide
  Seed: RGRGVFELS
RSRGVFELE

SEQ ID NO: 10449 - protein, 9 aa, Artificial Sequence
  Description of Artificial Sequence: Synthetic peptide
  Seed: RGRGVFELS
RSRGVFELG

SEQ ID NO: 10450 - protein, 9 aa, Artificial Sequence
  Description of Artificial Sequence: Synthetic peptide
  Seed: RGRGVFELS
RSRGVFELH

SEQ ID NO: 10451 - protein, 9 aa, Artificial Sequence
  Description of Artificial Sequence: Synthetic peptide
  Seed: RGRGVFELS
RSRGVFELI

SEQ ID NO: 10452 - protein, 9 aa, Artificial Sequence
  Description of Artificial Sequence: Synthetic peptide
  Seed: RGRGVFELS
RSRGVFELL

SEQ ID NO: 10453 - protein, 9 aa, Artificial Sequence
  Description of Artificial Sequence: Synthetic peptide
  Seed: RGRGVFELS
RSRGVFELK

SEQ ID NO: 10454 - protein, 9 aa, Artificial Sequence
  Description of Artificial Sequence: Synthetic peptide
  Seed: RGRGVFELS
RSRGVFELM

SEQ ID NO: 10455 - protein, 9 aa, Artificial Sequence
  Description of Artificial Sequence: Synthetic peptide
  Seed: RGRGVFELS
RSRGVFELF

SEQ ID NO: 10456 - protein, 9 aa, Artificial Sequence
  Description of Artificial Sequence: Synthetic peptide
  Seed: RGRGVFELS
RSRGVFELP

SEQ ID NO: 10457 - protein, 9 aa, Artificial Sequence
  Description of Artificial Sequence: Synthetic peptide
  Seed: RGRGVFELS
RTRGVFELV

SEQ ID NO: 10458 - protein, 9 aa, Artificial Sequence
  Description of Artificial Sequence: Synthetic peptide
  Seed: RGRGVFELS
RWRGVFELR

SEQ ID NO: 10459 - protein, 9 aa, Artificial Sequence
  Description of Artificial Sequence: Synthetic peptide
  Seed: RGRGVFELS
RVRGVFELI

SEQ ID NO: 10460 - protein, 9 aa, Artificial Sequence
  Description of Artificial Sequence: Synthetic peptide
  Seed: RGRGVFELS
RYRGVFELY

SEQ ID NO: 10461 - protein, 9 aa, Artificial Sequence
  Description of Artificial Sequence: Synthetic peptide
  Seed: RGRGVFELS
RYRGVFELH

SEQ ID NO: 10462 - protein, 9 aa, Artificial Sequence
  Description of Artificial Sequence: Synthetic peptide
  Seed: RGRGVFELS
RYRGVFELI

SEQ ID NO: 10463 - protein, 9 aa, Artificial Sequence
  Description of Artificial Sequence: Synthetic peptide
  Seed: RGRGVFELS
RYRGVFELL

SEQ ID NO: 10464 - protein, 9 aa, Artificial Sequence
  Description of Artificial Sequence: Synthetic peptide
  Seed: RGRGVFELS
RYRGVFELK

SEQ ID NO: 10465 - protein, 9 aa, Artificial Sequence
  Description of Artificial Sequence: Synthetic peptide
  Seed: RGRGVFELS
RYRGVFELM

SEQ ID NO: 10466 - protein, 9 aa, Artificial Sequence
  Description of Artificial Sequence: Synthetic peptide
  Seed: RGRGVFELS
RYRGVFELF

SEQ ID NO: 10467 - protein, 9 aa, Artificial Sequence
  Description of Artificial Sequence: Synthetic peptide
  Seed: RGRGVFELS
RYRGVFELP

SEQ ID NO: 10468 - protein, 9 aa, Artificial Sequence
  Description of Artificial Sequence: Synthetic peptide
  Seed: RGRGVFELS
RYRGVFELS

SEQ ID NO: 10469 - protein, 9 aa, Artificial Sequence
  Description of Artificial Sequence: Synthetic peptide
  Seed: RGRGVFELS
RYRGVFELT

SEQ ID NO: 10470 - protein, 9 aa, Artificial Sequence
  Description of Artificial Sequence: Synthetic peptide
  Seed: RGRGVFELS
RYRGVFELV

SEQ ID NO: 10471 - protein, 9 aa, Artificial Sequence
  Description of Artificial Sequence: Synthetic peptide
  Seed: RGRGVFELS
RWRGVFELN

SEQ ID NO: 10472 - protein, 9 aa, Artificial Sequence
  Description of Artificial Sequence: Synthetic peptide
  Seed: RGRGVFELS
RVRGVFELA

SEQ ID NO: 10473 - protein, 9 aa, Artificial Sequence
  Description of Artificial Sequence: Synthetic peptide
  Seed: RGRGVFELS
RVRGVFELR

SEQ ID NO: 10474 - protein, 9 aa, Artificial Sequence
  Description of Artificial Sequence: Synthetic peptide
  Seed: RGRGVFELS
RVRGVFELN

SEQ ID NO: 10475 - protein, 9 aa, Artificial Sequence
  Description of Artificial Sequence: Synthetic peptide
  Seed: RGRGVFELS
RVRGVFELD

SEQ ID NO: 10476 - protein, 9 aa, Artificial Sequence
  Description of Artificial Sequence: Synthetic peptide
  Seed: RGRGVFELS
RVRGVFELC

SEQ ID NO: 10477 - protein, 9 aa, Artificial Sequence
  Description of Artificial Sequence: Synthetic peptide
  Seed: RGRGVFELS
RVRGVFELQ

SEQ ID NO: 10478 - protein, 9 aa, Artificial Sequence
  Description of Artificial Sequence: Synthetic peptide
  Seed: RGRGVFELS
RVRGVFELE

SEQ ID NO: 10479 - protein, 9 aa, Artificial Sequence
  Description of Artificial Sequence: Synthetic peptide
  Seed: RGRGVFELS
RVRGVFELG

SEQ ID NO: 10480 - protein, 9 aa, Artificial Sequence
  Description of Artificial Sequence: Synthetic peptide
  Seed: RGRGVFELS
RVRGVFELH

SEQ ID NO: 10481 - protein, 9 aa, Artificial Sequence
  Description of Artificial Sequence: Synthetic peptide
  Seed: RGRGVFELS
RYRGVFELG

SEQ ID NO: 10482 - protein, 9 aa, Artificial Sequence
  Description of Artificial Sequence: Synthetic peptide
  Seed: RGRGVFELS
RYRGVFELE

SEQ ID NO: 10483 - protein, 9 aa, Artificial Sequence
  Description of Artificial Sequence: Synthetic peptide
  Seed: RGRGVFELS
RYRGVFELQ

SEQ ID NO: 10484 - protein, 9 aa, Artificial Sequence
  Description of Artificial Sequence: Synthetic peptide
  Seed: RGRGVFELS
RYRGVFELC

SEQ ID NO: 10485 - protein, 9 aa, Artificial Sequence
  Description of Artificial Sequence: Synthetic peptide
  Seed: RGRGVFELS
RWRGVFELC

SEQ ID NO: 10486 - protein, 9 aa, Artificial Sequence
  Description of Artificial Sequence: Synthetic peptide
  Seed: RGRGVFELS
RWRGVFELQ

SEQ ID NO: 10487 - protein, 9 aa, Artificial Sequence
  Description of Artificial Sequence: Synthetic peptide
  Seed: RGRGVFELS
RWRGVFELE

SEQ ID NO: 10488 - protein, 9 aa, Artificial Sequence
  Description of Artificial Sequence: Synthetic peptide
  Seed: RGRGVFELS
RWRGVFELG

SEQ ID NO: 10489 - protein, 9 aa, Artificial Sequence
  Description of Artificial Sequence: Synthetic peptide
  Seed: RGRGVFELS
RWRGVFELH

SEQ ID NO: 10490 - protein, 9 aa, Artificial Sequence
  Description of Artificial Sequence: Synthetic peptide
  Seed: RGRGVFELS
RWRGVFELI

SEQ ID NO: 10491 - protein, 9 aa, Artificial Sequence
  Description of Artificial Sequence: Synthetic peptide
  Seed: RGRGVFELS
RWRGVFELL

SEQ ID NO: 10492 - protein, 9 aa, Artificial Sequence
  Description of Artificial Sequence: Synthetic peptide
  Seed: RGRGVFELS
RWRGVFELK

SEQ ID NO: 10493 - protein, 9 aa, Artificial Sequence
  Description of Artificial Sequence: Synthetic peptide
  Seed: RGRGVFELS
RWRGVFELM

SEQ ID NO: 10494 - protein, 9 aa, Artificial Sequence
  Description of Artificial Sequence: Synthetic peptide
  Seed: RGRGVFELS
RWRGVFELF

SEQ ID NO: 10495 - protein, 9 aa, Artificial Sequence
  Description of Artificial Sequence: Synthetic peptide
  Seed: RGRGVFELS
RWRGVFELP

SEQ ID NO: 10496 - protein, 9 aa, Artificial Sequence
  Description of Artificial Sequence: Synthetic peptide
  Seed: RGRGVFELS
RWRGVFELS

SEQ ID NO: 10497 - protein, 9 aa, Artificial Sequence
  Description of Artificial Sequence: Synthetic peptide
  Seed: RGRGVFELS
RWRGVFELT

SEQ ID NO: 10498 - protein, 9 aa, Artificial Sequence
  Description of Artificial Sequence: Synthetic peptide
  Seed: RGRGVFELS
RWRGVFELY

SEQ ID NO: 10499 - protein, 9 aa, Artificial Sequence
  Description of Artificial Sequence: Synthetic peptide
  Seed: RGRGVFELS
RWRGVFELV

SEQ ID NO: 10500 - protein, 9 aa, Artificial Sequence
  Description of Artificial Sequence: Synthetic peptide
  Seed: RGRGVFELS
RYRGVFELA

SEQ ID NO: 10501 - protein, 9 aa, Artificial Sequence
  Description of Artificial Sequence: Synthetic peptide
  Seed: RGRGVFELS
RYRGVFELR

SEQ ID NO: 10502 - protein, 9 aa, Artificial Sequence
  Description of Artificial Sequence: Synthetic peptide
  Seed: RGRGVFELS
RYRGVFELN

SEQ ID NO: 10503 - protein, 9 aa, Artificial Sequence
  Description of Artificial Sequence: Synthetic peptide
  Seed: RGRGVFELS
RYRGVFELD

SEQ ID NO: 10504 - protein, 9 aa, Artificial Sequence
  Description of Artificial Sequence: Synthetic peptide
  Seed: RGQLSTRGV
REQLSTRGM

SEQ ID NO: 10505 - protein, 9 aa, Artificial Sequence
  Description of Artificial Sequence: Synthetic peptide
  Seed: RGQLSTRGV
RQQLSTRGV

SEQ ID NO: 10506 - protein, 9 aa, Artificial Sequence
  Description of Artificial Sequence: Synthetic peptide
  Seed: RGQLSTRGV
RQQLSTRGY

SEQ ID NO: 10507 - protein, 9 aa, Artificial Sequence
  Description of Artificial Sequence: Synthetic peptide
  Seed: RGKLSTRGV
RIKLSTRGF

SEQ ID NO: 10508 - protein, 9 aa, Artificial Sequence
  Description of Artificial Sequence: Synthetic peptide
  Seed: RGKLSTRGV
RIKLSTRGC

SEQ ID NO: 10509 - protein, 9 aa, Artificial Sequence
  Description of Artificial Sequence: Synthetic peptide
  Seed: RGKLSTRGV
RIKLSTRGQ

SEQ ID NO: 10510 - protein, 9 aa, Artificial Sequence
  Description of Artificial Sequence: Synthetic peptide
  Seed: RGKLSTRGV
RIKLSTRGE

SEQ ID NO: 10511 - protein, 9 aa, Artificial Sequence
  Description of Artificial Sequence: Synthetic peptide
  Seed: RGKLSTRGV
RIKLSTRGG

SEQ ID NO: 10512 - protein, 9 aa, Artificial Sequence
  Description of Artificial Sequence: Synthetic peptide
  Seed: RGKLSTRGV
RIKLSTRGH

SEQ ID NO: 10513 - protein, 9 aa, Artificial Sequence
  Description of Artificial Sequence: Synthetic peptide
  Seed: RGKLSTRGV
RIKLSTRGI

SEQ ID NO: 10514 - protein, 9 aa, Artificial Sequence
  Description of Artificial Sequence: Synthetic peptide
  Seed: RGKLSTRGV
RIKLSTRGL

SEQ ID NO: 10515 - protein, 9 aa, Artificial Sequence
  Description of Artificial Sequence: Synthetic peptide
  Seed: RGKLSTRGV
RIKLSTRGK

SEQ ID NO: 10516 - protein, 9 aa, Artificial Sequence
  Description of Artificial Sequence: Synthetic peptide
  Seed: RGKLSTRGV
RIKLSTRGM

SEQ ID NO: 10517 - protein, 9 aa, Artificial Sequence
  Description of Artificial Sequence: Synthetic peptide
  Seed: RGKLSTRGV
RIKLSTRGP

SEQ ID NO: 10518 - protein, 9 aa, Artificial Sequence
  Description of Artificial Sequence: Synthetic peptide
  Seed: RGKLSTRGV
RLKLSTRGG

SEQ ID NO: 10519 - protein, 9 aa, Artificial Sequence
  Description of Artificial Sequence: Synthetic peptide
  Seed: RGKLSTRGV
RIKLSTRGS

SEQ ID NO: 10520 - protein, 9 aa, Artificial Sequence
  Description of Artificial Sequence: Synthetic peptide
  Seed: RGKLSTRGV
RIKLSTRGT

SEQ ID NO: 10521 - protein, 9 aa, Artificial Sequence
  Description of Artificial Sequence: Synthetic peptide
  Seed: RGKLSTRGV
RIKLSTRGY

SEQ ID NO: 10522 - protein, 9 aa, Artificial Sequence
  Description of Artificial Sequence: Synthetic peptide
  Seed: RGKLSTRGV
RIKLSTRGV

SEQ ID NO: 10523 - protein, 9 aa, Artificial Sequence
  Description of Artificial Sequence: Synthetic peptide
  Seed: RGKLSTRGV
RLKLSTRGA

SEQ ID NO: 10524 - protein, 9 aa, Artificial Sequence
  Description of Artificial Sequence: Synthetic peptide
  Seed: RGKLSTRGV
RLKLSTRGR

SEQ ID NO: 10525 - protein, 9 aa, Artificial Sequence
  Description of Artificial Sequence: Synthetic peptide
  Seed: RGKLSTRGV
RLKLSTRGN

SEQ ID NO: 10526 - protein, 9 aa, Artificial Sequence
  Description of Artificial Sequence: Synthetic peptide
  Seed: RGKLSTRGV
RLKLSTRGC

SEQ ID NO: 10527 - protein, 9 aa, Artificial Sequence
  Description of Artificial Sequence: Synthetic peptide
  Seed: RGKLSTRGV
RLKLSTRGQ

SEQ ID NO: 10528 - protein, 9 aa, Artificial Sequence
  Description of Artificial Sequence: Synthetic peptide
  Seed: RGKLSTRGV
RIKLSTRGD

SEQ ID NO: 10529 - protein, 9 aa, Artificial Sequence
  Description of Artificial Sequence: Synthetic peptide
  Seed: RGKLSTRGV
RIKLSTRGN

SEQ ID NO: 10530 - protein, 9 aa, Artificial Sequence
  Description of Artificial Sequence: Synthetic peptide
  Seed: RGKLSTRGV
RIKLSTRGR

SEQ ID NO: 10531 - protein, 9 aa, Artificial Sequence
  Description of Artificial Sequence: Synthetic peptide
  Seed: RGKLSTRGV
RIKLSTRGA

SEQ ID NO: 10532 - protein, 9 aa, Artificial Sequence
  Description of Artificial Sequence: Synthetic peptide
  Seed: RGKLSTRGV
RQKLSTRGP

SEQ ID NO: 10533 - protein, 9 aa, Artificial Sequence
  Description of Artificial Sequence: Synthetic peptide
  Seed: RGKLSTRGV
RQKLSTRGS

SEQ ID NO: 10534 - protein, 9 aa, Artificial Sequence
  Description of Artificial Sequence: Synthetic peptide
  Seed: RGKLSTRGV
RQKLSTRGT

SEQ ID NO: 10535 - protein, 9 aa, Artificial Sequence
  Description of Artificial Sequence: Synthetic peptide
  Seed: RGKLSTRGV
RQKLSTRGY

SEQ ID NO: 10536 - protein, 9 aa, Artificial Sequence
  Description of Artificial Sequence: Synthetic peptide
  Seed: RGKLSTRGV
RQKLSTRGV

SEQ ID NO: 10537 - protein, 9 aa, Artificial Sequence
  Description of Artificial Sequence: Synthetic peptide
  Seed: RGKLSTRGV
RGKLSTRGA

SEQ ID NO: 10538 - protein, 9 aa, Artificial Sequence
  Description of Artificial Sequence: Synthetic peptide
  Seed: RGKLSTRGV
RGKLSTRGR

SEQ ID NO: 10539 - protein, 9 aa, Artificial Sequence
  Description of Artificial Sequence: Synthetic peptide
  Seed: RGKLSTRGV
RGKLSTRGC

SEQ ID NO: 10540 - protein, 9 aa, Artificial Sequence
  Description of Artificial Sequence: Synthetic peptide
  Seed: RGKLSTRGV
RGKLSTRGG

SEQ ID NO: 10541 - protein, 9 aa, Artificial Sequence
  Description of Artificial Sequence: Synthetic peptide
  Seed: RGKLSTRGV
RGKLSTRGI

SEQ ID NO: 10542 - protein, 9 aa, Artificial Sequence
  Description of Artificial Sequence: Synthetic peptide
  Seed: RGKLSTRGV
RGKLSTRGL

SEQ ID NO: 10543 - protein, 9 aa, Artificial Sequence
  Description of Artificial Sequence: Synthetic peptide
  Seed: RGKLSTRGV
RGKLSTRGK

SEQ ID NO: 10544 - protein, 9 aa, Artificial Sequence
  Description of Artificial Sequence: Synthetic peptide
  Seed: RGKLSTRGV
RGKLSTRGM

SEQ ID NO: 10545 - protein, 9 aa, Artificial Sequence
  Description of Artificial Sequence: Synthetic peptide
  Seed: RGKLSTRGV
RGKLSTRGF

SEQ ID NO: 10546 - protein, 9 aa, Artificial Sequence
  Description of Artificial Sequence: Synthetic peptide
  Seed: RGKLSTRGV
RGKLSTRGP

SEQ ID NO: 10547 - protein, 9 aa, Artificial Sequence
  Description of Artificial Sequence: Synthetic peptide
  Seed: RGKLSTRGV
RGKLSTRGS

SEQ ID NO: 10548 - protein, 9 aa, Artificial Sequence
  Description of Artificial Sequence: Synthetic peptide
  Seed: RGKLSTRGV
RGKLSTRGT

SEQ ID NO: 10549 - protein, 9 aa, Artificial Sequence
  Description of Artificial Sequence: Synthetic peptide
  Seed: RGKLSTRGV
RGKLSTRGY

SEQ ID NO: 10550 - protein, 9 aa, Artificial Sequence
  Description of Artificial Sequence: Synthetic peptide
  Seed: RGKLSTRGV
RHKLSTRGK

SEQ ID NO: 10551 - protein, 9 aa, Artificial Sequence
  Description of Artificial Sequence: Synthetic peptide
  Seed: RGKLSTRGV
RLKLSTRGE

SEQ ID NO: 10552 - protein, 9 aa, Artificial Sequence
  Description of Artificial Sequence: Synthetic peptide
  Seed: RGKLSTRGV
RLKLSTRGH

SEQ ID NO: 10553 - protein, 9 aa, Artificial Sequence
  Description of Artificial Sequence: Synthetic peptide
  Seed: RGKLSTRGV
RQKLSTRGM

SEQ ID NO: 10554 - protein, 9 aa, Artificial Sequence
  Description of Artificial Sequence: Synthetic peptide
  Seed: RGKLSTRGV
RFKLSTRGC

SEQ ID NO: 10555 - protein, 9 aa, Artificial Sequence
  Description of Artificial Sequence: Synthetic peptide
  Seed: RGKLSTRGV
RMKLSTRGF

SEQ ID NO: 10556 - protein, 9 aa, Artificial Sequence
  Description of Artificial Sequence: Synthetic peptide
  Seed: RGKLSTRGV
RMKLSTRGP

SEQ ID NO: 10557 - protein, 9 aa, Artificial Sequence
  Description of Artificial Sequence: Synthetic peptide
  Seed: RGKLSTRGV
RMKLSTRGS

SEQ ID NO: 10558 - protein, 9 aa, Artificial Sequence
  Description of Artificial Sequence: Synthetic peptide
  Seed: RGKLSTRGV
RMKLSTRGT

SEQ ID NO: 10559 - protein, 9 aa, Artificial Sequence
  Description of Artificial Sequence: Synthetic peptide
  Seed: RGKLSTRGV
RMKLSTRGY

SEQ ID NO: 10560 - protein, 9 aa, Artificial Sequence
  Description of Artificial Sequence: Synthetic peptide
  Seed: RGKLSTRGV
RMKLSTRGV

SEQ ID NO: 10561 - protein, 9 aa, Artificial Sequence
  Description of Artificial Sequence: Synthetic peptide
  Seed: RGKLSTRGV
RFKLSTRGA

SEQ ID NO: 10562 - protein, 9 aa, Artificial Sequence
  Description of Artificial Sequence: Synthetic peptide
  Seed: RGKLSTRGV
RFKLSTRGR

SEQ ID NO: 10563 - protein, 9 aa, Artificial Sequence
  Description of Artificial Sequence: Synthetic peptide
  Seed: RGKLSTRGV
RFKLSTRGN

SEQ ID NO: 10564 - protein, 9 aa, Artificial Sequence
  Description of Artificial Sequence: Synthetic peptide
  Seed: RGKLSTRGV
RFKLSTRGQ

SEQ ID NO: 10565 - protein, 9 aa, Artificial Sequence
  Description of Artificial Sequence: Synthetic peptide
  Seed: RGKLSTRGV
RLKLSTRGI

SEQ ID NO: 10566 - protein, 9 aa, Artificial Sequence
  Description of Artificial Sequence: Synthetic peptide
  Seed: RGKLSTRGV
RFKLSTRGE

SEQ ID NO: 10567 - protein, 9 aa, Artificial Sequence
  Description of Artificial Sequence: Synthetic peptide
  Seed: RGKLSTRGV
RFKLSTRGG

SEQ ID NO: 10568 - protein, 9 aa, Artificial Sequence
  Description of Artificial Sequence: Synthetic peptide
  Seed: RGKLSTRGV
RFKLSTRGH

SEQ ID NO: 10569 - protein, 9 aa, Artificial Sequence
  Description of Artificial Sequence: Synthetic peptide
  Seed: RGKLSTRGV
RFKLSTRGI

SEQ ID NO: 10570 - protein, 9 aa, Artificial Sequence
  Description of Artificial Sequence: Synthetic peptide
  Seed: RGKLSTRGV
RFKLSTRGL

SEQ ID NO: 10571 - protein, 9 aa, Artificial Sequence
  Description of Artificial Sequence: Synthetic peptide
  Seed: RGKLSTRGV
RFKLSTRGK

SEQ ID NO: 10572 - protein, 9 aa, Artificial Sequence
  Description of Artificial Sequence: Synthetic peptide
  Seed: RGKLSTRGV
RFKLSTRGM

SEQ ID NO: 10573 - protein, 9 aa, Artificial Sequence
  Description of Artificial Sequence: Synthetic peptide
  Seed: RGKLSTRGV
RFKLSTRGF

SEQ ID NO: 10574 - protein, 9 aa, Artificial Sequence
  Description of Artificial Sequence: Synthetic peptide
  Seed: RGKLSTRGV
RFKLSTRGP

SEQ ID NO: 10575 - protein, 9 aa, Artificial Sequence
  Description of Artificial Sequence: Synthetic peptide
  Seed: RGKLSTRGV
RMKLSTRGM

SEQ ID NO: 10576 - protein, 9 aa, Artificial Sequence
  Description of Artificial Sequence: Synthetic peptide
  Seed: RGKLSTRGV
RMKLSTRGK

SEQ ID NO: 10577 - protein, 9 aa, Artificial Sequence
  Description of Artificial Sequence: Synthetic peptide
  Seed: RGKLSTRGV
RMKLSTRGL

SEQ ID NO: 10578 - protein, 9 aa, Artificial Sequence
  Description of Artificial Sequence: Synthetic peptide
  Seed: RGKLSTRGV
RMKLSTRGI

SEQ ID NO: 10579 - protein, 9 aa, Artificial Sequence
  Description of Artificial Sequence: Synthetic peptide
  Seed: RGKLSTRGV
RLKLSTRGL

SEQ ID NO: 10580 - protein, 9 aa, Artificial Sequence
  Description of Artificial Sequence: Synthetic peptide
  Seed: RGKLSTRGV
RLKLSTRGK

SEQ ID NO: 10581 - protein, 9 aa, Artificial Sequence
  Description of Artificial Sequence: Synthetic peptide
  Seed: RGKLSTRGV
RLKLSTRGM

SEQ ID NO: 10582 - protein, 9 aa, Artificial Sequence
  Description of Artificial Sequence: Synthetic peptide
  Seed: RGKLSTRGV
RLKLSTRGF

SEQ ID NO: 10583 - protein, 9 aa, Artificial Sequence
  Description of Artificial Sequence: Synthetic peptide
  Seed: RGKLSTRGV
RLKLSTRGP

SEQ ID NO: 10584 - protein, 9 aa, Artificial Sequence
  Description of Artificial Sequence: Synthetic peptide
  Seed: RGKLSTRGV
RLKLSTRGS

SEQ ID NO: 10585 - protein, 9 aa, Artificial Sequence
  Description of Artificial Sequence: Synthetic peptide
  Seed: RGKLSTRGV
RLKLSTRGT

SEQ ID NO: 10586 - protein, 9 aa, Artificial Sequence
  Description of Artificial Sequence: Synthetic peptide
  Seed: RGKLSTRGV
RLKLSTRGY

SEQ ID NO: 10587 - protein, 9 aa, Artificial Sequence
  Description of Artificial Sequence: Synthetic peptide
  Seed: RGKLSTRGV
RLKLSTRGV

SEQ ID NO: 10588 - protein, 9 aa, Artificial Sequence
  Description of Artificial Sequence: Synthetic peptide
  Seed: RGKLSTRGV
RKKLSTRGK

SEQ ID NO: 10589 - protein, 9 aa, Artificial Sequence
  Description of Artificial Sequence: Synthetic peptide
  Seed: RGKLSTRGV
RMKLSTRGA

SEQ ID NO: 10590 - protein, 9 aa, Artificial Sequence
  Description of Artificial Sequence: Synthetic peptide
  Seed: RGKLSTRGV
RMKLSTRGR

SEQ ID NO: 10591 - protein, 9 aa, Artificial Sequence
  Description of Artificial Sequence: Synthetic peptide
  Seed: RGKLSTRGV
RMKLSTRGN

SEQ ID NO: 10592 - protein, 9 aa, Artificial Sequence
  Description of Artificial Sequence: Synthetic peptide
  Seed: RGKLSTRGV
RMKLSTRGD

SEQ ID NO: 10593 - protein, 9 aa, Artificial Sequence
  Description of Artificial Sequence: Synthetic peptide
  Seed: RGKLSTRGV
RMKLSTRGC

SEQ ID NO: 10594 - protein, 9 aa, Artificial Sequence
  Description of Artificial Sequence: Synthetic peptide
  Seed: RGKLSTRGV
RMKLSTRGQ

SEQ ID NO: 10595 - protein, 9 aa, Artificial Sequence
  Description of Artificial Sequence: Synthetic peptide
  Seed: RGKLSTRGV
RMKLSTRGE

SEQ ID NO: 10596 - protein, 9 aa, Artificial Sequence
  Description of Artificial Sequence: Synthetic peptide
  Seed: RGKLSTRGV
RMKLSTRGG

SEQ ID NO: 10597 - protein, 9 aa, Artificial Sequence
  Description of Artificial Sequence: Synthetic peptide
  Seed: RGKLSTRGV
RMKLSTRGH

SEQ ID NO: 10598 - protein, 9 aa, Artificial Sequence
  Description of Artificial Sequence: Synthetic peptide
  Seed: RGKLSTRGV
RQKLSTRGF

SEQ ID NO: 10599 - protein, 9 aa, Artificial Sequence
  Description of Artificial Sequence: Synthetic peptide
  Seed: RGKLSTRGV
RQKLSTRGK

SEQ ID NO: 10600 - protein, 9 aa, Artificial Sequence
  Description of Artificial Sequence: Synthetic peptide
  Seed: RGQLSTRGV
RQQLSTRGW

SEQ ID NO: 10601 - protein, 11 aa, Artificial Sequence
  Description of Artificial Sequence: Synthetic peptide
  Seed: RGINDRNFWRG
RVINDRNFWRC

SEQ ID NO: 10602 - protein, 11 aa, Artificial Sequence
  Description of Artificial Sequence: Synthetic peptide
  Seed: RGINDRNFWRG
RYINDRNFWRS

SEQ ID NO: 10603 - protein, 11 aa, Artificial Sequence
  Description of Artificial Sequence: Synthetic peptide
  Seed: RGINDRNFWRG
RYINDRNFWRT

SEQ ID NO: 10604 - protein, 11 aa, Artificial Sequence
  Description of Artificial Sequence: Synthetic peptide
  Seed: RGINDRNFWRG
RYINDRNFWRW

SEQ ID NO: 10605 - protein, 11 aa, Artificial Sequence
  Description of Artificial Sequence: Synthetic peptide
  Seed: RGINDRNFWRG
RYINDRNFWRY

SEQ ID NO: 10606 - protein, 11 aa, Artificial Sequence
  Description of Artificial Sequence: Synthetic peptide
  Seed: RGINDRNFWRG
RYINDRNFWRV

SEQ ID NO: 10607 - protein, 11 aa, Artificial Sequence
  Description of Artificial Sequence: Synthetic peptide
  Seed: RGINDRNFWRG
RVINDRNFWRA

SEQ ID NO: 10608 - protein, 11 aa, Artificial Sequence
  Description of Artificial Sequence: Synthetic peptide
  Seed: RGINDRNFWRG
RVINDRNFWRR

SEQ ID NO: 10609 - protein, 11 aa, Artificial Sequence
  Description of Artificial Sequence: Synthetic peptide
  Seed: RGINDRNFWRG
RVINDRNFWRN

SEQ ID NO: 10610 - protein, 11 aa, Artificial Sequence
  Description of Artificial Sequence: Synthetic peptide
  Seed: RGINDRNFWRG
RVINDRNFWRD

SEQ ID NO: 10611 - protein, 11 aa, Artificial Sequence
  Description of Artificial Sequence: Synthetic peptide
  Seed: RGINDRNFWRG
RVINDRNFWRQ

SEQ ID NO: 10612 - protein, 11 aa, Artificial Sequence
  Description of Artificial Sequence: Synthetic peptide
  Seed: RGINDRNFWRG
RVINDRNFWRT

SEQ ID NO: 10613 - protein, 11 aa, Artificial Sequence
  Description of Artificial Sequence: Synthetic peptide
  Seed: RGINDRNFWRG
RVINDRNFWRE

SEQ ID NO: 10614 - protein, 11 aa, Artificial Sequence
  Description of Artificial Sequence: Synthetic peptide
  Seed: RGINDRNFWRG
RVINDRNFWRG

SEQ ID NO: 10615 - protein, 11 aa, Artificial Sequence
  Description of Artificial Sequence: Synthetic peptide
  Seed: RGINDRNFWRG
RVINDRNFWRH

SEQ ID NO: 10616 - protein, 11 aa, Artificial Sequence
  Description of Artificial Sequence: Synthetic peptide
  Seed: RGINDRNFWRG
RVINDRNFWRI

SEQ ID NO: 10617 - protein, 11 aa, Artificial Sequence
  Description of Artificial Sequence: Synthetic peptide
  Seed: RGINDRNFWRG
RVINDRNFWRL

SEQ ID NO: 10618 - protein, 11 aa, Artificial Sequence
  Description of Artificial Sequence: Synthetic peptide
  Seed: RGINDRNFWRG
RVINDRNFWRK

SEQ ID NO: 10619 - protein, 11 aa, Artificial Sequence
  Description of Artificial Sequence: Synthetic peptide
  Seed: RGINDRNFWRG
RVINDRNFWRM

SEQ ID NO: 10620 - protein, 11 aa, Artificial Sequence
  Description of Artificial Sequence: Synthetic peptide
  Seed: RGINDRNFWRG
RVINDRNFWRF

SEQ ID NO: 10621 - protein, 11 aa, Artificial Sequence
  Description of Artificial Sequence: Synthetic peptide
  Seed: RGINDRNFWRG
RVINDRNFWRP

SEQ ID NO: 10622 - protein, 11 aa, Artificial Sequence
  Description of Artificial Sequence: Synthetic peptide
  Seed: RGINDRNFWRG
RYINDRNFWRP

SEQ ID NO: 10623 - protein, 11 aa, Artificial Sequence
  Description of Artificial Sequence: Synthetic peptide
  Seed: RGINDRNFWRG
RYINDRNFWRF

SEQ ID NO: 10624 - protein, 11 aa, Artificial Sequence
  Description of Artificial Sequence: Synthetic peptide
  Seed: RGINDRNFWRG
RYINDRNFWRM

SEQ ID NO: 10625 - protein, 11 aa, Artificial Sequence
  Description of Artificial Sequence: Synthetic peptide
  Seed: RGINDRNFWRG
RYINDRNFWRK

SEQ ID NO: 10626 - protein, 11 aa, Artificial Sequence
  Description of Artificial Sequence: Synthetic peptide
  Seed: RGINDRNFWRG
RWINDRNFWRM

SEQ ID NO: 10627 - protein, 11 aa, Artificial Sequence
  Description of Artificial Sequence: Synthetic peptide
  Seed: RGINDRNFWRG
RWINDRNFWRF

SEQ ID NO: 10628 - protein, 11 aa, Artificial Sequence
  Description of Artificial Sequence: Synthetic peptide
  Seed: RGINDRNFWRG
RWINDRNFWRP

SEQ ID NO: 10629 - protein, 11 aa, Artificial Sequence
  Description of Artificial Sequence: Synthetic peptide
  Seed: RGINDRNFWRG
RWINDRNFWRS

SEQ ID NO: 10630 - protein, 11 aa, Artificial Sequence
  Description of Artificial Sequence: Synthetic peptide
  Seed: RGINDRNFWRG
RWINDRNFWRT

SEQ ID NO: 10631 - protein, 11 aa, Artificial Sequence
  Description of Artificial Sequence: Synthetic peptide
  Seed: RGINDRNFWRG
RWINDRNFWRW

SEQ ID NO: 10632 - protein, 11 aa, Artificial Sequence
  Description of Artificial Sequence: Synthetic peptide
  Seed: RGINDRNFWRG
RWINDRNFWRY

SEQ ID NO: 10633 - protein, 11 aa, Artificial Sequence
  Description of Artificial Sequence: Synthetic peptide
  Seed: RGINDRNFWRG
RWINDRNFWRV

SEQ ID NO: 10634 - protein, 11 aa, Artificial Sequence
  Description of Artificial Sequence: Synthetic peptide
  Seed: RGINDRNFWRG
RYINDRNFWRA

SEQ ID NO: 10635 - protein, 11 aa, Artificial Sequence
  Description of Artificial Sequence: Synthetic peptide
  Seed: RGINDRNFWRG
RYINDRNFWRR

SEQ ID NO: 10636 - protein, 11 aa, Artificial Sequence
  Description of Artificial Sequence: Synthetic peptide
  Seed: RGINDRNFWRG
RYINDRNFWRN

SEQ ID NO: 10637 - protein, 11 aa, Artificial Sequence
  Description of Artificial Sequence: Synthetic peptide
  Seed: RGINDRNFWRG
RYINDRNFWRD

SEQ ID NO: 10638 - protein, 11 aa, Artificial Sequence
  Description of Artificial Sequence: Synthetic peptide
  Seed: RGINDRNFWRG
RYINDRNFWRC

SEQ ID NO: 10639 - protein, 11 aa, Artificial Sequence
  Description of Artificial Sequence: Synthetic peptide
  Seed: RGINDRNFWRG
RYINDRNFWRQ

SEQ ID NO: 10640 - protein, 11 aa, Artificial Sequence
  Description of Artificial Sequence: Synthetic peptide
  Seed: RGINDRNFWRG
RYINDRNFWRE

SEQ ID NO: 10641 - protein, 11 aa, Artificial Sequence
  Description of Artificial Sequence: Synthetic peptide
  Seed: RGINDRNFWRG
RYINDRNFWRG

SEQ ID NO: 10642 - protein, 11 aa, Artificial Sequence
  Description of Artificial Sequence: Synthetic peptide
  Seed: RGINDRNFWRG
RYINDRNFWRH

SEQ ID NO: 10643 - protein, 11 aa, Artificial Sequence
  Description of Artificial Sequence: Synthetic peptide
  Seed: RGINDRNFWRG
RYINDRNFWRI

SEQ ID NO: 10644 - protein, 11 aa, Artificial Sequence
  Description of Artificial Sequence: Synthetic peptide
  Seed: RGINDRNFWRG
RYINDRNFWRL

SEQ ID NO: 10645 - protein, 11 aa, Artificial Sequence
  Description of Artificial Sequence: Synthetic peptide
  Seed: RGINDRNFWRG
RVINDRNFWRS

SEQ ID NO: 10646 - protein, 11 aa, Artificial Sequence
  Description of Artificial Sequence: Synthetic peptide
  Seed: RGINDRNFWRG
RVINDRNFWRW

SEQ ID NO: 10647 - protein, 9 aa, Artificial Sequence
  Description of Artificial Sequence: Synthetic peptide
  Seed: RGKLSTRGV
RQKLSTRGL

SEQ ID NO: 10648 - protein, 9 aa, Artificial Sequence
  Description of Artificial Sequence: Synthetic peptide
  Seed: RGKLSTRGV
RCKLSTRGI

SEQ ID NO: 10649 - protein, 9 aa, Artificial Sequence
  Description of Artificial Sequence: Synthetic peptide
  Seed: RGKLSTRGV
RNKLSTRGI

SEQ ID NO: 10650 - protein, 9 aa, Artificial Sequence
  Description of Artificial Sequence: Synthetic peptide
  Seed: RGKLSTRGV
RNKLSTRGL

SEQ ID NO: 10651 - protein, 9 aa, Artificial Sequence
  Description of Artificial Sequence: Synthetic peptide
  Seed: RGKLSTRGV
RNKLSTRGK

SEQ ID NO: 10652 - protein, 9 aa, Artificial Sequence
  Description of Artificial Sequence: Synthetic peptide
  Seed: RGKLSTRGV
RNKLSTRGM

SEQ ID NO: 10653 - protein, 9 aa, Artificial Sequence
  Description of Artificial Sequence: Synthetic peptide
  Seed: RGKLSTRGV
RNKLSTRGS

SEQ ID NO: 10654 - protein, 9 aa, Artificial Sequence
  Description of Artificial Sequence: Synthetic peptide
  Seed: RGKLSTRGV
RNKLSTRGT

SEQ ID NO: 10655 - protein, 9 aa, Artificial Sequence
  Description of Artificial Sequence: Synthetic peptide
  Seed: RGKLSTRGV
RNKLSTRGY

SEQ ID NO: 10656 - protein, 9 aa, Artificial Sequence
  Description of Artificial Sequence: Synthetic peptide
  Seed: RGKLSTRGV
RNKLSTRGV

SEQ ID NO: 10657 - protein, 9 aa, Artificial Sequence
  Description of Artificial Sequence: Synthetic peptide
  Seed: RGKLSTRGV
RCKLSTRGA

SEQ ID NO: 10658 - protein, 9 aa, Artificial Sequence
  Description of Artificial Sequence: Synthetic peptide
  Seed: RGKLSTRGV
RCKLSTRGL

SEQ ID NO: 10659 - protein, 11 aa, Artificial Sequence
  Description of Artificial Sequence: Synthetic peptide
  Seed: RGINDRNFWRG
RVINDRNFWRY

SEQ ID NO: 10660 - protein, 9 aa, Artificial Sequence
  Description of Artificial Sequence: Synthetic peptide
  Seed: RGKLSTRGV
RCKLSTRGK

SEQ ID NO: 10661 - protein, 9 aa, Artificial Sequence
  Description of Artificial Sequence: Synthetic peptide
  Seed: RGKLSTRGV
RCKLSTRGM

SEQ ID NO: 10662 - protein, 9 aa, Artificial Sequence
  Description of Artificial Sequence: Synthetic peptide
  Seed: RGKLSTRGV
RCKLSTRGV

SEQ ID NO: 10663 - protein, 9 aa, Artificial Sequence
  Description of Artificial Sequence: Synthetic peptide
  Seed: RGKLSTRGV
RQKLSTRGA

SEQ ID NO: 10664 - protein, 9 aa, Artificial Sequence
  Description of Artificial Sequence: Synthetic peptide
  Seed: RGKLSTRGV
RQKLSTRGR

SEQ ID NO: 10665 - protein, 9 aa, Artificial Sequence
  Description of Artificial Sequence: Synthetic peptide
  Seed: RGKLSTRGV
RQKLSTRGC

SEQ ID NO: 10666 - protein, 9 aa, Artificial Sequence
  Description of Artificial Sequence: Synthetic peptide
  Seed: RGKLSTRGV
RQKLSTRGQ

SEQ ID NO: 10667 - protein, 9 aa, Artificial Sequence
  Description of Artificial Sequence: Synthetic peptide
  Seed: RGKLSTRGV
RQKLSTRGG

SEQ ID NO: 10668 - protein, 9 aa, Artificial Sequence
  Description of Artificial Sequence: Synthetic peptide
  Seed: RGKLSTRGV
RQKLSTRGI

SEQ ID NO: 10669 - protein, 9 aa, Artificial Sequence
  Description of Artificial Sequence: Synthetic peptide
  Seed: RGKLSTRGV
RNKLSTRGG

SEQ ID NO: 10670 - protein, 9 aa, Artificial Sequence
  Description of Artificial Sequence: Synthetic peptide
  Seed: RGKLSTRGV
RNKLSTRGR

SEQ ID NO: 10671 - protein, 9 aa, Artificial Sequence
  Description of Artificial Sequence: Synthetic peptide
  Seed: RGKLSTRGV
RNKLSTRGA

SEQ ID NO: 10672 - protein, 9 aa, Artificial Sequence
  Description of Artificial Sequence: Synthetic peptide
  Seed: RGKLSTRGV
RRKLSTRGK

SEQ ID NO: 10673 - protein, 11 aa, Artificial Sequence
  Description of Artificial Sequence: Synthetic peptide
  Seed: RGINDRNFWRG
RVINDRNFWRV

SEQ ID NO: 10674 - protein, 9 aa, Artificial Sequence
  Description of Artificial Sequence: Synthetic peptide
  Seed: RGKLSTRGV
RAKLSTRGA

SEQ ID NO: 10675 - protein, 9 aa, Artificial Sequence
  Description of Artificial Sequence: Synthetic peptide
  Seed: RGKLSTRGV
RAKLSTRGR

SEQ ID NO: 10676 - protein, 9 aa, Artificial Sequence
  Description of Artificial Sequence: Synthetic peptide
  Seed: RGKLSTRGV
RAKLSTRGN

SEQ ID NO: 10677 - protein, 9 aa, Artificial Sequence
  Description of Artificial Sequence: Synthetic peptide
  Seed: RGKLSTRGV
RAKLSTRGC

SEQ ID NO: 10678 - protein, 9 aa, Artificial Sequence
  Description of Artificial Sequence: Synthetic peptide
  Seed: RGKLSTRGV
RAKLSTRGQ

SEQ ID NO: 10679 - protein, 9 aa, Artificial Sequence
  Description of Artificial Sequence: Synthetic peptide
  Seed: RGKLSTRGV
RAKLSTRGE

SEQ ID NO: 10680 - protein, 9 aa, Artificial Sequence
  Description of Artificial Sequence: Synthetic peptide
  Seed: RGKLSTRGV
RAKLSTRGG

SEQ ID NO: 10681 - protein, 9 aa, Artificial Sequence
  Description of Artificial Sequence: Synthetic peptide
  Seed: RGKLSTRGV
RAKLSTRGH

SEQ ID NO: 10682 - protein, 9 aa, Artificial Sequence
  Description of Artificial Sequence: Synthetic peptide
  Seed: RGKLSTRGV
RAKLSTRGI

SEQ ID NO: 10683 - protein, 9 aa, Artificial Sequence
  Description of Artificial Sequence: Synthetic peptide
  Seed: RGKLSTRGV
RAKLSTRGL

SEQ ID NO: 10684 - protein, 9 aa, Artificial Sequence
  Description of Artificial Sequence: Synthetic peptide
  Seed: RGKLSTRGV
RAKLSTRGK

SEQ ID NO: 10685 - protein, 9 aa, Artificial Sequence
  Description of Artificial Sequence: Synthetic peptide
  Seed: RGKLSTRGV
RAKLSTRGM

SEQ ID NO: 10686 - protein, 9 aa, Artificial Sequence
  Description of Artificial Sequence: Synthetic peptide
  Seed: RGKLSTRGV
RAKLSTRGF

SEQ ID NO: 10687 - protein, 9 aa, Artificial Sequence
  Description of Artificial Sequence: Synthetic peptide
  Seed: RGKLSTRGV
RAKLSTRGP

SEQ ID NO: 10688 - protein, 9 aa, Artificial Sequence
  Description of Artificial Sequence: Synthetic peptide
  Seed: RGKLSTRGV
RAKLSTRGS

SEQ ID NO: 10689 - protein, 9 aa, Artificial Sequence
  Description of Artificial Sequence: Synthetic peptide
  Seed: RGKLSTRGV
RAKLSTRGT

SEQ ID NO: 10690 - protein, 9 aa, Artificial Sequence
  Description of Artificial Sequence: Synthetic peptide
  Seed: RGKLSTRGV
RAKLSTRGY

SEQ ID NO: 10691 - protein, 9 aa, Artificial Sequence
  Description of Artificial Sequence: Synthetic peptide
  Seed: RGKLSTRGV
RAKLSTRGV

SEQ ID NO: 10692 - protein, 9 aa, Artificial Sequence
  Description of Artificial Sequence: Synthetic peptide
  Seed: RGKLSTRGV
RFKLSTRGS

SEQ ID NO: 10693 - protein, 9 aa, Artificial Sequence
  Description of Artificial Sequence: Synthetic peptide
  Seed: RGKLSTRGV
RFKLSTRGT

SEQ ID NO: 10694 - protein, 9 aa, Artificial Sequence
  Description of Artificial Sequence: Synthetic peptide
  Seed: RGKLSTRGV
RFKLSTRGY

SEQ ID NO: 10695 - protein, 9 aa, Artificial Sequence
  Description of Artificial Sequence: Synthetic peptide
  Seed: RGLTHMMIW
RLLTHMMIL

SEQ ID NO: 10696 - protein, 9 aa, Artificial Sequence
  Description of Artificial Sequence: Synthetic peptide
  Seed: RGLTHMMIW
RGLTHMMIY

SEQ ID NO: 10697 - protein, 9 aa, Artificial Sequence
  Description of Artificial Sequence: Synthetic peptide
  Seed: RGLTHMMIW
RILTHMMII

SEQ ID NO: 10698 - protein, 9 aa, Artificial Sequence
  Description of Artificial Sequence: Synthetic peptide
  Seed: RGLTHMMIW
RILTHMMIL

SEQ ID NO: 10699 - protein, 9 aa, Artificial Sequence
  Description of Artificial Sequence: Synthetic peptide
  Seed: RGLTHMMIW
RILTHMMIM

SEQ ID NO: 10700 - protein, 9 aa, Artificial Sequence
  Description of Artificial Sequence: Synthetic peptide
  Seed: RGLTHMMIW
RILTHMMIF

SEQ ID NO: 10701 - protein, 9 aa, Artificial Sequence
  Description of Artificial Sequence: Synthetic peptide
  Seed: RGLTHMMIW
RILTHMMIW

SEQ ID NO: 10702 - protein, 9 aa, Artificial Sequence
  Description of Artificial Sequence: Synthetic peptide
  Seed: RGLTHMMIW
RILTHMMIY

SEQ ID NO: 10703 - protein, 9 aa, Artificial Sequence
  Description of Artificial Sequence: Synthetic peptide
  Seed: RGLTHMMIW
RILTHMMIV

SEQ ID NO: 10704 - protein, 9 aa, Artificial Sequence
  Description of Artificial Sequence: Synthetic peptide
  Seed: RGLTHMMIW
RLLTHMMII

SEQ ID NO: 10705 - protein, 9 aa, Artificial Sequence
  Description of Artificial Sequence: Synthetic peptide
  Seed: RGLTHMMIW
RLLTHMMIM

SEQ ID NO: 10706 - protein, 9 aa, Artificial Sequence
  Description of Artificial Sequence: Synthetic peptide
  Seed: RGLTHMMIW
RMLTHMMIV

SEQ ID NO: 10707 - protein, 9 aa, Artificial Sequence
  Description of Artificial Sequence: Synthetic peptide
  Seed: RGLTHMMIW
RLLTHMMIF

SEQ ID NO: 10708 - protein, 9 aa, Artificial Sequence
  Description of Artificial Sequence: Synthetic peptide
  Seed: RGLTHMMIW
RLLTHMMIW

SEQ ID NO: 10709 - protein, 9 aa, Artificial Sequence
  Description of Artificial Sequence: Synthetic peptide
  Seed: RGLTHMMIW
RLLTHMMIY

SEQ ID NO: 10710 - protein, 9 aa, Artificial Sequence
  Description of Artificial Sequence: Synthetic peptide
  Seed: RGLTHMMIW
RLLTHMMIV

SEQ ID NO: 10711 - protein, 9 aa, Artificial Sequence
  Description of Artificial Sequence: Synthetic peptide
  Seed: RGLTHMMIW
RMLTHMMII

SEQ ID NO: 10712 - protein, 9 aa, Artificial Sequence
  Description of Artificial Sequence: Synthetic peptide
  Seed: RGLTHMMIW
RMLTHMMIL

SEQ ID NO: 10713 - protein, 9 aa, Artificial Sequence
  Description of Artificial Sequence: Synthetic peptide
  Seed: RGLTHMMIW
RMLTHMMIM

SEQ ID NO: 10714 - protein, 9 aa, Artificial Sequence
  Description of Artificial Sequence: Synthetic peptide
  Seed: RGLTHMMIW
RMLTHMMIF

SEQ ID NO: 10715 - protein, 9 aa, Artificial Sequence
  Description of Artificial Sequence: Synthetic peptide
  Seed: RGLTHMMIW
RMLTHMMIW

SEQ ID NO: 10716 - protein, 9 aa, Artificial Sequence
  Description of Artificial Sequence: Synthetic peptide
  Seed: RGLTHMMIW
RGLTHMMIF

SEQ ID NO: 10717 - protein, 9 aa, Artificial Sequence
  Description of Artificial Sequence: Synthetic peptide
  Seed: RGLTHMMIW
RGLTHMMIM

SEQ ID NO: 10718 - protein, 9 aa, Artificial Sequence
  Description of Artificial Sequence: Synthetic peptide
  Seed: RGLTHMMIW
RGLTHMMIL

SEQ ID NO: 10719 - protein, 9 aa, Artificial Sequence
  Description of Artificial Sequence: Synthetic peptide
  Seed: RGLTHMMIW
RQLTHMMIV

SEQ ID NO: 10720 - protein, 9 aa, Artificial Sequence
  Description of Artificial Sequence: Synthetic peptide
  Seed: RGLTHMMIW
RALTHMMIL

SEQ ID NO: 10721 - protein, 9 aa, Artificial Sequence
  Description of Artificial Sequence: Synthetic peptide
  Seed: RGLTHMMIW
RALTHMMIM

SEQ ID NO: 10722 - protein, 9 aa, Artificial Sequence
  Description of Artificial Sequence: Synthetic peptide
  Seed: RGLTHMMIW
RALTHMMIF

SEQ ID NO: 10723 - protein, 9 aa, Artificial Sequence
  Description of Artificial Sequence: Synthetic peptide
  Seed: RGLTHMMIW
RALTHMMIW

SEQ ID NO: 10724 - protein, 9 aa, Artificial Sequence
  Description of Artificial Sequence: Synthetic peptide
  Seed: RGLTHMMIW
RALTHMMIY

SEQ ID NO: 10725 - protein, 9 aa, Artificial Sequence
  Description of Artificial Sequence: Synthetic peptide
  Seed: RGLTHMMIW
RALTHMMIV

SEQ ID NO: 10726 - protein, 9 aa, Artificial Sequence
  Description of Artificial Sequence: Synthetic peptide
  Seed: RGLTHMMIW
RNLTHMMIM

SEQ ID NO: 10727 - protein, 9 aa, Artificial Sequence
  Description of Artificial Sequence: Synthetic peptide
  Seed: RGLTHMMIW
RNLTHMMIF

SEQ ID NO: 10728 - protein, 9 aa, Artificial Sequence
  Description of Artificial Sequence: Synthetic peptide
  Seed: RGLTHMMIW
RNLTHMMIW

SEQ ID NO: 10729 - protein, 9 aa, Artificial Sequence
  Description of Artificial Sequence: Synthetic peptide
  Seed: RGLTHMMIW
RNLTHMMIY

SEQ ID NO: 10730 - protein, 9 aa, Artificial Sequence
  Description of Artificial Sequence: Synthetic peptide
  Seed: RGLTHMMIW
RCLTHMMIF

SEQ ID NO: 10731 - protein, 9 aa, Artificial Sequence
  Description of Artificial Sequence: Synthetic peptide
  Seed: RGLTHMMIW
RCLTHMMIW

SEQ ID NO: 10732 - protein, 9 aa, Artificial Sequence
  Description of Artificial Sequence: Synthetic peptide
  Seed: RGLTHMMIW
RCLTHMMIY

SEQ ID NO: 10733 - protein, 9 aa, Artificial Sequence
  Description of Artificial Sequence: Synthetic peptide
  Seed: RGLTHMMIW
RQLTHMMII

SEQ ID NO: 10734 - protein, 9 aa, Artificial Sequence
  Description of Artificial Sequence: Synthetic peptide
  Seed: RGLTHMMIW
RQLTHMMIL

SEQ ID NO: 10735 - protein, 9 aa, Artificial Sequence
  Description of Artificial Sequence: Synthetic peptide
  Seed: RGLTHMMIW
RQLTHMMIM

SEQ ID NO: 10736 - protein, 9 aa, Artificial Sequence
  Description of Artificial Sequence: Synthetic peptide
  Seed: RGLTHMMIW
RQLTHMMIF

SEQ ID NO: 10737 - protein, 9 aa, Artificial Sequence
  Description of Artificial Sequence: Synthetic peptide
  Seed: RGLTHMMIW
RQLTHMMIW

SEQ ID NO: 10738 - protein, 9 aa, Artificial Sequence
  Description of Artificial Sequence: Synthetic peptide
  Seed: RGLTHMMIW
RQLTHMMIY

SEQ ID NO: 10739 - protein, 9 aa, Artificial Sequence
  Description of Artificial Sequence: Synthetic peptide
  Seed: RGLTHMMIW
RMLTHMMIY

SEQ ID NO: 10740 - protein, 9 aa, Artificial Sequence
  Description of Artificial Sequence: Synthetic peptide
  Seed: RGLTHMMIW
RFLTHMMIW

SEQ ID NO: 10741 - protein, 9 aa, Artificial Sequence
  Description of Artificial Sequence: Synthetic peptide
  Seed: RGKLSTRGV
RFKLSTRGV

SEQ ID NO: 10742 - protein, 9 aa, Artificial Sequence
  Description of Artificial Sequence: Synthetic peptide
  Seed: RGQLSTRGV
RRQLSTRGM

SEQ ID NO: 10743 - protein, 9 aa, Artificial Sequence
  Description of Artificial Sequence: Synthetic peptide
  Seed: RGLTHMMIW
RVLTHMMIL

SEQ ID NO: 10744 - protein, 9 aa, Artificial Sequence
  Description of Artificial Sequence: Synthetic peptide
  Seed: RGLTHMMIW
RVLTHMMIM

SEQ ID NO: 10745 - protein, 9 aa, Artificial Sequence
  Description of Artificial Sequence: Synthetic peptide
  Seed: RGLTHMMIW
RVLTHMMIF

SEQ ID NO: 10746 - protein, 9 aa, Artificial Sequence
  Description of Artificial Sequence: Synthetic peptide
  Seed: RGLTHMMIW
RVLTHMMIW

SEQ ID NO: 10747 - protein, 9 aa, Artificial Sequence
  Description of Artificial Sequence: Synthetic peptide
  Seed: RGLTHMMIW
RVLTHMMIY

SEQ ID NO: 10748 - protein, 9 aa, Artificial Sequence
  Description of Artificial Sequence: Synthetic peptide
  Seed: RGLTHMMIW
RVLTHMMIV

SEQ ID NO: 10749 - protein, 9 aa, Artificial Sequence
  Description of Artificial Sequence: Synthetic peptide
  Seed: RGQLSTRGV
RAQLSTRGM

SEQ ID NO: 10750 - protein, 9 aa, Artificial Sequence
  Description of Artificial Sequence: Synthetic peptide
  Seed: RGQLSTRGV
RAQLSTRGF

SEQ ID NO: 10751 - protein, 9 aa, Artificial Sequence
  Description of Artificial Sequence: Synthetic peptide
  Seed: RGQLSTRGV
RAQLSTRGY

SEQ ID NO: 10752 - protein, 9 aa, Artificial Sequence
  Description of Artificial Sequence: Synthetic peptide
  Seed: RGQLSTRGV
RRQLSTRGF

SEQ ID NO: 10753 - protein, 9 aa, Artificial Sequence
  Description of Artificial Sequence: Synthetic peptide
  Seed: RGLTHMMIW
RPLTHMMIW

SEQ ID NO: 10754 - protein, 9 aa, Artificial Sequence
  Description of Artificial Sequence: Synthetic peptide
  Seed: RGQLSTRGV
RRQLSTRGY

SEQ ID NO: 10755 - protein, 9 aa, Artificial Sequence
  Description of Artificial Sequence: Synthetic peptide
  Seed: RGQLSTRGV
RNQLSTRGF

SEQ ID NO: 10756 - protein, 9 aa, Artificial Sequence
  Description of Artificial Sequence: Synthetic peptide
  Seed: RGQLSTRGV
RNQLSTRGY

SEQ ID NO: 10757 - protein, 9 aa, Artificial Sequence
  Description of Artificial Sequence: Synthetic peptide
  Seed: RGQLSTRGV
RQQLSTRGA

SEQ ID NO: 10758 - protein, 9 aa, Artificial Sequence
  Description of Artificial Sequence: Synthetic peptide
  Seed: RGQLSTRGV
RQQLSTRGH

SEQ ID NO: 10759 - protein, 9 aa, Artificial Sequence
  Description of Artificial Sequence: Synthetic peptide
  Seed: RGQLSTRGV
RQQLSTRGI

SEQ ID NO: 10760 - protein, 9 aa, Artificial Sequence
  Description of Artificial Sequence: Synthetic peptide
  Seed: RGQLSTRGV
RQQLSTRGL

SEQ ID NO: 10761 - protein, 9 aa, Artificial Sequence
  Description of Artificial Sequence: Synthetic peptide
  Seed: RGQLSTRGV
RQQLSTRGM

SEQ ID NO: 10762 - protein, 9 aa, Artificial Sequence
  Description of Artificial Sequence: Synthetic peptide
  Seed: RGQLSTRGV
RQQLSTRGF

SEQ ID NO: 10763 - protein, 9 aa, Artificial Sequence
  Description of Artificial Sequence: Synthetic peptide
  Seed: RGLTHMMIW
RVLTHMMII

SEQ ID NO: 10764 - protein, 9 aa, Artificial Sequence
  Description of Artificial Sequence: Synthetic peptide
  Seed: RGLTHMMIW
RYLTHMMIW

SEQ ID NO: 10765 - protein, 9 aa, Artificial Sequence
  Description of Artificial Sequence: Synthetic peptide
  Seed: RGLTHMMIW
RYLTHMMIF

SEQ ID NO: 10766 - protein, 9 aa, Artificial Sequence
  Description of Artificial Sequence: Synthetic peptide
  Seed: RGLTHMMIW
RTLTHMMIV

SEQ ID NO: 10767 - protein, 9 aa, Artificial Sequence
  Description of Artificial Sequence: Synthetic peptide
  Seed: RGLTHMMIW
RSLTHMMIA

SEQ ID NO: 10768 - protein, 9 aa, Artificial Sequence
  Description of Artificial Sequence: Synthetic peptide
  Seed: RGLTHMMIW
RSLTHMMIG

SEQ ID NO: 10769 - protein, 9 aa, Artificial Sequence
  Description of Artificial Sequence: Synthetic peptide
  Seed: RGLTHMMIW
RSLTHMMIH

SEQ ID NO: 10770 - protein, 9 aa, Artificial Sequence
  Description of Artificial Sequence: Synthetic peptide
  Seed: RGLTHMMIW
RSLTHMMII

SEQ ID NO: 10771 - protein, 9 aa, Artificial Sequence
  Description of Artificial Sequence: Synthetic peptide
  Seed: RGLTHMMIW
RSLTHMMIL

SEQ ID NO: 10772 - protein, 9 aa, Artificial Sequence
  Description of Artificial Sequence: Synthetic peptide
  Seed: RGLTHMMIW
RSLTHMMIM

SEQ ID NO: 10773 - protein, 9 aa, Artificial Sequence
  Description of Artificial Sequence: Synthetic peptide
  Seed: RGLTHMMIW
RSLTHMMIF

SEQ ID NO: 10774 - protein, 9 aa, Artificial Sequence
  Description of Artificial Sequence: Synthetic peptide
  Seed: RGLTHMMIW
RSLTHMMIW

SEQ ID NO: 10775 - protein, 9 aa, Artificial Sequence
  Description of Artificial Sequence: Synthetic peptide
  Seed: RGLTHMMIW
RSLTHMMIY

SEQ ID NO: 10776 - protein, 9 aa, Artificial Sequence
  Description of Artificial Sequence: Synthetic peptide
  Seed: RGLTHMMIW
RSLTHMMIV

SEQ ID NO: 10777 - protein, 9 aa, Artificial Sequence
  Description of Artificial Sequence: Synthetic peptide
  Seed: RGLTHMMIW
RTLTHMMIA

SEQ ID NO: 10778 - protein, 9 aa, Artificial Sequence
  Description of Artificial Sequence: Synthetic peptide
  Seed: RGLTHMMIW
RTLTHMMIG

SEQ ID NO: 10779 - protein, 9 aa, Artificial Sequence
  Description of Artificial Sequence: Synthetic peptide
  Seed: RGLTHMMIW
RTLTHMMIH

SEQ ID NO: 10780 - protein, 9 aa, Artificial Sequence
  Description of Artificial Sequence: Synthetic peptide
  Seed: RGLTHMMIW
RTLTHMMII

SEQ ID NO: 10781 - protein, 9 aa, Artificial Sequence
  Description of Artificial Sequence: Synthetic peptide
  Seed: RGLTHMMIW
RTLTHMMIL

SEQ ID NO: 10782 - protein, 9 aa, Artificial Sequence
  Description of Artificial Sequence: Synthetic peptide
  Seed: RGLTHMMIW
RTLTHMMIM

SEQ ID NO: 10783 - protein, 9 aa, Artificial Sequence
  Description of Artificial Sequence: Synthetic peptide
  Seed: RGLTHMMIW
RTLTHMMIF

SEQ ID NO: 10784 - protein, 9 aa, Artificial Sequence
  Description of Artificial Sequence: Synthetic peptide
  Seed: RGLTHMMIW
RTLTHMMIW

SEQ ID NO: 10785 - protein, 9 aa, Artificial Sequence
  Description of Artificial Sequence: Synthetic peptide
  Seed: RGLTHMMIW
RTLTHMMIY

SEQ ID NO: 10786 - protein, 9 aa, Artificial Sequence
  Description of Artificial Sequence: Synthetic peptide
  Seed: RGLTHMMIW
RALTHMMII

SEQ ID NO: 10787 - protein, 9 aa, Artificial Sequence
  Description of Artificial Sequence: Synthetic peptide
  Seed: RGKLSTRGV
RVKLSTRGV

SEQ ID NO: 10788 - protein, 9 aa, Artificial Sequence
  Description of Artificial Sequence: Synthetic peptide
  Seed: RGKLSTRGV
RVKLSTRGY

SEQ ID NO: 10789 - protein, 9 aa, Artificial Sequence
  Description of Artificial Sequence: Synthetic peptide
  Seed: RGKLSTRGV
RTKLSTRGM

SEQ ID NO: 10790 - protein, 9 aa, Artificial Sequence
  Description of Artificial Sequence: Synthetic peptide
  Seed: RGKLSTRGV
RTKLSTRGD

SEQ ID NO: 10791 - protein, 9 aa, Artificial Sequence
  Description of Artificial Sequence: Synthetic peptide
  Seed: RGKLSTRGV
RTKLSTRGC

SEQ ID NO: 10792 - protein, 9 aa, Artificial Sequence
  Description of Artificial Sequence: Synthetic peptide
  Seed: RGKLSTRGV
RTKLSTRGQ

SEQ ID NO: 10793 - protein, 9 aa, Artificial Sequence
  Description of Artificial Sequence: Synthetic peptide
  Seed: RGKLSTRGV
RTKLSTRGE

SEQ ID NO: 10794 - protein, 9 aa, Artificial Sequence
  Description of Artificial Sequence: Synthetic peptide
  Seed: RGKLSTRGV
RTKLSTRGG

SEQ ID NO: 10795 - protein, 9 aa, Artificial Sequence
  Description of Artificial Sequence: Synthetic peptide
  Seed: RGKLSTRGV
RTKLSTRGH

SEQ ID NO: 10796 - protein, 9 aa, Artificial Sequence
  Description of Artificial Sequence: Synthetic peptide
  Seed: RGKLSTRGV
RTKLSTRGI

SEQ ID NO: 10797 - protein, 9 aa, Artificial Sequence
  Description of Artificial Sequence: Synthetic peptide
  Seed: RGKLSTRGV
RTKLSTRGL

SEQ ID NO: 10798 - protein, 9 aa, Artificial Sequence
  Description of Artificial Sequence: Synthetic peptide
  Seed: RGKLSTRGV
RTKLSTRGK

SEQ ID NO: 10799 - protein, 9 aa, Artificial Sequence
  Description of Artificial Sequence: Synthetic peptide
  Seed: RGKLSTRGV
RTKLSTRGF

SEQ ID NO: 10800 - protein, 9 aa, Artificial Sequence
  Description of Artificial Sequence: Synthetic peptide
  Seed: RGKLSTRGV
RVKLSTRGW

SEQ ID NO: 10801 - protein, 9 aa, Artificial Sequence
  Description of Artificial Sequence: Synthetic peptide
  Seed: RGKLSTRGV
RTKLSTRGP

SEQ ID NO: 10802 - protein, 9 aa, Artificial Sequence
  Description of Artificial Sequence: Synthetic peptide
  Seed: RGKLSTRGV
RTKLSTRGS

SEQ ID NO: 10803 - protein, 9 aa, Artificial Sequence
  Description of Artificial Sequence: Synthetic peptide
  Seed: RGKLSTRGV
RTKLSTRGT

SEQ ID NO: 10804 - protein, 9 aa, Artificial Sequence
  Description of Artificial Sequence: Synthetic peptide
  Seed: RGKLSTRGV
RTKLSTRGW

SEQ ID NO: 10805 - protein, 9 aa, Artificial Sequence
  Description of Artificial Sequence: Synthetic peptide
  Seed: RGKLSTRGV
RTKLSTRGY

SEQ ID NO: 10806 - protein, 9 aa, Artificial Sequence
  Description of Artificial Sequence: Synthetic peptide
  Seed: RGKLSTRGV
RTKLSTRGV

SEQ ID NO: 10807 - protein, 9 aa, Artificial Sequence
  Description of Artificial Sequence: Synthetic peptide
  Seed: RGKLSTRGV
RWKLSTRGA

SEQ ID NO: 10808 - protein, 9 aa, Artificial Sequence
  Description of Artificial Sequence: Synthetic peptide
  Seed: RGKLSTRGV
RWKLSTRGR

SEQ ID NO: 10809 - protein, 9 aa, Artificial Sequence
  Description of Artificial Sequence: Synthetic peptide
  Seed: RGKLSTRGV
RWKLSTRGC

SEQ ID NO: 10810 - protein, 9 aa, Artificial Sequence
  Description of Artificial Sequence: Synthetic peptide
  Seed: RGKLSTRGV
RTKLSTRGN

SEQ ID NO: 10811 - protein, 9 aa, Artificial Sequence
  Description of Artificial Sequence: Synthetic peptide
  Seed: RGKLSTRGV
RTKLSTRGR

SEQ ID NO: 10812 - protein, 9 aa, Artificial Sequence
  Description of Artificial Sequence: Synthetic peptide
  Seed: RGKLSTRGV
RTKLSTRGA

SEQ ID NO: 10813 - protein, 9 aa, Artificial Sequence
  Description of Artificial Sequence: Synthetic peptide
  Seed: RGKLSTRGV
RSKLSTRGV

SEQ ID NO: 10814 - protein, 9 aa, Artificial Sequence
  Description of Artificial Sequence: Synthetic peptide
  Seed: RGKLSTRGV
RPKLSTRGK

SEQ ID NO: 10815 - protein, 9 aa, Artificial Sequence
  Description of Artificial Sequence: Synthetic peptide
  Seed: RGKLSTRGV
RSKLSTRGA

SEQ ID NO: 10816 - protein, 9 aa, Artificial Sequence
  Description of Artificial Sequence: Synthetic peptide
  Seed: RGKLSTRGV
RSKLSTRGR

SEQ ID NO: 10817 - protein, 9 aa, Artificial Sequence
  Description of Artificial Sequence: Synthetic peptide
  Seed: RGKLSTRGV
RSKLSTRGN

SEQ ID NO: 10818 - protein, 9 aa, Artificial Sequence
  Description of Artificial Sequence: Synthetic peptide
  Seed: RGKLSTRGV
RSKLSTRGD

SEQ ID NO: 10819 - protein, 9 aa, Artificial Sequence
  Description of Artificial Sequence: Synthetic peptide
  Seed: RGKLSTRGV
RSKLSTRGC

SEQ ID NO: 10820 - protein, 9 aa, Artificial Sequence
  Description of Artificial Sequence: Synthetic peptide
  Seed: RGKLSTRGV
RSKLSTRGQ

SEQ ID NO: 10821 - protein, 9 aa, Artificial Sequence
  Description of Artificial Sequence: Synthetic peptide
  Seed: RGKLSTRGV
RSKLSTRGE

SEQ ID NO: 10822 - protein, 9 aa, Artificial Sequence
  Description of Artificial Sequence: Synthetic peptide
  Seed: RGKLSTRGV
RSKLSTRGG

SEQ ID NO: 10823 - protein, 9 aa, Artificial Sequence
  Description of Artificial Sequence: Synthetic peptide
  Seed: RGKLSTRGV
RSKLSTRGH

SEQ ID NO: 10824 - protein, 9 aa, Artificial Sequence
  Description of Artificial Sequence: Synthetic peptide
  Seed: RGKLSTRGV
RSKLSTRGI

SEQ ID NO: 10825 - protein, 9 aa, Artificial Sequence
  Description of Artificial Sequence: Synthetic peptide
  Seed: RGKLSTRGV
RSKLSTRGL

SEQ ID NO: 10826 - protein, 9 aa, Artificial Sequence
  Description of Artificial Sequence: Synthetic peptide
  Seed: RGKLSTRGV
RSKLSTRGK

SEQ ID NO: 10827 - protein, 9 aa, Artificial Sequence
  Description of Artificial Sequence: Synthetic peptide
  Seed: RGKLSTRGV
RSKLSTRGM

SEQ ID NO: 10828 - protein, 9 aa, Artificial Sequence
  Description of Artificial Sequence: Synthetic peptide
  Seed: RGKLSTRGV
RSKLSTRGF

SEQ ID NO: 10829 - protein, 9 aa, Artificial Sequence
  Description of Artificial Sequence: Synthetic peptide
  Seed: RGKLSTRGV
RSKLSTRGP

SEQ ID NO: 10830 - protein, 9 aa, Artificial Sequence
  Description of Artificial Sequence: Synthetic peptide
  Seed: RGKLSTRGV
RSKLSTRGS

SEQ ID NO: 10831 - protein, 9 aa, Artificial Sequence
  Description of Artificial Sequence: Synthetic peptide
  Seed: RGKLSTRGV
RSKLSTRGT

SEQ ID NO: 10832 - protein, 9 aa, Artificial Sequence
  Description of Artificial Sequence: Synthetic peptide
  Seed: RGKLSTRGV
RSKLSTRGY

SEQ ID NO: 10833 - protein, 9 aa, Artificial Sequence
  Description of Artificial Sequence: Synthetic peptide
  Seed: RGKLSTRGV
RWKLSTRGG

SEQ ID NO: 10834 - protein, 9 aa, Artificial Sequence
  Description of Artificial Sequence: Synthetic peptide
  Seed: RGKLSTRGV
RWKLSTRGI

SEQ ID NO: 10835 - protein, 9 aa, Artificial Sequence
  Description of Artificial Sequence: Synthetic peptide
  Seed: RGKLSTRGV
RWKLSTRGL

SEQ ID NO: 10836 - protein, 9 aa, Artificial Sequence
  Description of Artificial Sequence: Synthetic peptide
  Seed: RGKLSTRGV
RYKLSTRGS

SEQ ID NO: 10837 - protein, 9 aa, Artificial Sequence
  Description of Artificial Sequence: Synthetic peptide
  Seed: RGKLSTRGV
RYKLSTRGY

SEQ ID NO: 10838 - protein, 9 aa, Artificial Sequence
  Description of Artificial Sequence: Synthetic peptide
  Seed: RGKLSTRGV
RYKLSTRGV

SEQ ID NO: 10839 - protein, 9 aa, Artificial Sequence
  Description of Artificial Sequence: Synthetic peptide
  Seed: RGKLSTRGV
RVKLSTRGA

SEQ ID NO: 10840 - protein, 9 aa, Artificial Sequence
  Description of Artificial Sequence: Synthetic peptide
  Seed: RGKLSTRGV
RVKLSTRGR

SEQ ID NO: 10841 - protein, 9 aa, Artificial Sequence
  Description of Artificial Sequence: Synthetic peptide
  Seed: RGKLSTRGV
RVKLSTRGN

SEQ ID NO: 10842 - protein, 9 aa, Artificial Sequence
  Description of Artificial Sequence: Synthetic peptide
  Seed: RGKLSTRGV
RVKLSTRGD

SEQ ID NO: 10843 - protein, 9 aa, Artificial Sequence
  Description of Artificial Sequence: Synthetic peptide
  Seed: RGKLSTRGV
RVKLSTRGC

SEQ ID NO: 10844 - protein, 9 aa, Artificial Sequence
  Description of Artificial Sequence: Synthetic peptide
  Seed: RGKLSTRGV
RVKLSTRGQ

SEQ ID NO: 10845 - protein, 9 aa, Artificial Sequence
  Description of Artificial Sequence: Synthetic peptide
  Seed: RGKLSTRGV
RVKLSTRGE

SEQ ID NO: 10846 - protein, 9 aa, Artificial Sequence
  Description of Artificial Sequence: Synthetic peptide
  Seed: RGKLSTRGV
RVKLSTRGG

SEQ ID NO: 10847 - protein, 9 aa, Artificial Sequence
  Description of Artificial Sequence: Synthetic peptide
  Seed: RGKLSTRGV
RVKLSTRGH

SEQ ID NO: 10848 - protein, 9 aa, Artificial Sequence
  Description of Artificial Sequence: Synthetic peptide
  Seed: RGKLSTRGV
RVKLSTRGI

SEQ ID NO: 10849 - protein, 9 aa, Artificial Sequence
  Description of Artificial Sequence: Synthetic peptide
  Seed: RGKLSTRGV
RVKLSTRGL

SEQ ID NO: 10850 - protein, 9 aa, Artificial Sequence
  Description of Artificial Sequence: Synthetic peptide
  Seed: RGKLSTRGV
RVKLSTRGK

SEQ ID NO: 10851 - protein, 9 aa, Artificial Sequence
  Description of Artificial Sequence: Synthetic peptide
  Seed: RGKLSTRGV
RVKLSTRGM

SEQ ID NO: 10852 - protein, 9 aa, Artificial Sequence
  Description of Artificial Sequence: Synthetic peptide
  Seed: RGKLSTRGV
RVKLSTRGF

SEQ ID NO: 10853 - protein, 9 aa, Artificial Sequence
  Description of Artificial Sequence: Synthetic peptide
  Seed: RGKLSTRGV
RVKLSTRGP

SEQ ID NO: 10854 - protein, 9 aa, Artificial Sequence
  Description of Artificial Sequence: Synthetic peptide
  Seed: RGKLSTRGV
RVKLSTRGS

SEQ ID NO: 10855 - protein, 9 aa, Artificial Sequence
  Description of Artificial Sequence: Synthetic peptide
  Seed: RGKLSTRGV
RVKLSTRGT

SEQ ID NO: 10856 - protein, 9 aa, Artificial Sequence
  Description of Artificial Sequence: Synthetic peptide
  Seed: RGKLSTRGV
RYKLSTRGT

SEQ ID NO: 10857 - protein, 9 aa, Artificial Sequence
  Description of Artificial Sequence: Synthetic peptide
  Seed: RGKLSTRGV
RYKLSTRGP

SEQ ID NO: 10858 - protein, 9 aa, Artificial Sequence
  Description of Artificial Sequence: Synthetic peptide
  Seed: RGKLSTRGV
RWKLSTRGK

SEQ ID NO: 10859 - protein, 9 aa, Artificial Sequence
  Description of Artificial Sequence: Synthetic peptide
  Seed: RGKLSTRGV
RYKLSTRGF

SEQ ID NO: 10860 - protein, 9 aa, Artificial Sequence
  Description of Artificial Sequence: Synthetic peptide
  Seed: RGKLSTRGV
RWKLSTRGM

SEQ ID NO: 10861 - protein, 9 aa, Artificial Sequence
  Description of Artificial Sequence: Synthetic peptide
  Seed: RGKLSTRGV
RWKLSTRGF

SEQ ID NO: 10862 - protein, 9 aa, Artificial Sequence
  Description of Artificial Sequence: Synthetic peptide
  Seed: RGKLSTRGV
RWKLSTRGP

SEQ ID NO: 10863 - protein, 9 aa, Artificial Sequence
  Description of Artificial Sequence: Synthetic peptide
  Seed: RGKLSTRGV
RWKLSTRGS

SEQ ID NO: 10864 - protein, 9 aa, Artificial Sequence
  Description of Artificial Sequence: Synthetic peptide
  Seed: RGKLSTRGV
RWKLSTRGT

SEQ ID NO: 10865 - protein, 9 aa, Artificial Sequence
  Description of Artificial Sequence: Synthetic peptide
  Seed: RGKLSTRGV
RWKLSTRGY

SEQ ID NO: 10866 - protein, 9 aa, Artificial Sequence
  Description of Artificial Sequence: Synthetic peptide
  Seed: RGKLSTRGV
RWKLSTRGV

SEQ ID NO: 10867 - protein, 9 aa, Artificial Sequence
  Description of Artificial Sequence: Synthetic peptide
  Seed: RGKLSTRGV
RYKLSTRGA

SEQ ID NO: 10868 - protein, 9 aa, Artificial Sequence
  Description of Artificial Sequence: Synthetic peptide
  Seed: RGKLSTRGV
RYKLSTRGR

SEQ ID NO: 10869 - protein, 9 aa, Artificial Sequence
  Description of Artificial Sequence: Synthetic peptide
  Seed: RGKLSTRGV
RYKLSTRGN

SEQ ID NO: 10870 - protein, 9 aa, Artificial Sequence
  Description of Artificial Sequence: Synthetic peptide
  Seed: RGKLSTRGV
RYKLSTRGC

SEQ ID NO: 10871 - protein, 9 aa, Artificial Sequence
  Description of Artificial Sequence: Synthetic peptide
  Seed: RGKLSTRGV
RYKLSTRGQ

SEQ ID NO: 10872 - protein, 9 aa, Artificial Sequence
  Description of Artificial Sequence: Synthetic peptide
  Seed: RGKLSTRGV
RYKLSTRGE

SEQ ID NO: 10873 - protein, 9 aa, Artificial Sequence
  Description of Artificial Sequence: Synthetic peptide
  Seed: RGKLSTRGV
RYKLSTRGG

SEQ ID NO: 10874 - protein, 9 aa, Artificial Sequence
  Description of Artificial Sequence: Synthetic peptide
  Seed: RGKLSTRGV
RYKLSTRGH

SEQ ID NO: 10875 - protein, 9 aa, Artificial Sequence
  Description of Artificial Sequence: Synthetic peptide
  Seed: RGKLSTRGV
RYKLSTRGI

SEQ ID NO: 10876 - protein, 9 aa, Artificial Sequence
  Description of Artificial Sequence: Synthetic peptide
  Seed: RGKLSTRGV
RYKLSTRGL

SEQ ID NO: 10877 - protein, 9 aa, Artificial Sequence
  Description of Artificial Sequence: Synthetic peptide
  Seed: RGKLSTRGV
RYKLSTRGK

SEQ ID NO: 10878 - protein, 9 aa, Artificial Sequence
  Description of Artificial Sequence: Synthetic peptide
  Seed: RGKLSTRGV
RYKLSTRGM

SEQ ID NO: 10879 - protein, 10 aa, Artificial Sequence
  Description of Artificial Sequence: Synthetic peptide
  Seed: RESRNPGNAE
RFSRNPGNAL

SEQ ID NO: 10880 - protein, 10 aa, Artificial Sequence
  Description of Artificial Sequence: Synthetic peptide
  Seed: RESRNPGNAE
RFSRNPGNAH

SEQ ID NO: 10881 - protein, 10 aa, Artificial Sequence
  Description of Artificial Sequence: Synthetic peptide
  Seed: RGTKVSPRGK
RETKVSPRGI

SEQ ID NO: 10882 - protein, 9 aa, Artificial Sequence
  Description of Artificial Sequence: Synthetic peptide
  Seed: QVRESRNPG
QTRESRNPG

SEQ ID NO: 10883 - protein, 9 aa, Artificial Sequence
  Description of Artificial Sequence: Synthetic peptide
  Seed: QVRESRNPG
QSRESRNPT

SEQ ID NO: 10884 - protein, 9 aa, Artificial Sequence
  Description of Artificial Sequence: Synthetic peptide
  Seed: QVRESRNPG
QSRESRNPY

SEQ ID NO: 10885 - protein, 9 aa, Artificial Sequence
  Description of Artificial Sequence: Synthetic peptide
  Seed: QVRESRNPG
QSRESRNPV

SEQ ID NO: 10886 - protein, 9 aa, Artificial Sequence
  Description of Artificial Sequence: Synthetic peptide
  Seed: QVRESRNPG
QTRESRNPA

SEQ ID NO: 10887 - protein, 9 aa, Artificial Sequence
  Description of Artificial Sequence: Synthetic peptide
  Seed: QVRESRNPG
QTRESRNPR

SEQ ID NO: 10888 - protein, 9 aa, Artificial Sequence
  Description of Artificial Sequence: Synthetic peptide
  Seed: QVRESRNPG
QTRESRNPN

SEQ ID NO: 10889 - protein, 9 aa, Artificial Sequence
  Description of Artificial Sequence: Synthetic peptide
  Seed: QVRESRNPG
QTRESRNPC

SEQ ID NO: 10890 - protein, 9 aa, Artificial Sequence
  Description of Artificial Sequence: Synthetic peptide
  Seed: QVRESRNPG
QTRESRNPQ

SEQ ID NO: 10891 - protein, 9 aa, Artificial Sequence
  Description of Artificial Sequence: Synthetic peptide
  Seed: QVRESRNPG
QTRESRNPE

SEQ ID NO: 10892 - protein, 9 aa, Artificial Sequence
  Description of Artificial Sequence: Synthetic peptide
  Seed: QVRESRNPG
QTRESRNPH

SEQ ID NO: 10893 - protein, 9 aa, Artificial Sequence
  Description of Artificial Sequence: Synthetic peptide
  Seed: QVRESRNPG
QWRESRNPA

SEQ ID NO: 10894 - protein, 9 aa, Artificial Sequence
  Description of Artificial Sequence: Synthetic peptide
  Seed: QVRESRNPG
QTRESRNPI

SEQ ID NO: 10895 - protein, 9 aa, Artificial Sequence
  Description of Artificial Sequence: Synthetic peptide
  Seed: QVRESRNPG
QTRESRNPL

SEQ ID NO: 10896 - protein, 9 aa, Artificial Sequence
  Description of Artificial Sequence: Synthetic peptide
  Seed: QVRESRNPG
QTRESRNPK

SEQ ID NO: 10897 - protein, 9 aa, Artificial Sequence
  Description of Artificial Sequence: Synthetic peptide
  Seed: QVRESRNPG
QTRESRNPM

SEQ ID NO: 10898 - protein, 9 aa, Artificial Sequence
  Description of Artificial Sequence: Synthetic peptide
  Seed: QVRESRNPG
QTRESRNPF

SEQ ID NO: 10899 - protein, 9 aa, Artificial Sequence
  Description of Artificial Sequence: Synthetic peptide
  Seed: QVRESRNPG
QTRESRNPP

SEQ ID NO: 10900 - protein, 9 aa, Artificial Sequence
  Description of Artificial Sequence: Synthetic peptide
  Seed: QVRESRNPG
QTRESRNPS

SEQ ID NO: 10901 - protein, 9 aa, Artificial Sequence
  Description of Artificial Sequence: Synthetic peptide
  Seed: QVRESRNPG
QTRESRNPT

SEQ ID NO: 10902 - protein, 9 aa, Artificial Sequence
  Description of Artificial Sequence: Synthetic peptide
  Seed: QVRESRNPG
QTRESRNPY

SEQ ID NO: 10903 - protein, 9 aa, Artificial Sequence
  Description of Artificial Sequence: Synthetic peptide
  Seed: QVRESRNPG
QSRESRNPS

SEQ ID NO: 10904 - protein, 9 aa, Artificial Sequence
  Description of Artificial Sequence: Synthetic peptide
  Seed: QVRESRNPG
QSRESRNPP

SEQ ID NO: 10905 - protein, 9 aa, Artificial Sequence
  Description of Artificial Sequence: Synthetic peptide
  Seed: QVRESRNPG
QSRESRNPF

SEQ ID NO: 10906 - protein, 9 aa, Artificial Sequence
  Description of Artificial Sequence: Synthetic peptide
  Seed: QVRESRNPG
QSRESRNPM

SEQ ID NO: 10907 - protein, 9 aa, Artificial Sequence
  Description of Artificial Sequence: Synthetic peptide
  Seed: QVRESRNPG
QFRESRNPA

SEQ ID NO: 10908 - protein, 9 aa, Artificial Sequence
  Description of Artificial Sequence: Synthetic peptide
  Seed: QVRESRNPG
QFRESRNPR

SEQ ID NO: 10909 - protein, 9 aa, Artificial Sequence
  Description of Artificial Sequence: Synthetic peptide
  Seed: QVRESRNPG
QFRESRNPG

SEQ ID NO: 10910 - protein, 9 aa, Artificial Sequence
  Description of Artificial Sequence: Synthetic peptide
  Seed: QVRESRNPG
QFRESRNPI

SEQ ID NO: 10911 - protein, 9 aa, Artificial Sequence
  Description of Artificial Sequence: Synthetic peptide
  Seed: QVRESRNPG
QFRESRNPL

SEQ ID NO: 10912 - protein, 9 aa, Artificial Sequence
  Description of Artificial Sequence: Synthetic peptide
  Seed: QVRESRNPG
QFRESRNPK

SEQ ID NO: 10913 - protein, 9 aa, Artificial Sequence
  Description of Artificial Sequence: Synthetic peptide
  Seed: QVRESRNPG
QFRESRNPM

SEQ ID NO: 10914 - protein, 9 aa, Artificial Sequence
  Description of Artificial Sequence: Synthetic peptide
  Seed: QVRESRNPG
QFRESRNPS

SEQ ID NO: 10915 - protein, 9 aa, Artificial Sequence
  Description of Artificial Sequence: Synthetic peptide
  Seed: QVRESRNPG
QFRESRNPV

SEQ ID NO: 10916 - protein, 9 aa, Artificial Sequence
  Description of Artificial Sequence: Synthetic peptide
  Seed: QVRESRNPG
QSRESRNPA

SEQ ID NO: 10917 - protein, 9 aa, Artificial Sequence
  Description of Artificial Sequence: Synthetic peptide
  Seed: QVRESRNPG
QSRESRNPR

SEQ ID NO: 10918 - protein, 9 aa, Artificial Sequence
  Description of Artificial Sequence: Synthetic peptide
  Seed: QVRESRNPG
QSRESRNPN

SEQ ID NO: 10919 - protein, 9 aa, Artificial Sequence
  Description of Artificial Sequence: Synthetic peptide
  Seed: QVRESRNPG
QSRESRNPC

SEQ ID NO: 10920 - protein, 9 aa, Artificial Sequence
  Description of Artificial Sequence: Synthetic peptide
  Seed: QVRESRNPG
QSRESRNPQ

SEQ ID NO: 10921 - protein, 9 aa, Artificial Sequence
  Description of Artificial Sequence: Synthetic peptide
  Seed: QVRESRNPG
QSRESRNPG

SEQ ID NO: 10922 - protein, 9 aa, Artificial Sequence
  Description of Artificial Sequence: Synthetic peptide
  Seed: QVRESRNPG
QSRESRNPH

SEQ ID NO: 10923 - protein, 9 aa, Artificial Sequence
  Description of Artificial Sequence: Synthetic peptide
  Seed: QVRESRNPG
QSRESRNPI

SEQ ID NO: 10924 - protein, 9 aa, Artificial Sequence
  Description of Artificial Sequence: Synthetic peptide
  Seed: QVRESRNPG
QSRESRNPL

SEQ ID NO: 10925 - protein, 9 aa, Artificial Sequence
  Description of Artificial Sequence: Synthetic peptide
  Seed: QVRESRNPG
QSRESRNPK

SEQ ID NO: 10926 - protein, 9 aa, Artificial Sequence
  Description of Artificial Sequence: Synthetic peptide
  Seed: QVRESRNPG
QTRESRNPV

SEQ ID NO: 10927 - protein, 9 aa, Artificial Sequence
  Description of Artificial Sequence: Synthetic peptide
  Seed: QVRESRNPG
QWRESRNPI

SEQ ID NO: 10928 - protein, 9 aa, Artificial Sequence
  Description of Artificial Sequence: Synthetic peptide
  Seed: QVRESRNPG
QMRESRNPY

SEQ ID NO: 10929 - protein, 11 aa, Artificial Sequence
  Description of Artificial Sequence: Synthetic peptide
  Seed: RALVRTGMDPR
RILVRTGMDPR

SEQ ID NO: 10930 - protein, 11 aa, Artificial Sequence
  Description of Artificial Sequence: Synthetic peptide
  Seed: RALVRTGMDPR
RRLVRTGMDPR

SEQ ID NO: 10931 - protein, 11 aa, Artificial Sequence
  Description of Artificial Sequence: Synthetic peptide
  Seed: RALVRTGMDPR
RNLVRTGMDPR

SEQ ID NO: 10932 - protein, 11 aa, Artificial Sequence
  Description of Artificial Sequence: Synthetic peptide
  Seed: RALVRTGMDPR
RDLVRTGMDPR

SEQ ID NO: 10933 - protein, 11 aa, Artificial Sequence
  Description of Artificial Sequence: Synthetic peptide
  Seed: RALVRTGMDPR
RCLVRTGMDPR

SEQ ID NO: 10934 - protein, 11 aa, Artificial Sequence
  Description of Artificial Sequence: Synthetic peptide
  Seed: RALVRTGMDPR
RQLVRTGMDPR

SEQ ID NO: 10935 - protein, 11 aa, Artificial Sequence
  Description of Artificial Sequence: Synthetic peptide
  Seed: RALVRTGMDPR
RQLVRTGMDPK

SEQ ID NO: 10936 - protein, 11 aa, Artificial Sequence
  Description of Artificial Sequence: Synthetic peptide
  Seed: RALVRTGMDPR
RELVRTGMDPR

SEQ ID NO: 10937 - protein, 11 aa, Artificial Sequence
  Description of Artificial Sequence: Synthetic peptide
  Seed: RALVRTGMDPR
RGLVRTGMDPR

SEQ ID NO: 10938 - protein, 11 aa, Artificial Sequence
  Description of Artificial Sequence: Synthetic peptide
  Seed: RALVRTGMDPR
RHLVRTGMDPR

SEQ ID NO: 10939 - protein, 11 aa, Artificial Sequence
  Description of Artificial Sequence: Synthetic peptide
  Seed: RALVRTGMDPR
RILVRTGMDPK

SEQ ID NO: 10940 - protein, 9 aa, Artificial Sequence
  Description of Artificial Sequence: Synthetic peptide
  Seed: QVRESRNPG
QWRESRNPK

SEQ ID NO: 10941 - protein, 11 aa, Artificial Sequence
  Description of Artificial Sequence: Synthetic peptide
  Seed: RALVRTGMDPR
RLLVRTGMDPR

SEQ ID NO: 10942 - protein, 11 aa, Artificial Sequence
  Description of Artificial Sequence: Synthetic peptide
  Seed: RALVRTGMDPR
RLLVRTGMDPK

SEQ ID NO: 10943 - protein, 11 aa, Artificial Sequence
  Description of Artificial Sequence: Synthetic peptide
  Seed: RALVRTGMDPR
RKLVRTGMDPR

SEQ ID NO: 10944 - protein, 11 aa, Artificial Sequence
  Description of Artificial Sequence: Synthetic peptide
  Seed: RALVRTGMDPR
RMLVRTGMDPR

SEQ ID NO: 10945 - protein, 11 aa, Artificial Sequence
  Description of Artificial Sequence: Synthetic peptide
  Seed: RALVRTGMDPR
RMLVRTGMDPK

SEQ ID NO: 10946 - protein, 11 aa, Artificial Sequence
  Description of Artificial Sequence: Synthetic peptide
  Seed: RALVRTGMDPR
RFLVRTGMDPR

SEQ ID NO: 10947 - protein, 11 aa, Artificial Sequence
  Description of Artificial Sequence: Synthetic peptide
  Seed: RALVRTGMDPR
RFLVRTGMDPK

SEQ ID NO: 10948 - protein, 11 aa, Artificial Sequence
  Description of Artificial Sequence: Synthetic peptide
  Seed: RALVRTGMDPR
RPLVRTGMDPR

SEQ ID NO: 10949 - protein, 11 aa, Artificial Sequence
  Description of Artificial Sequence: Synthetic peptide
  Seed: RALVRTGMDPR
RSLVRTGMDPR

SEQ ID NO: 10950 - protein, 9 aa, Artificial Sequence
  Description of Artificial Sequence: Synthetic peptide
  Seed: QVRESRNPG
QVRESRNPV

SEQ ID NO: 10951 - protein, 9 aa, Artificial Sequence
  Description of Artificial Sequence: Synthetic peptide
  Seed: QVRESRNPG
QVRESRNPY

SEQ ID NO: 10952 - protein, 9 aa, Artificial Sequence
  Description of Artificial Sequence: Synthetic peptide
  Seed: QVRESRNPG
QVRESRNPT

SEQ ID NO: 10953 - protein, 9 aa, Artificial Sequence
  Description of Artificial Sequence: Synthetic peptide
  Seed: QVRESRNPG
QVRESRNPS

SEQ ID NO: 10954 - protein, 9 aa, Artificial Sequence
  Description of Artificial Sequence: Synthetic peptide
  Seed: QVRESRNPG
QWRESRNPV

SEQ ID NO: 10955 - protein, 9 aa, Artificial Sequence
  Description of Artificial Sequence: Synthetic peptide
  Seed: QVRESRNPG
QYRESRNPA

SEQ ID NO: 10956 - protein, 9 aa, Artificial Sequence
  Description of Artificial Sequence: Synthetic peptide
  Seed: QVRESRNPG
QYRESRNPR

SEQ ID NO: 10957 - protein, 9 aa, Artificial Sequence
  Description of Artificial Sequence: Synthetic peptide
  Seed: QVRESRNPG
QYRESRNPG

SEQ ID NO: 10958 - protein, 9 aa, Artificial Sequence
  Description of Artificial Sequence: Synthetic peptide
  Seed: QVRESRNPG
QYRESRNPI

SEQ ID NO: 10959 - protein, 9 aa, Artificial Sequence
  Description of Artificial Sequence: Synthetic peptide
  Seed: QVRESRNPG
QYRESRNPL

SEQ ID NO: 10960 - protein, 9 aa, Artificial Sequence
  Description of Artificial Sequence: Synthetic peptide
  Seed: QVRESRNPG
QYRESRNPK

SEQ ID NO: 10961 - protein, 9 aa, Artificial Sequence
  Description of Artificial Sequence: Synthetic peptide
  Seed: QVRESRNPG
QYRESRNPM

SEQ ID NO: 10962 - protein, 9 aa, Artificial Sequence
  Description of Artificial Sequence: Synthetic peptide
  Seed: QVRESRNPG
QYRESRNPS

SEQ ID NO: 10963 - protein, 9 aa, Artificial Sequence
  Description of Artificial Sequence: Synthetic peptide
  Seed: QVRESRNPG
QYRESRNPV

SEQ ID NO: 10964 - protein, 9 aa, Artificial Sequence
  Description of Artificial Sequence: Synthetic peptide
  Seed: QVRESRNPG
QVRESRNPA

SEQ ID NO: 10965 - protein, 9 aa, Artificial Sequence
  Description of Artificial Sequence: Synthetic peptide
  Seed: QVRESRNPG
QVRESRNPR

SEQ ID NO: 10966 - protein, 9 aa, Artificial Sequence
  Description of Artificial Sequence: Synthetic peptide
  Seed: QVRESRNPG
QVRESRNPC

SEQ ID NO: 10967 - protein, 9 aa, Artificial Sequence
  Description of Artificial Sequence: Synthetic peptide
  Seed: QVRESRNPG
QVRESRNPI

SEQ ID NO: 10968 - protein, 9 aa, Artificial Sequence
  Description of Artificial Sequence: Synthetic peptide
  Seed: QVRESRNPG
QVRESRNPL

SEQ ID NO: 10969 - protein, 9 aa, Artificial Sequence
  Description of Artificial Sequence: Synthetic peptide
  Seed: QVRESRNPG
QVRESRNPK

SEQ ID NO: 10970 - protein, 9 aa, Artificial Sequence
  Description of Artificial Sequence: Synthetic peptide
  Seed: QVRESRNPG
QVRESRNPM

SEQ ID NO: 10971 - protein, 9 aa, Artificial Sequence
  Description of Artificial Sequence: Synthetic peptide
  Seed: QVRESRNPG
QVRESRNPF

SEQ ID NO: 10972 - protein, 9 aa, Artificial Sequence
  Description of Artificial Sequence: Synthetic peptide
  Seed: QVRESRNPG
QVRESRNPP

SEQ ID NO: 10973 - protein, 9 aa, Artificial Sequence
  Description of Artificial Sequence: Synthetic peptide
  Seed: QVRESRNPG
QMRESRNPV

SEQ ID NO: 10974 - protein, 9 aa, Artificial Sequence
  Description of Artificial Sequence: Synthetic peptide
  Seed: QVRESRNPG
QMRESRNPS

SEQ ID NO: 10975 - protein, 11 aa, Artificial Sequence
  Description of Artificial Sequence: Synthetic peptide
  Seed: RALVRTGMDPR
RTLVRTGMDPR

SEQ ID NO: 10976 - protein, 9 aa, Artificial Sequence
  Description of Artificial Sequence: Synthetic peptide
  Seed: QTAAQRAMM
QVAAQRAMM

SEQ ID NO: 10977 - protein, 9 aa, Artificial Sequence
  Description of Artificial Sequence: Synthetic peptide
  Seed: QTAAQRAMM
QTAAQRAMF

SEQ ID NO: 10978 - protein, 9 aa, Artificial Sequence
  Description of Artificial Sequence: Synthetic peptide
  Seed: QTAAQRAMM
QTAAQRAMW

SEQ ID NO: 10979 - protein, 9 aa, Artificial Sequence
  Description of Artificial Sequence: Synthetic peptide
  Seed: QTAAQRAMM
QTAAQRAMY

SEQ ID NO: 10980 - protein, 9 aa, Artificial Sequence
  Description of Artificial Sequence: Synthetic peptide
  Seed: QTAAQRAMM
QVAAQRAMA

SEQ ID NO: 10981 - protein, 9 aa, Artificial Sequence
  Description of Artificial Sequence: Synthetic peptide
  Seed: QTAAQRAMM
QVAAQRAMR

SEQ ID NO: 10982 - protein, 9 aa, Artificial Sequence
  Description of Artificial Sequence: Synthetic peptide
  Seed: QTAAQRAMM
QVAAQRAMI

SEQ ID NO: 10983 - protein, 9 aa, Artificial Sequence
  Description of Artificial Sequence: Synthetic peptide
  Seed: QTAAQRAMM
QVAAQRAML

SEQ ID NO: 10984 - protein, 9 aa, Artificial Sequence
  Description of Artificial Sequence: Synthetic peptide
  Seed: QTAAQRAMM
QVAAQRAMK

SEQ ID NO: 10985 - protein, 9 aa, Artificial Sequence
  Description of Artificial Sequence: Synthetic peptide
  Seed: QTAAQRAMM
QVAAQRAMF

SEQ ID NO: 10986 - protein, 9 aa, Artificial Sequence
  Description of Artificial Sequence: Synthetic peptide
  Seed: QVRESRNPG
QARESRNPY

SEQ ID NO: 10987 - protein, 9 aa, Artificial Sequence
  Description of Artificial Sequence: Synthetic peptide
  Seed: QTAAQRAMM
QVAAQRAMW

SEQ ID NO: 10988 - protein, 9 aa, Artificial Sequence
  Description of Artificial Sequence: Synthetic peptide
  Seed: QTAAQRAMM
QVAAQRAMY

SEQ ID NO: 10989 - protein, 9 aa, Artificial Sequence
  Description of Artificial Sequence: Synthetic peptide
  Seed: QTAAQRAMM
QVAAQRAMV

SEQ ID NO: 10990 - protein, 9 aa, Artificial Sequence
  Description of Artificial Sequence: Synthetic peptide
  Seed: QVRESRNPG
QARESRNPA

SEQ ID NO: 10991 - protein, 9 aa, Artificial Sequence
  Description of Artificial Sequence: Synthetic peptide
  Seed: QVRESRNPG
QARESRNPR

SEQ ID NO: 10992 - protein, 9 aa, Artificial Sequence
  Description of Artificial Sequence: Synthetic peptide
  Seed: QVRESRNPG
QARESRNPI

SEQ ID NO: 10993 - protein, 9 aa, Artificial Sequence
  Description of Artificial Sequence: Synthetic peptide
  Seed: QVRESRNPG
QARESRNPL

SEQ ID NO: 10994 - protein, 9 aa, Artificial Sequence
  Description of Artificial Sequence: Synthetic peptide
  Seed: QVRESRNPG
QARESRNPK

SEQ ID NO: 10995 - protein, 9 aa, Artificial Sequence
  Description of Artificial Sequence: Synthetic peptide
  Seed: QVRESRNPG
QARESRNPM

SEQ ID NO: 10996 - protein, 9 aa, Artificial Sequence
  Description of Artificial Sequence: Synthetic peptide
  Seed: QTAAQRAMM
QTAAQRAMK

SEQ ID NO: 10997 - protein, 9 aa, Artificial Sequence
  Description of Artificial Sequence: Synthetic peptide
  Seed: QTAAQRAMM
QTAAQRAML

SEQ ID NO: 10998 - protein, 9 aa, Artificial Sequence
  Description of Artificial Sequence: Synthetic peptide
  Seed: QTAAQRAMM
QTAAQRAMI

SEQ ID NO: 10999 - protein, 9 aa, Artificial Sequence
  Description of Artificial Sequence: Synthetic peptide
  Seed: QTAAQRAMM
QTAAQRAMR

SEQ ID NO: 11000 - protein, 11 aa, Artificial Sequence
  Description of Artificial Sequence: Synthetic peptide
  Seed: QRTRALVRTGM
QVTRALVRTGL

SEQ ID NO: 11001 - protein, 9 aa, Artificial Sequence
  Description of Artificial Sequence: Synthetic peptide
  Seed: QTAAQRAMM
QAAAQRAMI

SEQ ID NO: 11002 - protein, 9 aa, Artificial Sequence
  Description of Artificial Sequence: Synthetic peptide
  Seed: QTAAQRAMM
QAAAQRAMF

SEQ ID NO: 11003 - protein, 9 aa, Artificial Sequence
  Description of Artificial Sequence: Synthetic peptide
  Seed: QTAAQRAMM
QAAAQRAMW

SEQ ID NO: 11004 - protein, 9 aa, Artificial Sequence
  Description of Artificial Sequence: Synthetic peptide
  Seed: QTAAQRAMM
QAAAQRAMY

SEQ ID NO: 11005 - protein, 9 aa, Artificial Sequence
  Description of Artificial Sequence: Synthetic peptide
  Seed: QTAAQRAMM
QAAAQRAMV

SEQ ID NO: 11006 - protein, 9 aa, Artificial Sequence
  Description of Artificial Sequence: Synthetic peptide
  Seed: QTAAQRAMM
QIAAQRAMI

SEQ ID NO: 11007 - protein, 9 aa, Artificial Sequence
  Description of Artificial Sequence: Synthetic peptide
  Seed: QTAAQRAMM
QIAAQRAMW

SEQ ID NO: 11008 - protein, 9 aa, Artificial Sequence
  Description of Artificial Sequence: Synthetic peptide
  Seed: QTAAQRAMM
QIAAQRAMY

SEQ ID NO: 11009 - protein, 9 aa, Artificial Sequence
  Description of Artificial Sequence: Synthetic peptide
  Seed: QTAAQRAMM
QIAAQRAMV

SEQ ID NO: 11010 - protein, 9 aa, Artificial Sequence
  Description of Artificial Sequence: Synthetic peptide
  Seed: QTAAQRAMM
QMAAQRAMW

SEQ ID NO: 11011 - protein, 9 aa, Artificial Sequence
  Description of Artificial Sequence: Synthetic peptide
  Seed: QTAAQRAMM
QSAAQRAMI

SEQ ID NO: 11012 - protein, 9 aa, Artificial Sequence
  Description of Artificial Sequence: Synthetic peptide
  Seed: QTAAQRAMM
QSAAQRAML

SEQ ID NO: 11013 - protein, 9 aa, Artificial Sequence
  Description of Artificial Sequence: Synthetic peptide
  Seed: QTAAQRAMM
QSAAQRAMM

SEQ ID NO: 11014 - protein, 9 aa, Artificial Sequence
  Description of Artificial Sequence: Synthetic peptide
  Seed: QTAAQRAMM
QSAAQRAMF

SEQ ID NO: 11015 - protein, 9 aa, Artificial Sequence
  Description of Artificial Sequence: Synthetic peptide
  Seed: QTAAQRAMM
QSAAQRAMW

SEQ ID NO: 11016 - protein, 9 aa, Artificial Sequence
  Description of Artificial Sequence: Synthetic peptide
  Seed: QTAAQRAMM
QSAAQRAMY

SEQ ID NO: 11017 - protein, 9 aa, Artificial Sequence
  Description of Artificial Sequence: Synthetic peptide
  Seed: QTAAQRAMM
QSAAQRAMV

SEQ ID NO: 11018 - protein, 9 aa, Artificial Sequence
  Description of Artificial Sequence: Synthetic peptide
  Seed: QTAAQRAMM
QTAAQRAMA

SEQ ID NO: 11019 - protein, 9 aa, Artificial Sequence
  Description of Artificial Sequence: Synthetic peptide
  Seed: QVRESRNPG
QARESRNPS

SEQ ID NO: 11020 - protein, 9 aa, Artificial Sequence
  Description of Artificial Sequence: Synthetic peptide
  Seed: QVRESRNPG
QARESRNPV

SEQ ID NO: 11021 - protein, 9 aa, Artificial Sequence
  Description of Artificial Sequence: Synthetic peptide
  Seed: QVRESRNPG
QMRESRNPP

SEQ ID NO: 11022 - protein, 9 aa, Artificial Sequence
  Description of Artificial Sequence: Synthetic peptide
  Seed: QVRESRNPG
QLRESRNPY

SEQ ID NO: 11023 - protein, 9 aa, Artificial Sequence
  Description of Artificial Sequence: Synthetic peptide
  Seed: QVRESRNPG
QIRESRNPS

SEQ ID NO: 11024 - protein, 9 aa, Artificial Sequence
  Description of Artificial Sequence: Synthetic peptide
  Seed: QVRESRNPG
QIRESRNPY

SEQ ID NO: 11025 - protein, 9 aa, Artificial Sequence
  Description of Artificial Sequence: Synthetic peptide
  Seed: QVRESRNPG
QIRESRNPV

SEQ ID NO: 11026 - protein, 9 aa, Artificial Sequence
  Description of Artificial Sequence: Synthetic peptide
  Seed: QVRESRNPG
QLRESRNPA

SEQ ID NO: 11027 - protein, 9 aa, Artificial Sequence
  Description of Artificial Sequence: Synthetic peptide
  Seed: QVRESRNPG
QLRESRNPG

SEQ ID NO: 11028 - protein, 9 aa, Artificial Sequence
  Description of Artificial Sequence: Synthetic peptide
  Seed: QVRESRNPG
QLRESRNPI

SEQ ID NO: 11029 - protein, 9 aa, Artificial Sequence
  Description of Artificial Sequence: Synthetic peptide
  Seed: QVRESRNPG
QLRESRNPL

SEQ ID NO: 11030 - protein, 9 aa, Artificial Sequence
  Description of Artificial Sequence: Synthetic peptide
  Seed: QVRESRNPG
QLRESRNPK

SEQ ID NO: 11031 - protein, 9 aa, Artificial Sequence
  Description of Artificial Sequence: Synthetic peptide
  Seed: QVRESRNPG
QLRESRNPM

SEQ ID NO: 11032 - protein, 9 aa, Artificial Sequence
  Description of Artificial Sequence: Synthetic peptide
  Seed: QVRESRNPG
QLRESRNPV

SEQ ID NO: 11033 - protein, 9 aa, Artificial Sequence
  Description of Artificial Sequence: Synthetic peptide
  Seed: QVRESRNPG
QRRESRNPK

SEQ ID NO: 11034 - protein, 9 aa, Artificial Sequence
  Description of Artificial Sequence: Synthetic peptide
  Seed: QVRESRNPG
QKRESRNPK

SEQ ID NO: 11035 - protein, 9 aa, Artificial Sequence
  Description of Artificial Sequence: Synthetic peptide
  Seed: QVRESRNPG
QMRESRNPA

SEQ ID NO: 11036 - protein, 9 aa, Artificial Sequence
  Description of Artificial Sequence: Synthetic peptide
  Seed: QVRESRNPG
QMRESRNPR

SEQ ID NO: 11037 - protein, 9 aa, Artificial Sequence
  Description of Artificial Sequence: Synthetic peptide
  Seed: QVRESRNPG
QMRESRNPG

SEQ ID NO: 11038 - protein, 9 aa, Artificial Sequence
  Description of Artificial Sequence: Synthetic peptide
  Seed: QVRESRNPG
QMRESRNPI

SEQ ID NO: 11039 - protein, 9 aa, Artificial Sequence
  Description of Artificial Sequence: Synthetic peptide
  Seed: QVRESRNPG
QMRESRNPL

SEQ ID NO: 11040 - protein, 9 aa, Artificial Sequence
  Description of Artificial Sequence: Synthetic peptide
  Seed: QVRESRNPG
QMRESRNPK

SEQ ID NO: 11041 - protein, 9 aa, Artificial Sequence
  Description of Artificial Sequence: Synthetic peptide
  Seed: QVRESRNPG
QMRESRNPM

SEQ ID NO: 11042 - protein, 9 aa, Artificial Sequence
  Description of Artificial Sequence: Synthetic peptide
  Seed: QVRESRNPG
QMRESRNPF

SEQ ID NO: 11043 - protein, 9 aa, Artificial Sequence
  Description of Artificial Sequence: Synthetic peptide
  Seed: QVRESRNPG
QIRESRNPM

SEQ ID NO: 11044 - protein, 9 aa, Artificial Sequence
  Description of Artificial Sequence: Synthetic peptide
  Seed: QVRESRNPG
QIRESRNPK

SEQ ID NO: 11045 - protein, 9 aa, Artificial Sequence
  Description of Artificial Sequence: Synthetic peptide
  Seed: QVRESRNPG
QIRESRNPL

SEQ ID NO: 11046 - protein, 9 aa, Artificial Sequence
  Description of Artificial Sequence: Synthetic peptide
  Seed: QVRESRNPG
QIRESRNPI

SEQ ID NO: 11047 - protein, 9 aa, Artificial Sequence
  Description of Artificial Sequence: Synthetic peptide
  Seed: QVRESRNPG
QNRESRNPA

SEQ ID NO: 11048 - protein, 9 aa, Artificial Sequence
  Description of Artificial Sequence: Synthetic peptide
  Seed: QVRESRNPG
QNRESRNPK

SEQ ID NO: 11049 - protein, 9 aa, Artificial Sequence
  Description of Artificial Sequence: Synthetic peptide
  Seed: QVRESRNPG
QNRESRNPV

SEQ ID NO: 11050 - protein, 9 aa, Artificial Sequence
  Description of Artificial Sequence: Synthetic peptide
  Seed: QVRESRNPG
QCRESRNPK

SEQ ID NO: 11051 - protein, 9 aa, Artificial Sequence
  Description of Artificial Sequence: Synthetic peptide
  Seed: QVRESRNPG
QQRESRNPA

SEQ ID NO: 11052 - protein, 9 aa, Artificial Sequence
  Description of Artificial Sequence: Synthetic peptide
  Seed: QVRESRNPG
QQRESRNPR

SEQ ID NO: 11053 - protein, 9 aa, Artificial Sequence
  Description of Artificial Sequence: Synthetic peptide
  Seed: QVRESRNPG
QQRESRNPI

SEQ ID NO: 11054 - protein, 9 aa, Artificial Sequence
  Description of Artificial Sequence: Synthetic peptide
  Seed: QVRESRNPG
QQRESRNPK

SEQ ID NO: 11055 - protein, 9 aa, Artificial Sequence
  Description of Artificial Sequence: Synthetic peptide
  Seed: QVRESRNPG
QQRESRNPM

SEQ ID NO: 11056 - protein, 9 aa, Artificial Sequence
  Description of Artificial Sequence: Synthetic peptide
  Seed: QVRESRNPG
QQRESRNPY

SEQ ID NO: 11057 - protein, 9 aa, Artificial Sequence
  Description of Artificial Sequence: Synthetic peptide
  Seed: QVRESRNPG
QQRESRNPV

SEQ ID NO: 11058 - protein, 9 aa, Artificial Sequence
  Description of Artificial Sequence: Synthetic peptide
  Seed: QVRESRNPG
QGRESRNPA

SEQ ID NO: 11059 - protein, 9 aa, Artificial Sequence
  Description of Artificial Sequence: Synthetic peptide
  Seed: QVRESRNPG
QGRESRNPI

SEQ ID NO: 11060 - protein, 9 aa, Artificial Sequence
  Description of Artificial Sequence: Synthetic peptide
  Seed: QVRESRNPG
QGRESRNPK

SEQ ID NO: 11061 - protein, 9 aa, Artificial Sequence
  Description of Artificial Sequence: Synthetic peptide
  Seed: QVRESRNPG
QGRESRNPV

SEQ ID NO: 11062 - protein, 9 aa, Artificial Sequence
  Description of Artificial Sequence: Synthetic peptide
  Seed: QVRESRNPG
QHRESRNPK

SEQ ID NO: 11063 - protein, 9 aa, Artificial Sequence
  Description of Artificial Sequence: Synthetic peptide
  Seed: QVRESRNPG
QIRESRNPA

SEQ ID NO: 11064 - protein, 9 aa, Artificial Sequence
  Description of Artificial Sequence: Synthetic peptide
  Seed: QVRESRNPG
QIRESRNPR

SEQ ID NO: 11065 - protein, 9 aa, Artificial Sequence
  Description of Artificial Sequence: Synthetic peptide
  Seed: QVRESRNPG
QIRESRNPG

SEQ ID NO: 11066 - protein, 11 aa, Artificial Sequence
  Description of Artificial Sequence: Synthetic peptide
  Seed: RALVRTGMDPR
RSLVRTGMDPK

SEQ ID NO: 11067 - protein, 11 aa, Artificial Sequence
  Description of Artificial Sequence: Synthetic peptide
  Seed: RALVRTGMDPR
RTLVRTGMDPK

SEQ ID NO: 11068 - protein, 9 aa, Artificial Sequence
  Description of Artificial Sequence: Synthetic peptide
  Seed: RASVGRMIG
RISVGRMIA

SEQ ID NO: 11069 - protein, 9 aa, Artificial Sequence
  Description of Artificial Sequence: Synthetic peptide
  Seed: RASAGQISV
RLSAGQISY

SEQ ID NO: 11070 - protein, 9 aa, Artificial Sequence
  Description of Artificial Sequence: Synthetic peptide
  Seed: RASAGQISV
RISAGQISM

SEQ ID NO: 11071 - protein, 9 aa, Artificial Sequence
  Description of Artificial Sequence: Synthetic peptide
  Seed: RASAGQISV
RISAGQISF

SEQ ID NO: 11072 - protein, 9 aa, Artificial Sequence
  Description of Artificial Sequence: Synthetic peptide
  Seed: RASAGQISV
RISAGQISW

SEQ ID NO: 11073 - protein, 9 aa, Artificial Sequence
  Description of Artificial Sequence: Synthetic peptide
  Seed: RASAGQISV
RISAGQISY

SEQ ID NO: 11074 - protein, 9 aa, Artificial Sequence
  Description of Artificial Sequence: Synthetic peptide
  Seed: RASAGQISV
RLSAGQISI

SEQ ID NO: 11075 - protein, 9 aa, Artificial Sequence
  Description of Artificial Sequence: Synthetic peptide
  Seed: RASAGQISV
RLSAGQISL

SEQ ID NO: 11076 - protein, 9 aa, Artificial Sequence
  Description of Artificial Sequence: Synthetic peptide
  Seed: RASAGQISV
RLSAGQISM

SEQ ID NO: 11077 - protein, 9 aa, Artificial Sequence
  Description of Artificial Sequence: Synthetic peptide
  Seed: RASAGQISV
RLSAGQISF

SEQ ID NO: 11078 - protein, 9 aa, Artificial Sequence
  Description of Artificial Sequence: Synthetic peptide
  Seed: RASAGQISV
RLSAGQISW

SEQ ID NO: 11079 - protein, 9 aa, Artificial Sequence
  Description of Artificial Sequence: Synthetic peptide
  Seed: RASAGQISV
RLSAGQISV

SEQ ID NO: 11080 - protein, 9 aa, Artificial Sequence
  Description of Artificial Sequence: Synthetic peptide
  Seed: RASAGQISV
RSSAGQISL

SEQ ID NO: 11081 - protein, 9 aa, Artificial Sequence
  Description of Artificial Sequence: Synthetic peptide
  Seed: RASAGQISV
RMSAGQISI

SEQ ID NO: 11082 - protein, 9 aa, Artificial Sequence
  Description of Artificial Sequence: Synthetic peptide
  Seed: RASAGQISV
RMSAGQISL

SEQ ID NO: 11083 - protein, 9 aa, Artificial Sequence
  Description of Artificial Sequence: Synthetic peptide
  Seed: RASAGQISV
RMSAGQISM

SEQ ID NO: 11084 - protein, 9 aa, Artificial Sequence
  Description of Artificial Sequence: Synthetic peptide
  Seed: RASAGQISV
RMSAGQISF

SEQ ID NO: 11085 - protein, 9 aa, Artificial Sequence
  Description of Artificial Sequence: Synthetic peptide
  Seed: RASAGQISV
RMSAGQISW

SEQ ID NO: 11086 - protein, 9 aa, Artificial Sequence
  Description of Artificial Sequence: Synthetic peptide
  Seed: RASAGQISV
RMSAGQISY

SEQ ID NO: 11087 - protein, 9 aa, Artificial Sequence
  Description of Artificial Sequence: Synthetic peptide
  Seed: RASAGQISV
RMSAGQISV

SEQ ID NO: 11088 - protein, 9 aa, Artificial Sequence
  Description of Artificial Sequence: Synthetic peptide
  Seed: RASAGQISV
RFSAGQISW

SEQ ID NO: 11089 - protein, 9 aa, Artificial Sequence
  Description of Artificial Sequence: Synthetic peptide
  Seed: RASAGQISV
RPSAGQISW

SEQ ID NO: 11090 - protein, 9 aa, Artificial Sequence
  Description of Artificial Sequence: Synthetic peptide
  Seed: RASAGQISV
RISAGQISL

SEQ ID NO: 11091 - protein, 9 aa, Artificial Sequence
  Description of Artificial Sequence: Synthetic peptide
  Seed: RASAGQISV
RISAGQISI

SEQ ID NO: 11092 - protein, 9 aa, Artificial Sequence
  Description of Artificial Sequence: Synthetic peptide
  Seed: RASAGQISV
RGSAGQISY

SEQ ID NO: 11093 - protein, 9 aa, Artificial Sequence
  Description of Artificial Sequence: Synthetic peptide
  Seed: RASAGQISV
RGSAGQISW

SEQ ID NO: 11094 - protein, 9 aa, Artificial Sequence
  Description of Artificial Sequence: Synthetic peptide
  Seed: RASAGQISI
RVSAGQISF

SEQ ID NO: 11095 - protein, 9 aa, Artificial Sequence
  Description of Artificial Sequence: Synthetic peptide
  Seed: RASAGQISI
RVSAGQISW

SEQ ID NO: 11096 - protein, 9 aa, Artificial Sequence
  Description of Artificial Sequence: Synthetic peptide
  Seed: RASAGQISI
RVSAGQISY

SEQ ID NO: 11097 - protein, 9 aa, Artificial Sequence
  Description of Artificial Sequence: Synthetic peptide
  Seed: RASAGQISI
RVSAGQISV

SEQ ID NO: 11098 - protein, 9 aa, Artificial Sequence
  Description of Artificial Sequence: Synthetic peptide
  Seed: RASAGQISV
RASAGQISL

SEQ ID NO: 11099 - protein, 9 aa, Artificial Sequence
  Description of Artificial Sequence: Synthetic peptide
  Seed: RASAGQISV
RASAGQISM

SEQ ID NO: 11100 - protein, 9 aa, Artificial Sequence
  Description of Artificial Sequence: Synthetic peptide
  Seed: RASAGQISV
RASAGQISF

SEQ ID NO: 11101 - protein, 9 aa, Artificial Sequence
  Description of Artificial Sequence: Synthetic peptide
  Seed: RASAGQISV
RASAGQISW

SEQ ID NO: 11102 - protein, 9 aa, Artificial Sequence
  Description of Artificial Sequence: Synthetic peptide
  Seed: RASAGQISV
RASAGQISY

SEQ ID NO: 11103 - protein, 9 aa, Artificial Sequence
  Description of Artificial Sequence: Synthetic peptide
  Seed: RASAGQISV
RNSAGQISW

SEQ ID NO: 11104 - protein, 9 aa, Artificial Sequence
  Description of Artificial Sequence: Synthetic peptide
  Seed: RASAGQISV
RCSAGQISF

SEQ ID NO: 11105 - protein, 9 aa, Artificial Sequence
  Description of Artificial Sequence: Synthetic peptide
  Seed: RASAGQISV
RCSAGQISW

SEQ ID NO: 11106 - protein, 9 aa, Artificial Sequence
  Description of Artificial Sequence: Synthetic peptide
  Seed: RASAGQISV
RQSAGQISI

SEQ ID NO: 11107 - protein, 9 aa, Artificial Sequence
  Description of Artificial Sequence: Synthetic peptide
  Seed: RASAGQISV
RQSAGQISL

SEQ ID NO: 11108 - protein, 9 aa, Artificial Sequence
  Description of Artificial Sequence: Synthetic peptide
  Seed: RASAGQISV
RQSAGQISF

SEQ ID NO: 11109 - protein, 9 aa, Artificial Sequence
  Description of Artificial Sequence: Synthetic peptide
  Seed: RASAGQISV
RQSAGQISW

SEQ ID NO: 11110 - protein, 9 aa, Artificial Sequence
  Description of Artificial Sequence: Synthetic peptide
  Seed: RASAGQISV
RGSAGQISM

SEQ ID NO: 11111 - protein, 9 aa, Artificial Sequence
  Description of Artificial Sequence: Synthetic peptide
  Seed: RASAGQISV
RGSAGQISF

SEQ ID NO: 11112 - protein, 9 aa, Artificial Sequence
  Description of Artificial Sequence: Synthetic peptide
  Seed: RASAGQISV
RSSAGQISI

SEQ ID NO: 11113 - protein, 9 aa, Artificial Sequence
  Description of Artificial Sequence: Synthetic peptide
  Seed: RASAGQISV
RSSAGQISM

SEQ ID NO: 11114 - protein, 9 aa, Artificial Sequence
  Description of Artificial Sequence: Synthetic peptide
  Seed: RASAGQISI
RVSAGQISL

SEQ ID NO: 11115 - protein, 9 aa, Artificial Sequence
  Description of Artificial Sequence: Synthetic peptide
  Seed: RASVGRMIG
RQSVGRMIA

SEQ ID NO: 11116 - protein, 9 aa, Artificial Sequence
  Description of Artificial Sequence: Synthetic peptide
  Seed: RASVGRMIG
RASVGRMIM

SEQ ID NO: 11117 - protein, 9 aa, Artificial Sequence
  Description of Artificial Sequence: Synthetic peptide
  Seed: RASVGRMIG
RASVGRMIS

SEQ ID NO: 11118 - protein, 9 aa, Artificial Sequence
  Description of Artificial Sequence: Synthetic peptide
  Seed: RASVGRMIG
RASVGRMIT

SEQ ID NO: 11119 - protein, 9 aa, Artificial Sequence
  Description of Artificial Sequence: Synthetic peptide
  Seed: RASVGRMIG
RASVGRMIY

SEQ ID NO: 11120 - protein, 9 aa, Artificial Sequence
  Description of Artificial Sequence: Synthetic peptide
  Seed: RASVGRMIG
RASVGRMIV

SEQ ID NO: 11121 - protein, 9 aa, Artificial Sequence
  Description of Artificial Sequence: Synthetic peptide
  Seed: RASVGRMIG
RNSVGRMIA

SEQ ID NO: 11122 - protein, 9 aa, Artificial Sequence
  Description of Artificial Sequence: Synthetic peptide
  Seed: RASVGRMIG
RNSVGRMIK

SEQ ID NO: 11123 - protein, 9 aa, Artificial Sequence
  Description of Artificial Sequence: Synthetic peptide
  Seed: RASVGRMIG
RNSVGRMIV

SEQ ID NO: 11124 - protein, 9 aa, Artificial Sequence
  Description of Artificial Sequence: Synthetic peptide
  Seed: RASVGRMIG
RCSVGRMIK

SEQ ID NO: 11125 - protein, 9 aa, Artificial Sequence
  Description of Artificial Sequence: Synthetic peptide
  Seed: RASVGRMIG
RQSVGRMIR

SEQ ID NO: 11126 - protein, 9 aa, Artificial Sequence
  Description of Artificial Sequence: Synthetic peptide
  Seed: RASAGQISV
RSSAGQISF

SEQ ID NO: 11127 - protein, 9 aa, Artificial Sequence
  Description of Artificial Sequence: Synthetic peptide
  Seed: RASVGRMIG
RQSVGRMII

SEQ ID NO: 11128 - protein, 9 aa, Artificial Sequence
  Description of Artificial Sequence: Synthetic peptide
  Seed: RASVGRMIG
RQSVGRMIL

SEQ ID NO: 11129 - protein, 9 aa, Artificial Sequence
  Description of Artificial Sequence: Synthetic peptide
  Seed: RASVGRMIG
RQSVGRMIK

SEQ ID NO: 11130 - protein, 9 aa, Artificial Sequence
  Description of Artificial Sequence: Synthetic peptide
  Seed: RASVGRMIG
RQSVGRMIM

SEQ ID NO: 11131 - protein, 9 aa, Artificial Sequence
  Description of Artificial Sequence: Synthetic peptide
  Seed: RASVGRMIG
RQSVGRMIY

SEQ ID NO: 11132 - protein, 9 aa, Artificial Sequence
  Description of Artificial Sequence: Synthetic peptide
  Seed: RASVGRMIG
RQSVGRMIV

SEQ ID NO: 11133 - protein, 9 aa, Artificial Sequence
  Description of Artificial Sequence: Synthetic peptide
  Seed: RASVGRMIG
RGSVGRMIA

SEQ ID NO: 11134 - protein, 9 aa, Artificial Sequence
  Description of Artificial Sequence: Synthetic peptide
  Seed: RASVGRMIG
RGSVGRMIK

SEQ ID NO: 11135 - protein, 9 aa, Artificial Sequence
  Description of Artificial Sequence: Synthetic peptide
  Seed: RASVGRMIG
RGSVGRMIV

SEQ ID NO: 11136 - protein, 9 aa, Artificial Sequence
  Description of Artificial Sequence: Synthetic peptide
  Seed: RASVGRMIG
RASVGRMIK

SEQ ID NO: 11137 - protein, 9 aa, Artificial Sequence
  Description of Artificial Sequence: Synthetic peptide
  Seed: RASVGRMIG
RASVGRMIL

SEQ ID NO: 11138 - protein, 9 aa, Artificial Sequence
  Description of Artificial Sequence: Synthetic peptide
  Seed: RASVGRMIG
RASVGRMII

SEQ ID NO: 11139 - protein, 9 aa, Artificial Sequence
  Description of Artificial Sequence: Synthetic peptide
  Seed: RASVGRMIG
RASVGRMIR

SEQ ID NO: 11140 - protein, 9 aa, Artificial Sequence
  Description of Artificial Sequence: Synthetic peptide
  Seed: RASAGQISV
RSSAGQISW

SEQ ID NO: 11141 - protein, 9 aa, Artificial Sequence
  Description of Artificial Sequence: Synthetic peptide
  Seed: RASAGQISV
RSSAGQISY

SEQ ID NO: 11142 - protein, 9 aa, Artificial Sequence
  Description of Artificial Sequence: Synthetic peptide
  Seed: RASAGQISV
RSSAGQISV

SEQ ID NO: 11143 - protein, 9 aa, Artificial Sequence
  Description of Artificial Sequence: Synthetic peptide
  Seed: RASAGQISV
RTSAGQISI

SEQ ID NO: 11144 - protein, 9 aa, Artificial Sequence
  Description of Artificial Sequence: Synthetic peptide
  Seed: RASAGQISV
RTSAGQISL

SEQ ID NO: 11145 - protein, 9 aa, Artificial Sequence
  Description of Artificial Sequence: Synthetic peptide
  Seed: RASAGQISV
RTSAGQISM

SEQ ID NO: 11146 - protein, 9 aa, Artificial Sequence
  Description of Artificial Sequence: Synthetic peptide
  Seed: RASAGQISV
RTSAGQISF

SEQ ID NO: 11147 - protein, 9 aa, Artificial Sequence
  Description of Artificial Sequence: Synthetic peptide
  Seed: RASAGQISV
RTSAGQISW

SEQ ID NO: 11148 - protein, 9 aa, Artificial Sequence
  Description of Artificial Sequence: Synthetic peptide
  Seed: RASAGQISV
RTSAGQISY

SEQ ID NO: 11149 - protein, 9 aa, Artificial Sequence
  Description of Artificial Sequence: Synthetic peptide
  Seed: RASAGQISV
RTSAGQISV

SEQ ID NO: 11150 - protein, 9 aa, Artificial Sequence
  Description of Artificial Sequence: Synthetic peptide
  Seed: RASAGQISV
RYSAGQISW

SEQ ID NO: 11151 - protein, 9 aa, Artificial Sequence
  Description of Artificial Sequence: Synthetic peptide
  Seed: RASAGQISV
RVSAGQISI

SEQ ID NO: 11152 - protein, 9 aa, Artificial Sequence
  Description of Artificial Sequence: Synthetic peptide
  Seed: RASAGQISV
RVSAGQISM

SEQ ID NO: 11153 - protein, 9 aa, Artificial Sequence
  Description of Artificial Sequence: Synthetic peptide
  Seed: RASVGRMIG
RASVGRMIA

SEQ ID NO: 11154 - protein, 11 aa, Artificial Sequence
  Description of Artificial Sequence: Synthetic peptide
  Seed: RALVRTGMDPR
RWLVRTGMDPR

SEQ ID NO: 11155 - protein, 11 aa, Artificial Sequence
  Description of Artificial Sequence: Synthetic peptide
  Seed: RAMMDQVRESR
RWMMDQVRESK

SEQ ID NO: 11156 - protein, 11 aa, Artificial Sequence
  Description of Artificial Sequence: Synthetic peptide
  Seed: RAMMDQVRESR
RMMMDQVRESK

SEQ ID NO: 11157 - protein, 11 aa, Artificial Sequence
  Description of Artificial Sequence: Synthetic peptide
  Seed: RAMMDQVRESR
RFMMDQVRESR

SEQ ID NO: 11158 - protein, 11 aa, Artificial Sequence
  Description of Artificial Sequence: Synthetic peptide
  Seed: RAMMDQVRESR
RFMMDQVRESK

SEQ ID NO: 11159 - protein, 11 aa, Artificial Sequence
  Description of Artificial Sequence: Synthetic peptide
  Seed: RAMMDQVRESR
RPMMDQVRESR

SEQ ID NO: 11160 - protein, 11 aa, Artificial Sequence
  Description of Artificial Sequence: Synthetic peptide
  Seed: RAMMDQVRESR
RSMMDQVRESR

SEQ ID NO: 11161 - protein, 11 aa, Artificial Sequence
  Description of Artificial Sequence: Synthetic peptide
  Seed: RAMMDQVRESR
RSMMDQVRESK

SEQ ID NO: 11162 - protein, 11 aa, Artificial Sequence
  Description of Artificial Sequence: Synthetic peptide
  Seed: RAMMDQVRESR
RTMMDQVRESR

SEQ ID NO: 11163 - protein, 11 aa, Artificial Sequence
  Description of Artificial Sequence: Synthetic peptide
  Seed: RAMMDQVRESR
RTMMDQVRESK

SEQ ID NO: 11164 - protein, 11 aa, Artificial Sequence
  Description of Artificial Sequence: Synthetic peptide
  Seed: RAMMDQVRESR
RWMMDQVRESR

SEQ ID NO: 11165 - protein, 11 aa, Artificial Sequence
  Description of Artificial Sequence: Synthetic peptide
  Seed: RAMMDQVRESR
RYMMDQVRESR

SEQ ID NO: 11166 - protein, 11 aa, Artificial Sequence
  Description of Artificial Sequence: Synthetic peptide
  Seed: RAMMDQVRESR
RYMMDQVRESK

SEQ ID NO: 11167 - protein, 11 aa, Artificial Sequence
  Description of Artificial Sequence: Synthetic peptide
  Seed: RAMMDQVRESR
RVMMDQVRESR

SEQ ID NO: 11168 - protein, 11 aa, Artificial Sequence
  Description of Artificial Sequence: Synthetic peptide
  Seed: RAMMDQVRESR
RVMMDQVRESK

SEQ ID NO: 11169 - protein, 11 aa, Artificial Sequence
  Description of Artificial Sequence: Synthetic peptide
  Seed: RAMMDQVRESR
RMMMDQVRESR

SEQ ID NO: 11170 - protein, 11 aa, Artificial Sequence
  Description of Artificial Sequence: Synthetic peptide
  Seed: RAMMDQVRESR
RKMMDQVRESK

SEQ ID NO: 11171 - protein, 11 aa, Artificial Sequence
  Description of Artificial Sequence: Synthetic peptide
  Seed: RAMMDQVRESR
RKMMDQVRESR

SEQ ID NO: 11172 - protein, 11 aa, Artificial Sequence
  Description of Artificial Sequence: Synthetic peptide
  Seed: RAMMDQVRESR
RLMMDQVRESK

SEQ ID NO: 11173 - protein, 11 aa, Artificial Sequence
  Description of Artificial Sequence: Synthetic peptide
  Seed: RALVRTGMDPR
RWLVRTGMDPK

SEQ ID NO: 11174 - protein, 11 aa, Artificial Sequence
  Description of Artificial Sequence: Synthetic peptide
  Seed: RALVRTGMDPR
RYLVRTGMDPR

SEQ ID NO: 11175 - protein, 11 aa, Artificial Sequence
  Description of Artificial Sequence: Synthetic peptide
  Seed: RALVRTGMDPR
RYLVRTGMDPK

SEQ ID NO: 11176 - protein, 11 aa, Artificial Sequence
  Description of Artificial Sequence: Synthetic peptide
  Seed: RALVRTGMDPR
RVLVRTGMDPR

SEQ ID NO: 11177 - protein, 11 aa, Artificial Sequence
  Description of Artificial Sequence: Synthetic peptide
  Seed: RALVRTGMDPR
RVLVRTGMDPK

SEQ ID NO: 11178 - protein, 11 aa, Artificial Sequence
  Description of Artificial Sequence: Synthetic peptide
  Seed: RAMMDQVRESR
RAMMDQVRESK

SEQ ID NO: 11179 - protein, 11 aa, Artificial Sequence
  Description of Artificial Sequence: Synthetic peptide
  Seed: RAMMDQVRESR
RRMMDQVRESR

SEQ ID NO: 11180 - protein, 11 aa, Artificial Sequence
  Description of Artificial Sequence: Synthetic peptide
  Seed: RAMMDQVRESR
RRMMDQVRESK

SEQ ID NO: 11181 - protein, 11 aa, Artificial Sequence
  Description of Artificial Sequence: Synthetic peptide
  Seed: RAMMDQVRESR
RNMMDQVRESR

SEQ ID NO: 11182 - protein, 11 aa, Artificial Sequence
  Description of Artificial Sequence: Synthetic peptide
  Seed: RAMMDQVRESR
RDMMDQVRESR

SEQ ID NO: 11183 - protein, 11 aa, Artificial Sequence
  Description of Artificial Sequence: Synthetic peptide
  Seed: RAMMDQVRESR
RCMMDQVRESR

SEQ ID NO: 11184 - protein, 11 aa, Artificial Sequence
  Description of Artificial Sequence: Synthetic peptide
  Seed: RAMMDQVRESR
RQMMDQVRESR

SEQ ID NO: 11185 - protein, 11 aa, Artificial Sequence
  Description of Artificial Sequence: Synthetic peptide
  Seed: RAMMDQVRESR
RQMMDQVRESK

SEQ ID NO: 11186 - protein, 11 aa, Artificial Sequence
  Description of Artificial Sequence: Synthetic peptide
  Seed: RAMMDQVRESR
REMMDQVRESR

SEQ ID NO: 11187 - protein, 11 aa, Artificial Sequence
  Description of Artificial Sequence: Synthetic peptide
  Seed: RAMMDQVRESR
RGMMDQVRESR

SEQ ID NO: 11188 - protein, 11 aa, Artificial Sequence
  Description of Artificial Sequence: Synthetic peptide
  Seed: RAMMDQVRESR
RHMMDQVRESR

SEQ ID NO: 11189 - protein, 11 aa, Artificial Sequence
  Description of Artificial Sequence: Synthetic peptide
  Seed: RAMMDQVRESR
RIMMDQVRESR

SEQ ID NO: 11190 - protein, 11 aa, Artificial Sequence
  Description of Artificial Sequence: Synthetic peptide
  Seed: RAMMDQVRESR
RIMMDQVRESK

SEQ ID NO: 11191 - protein, 11 aa, Artificial Sequence
  Description of Artificial Sequence: Synthetic peptide
  Seed: RAMMDQVRESR
RLMMDQVRESR

SEQ ID NO: 11192 - protein, 11 aa, Artificial Sequence
  Description of Artificial Sequence: Synthetic peptide
  Seed: QRTRALVRTGM
QYTRALVRTGL

SEQ ID NO: 11193 - protein, 11 aa, Artificial Sequence
  Description of Artificial Sequence: Synthetic peptide
  Seed: QRTRALVRTGM
QWTRALVRTGL

SEQ ID NO: 11194 - protein, 11 aa, Artificial Sequence
  Description of Artificial Sequence: Synthetic peptide
  Seed: QRTRALVRTGM
QTTRALVRTGL

SEQ ID NO: 11195 - protein, 9 aa, Artificial Sequence
  Description of Artificial Sequence: Synthetic peptide
  Seed: QNSQVFSLI
QTSQVFSLS

SEQ ID NO: 11196 - protein, 9 aa, Artificial Sequence
  Description of Artificial Sequence: Synthetic peptide
  Seed: QNSQVFSLI
QSSQVFSLI

SEQ ID NO: 11197 - protein, 9 aa, Artificial Sequence
  Description of Artificial Sequence: Synthetic peptide
  Seed: QNSQVFSLI
QSSQVFSLL

SEQ ID NO: 11198 - protein, 9 aa, Artificial Sequence
  Description of Artificial Sequence: Synthetic peptide
  Seed: QNSQVFSLI
QSSQVFSLM

SEQ ID NO: 11199 - protein, 9 aa, Artificial Sequence
  Description of Artificial Sequence: Synthetic peptide
  Seed: QNSQVFSLI
QSSQVFSLV

SEQ ID NO: 11200 - protein, 9 aa, Artificial Sequence
  Description of Artificial Sequence: Synthetic peptide
  Seed: QNSQVFSLI
QTSQVFSLA

SEQ ID NO: 11201 - protein, 9 aa, Artificial Sequence
  Description of Artificial Sequence: Synthetic peptide
  Seed: QNSQVFSLI
QTSQVFSLC

SEQ ID NO: 11202 - protein, 9 aa, Artificial Sequence
  Description of Artificial Sequence: Synthetic peptide
  Seed: QNSQVFSLI
QTSQVFSLI

SEQ ID NO: 11203 - protein, 9 aa, Artificial Sequence
  Description of Artificial Sequence: Synthetic peptide
  Seed: QNSQVFSLI
QTSQVFSLL

SEQ ID NO: 11204 - protein, 9 aa, Artificial Sequence
  Description of Artificial Sequence: Synthetic peptide
  Seed: QNSQVFSLI
QTSQVFSLM

SEQ ID NO: 11205 - protein, 9 aa, Artificial Sequence
  Description of Artificial Sequence: Synthetic peptide
  Seed: QNSQVFSLI
QTSQVFSLT

SEQ ID NO: 11206 - protein, 10 aa, Artificial Sequence
  Description of Artificial Sequence: Synthetic peptide
  Seed: QNSQVFSLIR
QDSQVFSLIR

SEQ ID NO: 11207 - protein, 9 aa, Artificial Sequence
  Description of Artificial Sequence: Synthetic peptide
  Seed: QNSQVFSLI
QTSQVFSLV

SEQ ID NO: 11208 - protein, 9 aa, Artificial Sequence
  Description of Artificial Sequence: Synthetic peptide
  Seed: QNSQVFSLI
QVSQVFSLA

SEQ ID NO: 11209 - protein, 9 aa, Artificial Sequence
  Description of Artificial Sequence: Synthetic peptide
  Seed: QNSQVFSLI
QVSQVFSLI

SEQ ID NO: 11210 - protein, 9 aa, Artificial Sequence
  Description of Artificial Sequence: Synthetic peptide
  Seed: QNSQVFSLI
QVSQVFSLL

SEQ ID NO: 11211 - protein, 9 aa, Artificial Sequence
  Description of Artificial Sequence: Synthetic peptide
  Seed: QNSQVFSLI
QVSQVFSLM

SEQ ID NO: 11212 - protein, 9 aa, Artificial Sequence
  Description of Artificial Sequence: Synthetic peptide
  Seed: QNSQVFSLI
QVSQVFSLT

SEQ ID NO: 11213 - protein, 9 aa, Artificial Sequence
  Description of Artificial Sequence: Synthetic peptide
  Seed: QNSQVFSLI
QVSQVFSLV

SEQ ID NO: 11214 - protein, 10 aa, Artificial Sequence
  Description of Artificial Sequence: Synthetic peptide
  Seed: QNSQVFSLIR
QASQVFSLIR

SEQ ID NO: 11215 - protein, 10 aa, Artificial Sequence
  Description of Artificial Sequence: Synthetic peptide
  Seed: QNSQVFSLIR
QASQVFSLIK

SEQ ID NO: 11216 - protein, 9 aa, Artificial Sequence
  Description of Artificial Sequence: Synthetic peptide
  Seed: QNSQVFSLI
QSSQVFSLA

SEQ ID NO: 11217 - protein, 9 aa, Artificial Sequence
  Description of Artificial Sequence: Synthetic peptide
  Seed: QNSQVFSLI
QPSQVFSLV

SEQ ID NO: 11218 - protein, 9 aa, Artificial Sequence
  Description of Artificial Sequence: Synthetic peptide
  Seed: QNSQVFSLI
QMSQVFSLV

SEQ ID NO: 11219 - protein, 9 aa, Artificial Sequence
  Description of Artificial Sequence: Synthetic peptide
  Seed: QNSQVFSLI
QMSQVFSLL

SEQ ID NO: 11220 - protein, 10 aa, Artificial Sequence
  Description of Artificial Sequence: Synthetic peptide
  Seed: QNATEIRASV
QVATEIRASM

SEQ ID NO: 11221 - protein, 10 aa, Artificial Sequence
  Description of Artificial Sequence: Synthetic peptide
  Seed: QNATEIRASV
QVATEIRASV

SEQ ID NO: 11222 - protein, 9 aa, Artificial Sequence
  Description of Artificial Sequence: Synthetic peptide
  Seed: QNSQVFSLI
QASQVFSLA

SEQ ID NO: 11223 - protein, 9 aa, Artificial Sequence
  Description of Artificial Sequence: Synthetic peptide
  Seed: QNSQVFSLI
QASQVFSLI

SEQ ID NO: 11224 - protein, 9 aa, Artificial Sequence
  Description of Artificial Sequence: Synthetic peptide
  Seed: QNSQVFSLI
QASQVFSLL

SEQ ID NO: 11225 - protein, 9 aa, Artificial Sequence
  Description of Artificial Sequence: Synthetic peptide
  Seed: QNSQVFSLI
QASQVFSLM

SEQ ID NO: 11226 - protein, 9 aa, Artificial Sequence
  Description of Artificial Sequence: Synthetic peptide
  Seed: QNSQVFSLI
QASQVFSLV

SEQ ID NO: 11227 - protein, 9 aa, Artificial Sequence
  Description of Artificial Sequence: Synthetic peptide
  Seed: QNSQVFSLI
QGSQVFSLV

SEQ ID NO: 11228 - protein, 9 aa, Artificial Sequence
  Description of Artificial Sequence: Synthetic peptide
  Seed: QNSQVFSLI
QISQVFSLA

SEQ ID NO: 11229 - protein, 9 aa, Artificial Sequence
  Description of Artificial Sequence: Synthetic peptide
  Seed: QNSQVFSLI
QISQVFSLI

SEQ ID NO: 11230 - protein, 9 aa, Artificial Sequence
  Description of Artificial Sequence: Synthetic peptide
  Seed: QNSQVFSLI
QISQVFSLL

SEQ ID NO: 11231 - protein, 9 aa, Artificial Sequence
  Description of Artificial Sequence: Synthetic peptide
  Seed: QNSQVFSLI
QISQVFSLM

SEQ ID NO: 11232 - protein, 9 aa, Artificial Sequence
  Description of Artificial Sequence: Synthetic peptide
  Seed: QNSQVFSLI
QISQVFSLV

SEQ ID NO: 11233 - protein, 9 aa, Artificial Sequence
  Description of Artificial Sequence: Synthetic peptide
  Seed: QNSQVFSLI
QLSQVFSLI

SEQ ID NO: 11234 - protein, 9 aa, Artificial Sequence
  Description of Artificial Sequence: Synthetic peptide
  Seed: QNSQVFSLI
QLSQVFSLL

SEQ ID NO: 11235 - protein, 9 aa, Artificial Sequence
  Description of Artificial Sequence: Synthetic peptide
  Seed: QNSQVFSLI
QLSQVFSLV

SEQ ID NO: 11236 - protein, 9 aa, Artificial Sequence
  Description of Artificial Sequence: Synthetic peptide
  Seed: QNSQVFSLI
QMSQVFSLA

SEQ ID NO: 11237 - protein, 9 aa, Artificial Sequence
  Description of Artificial Sequence: Synthetic peptide
  Seed: QNSQVFSLI
QMSQVFSLI

SEQ ID NO: 11238 - protein, 10 aa, Artificial Sequence
  Description of Artificial Sequence: Synthetic peptide
  Seed: QNSQVFSLIR
QRSQVFSLIR

SEQ ID NO: 11239 - protein, 10 aa, Artificial Sequence
  Description of Artificial Sequence: Synthetic peptide
  Seed: QNSQVFSLIR
QCSQVFSLIR

SEQ ID NO: 11240 - protein, 10 aa, Artificial Sequence
  Description of Artificial Sequence: Synthetic peptide
  Seed: QNATEIRASV
QVATEIRASI

SEQ ID NO: 11241 - protein, 10 aa, Artificial Sequence
  Description of Artificial Sequence: Synthetic peptide
  Seed: QNSQVYSLIR
QESQVYSLIR

SEQ ID NO: 11242 - protein, 10 aa, Artificial Sequence
  Description of Artificial Sequence: Synthetic peptide
  Seed: QNSQVFSLIR
QVSQVFSLIR

SEQ ID NO: 11243 - protein, 10 aa, Artificial Sequence
  Description of Artificial Sequence: Synthetic peptide
  Seed: QNSQVFSLIR
QVSQVFSLIK

SEQ ID NO: 11244 - protein, 10 aa, Artificial Sequence
  Description of Artificial Sequence: Synthetic peptide
  Seed: QNSQVFSLIR
QVSQVFSLIY

SEQ ID NO: 11245 - protein, 10 aa, Artificial Sequence
  Description of Artificial Sequence: Synthetic peptide
  Seed: QNSQVYSLIR
QASQVYSLIR

SEQ ID NO: 11246 - protein, 10 aa, Artificial Sequence
  Description of Artificial Sequence: Synthetic peptide
  Seed: QNSQVYSLIR
QASQVYSLIK

SEQ ID NO: 11247 - protein, 10 aa, Artificial Sequence
  Description of Artificial Sequence: Synthetic peptide
  Seed: QNSQVYSLIR
QRSQVYSLIR

SEQ ID NO: 11248 - protein, 10 aa, Artificial Sequence
  Description of Artificial Sequence: Synthetic peptide
  Seed: QNSQVYSLIR
QDSQVYSLIR

SEQ ID NO: 11249 - protein, 10 aa, Artificial Sequence
  Description of Artificial Sequence: Synthetic peptide
  Seed: QNSQVYSLIR
QCSQVYSLIR

SEQ ID NO: 11250 - protein, 10 aa, Artificial Sequence
  Description of Artificial Sequence: Synthetic peptide
  Seed: QNSQVYSLIR
QQSQVYSLIR

SEQ ID NO: 11251 - protein, 10 aa, Artificial Sequence
  Description of Artificial Sequence: Synthetic peptide
  Seed: QNSQVYSLIR
QGSQVYSLIR

SEQ ID NO: 11252 - protein, 10 aa, Artificial Sequence
  Description of Artificial Sequence: Synthetic peptide
  Seed: QNSQVFSLIR
QQSQVFSLIR

SEQ ID NO: 11253 - protein, 10 aa, Artificial Sequence
  Description of Artificial Sequence: Synthetic peptide
  Seed: QNSQVYSLIR
QHSQVYSLIR

SEQ ID NO: 11254 - protein, 10 aa, Artificial Sequence
  Description of Artificial Sequence: Synthetic peptide
  Seed: QNSQVYSLIR
QISQVYSLIR

SEQ ID NO: 11255 - protein, 10 aa, Artificial Sequence
  Description of Artificial Sequence: Synthetic peptide
  Seed: QNSQVYSLIR
QISQVYSLIK

SEQ ID NO: 11256 - protein, 10 aa, Artificial Sequence
  Description of Artificial Sequence: Synthetic peptide
  Seed: QNSQVYSLIR
QLSQVYSLIR

SEQ ID NO: 11257 - protein, 10 aa, Artificial Sequence
  Description of Artificial Sequence: Synthetic peptide
  Seed: QNSQVYSLIR
QLSQVYSLIK

SEQ ID NO: 11258 - protein, 10 aa, Artificial Sequence
  Description of Artificial Sequence: Synthetic peptide
  Seed: QNSQVYSLIR
QKSQVYSLIR

SEQ ID NO: 11259 - protein, 10 aa, Artificial Sequence
  Description of Artificial Sequence: Synthetic peptide
  Seed: QNSQVYSLIR
QMSQVYSLIR

SEQ ID NO: 11260 - protein, 10 aa, Artificial Sequence
  Description of Artificial Sequence: Synthetic peptide
  Seed: QNSQVYSLIR
QMSQVYSLIK

SEQ ID NO: 11261 - protein, 10 aa, Artificial Sequence
  Description of Artificial Sequence: Synthetic peptide
  Seed: QNSQVYSLIR
QFSQVYSLIR

SEQ ID NO: 11262 - protein, 10 aa, Artificial Sequence
  Description of Artificial Sequence: Synthetic peptide
  Seed: QNSQVFSLIR
QYSQVFSLIK

SEQ ID NO: 11263 - protein, 10 aa, Artificial Sequence
  Description of Artificial Sequence: Synthetic peptide
  Seed: QNSQVFSLIR
QYSQVFSLIR

SEQ ID NO: 11264 - protein, 10 aa, Artificial Sequence
  Description of Artificial Sequence: Synthetic peptide
  Seed: QNSQVFSLIR
QWSQVFSLIK

SEQ ID NO: 11265 - protein, 10 aa, Artificial Sequence
  Description of Artificial Sequence: Synthetic peptide
  Seed: QNSQVFSLIR
QWSQVFSLIR

SEQ ID NO: 11266 - protein, 10 aa, Artificial Sequence
  Description of Artificial Sequence: Synthetic peptide
  Seed: QNSQVFSLIR
QQSQVFSLIK

SEQ ID NO: 11267 - protein, 10 aa, Artificial Sequence
  Description of Artificial Sequence: Synthetic peptide
  Seed: QNSQVFSLIR
QESQVFSLIR

SEQ ID NO: 11268 - protein, 10 aa, Artificial Sequence
  Description of Artificial Sequence: Synthetic peptide
  Seed: QNSQVFSLIR
QGSQVFSLIR

SEQ ID NO: 11269 - protein, 10 aa, Artificial Sequence
  Description of Artificial Sequence: Synthetic peptide
  Seed: QNSQVFSLIR
QHSQVFSLIR

SEQ ID NO: 11270 - protein, 10 aa, Artificial Sequence
  Description of Artificial Sequence: Synthetic peptide
  Seed: QNSQVFSLIR
QISQVFSLIR

SEQ ID NO: 11271 - protein, 10 aa, Artificial Sequence
  Description of Artificial Sequence: Synthetic peptide
  Seed: QNSQVFSLIR
QISQVFSLIK

SEQ ID NO: 11272 - protein, 10 aa, Artificial Sequence
  Description of Artificial Sequence: Synthetic peptide
  Seed: QNSQVFSLIR
QLSQVFSLIR

SEQ ID NO: 11273 - protein, 10 aa, Artificial Sequence
  Description of Artificial Sequence: Synthetic peptide
  Seed: QNSQVFSLIR
QLSQVFSLIK

SEQ ID NO: 11274 - protein, 10 aa, Artificial Sequence
  Description of Artificial Sequence: Synthetic peptide
  Seed: QNSQVFSLIR
QKSQVFSLIR

SEQ ID NO: 11275 - protein, 10 aa, Artificial Sequence
  Description of Artificial Sequence: Synthetic peptide
  Seed: QNSQVFSLIR
QMSQVFSLIR

SEQ ID NO: 11276 - protein, 10 aa, Artificial Sequence
  Description of Artificial Sequence: Synthetic peptide
  Seed: QNSQVFSLIR
QMSQVFSLIK

SEQ ID NO: 11277 - protein, 10 aa, Artificial Sequence
  Description of Artificial Sequence: Synthetic peptide
  Seed: QNSQVFSLIR
QFSQVFSLIR

SEQ ID NO: 11278 - protein, 10 aa, Artificial Sequence
  Description of Artificial Sequence: Synthetic peptide
  Seed: QNSQVFSLIR
QFSQVFSLIK

SEQ ID NO: 11279 - protein, 10 aa, Artificial Sequence
  Description of Artificial Sequence: Synthetic peptide
  Seed: QNSQVFSLIR
QPSQVFSLIR

SEQ ID NO: 11280 - protein, 10 aa, Artificial Sequence
  Description of Artificial Sequence: Synthetic peptide
  Seed: QNSQVFSLIR
QSSQVFSLIR

SEQ ID NO: 11281 - protein, 10 aa, Artificial Sequence
  Description of Artificial Sequence: Synthetic peptide
  Seed: QNSQVFSLIR
QSSQVFSLIK

SEQ ID NO: 11282 - protein, 10 aa, Artificial Sequence
  Description of Artificial Sequence: Synthetic peptide
  Seed: QNSQVFSLIR
QTSQVFSLIR

SEQ ID NO: 11283 - protein, 10 aa, Artificial Sequence
  Description of Artificial Sequence: Synthetic peptide
  Seed: QNSQVFSLIR
QTSQVFSLIK

SEQ ID NO: 11284 - protein, 10 aa, Artificial Sequence
  Description of Artificial Sequence: Synthetic peptide
  Seed: QNSQVFSLIR
QTSQVFSLIY

SEQ ID NO: 11285 - protein, 10 aa, Artificial Sequence
  Description of Artificial Sequence: Synthetic peptide
  Seed: QNATEIRASV
QVATEIRASL

SEQ ID NO: 11286 - protein, 10 aa, Artificial Sequence
  Description of Artificial Sequence: Synthetic peptide
  Seed: QNATEIRASV
QVATEIRASA

SEQ ID NO: 11287 - protein, 11 aa, Artificial Sequence
  Description of Artificial Sequence: Synthetic peptide
  Seed: QRTRALVRTGM
QSTRALVRTGK

SEQ ID NO: 11288 - protein, 10 aa, Artificial Sequence
  Description of Artificial Sequence: Synthetic peptide
  Seed: QLVWMACHSA
QLVWMACHSI

SEQ ID NO: 11289 - protein, 10 aa, Artificial Sequence
  Description of Artificial Sequence: Synthetic peptide
  Seed: QISVQPTFSV
QVSVQPTFSL

SEQ ID NO: 11290 - protein, 10 aa, Artificial Sequence
  Description of Artificial Sequence: Synthetic peptide
  Seed: QLVWMACHSA
QAVWMACHSV

SEQ ID NO: 11291 - protein, 10 aa, Artificial Sequence
  Description of Artificial Sequence: Synthetic peptide
  Seed: QLVWMACHSA
QRVWMACHSV

SEQ ID NO: 11292 - protein, 10 aa, Artificial Sequence
  Description of Artificial Sequence: Synthetic peptide
  Seed: QLVWMACHSA
QNVWMACHSV

SEQ ID NO: 11293 - protein, 10 aa, Artificial Sequence
  Description of Artificial Sequence: Synthetic peptide
  Seed: QLVWMACHSA
QQVWMACHSV

SEQ ID NO: 11294 - protein, 10 aa, Artificial Sequence
  Description of Artificial Sequence: Synthetic peptide
  Seed: QLVWMACHSA
QGVWMACHSV

SEQ ID NO: 11295 - protein, 10 aa, Artificial Sequence
  Description of Artificial Sequence: Synthetic peptide
  Seed: QLVWMACHSA
QHVWMACHSV

SEQ ID NO: 11296 - protein, 10 aa, Artificial Sequence
  Description of Artificial Sequence: Synthetic peptide
  Seed: QLVWMACHSA
QIVWMACHSV

SEQ ID NO: 11297 - protein, 10 aa, Artificial Sequence
  Description of Artificial Sequence: Synthetic peptide
  Seed: QLVWMACHSA
QLVWMACHSL

SEQ ID NO: 11298 - protein, 10 aa, Artificial Sequence
  Description of Artificial Sequence: Synthetic peptide
  Seed: QLVWMACHSA
QTVWMACHSV

SEQ ID NO: 11299 - protein, 10 aa, Artificial Sequence
  Description of Artificial Sequence: Synthetic peptide
  Seed: QLVWMACHSA
QLVWMACHSM

SEQ ID NO: 11300 - protein, 10 aa, Artificial Sequence
  Description of Artificial Sequence: Synthetic peptide
  Seed: QLVWMACHSA
QLVWMACHSV

SEQ ID NO: 11301 - protein, 10 aa, Artificial Sequence
  Description of Artificial Sequence: Synthetic peptide
  Seed: QLVWMACHSA
QKVWMACHSV

SEQ ID NO: 11302 - protein, 10 aa, Artificial Sequence
  Description of Artificial Sequence: Synthetic peptide
  Seed: QLVWMACHSA
QMVWMACHSA

SEQ ID NO: 11303 - protein, 10 aa, Artificial Sequence
  Description of Artificial Sequence: Synthetic peptide
  Seed: QLVWMACHSA
QMVWMACHSI

SEQ ID NO: 11304 - protein, 10 aa, Artificial Sequence
  Description of Artificial Sequence: Synthetic peptide
  Seed: QLVWMACHSA
QMVWMACHSL

SEQ ID NO: 11305 - protein, 10 aa, Artificial Sequence
  Description of Artificial Sequence: Synthetic peptide
  Seed: QLVWMACHSA
QMVWMACHSM

SEQ ID NO: 11306 - protein, 10 aa, Artificial Sequence
  Description of Artificial Sequence: Synthetic peptide
  Seed: QLVWMACHSA
QMVWMACHSV

SEQ ID NO: 11307 - protein, 10 aa, Artificial Sequence
  Description of Artificial Sequence: Synthetic peptide
  Seed: QLVWMACHSA
QFVWMACHSV

SEQ ID NO: 11308 - protein, 10 aa, Artificial Sequence
  Description of Artificial Sequence: Synthetic peptide
  Seed: QISVQPTFSV
QVSVQPTFSI

SEQ ID NO: 11309 - protein, 10 aa, Artificial Sequence
  Description of Artificial Sequence: Synthetic peptide
  Seed: QISVQPTFSV
QYSVQPTFSV

SEQ ID NO: 11310 - protein, 10 aa, Artificial Sequence
  Description of Artificial Sequence: Synthetic peptide
  Seed: QISVQPTFSV
QWSVQPTFSV

SEQ ID NO: 11311 - protein, 10 aa, Artificial Sequence
  Description of Artificial Sequence: Synthetic peptide
  Seed: QISVQPTFSV
QTSVQPTFSV

SEQ ID NO: 11312 - protein, 10 aa, Artificial Sequence
  Description of Artificial Sequence: Synthetic peptide
  Seed: QISVQPTFSV
QHSVQPTFSV

SEQ ID NO: 11313 - protein, 10 aa, Artificial Sequence
  Description of Artificial Sequence: Synthetic peptide
  Seed: QISVQPTFSV
QISVQPTFSI

SEQ ID NO: 11314 - protein, 10 aa, Artificial Sequence
  Description of Artificial Sequence: Synthetic peptide
  Seed: QISVQPTFSV
QLSVQPTFSA

SEQ ID NO: 11315 - protein, 10 aa, Artificial Sequence
  Description of Artificial Sequence: Synthetic peptide
  Seed: QISVQPTFSV
QLSVQPTFSI

SEQ ID NO: 11316 - protein, 10 aa, Artificial Sequence
  Description of Artificial Sequence: Synthetic peptide
  Seed: QISVQPTFSV
QLSVQPTFSL

SEQ ID NO: 11317 - protein, 10 aa, Artificial Sequence
  Description of Artificial Sequence: Synthetic peptide
  Seed: QISVQPTFSV
QLSVQPTFSM

SEQ ID NO: 11318 - protein, 10 aa, Artificial Sequence
  Description of Artificial Sequence: Synthetic peptide
  Seed: QISVQPTFSV
QLSVQPTFSV

SEQ ID NO: 11319 - protein, 10 aa, Artificial Sequence
  Description of Artificial Sequence: Synthetic peptide
  Seed: QISVQPTFSV
QKSVQPTFSV

SEQ ID NO: 11320 - protein, 10 aa, Artificial Sequence
  Description of Artificial Sequence: Synthetic peptide
  Seed: QISVQPTFSV
QMSVQPTFSA

SEQ ID NO: 11321 - protein, 10 aa, Artificial Sequence
  Description of Artificial Sequence: Synthetic peptide
  Seed: QISVQPTFSV
QMSVQPTFSI

SEQ ID NO: 11322 - protein, 10 aa, Artificial Sequence
  Description of Artificial Sequence: Synthetic peptide
  Seed: QISVQPTFSV
QMSVQPTFSL

SEQ ID NO: 11323 - protein, 10 aa, Artificial Sequence
  Description of Artificial Sequence: Synthetic peptide
  Seed: QISVQPTFSV
QMSVQPTFSM

SEQ ID NO: 11324 - protein, 10 aa, Artificial Sequence
  Description of Artificial Sequence: Synthetic peptide
  Seed: QISVQPTFSV
QMSVQPTFSV

SEQ ID NO: 11325 - protein, 10 aa, Artificial Sequence
  Description of Artificial Sequence: Synthetic peptide
  Seed: QISVQPTFSV
QFSVQPTFSV

SEQ ID NO: 11326 - protein, 10 aa, Artificial Sequence
  Description of Artificial Sequence: Synthetic peptide
  Seed: QISVQPTFSV
QPSVQPTFSV

SEQ ID NO: 11327 - protein, 10 aa, Artificial Sequence
  Description of Artificial Sequence: Synthetic peptide
  Seed: QISVQPTFSV
QSSVQPTFSV

SEQ ID NO: 11328 - protein, 10 aa, Artificial Sequence
  Description of Artificial Sequence: Synthetic peptide
  Seed: QISVQPTFSV
QTSVQPTFSA

SEQ ID NO: 11329 - protein, 10 aa, Artificial Sequence
  Description of Artificial Sequence: Synthetic peptide
  Seed: QISVQPTFSV
QTSVQPTFSI

SEQ ID NO: 11330 - protein, 10 aa, Artificial Sequence
  Description of Artificial Sequence: Synthetic peptide
  Seed: QISVQPTFSV
QTSVQPTFSL

SEQ ID NO: 11331 - protein, 10 aa, Artificial Sequence
  Description of Artificial Sequence: Synthetic peptide
  Seed: QLVWMACHSA
QSVWMACHSV

SEQ ID NO: 11332 - protein, 10 aa, Artificial Sequence
  Description of Artificial Sequence: Synthetic peptide
  Seed: QLVWMACHSA
QWVWMACHSV

SEQ ID NO: 11333 - protein, 10 aa, Artificial Sequence
  Description of Artificial Sequence: Synthetic peptide
  Seed: QNATEIRASV
QYATEIRASV

SEQ ID NO: 11334 - protein, 10 aa, Artificial Sequence
  Description of Artificial Sequence: Synthetic peptide
  Seed: QNATEIRASV
QSATEIRASA

SEQ ID NO: 11335 - protein, 10 aa, Artificial Sequence
  Description of Artificial Sequence: Synthetic peptide
  Seed: QNATEIRASV
QIATEIRASI

SEQ ID NO: 11336 - protein, 10 aa, Artificial Sequence
  Description of Artificial Sequence: Synthetic peptide
  Seed: QNATEIRASV
QIATEIRASL

SEQ ID NO: 11337 - protein, 10 aa, Artificial Sequence
  Description of Artificial Sequence: Synthetic peptide
  Seed: QNATEIRASV
QIATEIRASV

SEQ ID NO: 11338 - protein, 10 aa, Artificial Sequence
  Description of Artificial Sequence: Synthetic peptide
  Seed: QNATEIRASV
QLATEIRASV

SEQ ID NO: 11339 - protein, 10 aa, Artificial Sequence
  Description of Artificial Sequence: Synthetic peptide
  Seed: QNATEIRASV
QKATEIRASV

SEQ ID NO: 11340 - protein, 10 aa, Artificial Sequence
  Description of Artificial Sequence: Synthetic peptide
  Seed: QNATEIRASV
QMATEIRASI

SEQ ID NO: 11341 - protein, 10 aa, Artificial Sequence
  Description of Artificial Sequence: Synthetic peptide
  Seed: QNATEIRASV
QMATEIRASV

SEQ ID NO: 11342 - protein, 10 aa, Artificial Sequence
  Description of Artificial Sequence: Synthetic peptide
  Seed: QNATEIRASV
QFATEIRASV

SEQ ID NO: 11343 - protein, 10 aa, Artificial Sequence
  Description of Artificial Sequence: Synthetic peptide
  Seed: QNATEIRASV
QPATEIRASV

SEQ ID NO: 11344 - protein, 10 aa, Artificial Sequence
  Description of Artificial Sequence: Synthetic peptide
  Seed: QNATEIRASV
QSATEIRASI

SEQ ID NO: 11345 - protein, 10 aa, Artificial Sequence
  Description of Artificial Sequence: Synthetic peptide
  Seed: QLVWMACHSA
QYVWMACHSV

SEQ ID NO: 11346 - protein, 10 aa, Artificial Sequence
  Description of Artificial Sequence: Synthetic peptide
  Seed: QNATEIRASV
QSATEIRASL

SEQ ID NO: 11347 - protein, 10 aa, Artificial Sequence
  Description of Artificial Sequence: Synthetic peptide
  Seed: QNATEIRASV
QSATEIRASV

SEQ ID NO: 11348 - protein, 10 aa, Artificial Sequence
  Description of Artificial Sequence: Synthetic peptide
  Seed: QNATEIRASV
QTATEIRASA

SEQ ID NO: 11349 - protein, 10 aa, Artificial Sequence
  Description of Artificial Sequence: Synthetic peptide
  Seed: QNATEIRASV
QTATEIRASI

SEQ ID NO: 11350 - protein, 10 aa, Artificial Sequence
  Description of Artificial Sequence: Synthetic peptide
  Seed: QNATEIRASV
QTATEIRASL

SEQ ID NO: 11351 - protein, 10 aa, Artificial Sequence
  Description of Artificial Sequence: Synthetic peptide
  Seed: QNATEIRASV
QTATEIRASM

SEQ ID NO: 11352 - protein, 10 aa, Artificial Sequence
  Description of Artificial Sequence: Synthetic peptide
  Seed: QNATEIRASV
QTATEIRAST

SEQ ID NO: 11353 - protein, 10 aa, Artificial Sequence
  Description of Artificial Sequence: Synthetic peptide
  Seed: QNATEIRASV
QTATEIRASV

SEQ ID NO: 11354 - protein, 10 aa, Artificial Sequence
  Description of Artificial Sequence: Synthetic peptide
  Seed: QNATEIRASV
QWATEIRASV

SEQ ID NO: 11355 - protein, 10 aa, Artificial Sequence
  Description of Artificial Sequence: Synthetic peptide
  Seed: QNATEIRASV
QHATEIRASV

SEQ ID NO: 11356 - protein, 10 aa, Artificial Sequence
  Description of Artificial Sequence: Synthetic peptide
  Seed: QNATEIRASV
QGATEIRASV

SEQ ID NO: 11357 - protein, 10 aa, Artificial Sequence
  Description of Artificial Sequence: Synthetic peptide
  Seed: QNATEIRASV
QEATEIRASV

SEQ ID NO: 11358 - protein, 10 aa, Artificial Sequence
  Description of Artificial Sequence: Synthetic peptide
  Seed: QNATEIRASV
QQATEIRASV

SEQ ID NO: 11359 - protein, 10 aa, Artificial Sequence
  Description of Artificial Sequence: Synthetic peptide
  Seed: QLVWMACHSA
QVVWMACHSV

SEQ ID NO: 11360 - protein, 10 aa, Artificial Sequence
  Description of Artificial Sequence: Synthetic peptide
  Seed: QLVWMACNSA
QQVWMACNSV

SEQ ID NO: 11361 - protein, 10 aa, Artificial Sequence
  Description of Artificial Sequence: Synthetic peptide
  Seed: QLVWMACNSA
QIVWMACNSV

SEQ ID NO: 11362 - protein, 10 aa, Artificial Sequence
  Description of Artificial Sequence: Synthetic peptide
  Seed: QLVWMACNSA
QLVWMACNSI

SEQ ID NO: 11363 - protein, 10 aa, Artificial Sequence
  Description of Artificial Sequence: Synthetic peptide
  Seed: QLVWMACNSA
QLVWMACNSL

SEQ ID NO: 11364 - protein, 10 aa, Artificial Sequence
  Description of Artificial Sequence: Synthetic peptide
  Seed: QLVWMACNSA
QLVWMACNSV

SEQ ID NO: 11365 - protein, 10 aa, Artificial Sequence
  Description of Artificial Sequence: Synthetic peptide
  Seed: QLVWMACNSA
QMVWMACNSA

SEQ ID NO: 11366 - protein, 10 aa, Artificial Sequence
  Description of Artificial Sequence: Synthetic peptide
  Seed: QLVWMACNSA
QMVWMACNSI

SEQ ID NO: 11367 - protein, 10 aa, Artificial Sequence
  Description of Artificial Sequence: Synthetic peptide
  Seed: QLVWMACNSA
QMVWMACNSL

SEQ ID NO: 11368 - protein, 10 aa, Artificial Sequence
  Description of Artificial Sequence: Synthetic peptide
  Seed: QLVWMACNSA
QMVWMACNSV

SEQ ID NO: 11369 - protein, 10 aa, Artificial Sequence
  Description of Artificial Sequence: Synthetic peptide
  Seed: QLVWMACNSA
QFVWMACNSV

SEQ ID NO: 11370 - protein, 10 aa, Artificial Sequence
  Description of Artificial Sequence: Synthetic peptide
  Seed: QLVWMACNSA
QYVWMACNSV

SEQ ID NO: 11371 - protein, 10 aa, Artificial Sequence
  Description of Artificial Sequence: Synthetic peptide
  Seed: QLVWMACNSA
QVVWMACNSV

SEQ ID NO: 11372 - protein, 10 aa, Artificial Sequence
  Description of Artificial Sequence: Synthetic peptide
  Seed: QNATEIRASV
QAATEIRASI

SEQ ID NO: 11373 - protein, 10 aa, Artificial Sequence
  Description of Artificial Sequence: Synthetic peptide
  Seed: QNATEIRASV
QAATEIRASL

SEQ ID NO: 11374 - protein, 10 aa, Artificial Sequence
  Description of Artificial Sequence: Synthetic peptide
  Seed: QNATEIRASV
QAATEIRASV

SEQ ID NO: 11375 - protein, 10 aa, Artificial Sequence
  Description of Artificial Sequence: Synthetic peptide
  Seed: QNATEIRASV
QRATEIRASV

SEQ ID NO: 11376 - protein, 10 aa, Artificial Sequence
  Description of Artificial Sequence: Synthetic peptide
  Seed: QNATEIRASV
QCATEIRASV

SEQ ID NO: 11377 - protein, 10 aa, Artificial Sequence
  Description of Artificial Sequence: Synthetic peptide
  Seed: QNSQVYSLIR
QFSQVYSLIK

SEQ ID NO: 11378 - protein, 10 aa, Artificial Sequence
  Description of Artificial Sequence: Synthetic peptide
  Seed: QNSQVYSLIR
QPSQVYSLIR

SEQ ID NO: 11379 - protein, 10 aa, Artificial Sequence
  Description of Artificial Sequence: Synthetic peptide
  Seed: QNSQVYSLIR
QSSQVYSLIR

SEQ ID NO: 11380 - protein, 10 aa, Artificial Sequence
  Description of Artificial Sequence: Synthetic peptide
  Seed: QRTRALVRTG
QFTRALVRTI

SEQ ID NO: 11381 - protein, 10 aa, Artificial Sequence
  Description of Artificial Sequence: Synthetic peptide
  Seed: QRTRALVRTG
QKTRALVRTY

SEQ ID NO: 11382 - protein, 10 aa, Artificial Sequence
  Description of Artificial Sequence: Synthetic peptide
  Seed: QRTRALVRTG
QKTRALVRTV

SEQ ID NO: 11383 - protein, 10 aa, Artificial Sequence
  Description of Artificial Sequence: Synthetic peptide
  Seed: QRTRALVRTG
QMTRALVRTA

SEQ ID NO: 11384 - protein, 10 aa, Artificial Sequence
  Description of Artificial Sequence: Synthetic peptide
  Seed: QRTRALVRTG
QMTRALVRTI

SEQ ID NO: 11385 - protein, 10 aa, Artificial Sequence
  Description of Artificial Sequence: Synthetic peptide
  Seed: QRTRALVRTG
QMTRALVRTL

SEQ ID NO: 11386 - protein, 10 aa, Artificial Sequence
  Description of Artificial Sequence: Synthetic peptide
  Seed: QRTRALVRTG
QMTRALVRTK

SEQ ID NO: 11387 - protein, 10 aa, Artificial Sequence
  Description of Artificial Sequence: Synthetic peptide
  Seed: QRTRALVRTG
QMTRALVRTM

SEQ ID NO: 11388 - protein, 10 aa, Artificial Sequence
  Description of Artificial Sequence: Synthetic peptide
  Seed: QRTRALVRTG
QMTRALVRTV

SEQ ID NO: 11389 - protein, 10 aa, Artificial Sequence
  Description of Artificial Sequence: Synthetic peptide
  Seed: QRTRALVRTG
QFTRALVRTA

SEQ ID NO: 11390 - protein, 10 aa, Artificial Sequence
  Description of Artificial Sequence: Synthetic peptide
  Seed: QRTRALVRTG
QFTRALVRTK

SEQ ID NO: 11391 - protein, 10 aa, Artificial Sequence
  Description of Artificial Sequence: Synthetic peptide
  Seed: QRTRALVRTG
QSTRALVRTS

SEQ ID NO: 11392 - protein, 10 aa, Artificial Sequence
  Description of Artificial Sequence: Synthetic peptide
  Seed: QRTRALVRTG
QFTRALVRTV

SEQ ID NO: 11393 - protein, 10 aa, Artificial Sequence
  Description of Artificial Sequence: Synthetic peptide
  Seed: QRTRALVRTG
QPTRALVRTA

SEQ ID NO: 11394 - protein, 10 aa, Artificial Sequence
  Description of Artificial Sequence: Synthetic peptide
  Seed: QRTRALVRTG
QPTRALVRTI

SEQ ID NO: 11395 - protein, 10 aa, Artificial Sequence
  Description of Artificial Sequence: Synthetic peptide
  Seed: QRTRALVRTG
QPTRALVRTK

SEQ ID NO: 11396 - protein, 10 aa, Artificial Sequence
  Description of Artificial Sequence: Synthetic peptide
  Seed: QRTRALVRTG
QPTRALVRTV

SEQ ID NO: 11397 - protein, 10 aa, Artificial Sequence
  Description of Artificial Sequence: Synthetic peptide
  Seed: QRTRALVRTG
QSTRALVRTA

SEQ ID NO: 11398 - protein, 10 aa, Artificial Sequence
  Description of Artificial Sequence: Synthetic peptide
  Seed: QRTRALVRTG
QSTRALVRTI

SEQ ID NO: 11399 - protein, 10 aa, Artificial Sequence
  Description of Artificial Sequence: Synthetic peptide
  Seed: QRTRALVRTG
QSTRALVRTL

SEQ ID NO: 11400 - protein, 10 aa, Artificial Sequence
  Description of Artificial Sequence: Synthetic peptide
  Seed: QRTRALVRTG
QSTRALVRTK

SEQ ID NO: 11401 - protein, 10 aa, Artificial Sequence
  Description of Artificial Sequence: Synthetic peptide
  Seed: QRTRALVRTG
QKTRALVRTT

SEQ ID NO: 11402 - protein, 10 aa, Artificial Sequence
  Description of Artificial Sequence: Synthetic peptide
  Seed: QRTRALVRTG
QKTRALVRTS

SEQ ID NO: 11403 - protein, 10 aa, Artificial Sequence
  Description of Artificial Sequence: Synthetic peptide
  Seed: QRTRALVRTG
QKTRALVRTF

SEQ ID NO: 11404 - protein, 10 aa, Artificial Sequence
  Description of Artificial Sequence: Synthetic peptide
  Seed: QRTRALVRTG
QKTRALVRTM

SEQ ID NO: 11405 - protein, 10 aa, Artificial Sequence
  Description of Artificial Sequence: Synthetic peptide
  Seed: QRTRALVRTG
QGTRALVRTK

SEQ ID NO: 11406 - protein, 10 aa, Artificial Sequence
  Description of Artificial Sequence: Synthetic peptide
  Seed: QRTRALVRTG
QGTRALVRTV

SEQ ID NO: 11407 - protein, 10 aa, Artificial Sequence
  Description of Artificial Sequence: Synthetic peptide
  Seed: QRTRALVRTG
QHTRALVRTA

SEQ ID NO: 11408 - protein, 10 aa, Artificial Sequence
  Description of Artificial Sequence: Synthetic peptide
  Seed: QRTRALVRTG
QHTRALVRTI

SEQ ID NO: 11409 - protein, 10 aa, Artificial Sequence
  Description of Artificial Sequence: Synthetic peptide
  Seed: QRTRALVRTG
QHTRALVRTL

SEQ ID NO: 11410 - protein, 10 aa, Artificial Sequence
  Description of Artificial Sequence: Synthetic peptide
  Seed: QRTRALVRTG
QHTRALVRTK

SEQ ID NO: 11411 - protein, 10 aa, Artificial Sequence
  Description of Artificial Sequence: Synthetic peptide
  Seed: QRTRALVRTG
QHTRALVRTV

SEQ ID NO: 11412 - protein, 10 aa, Artificial Sequence
  Description of Artificial Sequence: Synthetic peptide
  Seed: QRTRALVRTG
QITRALVRTA

SEQ ID NO: 11413 - protein, 10 aa, Artificial Sequence
  Description of Artificial Sequence: Synthetic peptide
  Seed: QRTRALVRTG
QITRALVRTI

SEQ ID NO: 11414 - protein, 10 aa, Artificial Sequence
  Description of Artificial Sequence: Synthetic peptide
  Seed: QRTRALVRTG
QITRALVRTK

SEQ ID NO: 11415 - protein, 10 aa, Artificial Sequence
  Description of Artificial Sequence: Synthetic peptide
  Seed: QRTRALVRTG
QITRALVRTV

SEQ ID NO: 11416 - protein, 10 aa, Artificial Sequence
  Description of Artificial Sequence: Synthetic peptide
  Seed: QRTRALVRTG
QLTRALVRTA

SEQ ID NO: 11417 - protein, 10 aa, Artificial Sequence
  Description of Artificial Sequence: Synthetic peptide
  Seed: QRTRALVRTG
QLTRALVRTI

SEQ ID NO: 11418 - protein, 10 aa, Artificial Sequence
  Description of Artificial Sequence: Synthetic peptide
  Seed: QRTRALVRTG
QLTRALVRTK

SEQ ID NO: 11419 - protein, 10 aa, Artificial Sequence
  Description of Artificial Sequence: Synthetic peptide
  Seed: QRTRALVRTG
QLTRALVRTV

SEQ ID NO: 11420 - protein, 10 aa, Artificial Sequence
  Description of Artificial Sequence: Synthetic peptide
  Seed: QRTRALVRTG
QKTRALVRTA

SEQ ID NO: 11421 - protein, 10 aa, Artificial Sequence
  Description of Artificial Sequence: Synthetic peptide
  Seed: QRTRALVRTG
QKTRALVRTI

SEQ ID NO: 11422 - protein, 10 aa, Artificial Sequence
  Description of Artificial Sequence: Synthetic peptide
  Seed: QRTRALVRTG
QKTRALVRTL

SEQ ID NO: 11423 - protein, 10 aa, Artificial Sequence
  Description of Artificial Sequence: Synthetic peptide
  Seed: QRTRALVRTG
QKTRALVRTK

SEQ ID NO: 11424 - protein, 10 aa, Artificial Sequence
  Description of Artificial Sequence: Synthetic peptide
  Seed: QRTRALVRTG
QSTRALVRTM

SEQ ID NO: 11425 - protein, 10 aa, Artificial Sequence
  Description of Artificial Sequence: Synthetic peptide
  Seed: QRTRALVRTG
QSTRALVRTV

SEQ ID NO: 11426 - protein, 10 aa, Artificial Sequence
  Description of Artificial Sequence: Synthetic peptide
  Seed: QNSQVYSLIR
QSSQVYSLIK

SEQ ID NO: 11427 - protein, 11 aa, Artificial Sequence
  Description of Artificial Sequence: Synthetic peptide
  Seed: QRTRALVRTGM
QITRALVRTGL

SEQ ID NO: 11428 - protein, 11 aa, Artificial Sequence
  Description of Artificial Sequence: Synthetic peptide
  Seed: QRTRALVRTGM
QRTRALVRTGF

SEQ ID NO: 11429 - protein, 11 aa, Artificial Sequence
  Description of Artificial Sequence: Synthetic peptide
  Seed: QRTRALVRTGM
QRTRALVRTGV

SEQ ID NO: 11430 - protein, 11 aa, Artificial Sequence
  Description of Artificial Sequence: Synthetic peptide
  Seed: QRTRALVRTGM
QNTRALVRTGL

SEQ ID NO: 11431 - protein, 11 aa, Artificial Sequence
  Description of Artificial Sequence: Synthetic peptide
  Seed: QRTRALVRTGM
QDTRALVRTGL

SEQ ID NO: 11432 - protein, 11 aa, Artificial Sequence
  Description of Artificial Sequence: Synthetic peptide
  Seed: QRTRALVRTGM
QCTRALVRTGL

SEQ ID NO: 11433 - protein, 11 aa, Artificial Sequence
  Description of Artificial Sequence: Synthetic peptide
  Seed: QRTRALVRTGM
QQTRALVRTGL

SEQ ID NO: 11434 - protein, 11 aa, Artificial Sequence
  Description of Artificial Sequence: Synthetic peptide
  Seed: QRTRALVRTGM
QETRALVRTGL

SEQ ID NO: 11435 - protein, 11 aa, Artificial Sequence
  Description of Artificial Sequence: Synthetic peptide
  Seed: QRTRALVRTGM
QGTRALVRTGL

SEQ ID NO: 11436 - protein, 11 aa, Artificial Sequence
  Description of Artificial Sequence: Synthetic peptide
  Seed: QRTRALVRTGM
QHTRALVRTGL

SEQ ID NO: 11437 - protein, 11 aa, Artificial Sequence
  Description of Artificial Sequence: Synthetic peptide
  Seed: QRTRALVRTGM
QLTRALVRTGL

SEQ ID NO: 11438 - protein, 10 aa, Artificial Sequence
  Description of Artificial Sequence: Synthetic peptide
  Seed: QRTRALVRTG
QTTRALVRTA

SEQ ID NO: 11439 - protein, 11 aa, Artificial Sequence
  Description of Artificial Sequence: Synthetic peptide
  Seed: QRTRALVRTGM
QKTRALVRTGA

SEQ ID NO: 11440 - protein, 11 aa, Artificial Sequence
  Description of Artificial Sequence: Synthetic peptide
  Seed: QRTRALVRTGM
QKTRALVRTGL

SEQ ID NO: 11441 - protein, 11 aa, Artificial Sequence
  Description of Artificial Sequence: Synthetic peptide
  Seed: QRTRALVRTGM
QKTRALVRTGK

SEQ ID NO: 11442 - protein, 11 aa, Artificial Sequence
  Description of Artificial Sequence: Synthetic peptide
  Seed: QRTRALVRTGM
QKTRALVRTGV

SEQ ID NO: 11443 - protein, 11 aa, Artificial Sequence
  Description of Artificial Sequence: Synthetic peptide
  Seed: QRTRALVRTGM
QMTRALVRTGL

SEQ ID NO: 11444 - protein, 11 aa, Artificial Sequence
  Description of Artificial Sequence: Synthetic peptide
  Seed: QRTRALVRTGM
QMTRALVRTGK

SEQ ID NO: 11445 - protein, 11 aa, Artificial Sequence
  Description of Artificial Sequence: Synthetic peptide
  Seed: QRTRALVRTGM
QFTRALVRTGL

SEQ ID NO: 11446 - protein, 11 aa, Artificial Sequence
  Description of Artificial Sequence: Synthetic peptide
  Seed: QRTRALVRTGM
QPTRALVRTGL

SEQ ID NO: 11447 - protein, 11 aa, Artificial Sequence
  Description of Artificial Sequence: Synthetic peptide
  Seed: QRTRALVRTGM
QSTRALVRTGL

SEQ ID NO: 11448 - protein, 11 aa, Artificial Sequence
  Description of Artificial Sequence: Synthetic peptide
  Seed: QRTRALVRTGM
QRTRALVRTGK

SEQ ID NO: 11449 - protein, 11 aa, Artificial Sequence
  Description of Artificial Sequence: Synthetic peptide
  Seed: QRTRALVRTGM
QRTRALVRTGL

SEQ ID NO: 11450 - protein, 11 aa, Artificial Sequence
  Description of Artificial Sequence: Synthetic peptide
  Seed: QRTRALVRTGM
QRTRALVRTGI

SEQ ID NO: 11451 - protein, 11 aa, Artificial Sequence
  Description of Artificial Sequence: Synthetic peptide
  Seed: QRTRALVRTGM
QRTRALVRTGA

SEQ ID NO: 11452 - protein, 10 aa, Artificial Sequence
  Description of Artificial Sequence: Synthetic peptide
  Seed: QRTRALVRTG
QTTRALVRTI

SEQ ID NO: 11453 - protein, 10 aa, Artificial Sequence
  Description of Artificial Sequence: Synthetic peptide
  Seed: QRTRALVRTG
QTTRALVRTK

SEQ ID NO: 11454 - protein, 10 aa, Artificial Sequence
  Description of Artificial Sequence: Synthetic peptide
  Seed: QRTRALVRTG
QTTRALVRTV

SEQ ID NO: 11455 - protein, 10 aa, Artificial Sequence
  Description of Artificial Sequence: Synthetic peptide
  Seed: QRTRALVRTG
QWTRALVRTA

SEQ ID NO: 11456 - protein, 10 aa, Artificial Sequence
  Description of Artificial Sequence: Synthetic peptide
  Seed: QRTRALVRTG
QWTRALVRTI

SEQ ID NO: 11457 - protein, 10 aa, Artificial Sequence
  Description of Artificial Sequence: Synthetic peptide
  Seed: QRTRALVRTG
QWTRALVRTL

SEQ ID NO: 11458 - protein, 10 aa, Artificial Sequence
  Description of Artificial Sequence: Synthetic peptide
  Seed: QRTRALVRTG
QWTRALVRTK

SEQ ID NO: 11459 - protein, 10 aa, Artificial Sequence
  Description of Artificial Sequence: Synthetic peptide
  Seed: QRTRALVRTG
QWTRALVRTV

SEQ ID NO: 11460 - protein, 10 aa, Artificial Sequence
  Description of Artificial Sequence: Synthetic peptide
  Seed: QRTRALVRTG
QYTRALVRTA

SEQ ID NO: 11461 - protein, 10 aa, Artificial Sequence
  Description of Artificial Sequence: Synthetic peptide
  Seed: QRTRALVRTG
QYTRALVRTI

SEQ ID NO: 11462 - protein, 10 aa, Artificial Sequence
  Description of Artificial Sequence: Synthetic peptide
  Seed: QRTRALVRTG
QYTRALVRTL

SEQ ID NO: 11463 - protein, 10 aa, Artificial Sequence
  Description of Artificial Sequence: Synthetic peptide
  Seed: QRTRALVRTG
QYTRALVRTK

SEQ ID NO: 11464 - protein, 10 aa, Artificial Sequence
  Description of Artificial Sequence: Synthetic peptide
  Seed: QRTRALVRTG
QYTRALVRTS

SEQ ID NO: 11465 - protein, 10 aa, Artificial Sequence
  Description of Artificial Sequence: Synthetic peptide
  Seed: QRTRALVRTG
QYTRALVRTV

SEQ ID NO: 11466 - protein, 10 aa, Artificial Sequence
  Description of Artificial Sequence: Synthetic peptide
  Seed: QRTRALVRTG
QVTRALVRTA

SEQ ID NO: 11467 - protein, 10 aa, Artificial Sequence
  Description of Artificial Sequence: Synthetic peptide
  Seed: QRTRALVRTG
QVTRALVRTI

SEQ ID NO: 11468 - protein, 10 aa, Artificial Sequence
  Description of Artificial Sequence: Synthetic peptide
  Seed: QRTRALVRTG
QVTRALVRTK

SEQ ID NO: 11469 - protein, 10 aa, Artificial Sequence
  Description of Artificial Sequence: Synthetic peptide
  Seed: QRTRALVRTG
QVTRALVRTV

SEQ ID NO: 11470 - protein, 11 aa, Artificial Sequence
  Description of Artificial Sequence: Synthetic peptide
  Seed: QRTRALVRTGM
QATRALVRTGL

SEQ ID NO: 11471 - protein, 10 aa, Artificial Sequence
  Description of Artificial Sequence: Synthetic peptide
  Seed: QRTRALVRTG
QGTRALVRTI

SEQ ID NO: 11472 - protein, 10 aa, Artificial Sequence
  Description of Artificial Sequence: Synthetic peptide
  Seed: QRTRALVRTG
QGTRALVRTA

SEQ ID NO: 11473 - protein, 10 aa, Artificial Sequence
  Description of Artificial Sequence: Synthetic peptide
  Seed: QRTRALVRTG
QETRALVRTV

SEQ ID NO: 11474 - protein, 9 aa, Artificial Sequence
  Description of Artificial Sequence: Synthetic peptide
  Seed: QQRASAGQI
QLRASAGQY

SEQ ID NO: 11475 - protein, 9 aa, Artificial Sequence
  Description of Artificial Sequence: Synthetic peptide
  Seed: QQRASAGQI
QERASAGQF

SEQ ID NO: 11476 - protein, 9 aa, Artificial Sequence
  Description of Artificial Sequence: Synthetic peptide
  Seed: QQRASAGQI
QERASAGQY

SEQ ID NO: 11477 - protein, 9 aa, Artificial Sequence
  Description of Artificial Sequence: Synthetic peptide
  Seed: QQRASAGQI
QHRASAGQM

SEQ ID NO: 11478 - protein, 9 aa, Artificial Sequence
  Description of Artificial Sequence: Synthetic peptide
  Seed: QQRASAGQI
QHRASAGQF

SEQ ID NO: 11479 - protein, 9 aa, Artificial Sequence
  Description of Artificial Sequence: Synthetic peptide
  Seed: QQRASAGQI
QHRASAGQY

SEQ ID NO: 11480 - protein, 9 aa, Artificial Sequence
  Description of Artificial Sequence: Synthetic peptide
  Seed: QQRASAGQI
QIRASAGQF

SEQ ID NO: 11481 - protein, 9 aa, Artificial Sequence
  Description of Artificial Sequence: Synthetic peptide
  Seed: QQRASAGQI
QIRASAGQY

SEQ ID NO: 11482 - protein, 9 aa, Artificial Sequence
  Description of Artificial Sequence: Synthetic peptide
  Seed: QQRASAGQI
QLRASAGQM

SEQ ID NO: 11483 - protein, 9 aa, Artificial Sequence
  Description of Artificial Sequence: Synthetic peptide
  Seed: QQRASAGQI
QLRASAGQF

SEQ ID NO: 11484 - protein, 9 aa, Artificial Sequence
  Description of Artificial Sequence: Synthetic peptide
  Seed: QQRASAGQI
QKRASAGQM

SEQ ID NO: 11485 - protein, 10 aa, Artificial Sequence
  Description of Artificial Sequence: Synthetic peptide
  Seed: QRTRALVRTG
QETRALVRTK

SEQ ID NO: 11486 - protein, 9 aa, Artificial Sequence
  Description of Artificial Sequence: Synthetic peptide
  Seed: QQRASAGQI
QKRASAGQF

SEQ ID NO: 11487 - protein, 9 aa, Artificial Sequence
  Description of Artificial Sequence: Synthetic peptide
  Seed: QQRASAGQI
QKRASAGQY

SEQ ID NO: 11488 - protein, 9 aa, Artificial Sequence
  Description of Artificial Sequence: Synthetic peptide
  Seed: QQRASAGQI
QMRASAGQL

SEQ ID NO: 11489 - protein, 9 aa, Artificial Sequence
  Description of Artificial Sequence: Synthetic peptide
  Seed: QQRASAGQI
QMRASAGQM

SEQ ID NO: 11490 - protein, 9 aa, Artificial Sequence
  Description of Artificial Sequence: Synthetic peptide
  Seed: QQRASAGQI
QMRASAGQF

SEQ ID NO: 11491 - protein, 9 aa, Artificial Sequence
  Description of Artificial Sequence: Synthetic peptide
  Seed: QQRASAGQI
QMRASAGQW

SEQ ID NO: 11492 - protein, 9 aa, Artificial Sequence
  Description of Artificial Sequence: Synthetic peptide
  Seed: QQRASAGQI
QMRASAGQY

SEQ ID NO: 11493 - protein, 9 aa, Artificial Sequence
  Description of Artificial Sequence: Synthetic peptide
  Seed: QQRASAGQI
QSRASAGQF

SEQ ID NO: 11494 - protein, 9 aa, Artificial Sequence
  Description of Artificial Sequence: Synthetic peptide
  Seed: QQRASAGQI
QSRASAGQY

SEQ ID NO: 11495 - protein, 9 aa, Artificial Sequence
  Description of Artificial Sequence: Synthetic peptide
  Seed: QQRASAGQI
QERASAGQM

SEQ ID NO: 11496 - protein, 9 aa, Artificial Sequence
  Description of Artificial Sequence: Synthetic peptide
  Seed: QQRASAGQI
QQRASAGQY

SEQ ID NO: 11497 - protein, 9 aa, Artificial Sequence
  Description of Artificial Sequence: Synthetic peptide
  Seed: QQRASAGQI
QQRASAGQW

SEQ ID NO: 11498 - protein, 10 aa, Artificial Sequence
  Description of Artificial Sequence: Synthetic peptide
  Seed: QNSQVYSLIR
QTSQVYSLIK

SEQ ID NO: 11499 - protein, 10 aa, Artificial Sequence
  Description of Artificial Sequence: Synthetic peptide
  Seed: QNSQVYSLIR
QTSQVYSLIY

SEQ ID NO: 11500 - protein, 10 aa, Artificial Sequence
  Description of Artificial Sequence: Synthetic peptide
  Seed: QNSQVYSLIR
QWSQVYSLIR

SEQ ID NO: 11501 - protein, 10 aa, Artificial Sequence
  Description of Artificial Sequence: Synthetic peptide
  Seed: QNSQVYSLIR
QWSQVYSLIK

SEQ ID NO: 11502 - protein, 10 aa, Artificial Sequence
  Description of Artificial Sequence: Synthetic peptide
  Seed: QNSQVYSLIR
QYSQVYSLIR

SEQ ID NO: 11503 - protein, 10 aa, Artificial Sequence
  Description of Artificial Sequence: Synthetic peptide
  Seed: QNSQVYSLIR
QYSQVYSLIK

SEQ ID NO: 11504 - protein, 10 aa, Artificial Sequence
  Description of Artificial Sequence: Synthetic peptide
  Seed: QNSQVYSLIR
QVSQVYSLIR

SEQ ID NO: 11505 - protein, 10 aa, Artificial Sequence
  Description of Artificial Sequence: Synthetic peptide
  Seed: QNSQVYSLIR
QVSQVYSLIK

SEQ ID NO: 11506 - protein, 10 aa, Artificial Sequence
  Description of Artificial Sequence: Synthetic peptide
  Seed: QNSQVYSLIR
QVSQVYSLIY

SEQ ID NO: 11507 - protein, 9 aa, Artificial Sequence
  Description of Artificial Sequence: Synthetic peptide
  Seed: QQRASAGQI
QARASAGQF

SEQ ID NO: 11508 - protein, 9 aa, Artificial Sequence
  Description of Artificial Sequence: Synthetic peptide
  Seed: QQRASAGQI
QARASAGQY

SEQ ID NO: 11509 - protein, 9 aa, Artificial Sequence
  Description of Artificial Sequence: Synthetic peptide
  Seed: QQRASAGQI
QRRASAGQF

SEQ ID NO: 11510 - protein, 9 aa, Artificial Sequence
  Description of Artificial Sequence: Synthetic peptide
  Seed: QQRASAGQI
QRRASAGQY

SEQ ID NO: 11511 - protein, 9 aa, Artificial Sequence
  Description of Artificial Sequence: Synthetic peptide
  Seed: QQRASAGQI
QNRASAGQF

SEQ ID NO: 11512 - protein, 9 aa, Artificial Sequence
  Description of Artificial Sequence: Synthetic peptide
  Seed: QQRASAGQI
QQRASAGQH

SEQ ID NO: 11513 - protein, 9 aa, Artificial Sequence
  Description of Artificial Sequence: Synthetic peptide
  Seed: QQRASAGQI
QQRASAGQL

SEQ ID NO: 11514 - protein, 9 aa, Artificial Sequence
  Description of Artificial Sequence: Synthetic peptide
  Seed: QQRASAGQI
QQRASAGQM

SEQ ID NO: 11515 - protein, 9 aa, Artificial Sequence
  Description of Artificial Sequence: Synthetic peptide
  Seed: QQRASAGQI
QQRASAGQF

SEQ ID NO: 11516 - protein, 9 aa, Artificial Sequence
  Description of Artificial Sequence: Synthetic peptide
  Seed: QQRASAGQI
QTRASAGQF

SEQ ID NO: 11517 - protein, 9 aa, Artificial Sequence
  Description of Artificial Sequence: Synthetic peptide
  Seed: QQRASAGQI
QVRASAGQF

SEQ ID NO: 11518 - protein, 9 aa, Artificial Sequence
  Description of Artificial Sequence: Synthetic peptide
  Seed: QQRASAGQI
QVRASAGQY

SEQ ID NO: 11519 - protein, 10 aa, Artificial Sequence
  Description of Artificial Sequence: Synthetic peptide
  Seed: QRTRALVRTG
QRTRALVRTT

SEQ ID NO: 11520 - protein, 10 aa, Artificial Sequence
  Description of Artificial Sequence: Synthetic peptide
  Seed: QRTRALVRTG
QRTRALVRTV

SEQ ID NO: 11521 - protein, 10 aa, Artificial Sequence
  Description of Artificial Sequence: Synthetic peptide
  Seed: QRTRALVRTG
QNTRALVRTA

SEQ ID NO: 11522 - protein, 10 aa, Artificial Sequence
  Description of Artificial Sequence: Synthetic peptide
  Seed: QRTRALVRTG
QNTRALVRTI

SEQ ID NO: 11523 - protein, 10 aa, Artificial Sequence
  Description of Artificial Sequence: Synthetic peptide
  Seed: QRTRALVRTG
QNTRALVRTK

SEQ ID NO: 11524 - protein, 10 aa, Artificial Sequence
  Description of Artificial Sequence: Synthetic peptide
  Seed: QRTRALVRTG
QNTRALVRTV

SEQ ID NO: 11525 - protein, 10 aa, Artificial Sequence
  Description of Artificial Sequence: Synthetic peptide
  Seed: QRTRALVRTG
QDTRALVRTA

SEQ ID NO: 11526 - protein, 10 aa, Artificial Sequence
  Description of Artificial Sequence: Synthetic peptide
  Seed: QRTRALVRTG
QDTRALVRTI

SEQ ID NO: 11527 - protein, 10 aa, Artificial Sequence
  Description of Artificial Sequence: Synthetic peptide
  Seed: QRTRALVRTG
QDTRALVRTK

SEQ ID NO: 11528 - protein, 10 aa, Artificial Sequence
  Description of Artificial Sequence: Synthetic peptide
  Seed: QRTRALVRTG
QDTRALVRTV

SEQ ID NO: 11529 - protein, 10 aa, Artificial Sequence
  Description of Artificial Sequence: Synthetic peptide
  Seed: QRTRALVRTG
QCTRALVRTA

SEQ ID NO: 11530 - protein, 10 aa, Artificial Sequence
  Description of Artificial Sequence: Synthetic peptide
  Seed: QRTRALVRTG
QCTRALVRTI

SEQ ID NO: 11531 - protein, 10 aa, Artificial Sequence
  Description of Artificial Sequence: Synthetic peptide
  Seed: QRTRALVRTG
QCTRALVRTK

SEQ ID NO: 11532 - protein, 10 aa, Artificial Sequence
  Description of Artificial Sequence: Synthetic peptide
  Seed: QRTRALVRTG
QCTRALVRTV

SEQ ID NO: 11533 - protein, 10 aa, Artificial Sequence
  Description of Artificial Sequence: Synthetic peptide
  Seed: QRTRALVRTG
QQTRALVRTA

SEQ ID NO: 11534 - protein, 10 aa, Artificial Sequence
  Description of Artificial Sequence: Synthetic peptide
  Seed: QRTRALVRTG
QQTRALVRTI

SEQ ID NO: 11535 - protein, 10 aa, Artificial Sequence
  Description of Artificial Sequence: Synthetic peptide
  Seed: QRTRALVRTG
QQTRALVRTK

SEQ ID NO: 11536 - protein, 10 aa, Artificial Sequence
  Description of Artificial Sequence: Synthetic peptide
  Seed: QRTRALVRTG
QQTRALVRTV

SEQ ID NO: 11537 - protein, 10 aa, Artificial Sequence
  Description of Artificial Sequence: Synthetic peptide
  Seed: QRTRALVRTG
QETRALVRTA

SEQ ID NO: 11538 - protein, 10 aa, Artificial Sequence
  Description of Artificial Sequence: Synthetic peptide
  Seed: QRTRALVRTG
QETRALVRTI

SEQ ID NO: 11539 - protein, 10 aa, Artificial Sequence
  Description of Artificial Sequence: Synthetic peptide
  Seed: QRTRALVRTG
QRTRALVRTY

SEQ ID NO: 11540 - protein, 10 aa, Artificial Sequence
  Description of Artificial Sequence: Synthetic peptide
  Seed: QRTRALVRTG
QRTRALVRTS

SEQ ID NO: 11541 - protein, 10 aa, Artificial Sequence
  Description of Artificial Sequence: Synthetic peptide
  Seed: QRASAGQISI
QRASAGQISL

SEQ ID NO: 11542 - protein, 10 aa, Artificial Sequence
  Description of Artificial Sequence: Synthetic peptide
  Seed: QRTRALVRTG
QRTRALVRTF

SEQ ID NO: 11543 - protein, 10 aa, Artificial Sequence
  Description of Artificial Sequence: Synthetic peptide
  Seed: QRASAGQISI
QRASAGQISM

SEQ ID NO: 11544 - protein, 10 aa, Artificial Sequence
  Description of Artificial Sequence: Synthetic peptide
  Seed: QRASAGQISI
QRASAGQISF

SEQ ID NO: 11545 - protein, 10 aa, Artificial Sequence
  Description of Artificial Sequence: Synthetic peptide
  Seed: QRTRALVRTG
QATRALVRTA

SEQ ID NO: 11546 - protein, 10 aa, Artificial Sequence
  Description of Artificial Sequence: Synthetic peptide
  Seed: QRTRALVRTG
QATRALVRTI

SEQ ID NO: 11547 - protein, 10 aa, Artificial Sequence
  Description of Artificial Sequence: Synthetic peptide
  Seed: QRTRALVRTG
QATRALVRTL

SEQ ID NO: 11548 - protein, 10 aa, Artificial Sequence
  Description of Artificial Sequence: Synthetic peptide
  Seed: QRTRALVRTG
QATRALVRTK

SEQ ID NO: 11549 - protein, 10 aa, Artificial Sequence
  Description of Artificial Sequence: Synthetic peptide
  Seed: QRTRALVRTG
QATRALVRTM

SEQ ID NO: 11550 - protein, 10 aa, Artificial Sequence
  Description of Artificial Sequence: Synthetic peptide
  Seed: QRTRALVRTG
QATRALVRTV

SEQ ID NO: 11551 - protein, 10 aa, Artificial Sequence
  Description of Artificial Sequence: Synthetic peptide
  Seed: QRTRALVRTG
QRTRALVRTA

SEQ ID NO: 11552 - protein, 10 aa, Artificial Sequence
  Description of Artificial Sequence: Synthetic peptide
  Seed: QRTRALVRTG
QRTRALVRTR

SEQ ID NO: 11553 - protein, 10 aa, Artificial Sequence
  Description of Artificial Sequence: Synthetic peptide
  Seed: QRTRALVRTG
QRTRALVRTI

SEQ ID NO: 11554 - protein, 10 aa, Artificial Sequence
  Description of Artificial Sequence: Synthetic peptide
  Seed: QRTRALVRTG
QRTRALVRTL

SEQ ID NO: 11555 - protein, 10 aa, Artificial Sequence
  Description of Artificial Sequence: Synthetic peptide
  Seed: QRTRALVRTG
QRTRALVRTK

SEQ ID NO: 11556 - protein, 10 aa, Artificial Sequence
  Description of Artificial Sequence: Synthetic peptide
  Seed: QRTRALVRTG
QRTRALVRTM

SEQ ID NO: 11557 - protein, 9 aa, Artificial Sequence
  Description of Artificial Sequence: Synthetic peptide
  Seed: RASVGRMIG
RHSVGRMIK

SEQ ID NO: 11558 - protein, 9 aa, Artificial Sequence
  Description of Artificial Sequence: Synthetic peptide
  Seed: RASVGRMIG
RISVGRMIR

SEQ ID NO: 11559 - protein, 10 aa, Artificial Sequence
  Description of Artificial Sequence: Synthetic peptide
  Seed: RESRNPGNAE
RFSRNPGNAG

SEQ ID NO: 11560 - protein, 8 aa, Artificial Sequence
  Description of Artificial Sequence: Synthetic peptide
  Seed: RATVMAAF
RVTVMAAW

SEQ ID NO: 11561 - protein, 8 aa, Artificial Sequence
  Description of Artificial Sequence: Synthetic peptide
  Seed: RATVMAAF
RSTVMAAY

SEQ ID NO: 11562 - protein, 8 aa, Artificial Sequence
  Description of Artificial Sequence: Synthetic peptide
  Seed: RATVMAAF
RTTVMAAL

SEQ ID NO: 11563 - protein, 8 aa, Artificial Sequence
  Description of Artificial Sequence: Synthetic peptide
  Seed: RATVMAAF
RTTVMAAM

SEQ ID NO: 11564 - protein, 8 aa, Artificial Sequence
  Description of Artificial Sequence: Synthetic peptide
  Seed: RATVMAAF
RTTVMAAW

SEQ ID NO: 11565 - protein, 8 aa, Artificial Sequence
  Description of Artificial Sequence: Synthetic peptide
  Seed: RATVMAAF
RTTVMAAY

SEQ ID NO: 11566 - protein, 8 aa, Artificial Sequence
  Description of Artificial Sequence: Synthetic peptide
  Seed: RATVMAAF
RYTVMAAF

SEQ ID NO: 11567 - protein, 8 aa, Artificial Sequence
  Description of Artificial Sequence: Synthetic peptide
  Seed: RATVMAAF
RYTVMAAY

SEQ ID NO: 11568 - protein, 8 aa, Artificial Sequence
  Description of Artificial Sequence: Synthetic peptide
  Seed: RATVMAAF
RVTVMAAF

SEQ ID NO: 11569 - protein, 8 aa, Artificial Sequence
  Description of Artificial Sequence: Synthetic peptide
  Seed: RATVMAAF
RVTVMAAY

SEQ ID NO: 11570 - protein, 11 aa, Artificial Sequence
  Description of Artificial Sequence: Synthetic peptide
  Seed: RELILYDKEEI
RELILYDKEEL

SEQ ID NO: 11571 - protein, 9 aa, Artificial Sequence
  Description of Artificial Sequence: Synthetic peptide
  Seed: REGYSLVGI
RQGYSLVGF

SEQ ID NO: 11572 - protein, 9 aa, Artificial Sequence
  Description of Artificial Sequence: Synthetic peptide
  Seed: REGYSLVGI
RQGYSLVGY

SEQ ID NO: 11573 - protein, 9 aa, Artificial Sequence
  Description of Artificial Sequence: Synthetic peptide
  Seed: REGYSLVGI
REGYSLVGA

SEQ ID NO: 11574 - protein, 9 aa, Artificial Sequence
  Description of Artificial Sequence: Synthetic peptide
  Seed: REGYSLVGI
REGYSLVGL

SEQ ID NO: 11575 - protein, 9 aa, Artificial Sequence
  Description of Artificial Sequence: Synthetic peptide
  Seed: REGYSLVGI
REGYSLVGM

SEQ ID NO: 11576 - protein, 9 aa, Artificial Sequence
  Description of Artificial Sequence: Synthetic peptide
  Seed: REGYSLVGI
REGYSLVGF

SEQ ID NO: 11577 - protein, 9 aa, Artificial Sequence
  Description of Artificial Sequence: Synthetic peptide
  Seed: REGYSLVGI
REGYSLVGP

SEQ ID NO: 11578 - protein, 9 aa, Artificial Sequence
  Description of Artificial Sequence: Synthetic peptide
  Seed: REGYSLVGI
REGYSLVGT

SEQ ID NO: 11579 - protein, 9 aa, Artificial Sequence
  Description of Artificial Sequence: Synthetic peptide
  Seed: REGYSLVGI
REGYSLVGY

SEQ ID NO: 11580 - protein, 8 aa, Artificial Sequence
  Description of Artificial Sequence: Synthetic peptide
  Seed: RATVMAAF
RSTVMAAW

SEQ ID NO: 11581 - protein, 8 aa, Artificial Sequence
  Description of Artificial Sequence: Synthetic peptide
  Seed: RATVMAAF
RSTVMAAF

SEQ ID NO: 11582 - protein, 8 aa, Artificial Sequence
  Description of Artificial Sequence: Synthetic peptide
  Seed: RATVMAAF
RSTVMAAM

SEQ ID NO: 11583 - protein, 8 aa, Artificial Sequence
  Description of Artificial Sequence: Synthetic peptide
  Seed: RATVMAAF
RSTVMAAL

SEQ ID NO: 11584 - protein, 8 aa, Artificial Sequence
  Description of Artificial Sequence: Synthetic peptide
  Seed: RATVMAAF
RQTVMAAY

SEQ ID NO: 11585 - protein, 8 aa, Artificial Sequence
  Description of Artificial Sequence: Synthetic peptide
  Seed: RATVMAAF
RQTVMAAV

SEQ ID NO: 11586 - protein, 8 aa, Artificial Sequence
  Description of Artificial Sequence: Synthetic peptide
  Seed: RATVMAAF
RETVMAAF

SEQ ID NO: 11587 - protein, 8 aa, Artificial Sequence
  Description of Artificial Sequence: Synthetic peptide
  Seed: RATVMAAF
RETVMAAY

SEQ ID NO: 11588 - protein, 8 aa, Artificial Sequence
  Description of Artificial Sequence: Synthetic peptide
  Seed: RATVMAAF
RHTVMAAF

SEQ ID NO: 11589 - protein, 8 aa, Artificial Sequence
  Description of Artificial Sequence: Synthetic peptide
  Seed: RATVMAAF
RHTVMAAY

SEQ ID NO: 11590 - protein, 8 aa, Artificial Sequence
  Description of Artificial Sequence: Synthetic peptide
  Seed: RATVMAAF
RITVMAAF

SEQ ID NO: 11591 - protein, 8 aa, Artificial Sequence
  Description of Artificial Sequence: Synthetic peptide
  Seed: RATVMAAF
RITVMAAY

SEQ ID NO: 11592 - protein, 8 aa, Artificial Sequence
  Description of Artificial Sequence: Synthetic peptide
  Seed: RATVMAAF
RLTVMAAF

SEQ ID NO: 11593 - protein, 8 aa, Artificial Sequence
  Description of Artificial Sequence: Synthetic peptide
  Seed: RATVMAAF
RLTVMAAY

SEQ ID NO: 11594 - protein, 8 aa, Artificial Sequence
  Description of Artificial Sequence: Synthetic peptide
  Seed: RATVMAAF
RKTVMAAM

SEQ ID NO: 11595 - protein, 8 aa, Artificial Sequence
  Description of Artificial Sequence: Synthetic peptide
  Seed: RATVMAAF
RKTVMAAF

SEQ ID NO: 11596 - protein, 8 aa, Artificial Sequence
  Description of Artificial Sequence: Synthetic peptide
  Seed: RATVMAAF
RKTVMAAY

SEQ ID NO: 11597 - protein, 8 aa, Artificial Sequence
  Description of Artificial Sequence: Synthetic peptide
  Seed: RATVMAAF
RMTVMAAL

SEQ ID NO: 11598 - protein, 8 aa, Artificial Sequence
  Description of Artificial Sequence: Synthetic peptide
  Seed: RATVMAAF
RMTVMAAM

SEQ ID NO: 11599 - protein, 8 aa, Artificial Sequence
  Description of Artificial Sequence: Synthetic peptide
  Seed: RATVMAAF
RMTVMAAF

SEQ ID NO: 11600 - protein, 8 aa, Artificial Sequence
  Description of Artificial Sequence: Synthetic peptide
  Seed: RATVMAAF
RMTVMAAY

SEQ ID NO: 11601 - protein, 8 aa, Artificial Sequence
  Description of Artificial Sequence: Synthetic peptide
  Seed: RATVMAAF
RFTVMAAF

SEQ ID NO: 11602 - protein, 8 aa, Artificial Sequence
  Description of Artificial Sequence: Synthetic peptide
  Seed: RATVMAAF
RFTVMAAY

SEQ ID NO: 11603 - protein, 8 aa, Artificial Sequence
  Description of Artificial Sequence: Synthetic peptide
  Seed: RATVMAAF
RQTVMAAF

SEQ ID NO: 11604 - protein, 10 aa, Artificial Sequence
  Description of Artificial Sequence: Synthetic peptide
  Seed: RESRNPGNAE
RRSRNPGNAS

SEQ ID NO: 11605 - protein, 10 aa, Artificial Sequence
  Description of Artificial Sequence: Synthetic peptide
  Seed: RESRNPGNAE
RRSRNPGNAQ

SEQ ID NO: 11606 - protein, 10 aa, Artificial Sequence
  Description of Artificial Sequence: Synthetic peptide
  Seed: RESRNPGNAE
RRSRNPGNAE

SEQ ID NO: 11607 - protein, 10 aa, Artificial Sequence
  Description of Artificial Sequence: Synthetic peptide
  Seed: RESRNPGNAE
RRSRNPGNAG

SEQ ID NO: 11608 - protein, 10 aa, Artificial Sequence
  Description of Artificial Sequence: Synthetic peptide
  Seed: RESRNPGNAE
RRSRNPGNAI

SEQ ID NO: 11609 - protein, 10 aa, Artificial Sequence
  Description of Artificial Sequence: Synthetic peptide
  Seed: RESRNPGNAE
RRSRNPGNAL

SEQ ID NO: 11610 - protein, 10 aa, Artificial Sequence
  Description of Artificial Sequence: Synthetic peptide
  Seed: RESRNPGNAE
RRSRNPGNAK

SEQ ID NO: 11611 - protein, 10 aa, Artificial Sequence
  Description of Artificial Sequence: Synthetic peptide
  Seed: RESRNPGNAE
RRSRNPGNAM

SEQ ID NO: 11612 - protein, 10 aa, Artificial Sequence
  Description of Artificial Sequence: Synthetic peptide
  Seed: RESRNPGNAE
RRSRNPGNAF

SEQ ID NO: 11613 - protein, 10 aa, Artificial Sequence
  Description of Artificial Sequence: Synthetic peptide
  Seed: RESRNPGNAE
RRSRNPGNAP

SEQ ID NO: 11614 - protein, 10 aa, Artificial Sequence
  Description of Artificial Sequence: Synthetic peptide
  Seed: RESRNPGNAE
RRSRNPGNAT

SEQ ID NO: 11615 - protein, 10 aa, Artificial Sequence
  Description of Artificial Sequence: Synthetic peptide
  Seed: RESRNPGNAE
RRSRNPGNAY

SEQ ID NO: 11616 - protein, 10 aa, Artificial Sequence
  Description of Artificial Sequence: Synthetic peptide
  Seed: RESRNPGNAE
RRSRNPGNAV

SEQ ID NO: 11617 - protein, 10 aa, Artificial Sequence
  Description of Artificial Sequence: Synthetic peptide
  Seed: RESRNPGNAE
RNSRNPGNAA

SEQ ID NO: 11618 - protein, 10 aa, Artificial Sequence
  Description of Artificial Sequence: Synthetic peptide
  Seed: RESRNPGNAE
RNSRNPGNAR

SEQ ID NO: 11619 - protein, 10 aa, Artificial Sequence
  Description of Artificial Sequence: Synthetic peptide
  Seed: RESRNPGNAE
RNSRNPGNAN

SEQ ID NO: 11620 - protein, 10 aa, Artificial Sequence
  Description of Artificial Sequence: Synthetic peptide
  Seed: RESRNPGNAE
RNSRNPGNAC

SEQ ID NO: 11621 - protein, 10 aa, Artificial Sequence
  Description of Artificial Sequence: Synthetic peptide
  Seed: RESRNPGNAE
RNSRNPGNAQ

SEQ ID NO: 11622 - protein, 10 aa, Artificial Sequence
  Description of Artificial Sequence: Synthetic peptide
  Seed: RESRNPGNAE
RNSRNPGNAE

SEQ ID NO: 11623 - protein, 10 aa, Artificial Sequence
  Description of Artificial Sequence: Synthetic peptide
  Seed: RESRNPGNAE
RNSRNPGNAG

SEQ ID NO: 11624 - protein, 10 aa, Artificial Sequence
  Description of Artificial Sequence: Synthetic peptide
  Seed: RESRNPGNAE
RRSRNPGNAC

SEQ ID NO: 11625 - protein, 10 aa, Artificial Sequence
  Description of Artificial Sequence: Synthetic peptide
  Seed: RESRNPGNAE
RRSRNPGNAN

SEQ ID NO: 11626 - protein, 10 aa, Artificial Sequence
  Description of Artificial Sequence: Synthetic peptide
  Seed: RESRNPGNAE
RRSRNPGNAR

SEQ ID NO: 11627 - protein, 10 aa, Artificial Sequence
  Description of Artificial Sequence: Synthetic peptide
  Seed: RESRNPGNAE
RRSRNPGNAA

SEQ ID NO: 11628 - protein, 10 aa, Artificial Sequence
  Description of Artificial Sequence: Synthetic peptide
  Seed: RESRNPGNAE
RASRNPGNAA

SEQ ID NO: 11629 - protein, 10 aa, Artificial Sequence
  Description of Artificial Sequence: Synthetic peptide
  Seed: RESRNPGNAE
RASRNPGNAR

SEQ ID NO: 11630 - protein, 10 aa, Artificial Sequence
  Description of Artificial Sequence: Synthetic peptide
  Seed: RESRNPGNAE
RASRNPGNAN

SEQ ID NO: 11631 - protein, 10 aa, Artificial Sequence
  Description of Artificial Sequence: Synthetic peptide
  Seed: RESRNPGNAE
RASRNPGNAC

SEQ ID NO: 11632 - protein, 10 aa, Artificial Sequence
  Description of Artificial Sequence: Synthetic peptide
  Seed: RESRNPGNAE
RASRNPGNAQ

SEQ ID NO: 11633 - protein, 10 aa, Artificial Sequence
  Description of Artificial Sequence: Synthetic peptide
  Seed: RESRNPGNAE
RASRNPGNAE

SEQ ID NO: 11634 - protein, 10 aa, Artificial Sequence
  Description of Artificial Sequence: Synthetic peptide
  Seed: RESRNPGNAE
RASRNPGNAG

SEQ ID NO: 11635 - protein, 10 aa, Artificial Sequence
  Description of Artificial Sequence: Synthetic peptide
  Seed: RESRNPGNAE
RASRNPGNAH

SEQ ID NO: 11636 - protein, 10 aa, Artificial Sequence
  Description of Artificial Sequence: Synthetic peptide
  Seed: RESRNPGNAE
RASRNPGNAI

SEQ ID NO: 11637 - protein, 10 aa, Artificial Sequence
  Description of Artificial Sequence: Synthetic peptide
  Seed: RESRNPGNAE
RASRNPGNAL

SEQ ID NO: 11638 - protein, 10 aa, Artificial Sequence
  Description of Artificial Sequence: Synthetic peptide
  Seed: RESRNPGNAE
RASRNPGNAK

SEQ ID NO: 11639 - protein, 10 aa, Artificial Sequence
  Description of Artificial Sequence: Synthetic peptide
  Seed: RESRNPGNAE
RASRNPGNAM

SEQ ID NO: 11640 - protein, 10 aa, Artificial Sequence
  Description of Artificial Sequence: Synthetic peptide
  Seed: RESRNPGNAE
RASRNPGNAF

SEQ ID NO: 11641 - protein, 10 aa, Artificial Sequence
  Description of Artificial Sequence: Synthetic peptide
  Seed: RESRNPGNAE
RASRNPGNAP

SEQ ID NO: 11642 - protein, 10 aa, Artificial Sequence
  Description of Artificial Sequence: Synthetic peptide
  Seed: RESRNPGNAE
RASRNPGNAS

SEQ ID NO: 11643 - protein, 10 aa, Artificial Sequence
  Description of Artificial Sequence: Synthetic peptide
  Seed: RESRNPGNAE
RASRNPGNAT

SEQ ID NO: 11644 - protein, 10 aa, Artificial Sequence
  Description of Artificial Sequence: Synthetic peptide
  Seed: RESRNPGNAE
RASRNPGNAY

SEQ ID NO: 11645 - protein, 10 aa, Artificial Sequence
  Description of Artificial Sequence: Synthetic peptide
  Seed: RESRNPGNAE
RASRNPGNAV

SEQ ID NO: 11646 - protein, 8 aa, Artificial Sequence
  Description of Artificial Sequence: Synthetic peptide
  Seed: RATVMAAF
RQTVMAAW

SEQ ID NO: 11647 - protein, 8 aa, Artificial Sequence
  Description of Artificial Sequence: Synthetic peptide
  Seed: RATVMAAF
RQTVMAAM

SEQ ID NO: 11648 - protein, 10 aa, Artificial Sequence
  Description of Artificial Sequence: Synthetic peptide
  Seed: RESRNPGNAE
RNSRNPGNAL

SEQ ID NO: 11649 - protein, 10 aa, Artificial Sequence
  Description of Artificial Sequence: Synthetic peptide
  Seed: RATIMAAFTG
RFTIMAAFTV

SEQ ID NO: 11650 - protein, 10 aa, Artificial Sequence
  Description of Artificial Sequence: Synthetic peptide
  Seed: RATIMAAFTG
RMTIMAAFTY

SEQ ID NO: 11651 - protein, 10 aa, Artificial Sequence
  Description of Artificial Sequence: Synthetic peptide
  Seed: RATIMAAFTG
RMTIMAAFTV

SEQ ID NO: 11652 - protein, 10 aa, Artificial Sequence
  Description of Artificial Sequence: Synthetic peptide
  Seed: RATIMAAFTG
RFTIMAAFTG

SEQ ID NO: 11653 - protein, 10 aa, Artificial Sequence
  Description of Artificial Sequence: Synthetic peptide
  Seed: RATIMAAFTG
RFTIMAAFTI

SEQ ID NO: 11654 - protein, 10 aa, Artificial Sequence
  Description of Artificial Sequence: Synthetic peptide
  Seed: RATIMAAFTG
RFTIMAAFTL

SEQ ID NO: 11655 - protein, 10 aa, Artificial Sequence
  Description of Artificial Sequence: Synthetic peptide
  Seed: RATIMAAFTG
RFTIMAAFTM

SEQ ID NO: 11656 - protein, 10 aa, Artificial Sequence
  Description of Artificial Sequence: Synthetic peptide
  Seed: RATIMAAFTG
RFTIMAAFTF

SEQ ID NO: 11657 - protein, 10 aa, Artificial Sequence
  Description of Artificial Sequence: Synthetic peptide
  Seed: RATIMAAFTG
RFTIMAAFTW

SEQ ID NO: 11658 - protein, 10 aa, Artificial Sequence
  Description of Artificial Sequence: Synthetic peptide
  Seed: RATIMAAFTG
RFTIMAAFTY

SEQ ID NO: 11659 - protein, 10 aa, Artificial Sequence
  Description of Artificial Sequence: Synthetic peptide
  Seed: RATIMAAFTG
RPTIMAAFTI

SEQ ID NO: 11660 - protein, 10 aa, Artificial Sequence
  Description of Artificial Sequence: Synthetic peptide
  Seed: RATIMAAFTG
RPTIMAAFTL

SEQ ID NO: 11661 - protein, 10 aa, Artificial Sequence
  Description of Artificial Sequence: Synthetic peptide
  Seed: RATIMAAFTG
RPTIMAAFTM

SEQ ID NO: 11662 - protein, 10 aa, Artificial Sequence
  Description of Artificial Sequence: Synthetic peptide
  Seed: RATIMAAFTG
RPTIMAAFTF

SEQ ID NO: 11663 - protein, 10 aa, Artificial Sequence
  Description of Artificial Sequence: Synthetic peptide
  Seed: RATIMAAFTG
RPTIMAAFTW

SEQ ID NO: 11664 - protein, 10 aa, Artificial Sequence
  Description of Artificial Sequence: Synthetic peptide
  Seed: RATIMAAFTG
RPTIMAAFTY

SEQ ID NO: 11665 - protein, 10 aa, Artificial Sequence
  Description of Artificial Sequence: Synthetic peptide
  Seed: RATIMAAFTG
RPTIMAAFTV

SEQ ID NO: 11666 - protein, 10 aa, Artificial Sequence
  Description of Artificial Sequence: Synthetic peptide
  Seed: RATIMAAFTG
RSTIMAAFTA

SEQ ID NO: 11667 - protein, 10 aa, Artificial Sequence
  Description of Artificial Sequence: Synthetic peptide
  Seed: RATIMAAFTG
RSTIMAAFTN

SEQ ID NO: 11668 - protein, 10 aa, Artificial Sequence
  Description of Artificial Sequence: Synthetic peptide
  Seed: RATIMAAFTG
RMTIMAAFTW

SEQ ID NO: 11669 - protein, 10 aa, Artificial Sequence
  Description of Artificial Sequence: Synthetic peptide
  Seed: RATIMAAFTG
RMTIMAAFTF

SEQ ID NO: 11670 - protein, 10 aa, Artificial Sequence
  Description of Artificial Sequence: Synthetic peptide
  Seed: RATIMAAFTG
RMTIMAAFTM

SEQ ID NO: 11671 - protein, 10 aa, Artificial Sequence
  Description of Artificial Sequence: Synthetic peptide
  Seed: RATIMAAFTG
RMTIMAAFTL

SEQ ID NO: 11672 - protein, 10 aa, Artificial Sequence
  Description of Artificial Sequence: Synthetic peptide
  Seed: RATIMAAFTG
RITIMAAFTV

SEQ ID NO: 11673 - protein, 10 aa, Artificial Sequence
  Description of Artificial Sequence: Synthetic peptide
  Seed: RATIMAAFTG
RLTIMAAFTG

SEQ ID NO: 11674 - protein, 10 aa, Artificial Sequence
  Description of Artificial Sequence: Synthetic peptide
  Seed: RATIMAAFTG
RLTIMAAFTI

SEQ ID NO: 11675 - protein, 10 aa, Artificial Sequence
  Description of Artificial Sequence: Synthetic peptide
  Seed: RATIMAAFTG
RLTIMAAFTL

SEQ ID NO: 11676 - protein, 10 aa, Artificial Sequence
  Description of Artificial Sequence: Synthetic peptide
  Seed: RATIMAAFTG
RLTIMAAFTM

SEQ ID NO: 11677 - protein, 10 aa, Artificial Sequence
  Description of Artificial Sequence: Synthetic peptide
  Seed: RATIMAAFTG
RLTIMAAFTF

SEQ ID NO: 11678 - protein, 10 aa, Artificial Sequence
  Description of Artificial Sequence: Synthetic peptide
  Seed: RATIMAAFTG
RLTIMAAFTW

SEQ ID NO: 11679 - protein, 10 aa, Artificial Sequence
  Description of Artificial Sequence: Synthetic peptide
  Seed: RATIMAAFTG
RLTIMAAFTY

SEQ ID NO: 11680 - protein, 10 aa, Artificial Sequence
  Description of Artificial Sequence: Synthetic peptide
  Seed: RATIMAAFTG
RLTIMAAFTV

SEQ ID NO: 11681 - protein, 10 aa, Artificial Sequence
  Description of Artificial Sequence: Synthetic peptide
  Seed: RATIMAAFTG
RKTIMAAFTG

SEQ ID NO: 11682 - protein, 10 aa, Artificial Sequence
  Description of Artificial Sequence: Synthetic peptide
  Seed: RATIMAAFTG
RKTIMAAFTI

SEQ ID NO: 11683 - protein, 10 aa, Artificial Sequence
  Description of Artificial Sequence: Synthetic peptide
  Seed: RATIMAAFTG
RKTIMAAFTL

SEQ ID NO: 11684 - protein, 10 aa, Artificial Sequence
  Description of Artificial Sequence: Synthetic peptide
  Seed: RATIMAAFTG
RKTIMAAFTM

SEQ ID NO: 11685 - protein, 10 aa, Artificial Sequence
  Description of Artificial Sequence: Synthetic peptide
  Seed: RATIMAAFTG
RKTIMAAFTF

SEQ ID NO: 11686 - protein, 10 aa, Artificial Sequence
  Description of Artificial Sequence: Synthetic peptide
  Seed: RATIMAAFTG
RKTIMAAFTW

SEQ ID NO: 11687 - protein, 10 aa, Artificial Sequence
  Description of Artificial Sequence: Synthetic peptide
  Seed: RATIMAAFTG
RKTIMAAFTY

SEQ ID NO: 11688 - protein, 10 aa, Artificial Sequence
  Description of Artificial Sequence: Synthetic peptide
  Seed: RATIMAAFTG
RKTIMAAFTV

SEQ ID NO: 11689 - protein, 10 aa, Artificial Sequence
  Description of Artificial Sequence: Synthetic peptide
  Seed: RATIMAAFTG
RMTIMAAFTG

SEQ ID NO: 11690 - protein, 10 aa, Artificial Sequence
  Description of Artificial Sequence: Synthetic peptide
  Seed: RATIMAAFTG
RMTIMAAFTI

SEQ ID NO: 11691 - protein, 10 aa, Artificial Sequence
  Description of Artificial Sequence: Synthetic peptide
  Seed: RATIMAAFTG
RSTIMAAFTC

SEQ ID NO: 11692 - protein, 10 aa, Artificial Sequence
  Description of Artificial Sequence: Synthetic peptide
  Seed: RATIMAAFTG
RSTIMAAFTI

SEQ ID NO: 11693 - protein, 8 aa, Artificial Sequence
  Description of Artificial Sequence: Synthetic peptide
  Seed: RATVMAAF
RQTVMAAL

SEQ ID NO: 11694 - protein, 10 aa, Artificial Sequence
  Description of Artificial Sequence: Synthetic peptide
  Seed: RATIMAAFTG
RVTIMAAFTM

SEQ ID NO: 11695 - protein, 10 aa, Artificial Sequence
  Description of Artificial Sequence: Synthetic peptide
  Seed: RATIMAAFTG
RYTIMAAFTL

SEQ ID NO: 11696 - protein, 10 aa, Artificial Sequence
  Description of Artificial Sequence: Synthetic peptide
  Seed: RATIMAAFTG
RYTIMAAFTM

SEQ ID NO: 11697 - protein, 10 aa, Artificial Sequence
  Description of Artificial Sequence: Synthetic peptide
  Seed: RATIMAAFTG
RYTIMAAFTF

SEQ ID NO: 11698 - protein, 10 aa, Artificial Sequence
  Description of Artificial Sequence: Synthetic peptide
  Seed: RATIMAAFTG
RYTIMAAFTW

SEQ ID NO: 11699 - protein, 10 aa, Artificial Sequence
  Description of Artificial Sequence: Synthetic peptide
  Seed: RATIMAAFTG
RYTIMAAFTY

SEQ ID NO: 11700 - protein, 10 aa, Artificial Sequence
  Description of Artificial Sequence: Synthetic peptide
  Seed: RATIMAAFTG
RYTIMAAFTV

SEQ ID NO: 11701 - protein, 10 aa, Artificial Sequence
  Description of Artificial Sequence: Synthetic peptide
  Seed: RATIMAAFTG
RVTIMAAFTG

SEQ ID NO: 11702 - protein, 10 aa, Artificial Sequence
  Description of Artificial Sequence: Synthetic peptide
  Seed: RATIMAAFTG
RVTIMAAFTI

SEQ ID NO: 11703 - protein, 10 aa, Artificial Sequence
  Description of Artificial Sequence: Synthetic peptide
  Seed: RATIMAAFTG
RVTIMAAFTL

SEQ ID NO: 11704 - protein, 10 aa, Artificial Sequence
  Description of Artificial Sequence: Synthetic peptide
  Seed: RATIMAAFTG
RVTIMAAFTF

SEQ ID NO: 11705 - protein, 10 aa, Artificial Sequence
  Description of Artificial Sequence: Synthetic peptide
  Seed: RATIMAAFTG
RSTIMAAFTL

SEQ ID NO: 11706 - protein, 10 aa, Artificial Sequence
  Description of Artificial Sequence: Synthetic peptide
  Seed: RATIMAAFTG
RVTIMAAFTW

SEQ ID NO: 11707 - protein, 10 aa, Artificial Sequence
  Description of Artificial Sequence: Synthetic peptide
  Seed: RATIMAAFTG
RVTIMAAFTY

SEQ ID NO: 11708 - protein, 10 aa, Artificial Sequence
  Description of Artificial Sequence: Synthetic peptide
  Seed: RATIMAAFTG
RVTIMAAFTV

SEQ ID NO: 11709 - protein, 8 aa, Artificial Sequence
  Description of Artificial Sequence: Synthetic peptide
  Seed: RATVMAAF
RATVMAAL

SEQ ID NO: 11710 - protein, 8 aa, Artificial Sequence
  Description of Artificial Sequence: Synthetic peptide
  Seed: RATVMAAF
RATVMAAM

SEQ ID NO: 11711 - protein, 8 aa, Artificial Sequence
  Description of Artificial Sequence: Synthetic peptide
  Seed: RATVMAAF
RATVMAAW

SEQ ID NO: 11712 - protein, 8 aa, Artificial Sequence
  Description of Artificial Sequence: Synthetic peptide
  Seed: RATVMAAF
RATVMAAY

SEQ ID NO: 11713 - protein, 8 aa, Artificial Sequence
  Description of Artificial Sequence: Synthetic peptide
  Seed: RATVMAAF
RRTVMAAY

SEQ ID NO: 11714 - protein, 8 aa, Artificial Sequence
  Description of Artificial Sequence: Synthetic peptide
  Seed: RATVMAAF
RQTVMAAI

SEQ ID NO: 11715 - protein, 10 aa, Artificial Sequence
  Description of Artificial Sequence: Synthetic peptide
  Seed: RATIMAAFTG
RYTIMAAFTI

SEQ ID NO: 11716 - protein, 10 aa, Artificial Sequence
  Description of Artificial Sequence: Synthetic peptide
  Seed: RATIMAAFTG
RYTIMAAFTG

SEQ ID NO: 11717 - protein, 10 aa, Artificial Sequence
  Description of Artificial Sequence: Synthetic peptide
  Seed: RATIMAAFTG
RWTIMAAFTV

SEQ ID NO: 11718 - protein, 10 aa, Artificial Sequence
  Description of Artificial Sequence: Synthetic peptide
  Seed: RATIMAAFTG
RWTIMAAFTY

SEQ ID NO: 11719 - protein, 10 aa, Artificial Sequence
  Description of Artificial Sequence: Synthetic peptide
  Seed: RATIMAAFTG
RSTIMAAFTM

SEQ ID NO: 11720 - protein, 10 aa, Artificial Sequence
  Description of Artificial Sequence: Synthetic peptide
  Seed: RATIMAAFTG
RSTIMAAFTF

SEQ ID NO: 11721 - protein, 10 aa, Artificial Sequence
  Description of Artificial Sequence: Synthetic peptide
  Seed: RATIMAAFTG
RSTIMAAFTW

SEQ ID NO: 11722 - protein, 10 aa, Artificial Sequence
  Description of Artificial Sequence: Synthetic peptide
  Seed: RATIMAAFTG
RSTIMAAFTY

SEQ ID NO: 11723 - protein, 10 aa, Artificial Sequence
  Description of Artificial Sequence: Synthetic peptide
  Seed: RATIMAAFTG
RSTIMAAFTV

SEQ ID NO: 11724 - protein, 10 aa, Artificial Sequence
  Description of Artificial Sequence: Synthetic peptide
  Seed: RATIMAAFTG
RTTIMAAFTI

SEQ ID NO: 11725 - protein, 10 aa, Artificial Sequence
  Description of Artificial Sequence: Synthetic peptide
  Seed: RATIMAAFTG
RTTIMAAFTL

SEQ ID NO: 11726 - protein, 10 aa, Artificial Sequence
  Description of Artificial Sequence: Synthetic peptide
  Seed: RATIMAAFTG
RTTIMAAFTM

SEQ ID NO: 11727 - protein, 10 aa, Artificial Sequence
  Description of Artificial Sequence: Synthetic peptide
  Seed: RATIMAAFTG
RTTIMAAFTF

SEQ ID NO: 11728 - protein, 10 aa, Artificial Sequence
  Description of Artificial Sequence: Synthetic peptide
  Seed: RATIMAAFTG
RTTIMAAFTW

SEQ ID NO: 11729 - protein, 10 aa, Artificial Sequence
  Description of Artificial Sequence: Synthetic peptide
  Seed: RATIMAAFTG
RTTIMAAFTY

SEQ ID NO: 11730 - protein, 10 aa, Artificial Sequence
  Description of Artificial Sequence: Synthetic peptide
  Seed: RATIMAAFTG
RTTIMAAFTV

SEQ ID NO: 11731 - protein, 10 aa, Artificial Sequence
  Description of Artificial Sequence: Synthetic peptide
  Seed: RATIMAAFTG
RWTIMAAFTG

SEQ ID NO: 11732 - protein, 10 aa, Artificial Sequence
  Description of Artificial Sequence: Synthetic peptide
  Seed: RATIMAAFTG
RWTIMAAFTI

SEQ ID NO: 11733 - protein, 10 aa, Artificial Sequence
  Description of Artificial Sequence: Synthetic peptide
  Seed: RATIMAAFTG
RWTIMAAFTL

SEQ ID NO: 11734 - protein, 10 aa, Artificial Sequence
  Description of Artificial Sequence: Synthetic peptide
  Seed: RATIMAAFTG
RWTIMAAFTM

SEQ ID NO: 11735 - protein, 10 aa, Artificial Sequence
  Description of Artificial Sequence: Synthetic peptide
  Seed: RATIMAAFTG
RWTIMAAFTF

SEQ ID NO: 11736 - protein, 10 aa, Artificial Sequence
  Description of Artificial Sequence: Synthetic peptide
  Seed: RATIMAAFTG
RWTIMAAFTW

SEQ ID NO: 11737 - protein, 10 aa, Artificial Sequence
  Description of Artificial Sequence: Synthetic peptide
  Seed: RESRNPGNAE
RNSRNPGNAI

SEQ ID NO: 11738 - protein, 10 aa, Artificial Sequence
  Description of Artificial Sequence: Synthetic peptide
  Seed: RESRNPGNAE
RNSRNPGNAK

SEQ ID NO: 11739 - protein, 9 aa, Artificial Sequence
  Description of Artificial Sequence: Synthetic peptide
  Seed: RASVGRMIG
RISVGRMIG

SEQ ID NO: 11740 - protein, 10 aa, Artificial Sequence
  Description of Artificial Sequence: Synthetic peptide
  Seed: RESRNPGNAE
RLSRNPGNAR

SEQ ID NO: 11741 - protein, 10 aa, Artificial Sequence
  Description of Artificial Sequence: Synthetic peptide
  Seed: RESRNPGNAE
RISRNPGNAK

SEQ ID NO: 11742 - protein, 10 aa, Artificial Sequence
  Description of Artificial Sequence: Synthetic peptide
  Seed: RESRNPGNAE
RISRNPGNAM

SEQ ID NO: 11743 - protein, 10 aa, Artificial Sequence
  Description of Artificial Sequence: Synthetic peptide
  Seed: RESRNPGNAE
RISRNPGNAF

SEQ ID NO: 11744 - protein, 10 aa, Artificial Sequence
  Description of Artificial Sequence: Synthetic peptide
  Seed: RESRNPGNAE
RISRNPGNAP

SEQ ID NO: 11745 - protein, 10 aa, Artificial Sequence
  Description of Artificial Sequence: Synthetic peptide
  Seed: RESRNPGNAE
RISRNPGNAS

SEQ ID NO: 11746 - protein, 10 aa, Artificial Sequence
  Description of Artificial Sequence: Synthetic peptide
  Seed: RESRNPGNAE
RISRNPGNAT

SEQ ID NO: 11747 - protein, 10 aa, Artificial Sequence
  Description of Artificial Sequence: Synthetic peptide
  Seed: RESRNPGNAE
RISRNPGNAY

SEQ ID NO: 11748 - protein, 10 aa, Artificial Sequence
  Description of Artificial Sequence: Synthetic peptide
  Seed: RESRNPGNAE
RISRNPGNAV

SEQ ID NO: 11749 - protein, 10 aa, Artificial Sequence
  Description of Artificial Sequence: Synthetic peptide
  Seed: RESRNPGNAE
RLSRNPGNAA

SEQ ID NO: 11750 - protein, 10 aa, Artificial Sequence
  Description of Artificial Sequence: Synthetic peptide
  Seed: RESRNPGNAE
RLSRNPGNAN

SEQ ID NO: 11751 - protein, 10 aa, Artificial Sequence
  Description of Artificial Sequence: Synthetic peptide
  Seed: RESRNPGNAE
RLSRNPGNAP

SEQ ID NO: 11752 - protein, 10 aa, Artificial Sequence
  Description of Artificial Sequence: Synthetic peptide
  Seed: RESRNPGNAE
RLSRNPGNAC

SEQ ID NO: 11753 - protein, 10 aa, Artificial Sequence
  Description of Artificial Sequence: Synthetic peptide
  Seed: RESRNPGNAE
RLSRNPGNAQ

SEQ ID NO: 11754 - protein, 10 aa, Artificial Sequence
  Description of Artificial Sequence: Synthetic peptide
  Seed: RESRNPGNAE
RLSRNPGNAE

SEQ ID NO: 11755 - protein, 10 aa, Artificial Sequence
  Description of Artificial Sequence: Synthetic peptide
  Seed: RESRNPGNAE
RLSRNPGNAG

SEQ ID NO: 11756 - protein, 10 aa, Artificial Sequence
  Description of Artificial Sequence: Synthetic peptide
  Seed: RESRNPGNAE
RLSRNPGNAH

SEQ ID NO: 11757 - protein, 10 aa, Artificial Sequence
  Description of Artificial Sequence: Synthetic peptide
  Seed: RESRNPGNAE
RLSRNPGNAI

SEQ ID NO: 11758 - protein, 10 aa, Artificial Sequence
  Description of Artificial Sequence: Synthetic peptide
  Seed: RESRNPGNAE
RLSRNPGNAL

SEQ ID NO: 11759 - protein, 10 aa, Artificial Sequence
  Description of Artificial Sequence: Synthetic peptide
  Seed: RESRNPGNAE
RLSRNPGNAK

SEQ ID NO: 11760 - protein, 10 aa, Artificial Sequence
  Description of Artificial Sequence: Synthetic peptide
  Seed: RESRNPGNAE
RLSRNPGNAM

SEQ ID NO: 11761 - protein, 10 aa, Artificial Sequence
  Description of Artificial Sequence: Synthetic peptide
  Seed: RESRNPGNAE
RISRNPGNAL

SEQ ID NO: 11762 - protein, 10 aa, Artificial Sequence
  Description of Artificial Sequence: Synthetic peptide
  Seed: RESRNPGNAE
RISRNPGNAI

SEQ ID NO: 11763 - protein, 10 aa, Artificial Sequence
  Description of Artificial Sequence: Synthetic peptide
  Seed: RESRNPGNAE
RISRNPGNAH

SEQ ID NO: 11764 - protein, 10 aa, Artificial Sequence
  Description of Artificial Sequence: Synthetic peptide
  Seed: RESRNPGNAE
RISRNPGNAG

SEQ ID NO: 11765 - protein, 10 aa, Artificial Sequence
  Description of Artificial Sequence: Synthetic peptide
  Seed: RESRNPGNAE
RHSRNPGNAQ

SEQ ID NO: 11766 - protein, 10 aa, Artificial Sequence
  Description of Artificial Sequence: Synthetic peptide
  Seed: RESRNPGNAE
RHSRNPGNAE

SEQ ID NO: 11767 - protein, 10 aa, Artificial Sequence
  Description of Artificial Sequence: Synthetic peptide
  Seed: RESRNPGNAE
RHSRNPGNAG

SEQ ID NO: 11768 - protein, 10 aa, Artificial Sequence
  Description of Artificial Sequence: Synthetic peptide
  Seed: RESRNPGNAE
RHSRNPGNAI

SEQ ID NO: 11769 - protein, 10 aa, Artificial Sequence
  Description of Artificial Sequence: Synthetic peptide
  Seed: RESRNPGNAE
RHSRNPGNAL

SEQ ID NO: 11770 - protein, 10 aa, Artificial Sequence
  Description of Artificial Sequence: Synthetic peptide
  Seed: RESRNPGNAE
RHSRNPGNAK

SEQ ID NO: 11771 - protein, 10 aa, Artificial Sequence
  Description of Artificial Sequence: Synthetic peptide
  Seed: RESRNPGNAE
RHSRNPGNAM

SEQ ID NO: 11772 - protein, 10 aa, Artificial Sequence
  Description of Artificial Sequence: Synthetic peptide
  Seed: RESRNPGNAE
RHSRNPGNAF

SEQ ID NO: 11773 - protein, 10 aa, Artificial Sequence
  Description of Artificial Sequence: Synthetic peptide
  Seed: RESRNPGNAE
RHSRNPGNAP

SEQ ID NO: 11774 - protein, 10 aa, Artificial Sequence
  Description of Artificial Sequence: Synthetic peptide
  Seed: RESRNPGNAE
RHSRNPGNAS

SEQ ID NO: 11775 - protein, 10 aa, Artificial Sequence
  Description of Artificial Sequence: Synthetic peptide
  Seed: RESRNPGNAE
RHSRNPGNAT

SEQ ID NO: 11776 - protein, 10 aa, Artificial Sequence
  Description of Artificial Sequence: Synthetic peptide
  Seed: RESRNPGNAE
RHSRNPGNAY

SEQ ID NO: 11777 - protein, 10 aa, Artificial Sequence
  Description of Artificial Sequence: Synthetic peptide
  Seed: RESRNPGNAE
RHSRNPGNAV

SEQ ID NO: 11778 - protein, 10 aa, Artificial Sequence
  Description of Artificial Sequence: Synthetic peptide
  Seed: RESRNPGNAE
RISRNPGNAA

SEQ ID NO: 11779 - protein, 10 aa, Artificial Sequence
  Description of Artificial Sequence: Synthetic peptide
  Seed: RESRNPGNAE
RISRNPGNAR

SEQ ID NO: 11780 - protein, 10 aa, Artificial Sequence
  Description of Artificial Sequence: Synthetic peptide
  Seed: RESRNPGNAE
RISRNPGNAN

SEQ ID NO: 11781 - protein, 10 aa, Artificial Sequence
  Description of Artificial Sequence: Synthetic peptide
  Seed: RESRNPGNAE
RISRNPGNAC

SEQ ID NO: 11782 - protein, 10 aa, Artificial Sequence
  Description of Artificial Sequence: Synthetic peptide
  Seed: RESRNPGNAE
RISRNPGNAQ

SEQ ID NO: 11783 - protein, 10 aa, Artificial Sequence
  Description of Artificial Sequence: Synthetic peptide
  Seed: RESRNPGNAE
RISRNPGNAE

SEQ ID NO: 11784 - protein, 10 aa, Artificial Sequence
  Description of Artificial Sequence: Synthetic peptide
  Seed: RESRNPGNAE
RLSRNPGNAF

SEQ ID NO: 11785 - protein, 10 aa, Artificial Sequence
  Description of Artificial Sequence: Synthetic peptide
  Seed: RESRNPGNAE
RLSRNPGNAS

SEQ ID NO: 11786 - protein, 10 aa, Artificial Sequence
  Description of Artificial Sequence: Synthetic peptide
  Seed: RESRNPGNAE
RHSRNPGNAN

SEQ ID NO: 11787 - protein, 10 aa, Artificial Sequence
  Description of Artificial Sequence: Synthetic peptide
  Seed: RESRNPGNAE
RMSRNPGNAP

SEQ ID NO: 11788 - protein, 10 aa, Artificial Sequence
  Description of Artificial Sequence: Synthetic peptide
  Seed: RESRNPGNAE
RMSRNPGNAQ

SEQ ID NO: 11789 - protein, 10 aa, Artificial Sequence
  Description of Artificial Sequence: Synthetic peptide
  Seed: RESRNPGNAE
RMSRNPGNAE

SEQ ID NO: 11790 - protein, 10 aa, Artificial Sequence
  Description of Artificial Sequence: Synthetic peptide
  Seed: RESRNPGNAE
RMSRNPGNAG

SEQ ID NO: 11791 - protein, 10 aa, Artificial Sequence
  Description of Artificial Sequence: Synthetic peptide
  Seed: RESRNPGNAE
RMSRNPGNAH

SEQ ID NO: 11792 - protein, 10 aa, Artificial Sequence
  Description of Artificial Sequence: Synthetic peptide
  Seed: RESRNPGNAE
RMSRNPGNAI

SEQ ID NO: 11793 - protein, 10 aa, Artificial Sequence
  Description of Artificial Sequence: Synthetic peptide
  Seed: RESRNPGNAE
RMSRNPGNAL

SEQ ID NO: 11794 - protein, 10 aa, Artificial Sequence
  Description of Artificial Sequence: Synthetic peptide
  Seed: RESRNPGNAE
RMSRNPGNAK

SEQ ID NO: 11795 - protein, 10 aa, Artificial Sequence
  Description of Artificial Sequence: Synthetic peptide
  Seed: RESRNPGNAE
RMSRNPGNAM

SEQ ID NO: 11796 - protein, 10 aa, Artificial Sequence
  Description of Artificial Sequence: Synthetic peptide
  Seed: RESRNPGNAE
RMSRNPGNAF

SEQ ID NO: 11797 - protein, 10 aa, Artificial Sequence
  Description of Artificial Sequence: Synthetic peptide
  Seed: RESRNPGNAE
RMSRNPGNAS

SEQ ID NO: 11798 - protein, 10 aa, Artificial Sequence
  Description of Artificial Sequence: Synthetic peptide
  Seed: RESRNPGNAE
RLSRNPGNAT

SEQ ID NO: 11799 - protein, 10 aa, Artificial Sequence
  Description of Artificial Sequence: Synthetic peptide
  Seed: RESRNPGNAE
RMSRNPGNAT

SEQ ID NO: 11800 - protein, 10 aa, Artificial Sequence
  Description of Artificial Sequence: Synthetic peptide
  Seed: RESRNPGNAE
RMSRNPGNAY

SEQ ID NO: 11801 - protein, 10 aa, Artificial Sequence
  Description of Artificial Sequence: Synthetic peptide
  Seed: RESRNPGNAE
RMSRNPGNAV

SEQ ID NO: 11802 - protein, 10 aa, Artificial Sequence
  Description of Artificial Sequence: Synthetic peptide
  Seed: RESRNPGNAE
RFSRNPGNAA

SEQ ID NO: 11803 - protein, 10 aa, Artificial Sequence
  Description of Artificial Sequence: Synthetic peptide
  Seed: RESRNPGNAE
RFSRNPGNAR

SEQ ID NO: 11804 - protein, 10 aa, Artificial Sequence
  Description of Artificial Sequence: Synthetic peptide
  Seed: RESRNPGNAE
RFSRNPGNAN

SEQ ID NO: 11805 - protein, 10 aa, Artificial Sequence
  Description of Artificial Sequence: Synthetic peptide
  Seed: RESRNPGNAE
RFSRNPGNAC

SEQ ID NO: 11806 - protein, 10 aa, Artificial Sequence
  Description of Artificial Sequence: Synthetic peptide
  Seed: RESRNPGNAE
RFSRNPGNAQ

SEQ ID NO: 11807 - protein, 10 aa, Artificial Sequence
  Description of Artificial Sequence: Synthetic peptide
  Seed: RESRNPGNAE
RFSRNPGNAE

SEQ ID NO: 11808 - protein, 10 aa, Artificial Sequence
  Description of Artificial Sequence: Synthetic peptide
  Seed: RESRNPGNAE
RMSRNPGNAC

SEQ ID NO: 11809 - protein, 10 aa, Artificial Sequence
  Description of Artificial Sequence: Synthetic peptide
  Seed: RESRNPGNAE
RMSRNPGNAN

SEQ ID NO: 11810 - protein, 10 aa, Artificial Sequence
  Description of Artificial Sequence: Synthetic peptide
  Seed: RESRNPGNAE
RMSRNPGNAR

SEQ ID NO: 11811 - protein, 10 aa, Artificial Sequence
  Description of Artificial Sequence: Synthetic peptide
  Seed: RESRNPGNAE
RMSRNPGNAA

SEQ ID NO: 11812 - protein, 10 aa, Artificial Sequence
  Description of Artificial Sequence: Synthetic peptide
  Seed: RESRNPGNAE
RLSRNPGNAY

SEQ ID NO: 11813 - protein, 10 aa, Artificial Sequence
  Description of Artificial Sequence: Synthetic peptide
  Seed: RESRNPGNAE
RLSRNPGNAV

SEQ ID NO: 11814 - protein, 10 aa, Artificial Sequence
  Description of Artificial Sequence: Synthetic peptide
  Seed: RESRNPGNAE
RKSRNPGNAA

SEQ ID NO: 11815 - protein, 10 aa, Artificial Sequence
  Description of Artificial Sequence: Synthetic peptide
  Seed: RESRNPGNAE
RKSRNPGNAR

SEQ ID NO: 11816 - protein, 10 aa, Artificial Sequence
  Description of Artificial Sequence: Synthetic peptide
  Seed: RESRNPGNAE
RKSRNPGNAN

SEQ ID NO: 11817 - protein, 10 aa, Artificial Sequence
  Description of Artificial Sequence: Synthetic peptide
  Seed: RESRNPGNAE
RKSRNPGNAC

SEQ ID NO: 11818 - protein, 10 aa, Artificial Sequence
  Description of Artificial Sequence: Synthetic peptide
  Seed: RESRNPGNAE
RKSRNPGNAQ

SEQ ID NO: 11819 - protein, 10 aa, Artificial Sequence
  Description of Artificial Sequence: Synthetic peptide
  Seed: RESRNPGNAE
RKSRNPGNAE

SEQ ID NO: 11820 - protein, 10 aa, Artificial Sequence
  Description of Artificial Sequence: Synthetic peptide
  Seed: RESRNPGNAE
RKSRNPGNAG

SEQ ID NO: 11821 - protein, 10 aa, Artificial Sequence
  Description of Artificial Sequence: Synthetic peptide
  Seed: RESRNPGNAE
RKSRNPGNAI

SEQ ID NO: 11822 - protein, 10 aa, Artificial Sequence
  Description of Artificial Sequence: Synthetic peptide
  Seed: RESRNPGNAE
RKSRNPGNAL

SEQ ID NO: 11823 - protein, 10 aa, Artificial Sequence
  Description of Artificial Sequence: Synthetic peptide
  Seed: RESRNPGNAE
RKSRNPGNAK

SEQ ID NO: 11824 - protein, 10 aa, Artificial Sequence
  Description of Artificial Sequence: Synthetic peptide
  Seed: RESRNPGNAE
RKSRNPGNAM

SEQ ID NO: 11825 - protein, 10 aa, Artificial Sequence
  Description of Artificial Sequence: Synthetic peptide
  Seed: RESRNPGNAE
RKSRNPGNAF

SEQ ID NO: 11826 - protein, 10 aa, Artificial Sequence
  Description of Artificial Sequence: Synthetic peptide
  Seed: RESRNPGNAE
RKSRNPGNAP

SEQ ID NO: 11827 - protein, 10 aa, Artificial Sequence
  Description of Artificial Sequence: Synthetic peptide
  Seed: RESRNPGNAE
RKSRNPGNAS

SEQ ID NO: 11828 - protein, 10 aa, Artificial Sequence
  Description of Artificial Sequence: Synthetic peptide
  Seed: RESRNPGNAE
RKSRNPGNAT

SEQ ID NO: 11829 - protein, 10 aa, Artificial Sequence
  Description of Artificial Sequence: Synthetic peptide
  Seed: RESRNPGNAE
RKSRNPGNAY

SEQ ID NO: 11830 - protein, 10 aa, Artificial Sequence
  Description of Artificial Sequence: Synthetic peptide
  Seed: RESRNPGNAE
RKSRNPGNAV

SEQ ID NO: 11831 - protein, 10 aa, Artificial Sequence
  Description of Artificial Sequence: Synthetic peptide
  Seed: RESRNPGNAE
RHSRNPGNAC

SEQ ID NO: 11832 - protein, 10 aa, Artificial Sequence
  Description of Artificial Sequence: Synthetic peptide
  Seed: RESRNPGNAE
RHSRNPGNAR

SEQ ID NO: 11833 - protein, 10 aa, Artificial Sequence
  Description of Artificial Sequence: Synthetic peptide
  Seed: RESRNPGNAE
RNSRNPGNAM

SEQ ID NO: 11834 - protein, 10 aa, Artificial Sequence
  Description of Artificial Sequence: Synthetic peptide
  Seed: RESRNPGNAE
RCSRNPGNAK

SEQ ID NO: 11835 - protein, 10 aa, Artificial Sequence
  Description of Artificial Sequence: Synthetic peptide
  Seed: RESRNPGNAE
RCSRNPGNAA

SEQ ID NO: 11836 - protein, 10 aa, Artificial Sequence
  Description of Artificial Sequence: Synthetic peptide
  Seed: RESRNPGNAE
RCSRNPGNAR

SEQ ID NO: 11837 - protein, 10 aa, Artificial Sequence
  Description of Artificial Sequence: Synthetic peptide
  Seed: RESRNPGNAE
RCSRNPGNAN

SEQ ID NO: 11838 - protein, 10 aa, Artificial Sequence
  Description of Artificial Sequence: Synthetic peptide
  Seed: RESRNPGNAE
RCSRNPGNAC

SEQ ID NO: 11839 - protein, 10 aa, Artificial Sequence
  Description of Artificial Sequence: Synthetic peptide
  Seed: RESRNPGNAE
RCSRNPGNAQ

SEQ ID NO: 11840 - protein, 10 aa, Artificial Sequence
  Description of Artificial Sequence: Synthetic peptide
  Seed: RESRNPGNAE
RCSRNPGNAE

SEQ ID NO: 11841 - protein, 10 aa, Artificial Sequence
  Description of Artificial Sequence: Synthetic peptide
  Seed: RESRNPGNAE
RCSRNPGNAG

SEQ ID NO: 11842 - protein, 10 aa, Artificial Sequence
  Description of Artificial Sequence: Synthetic peptide
  Seed: RESRNPGNAE
RCSRNPGNAI

SEQ ID NO: 11843 - protein, 10 aa, Artificial Sequence
  Description of Artificial Sequence: Synthetic peptide
  Seed: RESRNPGNAE
RCSRNPGNAL

SEQ ID NO: 11844 - protein, 10 aa, Artificial Sequence
  Description of Artificial Sequence: Synthetic peptide
  Seed: RESRNPGNAE
RCSRNPGNAM

SEQ ID NO: 11845 - protein, 10 aa, Artificial Sequence
  Description of Artificial Sequence: Synthetic peptide
  Seed: RESRNPGNAE
RQSRNPGNAQ

SEQ ID NO: 11846 - protein, 10 aa, Artificial Sequence
  Description of Artificial Sequence: Synthetic peptide
  Seed: RESRNPGNAE
RCSRNPGNAF

SEQ ID NO: 11847 - protein, 10 aa, Artificial Sequence
  Description of Artificial Sequence: Synthetic peptide
  Seed: RESRNPGNAE
RCSRNPGNAP

SEQ ID NO: 11848 - protein, 10 aa, Artificial Sequence
  Description of Artificial Sequence: Synthetic peptide
  Seed: RESRNPGNAE
RCSRNPGNAS

SEQ ID NO: 11849 - protein, 10 aa, Artificial Sequence
  Description of Artificial Sequence: Synthetic peptide
  Seed: RESRNPGNAE
RCSRNPGNAT

SEQ ID NO: 11850 - protein, 10 aa, Artificial Sequence
  Description of Artificial Sequence: Synthetic peptide
  Seed: RESRNPGNAE
RCSRNPGNAY

SEQ ID NO: 11851 - protein, 10 aa, Artificial Sequence
  Description of Artificial Sequence: Synthetic peptide
  Seed: RESRNPGNAE
RCSRNPGNAV

SEQ ID NO: 11852 - protein, 10 aa, Artificial Sequence
  Description of Artificial Sequence: Synthetic peptide
  Seed: RESRNPGNAE
RQSRNPGNAA

SEQ ID NO: 11853 - protein, 10 aa, Artificial Sequence
  Description of Artificial Sequence: Synthetic peptide
  Seed: RESRNPGNAE
RQSRNPGNAR

SEQ ID NO: 11854 - protein, 10 aa, Artificial Sequence
  Description of Artificial Sequence: Synthetic peptide
  Seed: RESRNPGNAE
RQSRNPGNAN

SEQ ID NO: 11855 - protein, 10 aa, Artificial Sequence
  Description of Artificial Sequence: Synthetic peptide
  Seed: RESRNPGNAE
RDSRNPGNAV

SEQ ID NO: 11856 - protein, 10 aa, Artificial Sequence
  Description of Artificial Sequence: Synthetic peptide
  Seed: RESRNPGNAE
RDSRNPGNAY

SEQ ID NO: 11857 - protein, 10 aa, Artificial Sequence
  Description of Artificial Sequence: Synthetic peptide
  Seed: RESRNPGNAE
RDSRNPGNAT

SEQ ID NO: 11858 - protein, 10 aa, Artificial Sequence
  Description of Artificial Sequence: Synthetic peptide
  Seed: RESRNPGNAE
RDSRNPGNAS

SEQ ID NO: 11859 - protein, 10 aa, Artificial Sequence
  Description of Artificial Sequence: Synthetic peptide
  Seed: RESRNPGNAE
RNSRNPGNAF

SEQ ID NO: 11860 - protein, 10 aa, Artificial Sequence
  Description of Artificial Sequence: Synthetic peptide
  Seed: RESRNPGNAE
RNSRNPGNAP

SEQ ID NO: 11861 - protein, 10 aa, Artificial Sequence
  Description of Artificial Sequence: Synthetic peptide
  Seed: RESRNPGNAE
RNSRNPGNAS

SEQ ID NO: 11862 - protein, 10 aa, Artificial Sequence
  Description of Artificial Sequence: Synthetic peptide
  Seed: RESRNPGNAE
RNSRNPGNAT

SEQ ID NO: 11863 - protein, 10 aa, Artificial Sequence
  Description of Artificial Sequence: Synthetic peptide
  Seed: RESRNPGNAE
RNSRNPGNAY

SEQ ID NO: 11864 - protein, 10 aa, Artificial Sequence
  Description of Artificial Sequence: Synthetic peptide
  Seed: RESRNPGNAE
RNSRNPGNAV

SEQ ID NO: 11865 - protein, 10 aa, Artificial Sequence
  Description of Artificial Sequence: Synthetic peptide
  Seed: RESRNPGNAE
RDSRNPGNAA

SEQ ID NO: 11866 - protein, 10 aa, Artificial Sequence
  Description of Artificial Sequence: Synthetic peptide
  Seed: RESRNPGNAE
RDSRNPGNAR

SEQ ID NO: 11867 - protein, 10 aa, Artificial Sequence
  Description of Artificial Sequence: Synthetic peptide
  Seed: RESRNPGNAE
RDSRNPGNAN

SEQ ID NO: 11868 - protein, 10 aa, Artificial Sequence
  Description of Artificial Sequence: Synthetic peptide
  Seed: RESRNPGNAE
RDSRNPGNAC

SEQ ID NO: 11869 - protein, 10 aa, Artificial Sequence
  Description of Artificial Sequence: Synthetic peptide
  Seed: RESRNPGNAE
RDSRNPGNAQ

SEQ ID NO: 11870 - protein, 10 aa, Artificial Sequence
  Description of Artificial Sequence: Synthetic peptide
  Seed: RESRNPGNAE
RDSRNPGNAE

SEQ ID NO: 11871 - protein, 10 aa, Artificial Sequence
  Description of Artificial Sequence: Synthetic peptide
  Seed: RESRNPGNAE
RDSRNPGNAG

SEQ ID NO: 11872 - protein, 10 aa, Artificial Sequence
  Description of Artificial Sequence: Synthetic peptide
  Seed: RESRNPGNAE
RDSRNPGNAI

SEQ ID NO: 11873 - protein, 10 aa, Artificial Sequence
  Description of Artificial Sequence: Synthetic peptide
  Seed: RESRNPGNAE
RDSRNPGNAL

SEQ ID NO: 11874 - protein, 10 aa, Artificial Sequence
  Description of Artificial Sequence: Synthetic peptide
  Seed: RESRNPGNAE
RDSRNPGNAK

SEQ ID NO: 11875 - protein, 10 aa, Artificial Sequence
  Description of Artificial Sequence: Synthetic peptide
  Seed: RESRNPGNAE
RDSRNPGNAM

SEQ ID NO: 11876 - protein, 10 aa, Artificial Sequence
  Description of Artificial Sequence: Synthetic peptide
  Seed: RESRNPGNAE
RDSRNPGNAF

SEQ ID NO: 11877 - protein, 10 aa, Artificial Sequence
  Description of Artificial Sequence: Synthetic peptide
  Seed: RESRNPGNAE
RDSRNPGNAP

SEQ ID NO: 11878 - protein, 10 aa, Artificial Sequence
  Description of Artificial Sequence: Synthetic peptide
  Seed: RESRNPGNAE
RQSRNPGNAC

SEQ ID NO: 11879 - protein, 10 aa, Artificial Sequence
  Description of Artificial Sequence: Synthetic peptide
  Seed: RESRNPGNAE
RQSRNPGNAE

SEQ ID NO: 11880 - protein, 10 aa, Artificial Sequence
  Description of Artificial Sequence: Synthetic peptide
  Seed: RESRNPGNAE
RHSRNPGNAA

SEQ ID NO: 11881 - protein, 10 aa, Artificial Sequence
  Description of Artificial Sequence: Synthetic peptide
  Seed: RESRNPGNAE
RGSRNPGNAG

SEQ ID NO: 11882 - protein, 10 aa, Artificial Sequence
  Description of Artificial Sequence: Synthetic peptide
  Seed: RESRNPGNAE
RESRNPGNAT

SEQ ID NO: 11883 - protein, 10 aa, Artificial Sequence
  Description of Artificial Sequence: Synthetic peptide
  Seed: RESRNPGNAE
RESRNPGNAY

SEQ ID NO: 11884 - protein, 10 aa, Artificial Sequence
  Description of Artificial Sequence: Synthetic peptide
  Seed: RESRNPGNAE
RESRNPGNAV

SEQ ID NO: 11885 - protein, 10 aa, Artificial Sequence
  Description of Artificial Sequence: Synthetic peptide
  Seed: RESRNPGNAE
RGSRNPGNAA

SEQ ID NO: 11886 - protein, 10 aa, Artificial Sequence
  Description of Artificial Sequence: Synthetic peptide
  Seed: RESRNPGNAE
RGSRNPGNAR

SEQ ID NO: 11887 - protein, 10 aa, Artificial Sequence
  Description of Artificial Sequence: Synthetic peptide
  Seed: RESRNPGNAE
RGSRNPGNAN

SEQ ID NO: 11888 - protein, 10 aa, Artificial Sequence
  Description of Artificial Sequence: Synthetic peptide
  Seed: RESRNPGNAE
RGSRNPGNAC

SEQ ID NO: 11889 - protein, 10 aa, Artificial Sequence
  Description of Artificial Sequence: Synthetic peptide
  Seed: RESRNPGNAE
RGSRNPGNAQ

SEQ ID NO: 11890 - protein, 10 aa, Artificial Sequence
  Description of Artificial Sequence: Synthetic peptide
  Seed: RESRNPGNAE
RGSRNPGNAE

SEQ ID NO: 11891 - protein, 10 aa, Artificial Sequence
  Description of Artificial Sequence: Synthetic peptide
  Seed: RESRNPGNAE
RGSRNPGNAI

SEQ ID NO: 11892 - protein, 10 aa, Artificial Sequence
  Description of Artificial Sequence: Synthetic peptide
  Seed: RESRNPGNAE
RQSRNPGNAG

SEQ ID NO: 11893 - protein, 10 aa, Artificial Sequence
  Description of Artificial Sequence: Synthetic peptide
  Seed: RESRNPGNAE
RGSRNPGNAL

SEQ ID NO: 11894 - protein, 10 aa, Artificial Sequence
  Description of Artificial Sequence: Synthetic peptide
  Seed: RESRNPGNAE
RGSRNPGNAK

SEQ ID NO: 11895 - protein, 10 aa, Artificial Sequence
  Description of Artificial Sequence: Synthetic peptide
  Seed: RESRNPGNAE
RGSRNPGNAM

SEQ ID NO: 11896 - protein, 10 aa, Artificial Sequence
  Description of Artificial Sequence: Synthetic peptide
  Seed: RESRNPGNAE
RGSRNPGNAF

SEQ ID NO: 11897 - protein, 10 aa, Artificial Sequence
  Description of Artificial Sequence: Synthetic peptide
  Seed: RESRNPGNAE
RGSRNPGNAP

SEQ ID NO: 11898 - protein, 10 aa, Artificial Sequence
  Description of Artificial Sequence: Synthetic peptide
  Seed: RESRNPGNAE
RGSRNPGNAS

SEQ ID NO: 11899 - protein, 10 aa, Artificial Sequence
  Description of Artificial Sequence: Synthetic peptide
  Seed: RESRNPGNAE
RGSRNPGNAT

SEQ ID NO: 11900 - protein, 10 aa, Artificial Sequence
  Description of Artificial Sequence: Synthetic peptide
  Seed: RESRNPGNAE
RGSRNPGNAY

SEQ ID NO: 11901 - protein, 10 aa, Artificial Sequence
  Description of Artificial Sequence: Synthetic peptide
  Seed: RESRNPGNAE
RGSRNPGNAV

SEQ ID NO: 11902 - protein, 10 aa, Artificial Sequence
  Description of Artificial Sequence: Synthetic peptide
  Seed: RESRNPGNAE
RESRNPGNAS

SEQ ID NO: 11903 - protein, 10 aa, Artificial Sequence
  Description of Artificial Sequence: Synthetic peptide
  Seed: RESRNPGNAE
RESRNPGNAP

SEQ ID NO: 11904 - protein, 10 aa, Artificial Sequence
  Description of Artificial Sequence: Synthetic peptide
  Seed: RESRNPGNAE
RESRNPGNAF

SEQ ID NO: 11905 - protein, 10 aa, Artificial Sequence
  Description of Artificial Sequence: Synthetic peptide
  Seed: RESRNPGNAE
RESRNPGNAM

SEQ ID NO: 11906 - protein, 10 aa, Artificial Sequence
  Description of Artificial Sequence: Synthetic peptide
  Seed: RESRNPGNAE
RQSRNPGNAI

SEQ ID NO: 11907 - protein, 10 aa, Artificial Sequence
  Description of Artificial Sequence: Synthetic peptide
  Seed: RESRNPGNAE
RQSRNPGNAL

SEQ ID NO: 11908 - protein, 10 aa, Artificial Sequence
  Description of Artificial Sequence: Synthetic peptide
  Seed: RESRNPGNAE
RQSRNPGNAK

SEQ ID NO: 11909 - protein, 10 aa, Artificial Sequence
  Description of Artificial Sequence: Synthetic peptide
  Seed: RESRNPGNAE
RQSRNPGNAM

SEQ ID NO: 11910 - protein, 10 aa, Artificial Sequence
  Description of Artificial Sequence: Synthetic peptide
  Seed: RESRNPGNAE
RQSRNPGNAF

SEQ ID NO: 11911 - protein, 10 aa, Artificial Sequence
  Description of Artificial Sequence: Synthetic peptide
  Seed: RESRNPGNAE
RQSRNPGNAP

SEQ ID NO: 11912 - protein, 10 aa, Artificial Sequence
  Description of Artificial Sequence: Synthetic peptide
  Seed: RESRNPGNAE
RQSRNPGNAS

SEQ ID NO: 11913 - protein, 10 aa, Artificial Sequence
  Description of Artificial Sequence: Synthetic peptide
  Seed: RESRNPGNAE
RQSRNPGNAT

SEQ ID NO: 11914 - protein, 10 aa, Artificial Sequence
  Description of Artificial Sequence: Synthetic peptide
  Seed: RESRNPGNAE
RQSRNPGNAY

SEQ ID NO: 11915 - protein, 10 aa, Artificial Sequence
  Description of Artificial Sequence: Synthetic peptide
  Seed: RESRNPGNAE
RQSRNPGNAV

SEQ ID NO: 11916 - protein, 10 aa, Artificial Sequence
  Description of Artificial Sequence: Synthetic peptide
  Seed: RESRNPGNAE
RESRNPGNAA

SEQ ID NO: 11917 - protein, 10 aa, Artificial Sequence
  Description of Artificial Sequence: Synthetic peptide
  Seed: RESRNPGNAE
RESRNPGNAR

SEQ ID NO: 11918 - protein, 10 aa, Artificial Sequence
  Description of Artificial Sequence: Synthetic peptide
  Seed: RESRNPGNAE
RESRNPGNAN

SEQ ID NO: 11919 - protein, 10 aa, Artificial Sequence
  Description of Artificial Sequence: Synthetic peptide
  Seed: RESRNPGNAE
RESRNPGNAC

SEQ ID NO: 11920 - protein, 10 aa, Artificial Sequence
  Description of Artificial Sequence: Synthetic peptide
  Seed: RESRNPGNAE
RESRNPGNAQ

SEQ ID NO: 11921 - protein, 10 aa, Artificial Sequence
  Description of Artificial Sequence: Synthetic peptide
  Seed: RESRNPGNAE
RESRNPGNAG

SEQ ID NO: 11922 - protein, 10 aa, Artificial Sequence
  Description of Artificial Sequence: Synthetic peptide
  Seed: RESRNPGNAE
RESRNPGNAI

SEQ ID NO: 11923 - protein, 10 aa, Artificial Sequence
  Description of Artificial Sequence: Synthetic peptide
  Seed: RESRNPGNAE
RESRNPGNAL

SEQ ID NO: 11924 - protein, 10 aa, Artificial Sequence
  Description of Artificial Sequence: Synthetic peptide
  Seed: RESRNPGNAE
RESRNPGNAK

SEQ ID NO: 11925 - protein, 10 aa, Artificial Sequence
  Description of Artificial Sequence: Synthetic peptide
  Seed: RATIMAAFTG
RITIMAAFTY

SEQ ID NO: 11926 - protein, 10 aa, Artificial Sequence
  Description of Artificial Sequence: Synthetic peptide
  Seed: RATIMAAFTG
RITIMAAFTW

SEQ ID NO: 11927 - protein, 10 aa, Artificial Sequence
  Description of Artificial Sequence: Synthetic peptide
  Seed: RATIMAAFTG
RITIMAAFTF

SEQ ID NO: 11928 - protein, 9 aa, Artificial Sequence
  Description of Artificial Sequence: Synthetic peptide
  Seed: RASVGRMVG
RQSVGRMVR

SEQ ID NO: 11929 - protein, 9 aa, Artificial Sequence
  Description of Artificial Sequence: Synthetic peptide
  Seed: RASVGRMVG
RASVGRMVT

SEQ ID NO: 11930 - protein, 9 aa, Artificial Sequence
  Description of Artificial Sequence: Synthetic peptide
  Seed: RASVGRMVG
RASVGRMVY

SEQ ID NO: 11931 - protein, 9 aa, Artificial Sequence
  Description of Artificial Sequence: Synthetic peptide
  Seed: RASVGRMVG
RASVGRMVV

SEQ ID NO: 11932 - protein, 9 aa, Artificial Sequence
  Description of Artificial Sequence: Synthetic peptide
  Seed: RASVGRMVG
RNSVGRMVA

SEQ ID NO: 11933 - protein, 9 aa, Artificial Sequence
  Description of Artificial Sequence: Synthetic peptide
  Seed: RASVGRMVG
RNSVGRMVK

SEQ ID NO: 11934 - protein, 9 aa, Artificial Sequence
  Description of Artificial Sequence: Synthetic peptide
  Seed: RASVGRMVG
RNSVGRMVV

SEQ ID NO: 11935 - protein, 9 aa, Artificial Sequence
  Description of Artificial Sequence: Synthetic peptide
  Seed: RASVGRMVG
RCSVGRMVK

SEQ ID NO: 11936 - protein, 9 aa, Artificial Sequence
  Description of Artificial Sequence: Synthetic peptide
  Seed: RASVGRMVG
RQSVGRMVA

SEQ ID NO: 11937 - protein, 9 aa, Artificial Sequence
  Description of Artificial Sequence: Synthetic peptide
  Seed: RASVGRMVG
RQSVGRMVI

SEQ ID NO: 11938 - protein, 9 aa, Artificial Sequence
  Description of Artificial Sequence: Synthetic peptide
  Seed: RASVGRMVG
RISVGRMVR

SEQ ID NO: 11939 - protein, 9 aa, Artificial Sequence
  Description of Artificial Sequence: Synthetic peptide
  Seed: RASVGRMVG
RQSVGRMVL

SEQ ID NO: 11940 - protein, 9 aa, Artificial Sequence
  Description of Artificial Sequence: Synthetic peptide
  Seed: RASVGRMVG
RQSVGRMVK

SEQ ID NO: 11941 - protein, 9 aa, Artificial Sequence
  Description of Artificial Sequence: Synthetic peptide
  Seed: RASVGRMVG
RQSVGRMVM

SEQ ID NO: 11942 - protein, 9 aa, Artificial Sequence
  Description of Artificial Sequence: Synthetic peptide
  Seed: RASVGRMVG
RQSVGRMVY

SEQ ID NO: 11943 - protein, 9 aa, Artificial Sequence
  Description of Artificial Sequence: Synthetic peptide
  Seed: RASVGRMVG
RQSVGRMVV

SEQ ID NO: 11944 - protein, 9 aa, Artificial Sequence
  Description of Artificial Sequence: Synthetic peptide
  Seed: RASVGRMVG
RGSVGRMVA

SEQ ID NO: 11945 - protein, 9 aa, Artificial Sequence
  Description of Artificial Sequence: Synthetic peptide
  Seed: RASVGRMVG
RGSVGRMVK

SEQ ID NO: 11946 - protein, 9 aa, Artificial Sequence
  Description of Artificial Sequence: Synthetic peptide
  Seed: RASVGRMVG
RGSVGRMVV

SEQ ID NO: 11947 - protein, 9 aa, Artificial Sequence
  Description of Artificial Sequence: Synthetic peptide
  Seed: RASVGRMVG
RHSVGRMVK

SEQ ID NO: 11948 - protein, 9 aa, Artificial Sequence
  Description of Artificial Sequence: Synthetic peptide
  Seed: RASVGRMVG
RASVGRMVM

SEQ ID NO: 11949 - protein, 9 aa, Artificial Sequence
  Description of Artificial Sequence: Synthetic peptide
  Seed: RASVGRMVG
RASVGRMVK

SEQ ID NO: 11950 - protein, 9 aa, Artificial Sequence
  Description of Artificial Sequence: Synthetic peptide
  Seed: RASVGRMVG
RASVGRMVL

SEQ ID NO: 11951 - protein, 9 aa, Artificial Sequence
  Description of Artificial Sequence: Synthetic peptide
  Seed: RASVGRMVG
RASVGRMVI

SEQ ID NO: 11952 - protein, 9 aa, Artificial Sequence
  Description of Artificial Sequence: Synthetic peptide
  Seed: RASVGRMIG
RYSVGRMIV

SEQ ID NO: 11953 - protein, 9 aa, Artificial Sequence
  Description of Artificial Sequence: Synthetic peptide
  Seed: RASVGRMIG
RVSVGRMIA

SEQ ID NO: 11954 - protein, 9 aa, Artificial Sequence
  Description of Artificial Sequence: Synthetic peptide
  Seed: RASVGRMIG
RVSVGRMIR

SEQ ID NO: 11955 - protein, 9 aa, Artificial Sequence
  Description of Artificial Sequence: Synthetic peptide
  Seed: RASVGRMIG
RVSVGRMIN

SEQ ID NO: 11956 - protein, 9 aa, Artificial Sequence
  Description of Artificial Sequence: Synthetic peptide
  Seed: RASVGRMIG
RVSVGRMIQ

SEQ ID NO: 11957 - protein, 9 aa, Artificial Sequence
  Description of Artificial Sequence: Synthetic peptide
  Seed: RASVGRMIG
RVSVGRMIG

SEQ ID NO: 11958 - protein, 9 aa, Artificial Sequence
  Description of Artificial Sequence: Synthetic peptide
  Seed: RASVGRMIG
RVSVGRMIH

SEQ ID NO: 11959 - protein, 9 aa, Artificial Sequence
  Description of Artificial Sequence: Synthetic peptide
  Seed: RASVGRMIG
RVSVGRMII

SEQ ID NO: 11960 - protein, 9 aa, Artificial Sequence
  Description of Artificial Sequence: Synthetic peptide
  Seed: RASVGRMIG
RVSVGRMIL

SEQ ID NO: 11961 - protein, 9 aa, Artificial Sequence
  Description of Artificial Sequence: Synthetic peptide
  Seed: RASVGRMIG
RVSVGRMIK

SEQ ID NO: 11962 - protein, 9 aa, Artificial Sequence
  Description of Artificial Sequence: Synthetic peptide
  Seed: RASVGRMIG
RVSVGRMIM

SEQ ID NO: 11963 - protein, 9 aa, Artificial Sequence
  Description of Artificial Sequence: Synthetic peptide
  Seed: RASVGRMIG
RVSVGRMIF

SEQ ID NO: 11964 - protein, 9 aa, Artificial Sequence
  Description of Artificial Sequence: Synthetic peptide
  Seed: RASVGRMIG
RVSVGRMIP

SEQ ID NO: 11965 - protein, 9 aa, Artificial Sequence
  Description of Artificial Sequence: Synthetic peptide
  Seed: RASVGRMIG
RVSVGRMIS

SEQ ID NO: 11966 - protein, 9 aa, Artificial Sequence
  Description of Artificial Sequence: Synthetic peptide
  Seed: RASVGRMIG
RVSVGRMIT

SEQ ID NO: 11967 - protein, 9 aa, Artificial Sequence
  Description of Artificial Sequence: Synthetic peptide
  Seed: RASVGRMIG
RVSVGRMIY

SEQ ID NO: 11968 - protein, 9 aa, Artificial Sequence
  Description of Artificial Sequence: Synthetic peptide
  Seed: RASVGRMIG
RVSVGRMIV

SEQ ID NO: 11969 - protein, 9 aa, Artificial Sequence
  Description of Artificial Sequence: Synthetic peptide
  Seed: RASVGRMVG
RASVGRMVA

SEQ ID NO: 11970 - protein, 9 aa, Artificial Sequence
  Description of Artificial Sequence: Synthetic peptide
  Seed: RASVGRMVG
RASVGRMVR

SEQ ID NO: 11971 - protein, 9 aa, Artificial Sequence
  Description of Artificial Sequence: Synthetic peptide
  Seed: RASVGRMVG
RISVGRMVA

SEQ ID NO: 11972 - protein, 9 aa, Artificial Sequence
  Description of Artificial Sequence: Synthetic peptide
  Seed: RASVGRMVG
RISVGRMVN

SEQ ID NO: 11973 - protein, 9 aa, Artificial Sequence
  Description of Artificial Sequence: Synthetic peptide
  Seed: RASVGRMIG
RYSVGRMIS

SEQ ID NO: 11974 - protein, 9 aa, Artificial Sequence
  Description of Artificial Sequence: Synthetic peptide
  Seed: RASVGRMVG
RMSVGRMVT

SEQ ID NO: 11975 - protein, 9 aa, Artificial Sequence
  Description of Artificial Sequence: Synthetic peptide
  Seed: RASVGRMVG
RMSVGRMVG

SEQ ID NO: 11976 - protein, 9 aa, Artificial Sequence
  Description of Artificial Sequence: Synthetic peptide
  Seed: RASVGRMVG
RMSVGRMVH

SEQ ID NO: 11977 - protein, 9 aa, Artificial Sequence
  Description of Artificial Sequence: Synthetic peptide
  Seed: RASVGRMVG
RMSVGRMVI

SEQ ID NO: 11978 - protein, 9 aa, Artificial Sequence
  Description of Artificial Sequence: Synthetic peptide
  Seed: RASVGRMVG
RMSVGRMVL

SEQ ID NO: 11979 - protein, 9 aa, Artificial Sequence
  Description of Artificial Sequence: Synthetic peptide
  Seed: RASVGRMVG
RMSVGRMVK

SEQ ID NO: 11980 - protein, 9 aa, Artificial Sequence
  Description of Artificial Sequence: Synthetic peptide
  Seed: RASVGRMVG
RMSVGRMVM

SEQ ID NO: 11981 - protein, 9 aa, Artificial Sequence
  Description of Artificial Sequence: Synthetic peptide
  Seed: RASVGRMVG
RMSVGRMVF

SEQ ID NO: 11982 - protein, 9 aa, Artificial Sequence
  Description of Artificial Sequence: Synthetic peptide
  Seed: RASVGRMVG
RMSVGRMVP

SEQ ID NO: 11983 - protein, 9 aa, Artificial Sequence
  Description of Artificial Sequence: Synthetic peptide
  Seed: RASVGRMVG
RMSVGRMVS

SEQ ID NO: 11984 - protein, 9 aa, Artificial Sequence
  Description of Artificial Sequence: Synthetic peptide
  Seed: RASVGRMVG
RMSVGRMVY

SEQ ID NO: 11985 - protein, 9 aa, Artificial Sequence
  Description of Artificial Sequence: Synthetic peptide
  Seed: RASVGRMVG
RISVGRMVG

SEQ ID NO: 11986 - protein, 9 aa, Artificial Sequence
  Description of Artificial Sequence: Synthetic peptide
  Seed: RASVGRMVG
RMSVGRMVV

SEQ ID NO: 11987 - protein, 9 aa, Artificial Sequence
  Description of Artificial Sequence: Synthetic peptide
  Seed: RASVGRMVG
RFSVGRMVA

SEQ ID NO: 11988 - protein, 9 aa, Artificial Sequence
  Description of Artificial Sequence: Synthetic peptide
  Seed: RASVGRMVG
RFSVGRMVR

SEQ ID NO: 11989 - protein, 9 aa, Artificial Sequence
  Description of Artificial Sequence: Synthetic peptide
  Seed: RASVGRMVG
RFSVGRMVG

SEQ ID NO: 11990 - protein, 9 aa, Artificial Sequence
  Description of Artificial Sequence: Synthetic peptide
  Seed: RASVGRMVG
RFSVGRMVI

SEQ ID NO: 11991 - protein, 9 aa, Artificial Sequence
  Description of Artificial Sequence: Synthetic peptide
  Seed: RASVGRMVG
RFSVGRMVL

SEQ ID NO: 11992 - protein, 9 aa, Artificial Sequence
  Description of Artificial Sequence: Synthetic peptide
  Seed: RASVGRMVG
RFSVGRMVK

SEQ ID NO: 11993 - protein, 9 aa, Artificial Sequence
  Description of Artificial Sequence: Synthetic peptide
  Seed: RASVGRMVG
RFSVGRMVM

SEQ ID NO: 11994 - protein, 9 aa, Artificial Sequence
  Description of Artificial Sequence: Synthetic peptide
  Seed: RASVGRMVG
RFSVGRMVS

SEQ ID NO: 11995 - protein, 9 aa, Artificial Sequence
  Description of Artificial Sequence: Synthetic peptide
  Seed: RASVGRMVG
RMSVGRMVQ

SEQ ID NO: 11996 - protein, 9 aa, Artificial Sequence
  Description of Artificial Sequence: Synthetic peptide
  Seed: RASVGRMVG
RMSVGRMVN

SEQ ID NO: 11997 - protein, 9 aa, Artificial Sequence
  Description of Artificial Sequence: Synthetic peptide
  Seed: RASVGRMVG
RMSVGRMVR

SEQ ID NO: 11998 - protein, 9 aa, Artificial Sequence
  Description of Artificial Sequence: Synthetic peptide
  Seed: RASVGRMVG
RMSVGRMVA

SEQ ID NO: 11999 - protein, 9 aa, Artificial Sequence
  Description of Artificial Sequence: Synthetic peptide
  Seed: RASVGRMVG
RISVGRMVI

SEQ ID NO: 12000 - protein, 9 aa, Artificial Sequence
  Description of Artificial Sequence: Synthetic peptide
  Seed: RASVGRMVG
RISVGRMVL

SEQ ID NO: 12001 - protein, 9 aa, Artificial Sequence
  Description of Artificial Sequence: Synthetic peptide
  Seed: RASVGRMVG
RISVGRMVK

SEQ ID NO: 12002 - protein, 9 aa, Artificial Sequence
  Description of Artificial Sequence: Synthetic peptide
  Seed: RASVGRMVG
RISVGRMVM

SEQ ID NO: 12003 - protein, 9 aa, Artificial Sequence
  Description of Artificial Sequence: Synthetic peptide
  Seed: RASVGRMVG
RISVGRMVF

SEQ ID NO: 12004 - protein, 9 aa, Artificial Sequence
  Description of Artificial Sequence: Synthetic peptide
  Seed: RASVGRMVG
RISVGRMVS

SEQ ID NO: 12005 - protein, 9 aa, Artificial Sequence
  Description of Artificial Sequence: Synthetic peptide
  Seed: RASVGRMVG
RISVGRMVT

SEQ ID NO: 12006 - protein, 9 aa, Artificial Sequence
  Description of Artificial Sequence: Synthetic peptide
  Seed: RASVGRMVG
RISVGRMVY

SEQ ID NO: 12007 - protein, 9 aa, Artificial Sequence
  Description of Artificial Sequence: Synthetic peptide
  Seed: RASVGRMVG
RISVGRMVV

SEQ ID NO: 12008 - protein, 9 aa, Artificial Sequence
  Description of Artificial Sequence: Synthetic peptide
  Seed: RASVGRMVG
RLSVGRMVA

SEQ ID NO: 12009 - protein, 9 aa, Artificial Sequence
  Description of Artificial Sequence: Synthetic peptide
  Seed: RASVGRMVG
RLSVGRMVG

SEQ ID NO: 12010 - protein, 9 aa, Artificial Sequence
  Description of Artificial Sequence: Synthetic peptide
  Seed: RASVGRMVG
RLSVGRMVI

SEQ ID NO: 12011 - protein, 9 aa, Artificial Sequence
  Description of Artificial Sequence: Synthetic peptide
  Seed: RASVGRMVG
RLSVGRMVL

SEQ ID NO: 12012 - protein, 9 aa, Artificial Sequence
  Description of Artificial Sequence: Synthetic peptide
  Seed: RASVGRMVG
RLSVGRMVK

SEQ ID NO: 12013 - protein, 9 aa, Artificial Sequence
  Description of Artificial Sequence: Synthetic peptide
  Seed: RASVGRMVG
RLSVGRMVM

SEQ ID NO: 12014 - protein, 9 aa, Artificial Sequence
  Description of Artificial Sequence: Synthetic peptide
  Seed: RASVGRMVG
RLSVGRMVS

SEQ ID NO: 12015 - protein, 9 aa, Artificial Sequence
  Description of Artificial Sequence: Synthetic peptide
  Seed: RASVGRMVG
RLSVGRMVY

SEQ ID NO: 12016 - protein, 9 aa, Artificial Sequence
  Description of Artificial Sequence: Synthetic peptide
  Seed: RASVGRMVG
RLSVGRMVV

SEQ ID NO: 12017 - protein, 9 aa, Artificial Sequence
  Description of Artificial Sequence: Synthetic peptide
  Seed: RASVGRMVG
RKSVGRMVK

SEQ ID NO: 12018 - protein, 9 aa, Artificial Sequence
  Description of Artificial Sequence: Synthetic peptide
  Seed: RASVGRMIG
RYSVGRMIY

SEQ ID NO: 12019 - protein, 9 aa, Artificial Sequence
  Description of Artificial Sequence: Synthetic peptide
  Seed: RASVGRMIG
RYSVGRMIM

SEQ ID NO: 12020 - protein, 10 aa, Artificial Sequence
  Description of Artificial Sequence: Synthetic peptide
  Seed: RATIMAAFTG
RITIMAAFTM

SEQ ID NO: 12021 - protein, 9 aa, Artificial Sequence
  Description of Artificial Sequence: Synthetic peptide
  Seed: RASVGRMIG
RMSVGRMIT

SEQ ID NO: 12022 - protein, 9 aa, Artificial Sequence
  Description of Artificial Sequence: Synthetic peptide
  Seed: RASVGRMIG
RMSVGRMIG

SEQ ID NO: 12023 - protein, 9 aa, Artificial Sequence
  Description of Artificial Sequence: Synthetic peptide
  Seed: RASVGRMIG
RMSVGRMIH

SEQ ID NO: 12024 - protein, 9 aa, Artificial Sequence
  Description of Artificial Sequence: Synthetic peptide
  Seed: RASVGRMIG
RMSVGRMII

SEQ ID NO: 12025 - protein, 9 aa, Artificial Sequence
  Description of Artificial Sequence: Synthetic peptide
  Seed: RASVGRMIG
RMSVGRMIL

SEQ ID NO: 12026 - protein, 9 aa, Artificial Sequence
  Description of Artificial Sequence: Synthetic peptide
  Seed: RASVGRMIG
RMSVGRMIK

SEQ ID NO: 12027 - protein, 9 aa, Artificial Sequence
  Description of Artificial Sequence: Synthetic peptide
  Seed: RASVGRMIG
RMSVGRMIM

SEQ ID NO: 12028 - protein, 9 aa, Artificial Sequence
  Description of Artificial Sequence: Synthetic peptide
  Seed: RASVGRMIG
RMSVGRMIF

SEQ ID NO: 12029 - protein, 9 aa, Artificial Sequence
  Description of Artificial Sequence: Synthetic peptide
  Seed: RASVGRMIG
RMSVGRMIP

SEQ ID NO: 12030 - protein, 9 aa, Artificial Sequence
  Description of Artificial Sequence: Synthetic peptide
  Seed: RASVGRMIG
RMSVGRMIS

SEQ ID NO: 12031 - protein, 9 aa, Artificial Sequence
  Description of Artificial Sequence: Synthetic peptide
  Seed: RASVGRMIG
RMSVGRMIY

SEQ ID NO: 12032 - protein, 9 aa, Artificial Sequence
  Description of Artificial Sequence: Synthetic peptide
  Seed: RASVGRMIG
RFSVGRMIV

SEQ ID NO: 12033 - protein, 9 aa, Artificial Sequence
  Description of Artificial Sequence: Synthetic peptide
  Seed: RASVGRMIG
RMSVGRMIV

SEQ ID NO: 12034 - protein, 9 aa, Artificial Sequence
  Description of Artificial Sequence: Synthetic peptide
  Seed: RASVGRMIG
RFSVGRMIA

SEQ ID NO: 12035 - protein, 9 aa, Artificial Sequence
  Description of Artificial Sequence: Synthetic peptide
  Seed: RASVGRMIG
RFSVGRMIR

SEQ ID NO: 12036 - protein, 9 aa, Artificial Sequence
  Description of Artificial Sequence: Synthetic peptide
  Seed: RASVGRMIG
RFSVGRMIG

SEQ ID NO: 12037 - protein, 9 aa, Artificial Sequence
  Description of Artificial Sequence: Synthetic peptide
  Seed: RASVGRMIG
RFSVGRMII

SEQ ID NO: 12038 - protein, 9 aa, Artificial Sequence
  Description of Artificial Sequence: Synthetic peptide
  Seed: RASVGRMIG
RFSVGRMIL

SEQ ID NO: 12039 - protein, 9 aa, Artificial Sequence
  Description of Artificial Sequence: Synthetic peptide
  Seed: RASVGRMIG
RFSVGRMIK

SEQ ID NO: 12040 - protein, 9 aa, Artificial Sequence
  Description of Artificial Sequence: Synthetic peptide
  Seed: RASVGRMIG
RFSVGRMIM

SEQ ID NO: 12041 - protein, 9 aa, Artificial Sequence
  Description of Artificial Sequence: Synthetic peptide
  Seed: RASVGRMIG
RFSVGRMIS

SEQ ID NO: 12042 - protein, 9 aa, Artificial Sequence
  Description of Artificial Sequence: Synthetic peptide
  Seed: RASVGRMIG
RMSVGRMIQ

SEQ ID NO: 12043 - protein, 9 aa, Artificial Sequence
  Description of Artificial Sequence: Synthetic peptide
  Seed: RASVGRMIG
RMSVGRMIN

SEQ ID NO: 12044 - protein, 9 aa, Artificial Sequence
  Description of Artificial Sequence: Synthetic peptide
  Seed: RASVGRMIG
RMSVGRMIR

SEQ ID NO: 12045 - protein, 9 aa, Artificial Sequence
  Description of Artificial Sequence: Synthetic peptide
  Seed: RASVGRMIG
RMSVGRMIA

SEQ ID NO: 12046 - protein, 9 aa, Artificial Sequence
  Description of Artificial Sequence: Synthetic peptide
  Seed: RASVGRMIG
RISVGRMII

SEQ ID NO: 12047 - protein, 9 aa, Artificial Sequence
  Description of Artificial Sequence: Synthetic peptide
  Seed: RASVGRMIG
RISVGRMIL

SEQ ID NO: 12048 - protein, 9 aa, Artificial Sequence
  Description of Artificial Sequence: Synthetic peptide
  Seed: RASVGRMIG
RISVGRMIK

SEQ ID NO: 12049 - protein, 9 aa, Artificial Sequence
  Description of Artificial Sequence: Synthetic peptide
  Seed: RASVGRMIG
RISVGRMIM

SEQ ID NO: 12050 - protein, 9 aa, Artificial Sequence
  Description of Artificial Sequence: Synthetic peptide
  Seed: RASVGRMIG
RISVGRMIF

SEQ ID NO: 12051 - protein, 9 aa, Artificial Sequence
  Description of Artificial Sequence: Synthetic peptide
  Seed: RASVGRMIG
RISVGRMIS

SEQ ID NO: 12052 - protein, 9 aa, Artificial Sequence
  Description of Artificial Sequence: Synthetic peptide
  Seed: RASVGRMIG
RISVGRMIT

SEQ ID NO: 12053 - protein, 9 aa, Artificial Sequence
  Description of Artificial Sequence: Synthetic peptide
  Seed: RASVGRMIG
RISVGRMIY

SEQ ID NO: 12054 - protein, 9 aa, Artificial Sequence
  Description of Artificial Sequence: Synthetic peptide
  Seed: RASVGRMIG
RISVGRMIV

SEQ ID NO: 12055 - protein, 9 aa, Artificial Sequence
  Description of Artificial Sequence: Synthetic peptide
  Seed: RASVGRMIG
RLSVGRMIA

SEQ ID NO: 12056 - protein, 9 aa, Artificial Sequence
  Description of Artificial Sequence: Synthetic peptide
  Seed: RASVGRMIG
RLSVGRMIG

SEQ ID NO: 12057 - protein, 9 aa, Artificial Sequence
  Description of Artificial Sequence: Synthetic peptide
  Seed: RASVGRMIG
RLSVGRMII

SEQ ID NO: 12058 - protein, 9 aa, Artificial Sequence
  Description of Artificial Sequence: Synthetic peptide
  Seed: RASVGRMIG
RLSVGRMIL

SEQ ID NO: 12059 - protein, 9 aa, Artificial Sequence
  Description of Artificial Sequence: Synthetic peptide
  Seed: RASVGRMIG
RLSVGRMIK

SEQ ID NO: 12060 - protein, 9 aa, Artificial Sequence
  Description of Artificial Sequence: Synthetic peptide
  Seed: RASVGRMIG
RLSVGRMIM

SEQ ID NO: 12061 - protein, 9 aa, Artificial Sequence
  Description of Artificial Sequence: Synthetic peptide
  Seed: RASVGRMIG
RLSVGRMIS

SEQ ID NO: 12062 - protein, 9 aa, Artificial Sequence
  Description of Artificial Sequence: Synthetic peptide
  Seed: RASVGRMIG
RLSVGRMIY

SEQ ID NO: 12063 - protein, 9 aa, Artificial Sequence
  Description of Artificial Sequence: Synthetic peptide
  Seed: RASVGRMIG
RLSVGRMIV

SEQ ID NO: 12064 - protein, 9 aa, Artificial Sequence
  Description of Artificial Sequence: Synthetic peptide
  Seed: RASVGRMIG
RKSVGRMIK

SEQ ID NO: 12065 - protein, 9 aa, Artificial Sequence
  Description of Artificial Sequence: Synthetic peptide
  Seed: RASVGRMIG
RFSVGRMIY

SEQ ID NO: 12066 - protein, 9 aa, Artificial Sequence
  Description of Artificial Sequence: Synthetic peptide
  Seed: RASVGRMIG
RSSVGRMIA

SEQ ID NO: 12067 - protein, 9 aa, Artificial Sequence
  Description of Artificial Sequence: Synthetic peptide
  Seed: RASVGRMIG
RYSVGRMIK

SEQ ID NO: 12068 - protein, 9 aa, Artificial Sequence
  Description of Artificial Sequence: Synthetic peptide
  Seed: RASVGRMIG
RWSVGRMIA

SEQ ID NO: 12069 - protein, 9 aa, Artificial Sequence
  Description of Artificial Sequence: Synthetic peptide
  Seed: RASVGRMIG
RTSVGRMIL

SEQ ID NO: 12070 - protein, 9 aa, Artificial Sequence
  Description of Artificial Sequence: Synthetic peptide
  Seed: RASVGRMIG
RTSVGRMIK

SEQ ID NO: 12071 - protein, 9 aa, Artificial Sequence
  Description of Artificial Sequence: Synthetic peptide
  Seed: RASVGRMIG
RTSVGRMIM

SEQ ID NO: 12072 - protein, 9 aa, Artificial Sequence
  Description of Artificial Sequence: Synthetic peptide
  Seed: RASVGRMIG
RTSVGRMIF

SEQ ID NO: 12073 - protein, 9 aa, Artificial Sequence
  Description of Artificial Sequence: Synthetic peptide
  Seed: RASVGRMIG
RTSVGRMIP

SEQ ID NO: 12074 - protein, 9 aa, Artificial Sequence
  Description of Artificial Sequence: Synthetic peptide
  Seed: RASVGRMIG
RTSVGRMIS

SEQ ID NO: 12075 - protein, 9 aa, Artificial Sequence
  Description of Artificial Sequence: Synthetic peptide
  Seed: RASVGRMIG
RTSVGRMIT

SEQ ID NO: 12076 - protein, 9 aa, Artificial Sequence
  Description of Artificial Sequence: Synthetic peptide
  Seed: RASVGRMIG
RTSVGRMIY

SEQ ID NO: 12077 - protein, 9 aa, Artificial Sequence
  Description of Artificial Sequence: Synthetic peptide
  Seed: RASVGRMIG
RTSVGRMIV

SEQ ID NO: 12078 - protein, 9 aa, Artificial Sequence
  Description of Artificial Sequence: Synthetic peptide
  Seed: RASVGRMIG
RWSVGRMII

SEQ ID NO: 12079 - protein, 9 aa, Artificial Sequence
  Description of Artificial Sequence: Synthetic peptide
  Seed: RASVGRMIG
RSSVGRMIR

SEQ ID NO: 12080 - protein, 9 aa, Artificial Sequence
  Description of Artificial Sequence: Synthetic peptide
  Seed: RASVGRMIG
RWSVGRMIL

SEQ ID NO: 12081 - protein, 9 aa, Artificial Sequence
  Description of Artificial Sequence: Synthetic peptide
  Seed: RASVGRMIG
RWSVGRMIK

SEQ ID NO: 12082 - protein, 9 aa, Artificial Sequence
  Description of Artificial Sequence: Synthetic peptide
  Seed: RASVGRMIG
RWSVGRMIM

SEQ ID NO: 12083 - protein, 9 aa, Artificial Sequence
  Description of Artificial Sequence: Synthetic peptide
  Seed: RASVGRMIG
RWSVGRMIV

SEQ ID NO: 12084 - protein, 9 aa, Artificial Sequence
  Description of Artificial Sequence: Synthetic peptide
  Seed: RASVGRMIG
RYSVGRMIA

SEQ ID NO: 12085 - protein, 9 aa, Artificial Sequence
  Description of Artificial Sequence: Synthetic peptide
  Seed: RASVGRMIG
RYSVGRMIR

SEQ ID NO: 12086 - protein, 9 aa, Artificial Sequence
  Description of Artificial Sequence: Synthetic peptide
  Seed: RASVGRMIG
RYSVGRMIG

SEQ ID NO: 12087 - protein, 9 aa, Artificial Sequence
  Description of Artificial Sequence: Synthetic peptide
  Seed: RASVGRMIG
RYSVGRMII

SEQ ID NO: 12088 - protein, 9 aa, Artificial Sequence
  Description of Artificial Sequence: Synthetic peptide
  Seed: RASVGRMIG
RYSVGRMIL

SEQ ID NO: 12089 - protein, 9 aa, Artificial Sequence
  Description of Artificial Sequence: Synthetic peptide
  Seed: RASVGRMIG
RTSVGRMII

SEQ ID NO: 12090 - protein, 9 aa, Artificial Sequence
  Description of Artificial Sequence: Synthetic peptide
  Seed: RASVGRMIG
RTSVGRMIH

SEQ ID NO: 12091 - protein, 9 aa, Artificial Sequence
  Description of Artificial Sequence: Synthetic peptide
  Seed: RASVGRMIG
RTSVGRMIG

SEQ ID NO: 12092 - protein, 9 aa, Artificial Sequence
  Description of Artificial Sequence: Synthetic peptide
  Seed: RASVGRMIG
RTSVGRMIE

SEQ ID NO: 12093 - protein, 9 aa, Artificial Sequence
  Description of Artificial Sequence: Synthetic peptide
  Seed: RASVGRMIG
RSSVGRMIN

SEQ ID NO: 12094 - protein, 9 aa, Artificial Sequence
  Description of Artificial Sequence: Synthetic peptide
  Seed: RASVGRMIG
RSSVGRMIQ

SEQ ID NO: 12095 - protein, 9 aa, Artificial Sequence
  Description of Artificial Sequence: Synthetic peptide
  Seed: RASVGRMIG
RSSVGRMIG

SEQ ID NO: 12096 - protein, 9 aa, Artificial Sequence
  Description of Artificial Sequence: Synthetic peptide
  Seed: RASVGRMIG
RSSVGRMIH

SEQ ID NO: 12097 - protein, 9 aa, Artificial Sequence
  Description of Artificial Sequence: Synthetic peptide
  Seed: RASVGRMIG
RSSVGRMII

SEQ ID NO: 12098 - protein, 9 aa, Artificial Sequence
  Description of Artificial Sequence: Synthetic peptide
  Seed: RASVGRMIG
RSSVGRMIL

SEQ ID NO: 12099 - protein, 9 aa, Artificial Sequence
  Description of Artificial Sequence: Synthetic peptide
  Seed: RASVGRMIG
RSSVGRMIK

SEQ ID NO: 12100 - protein, 9 aa, Artificial Sequence
  Description of Artificial Sequence: Synthetic peptide
  Seed: RASVGRMIG
RSSVGRMIM

SEQ ID NO: 12101 - protein, 9 aa, Artificial Sequence
  Description of Artificial Sequence: Synthetic peptide
  Seed: RASVGRMIG
RSSVGRMIF

SEQ ID NO: 12102 - protein, 9 aa, Artificial Sequence
  Description of Artificial Sequence: Synthetic peptide
  Seed: RASVGRMIG
RSSVGRMIP

SEQ ID NO: 12103 - protein, 9 aa, Artificial Sequence
  Description of Artificial Sequence: Synthetic peptide
  Seed: RASVGRMIG
RSSVGRMIS

SEQ ID NO: 12104 - protein, 9 aa, Artificial Sequence
  Description of Artificial Sequence: Synthetic peptide
  Seed: RASVGRMIG
RSSVGRMIT

SEQ ID NO: 12105 - protein, 9 aa, Artificial Sequence
  Description of Artificial Sequence: Synthetic peptide
  Seed: RASVGRMIG
RSSVGRMIY

SEQ ID NO: 12106 - protein, 9 aa, Artificial Sequence
  Description of Artificial Sequence: Synthetic peptide
  Seed: RASVGRMIG
RSSVGRMIV

SEQ ID NO: 12107 - protein, 9 aa, Artificial Sequence
  Description of Artificial Sequence: Synthetic peptide
  Seed: RASVGRMIG
RTSVGRMIA

SEQ ID NO: 12108 - protein, 9 aa, Artificial Sequence
  Description of Artificial Sequence: Synthetic peptide
  Seed: RASVGRMIG
RTSVGRMIR

SEQ ID NO: 12109 - protein, 9 aa, Artificial Sequence
  Description of Artificial Sequence: Synthetic peptide
  Seed: RASVGRMIG
RTSVGRMIN

SEQ ID NO: 12110 - protein, 9 aa, Artificial Sequence
  Description of Artificial Sequence: Synthetic peptide
  Seed: RASVGRMIG
RTSVGRMIC

SEQ ID NO: 12111 - protein, 9 aa, Artificial Sequence
  Description of Artificial Sequence: Synthetic peptide
  Seed: RASVGRMIG
RTSVGRMIQ

SEQ ID NO: 12112 - protein, 9 aa, Artificial Sequence
  Description of Artificial Sequence: Synthetic peptide
  Seed: RASVGRMVG
RFSVGRMVY

SEQ ID NO: 12113 - protein, 9 aa, Artificial Sequence
  Description of Artificial Sequence: Synthetic peptide
  Seed: RASVGRMVG
RFSVGRMVV

SEQ ID NO: 12114 - protein, 9 aa, Artificial Sequence
  Description of Artificial Sequence: Synthetic peptide
  Seed: RASVGRMVG
RSSVGRMVA

SEQ ID NO: 12115 - protein, 10 aa, Artificial Sequence
  Description of Artificial Sequence: Synthetic peptide
  Seed: RATIMAAFTG
RNTIMAAFTI

SEQ ID NO: 12116 - protein, 10 aa, Artificial Sequence
  Description of Artificial Sequence: Synthetic peptide
  Seed: RATIMAAFTG
RRTIMAAFTG

SEQ ID NO: 12117 - protein, 10 aa, Artificial Sequence
  Description of Artificial Sequence: Synthetic peptide
  Seed: RATIMAAFTG
RRTIMAAFTI

SEQ ID NO: 12118 - protein, 10 aa, Artificial Sequence
  Description of Artificial Sequence: Synthetic peptide
  Seed: RATIMAAFTG
RRTIMAAFTL

SEQ ID NO: 12119 - protein, 10 aa, Artificial Sequence
  Description of Artificial Sequence: Synthetic peptide
  Seed: RATIMAAFTG
RRTIMAAFTM

SEQ ID NO: 12120 - protein, 10 aa, Artificial Sequence
  Description of Artificial Sequence: Synthetic peptide
  Seed: RATIMAAFTG
RRTIMAAFTF

SEQ ID NO: 12121 - protein, 10 aa, Artificial Sequence
  Description of Artificial Sequence: Synthetic peptide
  Seed: RATIMAAFTG
RRTIMAAFTW

SEQ ID NO: 12122 - protein, 10 aa, Artificial Sequence
  Description of Artificial Sequence: Synthetic peptide
  Seed: RATIMAAFTG
RRTIMAAFTY

SEQ ID NO: 12123 - protein, 10 aa, Artificial Sequence
  Description of Artificial Sequence: Synthetic peptide
  Seed: RATIMAAFTG
RRTIMAAFTV

SEQ ID NO: 12124 - protein, 10 aa, Artificial Sequence
  Description of Artificial Sequence: Synthetic peptide
  Seed: RATIMAAFTG
RNTIMAAFTG

SEQ ID NO: 12125 - protein, 10 aa, Artificial Sequence
  Description of Artificial Sequence: Synthetic peptide
  Seed: RATIMAAFTG
RNTIMAAFTL

SEQ ID NO: 12126 - protein, 10 aa, Artificial Sequence
  Description of Artificial Sequence: Synthetic peptide
  Seed: RATIMAAFTG
RDTIMAAFTW

SEQ ID NO: 12127 - protein, 10 aa, Artificial Sequence
  Description of Artificial Sequence: Synthetic peptide
  Seed: RATIMAAFTG
RNTIMAAFTM

SEQ ID NO: 12128 - protein, 10 aa, Artificial Sequence
  Description of Artificial Sequence: Synthetic peptide
  Seed: RATIMAAFTG
RNTIMAAFTF

SEQ ID NO: 12129 - protein, 10 aa, Artificial Sequence
  Description of Artificial Sequence: Synthetic peptide
  Seed: RATIMAAFTG
RNTIMAAFTW

SEQ ID NO: 12130 - protein, 10 aa, Artificial Sequence
  Description of Artificial Sequence: Synthetic peptide
  Seed: RATIMAAFTG
RNTIMAAFTY

SEQ ID NO: 12131 - protein, 10 aa, Artificial Sequence
  Description of Artificial Sequence: Synthetic peptide
  Seed: RATIMAAFTG
RNTIMAAFTV

SEQ ID NO: 12132 - protein, 10 aa, Artificial Sequence
  Description of Artificial Sequence: Synthetic peptide
  Seed: RATIMAAFTG
RDTIMAAFTG

SEQ ID NO: 12133 - protein, 10 aa, Artificial Sequence
  Description of Artificial Sequence: Synthetic peptide
  Seed: RATIMAAFTG
RDTIMAAFTI

SEQ ID NO: 12134 - protein, 10 aa, Artificial Sequence
  Description of Artificial Sequence: Synthetic peptide
  Seed: RATIMAAFTG
RDTIMAAFTL

SEQ ID NO: 12135 - protein, 10 aa, Artificial Sequence
  Description of Artificial Sequence: Synthetic peptide
  Seed: RATIMAAFTG
RDTIMAAFTM

SEQ ID NO: 12136 - protein, 10 aa, Artificial Sequence
  Description of Artificial Sequence: Synthetic peptide
  Seed: RATIMAAFTG
RATIMAAFTV

SEQ ID NO: 12137 - protein, 10 aa, Artificial Sequence
  Description of Artificial Sequence: Synthetic peptide
  Seed: RATIMAAFTG
RATIMAAFTY

SEQ ID NO: 12138 - protein, 10 aa, Artificial Sequence
  Description of Artificial Sequence: Synthetic peptide
  Seed: RATIMAAFTG
RATIMAAFTW

SEQ ID NO: 12139 - protein, 10 aa, Artificial Sequence
  Description of Artificial Sequence: Synthetic peptide
  Seed: RATIMAAFTG
RATIMAAFTF

SEQ ID NO: 12140 - protein, 8 aa, Artificial Sequence
  Description of Artificial Sequence: Synthetic peptide
  Seed: RATIMAAF
RSTIMAAL

SEQ ID NO: 12141 - protein, 8 aa, Artificial Sequence
  Description of Artificial Sequence: Synthetic peptide
  Seed: RATIMAAF
RSTIMAAM

SEQ ID NO: 12142 - protein, 8 aa, Artificial Sequence
  Description of Artificial Sequence: Synthetic peptide
  Seed: RATIMAAF
RSTIMAAW

SEQ ID NO: 12143 - protein, 8 aa, Artificial Sequence
  Description of Artificial Sequence: Synthetic peptide
  Seed: RATIMAAF
RSTIMAAY

SEQ ID NO: 12144 - protein, 8 aa, Artificial Sequence
  Description of Artificial Sequence: Synthetic peptide
  Seed: RATIMAAF
RTTIMAAL

SEQ ID NO: 12145 - protein, 8 aa, Artificial Sequence
  Description of Artificial Sequence: Synthetic peptide
  Seed: RATIMAAF
RTTIMAAM

SEQ ID NO: 12146 - protein, 8 aa, Artificial Sequence
  Description of Artificial Sequence: Synthetic peptide
  Seed: RATIMAAF
RTTIMAAW

SEQ ID NO: 12147 - protein, 8 aa, Artificial Sequence
  Description of Artificial Sequence: Synthetic peptide
  Seed: RATIMAAF
RTTIMAAY

SEQ ID NO: 12148 - protein, 8 aa, Artificial Sequence
  Description of Artificial Sequence: Synthetic peptide
  Seed: RATIMAAF
RYTIMAAF

SEQ ID NO: 12149 - protein, 8 aa, Artificial Sequence
  Description of Artificial Sequence: Synthetic peptide
  Seed: RATIMAAF
RYTIMAAY

SEQ ID NO: 12150 - protein, 8 aa, Artificial Sequence
  Description of Artificial Sequence: Synthetic peptide
  Seed: RATIMAAF
RVTIMAAW

SEQ ID NO: 12151 - protein, 8 aa, Artificial Sequence
  Description of Artificial Sequence: Synthetic peptide
  Seed: RATIMAAF
RVTIMAAY

SEQ ID NO: 12152 - protein, 10 aa, Artificial Sequence
  Description of Artificial Sequence: Synthetic peptide
  Seed: RATIMAAFTG
RATIMAAFTN

SEQ ID NO: 12153 - protein, 10 aa, Artificial Sequence
  Description of Artificial Sequence: Synthetic peptide
  Seed: RATIMAAFTG
RATIMAAFTI

SEQ ID NO: 12154 - protein, 10 aa, Artificial Sequence
  Description of Artificial Sequence: Synthetic peptide
  Seed: RATIMAAFTG
RATIMAAFTL

SEQ ID NO: 12155 - protein, 10 aa, Artificial Sequence
  Description of Artificial Sequence: Synthetic peptide
  Seed: RATIMAAFTG
RATIMAAFTM

SEQ ID NO: 12156 - protein, 10 aa, Artificial Sequence
  Description of Artificial Sequence: Synthetic peptide
  Seed: RATIMAAFTG
RDTIMAAFTF

SEQ ID NO: 12157 - protein, 10 aa, Artificial Sequence
  Description of Artificial Sequence: Synthetic peptide
  Seed: RATIMAAFTG
RDTIMAAFTY

SEQ ID NO: 12158 - protein, 9 aa, Artificial Sequence
  Description of Artificial Sequence: Synthetic peptide
  Seed: RASVGRMVG
RSSVGRMVR

SEQ ID NO: 12159 - protein, 10 aa, Artificial Sequence
  Description of Artificial Sequence: Synthetic peptide
  Seed: RATIMAAFTG
RHTIMAAFTG

SEQ ID NO: 12160 - protein, 10 aa, Artificial Sequence
  Description of Artificial Sequence: Synthetic peptide
  Seed: RATIMAAFTG
RETIMAAFTV

SEQ ID NO: 12161 - protein, 10 aa, Artificial Sequence
  Description of Artificial Sequence: Synthetic peptide
  Seed: RATIMAAFTG
RGTIMAAFTG

SEQ ID NO: 12162 - protein, 10 aa, Artificial Sequence
  Description of Artificial Sequence: Synthetic peptide
  Seed: RATIMAAFTG
RGTIMAAFTI

SEQ ID NO: 12163 - protein, 10 aa, Artificial Sequence
  Description of Artificial Sequence: Synthetic peptide
  Seed: RATIMAAFTG
RGTIMAAFTL

SEQ ID NO: 12164 - protein, 10 aa, Artificial Sequence
  Description of Artificial Sequence: Synthetic peptide
  Seed: RATIMAAFTG
RGTIMAAFTM

SEQ ID NO: 12165 - protein, 10 aa, Artificial Sequence
  Description of Artificial Sequence: Synthetic peptide
  Seed: RATIMAAFTG
RGTIMAAFTF

SEQ ID NO: 12166 - protein, 10 aa, Artificial Sequence
  Description of Artificial Sequence: Synthetic peptide
  Seed: RATIMAAFTG
RGTIMAAFTW

SEQ ID NO: 12167 - protein, 10 aa, Artificial Sequence
  Description of Artificial Sequence: Synthetic peptide
  Seed: RATIMAAFTG
RGTIMAAFTY

SEQ ID NO: 12168 - protein, 10 aa, Artificial Sequence
  Description of Artificial Sequence: Synthetic peptide
  Seed: RATIMAAFTG
RGTIMAAFTV

SEQ ID NO: 12169 - protein, 10 aa, Artificial Sequence
  Description of Artificial Sequence: Synthetic peptide
  Seed: RATIMAAFTG
RHTIMAAFTI

SEQ ID NO: 12170 - protein, 10 aa, Artificial Sequence
  Description of Artificial Sequence: Synthetic peptide
  Seed: RATIMAAFTG
RDTIMAAFTV

SEQ ID NO: 12171 - protein, 10 aa, Artificial Sequence
  Description of Artificial Sequence: Synthetic peptide
  Seed: RATIMAAFTG
RHTIMAAFTL

SEQ ID NO: 12172 - protein, 10 aa, Artificial Sequence
  Description of Artificial Sequence: Synthetic peptide
  Seed: RATIMAAFTG
RHTIMAAFTM

SEQ ID NO: 12173 - protein, 10 aa, Artificial Sequence
  Description of Artificial Sequence: Synthetic peptide
  Seed: RATIMAAFTG
RHTIMAAFTF

SEQ ID NO: 12174 - protein, 10 aa, Artificial Sequence
  Description of Artificial Sequence: Synthetic peptide
  Seed: RATIMAAFTG
RHTIMAAFTW

SEQ ID NO: 12175 - protein, 10 aa, Artificial Sequence
  Description of Artificial Sequence: Synthetic peptide
  Seed: RATIMAAFTG
RHTIMAAFTY

SEQ ID NO: 12176 - protein, 10 aa, Artificial Sequence
  Description of Artificial Sequence: Synthetic peptide
  Seed: RATIMAAFTG
RHTIMAAFTV

SEQ ID NO: 12177 - protein, 10 aa, Artificial Sequence
  Description of Artificial Sequence: Synthetic peptide
  Seed: RATIMAAFTG
RITIMAAFTG

SEQ ID NO: 12178 - protein, 10 aa, Artificial Sequence
  Description of Artificial Sequence: Synthetic peptide
  Seed: RATIMAAFTG
RITIMAAFTI

SEQ ID NO: 12179 - protein, 10 aa, Artificial Sequence
  Description of Artificial Sequence: Synthetic peptide
  Seed: RATIMAAFTG
RITIMAAFTL

SEQ ID NO: 12180 - protein, 10 aa, Artificial Sequence
  Description of Artificial Sequence: Synthetic peptide
  Seed: RATIMAAFTG
RETIMAAFTY

SEQ ID NO: 12181 - protein, 10 aa, Artificial Sequence
  Description of Artificial Sequence: Synthetic peptide
  Seed: RATIMAAFTG
RETIMAAFTW

SEQ ID NO: 12182 - protein, 10 aa, Artificial Sequence
  Description of Artificial Sequence: Synthetic peptide
  Seed: RATIMAAFTG
RETIMAAFTF

SEQ ID NO: 12183 - protein, 10 aa, Artificial Sequence
  Description of Artificial Sequence: Synthetic peptide
  Seed: RATIMAAFTG
RETIMAAFTM

SEQ ID NO: 12184 - protein, 10 aa, Artificial Sequence
  Description of Artificial Sequence: Synthetic peptide
  Seed: RATIMAAFTG
RCTIMAAFTG

SEQ ID NO: 12185 - protein, 10 aa, Artificial Sequence
  Description of Artificial Sequence: Synthetic peptide
  Seed: RATIMAAFTG
RCTIMAAFTI

SEQ ID NO: 12186 - protein, 10 aa, Artificial Sequence
  Description of Artificial Sequence: Synthetic peptide
  Seed: RATIMAAFTG
RCTIMAAFTL

SEQ ID NO: 12187 - protein, 10 aa, Artificial Sequence
  Description of Artificial Sequence: Synthetic peptide
  Seed: RATIMAAFTG
RCTIMAAFTM

SEQ ID NO: 12188 - protein, 10 aa, Artificial Sequence
  Description of Artificial Sequence: Synthetic peptide
  Seed: RATIMAAFTG
RCTIMAAFTF

SEQ ID NO: 12189 - protein, 10 aa, Artificial Sequence
  Description of Artificial Sequence: Synthetic peptide
  Seed: RATIMAAFTG
RCTIMAAFTW

SEQ ID NO: 12190 - protein, 10 aa, Artificial Sequence
  Description of Artificial Sequence: Synthetic peptide
  Seed: RATIMAAFTG
RCTIMAAFTY

SEQ ID NO: 12191 - protein, 10 aa, Artificial Sequence
  Description of Artificial Sequence: Synthetic peptide
  Seed: RATIMAAFTG
RCTIMAAFTV

SEQ ID NO: 12192 - protein, 10 aa, Artificial Sequence
  Description of Artificial Sequence: Synthetic peptide
  Seed: RATIMAAFTG
RQTIMAAFTG

SEQ ID NO: 12193 - protein, 10 aa, Artificial Sequence
  Description of Artificial Sequence: Synthetic peptide
  Seed: RATIMAAFTG
RQTIMAAFTI

SEQ ID NO: 12194 - protein, 10 aa, Artificial Sequence
  Description of Artificial Sequence: Synthetic peptide
  Seed: RATIMAAFTG
RQTIMAAFTL

SEQ ID NO: 12195 - protein, 10 aa, Artificial Sequence
  Description of Artificial Sequence: Synthetic peptide
  Seed: RATIMAAFTG
RQTIMAAFTM

SEQ ID NO: 12196 - protein, 10 aa, Artificial Sequence
  Description of Artificial Sequence: Synthetic peptide
  Seed: RATIMAAFTG
RQTIMAAFTF

SEQ ID NO: 12197 - protein, 10 aa, Artificial Sequence
  Description of Artificial Sequence: Synthetic peptide
  Seed: RATIMAAFTG
RQTIMAAFTW

SEQ ID NO: 12198 - protein, 10 aa, Artificial Sequence
  Description of Artificial Sequence: Synthetic peptide
  Seed: RATIMAAFTG
RQTIMAAFTY

SEQ ID NO: 12199 - protein, 10 aa, Artificial Sequence
  Description of Artificial Sequence: Synthetic peptide
  Seed: RATIMAAFTG
RQTIMAAFTV

SEQ ID NO: 12200 - protein, 10 aa, Artificial Sequence
  Description of Artificial Sequence: Synthetic peptide
  Seed: RATIMAAFTG
RETIMAAFTG

SEQ ID NO: 12201 - protein, 10 aa, Artificial Sequence
  Description of Artificial Sequence: Synthetic peptide
  Seed: RATIMAAFTG
RETIMAAFTI

SEQ ID NO: 12202 - protein, 10 aa, Artificial Sequence
  Description of Artificial Sequence: Synthetic peptide
  Seed: RATIMAAFTG
RETIMAAFTL

SEQ ID NO: 12203 - protein, 8 aa, Artificial Sequence
  Description of Artificial Sequence: Synthetic peptide
  Seed: RATIMAAF
RFTIMAAY

SEQ ID NO: 12204 - protein, 8 aa, Artificial Sequence
  Description of Artificial Sequence: Synthetic peptide
  Seed: RATIMAAF
RFTIMAAF

SEQ ID NO: 12205 - protein, 9 aa, Artificial Sequence
  Description of Artificial Sequence: Synthetic peptide
  Seed: RASVGRMVG
RTSVGRMVV

SEQ ID NO: 12206 - protein, 9 aa, Artificial Sequence
  Description of Artificial Sequence: Synthetic peptide
  Seed: RASVGRMVG
RTSVGRMVI

SEQ ID NO: 12207 - protein, 9 aa, Artificial Sequence
  Description of Artificial Sequence: Synthetic peptide
  Seed: RASVGRMVG
RTSVGRMVL

SEQ ID NO: 12208 - protein, 9 aa, Artificial Sequence
  Description of Artificial Sequence: Synthetic peptide
  Seed: RASVGRMVG
RTSVGRMVK

SEQ ID NO: 12209 - protein, 9 aa, Artificial Sequence
  Description of Artificial Sequence: Synthetic peptide
  Seed: RASVGRMVG
RTSVGRMVM

SEQ ID NO: 12210 - protein, 9 aa, Artificial Sequence
  Description of Artificial Sequence: Synthetic peptide
  Seed: RASVGRMVG
RTSVGRMVF

SEQ ID NO: 12211 - protein, 9 aa, Artificial Sequence
  Description of Artificial Sequence: Synthetic peptide
  Seed: RASVGRMVG
RTSVGRMVP

SEQ ID NO: 12212 - protein, 9 aa, Artificial Sequence
  Description of Artificial Sequence: Synthetic peptide
  Seed: RASVGRMVG
RTSVGRMVS

SEQ ID NO: 12213 - protein, 9 aa, Artificial Sequence
  Description of Artificial Sequence: Synthetic peptide
  Seed: RASVGRMVG
RTSVGRMVT

SEQ ID NO: 12214 - protein, 9 aa, Artificial Sequence
  Description of Artificial Sequence: Synthetic peptide
  Seed: RASVGRMVG
RTSVGRMVY

SEQ ID NO: 12215 - protein, 9 aa, Artificial Sequence
  Description of Artificial Sequence: Synthetic peptide
  Seed: RASVGRMVG
RWSVGRMVA

SEQ ID NO: 12216 - protein, 8 aa, Artificial Sequence
  Description of Artificial Sequence: Synthetic peptide
  Seed: RATIMAAF
RMTIMAAY

SEQ ID NO: 12217 - protein, 9 aa, Artificial Sequence
  Description of Artificial Sequence: Synthetic peptide
  Seed: RASVGRMVG
RWSVGRMVI

SEQ ID NO: 12218 - protein, 9 aa, Artificial Sequence
  Description of Artificial Sequence: Synthetic peptide
  Seed: RASVGRMVG
RWSVGRMVL

SEQ ID NO: 12219 - protein, 9 aa, Artificial Sequence
  Description of Artificial Sequence: Synthetic peptide
  Seed: RASVGRMVG
RWSVGRMVK

SEQ ID NO: 12220 - protein, 9 aa, Artificial Sequence
  Description of Artificial Sequence: Synthetic peptide
  Seed: RASVGRMVG
RWSVGRMVM

SEQ ID NO: 12221 - protein, 9 aa, Artificial Sequence
  Description of Artificial Sequence: Synthetic peptide
  Seed: RASVGRMVG
RWSVGRMVV

SEQ ID NO: 12222 - protein, 9 aa, Artificial Sequence
  Description of Artificial Sequence: Synthetic peptide
  Seed: RASVGRMVG
RYSVGRMVA

SEQ ID NO: 12223 - protein, 9 aa, Artificial Sequence
  Description of Artificial Sequence: Synthetic peptide
  Seed: RASVGRMVG
RYSVGRMVR

SEQ ID NO: 12224 - protein, 9 aa, Artificial Sequence
  Description of Artificial Sequence: Synthetic peptide
  Seed: RASVGRMVG
RYSVGRMVG

SEQ ID NO: 12225 - protein, 9 aa, Artificial Sequence
  Description of Artificial Sequence: Synthetic peptide
  Seed: RASVGRMVG
RYSVGRMVI

SEQ ID NO: 12226 - protein, 9 aa, Artificial Sequence
  Description of Artificial Sequence: Synthetic peptide
  Seed: RASVGRMVG
RTSVGRMVH

SEQ ID NO: 12227 - protein, 9 aa, Artificial Sequence
  Description of Artificial Sequence: Synthetic peptide
  Seed: RASVGRMVG
RTSVGRMVG

SEQ ID NO: 12228 - protein, 9 aa, Artificial Sequence
  Description of Artificial Sequence: Synthetic peptide
  Seed: RASVGRMVG
RTSVGRMVE

SEQ ID NO: 12229 - protein, 9 aa, Artificial Sequence
  Description of Artificial Sequence: Synthetic peptide
  Seed: RASVGRMVG
RTSVGRMVQ

SEQ ID NO: 12230 - protein, 9 aa, Artificial Sequence
  Description of Artificial Sequence: Synthetic peptide
  Seed: RASVGRMVG
RSSVGRMVN

SEQ ID NO: 12231 - protein, 9 aa, Artificial Sequence
  Description of Artificial Sequence: Synthetic peptide
  Seed: RASVGRMVG
RSSVGRMVC

SEQ ID NO: 12232 - protein, 9 aa, Artificial Sequence
  Description of Artificial Sequence: Synthetic peptide
  Seed: RASVGRMVG
RSSVGRMVQ

SEQ ID NO: 12233 - protein, 9 aa, Artificial Sequence
  Description of Artificial Sequence: Synthetic peptide
  Seed: RASVGRMVG
RSSVGRMVH

SEQ ID NO: 12234 - protein, 9 aa, Artificial Sequence
  Description of Artificial Sequence: Synthetic peptide
  Seed: RASVGRMVG
RSSVGRMVI

SEQ ID NO: 12235 - protein, 9 aa, Artificial Sequence
  Description of Artificial Sequence: Synthetic peptide
  Seed: RASVGRMVG
RSSVGRMVL

SEQ ID NO: 12236 - protein, 9 aa, Artificial Sequence
  Description of Artificial Sequence: Synthetic peptide
  Seed: RASVGRMVG
RSSVGRMVK

SEQ ID NO: 12237 - protein, 9 aa, Artificial Sequence
  Description of Artificial Sequence: Synthetic peptide
  Seed: RASVGRMVG
RSSVGRMVM

SEQ ID NO: 12238 - protein, 9 aa, Artificial Sequence
  Description of Artificial Sequence: Synthetic peptide
  Seed: RASVGRMVG
RSSVGRMVF

SEQ ID NO: 12239 - protein, 9 aa, Artificial Sequence
  Description of Artificial Sequence: Synthetic peptide
  Seed: RASVGRMVG
RSSVGRMVP

SEQ ID NO: 12240 - protein, 9 aa, Artificial Sequence
  Description of Artificial Sequence: Synthetic peptide
  Seed: RASVGRMVG
RSSVGRMVS

SEQ ID NO: 12241 - protein, 9 aa, Artificial Sequence
  Description of Artificial Sequence: Synthetic peptide
  Seed: RASVGRMVG
RSSVGRMVT

SEQ ID NO: 12242 - protein, 9 aa, Artificial Sequence
  Description of Artificial Sequence: Synthetic peptide
  Seed: RASVGRMVG
RSSVGRMVY

SEQ ID NO: 12243 - protein, 9 aa, Artificial Sequence
  Description of Artificial Sequence: Synthetic peptide
  Seed: RASVGRMVG
RSSVGRMVV

SEQ ID NO: 12244 - protein, 9 aa, Artificial Sequence
  Description of Artificial Sequence: Synthetic peptide
  Seed: RASVGRMVG
RTSVGRMVA

SEQ ID NO: 12245 - protein, 9 aa, Artificial Sequence
  Description of Artificial Sequence: Synthetic peptide
  Seed: RASVGRMVG
RTSVGRMVR

SEQ ID NO: 12246 - protein, 9 aa, Artificial Sequence
  Description of Artificial Sequence: Synthetic peptide
  Seed: RASVGRMVG
RTSVGRMVN

SEQ ID NO: 12247 - protein, 9 aa, Artificial Sequence
  Description of Artificial Sequence: Synthetic peptide
  Seed: RASVGRMVG
RTSVGRMVC

SEQ ID NO: 12248 - protein, 9 aa, Artificial Sequence
  Description of Artificial Sequence: Synthetic peptide
  Seed: RASVGRMVG
RYSVGRMVL

SEQ ID NO: 12249 - protein, 9 aa, Artificial Sequence
  Description of Artificial Sequence: Synthetic peptide
  Seed: RASVGRMVG
RYSVGRMVK

SEQ ID NO: 12250 - protein, 9 aa, Artificial Sequence
  Description of Artificial Sequence: Synthetic peptide
  Seed: RASVGRMVG
RYSVGRMVM

SEQ ID NO: 12251 - protein, 8 aa, Artificial Sequence
  Description of Artificial Sequence: Synthetic peptide
  Seed: RATIMAAF
RATIMAAW

SEQ ID NO: 12252 - protein, 8 aa, Artificial Sequence
  Description of Artificial Sequence: Synthetic peptide
  Seed: RATIMAAF
RRTIMAAY

SEQ ID NO: 12253 - protein, 8 aa, Artificial Sequence
  Description of Artificial Sequence: Synthetic peptide
  Seed: RATIMAAF
RQTIMAAI

SEQ ID NO: 12254 - protein, 8 aa, Artificial Sequence
  Description of Artificial Sequence: Synthetic peptide
  Seed: RATIMAAF
RQTIMAAL

SEQ ID NO: 12255 - protein, 8 aa, Artificial Sequence
  Description of Artificial Sequence: Synthetic peptide
  Seed: RATIMAAF
RQTIMAAM

SEQ ID NO: 12256 - protein, 8 aa, Artificial Sequence
  Description of Artificial Sequence: Synthetic peptide
  Seed: RATIMAAF
RQTIMAAF

SEQ ID NO: 12257 - protein, 8 aa, Artificial Sequence
  Description of Artificial Sequence: Synthetic peptide
  Seed: RATIMAAF
RQTIMAAW

SEQ ID NO: 12258 - protein, 8 aa, Artificial Sequence
  Description of Artificial Sequence: Synthetic peptide
  Seed: RATIMAAF
RQTIMAAY

SEQ ID NO: 12259 - protein, 8 aa, Artificial Sequence
  Description of Artificial Sequence: Synthetic peptide
  Seed: RATIMAAF
RETIMAAF

SEQ ID NO: 12260 - protein, 8 aa, Artificial Sequence
  Description of Artificial Sequence: Synthetic peptide
  Seed: RATIMAAF
RETIMAAY

SEQ ID NO: 12261 - protein, 8 aa, Artificial Sequence
  Description of Artificial Sequence: Synthetic peptide
  Seed: RATIMAAF
RHTIMAAF

SEQ ID NO: 12262 - protein, 8 aa, Artificial Sequence
  Description of Artificial Sequence: Synthetic peptide
  Seed: RATIMAAF
RHTIMAAY

SEQ ID NO: 12263 - protein, 8 aa, Artificial Sequence
  Description of Artificial Sequence: Synthetic peptide
  Seed: RATIMAAF
RITIMAAY

SEQ ID NO: 12264 - protein, 8 aa, Artificial Sequence
  Description of Artificial Sequence: Synthetic peptide
  Seed: RATIMAAF
RLTIMAAF

SEQ ID NO: 12265 - protein, 8 aa, Artificial Sequence
  Description of Artificial Sequence: Synthetic peptide
  Seed: RATIMAAF
RLTIMAAY

SEQ ID NO: 12266 - protein, 8 aa, Artificial Sequence
  Description of Artificial Sequence: Synthetic peptide
  Seed: RATIMAAF
RKTIMAAM

SEQ ID NO: 12267 - protein, 8 aa, Artificial Sequence
  Description of Artificial Sequence: Synthetic peptide
  Seed: RATIMAAF
RKTIMAAF

SEQ ID NO: 12268 - protein, 8 aa, Artificial Sequence
  Description of Artificial Sequence: Synthetic peptide
  Seed: RATIMAAF
RKTIMAAY

SEQ ID NO: 12269 - protein, 8 aa, Artificial Sequence
  Description of Artificial Sequence: Synthetic peptide
  Seed: RATIMAAF
RMTIMAAM

SEQ ID NO: 12270 - protein, 8 aa, Artificial Sequence
  Description of Artificial Sequence: Synthetic peptide
  Seed: RATIMAAF
RMTIMAAF

SEQ ID NO: 12271 - protein, 8 aa, Artificial Sequence
  Description of Artificial Sequence: Synthetic peptide
  Seed: RATIMAAF
RATIMAAY

SEQ ID NO: 12272 - protein, 8 aa, Artificial Sequence
  Description of Artificial Sequence: Synthetic peptide
  Seed: RATIMAAF
RATIMAAM

SEQ ID NO: 12273 - protein, 9 aa, Artificial Sequence
  Description of Artificial Sequence: Synthetic peptide
  Seed: RASVGRMVG
RYSVGRMVS

SEQ ID NO: 12274 - protein, 8 aa, Artificial Sequence
  Description of Artificial Sequence: Synthetic peptide
  Seed: RATIMAAF
RATIMAAL

SEQ ID NO: 12275 - protein, 9 aa, Artificial Sequence
  Description of Artificial Sequence: Synthetic peptide
  Seed: RASVGRMVG
RYSVGRMVT

SEQ ID NO: 12276 - protein, 9 aa, Artificial Sequence
  Description of Artificial Sequence: Synthetic peptide
  Seed: RASVGRMVG
RYSVGRMVY

SEQ ID NO: 12277 - protein, 9 aa, Artificial Sequence
  Description of Artificial Sequence: Synthetic peptide
  Seed: RASVGRMVG
RYSVGRMVV

SEQ ID NO: 12278 - protein, 9 aa, Artificial Sequence
  Description of Artificial Sequence: Synthetic peptide
  Seed: RASVGRMVG
RVSVGRMVA

SEQ ID NO: 12279 - protein, 9 aa, Artificial Sequence
  Description of Artificial Sequence: Synthetic peptide
  Seed: RASVGRMVG
RVSVGRMVR

SEQ ID NO: 12280 - protein, 9 aa, Artificial Sequence
  Description of Artificial Sequence: Synthetic peptide
  Seed: RASVGRMVG
RVSVGRMVN

SEQ ID NO: 12281 - protein, 9 aa, Artificial Sequence
  Description of Artificial Sequence: Synthetic peptide
  Seed: RASVGRMVG
RVSVGRMVQ

SEQ ID NO: 12282 - protein, 9 aa, Artificial Sequence
  Description of Artificial Sequence: Synthetic peptide
  Seed: RASVGRMVG
RVSVGRMVG

SEQ ID NO: 12283 - protein, 9 aa, Artificial Sequence
  Description of Artificial Sequence: Synthetic peptide
  Seed: RASVGRMVG
RVSVGRMVH

SEQ ID NO: 12284 - protein, 9 aa, Artificial Sequence
  Description of Artificial Sequence: Synthetic peptide
  Seed: RASVGRMVG
RVSVGRMVI

SEQ ID NO: 12285 - protein, 9 aa, Artificial Sequence
  Description of Artificial Sequence: Synthetic peptide
  Seed: RASVGRMVG
RVSVGRMVL

SEQ ID NO: 12286 - protein, 9 aa, Artificial Sequence
  Description of Artificial Sequence: Synthetic peptide
  Seed: RASVGRMVG
RVSVGRMVK

SEQ ID NO: 12287 - protein, 9 aa, Artificial Sequence
  Description of Artificial Sequence: Synthetic peptide
  Seed: RASVGRMVG
RVSVGRMVM

SEQ ID NO: 12288 - protein, 9 aa, Artificial Sequence
  Description of Artificial Sequence: Synthetic peptide
  Seed: RASVGRMVG
RVSVGRMVF

SEQ ID NO: 12289 - protein, 9 aa, Artificial Sequence
  Description of Artificial Sequence: Synthetic peptide
  Seed: RASVGRMVG
RVSVGRMVP

SEQ ID NO: 12290 - protein, 9 aa, Artificial Sequence
  Description of Artificial Sequence: Synthetic peptide
  Seed: RASVGRMVG
RVSVGRMVS

SEQ ID NO: 12291 - protein, 9 aa, Artificial Sequence
  Description of Artificial Sequence: Synthetic peptide
  Seed: RASVGRMVG
RVSVGRMVT

SEQ ID NO: 12292 - protein, 9 aa, Artificial Sequence
  Description of Artificial Sequence: Synthetic peptide
  Seed: RASVGRMVG
RVSVGRMVY

SEQ ID NO: 12293 - protein, 9 aa, Artificial Sequence
  Description of Artificial Sequence: Synthetic peptide
  Seed: RASVGRMVG
RVSVGRMVV

SEQ ID NO: 12294 - protein, 10 aa, Artificial Sequence
  Description of Artificial Sequence: Synthetic peptide
  Seed: RGTKVSPRGK
RETKVSPRGC

SEQ ID NO: 12295 - protein, 10 aa, Artificial Sequence
  Description of Artificial Sequence: Synthetic peptide
  Seed: RGTKVSPRGK
RETKVSPRGL

SEQ ID NO: 12296 - protein, 11 aa, Artificial Sequence
  Description of Artificial Sequence: Synthetic peptide
  Seed: RMIGGIGRFYI
RMIGGIGRFYV

SEQ ID NO: 12297 - protein, 10 aa, Artificial Sequence
  Description of Artificial Sequence: Synthetic peptide
  Seed: RLLQNSQVFS
RQLQNSQVFP

SEQ ID NO: 12298 - protein, 10 aa, Artificial Sequence
  Description of Artificial Sequence: Synthetic peptide
  Seed: RLLQNSQVFS
RQLQNSQVFQ

SEQ ID NO: 12299 - protein, 10 aa, Artificial Sequence
  Description of Artificial Sequence: Synthetic peptide
  Seed: RLLQNSQVFS
RQLQNSQVFE

SEQ ID NO: 12300 - protein, 10 aa, Artificial Sequence
  Description of Artificial Sequence: Synthetic peptide
  Seed: RLLQNSQVFS
RQLQNSQVFG

SEQ ID NO: 12301 - protein, 10 aa, Artificial Sequence
  Description of Artificial Sequence: Synthetic peptide
  Seed: RLLQNSQVFS
RQLQNSQVFH

SEQ ID NO: 12302 - protein, 10 aa, Artificial Sequence
  Description of Artificial Sequence: Synthetic peptide
  Seed: RLLQNSQVFS
RQLQNSQVFI

SEQ ID NO: 12303 - protein, 10 aa, Artificial Sequence
  Description of Artificial Sequence: Synthetic peptide
  Seed: RLLQNSQVFS
RQLQNSQVFL

SEQ ID NO: 12304 - protein, 10 aa, Artificial Sequence
  Description of Artificial Sequence: Synthetic peptide
  Seed: RLLQNSQVFS
RQLQNSQVFK

SEQ ID NO: 12305 - protein, 10 aa, Artificial Sequence
  Description of Artificial Sequence: Synthetic peptide
  Seed: RLLQNSQVFS
RQLQNSQVFM

SEQ ID NO: 12306 - protein, 10 aa, Artificial Sequence
  Description of Artificial Sequence: Synthetic peptide
  Seed: RLLQNSQVFS
RQLQNSQVFF

SEQ ID NO: 12307 - protein, 10 aa, Artificial Sequence
  Description of Artificial Sequence: Synthetic peptide
  Seed: RLLQNSQVFS
RQLQNSQVFS

SEQ ID NO: 12308 - protein, 10 aa, Artificial Sequence
  Description of Artificial Sequence: Synthetic peptide
  Seed: RLLQNSQVFS
RILQNSQVFM

SEQ ID NO: 12309 - protein, 10 aa, Artificial Sequence
  Description of Artificial Sequence: Synthetic peptide
  Seed: RLLQNSQVFS
RQLQNSQVFT

SEQ ID NO: 12310 - protein, 10 aa, Artificial Sequence
  Description of Artificial Sequence: Synthetic peptide
  Seed: RLLQNSQVFS
RQLQNSQVFW

SEQ ID NO: 12311 - protein, 10 aa, Artificial Sequence
  Description of Artificial Sequence: Synthetic peptide
  Seed: RLLQNSQVFS
RQLQNSQVFY

SEQ ID NO: 12312 - protein, 10 aa, Artificial Sequence
  Description of Artificial Sequence: Synthetic peptide
  Seed: RLLQNSQVFS
RQLQNSQVFV

SEQ ID NO: 12313 - protein, 10 aa, Artificial Sequence
  Description of Artificial Sequence: Synthetic peptide
  Seed: RLLQNSQVFS
RELQNSQVFF

SEQ ID NO: 12314 - protein, 10 aa, Artificial Sequence
  Description of Artificial Sequence: Synthetic peptide
  Seed: RLLQNSQVFS
RELQNSQVFY

SEQ ID NO: 12315 - protein, 10 aa, Artificial Sequence
  Description of Artificial Sequence: Synthetic peptide
  Seed: RLLQNSQVFS
RGLQNSQVFF

SEQ ID NO: 12316 - protein, 10 aa, Artificial Sequence
  Description of Artificial Sequence: Synthetic peptide
  Seed: RLLQNSQVFS
RGLQNSQVFY

SEQ ID NO: 12317 - protein, 10 aa, Artificial Sequence
  Description of Artificial Sequence: Synthetic peptide
  Seed: RLLQNSQVFS
RHLQNSQVFF

SEQ ID NO: 12318 - protein, 10 aa, Artificial Sequence
  Description of Artificial Sequence: Synthetic peptide
  Seed: RLLQNSQVFS
RQLQNSQVFC

SEQ ID NO: 12319 - protein, 10 aa, Artificial Sequence
  Description of Artificial Sequence: Synthetic peptide
  Seed: RLLQNSQVFS
RQLQNSQVFD

SEQ ID NO: 12320 - protein, 10 aa, Artificial Sequence
  Description of Artificial Sequence: Synthetic peptide
  Seed: RLLQNSQVFS
RQLQNSQVFN

SEQ ID NO: 12321 - protein, 10 aa, Artificial Sequence
  Description of Artificial Sequence: Synthetic peptide
  Seed: RLLQNSQVFS
RQLQNSQVFR

SEQ ID NO: 12322 - protein, 9 aa, Artificial Sequence
  Description of Artificial Sequence: Synthetic peptide
  Seed: RLLQNSQVF
RVLQNSQVI

SEQ ID NO: 12323 - protein, 9 aa, Artificial Sequence
  Description of Artificial Sequence: Synthetic peptide
  Seed: RLLQNSQVF
RVLQNSQVL

SEQ ID NO: 12324 - protein, 9 aa, Artificial Sequence
  Description of Artificial Sequence: Synthetic peptide
  Seed: RLLQNSQVF
RVLQNSQVM

SEQ ID NO: 12325 - protein, 9 aa, Artificial Sequence
  Description of Artificial Sequence: Synthetic peptide
  Seed: RLLQNSQVF
RVLQNSQVF

SEQ ID NO: 12326 - protein, 9 aa, Artificial Sequence
  Description of Artificial Sequence: Synthetic peptide
  Seed: RLLQNSQVF
RVLQNSQVW

SEQ ID NO: 12327 - protein, 9 aa, Artificial Sequence
  Description of Artificial Sequence: Synthetic peptide
  Seed: RLLQNSQVF
RVLQNSQVY

SEQ ID NO: 12328 - protein, 9 aa, Artificial Sequence
  Description of Artificial Sequence: Synthetic peptide
  Seed: RLLQNSQVF
RVLQNSQVV

SEQ ID NO: 12329 - protein, 10 aa, Artificial Sequence
  Description of Artificial Sequence: Synthetic peptide
  Seed: RLLQNSQVFS
RALQNSQVFM

SEQ ID NO: 12330 - protein, 10 aa, Artificial Sequence
  Description of Artificial Sequence: Synthetic peptide
  Seed: RLLQNSQVFS
RALQNSQVFF

SEQ ID NO: 12331 - protein, 10 aa, Artificial Sequence
  Description of Artificial Sequence: Synthetic peptide
  Seed: RLLQNSQVFS
RALQNSQVFY

SEQ ID NO: 12332 - protein, 10 aa, Artificial Sequence
  Description of Artificial Sequence: Synthetic peptide
  Seed: RLLQNSQVFS
RRLQNSQVFF

SEQ ID NO: 12333 - protein, 10 aa, Artificial Sequence
  Description of Artificial Sequence: Synthetic peptide
  Seed: RLLQNSQVFS
RRLQNSQVFY

SEQ ID NO: 12334 - protein, 10 aa, Artificial Sequence
  Description of Artificial Sequence: Synthetic peptide
  Seed: RLLQNSQVFS
RNLQNSQVFF

SEQ ID NO: 12335 - protein, 10 aa, Artificial Sequence
  Description of Artificial Sequence: Synthetic peptide
  Seed: RLLQNSQVFS
RNLQNSQVFY

SEQ ID NO: 12336 - protein, 10 aa, Artificial Sequence
  Description of Artificial Sequence: Synthetic peptide
  Seed: RLLQNSQVFS
RDLQNSQVFF

SEQ ID NO: 12337 - protein, 10 aa, Artificial Sequence
  Description of Artificial Sequence: Synthetic peptide
  Seed: RLLQNSQVFS
RDLQNSQVFY

SEQ ID NO: 12338 - protein, 10 aa, Artificial Sequence
  Description of Artificial Sequence: Synthetic peptide
  Seed: RLLQNSQVFS
RCLQNSQVFF

SEQ ID NO: 12339 - protein, 10 aa, Artificial Sequence
  Description of Artificial Sequence: Synthetic peptide
  Seed: RLLQNSQVFS
RCLQNSQVFY

SEQ ID NO: 12340 - protein, 10 aa, Artificial Sequence
  Description of Artificial Sequence: Synthetic peptide
  Seed: RLLQNSQVFS
RQLQNSQVFA

SEQ ID NO: 12341 - protein, 10 aa, Artificial Sequence
  Description of Artificial Sequence: Synthetic peptide
  Seed: RLLQNSQVFS
RHLQNSQVFY

SEQ ID NO: 12342 - protein, 10 aa, Artificial Sequence
  Description of Artificial Sequence: Synthetic peptide
  Seed: RLLQNSQVFS
RILQNSQVFF

SEQ ID NO: 12343 - protein, 9 aa, Artificial Sequence
  Description of Artificial Sequence: Synthetic peptide
  Seed: RLLQNSQVF
RYLQNSQVV

SEQ ID NO: 12344 - protein, 10 aa, Artificial Sequence
  Description of Artificial Sequence: Synthetic peptide
  Seed: RLLQNSQVFS
RMLQNSQVFK

SEQ ID NO: 12345 - protein, 10 aa, Artificial Sequence
  Description of Artificial Sequence: Synthetic peptide
  Seed: RLLQNSQVFS
RMLQNSQVFN

SEQ ID NO: 12346 - protein, 10 aa, Artificial Sequence
  Description of Artificial Sequence: Synthetic peptide
  Seed: RLLQNSQVFS
RMLQNSQVFD

SEQ ID NO: 12347 - protein, 10 aa, Artificial Sequence
  Description of Artificial Sequence: Synthetic peptide
  Seed: RLLQNSQVFS
RMLQNSQVFC

SEQ ID NO: 12348 - protein, 10 aa, Artificial Sequence
  Description of Artificial Sequence: Synthetic peptide
  Seed: RLLQNSQVFS
RMLQNSQVFQ

SEQ ID NO: 12349 - protein, 10 aa, Artificial Sequence
  Description of Artificial Sequence: Synthetic peptide
  Seed: RLLQNSQVFS
RMLQNSQVFE

SEQ ID NO: 12350 - protein, 10 aa, Artificial Sequence
  Description of Artificial Sequence: Synthetic peptide
  Seed: RLLQNSQVFS
RMLQNSQVFG

SEQ ID NO: 12351 - protein, 10 aa, Artificial Sequence
  Description of Artificial Sequence: Synthetic peptide
  Seed: RLLQNSQVFS
RMLQNSQVFH

SEQ ID NO: 12352 - protein, 10 aa, Artificial Sequence
  Description of Artificial Sequence: Synthetic peptide
  Seed: RLLQNSQVFS
RMLQNSQVFI

SEQ ID NO: 12353 - protein, 10 aa, Artificial Sequence
  Description of Artificial Sequence: Synthetic peptide
  Seed: RLLQNSQVFS
RMLQNSQVFL

SEQ ID NO: 12354 - protein, 10 aa, Artificial Sequence
  Description of Artificial Sequence: Synthetic peptide
  Seed: RLLQNSQVFS
RMLQNSQVFM

SEQ ID NO: 12355 - protein, 10 aa, Artificial Sequence
  Description of Artificial Sequence: Synthetic peptide
  Seed: RLLQNSQVFS
RILQNSQVFY

SEQ ID NO: 12356 - protein, 10 aa, Artificial Sequence
  Description of Artificial Sequence: Synthetic peptide
  Seed: RLLQNSQVFS
RMLQNSQVFF

SEQ ID NO: 12357 - protein, 10 aa, Artificial Sequence
  Description of Artificial Sequence: Synthetic peptide
  Seed: RLLQNSQVFS
RMLQNSQVFP

SEQ ID NO: 12358 - protein, 10 aa, Artificial Sequence
  Description of Artificial Sequence: Synthetic peptide
  Seed: RLLQNSQVFS
RMLQNSQVFT

SEQ ID NO: 12359 - protein, 10 aa, Artificial Sequence
  Description of Artificial Sequence: Synthetic peptide
  Seed: RLLQNSQVFS
RMLQNSQVFW

SEQ ID NO: 12360 - protein, 10 aa, Artificial Sequence
  Description of Artificial Sequence: Synthetic peptide
  Seed: RLLQNSQVFS
RMLQNSQVFY

SEQ ID NO: 12361 - protein, 10 aa, Artificial Sequence
  Description of Artificial Sequence: Synthetic peptide
  Seed: RLLQNSQVFS
RMLQNSQVFV

SEQ ID NO: 12362 - protein, 10 aa, Artificial Sequence
  Description of Artificial Sequence: Synthetic peptide
  Seed: RLLQNSQVFS
RFLQNSQVFF

SEQ ID NO: 12363 - protein, 10 aa, Artificial Sequence
  Description of Artificial Sequence: Synthetic peptide
  Seed: RLLQNSQVFS
RFLQNSQVFY

SEQ ID NO: 12364 - protein, 10 aa, Artificial Sequence
  Description of Artificial Sequence: Synthetic peptide
  Seed: RLLQNSQVFS
RMLQNSQVFR

SEQ ID NO: 12365 - protein, 10 aa, Artificial Sequence
  Description of Artificial Sequence: Synthetic peptide
  Seed: RLLQNSQVFS
RMLQNSQVFA

SEQ ID NO: 12366 - protein, 10 aa, Artificial Sequence
  Description of Artificial Sequence: Synthetic peptide
  Seed: RLLQNSQVFS
RKLQNSQVFY

SEQ ID NO: 12367 - protein, 10 aa, Artificial Sequence
  Description of Artificial Sequence: Synthetic peptide
  Seed: RLLQNSQVFS
RKLQNSQVFF

SEQ ID NO: 12368 - protein, 10 aa, Artificial Sequence
  Description of Artificial Sequence: Synthetic peptide
  Seed: RLLQNSQVFS
RLLQNSQVFA

SEQ ID NO: 12369 - protein, 10 aa, Artificial Sequence
  Description of Artificial Sequence: Synthetic peptide
  Seed: RLLQNSQVFS
RLLQNSQVFR

SEQ ID NO: 12370 - protein, 10 aa, Artificial Sequence
  Description of Artificial Sequence: Synthetic peptide
  Seed: RLLQNSQVFS
RLLQNSQVFN

SEQ ID NO: 12371 - protein, 10 aa, Artificial Sequence
  Description of Artificial Sequence: Synthetic peptide
  Seed: RLLQNSQVFS
RLLQNSQVFD

SEQ ID NO: 12372 - protein, 10 aa, Artificial Sequence
  Description of Artificial Sequence: Synthetic peptide
  Seed: RLLQNSQVFS
RLLQNSQVFC

SEQ ID NO: 12373 - protein, 10 aa, Artificial Sequence
  Description of Artificial Sequence: Synthetic peptide
  Seed: RLLQNSQVFS
RLLQNSQVFQ

SEQ ID NO: 12374 - protein, 10 aa, Artificial Sequence
  Description of Artificial Sequence: Synthetic peptide
  Seed: RLLQNSQVFS
RLLQNSQVFE

SEQ ID NO: 12375 - protein, 10 aa, Artificial Sequence
  Description of Artificial Sequence: Synthetic peptide
  Seed: RLLQNSQVFS
RLLQNSQVFG

SEQ ID NO: 12376 - protein, 10 aa, Artificial Sequence
  Description of Artificial Sequence: Synthetic peptide
  Seed: RLLQNSQVFS
RLLQNSQVFH

SEQ ID NO: 12377 - protein, 10 aa, Artificial Sequence
  Description of Artificial Sequence: Synthetic peptide
  Seed: RLLQNSQVFS
RLLQNSQVFI

SEQ ID NO: 12378 - protein, 10 aa, Artificial Sequence
  Description of Artificial Sequence: Synthetic peptide
  Seed: RLLQNSQVFS
RLLQNSQVFL

SEQ ID NO: 12379 - protein, 10 aa, Artificial Sequence
  Description of Artificial Sequence: Synthetic peptide
  Seed: RLLQNSQVFS
RLLQNSQVFK

SEQ ID NO: 12380 - protein, 10 aa, Artificial Sequence
  Description of Artificial Sequence: Synthetic peptide
  Seed: RLLQNSQVFS
RLLQNSQVFM

SEQ ID NO: 12381 - protein, 10 aa, Artificial Sequence
  Description of Artificial Sequence: Synthetic peptide
  Seed: RLLQNSQVFS
RLLQNSQVFF

SEQ ID NO: 12382 - protein, 10 aa, Artificial Sequence
  Description of Artificial Sequence: Synthetic peptide
  Seed: RLLQNSQVFS
RLLQNSQVFP

SEQ ID NO: 12383 - protein, 10 aa, Artificial Sequence
  Description of Artificial Sequence: Synthetic peptide
  Seed: RLLQNSQVFS
RLLQNSQVFT

SEQ ID NO: 12384 - protein, 10 aa, Artificial Sequence
  Description of Artificial Sequence: Synthetic peptide
  Seed: RLLQNSQVFS
RLLQNSQVFW

SEQ ID NO: 12385 - protein, 10 aa, Artificial Sequence
  Description of Artificial Sequence: Synthetic peptide
  Seed: RLLQNSQVFS
RLLQNSQVFY

SEQ ID NO: 12386 - protein, 10 aa, Artificial Sequence
  Description of Artificial Sequence: Synthetic peptide
  Seed: RLLQNSQVFS
RLLQNSQVFV

SEQ ID NO: 12387 - protein, 9 aa, Artificial Sequence
  Description of Artificial Sequence: Synthetic peptide
  Seed: RLLQNSQVF
RVLQNSQVH

SEQ ID NO: 12388 - protein, 9 aa, Artificial Sequence
  Description of Artificial Sequence: Synthetic peptide
  Seed: RLLQNSQVF
RYLQNSQVY

SEQ ID NO: 12389 - protein, 10 aa, Artificial Sequence
  Description of Artificial Sequence: Synthetic peptide
  Seed: RLLQNSQVFS
RPLQNSQVFY

SEQ ID NO: 12390 - protein, 9 aa, Artificial Sequence
  Description of Artificial Sequence: Synthetic peptide
  Seed: RLLQNSQVF
RLLQNSQVI

SEQ ID NO: 12391 - protein, 9 aa, Artificial Sequence
  Description of Artificial Sequence: Synthetic peptide
  Seed: RLLQNSQVF
RILQNSQVH

SEQ ID NO: 12392 - protein, 9 aa, Artificial Sequence
  Description of Artificial Sequence: Synthetic peptide
  Seed: RLLQNSQVF
RILQNSQVI

SEQ ID NO: 12393 - protein, 9 aa, Artificial Sequence
  Description of Artificial Sequence: Synthetic peptide
  Seed: RLLQNSQVF
RILQNSQVL

SEQ ID NO: 12394 - protein, 9 aa, Artificial Sequence
  Description of Artificial Sequence: Synthetic peptide
  Seed: RLLQNSQVF
RILQNSQVM

SEQ ID NO: 12395 - protein, 9 aa, Artificial Sequence
  Description of Artificial Sequence: Synthetic peptide
  Seed: RLLQNSQVF
RILQNSQVF

SEQ ID NO: 12396 - protein, 9 aa, Artificial Sequence
  Description of Artificial Sequence: Synthetic peptide
  Seed: RLLQNSQVF
RILQNSQVW

SEQ ID NO: 12397 - protein, 9 aa, Artificial Sequence
  Description of Artificial Sequence: Synthetic peptide
  Seed: RLLQNSQVF
RILQNSQVY

SEQ ID NO: 12398 - protein, 9 aa, Artificial Sequence
  Description of Artificial Sequence: Synthetic peptide
  Seed: RLLQNSQVF
RLLQNSQVA

SEQ ID NO: 12399 - protein, 9 aa, Artificial Sequence
  Description of Artificial Sequence: Synthetic peptide
  Seed: RLLQNSQVF
RLLQNSQVH

SEQ ID NO: 12400 - protein, 9 aa, Artificial Sequence
  Description of Artificial Sequence: Synthetic peptide
  Seed: RLLQNSQVF
RKLQNSQVW

SEQ ID NO: 12401 - protein, 9 aa, Artificial Sequence
  Description of Artificial Sequence: Synthetic peptide
  Seed: RLLQNSQVF
RLLQNSQVM

SEQ ID NO: 12402 - protein, 9 aa, Artificial Sequence
  Description of Artificial Sequence: Synthetic peptide
  Seed: RLLQNSQVF
RLLQNSQVW

SEQ ID NO: 12403 - protein, 9 aa, Artificial Sequence
  Description of Artificial Sequence: Synthetic peptide
  Seed: RLLQNSQVF
RLLQNSQVV

SEQ ID NO: 12404 - protein, 9 aa, Artificial Sequence
  Description of Artificial Sequence: Synthetic peptide
  Seed: RLLQNSQVF
RKLQNSQVA

SEQ ID NO: 12405 - protein, 9 aa, Artificial Sequence
  Description of Artificial Sequence: Synthetic peptide
  Seed: RLLQNSQVF
RKLQNSQVH

SEQ ID NO: 12406 - protein, 9 aa, Artificial Sequence
  Description of Artificial Sequence: Synthetic peptide
  Seed: RLLQNSQVF
RKLQNSQVI

SEQ ID NO: 12407 - protein, 9 aa, Artificial Sequence
  Description of Artificial Sequence: Synthetic peptide
  Seed: RLLQNSQVF
RKLQNSQVL

SEQ ID NO: 12408 - protein, 9 aa, Artificial Sequence
  Description of Artificial Sequence: Synthetic peptide
  Seed: RLLQNSQVF
RKLQNSQVM

SEQ ID NO: 12409 - protein, 9 aa, Artificial Sequence
  Description of Artificial Sequence: Synthetic peptide
  Seed: RLLQNSQVF
RHLQNSQVV

SEQ ID NO: 12410 - protein, 9 aa, Artificial Sequence
  Description of Artificial Sequence: Synthetic peptide
  Seed: RLLQNSQVF
RHLQNSQVY

SEQ ID NO: 12411 - protein, 9 aa, Artificial Sequence
  Description of Artificial Sequence: Synthetic peptide
  Seed: RLLQNSQVF
RHLQNSQVW

SEQ ID NO: 12412 - protein, 9 aa, Artificial Sequence
  Description of Artificial Sequence: Synthetic peptide
  Seed: RLLQNSQVF
RHLQNSQVF

SEQ ID NO: 12413 - protein, 9 aa, Artificial Sequence
  Description of Artificial Sequence: Synthetic peptide
  Seed: RLLQNSQVF
RQLQNSQVY

SEQ ID NO: 12414 - protein, 9 aa, Artificial Sequence
  Description of Artificial Sequence: Synthetic peptide
  Seed: RLLQNSQVF
RQLQNSQVV

SEQ ID NO: 12415 - protein, 9 aa, Artificial Sequence
  Description of Artificial Sequence: Synthetic peptide
  Seed: RLLQNSQVF
RELQNSQVH

SEQ ID NO: 12416 - protein, 9 aa, Artificial Sequence
  Description of Artificial Sequence: Synthetic peptide
  Seed: RLLQNSQVF
RELQNSQVI

SEQ ID NO: 12417 - protein, 9 aa, Artificial Sequence
  Description of Artificial Sequence: Synthetic peptide
  Seed: RLLQNSQVF
RELQNSQVL

SEQ ID NO: 12418 - protein, 9 aa, Artificial Sequence
  Description of Artificial Sequence: Synthetic peptide
  Seed: RLLQNSQVF
RELQNSQVM

SEQ ID NO: 12419 - protein, 9 aa, Artificial Sequence
  Description of Artificial Sequence: Synthetic peptide
  Seed: RLLQNSQVF
RELQNSQVF

SEQ ID NO: 12420 - protein, 9 aa, Artificial Sequence
  Description of Artificial Sequence: Synthetic peptide
  Seed: RLLQNSQVF
RELQNSQVW

SEQ ID NO: 12421 - protein, 9 aa, Artificial Sequence
  Description of Artificial Sequence: Synthetic peptide
  Seed: RLLQNSQVF
RELQNSQVY

SEQ ID NO: 12422 - protein, 9 aa, Artificial Sequence
  Description of Artificial Sequence: Synthetic peptide
  Seed: RLLQNSQVF
RELQNSQVV

SEQ ID NO: 12423 - protein, 9 aa, Artificial Sequence
  Description of Artificial Sequence: Synthetic peptide
  Seed: RLLQNSQVF
RGLQNSQVL

SEQ ID NO: 12424 - protein, 9 aa, Artificial Sequence
  Description of Artificial Sequence: Synthetic peptide
  Seed: RLLQNSQVF
RGLQNSQVM

SEQ ID NO: 12425 - protein, 9 aa, Artificial Sequence
  Description of Artificial Sequence: Synthetic peptide
  Seed: RLLQNSQVF
RGLQNSQVF

SEQ ID NO: 12426 - protein, 9 aa, Artificial Sequence
  Description of Artificial Sequence: Synthetic peptide
  Seed: RLLQNSQVF
RGLQNSQVW

SEQ ID NO: 12427 - protein, 9 aa, Artificial Sequence
  Description of Artificial Sequence: Synthetic peptide
  Seed: RLLQNSQVF
RGLQNSQVY

SEQ ID NO: 12428 - protein, 9 aa, Artificial Sequence
  Description of Artificial Sequence: Synthetic peptide
  Seed: RLLQNSQVF
RHLQNSQVH

SEQ ID NO: 12429 - protein, 9 aa, Artificial Sequence
  Description of Artificial Sequence: Synthetic peptide
  Seed: RLLQNSQVF
RHLQNSQVI

SEQ ID NO: 12430 - protein, 9 aa, Artificial Sequence
  Description of Artificial Sequence: Synthetic peptide
  Seed: RLLQNSQVF
RHLQNSQVL

SEQ ID NO: 12431 - protein, 9 aa, Artificial Sequence
  Description of Artificial Sequence: Synthetic peptide
  Seed: RLLQNSQVF
RHLQNSQVM

SEQ ID NO: 12432 - protein, 9 aa, Artificial Sequence
  Description of Artificial Sequence: Synthetic peptide
  Seed: RLLQNSQVF
RKLQNSQVF

SEQ ID NO: 12433 - protein, 9 aa, Artificial Sequence
  Description of Artificial Sequence: Synthetic peptide
  Seed: RLLQNSQVF
RKLQNSQVY

SEQ ID NO: 12434 - protein, 9 aa, Artificial Sequence
  Description of Artificial Sequence: Synthetic peptide
  Seed: RLLQNSQVF
RYLQNSQVF

SEQ ID NO: 12435 - protein, 9 aa, Artificial Sequence
  Description of Artificial Sequence: Synthetic peptide
  Seed: RLLQNSQVF
RTLQNSQVL

SEQ ID NO: 12436 - protein, 9 aa, Artificial Sequence
  Description of Artificial Sequence: Synthetic peptide
  Seed: RLLQNSQVF
RSLQNSQVI

SEQ ID NO: 12437 - protein, 9 aa, Artificial Sequence
  Description of Artificial Sequence: Synthetic peptide
  Seed: RLLQNSQVF
RSLQNSQVL

SEQ ID NO: 12438 - protein, 9 aa, Artificial Sequence
  Description of Artificial Sequence: Synthetic peptide
  Seed: RLLQNSQVF
RSLQNSQVM

SEQ ID NO: 12439 - protein, 9 aa, Artificial Sequence
  Description of Artificial Sequence: Synthetic peptide
  Seed: RLLQNSQVF
RSLQNSQVF

SEQ ID NO: 12440 - protein, 9 aa, Artificial Sequence
  Description of Artificial Sequence: Synthetic peptide
  Seed: RLLQNSQVF
RSLQNSQVW

SEQ ID NO: 12441 - protein, 9 aa, Artificial Sequence
  Description of Artificial Sequence: Synthetic peptide
  Seed: RLLQNSQVF
RSLQNSQVY

SEQ ID NO: 12442 - protein, 9 aa, Artificial Sequence
  Description of Artificial Sequence: Synthetic peptide
  Seed: RLLQNSQVF
RSLQNSQVV

SEQ ID NO: 12443 - protein, 9 aa, Artificial Sequence
  Description of Artificial Sequence: Synthetic peptide
  Seed: RLLQNSQVF
RTLQNSQVH

SEQ ID NO: 12444 - protein, 9 aa, Artificial Sequence
  Description of Artificial Sequence: Synthetic peptide
  Seed: RLLQNSQVF
RTLQNSQVI

SEQ ID NO: 12445 - protein, 9 aa, Artificial Sequence
  Description of Artificial Sequence: Synthetic peptide
  Seed: RLLQNSQVF
RTLQNSQVM

SEQ ID NO: 12446 - protein, 9 aa, Artificial Sequence
  Description of Artificial Sequence: Synthetic peptide
  Seed: RLLQNSQVF
RKLQNSQVV

SEQ ID NO: 12447 - protein, 9 aa, Artificial Sequence
  Description of Artificial Sequence: Synthetic peptide
  Seed: RLLQNSQVF
RTLQNSQVF

SEQ ID NO: 12448 - protein, 9 aa, Artificial Sequence
  Description of Artificial Sequence: Synthetic peptide
  Seed: RLLQNSQVF
RTLQNSQVW

SEQ ID NO: 12449 - protein, 9 aa, Artificial Sequence
  Description of Artificial Sequence: Synthetic peptide
  Seed: RLLQNSQVF
RTLQNSQVY

SEQ ID NO: 12450 - protein, 9 aa, Artificial Sequence
  Description of Artificial Sequence: Synthetic peptide
  Seed: RLLQNSQVF
RTLQNSQVV

SEQ ID NO: 12451 - protein, 9 aa, Artificial Sequence
  Description of Artificial Sequence: Synthetic peptide
  Seed: RLLQNSQVF
RWLQNSQVM

SEQ ID NO: 12452 - protein, 9 aa, Artificial Sequence
  Description of Artificial Sequence: Synthetic peptide
  Seed: RLLQNSQVF
RWLQNSQVF

SEQ ID NO: 12453 - protein, 9 aa, Artificial Sequence
  Description of Artificial Sequence: Synthetic peptide
  Seed: RLLQNSQVF
RWLQNSQVY

SEQ ID NO: 12454 - protein, 9 aa, Artificial Sequence
  Description of Artificial Sequence: Synthetic peptide
  Seed: RLLQNSQVF
RYLQNSQVL

SEQ ID NO: 12455 - protein, 9 aa, Artificial Sequence
  Description of Artificial Sequence: Synthetic peptide
  Seed: RLLQNSQVF
RYLQNSQVM

SEQ ID NO: 12456 - protein, 9 aa, Artificial Sequence
  Description of Artificial Sequence: Synthetic peptide
  Seed: RLLQNSQVF
RSLQNSQVH

SEQ ID NO: 12457 - protein, 9 aa, Artificial Sequence
  Description of Artificial Sequence: Synthetic peptide
  Seed: RLLQNSQVF
RPLQNSQVY

SEQ ID NO: 12458 - protein, 9 aa, Artificial Sequence
  Description of Artificial Sequence: Synthetic peptide
  Seed: RLLQNSQVF
RPLQNSQVF

SEQ ID NO: 12459 - protein, 9 aa, Artificial Sequence
  Description of Artificial Sequence: Synthetic peptide
  Seed: RLLQNSQVF
RPLQNSQVM

SEQ ID NO: 12460 - protein, 9 aa, Artificial Sequence
  Description of Artificial Sequence: Synthetic peptide
  Seed: RLLQNSQVF
RMLQNSQVA

SEQ ID NO: 12461 - protein, 9 aa, Artificial Sequence
  Description of Artificial Sequence: Synthetic peptide
  Seed: RLLQNSQVF
RMLQNSQVC

SEQ ID NO: 12462 - protein, 9 aa, Artificial Sequence
  Description of Artificial Sequence: Synthetic peptide
  Seed: RLLQNSQVF
RMLQNSQVG

SEQ ID NO: 12463 - protein, 9 aa, Artificial Sequence
  Description of Artificial Sequence: Synthetic peptide
  Seed: RLLQNSQVF
RMLQNSQVH

SEQ ID NO: 12464 - protein, 9 aa, Artificial Sequence
  Description of Artificial Sequence: Synthetic peptide
  Seed: RLLQNSQVF
RMLQNSQVI

SEQ ID NO: 12465 - protein, 9 aa, Artificial Sequence
  Description of Artificial Sequence: Synthetic peptide
  Seed: RLLQNSQVF
RMLQNSQVL

SEQ ID NO: 12466 - protein, 9 aa, Artificial Sequence
  Description of Artificial Sequence: Synthetic peptide
  Seed: RLLQNSQVF
RMLQNSQVM

SEQ ID NO: 12467 - protein, 9 aa, Artificial Sequence
  Description of Artificial Sequence: Synthetic peptide
  Seed: RLLQNSQVF
RMLQNSQVS

SEQ ID NO: 12468 - protein, 9 aa, Artificial Sequence
  Description of Artificial Sequence: Synthetic peptide
  Seed: RLLQNSQVF
RMLQNSQVT

SEQ ID NO: 12469 - protein, 9 aa, Artificial Sequence
  Description of Artificial Sequence: Synthetic peptide
  Seed: RLLQNSQVF
RMLQNSQVW

SEQ ID NO: 12470 - protein, 9 aa, Artificial Sequence
  Description of Artificial Sequence: Synthetic peptide
  Seed: RLLQNSQVF
RMLQNSQVY

SEQ ID NO: 12471 - protein, 9 aa, Artificial Sequence
  Description of Artificial Sequence: Synthetic peptide
  Seed: RLLQNSQVF
RMLQNSQVV

SEQ ID NO: 12472 - protein, 9 aa, Artificial Sequence
  Description of Artificial Sequence: Synthetic peptide
  Seed: RLLQNSQVF
RFLQNSQVL

SEQ ID NO: 12473 - protein, 9 aa, Artificial Sequence
  Description of Artificial Sequence: Synthetic peptide
  Seed: RLLQNSQVF
RFLQNSQVM

SEQ ID NO: 12474 - protein, 9 aa, Artificial Sequence
  Description of Artificial Sequence: Synthetic peptide
  Seed: RLLQNSQVF
RFLQNSQVF

SEQ ID NO: 12475 - protein, 9 aa, Artificial Sequence
  Description of Artificial Sequence: Synthetic peptide
  Seed: RLLQNSQVF
RFLQNSQVW

SEQ ID NO: 12476 - protein, 9 aa, Artificial Sequence
  Description of Artificial Sequence: Synthetic peptide
  Seed: RLLQNSQVF
RFLQNSQVY

SEQ ID NO: 12477 - protein, 9 aa, Artificial Sequence
  Description of Artificial Sequence: Synthetic peptide
  Seed: RLLQNSQVF
RPLQNSQVL

SEQ ID NO: 12478 - protein, 10 aa, Artificial Sequence
  Description of Artificial Sequence: Synthetic peptide
  Seed: RLLQNSQVFS
RPLQNSQVFF

SEQ ID NO: 12479 - protein, 10 aa, Artificial Sequence
  Description of Artificial Sequence: Synthetic peptide
  Seed: RLLQNSQVFS
RSLQNSQVFM

SEQ ID NO: 12480 - protein, 9 aa, Artificial Sequence
  Description of Artificial Sequence: Synthetic peptide
  Seed: RLLSFIRGT
RMLSFIRGP

SEQ ID NO: 12481 - protein, 11 aa, Artificial Sequence
  Description of Artificial Sequence: Synthetic peptide
  Seed: RLLQNSQVFSL
RTLQNSQVFSY

SEQ ID NO: 12482 - protein, 11 aa, Artificial Sequence
  Description of Artificial Sequence: Synthetic peptide
  Seed: RLLQNSQVFSL
RSLQNSQVFSF

SEQ ID NO: 12483 - protein, 11 aa, Artificial Sequence
  Description of Artificial Sequence: Synthetic peptide
  Seed: RLLQNSQVFSL
RSLQNSQVFSW

SEQ ID NO: 12484 - protein, 11 aa, Artificial Sequence
  Description of Artificial Sequence: Synthetic peptide
  Seed: RLLQNSQVFSL
RSLQNSQVFSY

SEQ ID NO: 12485 - protein, 11 aa, Artificial Sequence
  Description of Artificial Sequence: Synthetic peptide
  Seed: RLLQNSQVFSL
RSLQNSQVFSV

SEQ ID NO: 12486 - protein, 11 aa, Artificial Sequence
  Description of Artificial Sequence: Synthetic peptide
  Seed: RLLQNSQVFSL
RTLQNSQVFSI

SEQ ID NO: 12487 - protein, 11 aa, Artificial Sequence
  Description of Artificial Sequence: Synthetic peptide
  Seed: RLLQNSQVFSL
RTLQNSQVFSL

SEQ ID NO: 12488 - protein, 11 aa, Artificial Sequence
  Description of Artificial Sequence: Synthetic peptide
  Seed: RLLQNSQVFSL
RTLQNSQVFSM

SEQ ID NO: 12489 - protein, 11 aa, Artificial Sequence
  Description of Artificial Sequence: Synthetic peptide
  Seed: RLLQNSQVFSL
RTLQNSQVFSF

SEQ ID NO: 12490 - protein, 11 aa, Artificial Sequence
  Description of Artificial Sequence: Synthetic peptide
  Seed: RLLQNSQVFSL
RTLQNSQVFSW

SEQ ID NO: 12491 - protein, 11 aa, Artificial Sequence
  Description of Artificial Sequence: Synthetic peptide
  Seed: RLLQNSQVFSL
RTLQNSQVFSV

SEQ ID NO: 12492 - protein, 11 aa, Artificial Sequence
  Description of Artificial Sequence: Synthetic peptide
  Seed: RLLQNSQVFSL
RYLQNSQVFSM

SEQ ID NO: 12493 - protein, 11 aa, Artificial Sequence
  Description of Artificial Sequence: Synthetic peptide
  Seed: RLLQNSQVFSL
RWLQNSQVFSI

SEQ ID NO: 12494 - protein, 11 aa, Artificial Sequence
  Description of Artificial Sequence: Synthetic peptide
  Seed: RLLQNSQVFSL
RWLQNSQVFSL

SEQ ID NO: 12495 - protein, 11 aa, Artificial Sequence
  Description of Artificial Sequence: Synthetic peptide
  Seed: RLLQNSQVFSL
RWLQNSQVFSM

SEQ ID NO: 12496 - protein, 11 aa, Artificial Sequence
  Description of Artificial Sequence: Synthetic peptide
  Seed: RLLQNSQVFSL
RWLQNSQVFSF

SEQ ID NO: 12497 - protein, 11 aa, Artificial Sequence
  Description of Artificial Sequence: Synthetic peptide
  Seed: RLLQNSQVFSL
RWLQNSQVFSW

SEQ ID NO: 12498 - protein, 11 aa, Artificial Sequence
  Description of Artificial Sequence: Synthetic peptide
  Seed: RLLQNSQVFSL
RWLQNSQVFSY

SEQ ID NO: 12499 - protein, 11 aa, Artificial Sequence
  Description of Artificial Sequence: Synthetic peptide
  Seed: RLLQNSQVFSL
RWLQNSQVFSV

SEQ ID NO: 12500 - protein, 11 aa, Artificial Sequence
  Description of Artificial Sequence: Synthetic peptide
  Seed: RLLQNSQVFSL
RYLQNSQVFSA

SEQ ID NO: 12501 - protein, 11 aa, Artificial Sequence
  Description of Artificial Sequence: Synthetic peptide
  Seed: RLLQNSQVFSL
RYLQNSQVFSI

SEQ ID NO: 12502 - protein, 11 aa, Artificial Sequence
  Description of Artificial Sequence: Synthetic peptide
  Seed: RLLQNSQVFSL
RSLQNSQVFSM

SEQ ID NO: 12503 - protein, 11 aa, Artificial Sequence
  Description of Artificial Sequence: Synthetic peptide
  Seed: RLLQNSQVFSL
RSLQNSQVFSL

SEQ ID NO: 12504 - protein, 11 aa, Artificial Sequence
  Description of Artificial Sequence: Synthetic peptide
  Seed: RLLQNSQVFSL
RSLQNSQVFSI

SEQ ID NO: 12505 - protein, 11 aa, Artificial Sequence
  Description of Artificial Sequence: Synthetic peptide
  Seed: RLLQNSQVFSL
RPLQNSQVFSV

SEQ ID NO: 12506 - protein, 11 aa, Artificial Sequence
  Description of Artificial Sequence: Synthetic peptide
  Seed: RLLQNSQVFSL
RMLQNSQVFSM

SEQ ID NO: 12507 - protein, 11 aa, Artificial Sequence
  Description of Artificial Sequence: Synthetic peptide
  Seed: RLLQNSQVFSL
RMLQNSQVFSF

SEQ ID NO: 12508 - protein, 11 aa, Artificial Sequence
  Description of Artificial Sequence: Synthetic peptide
  Seed: RLLQNSQVFSL
RMLQNSQVFST

SEQ ID NO: 12509 - protein, 11 aa, Artificial Sequence
  Description of Artificial Sequence: Synthetic peptide
  Seed: RLLQNSQVFSL
RMLQNSQVFSW

SEQ ID NO: 12510 - protein, 11 aa, Artificial Sequence
  Description of Artificial Sequence: Synthetic peptide
  Seed: RLLQNSQVFSL
RMLQNSQVFSY

SEQ ID NO: 12511 - protein, 11 aa, Artificial Sequence
  Description of Artificial Sequence: Synthetic peptide
  Seed: RLLQNSQVFSL
RMLQNSQVFSV

SEQ ID NO: 12512 - protein, 11 aa, Artificial Sequence
  Description of Artificial Sequence: Synthetic peptide
  Seed: RLLQNSQVFSL
RFLQNSQVFSA

SEQ ID NO: 12513 - protein, 11 aa, Artificial Sequence
  Description of Artificial Sequence: Synthetic peptide
  Seed: RLLQNSQVFSL
RFLQNSQVFSI

SEQ ID NO: 12514 - protein, 11 aa, Artificial Sequence
  Description of Artificial Sequence: Synthetic peptide
  Seed: RLLQNSQVFSL
RFLQNSQVFSL

SEQ ID NO: 12515 - protein, 11 aa, Artificial Sequence
  Description of Artificial Sequence: Synthetic peptide
  Seed: RLLQNSQVFSL
RFLQNSQVFSM

SEQ ID NO: 12516 - protein, 11 aa, Artificial Sequence
  Description of Artificial Sequence: Synthetic peptide
  Seed: RLLQNSQVFSL
RFLQNSQVFSF

SEQ ID NO: 12517 - protein, 11 aa, Artificial Sequence
  Description of Artificial Sequence: Synthetic peptide
  Seed: RLLQNSQVFSL
RFLQNSQVFSW

SEQ ID NO: 12518 - protein, 11 aa, Artificial Sequence
  Description of Artificial Sequence: Synthetic peptide
  Seed: RLLQNSQVFSL
RFLQNSQVFSY

SEQ ID NO: 12519 - protein, 11 aa, Artificial Sequence
  Description of Artificial Sequence: Synthetic peptide
  Seed: RLLQNSQVFSL
RFLQNSQVFSV

SEQ ID NO: 12520 - protein, 11 aa, Artificial Sequence
  Description of Artificial Sequence: Synthetic peptide
  Seed: RLLQNSQVFSL
RPLQNSQVFSI

SEQ ID NO: 12521 - protein, 11 aa, Artificial Sequence
  Description of Artificial Sequence: Synthetic peptide
  Seed: RLLQNSQVFSL
RPLQNSQVFSL

SEQ ID NO: 12522 - protein, 11 aa, Artificial Sequence
  Description of Artificial Sequence: Synthetic peptide
  Seed: RLLQNSQVFSL
RPLQNSQVFSM

SEQ ID NO: 12523 - protein, 11 aa, Artificial Sequence
  Description of Artificial Sequence: Synthetic peptide
  Seed: RLLQNSQVFSL
RPLQNSQVFSF

SEQ ID NO: 12524 - protein, 11 aa, Artificial Sequence
  Description of Artificial Sequence: Synthetic peptide
  Seed: RLLQNSQVFSL
RPLQNSQVFSY

SEQ ID NO: 12525 - protein, 11 aa, Artificial Sequence
  Description of Artificial Sequence: Synthetic peptide
  Seed: RLLQNSQVFSL
RYLQNSQVFSL

SEQ ID NO: 12526 - protein, 11 aa, Artificial Sequence
  Description of Artificial Sequence: Synthetic peptide
  Seed: RLLQNSQVFSL
RYLQNSQVFSF

SEQ ID NO: 12527 - protein, 11 aa, Artificial Sequence
  Description of Artificial Sequence: Synthetic peptide
  Seed: RLLQNSQVFSL
RMLQNSQVFSI

SEQ ID NO: 12528 - protein, 9 aa, Artificial Sequence
  Description of Artificial Sequence: Synthetic peptide
  Seed: RLLSFIRGT
RLLSFIRGI

SEQ ID NO: 12529 - protein, 9 aa, Artificial Sequence
  Description of Artificial Sequence: Synthetic peptide
  Seed: RLLSFIRGT
RILSFIRGA

SEQ ID NO: 12530 - protein, 9 aa, Artificial Sequence
  Description of Artificial Sequence: Synthetic peptide
  Seed: RLLSFIRGT
RILSFIRGC

SEQ ID NO: 12531 - protein, 9 aa, Artificial Sequence
  Description of Artificial Sequence: Synthetic peptide
  Seed: RLLSFIRGT
RILSFIRGI

SEQ ID NO: 12532 - protein, 9 aa, Artificial Sequence
  Description of Artificial Sequence: Synthetic peptide
  Seed: RLLSFIRGT
RILSFIRGL

SEQ ID NO: 12533 - protein, 9 aa, Artificial Sequence
  Description of Artificial Sequence: Synthetic peptide
  Seed: RLLSFIRGT
RILSFIRGM

SEQ ID NO: 12534 - protein, 9 aa, Artificial Sequence
  Description of Artificial Sequence: Synthetic peptide
  Seed: RLLSFIRGT
RILSFIRGT

SEQ ID NO: 12535 - protein, 9 aa, Artificial Sequence
  Description of Artificial Sequence: Synthetic peptide
  Seed: RLLSFIRGT
RILSFIRGV

SEQ ID NO: 12536 - protein, 9 aa, Artificial Sequence
  Description of Artificial Sequence: Synthetic peptide
  Seed: RLLSFIRGT
RLLSFIRGA

SEQ ID NO: 12537 - protein, 9 aa, Artificial Sequence
  Description of Artificial Sequence: Synthetic peptide
  Seed: RLLSFIRGT
RLLSFIRGC

SEQ ID NO: 12538 - protein, 9 aa, Artificial Sequence
  Description of Artificial Sequence: Synthetic peptide
  Seed: RLLSFIRGT
RLLSFIRGL

SEQ ID NO: 12539 - protein, 11 aa, Artificial Sequence
  Description of Artificial Sequence: Synthetic peptide
  Seed: RLLQNSQVFSL
RYLQNSQVFSW

SEQ ID NO: 12540 - protein, 9 aa, Artificial Sequence
  Description of Artificial Sequence: Synthetic peptide
  Seed: RLLSFIRGT
RLLSFIRGM

SEQ ID NO: 12541 - protein, 9 aa, Artificial Sequence
  Description of Artificial Sequence: Synthetic peptide
  Seed: RLLSFIRGT
RLLSFIRGF

SEQ ID NO: 12542 - protein, 9 aa, Artificial Sequence
  Description of Artificial Sequence: Synthetic peptide
  Seed: RLLSFIRGT
RLLSFIRGS

SEQ ID NO: 12543 - protein, 9 aa, Artificial Sequence
  Description of Artificial Sequence: Synthetic peptide
  Seed: RLLSFIRGT
RLLSFIRGV

SEQ ID NO: 12544 - protein, 9 aa, Artificial Sequence
  Description of Artificial Sequence: Synthetic peptide
  Seed: RLLSFIRGT
RMLSFIRGA

SEQ ID NO: 12545 - protein, 9 aa, Artificial Sequence
  Description of Artificial Sequence: Synthetic peptide
  Seed: RLLSFIRGT
RMLSFIRGC

SEQ ID NO: 12546 - protein, 9 aa, Artificial Sequence
  Description of Artificial Sequence: Synthetic peptide
  Seed: RLLSFIRGT
RMLSFIRGI

SEQ ID NO: 12547 - protein, 9 aa, Artificial Sequence
  Description of Artificial Sequence: Synthetic peptide
  Seed: RLLSFIRGT
RMLSFIRGL

SEQ ID NO: 12548 - protein, 9 aa, Artificial Sequence
  Description of Artificial Sequence: Synthetic peptide
  Seed: RLLSFIRGT
RMLSFIRGM

SEQ ID NO: 12549 - protein, 9 aa, Artificial Sequence
  Description of Artificial Sequence: Synthetic peptide
  Seed: RLLSFIRGT
RGLSFIRGV

SEQ ID NO: 12550 - protein, 9 aa, Artificial Sequence
  Description of Artificial Sequence: Synthetic peptide
  Seed: RLLSFIRGT
RQLSFIRGV

SEQ ID NO: 12551 - protein, 9 aa, Artificial Sequence
  Description of Artificial Sequence: Synthetic peptide
  Seed: RLLSFIRGT
RQLSFIRGT

SEQ ID NO: 12552 - protein, 9 aa, Artificial Sequence
  Description of Artificial Sequence: Synthetic peptide
  Seed: RLLSFIRGT
RQLSFIRGS

SEQ ID NO: 12553 - protein, 11 aa, Artificial Sequence
  Description of Artificial Sequence: Synthetic peptide
  Seed: RLLQNSQVFSL
RYLQNSQVFSY

SEQ ID NO: 12554 - protein, 11 aa, Artificial Sequence
  Description of Artificial Sequence: Synthetic peptide
  Seed: RLLQNSQVFSL
RYLQNSQVFSV

SEQ ID NO: 12555 - protein, 11 aa, Artificial Sequence
  Description of Artificial Sequence: Synthetic peptide
  Seed: RLLQNSQVFSL
RVLQNSQVFSI

SEQ ID NO: 12556 - protein, 11 aa, Artificial Sequence
  Description of Artificial Sequence: Synthetic peptide
  Seed: RLLQNSQVFSL
RVLQNSQVFSL

SEQ ID NO: 12557 - protein, 11 aa, Artificial Sequence
  Description of Artificial Sequence: Synthetic peptide
  Seed: RLLQNSQVFSL
RVLQNSQVFSM

SEQ ID NO: 12558 - protein, 11 aa, Artificial Sequence
  Description of Artificial Sequence: Synthetic peptide
  Seed: RLLQNSQVFSL
RVLQNSQVFSF

SEQ ID NO: 12559 - protein, 11 aa, Artificial Sequence
  Description of Artificial Sequence: Synthetic peptide
  Seed: RLLQNSQVFSL
RVLQNSQVFSW

SEQ ID NO: 12560 - protein, 11 aa, Artificial Sequence
  Description of Artificial Sequence: Synthetic peptide
  Seed: RLLQNSQVFSL
RVLQNSQVFSY

SEQ ID NO: 12561 - protein, 11 aa, Artificial Sequence
  Description of Artificial Sequence: Synthetic peptide
  Seed: RLLQNSQVFSL
RVLQNSQVFSV

SEQ ID NO: 12562 - protein, 9 aa, Artificial Sequence
  Description of Artificial Sequence: Synthetic peptide
  Seed: RLLSFIRGT
RALSFIRGA

SEQ ID NO: 12563 - protein, 9 aa, Artificial Sequence
  Description of Artificial Sequence: Synthetic peptide
  Seed: RLLSFIRGT
RALSFIRGI

SEQ ID NO: 12564 - protein, 9 aa, Artificial Sequence
  Description of Artificial Sequence: Synthetic peptide
  Seed: RLLSFIRGT
RALSFIRGL

SEQ ID NO: 12565 - protein, 9 aa, Artificial Sequence
  Description of Artificial Sequence: Synthetic peptide
  Seed: RLLSFIRGT
RALSFIRGV

SEQ ID NO: 12566 - protein, 9 aa, Artificial Sequence
  Description of Artificial Sequence: Synthetic peptide
  Seed: RLLSFIRGT
RQLSFIRGA

SEQ ID NO: 12567 - protein, 9 aa, Artificial Sequence
  Description of Artificial Sequence: Synthetic peptide
  Seed: RLLSFIRGT
RQLSFIRGC

SEQ ID NO: 12568 - protein, 9 aa, Artificial Sequence
  Description of Artificial Sequence: Synthetic peptide
  Seed: RLLSFIRGT
RQLSFIRGI

SEQ ID NO: 12569 - protein, 9 aa, Artificial Sequence
  Description of Artificial Sequence: Synthetic peptide
  Seed: RLLSFIRGT
RQLSFIRGL

SEQ ID NO: 12570 - protein, 9 aa, Artificial Sequence
  Description of Artificial Sequence: Synthetic peptide
  Seed: RLLSFIRGT
RQLSFIRGM

SEQ ID NO: 12571 - protein, 9 aa, Artificial Sequence
  Description of Artificial Sequence: Synthetic peptide
  Seed: RLLSFIRGT
RQLSFIRGF

SEQ ID NO: 12572 - protein, 11 aa, Artificial Sequence
  Description of Artificial Sequence: Synthetic peptide
  Seed: RLLQNSQVFSL
RMLQNSQVFSH

SEQ ID NO: 12573 - protein, 10 aa, Artificial Sequence
  Description of Artificial Sequence: Synthetic peptide
  Seed: RLLQNSQVFS
RSLQNSQVFF

SEQ ID NO: 12574 - protein, 11 aa, Artificial Sequence
  Description of Artificial Sequence: Synthetic peptide
  Seed: RLLQNSQVFSL
RNLQNSQVFSM

SEQ ID NO: 12575 - protein, 11 aa, Artificial Sequence
  Description of Artificial Sequence: Synthetic peptide
  Seed: RLLQNSQVFSL
RRLQNSQVFSF

SEQ ID NO: 12576 - protein, 11 aa, Artificial Sequence
  Description of Artificial Sequence: Synthetic peptide
  Seed: RLLQNSQVFSL
RRLQNSQVFSP

SEQ ID NO: 12577 - protein, 11 aa, Artificial Sequence
  Description of Artificial Sequence: Synthetic peptide
  Seed: RLLQNSQVFSL
RRLQNSQVFSS

SEQ ID NO: 12578 - protein, 11 aa, Artificial Sequence
  Description of Artificial Sequence: Synthetic peptide
  Seed: RLLQNSQVFSL
RRLQNSQVFST

SEQ ID NO: 12579 - protein, 11 aa, Artificial Sequence
  Description of Artificial Sequence: Synthetic peptide
  Seed: RLLQNSQVFSL
RRLQNSQVFSW

SEQ ID NO: 12580 - protein, 11 aa, Artificial Sequence
  Description of Artificial Sequence: Synthetic peptide
  Seed: RLLQNSQVFSL
RRLQNSQVFSY

SEQ ID NO: 12581 - protein, 11 aa, Artificial Sequence
  Description of Artificial Sequence: Synthetic peptide
  Seed: RLLQNSQVFSL
RRLQNSQVFSV

SEQ ID NO: 12582 - protein, 11 aa, Artificial Sequence
  Description of Artificial Sequence: Synthetic peptide
  Seed: RLLQNSQVFSL
RNLQNSQVFSI

SEQ ID NO: 12583 - protein, 11 aa, Artificial Sequence
  Description of Artificial Sequence: Synthetic peptide
  Seed: RLLQNSQVFSL
RNLQNSQVFSL

SEQ ID NO: 12584 - protein, 11 aa, Artificial Sequence
  Description of Artificial Sequence: Synthetic peptide
  Seed: RLLQNSQVFSL
RNLQNSQVFSW

SEQ ID NO: 12585 - protein, 11 aa, Artificial Sequence
  Description of Artificial Sequence: Synthetic peptide
  Seed: RLLQNSQVFSL
RQLQNSQVFSI

SEQ ID NO: 12586 - protein, 11 aa, Artificial Sequence
  Description of Artificial Sequence: Synthetic peptide
  Seed: RLLQNSQVFSL
RNLQNSQVFSV

SEQ ID NO: 12587 - protein, 11 aa, Artificial Sequence
  Description of Artificial Sequence: Synthetic peptide
  Seed: RLLQNSQVFSL
RDLQNSQVFSI

SEQ ID NO: 12588 - protein, 11 aa, Artificial Sequence
  Description of Artificial Sequence: Synthetic peptide
  Seed: RLLQNSQVFSL
RDLQNSQVFSL

SEQ ID NO: 12589 - protein, 11 aa, Artificial Sequence
  Description of Artificial Sequence: Synthetic peptide
  Seed: RLLQNSQVFSL
RDLQNSQVFSM

SEQ ID NO: 12590 - protein, 11 aa, Artificial Sequence
  Description of Artificial Sequence: Synthetic peptide
  Seed: RLLQNSQVFSL
RDLQNSQVFSV

SEQ ID NO: 12591 - protein, 11 aa, Artificial Sequence
  Description of Artificial Sequence: Synthetic peptide
  Seed: RLLQNSQVFSL
RCLQNSQVFSI

SEQ ID NO: 12592 - protein, 11 aa, Artificial Sequence
  Description of Artificial Sequence: Synthetic peptide
  Seed: RLLQNSQVFSL
RCLQNSQVFSL

SEQ ID NO: 12593 - protein, 11 aa, Artificial Sequence
  Description of Artificial Sequence: Synthetic peptide
  Seed: RLLQNSQVFSL
RCLQNSQVFSM

SEQ ID NO: 12594 - protein, 11 aa, Artificial Sequence
  Description of Artificial Sequence: Synthetic peptide
  Seed: RLLQNSQVFSL
RCLQNSQVFSW

SEQ ID NO: 12595 - protein, 11 aa, Artificial Sequence
  Description of Artificial Sequence: Synthetic peptide
  Seed: RLLQNSQVFSL
RRLQNSQVFSM

SEQ ID NO: 12596 - protein, 11 aa, Artificial Sequence
  Description of Artificial Sequence: Synthetic peptide
  Seed: RLLQNSQVFSL
RRLQNSQVFSL

SEQ ID NO: 12597 - protein, 11 aa, Artificial Sequence
  Description of Artificial Sequence: Synthetic peptide
  Seed: RLLQNSQVFSL
RRLQNSQVFSI

SEQ ID NO: 12598 - protein, 11 aa, Artificial Sequence
  Description of Artificial Sequence: Synthetic peptide
  Seed: RLLQNSQVFSL
RRLQNSQVFSG

SEQ ID NO: 12599 - protein, 10 aa, Artificial Sequence
  Description of Artificial Sequence: Synthetic peptide
  Seed: RLLQNSQVFS
RSLQNSQVFY

SEQ ID NO: 12600 - protein, 10 aa, Artificial Sequence
  Description of Artificial Sequence: Synthetic peptide
  Seed: RLLQNSQVFS
RTLQNSQVFM

SEQ ID NO: 12601 - protein, 10 aa, Artificial Sequence
  Description of Artificial Sequence: Synthetic peptide
  Seed: RLLQNSQVFS
RTLQNSQVFF

SEQ ID NO: 12602 - protein, 10 aa, Artificial Sequence
  Description of Artificial Sequence: Synthetic peptide
  Seed: RLLQNSQVFS
RTLQNSQVFY

SEQ ID NO: 12603 - protein, 10 aa, Artificial Sequence
  Description of Artificial Sequence: Synthetic peptide
  Seed: RLLQNSQVFS
RWLQNSQVFF

SEQ ID NO: 12604 - protein, 10 aa, Artificial Sequence
  Description of Artificial Sequence: Synthetic peptide
  Seed: RLLQNSQVFS
RWLQNSQVFY

SEQ ID NO: 12605 - protein, 10 aa, Artificial Sequence
  Description of Artificial Sequence: Synthetic peptide
  Seed: RLLQNSQVFS
RYLQNSQVFF

SEQ ID NO: 12606 - protein, 10 aa, Artificial Sequence
  Description of Artificial Sequence: Synthetic peptide
  Seed: RLLQNSQVFS
RYLQNSQVFY

SEQ ID NO: 12607 - protein, 10 aa, Artificial Sequence
  Description of Artificial Sequence: Synthetic peptide
  Seed: RLLQNSQVFS
RVLQNSQVFM

SEQ ID NO: 12608 - protein, 10 aa, Artificial Sequence
  Description of Artificial Sequence: Synthetic peptide
  Seed: RLLQNSQVFS
RVLQNSQVFF

SEQ ID NO: 12609 - protein, 10 aa, Artificial Sequence
  Description of Artificial Sequence: Synthetic peptide
  Seed: RLLQNSQVFS
RVLQNSQVFY

SEQ ID NO: 12610 - protein, 11 aa, Artificial Sequence
  Description of Artificial Sequence: Synthetic peptide
  Seed: RLLQNSQVFSL
RALQNSQVFSI

SEQ ID NO: 12611 - protein, 11 aa, Artificial Sequence
  Description of Artificial Sequence: Synthetic peptide
  Seed: RLLQNSQVFSL
RALQNSQVFSL

SEQ ID NO: 12612 - protein, 11 aa, Artificial Sequence
  Description of Artificial Sequence: Synthetic peptide
  Seed: RLLQNSQVFSL
RALQNSQVFSM

SEQ ID NO: 12613 - protein, 11 aa, Artificial Sequence
  Description of Artificial Sequence: Synthetic peptide
  Seed: RLLQNSQVFSL
RALQNSQVFSF

SEQ ID NO: 12614 - protein, 11 aa, Artificial Sequence
  Description of Artificial Sequence: Synthetic peptide
  Seed: RLLQNSQVFSL
RALQNSQVFSW

SEQ ID NO: 12615 - protein, 11 aa, Artificial Sequence
  Description of Artificial Sequence: Synthetic peptide
  Seed: RLLQNSQVFSL
RALQNSQVFSV

SEQ ID NO: 12616 - protein, 11 aa, Artificial Sequence
  Description of Artificial Sequence: Synthetic peptide
  Seed: RLLQNSQVFSL
RRLQNSQVFSA

SEQ ID NO: 12617 - protein, 11 aa, Artificial Sequence
  Description of Artificial Sequence: Synthetic peptide
  Seed: RLLQNSQVFSL
RRLQNSQVFSC

SEQ ID NO: 12618 - protein, 11 aa, Artificial Sequence
  Description of Artificial Sequence: Synthetic peptide
  Seed: RLLQNSQVFSL
RCLQNSQVFSV

SEQ ID NO: 12619 - protein, 11 aa, Artificial Sequence
  Description of Artificial Sequence: Synthetic peptide
  Seed: RLLQNSQVFSL
RQLQNSQVFSL

SEQ ID NO: 12620 - protein, 11 aa, Artificial Sequence
  Description of Artificial Sequence: Synthetic peptide
  Seed: RLLQNSQVFSL
RMLQNSQVFSA

SEQ ID NO: 12621 - protein, 11 aa, Artificial Sequence
  Description of Artificial Sequence: Synthetic peptide
  Seed: RLLQNSQVFSL
RLLQNSQVFST

SEQ ID NO: 12622 - protein, 11 aa, Artificial Sequence
  Description of Artificial Sequence: Synthetic peptide
  Seed: RLLQNSQVFSL
RILQNSQVFSM

SEQ ID NO: 12623 - protein, 11 aa, Artificial Sequence
  Description of Artificial Sequence: Synthetic peptide
  Seed: RLLQNSQVFSL
RILQNSQVFSF

SEQ ID NO: 12624 - protein, 11 aa, Artificial Sequence
  Description of Artificial Sequence: Synthetic peptide
  Seed: RLLQNSQVFSL
RILQNSQVFSW

SEQ ID NO: 12625 - protein, 11 aa, Artificial Sequence
  Description of Artificial Sequence: Synthetic peptide
  Seed: RLLQNSQVFSL
RILQNSQVFSY

SEQ ID NO: 12626 - protein, 11 aa, Artificial Sequence
  Description of Artificial Sequence: Synthetic peptide
  Seed: RLLQNSQVFSL
RILQNSQVFSV

SEQ ID NO: 12627 - protein, 11 aa, Artificial Sequence
  Description of Artificial Sequence: Synthetic peptide
  Seed: RLLQNSQVFSL
RLLQNSQVFSA

SEQ ID NO: 12628 - protein, 11 aa, Artificial Sequence
  Description of Artificial Sequence: Synthetic peptide
  Seed: RLLQNSQVFSL
RLLQNSQVFSM

SEQ ID NO: 12629 - protein, 11 aa, Artificial Sequence
  Description of Artificial Sequence: Synthetic peptide
  Seed: RLLQNSQVFSL
RLLQNSQVFSF

SEQ ID NO: 12630 - protein, 11 aa, Artificial Sequence
  Description of Artificial Sequence: Synthetic peptide
  Seed: RLLQNSQVFSL
RLLQNSQVFSW

SEQ ID NO: 12631 - protein, 11 aa, Artificial Sequence
  Description of Artificial Sequence: Synthetic peptide
  Seed: RLLQNSQVFSL
RQLQNSQVFSM

SEQ ID NO: 12632 - protein, 11 aa, Artificial Sequence
  Description of Artificial Sequence: Synthetic peptide
  Seed: RLLQNSQVFSL
RLLQNSQVFSY

SEQ ID NO: 12633 - protein, 11 aa, Artificial Sequence
  Description of Artificial Sequence: Synthetic peptide
  Seed: RLLQNSQVFSL
RLLQNSQVFSV

SEQ ID NO: 12634 - protein, 11 aa, Artificial Sequence
  Description of Artificial Sequence: Synthetic peptide
  Seed: RLLQNSQVFSL
RKLQNSQVFSI

SEQ ID NO: 12635 - protein, 11 aa, Artificial Sequence
  Description of Artificial Sequence: Synthetic peptide
  Seed: RLLQNSQVFSL
RKLQNSQVFSL

SEQ ID NO: 12636 - protein, 11 aa, Artificial Sequence
  Description of Artificial Sequence: Synthetic peptide
  Seed: RLLQNSQVFSL
RKLQNSQVFSM

SEQ ID NO: 12637 - protein, 11 aa, Artificial Sequence
  Description of Artificial Sequence: Synthetic peptide
  Seed: RLLQNSQVFSL
RKLQNSQVFSF

SEQ ID NO: 12638 - protein, 11 aa, Artificial Sequence
  Description of Artificial Sequence: Synthetic peptide
  Seed: RLLQNSQVFSL
RKLQNSQVFSW

SEQ ID NO: 12639 - protein, 11 aa, Artificial Sequence
  Description of Artificial Sequence: Synthetic peptide
  Seed: RLLQNSQVFSL
RKLQNSQVFSY

SEQ ID NO: 12640 - protein, 11 aa, Artificial Sequence
  Description of Artificial Sequence: Synthetic peptide
  Seed: RLLQNSQVFSL
RKLQNSQVFSV

SEQ ID NO: 12641 - protein, 11 aa, Artificial Sequence
  Description of Artificial Sequence: Synthetic peptide
  Seed: RLLQNSQVFSL
RILQNSQVFSL

SEQ ID NO: 12642 - protein, 11 aa, Artificial Sequence
  Description of Artificial Sequence: Synthetic peptide
  Seed: RLLQNSQVFSL
RILQNSQVFSI

SEQ ID NO: 12643 - protein, 11 aa, Artificial Sequence
  Description of Artificial Sequence: Synthetic peptide
  Seed: RLLQNSQVFSL
RHLQNSQVFSV

SEQ ID NO: 12644 - protein, 11 aa, Artificial Sequence
  Description of Artificial Sequence: Synthetic peptide
  Seed: RLLQNSQVFSL
RHLQNSQVFSY

SEQ ID NO: 12645 - protein, 11 aa, Artificial Sequence
  Description of Artificial Sequence: Synthetic peptide
  Seed: RLLQNSQVFSL
RQLQNSQVFSF

SEQ ID NO: 12646 - protein, 11 aa, Artificial Sequence
  Description of Artificial Sequence: Synthetic peptide
  Seed: RLLQNSQVFSL
RQLQNSQVFSW

SEQ ID NO: 12647 - protein, 11 aa, Artificial Sequence
  Description of Artificial Sequence: Synthetic peptide
  Seed: RLLQNSQVFSL
RQLQNSQVFSV

SEQ ID NO: 12648 - protein, 11 aa, Artificial Sequence
  Description of Artificial Sequence: Synthetic peptide
  Seed: RLLQNSQVFSL
RELQNSQVFSI

SEQ ID NO: 12649 - protein, 11 aa, Artificial Sequence
  Description of Artificial Sequence: Synthetic peptide
  Seed: RLLQNSQVFSL
RELQNSQVFSL

SEQ ID NO: 12650 - protein, 11 aa, Artificial Sequence
  Description of Artificial Sequence: Synthetic peptide
  Seed: RLLQNSQVFSL
RELQNSQVFSM

SEQ ID NO: 12651 - protein, 11 aa, Artificial Sequence
  Description of Artificial Sequence: Synthetic peptide
  Seed: RLLQNSQVFSL
RELQNSQVFSF

SEQ ID NO: 12652 - protein, 11 aa, Artificial Sequence
  Description of Artificial Sequence: Synthetic peptide
  Seed: RLLQNSQVFSL
RELQNSQVFSV

SEQ ID NO: 12653 - protein, 11 aa, Artificial Sequence
  Description of Artificial Sequence: Synthetic peptide
  Seed: RLLQNSQVFSL
RGLQNSQVFSI

SEQ ID NO: 12654 - protein, 11 aa, Artificial Sequence
  Description of Artificial Sequence: Synthetic peptide
  Seed: RLLQNSQVFSL
RGLQNSQVFSL

SEQ ID NO: 12655 - protein, 11 aa, Artificial Sequence
  Description of Artificial Sequence: Synthetic peptide
  Seed: RLLQNSQVFSL
RGLQNSQVFSM

SEQ ID NO: 12656 - protein, 11 aa, Artificial Sequence
  Description of Artificial Sequence: Synthetic peptide
  Seed: RLLQNSQVFSL
RGLQNSQVFSW

SEQ ID NO: 12657 - protein, 11 aa, Artificial Sequence
  Description of Artificial Sequence: Synthetic peptide
  Seed: RLLQNSQVFSL
RGLQNSQVFSY

SEQ ID NO: 12658 - protein, 11 aa, Artificial Sequence
  Description of Artificial Sequence: Synthetic peptide
  Seed: RLLQNSQVFSL
RGLQNSQVFSV

SEQ ID NO: 12659 - protein, 11 aa, Artificial Sequence
  Description of Artificial Sequence: Synthetic peptide
  Seed: RLLQNSQVFSL
RHLQNSQVFSI

SEQ ID NO: 12660 - protein, 11 aa, Artificial Sequence
  Description of Artificial Sequence: Synthetic peptide
  Seed: RLLQNSQVFSL
RHLQNSQVFSL

SEQ ID NO: 12661 - protein, 11 aa, Artificial Sequence
  Description of Artificial Sequence: Synthetic peptide
  Seed: RLLQNSQVFSL
RHLQNSQVFSM

SEQ ID NO: 12662 - protein, 11 aa, Artificial Sequence
  Description of Artificial Sequence: Synthetic peptide
  Seed: RLLQNSQVFSL
RHLQNSQVFSF

SEQ ID NO: 12663 - protein, 11 aa, Artificial Sequence
  Description of Artificial Sequence: Synthetic peptide
  Seed: RLLQNSQVFSL
RHLQNSQVFSW

SEQ ID NO: 12664 - protein, 9 aa, Artificial Sequence
  Description of Artificial Sequence: Synthetic peptide
  Seed: RLLQNSQVF
RQLQNSQVW

SEQ ID NO: 12665 - protein, 9 aa, Artificial Sequence
  Description of Artificial Sequence: Synthetic peptide
  Seed: RLLQNSQVF
RQLQNSQVT

SEQ ID NO: 12666 - protein, 9 aa, Artificial Sequence
  Description of Artificial Sequence: Synthetic peptide
  Seed: RLLQNSQVF
RQLQNSQVS

SEQ ID NO: 12667 - protein, 9 aa, Artificial Sequence
  Description of Artificial Sequence: Synthetic peptide
  Seed: RLIQNSLTI
RAIQNSLTI

SEQ ID NO: 12668 - protein, 11 aa, Artificial Sequence
  Description of Artificial Sequence: Synthetic peptide
  Seed: RLIQNSITIER
RWIQNSITIER

SEQ ID NO: 12669 - protein, 11 aa, Artificial Sequence
  Description of Artificial Sequence: Synthetic peptide
  Seed: RLIQNSITIER
RWIQNSITIEK

SEQ ID NO: 12670 - protein, 11 aa, Artificial Sequence
  Description of Artificial Sequence: Synthetic peptide
  Seed: RLIQNSITIER
RYIQNSITIER

SEQ ID NO: 12671 - protein, 11 aa, Artificial Sequence
  Description of Artificial Sequence: Synthetic peptide
  Seed: RLIQNSITIER
RYIQNSITIEK

SEQ ID NO: 12672 - protein, 11 aa, Artificial Sequence
  Description of Artificial Sequence: Synthetic peptide
  Seed: RLIQNSITIER
RVIQNSITIER

SEQ ID NO: 12673 - protein, 11 aa, Artificial Sequence
  Description of Artificial Sequence: Synthetic peptide
  Seed: RLIQNSITIER
RVIQNSITIEK

SEQ ID NO: 12674 - protein, 11 aa, Artificial Sequence
  Description of Artificial Sequence: Synthetic peptide
  Seed: RLIQNSITIER
RVIQNSITIEY

SEQ ID NO: 12675 - protein, 9 aa, Artificial Sequence
  Description of Artificial Sequence: Synthetic peptide
  Seed: RLIQNSLTI
RAIQNSLTA

SEQ ID NO: 12676 - protein, 9 aa, Artificial Sequence
  Description of Artificial Sequence: Synthetic peptide
  Seed: RLIQNSLTI
RAIQNSLTH

SEQ ID NO: 12677 - protein, 9 aa, Artificial Sequence
  Description of Artificial Sequence: Synthetic peptide
  Seed: RLIQNSLTI
RAIQNSLTL

SEQ ID NO: 12678 - protein, 9 aa, Artificial Sequence
  Description of Artificial Sequence: Synthetic peptide
  Seed: RLIQNSLTI
RRIQNSLTF

SEQ ID NO: 12679 - protein, 9 aa, Artificial Sequence
  Description of Artificial Sequence: Synthetic peptide
  Seed: RLIQNSLTI
RAIQNSLTM

SEQ ID NO: 12680 - protein, 9 aa, Artificial Sequence
  Description of Artificial Sequence: Synthetic peptide
  Seed: RLIQNSLTI
RAIQNSLTF

SEQ ID NO: 12681 - protein, 9 aa, Artificial Sequence
  Description of Artificial Sequence: Synthetic peptide
  Seed: RLIQNSLTI
RAIQNSLTW

SEQ ID NO: 12682 - protein, 9 aa, Artificial Sequence
  Description of Artificial Sequence: Synthetic peptide
  Seed: RLIQNSLTI
RAIQNSLTY

SEQ ID NO: 12683 - protein, 9 aa, Artificial Sequence
  Description of Artificial Sequence: Synthetic peptide
  Seed: RLIQNSLTI
RAIQNSLTV

SEQ ID NO: 12684 - protein, 9 aa, Artificial Sequence
  Description of Artificial Sequence: Synthetic peptide
  Seed: RLIQNSLTI
RRIQNSLTA

SEQ ID NO: 12685 - protein, 9 aa, Artificial Sequence
  Description of Artificial Sequence: Synthetic peptide
  Seed: RLIQNSLTI
RRIQNSLTH

SEQ ID NO: 12686 - protein, 9 aa, Artificial Sequence
  Description of Artificial Sequence: Synthetic peptide
  Seed: RLIQNSLTI
RRIQNSLTI

SEQ ID NO: 12687 - protein, 9 aa, Artificial Sequence
  Description of Artificial Sequence: Synthetic peptide
  Seed: RLIQNSLTI
RRIQNSLTL

SEQ ID NO: 12688 - protein, 11 aa, Artificial Sequence
  Description of Artificial Sequence: Synthetic peptide
  Seed: RLIQNSITIER
RTIQNSITIEY

SEQ ID NO: 12689 - protein, 11 aa, Artificial Sequence
  Description of Artificial Sequence: Synthetic peptide
  Seed: RLIQNSITIER
RTIQNSITIEK

SEQ ID NO: 12690 - protein, 11 aa, Artificial Sequence
  Description of Artificial Sequence: Synthetic peptide
  Seed: RLIQNSITIER
RTIQNSITIER

SEQ ID NO: 12691 - protein, 11 aa, Artificial Sequence
  Description of Artificial Sequence: Synthetic peptide
  Seed: RLIQNSITIER
RSIQNSITIEK

SEQ ID NO: 12692 - protein, 11 aa, Artificial Sequence
  Description of Artificial Sequence: Synthetic peptide
  Seed: RLIQNSITIER
RQIQNSITIER

SEQ ID NO: 12693 - protein, 11 aa, Artificial Sequence
  Description of Artificial Sequence: Synthetic peptide
  Seed: RLIQNSITIER
RQIQNSITIEK

SEQ ID NO: 12694 - protein, 11 aa, Artificial Sequence
  Description of Artificial Sequence: Synthetic peptide
  Seed: RLIQNSITIER
REIQNSITIER

SEQ ID NO: 12695 - protein, 11 aa, Artificial Sequence
  Description of Artificial Sequence: Synthetic peptide
  Seed: RLIQNSITIER
RGIQNSITIER

SEQ ID NO: 12696 - protein, 11 aa, Artificial Sequence
  Description of Artificial Sequence: Synthetic peptide
  Seed: RLIQNSITIER
RGIQNSITIEK

SEQ ID NO: 12697 - protein, 11 aa, Artificial Sequence
  Description of Artificial Sequence: Synthetic peptide
  Seed: RLIQNSITIER
RHIQNSITIER

SEQ ID NO: 12698 - protein, 11 aa, Artificial Sequence
  Description of Artificial Sequence: Synthetic peptide
  Seed: RLIQNSITIER
RIIQNSITIER

SEQ ID NO: 12699 - protein, 11 aa, Artificial Sequence
  Description of Artificial Sequence: Synthetic peptide
  Seed: RLIQNSITIER
RIIQNSITIEK

SEQ ID NO: 12700 - protein, 11 aa, Artificial Sequence
  Description of Artificial Sequence: Synthetic peptide
  Seed: RLIQNSITIER
RKIQNSITIER

SEQ ID NO: 12701 - protein, 11 aa, Artificial Sequence
  Description of Artificial Sequence: Synthetic peptide
  Seed: RLIQNSITIER
RKIQNSITIEK

SEQ ID NO: 12702 - protein, 11 aa, Artificial Sequence
  Description of Artificial Sequence: Synthetic peptide
  Seed: RLIQNSITIER
RMIQNSITIER

SEQ ID NO: 12703 - protein, 11 aa, Artificial Sequence
  Description of Artificial Sequence: Synthetic peptide
  Seed: RLIQNSITIER
RMIQNSITIEK

SEQ ID NO: 12704 - protein, 11 aa, Artificial Sequence
  Description of Artificial Sequence: Synthetic peptide
  Seed: RLIQNSITIER
RMIQNSITIEY

SEQ ID NO: 12705 - protein, 11 aa, Artificial Sequence
  Description of Artificial Sequence: Synthetic peptide
  Seed: RLIQNSITIER
RFIQNSITIER

SEQ ID NO: 12706 - protein, 11 aa, Artificial Sequence
  Description of Artificial Sequence: Synthetic peptide
  Seed: RLIQNSITIER
RFIQNSITIEK

SEQ ID NO: 12707 - protein, 11 aa, Artificial Sequence
  Description of Artificial Sequence: Synthetic peptide
  Seed: RLIQNSITIER
RPIQNSITIER

SEQ ID NO: 12708 - protein, 11 aa, Artificial Sequence
  Description of Artificial Sequence: Synthetic peptide
  Seed: RLIQNSITIER
RPIQNSITIEK

SEQ ID NO: 12709 - protein, 11 aa, Artificial Sequence
  Description of Artificial Sequence: Synthetic peptide
  Seed: RLIQNSITIER
RSIQNSITIER

SEQ ID NO: 12710 - protein, 9 aa, Artificial Sequence
  Description of Artificial Sequence: Synthetic peptide
  Seed: RLIQNSLTI
RRIQNSLTM

SEQ ID NO: 12711 - protein, 9 aa, Artificial Sequence
  Description of Artificial Sequence: Synthetic peptide
  Seed: RLIQNSLTI
RRIQNSLTW

SEQ ID NO: 12712 - protein, 11 aa, Artificial Sequence
  Description of Artificial Sequence: Synthetic peptide
  Seed: RLIQNSITIER
RDIQNSITIER

SEQ ID NO: 12713 - protein, 9 aa, Artificial Sequence
  Description of Artificial Sequence: Synthetic peptide
  Seed: RLIQNSLTI
RQIQNSLTT

SEQ ID NO: 12714 - protein, 9 aa, Artificial Sequence
  Description of Artificial Sequence: Synthetic peptide
  Seed: RLIQNSLTI
RQIQNSLTG

SEQ ID NO: 12715 - protein, 9 aa, Artificial Sequence
  Description of Artificial Sequence: Synthetic peptide
  Seed: RLIQNSLTI
RQIQNSLTH

SEQ ID NO: 12716 - protein, 9 aa, Artificial Sequence
  Description of Artificial Sequence: Synthetic peptide
  Seed: RLIQNSLTI
RQIQNSLTI

SEQ ID NO: 12717 - protein, 9 aa, Artificial Sequence
  Description of Artificial Sequence: Synthetic peptide
  Seed: RLIQNSLTI
RQIQNSLTL

SEQ ID NO: 12718 - protein, 9 aa, Artificial Sequence
  Description of Artificial Sequence: Synthetic peptide
  Seed: RLIQNSLTI
RQIQNSLTK

SEQ ID NO: 12719 - protein, 9 aa, Artificial Sequence
  Description of Artificial Sequence: Synthetic peptide
  Seed: RLIQNSLTI
RQIQNSLTM

SEQ ID NO: 12720 - protein, 9 aa, Artificial Sequence
  Description of Artificial Sequence: Synthetic peptide
  Seed: RLIQNSLTI
RQIQNSLTF

SEQ ID NO: 12721 - protein, 9 aa, Artificial Sequence
  Description of Artificial Sequence: Synthetic peptide
  Seed: RLIQNSLTI
RQIQNSLTP

SEQ ID NO: 12722 - protein, 9 aa, Artificial Sequence
  Description of Artificial Sequence: Synthetic peptide
  Seed: RLIQNSLTI
RQIQNSLTS

SEQ ID NO: 12723 - protein, 9 aa, Artificial Sequence
  Description of Artificial Sequence: Synthetic peptide
  Seed: RLIQNSLTI
RQIQNSLTW

SEQ ID NO: 12724 - protein, 9 aa, Artificial Sequence
  Description of Artificial Sequence: Synthetic peptide
  Seed: RLIQNSLTI
RRIQNSLTY

SEQ ID NO: 12725 - protein, 9 aa, Artificial Sequence
  Description of Artificial Sequence: Synthetic peptide
  Seed: RLIQNSLTI
RQIQNSLTY

SEQ ID NO: 12726 - protein, 9 aa, Artificial Sequence
  Description of Artificial Sequence: Synthetic peptide
  Seed: RLIQNSLTI
RQIQNSLTV

SEQ ID NO: 12727 - protein, 9 aa, Artificial Sequence
  Description of Artificial Sequence: Synthetic peptide
  Seed: RLIQNSLTI
REIQNSLTA

SEQ ID NO: 12728 - protein, 9 aa, Artificial Sequence
  Description of Artificial Sequence: Synthetic peptide
  Seed: RLIQNSLTI
REIQNSLTH

SEQ ID NO: 12729 - protein, 9 aa, Artificial Sequence
  Description of Artificial Sequence: Synthetic peptide
  Seed: RLIQNSLTI
REIQNSLTI

SEQ ID NO: 12730 - protein, 9 aa, Artificial Sequence
  Description of Artificial Sequence: Synthetic peptide
  Seed: RLIQNSLTI
REIQNSLTL

SEQ ID NO: 12731 - protein, 9 aa, Artificial Sequence
  Description of Artificial Sequence: Synthetic peptide
  Seed: RLIQNSLTI
REIQNSLTM

SEQ ID NO: 12732 - protein, 9 aa, Artificial Sequence
  Description of Artificial Sequence: Synthetic peptide
  Seed: RLIQNSLTI
REIQNSLTF

SEQ ID NO: 12733 - protein, 9 aa, Artificial Sequence
  Description of Artificial Sequence: Synthetic peptide
  Seed: RLIQNSLTI
REIQNSLTW

SEQ ID NO: 12734 - protein, 9 aa, Artificial Sequence
  Description of Artificial Sequence: Synthetic peptide
  Seed: RLIQNSLTI
RQIQNSLTE

SEQ ID NO: 12735 - protein, 9 aa, Artificial Sequence
  Description of Artificial Sequence: Synthetic peptide
  Seed: RLIQNSLTI
RQIQNSLTQ

SEQ ID NO: 12736 - protein, 9 aa, Artificial Sequence
  Description of Artificial Sequence: Synthetic peptide
  Seed: RLIQNSLTI
RQIQNSLTC

SEQ ID NO: 12737 - protein, 9 aa, Artificial Sequence
  Description of Artificial Sequence: Synthetic peptide
  Seed: RLIQNSLTI
RQIQNSLTD

SEQ ID NO: 12738 - protein, 9 aa, Artificial Sequence
  Description of Artificial Sequence: Synthetic peptide
  Seed: RLIQNSLTI
RRIQNSLTV

SEQ ID NO: 12739 - protein, 9 aa, Artificial Sequence
  Description of Artificial Sequence: Synthetic peptide
  Seed: RLIQNSLTI
RNIQNSLTH

SEQ ID NO: 12740 - protein, 9 aa, Artificial Sequence
  Description of Artificial Sequence: Synthetic peptide
  Seed: RLIQNSLTI
RNIQNSLTI

SEQ ID NO: 12741 - protein, 9 aa, Artificial Sequence
  Description of Artificial Sequence: Synthetic peptide
  Seed: RLIQNSLTI
RNIQNSLTL

SEQ ID NO: 12742 - protein, 9 aa, Artificial Sequence
  Description of Artificial Sequence: Synthetic peptide
  Seed: RLIQNSLTI
RNIQNSLTM

SEQ ID NO: 12743 - protein, 9 aa, Artificial Sequence
  Description of Artificial Sequence: Synthetic peptide
  Seed: RLIQNSLTI
RNIQNSLTF

SEQ ID NO: 12744 - protein, 9 aa, Artificial Sequence
  Description of Artificial Sequence: Synthetic peptide
  Seed: RLIQNSLTI
RNIQNSLTW

SEQ ID NO: 12745 - protein, 9 aa, Artificial Sequence
  Description of Artificial Sequence: Synthetic peptide
  Seed: RLIQNSLTI
RNIQNSLTY

SEQ ID NO: 12746 - protein, 9 aa, Artificial Sequence
  Description of Artificial Sequence: Synthetic peptide
  Seed: RLIQNSLTI
RNIQNSLTV

SEQ ID NO: 12747 - protein, 9 aa, Artificial Sequence
  Description of Artificial Sequence: Synthetic peptide
  Seed: RLIQNSLTI
RDIQNSLTI

SEQ ID NO: 12748 - protein, 9 aa, Artificial Sequence
  Description of Artificial Sequence: Synthetic peptide
  Seed: RLIQNSLTI
RDIQNSLTF

SEQ ID NO: 12749 - protein, 9 aa, Artificial Sequence
  Description of Artificial Sequence: Synthetic peptide
  Seed: RLIQNSLTI
RDIQNSLTY

SEQ ID NO: 12750 - protein, 9 aa, Artificial Sequence
  Description of Artificial Sequence: Synthetic peptide
  Seed: RLIQNSLTI
RCIQNSLTL

SEQ ID NO: 12751 - protein, 9 aa, Artificial Sequence
  Description of Artificial Sequence: Synthetic peptide
  Seed: RLIQNSLTI
RCIQNSLTM

SEQ ID NO: 12752 - protein, 9 aa, Artificial Sequence
  Description of Artificial Sequence: Synthetic peptide
  Seed: RLIQNSLTI
RCIQNSLTF

SEQ ID NO: 12753 - protein, 9 aa, Artificial Sequence
  Description of Artificial Sequence: Synthetic peptide
  Seed: RLIQNSLTI
RCIQNSLTW

SEQ ID NO: 12754 - protein, 9 aa, Artificial Sequence
  Description of Artificial Sequence: Synthetic peptide
  Seed: RLIQNSLTI
RCIQNSLTY

SEQ ID NO: 12755 - protein, 9 aa, Artificial Sequence
  Description of Artificial Sequence: Synthetic peptide
  Seed: RLIQNSLTI
RQIQNSLTA

SEQ ID NO: 12756 - protein, 9 aa, Artificial Sequence
  Description of Artificial Sequence: Synthetic peptide
  Seed: RLIQNSLTI
RQIQNSLTN

SEQ ID NO: 12757 - protein, 11 aa, Artificial Sequence
  Description of Artificial Sequence: Synthetic peptide
  Seed: RLIQNSITIER
RCIQNSITIER

SEQ ID NO: 12758 - protein, 11 aa, Artificial Sequence
  Description of Artificial Sequence: Synthetic peptide
  Seed: RLIQNSITIER
RNIQNSITIER

SEQ ID NO: 12759 - protein, 9 aa, Artificial Sequence
  Description of Artificial Sequence: Synthetic peptide
  Seed: RLLQNSQVF
RQLQNSQVP

SEQ ID NO: 12760 - protein, 9 aa, Artificial Sequence
  Description of Artificial Sequence: Synthetic peptide
  Seed: RLIQNSITI
RMIQNSITP

SEQ ID NO: 12761 - protein, 9 aa, Artificial Sequence
  Description of Artificial Sequence: Synthetic peptide
  Seed: RLIQNSITI
RMIQNSITN

SEQ ID NO: 12762 - protein, 9 aa, Artificial Sequence
  Description of Artificial Sequence: Synthetic peptide
  Seed: RLIQNSITI
RMIQNSITC

SEQ ID NO: 12763 - protein, 9 aa, Artificial Sequence
  Description of Artificial Sequence: Synthetic peptide
  Seed: RLIQNSITI
RMIQNSITQ

SEQ ID NO: 12764 - protein, 9 aa, Artificial Sequence
  Description of Artificial Sequence: Synthetic peptide
  Seed: RLIQNSITI
RMIQNSITG

SEQ ID NO: 12765 - protein, 9 aa, Artificial Sequence
  Description of Artificial Sequence: Synthetic peptide
  Seed: RLIQNSITI
RMIQNSITH

SEQ ID NO: 12766 - protein, 9 aa, Artificial Sequence
  Description of Artificial Sequence: Synthetic peptide
  Seed: RLIQNSITI
RMIQNSITI

SEQ ID NO: 12767 - protein, 9 aa, Artificial Sequence
  Description of Artificial Sequence: Synthetic peptide
  Seed: RLIQNSITI
RMIQNSITL

SEQ ID NO: 12768 - protein, 9 aa, Artificial Sequence
  Description of Artificial Sequence: Synthetic peptide
  Seed: RLIQNSITI
RMIQNSITM

SEQ ID NO: 12769 - protein, 9 aa, Artificial Sequence
  Description of Artificial Sequence: Synthetic peptide
  Seed: RLIQNSITI
RMIQNSITF

SEQ ID NO: 12770 - protein, 9 aa, Artificial Sequence
  Description of Artificial Sequence: Synthetic peptide
  Seed: RLIQNSITI
RMIQNSITS

SEQ ID NO: 12771 - protein, 9 aa, Artificial Sequence
  Description of Artificial Sequence: Synthetic peptide
  Seed: RLIQNSITI
RPIQNSITM

SEQ ID NO: 12772 - protein, 9 aa, Artificial Sequence
  Description of Artificial Sequence: Synthetic peptide
  Seed: RLIQNSITI
RMIQNSITT

SEQ ID NO: 12773 - protein, 9 aa, Artificial Sequence
  Description of Artificial Sequence: Synthetic peptide
  Seed: RLIQNSITI
RMIQNSITW

SEQ ID NO: 12774 - protein, 9 aa, Artificial Sequence
  Description of Artificial Sequence: Synthetic peptide
  Seed: RLIQNSITI
RMIQNSITY

SEQ ID NO: 12775 - protein, 9 aa, Artificial Sequence
  Description of Artificial Sequence: Synthetic peptide
  Seed: RLIQNSITI
RMIQNSITV

SEQ ID NO: 12776 - protein, 9 aa, Artificial Sequence
  Description of Artificial Sequence: Synthetic peptide
  Seed: RLIQNSITI
RFIQNSITI

SEQ ID NO: 12777 - protein, 9 aa, Artificial Sequence
  Description of Artificial Sequence: Synthetic peptide
  Seed: RLIQNSITI
RFIQNSITL

SEQ ID NO: 12778 - protein, 9 aa, Artificial Sequence
  Description of Artificial Sequence: Synthetic peptide
  Seed: RLIQNSITI
RFIQNSITM

SEQ ID NO: 12779 - protein, 9 aa, Artificial Sequence
  Description of Artificial Sequence: Synthetic peptide
  Seed: RLIQNSITI
RFIQNSITF

SEQ ID NO: 12780 - protein, 9 aa, Artificial Sequence
  Description of Artificial Sequence: Synthetic peptide
  Seed: RLIQNSITI
RFIQNSITW

SEQ ID NO: 12781 - protein, 9 aa, Artificial Sequence
  Description of Artificial Sequence: Synthetic peptide
  Seed: RLIQNSITI
RMIQNSITA

SEQ ID NO: 12782 - protein, 9 aa, Artificial Sequence
  Description of Artificial Sequence: Synthetic peptide
  Seed: RLIQNSITI
RKIQNSITV

SEQ ID NO: 12783 - protein, 9 aa, Artificial Sequence
  Description of Artificial Sequence: Synthetic peptide
  Seed: RLIQNSITI
RKIQNSITY

SEQ ID NO: 12784 - protein, 9 aa, Artificial Sequence
  Description of Artificial Sequence: Synthetic peptide
  Seed: RLIQNSITI
RKIQNSITW

SEQ ID NO: 12785 - protein, 9 aa, Artificial Sequence
  Description of Artificial Sequence: Synthetic peptide
  Seed: RLIQNSITI
RLIQNSITC

SEQ ID NO: 12786 - protein, 9 aa, Artificial Sequence
  Description of Artificial Sequence: Synthetic peptide
  Seed: RLIQNSITI
RLIQNSITH

SEQ ID NO: 12787 - protein, 9 aa, Artificial Sequence
  Description of Artificial Sequence: Synthetic peptide
  Seed: RLIQNSITI
RLIQNSITL

SEQ ID NO: 12788 - protein, 9 aa, Artificial Sequence
  Description of Artificial Sequence: Synthetic peptide
  Seed: RLIQNSITI
RLIQNSITF

SEQ ID NO: 12789 - protein, 9 aa, Artificial Sequence
  Description of Artificial Sequence: Synthetic peptide
  Seed: RLIQNSITI
RLIQNSITT

SEQ ID NO: 12790 - protein, 9 aa, Artificial Sequence
  Description of Artificial Sequence: Synthetic peptide
  Seed: RLIQNSITI
RLIQNSITW

SEQ ID NO: 12791 - protein, 9 aa, Artificial Sequence
  Description of Artificial Sequence: Synthetic peptide
  Seed: RLIQNSITI
RLIQNSITY

SEQ ID NO: 12792 - protein, 9 aa, Artificial Sequence
  Description of Artificial Sequence: Synthetic peptide
  Seed: RLIQNSITI
RLIQNSITV

SEQ ID NO: 12793 - protein, 9 aa, Artificial Sequence
  Description of Artificial Sequence: Synthetic peptide
  Seed: RLIQNSITI
RKIQNSITA

SEQ ID NO: 12794 - protein, 9 aa, Artificial Sequence
  Description of Artificial Sequence: Synthetic peptide
  Seed: RLIQNSITI
RKIQNSITC

SEQ ID NO: 12795 - protein, 9 aa, Artificial Sequence
  Description of Artificial Sequence: Synthetic peptide
  Seed: RLIQNSITI
RKIQNSITG

SEQ ID NO: 12796 - protein, 9 aa, Artificial Sequence
  Description of Artificial Sequence: Synthetic peptide
  Seed: RLIQNSITI
RKIQNSITH

SEQ ID NO: 12797 - protein, 9 aa, Artificial Sequence
  Description of Artificial Sequence: Synthetic peptide
  Seed: RLIQNSITI
RKIQNSITI

SEQ ID NO: 12798 - protein, 9 aa, Artificial Sequence
  Description of Artificial Sequence: Synthetic peptide
  Seed: RLIQNSITI
RKIQNSITL

SEQ ID NO: 12799 - protein, 9 aa, Artificial Sequence
  Description of Artificial Sequence: Synthetic peptide
  Seed: RLIQNSITI
RKIQNSITM

SEQ ID NO: 12800 - protein, 9 aa, Artificial Sequence
  Description of Artificial Sequence: Synthetic peptide
  Seed: RLIQNSITI
RKIQNSITF

SEQ ID NO: 12801 - protein, 9 aa, Artificial Sequence
  Description of Artificial Sequence: Synthetic peptide
  Seed: RLIQNSITI
RKIQNSITS

SEQ ID NO: 12802 - protein, 9 aa, Artificial Sequence
  Description of Artificial Sequence: Synthetic peptide
  Seed: RLIQNSITI
RKIQNSITT

SEQ ID NO: 12803 - protein, 9 aa, Artificial Sequence
  Description of Artificial Sequence: Synthetic peptide
  Seed: RLIQNSITI
RFIQNSITY

SEQ ID NO: 12804 - protein, 9 aa, Artificial Sequence
  Description of Artificial Sequence: Synthetic peptide
  Seed: RLIQNSITI
RPIQNSITF

SEQ ID NO: 12805 - protein, 11 aa, Artificial Sequence
  Description of Artificial Sequence: Synthetic peptide
  Seed: RLIQNSITIER
RRIQNSITIEK

SEQ ID NO: 12806 - protein, 9 aa, Artificial Sequence
  Description of Artificial Sequence: Synthetic peptide
  Seed: RLIQNSITI
RVIQNSITH

SEQ ID NO: 12807 - protein, 9 aa, Artificial Sequence
  Description of Artificial Sequence: Synthetic peptide
  Seed: RLIQNSITI
RWIQNSITW

SEQ ID NO: 12808 - protein, 9 aa, Artificial Sequence
  Description of Artificial Sequence: Synthetic peptide
  Seed: RLIQNSITI
RWIQNSITY

SEQ ID NO: 12809 - protein, 9 aa, Artificial Sequence
  Description of Artificial Sequence: Synthetic peptide
  Seed: RLIQNSITI
RYIQNSITI

SEQ ID NO: 12810 - protein, 9 aa, Artificial Sequence
  Description of Artificial Sequence: Synthetic peptide
  Seed: RLIQNSITI
RYIQNSITL

SEQ ID NO: 12811 - protein, 9 aa, Artificial Sequence
  Description of Artificial Sequence: Synthetic peptide
  Seed: RLIQNSITI
RYIQNSITM

SEQ ID NO: 12812 - protein, 9 aa, Artificial Sequence
  Description of Artificial Sequence: Synthetic peptide
  Seed: RLIQNSITI
RYIQNSITF

SEQ ID NO: 12813 - protein, 9 aa, Artificial Sequence
  Description of Artificial Sequence: Synthetic peptide
  Seed: RLIQNSITI
RYIQNSITW

SEQ ID NO: 12814 - protein, 9 aa, Artificial Sequence
  Description of Artificial Sequence: Synthetic peptide
  Seed: RLIQNSITI
RYIQNSITY

SEQ ID NO: 12815 - protein, 9 aa, Artificial Sequence
  Description of Artificial Sequence: Synthetic peptide
  Seed: RLIQNSITI
RVIQNSITA

SEQ ID NO: 12816 - protein, 9 aa, Artificial Sequence
  Description of Artificial Sequence: Synthetic peptide
  Seed: RLIQNSITI
RVIQNSITI

SEQ ID NO: 12817 - protein, 9 aa, Artificial Sequence
  Description of Artificial Sequence: Synthetic peptide
  Seed: RLIQNSITI
RPIQNSITY

SEQ ID NO: 12818 - protein, 9 aa, Artificial Sequence
  Description of Artificial Sequence: Synthetic peptide
  Seed: RLIQNSITI
RVIQNSITL

SEQ ID NO: 12819 - protein, 9 aa, Artificial Sequence
  Description of Artificial Sequence: Synthetic peptide
  Seed: RLIQNSITI
RVIQNSITM

SEQ ID NO: 12820 - protein, 9 aa, Artificial Sequence
  Description of Artificial Sequence: Synthetic peptide
  Seed: RLIQNSITI
RVIQNSITF

SEQ ID NO: 12821 - protein, 9 aa, Artificial Sequence
  Description of Artificial Sequence: Synthetic peptide
  Seed: RLIQNSITI
RVIQNSITW

SEQ ID NO: 12822 - protein, 9 aa, Artificial Sequence
  Description of Artificial Sequence: Synthetic peptide
  Seed: RLIQNSITI
RVIQNSITY

SEQ ID NO: 12823 - protein, 9 aa, Artificial Sequence
  Description of Artificial Sequence: Synthetic peptide
  Seed: RLIQNSITI
RVIQNSITV

SEQ ID NO: 12824 - protein, 11 aa, Artificial Sequence
  Description of Artificial Sequence: Synthetic peptide
  Seed: RLIQNSITIER
RAIQNSITIER

SEQ ID NO: 12825 - protein, 11 aa, Artificial Sequence
  Description of Artificial Sequence: Synthetic peptide
  Seed: RLIQNSITIER
RAIQNSITIEK

SEQ ID NO: 12826 - protein, 11 aa, Artificial Sequence
  Description of Artificial Sequence: Synthetic peptide
  Seed: RLIQNSITIER
RRIQNSITIER

SEQ ID NO: 12827 - protein, 9 aa, Artificial Sequence
  Description of Artificial Sequence: Synthetic peptide
  Seed: RLIQNSITI
RWIQNSITF

SEQ ID NO: 12828 - protein, 9 aa, Artificial Sequence
  Description of Artificial Sequence: Synthetic peptide
  Seed: RLIQNSITI
RWIQNSITM

SEQ ID NO: 12829 - protein, 9 aa, Artificial Sequence
  Description of Artificial Sequence: Synthetic peptide
  Seed: RLIQNSITI
RTIQNSITV

SEQ ID NO: 12830 - protein, 9 aa, Artificial Sequence
  Description of Artificial Sequence: Synthetic peptide
  Seed: RLIQNSITI
RTIQNSITY

SEQ ID NO: 12831 - protein, 9 aa, Artificial Sequence
  Description of Artificial Sequence: Synthetic peptide
  Seed: RLIQNSITI
RSIQNSITA

SEQ ID NO: 12832 - protein, 9 aa, Artificial Sequence
  Description of Artificial Sequence: Synthetic peptide
  Seed: RLIQNSITI
RSIQNSITC

SEQ ID NO: 12833 - protein, 9 aa, Artificial Sequence
  Description of Artificial Sequence: Synthetic peptide
  Seed: RLIQNSITI
RSIQNSITH

SEQ ID NO: 12834 - protein, 9 aa, Artificial Sequence
  Description of Artificial Sequence: Synthetic peptide
  Seed: RLIQNSITI
RSIQNSITI

SEQ ID NO: 12835 - protein, 9 aa, Artificial Sequence
  Description of Artificial Sequence: Synthetic peptide
  Seed: RLIQNSITI
RSIQNSITL

SEQ ID NO: 12836 - protein, 9 aa, Artificial Sequence
  Description of Artificial Sequence: Synthetic peptide
  Seed: RLIQNSITI
RSIQNSITM

SEQ ID NO: 12837 - protein, 9 aa, Artificial Sequence
  Description of Artificial Sequence: Synthetic peptide
  Seed: RLIQNSITI
RSIQNSITF

SEQ ID NO: 12838 - protein, 9 aa, Artificial Sequence
  Description of Artificial Sequence: Synthetic peptide
  Seed: RLIQNSITI
RSIQNSITW

SEQ ID NO: 12839 - protein, 9 aa, Artificial Sequence
  Description of Artificial Sequence: Synthetic peptide
  Seed: RLIQNSITI
RSIQNSITY

SEQ ID NO: 12840 - protein, 9 aa, Artificial Sequence
  Description of Artificial Sequence: Synthetic peptide
  Seed: RLIQNSITI
RSIQNSITV

SEQ ID NO: 12841 - protein, 9 aa, Artificial Sequence
  Description of Artificial Sequence: Synthetic peptide
  Seed: RLIQNSITI
RTIQNSITA

SEQ ID NO: 12842 - protein, 9 aa, Artificial Sequence
  Description of Artificial Sequence: Synthetic peptide
  Seed: RLIQNSITI
RTIQNSITC

SEQ ID NO: 12843 - protein, 9 aa, Artificial Sequence
  Description of Artificial Sequence: Synthetic peptide
  Seed: RLIQNSITI
RTIQNSITG

SEQ ID NO: 12844 - protein, 9 aa, Artificial Sequence
  Description of Artificial Sequence: Synthetic peptide
  Seed: RLIQNSITI
RTIQNSITH

SEQ ID NO: 12845 - protein, 9 aa, Artificial Sequence
  Description of Artificial Sequence: Synthetic peptide
  Seed: RLIQNSITI
RTIQNSITI

SEQ ID NO: 12846 - protein, 9 aa, Artificial Sequence
  Description of Artificial Sequence: Synthetic peptide
  Seed: RLIQNSITI
RTIQNSITL

SEQ ID NO: 12847 - protein, 9 aa, Artificial Sequence
  Description of Artificial Sequence: Synthetic peptide
  Seed: RLIQNSITI
RTIQNSITM

SEQ ID NO: 12848 - protein, 9 aa, Artificial Sequence
  Description of Artificial Sequence: Synthetic peptide
  Seed: RLIQNSITI
RTIQNSITF

SEQ ID NO: 12849 - protein, 9 aa, Artificial Sequence
  Description of Artificial Sequence: Synthetic peptide
  Seed: RLIQNSITI
RTIQNSITW

SEQ ID NO: 12850 - protein, 9 aa, Artificial Sequence
  Description of Artificial Sequence: Synthetic peptide
  Seed: RLIQNSLTI
REIQNSLTY

SEQ ID NO: 12851 - protein, 9 aa, Artificial Sequence
  Description of Artificial Sequence: Synthetic peptide
  Seed: RLIQNSLTI
REIQNSLTV

SEQ ID NO: 12852 - protein, 9 aa, Artificial Sequence
  Description of Artificial Sequence: Synthetic peptide
  Seed: RLIQNSLTI
RGIQNSLTH

SEQ ID NO: 12853 - protein, 11 aa, Artificial Sequence
  Description of Artificial Sequence: Synthetic peptide
  Seed: RLIQNSLTIER
RGIQNSLTIER

SEQ ID NO: 12854 - protein, 11 aa, Artificial Sequence
  Description of Artificial Sequence: Synthetic peptide
  Seed: RLIQNSLTIER
RAIQNSLTIEK

SEQ ID NO: 12855 - protein, 11 aa, Artificial Sequence
  Description of Artificial Sequence: Synthetic peptide
  Seed: RLIQNSLTIER
RRIQNSLTIER

SEQ ID NO: 12856 - protein, 11 aa, Artificial Sequence
  Description of Artificial Sequence: Synthetic peptide
  Seed: RLIQNSLTIER
RRIQNSLTIEK

SEQ ID NO: 12857 - protein, 11 aa, Artificial Sequence
  Description of Artificial Sequence: Synthetic peptide
  Seed: RLIQNSLTIER
RNIQNSLTIER

SEQ ID NO: 12858 - protein, 11 aa, Artificial Sequence
  Description of Artificial Sequence: Synthetic peptide
  Seed: RLIQNSLTIER
RDIQNSLTIER

SEQ ID NO: 12859 - protein, 11 aa, Artificial Sequence
  Description of Artificial Sequence: Synthetic peptide
  Seed: RLIQNSLTIER
RCIQNSLTIER

SEQ ID NO: 12860 - protein, 11 aa, Artificial Sequence
  Description of Artificial Sequence: Synthetic peptide
  Seed: RLIQNSLTIER
RQIQNSLTIER

SEQ ID NO: 12861 - protein, 11 aa, Artificial Sequence
  Description of Artificial Sequence: Synthetic peptide
  Seed: RLIQNSLTIER
RQIQNSLTIEK

SEQ ID NO: 12862 - protein, 11 aa, Artificial Sequence
  Description of Artificial Sequence: Synthetic peptide
  Seed: RLIQNSLTIER
REIQNSLTIER

SEQ ID NO: 12863 - protein, 11 aa, Artificial Sequence
  Description of Artificial Sequence: Synthetic peptide
  Seed: RLIQNSLTIER
RHIQNSLTIER

SEQ ID NO: 12864 - protein, 11 aa, Artificial Sequence
  Description of Artificial Sequence: Synthetic peptide
  Seed: RLIQNSLTIER
RSIQNSLTIEK

SEQ ID NO: 12865 - protein, 11 aa, Artificial Sequence
  Description of Artificial Sequence: Synthetic peptide
  Seed: RLIQNSLTIER
RIIQNSLTIER

SEQ ID NO: 12866 - protein, 11 aa, Artificial Sequence
  Description of Artificial Sequence: Synthetic peptide
  Seed: RLIQNSLTIER
RIIQNSLTIEK

SEQ ID NO: 12867 - protein, 11 aa, Artificial Sequence
  Description of Artificial Sequence: Synthetic peptide
  Seed: RLIQNSLTIER
RLIQNSLTIEK

SEQ ID NO: 12868 - protein, 11 aa, Artificial Sequence
  Description of Artificial Sequence: Synthetic peptide
  Seed: RLIQNSLTIER
RKIQNSLTIER

SEQ ID NO: 12869 - protein, 11 aa, Artificial Sequence
  Description of Artificial Sequence: Synthetic peptide
  Seed: RLIQNSLTIER
RMIQNSLTIER

SEQ ID NO: 12870 - protein, 11 aa, Artificial Sequence
  Description of Artificial Sequence: Synthetic peptide
  Seed: RLIQNSLTIER
RMIQNSLTIEK

SEQ ID NO: 12871 - protein, 11 aa, Artificial Sequence
  Description of Artificial Sequence: Synthetic peptide
  Seed: RLIQNSLTIER
RFIQNSLTIER

SEQ ID NO: 12872 - protein, 11 aa, Artificial Sequence
  Description of Artificial Sequence: Synthetic peptide
  Seed: RLIQNSLTIER
RFIQNSLTIEK

SEQ ID NO: 12873 - protein, 11 aa, Artificial Sequence
  Description of Artificial Sequence: Synthetic peptide
  Seed: RLIQNSLTIER
RPIQNSLTIER

SEQ ID NO: 12874 - protein, 11 aa, Artificial Sequence
  Description of Artificial Sequence: Synthetic peptide
  Seed: RLIQNSLTIER
RAIQNSLTIER

SEQ ID NO: 12875 - protein, 9 aa, Artificial Sequence
  Description of Artificial Sequence: Synthetic peptide
  Seed: RLIQNSLTI
RVIQNSLTV

SEQ ID NO: 12876 - protein, 9 aa, Artificial Sequence
  Description of Artificial Sequence: Synthetic peptide
  Seed: RLIQNSLTI
RVIQNSLTY

SEQ ID NO: 12877 - protein, 9 aa, Artificial Sequence
  Description of Artificial Sequence: Synthetic peptide
  Seed: RLIQNSLTI
RVIQNSLTW

SEQ ID NO: 12878 - protein, 9 aa, Artificial Sequence
  Description of Artificial Sequence: Synthetic peptide
  Seed: RLIQNSLTI
RWIQNSLTL

SEQ ID NO: 12879 - protein, 9 aa, Artificial Sequence
  Description of Artificial Sequence: Synthetic peptide
  Seed: RLIQNSLTI
RWIQNSLTM

SEQ ID NO: 12880 - protein, 9 aa, Artificial Sequence
  Description of Artificial Sequence: Synthetic peptide
  Seed: RLIQNSLTI
RWIQNSLTF

SEQ ID NO: 12881 - protein, 9 aa, Artificial Sequence
  Description of Artificial Sequence: Synthetic peptide
  Seed: RLIQNSLTI
RWIQNSLTW

SEQ ID NO: 12882 - protein, 9 aa, Artificial Sequence
  Description of Artificial Sequence: Synthetic peptide
  Seed: RLIQNSLTI
RWIQNSLTY

SEQ ID NO: 12883 - protein, 9 aa, Artificial Sequence
  Description of Artificial Sequence: Synthetic peptide
  Seed: RLIQNSLTI
RYIQNSLTH

SEQ ID NO: 12884 - protein, 9 aa, Artificial Sequence
  Description of Artificial Sequence: Synthetic peptide
  Seed: RLIQNSLTI
RYIQNSLTI

SEQ ID NO: 12885 - protein, 9 aa, Artificial Sequence
  Description of Artificial Sequence: Synthetic peptide
  Seed: RLIQNSLTI
RYIQNSLTL

SEQ ID NO: 12886 - protein, 9 aa, Artificial Sequence
  Description of Artificial Sequence: Synthetic peptide
  Seed: RLIQNSLTI
RYIQNSLTM

SEQ ID NO: 12887 - protein, 9 aa, Artificial Sequence
  Description of Artificial Sequence: Synthetic peptide
  Seed: RLIQNSLTI
RYIQNSLTF

SEQ ID NO: 12888 - protein, 9 aa, Artificial Sequence
  Description of Artificial Sequence: Synthetic peptide
  Seed: RLIQNSLTI
RYIQNSLTW

SEQ ID NO: 12889 - protein, 9 aa, Artificial Sequence
  Description of Artificial Sequence: Synthetic peptide
  Seed: RLIQNSLTI
RYIQNSLTY

SEQ ID NO: 12890 - protein, 9 aa, Artificial Sequence
  Description of Artificial Sequence: Synthetic peptide
  Seed: RLIQNSLTI
RYIQNSLTV

SEQ ID NO: 12891 - protein, 9 aa, Artificial Sequence
  Description of Artificial Sequence: Synthetic peptide
  Seed: RLIQNSLTI
RVIQNSLTA

SEQ ID NO: 12892 - protein, 9 aa, Artificial Sequence
  Description of Artificial Sequence: Synthetic peptide
  Seed: RLIQNSLTI
RVIQNSLTH

SEQ ID NO: 12893 - protein, 9 aa, Artificial Sequence
  Description of Artificial Sequence: Synthetic peptide
  Seed: RLIQNSLTI
RVIQNSLTI

SEQ ID NO: 12894 - protein, 9 aa, Artificial Sequence
  Description of Artificial Sequence: Synthetic peptide
  Seed: RLIQNSLTI
RVIQNSLTL

SEQ ID NO: 12895 - protein, 9 aa, Artificial Sequence
  Description of Artificial Sequence: Synthetic peptide
  Seed: RLIQNSLTI
RVIQNSLTM

SEQ ID NO: 12896 - protein, 9 aa, Artificial Sequence
  Description of Artificial Sequence: Synthetic peptide
  Seed: RLIQNSLTI
RVIQNSLTF

SEQ ID NO: 12897 - protein, 11 aa, Artificial Sequence
  Description of Artificial Sequence: Synthetic peptide
  Seed: RLIQNSLTIER
RSIQNSLTIER

SEQ ID NO: 12898 - protein, 11 aa, Artificial Sequence
  Description of Artificial Sequence: Synthetic peptide
  Seed: RLIQNSLTIER
RTIQNSLTIER

SEQ ID NO: 12899 - protein, 9 aa, Artificial Sequence
  Description of Artificial Sequence: Synthetic peptide
  Seed: RLIQNSLTI
RGIQNSLTI

SEQ ID NO: 12900 - protein, 9 aa, Artificial Sequence
  Description of Artificial Sequence: Synthetic peptide
  Seed: RLLQNSQVF
RQLQNSQVA

SEQ ID NO: 12901 - protein, 9 aa, Artificial Sequence
  Description of Artificial Sequence: Synthetic peptide
  Seed: RLLQNSQVF
RNLQNSQVL

SEQ ID NO: 12902 - protein, 9 aa, Artificial Sequence
  Description of Artificial Sequence: Synthetic peptide
  Seed: RLLQNSQVF
RNLQNSQVM

SEQ ID NO: 12903 - protein, 9 aa, Artificial Sequence
  Description of Artificial Sequence: Synthetic peptide
  Seed: RLLQNSQVF
RNLQNSQVF

SEQ ID NO: 12904 - protein, 9 aa, Artificial Sequence
  Description of Artificial Sequence: Synthetic peptide
  Seed: RLLQNSQVF
RNLQNSQVW

SEQ ID NO: 12905 - protein, 9 aa, Artificial Sequence
  Description of Artificial Sequence: Synthetic peptide
  Seed: RLLQNSQVF
RNLQNSQVY

SEQ ID NO: 12906 - protein, 9 aa, Artificial Sequence
  Description of Artificial Sequence: Synthetic peptide
  Seed: RLLQNSQVF
RCLQNSQVM

SEQ ID NO: 12907 - protein, 9 aa, Artificial Sequence
  Description of Artificial Sequence: Synthetic peptide
  Seed: RLLQNSQVF
RCLQNSQVF

SEQ ID NO: 12908 - protein, 9 aa, Artificial Sequence
  Description of Artificial Sequence: Synthetic peptide
  Seed: RLLQNSQVF
RCLQNSQVW

SEQ ID NO: 12909 - protein, 9 aa, Artificial Sequence
  Description of Artificial Sequence: Synthetic peptide
  Seed: RLLQNSQVF
RCLQNSQVY

SEQ ID NO: 12910 - protein, 9 aa, Artificial Sequence
  Description of Artificial Sequence: Synthetic peptide
  Seed: RLLQNSQVF
RQLQNSQVN

SEQ ID NO: 12911 - protein, 11 aa, Artificial Sequence
  Description of Artificial Sequence: Synthetic peptide
  Seed: RLIQNSLTIER
RTIQNSLTIEK

SEQ ID NO: 12912 - protein, 9 aa, Artificial Sequence
  Description of Artificial Sequence: Synthetic peptide
  Seed: RLLQNSQVF
RQLQNSQVC

SEQ ID NO: 12913 - protein, 9 aa, Artificial Sequence
  Description of Artificial Sequence: Synthetic peptide
  Seed: RLLQNSQVF
RQLQNSQVQ

SEQ ID NO: 12914 - protein, 9 aa, Artificial Sequence
  Description of Artificial Sequence: Synthetic peptide
  Seed: RLLQNSQVF
RQLQNSQVE

SEQ ID NO: 12915 - protein, 9 aa, Artificial Sequence
  Description of Artificial Sequence: Synthetic peptide
  Seed: RLLQNSQVF
RQLQNSQVG

SEQ ID NO: 12916 - protein, 9 aa, Artificial Sequence
  Description of Artificial Sequence: Synthetic peptide
  Seed: RLLQNSQVF
RQLQNSQVH

SEQ ID NO: 12917 - protein, 9 aa, Artificial Sequence
  Description of Artificial Sequence: Synthetic peptide
  Seed: RLLQNSQVF
RQLQNSQVI

SEQ ID NO: 12918 - protein, 9 aa, Artificial Sequence
  Description of Artificial Sequence: Synthetic peptide
  Seed: RLLQNSQVF
RQLQNSQVL

SEQ ID NO: 12919 - protein, 9 aa, Artificial Sequence
  Description of Artificial Sequence: Synthetic peptide
  Seed: RLLQNSQVF
RQLQNSQVM

SEQ ID NO: 12920 - protein, 9 aa, Artificial Sequence
  Description of Artificial Sequence: Synthetic peptide
  Seed: RLLQNSQVF
RQLQNSQVF

SEQ ID NO: 12921 - protein, 9 aa, Artificial Sequence
  Description of Artificial Sequence: Synthetic peptide
  Seed: RLLQNSQVF
RRLQNSQVV

SEQ ID NO: 12922 - protein, 9 aa, Artificial Sequence
  Description of Artificial Sequence: Synthetic peptide
  Seed: RLLQNSQVF
RRLQNSQVY

SEQ ID NO: 12923 - protein, 9 aa, Artificial Sequence
  Description of Artificial Sequence: Synthetic peptide
  Seed: RLLQNSQVF
RRLQNSQVW

SEQ ID NO: 12924 - protein, 9 aa, Artificial Sequence
  Description of Artificial Sequence: Synthetic peptide
  Seed: RLLQNSQVF
RRLQNSQVF

SEQ ID NO: 12925 - protein, 11 aa, Artificial Sequence
  Description of Artificial Sequence: Synthetic peptide
  Seed: RLIQNSLTIER
RWIQNSLTIER

SEQ ID NO: 12926 - protein, 11 aa, Artificial Sequence
  Description of Artificial Sequence: Synthetic peptide
  Seed: RLIQNSLTIER
RWIQNSLTIEK

SEQ ID NO: 12927 - protein, 11 aa, Artificial Sequence
  Description of Artificial Sequence: Synthetic peptide
  Seed: RLIQNSLTIER
RYIQNSLTIER

SEQ ID NO: 12928 - protein, 11 aa, Artificial Sequence
  Description of Artificial Sequence: Synthetic peptide
  Seed: RLIQNSLTIER
RYIQNSLTIEK

SEQ ID NO: 12929 - protein, 11 aa, Artificial Sequence
  Description of Artificial Sequence: Synthetic peptide
  Seed: RLIQNSLTIER
RVIQNSLTIER

SEQ ID NO: 12930 - protein, 11 aa, Artificial Sequence
  Description of Artificial Sequence: Synthetic peptide
  Seed: RLIQNSLTIER
RVIQNSLTIEK

SEQ ID NO: 12931 - protein, 9 aa, Artificial Sequence
  Description of Artificial Sequence: Synthetic peptide
  Seed: RLLQNSQVF
RALQNSQVA

SEQ ID NO: 12932 - protein, 9 aa, Artificial Sequence
  Description of Artificial Sequence: Synthetic peptide
  Seed: RLLQNSQVF
RALQNSQVH

SEQ ID NO: 12933 - protein, 9 aa, Artificial Sequence
  Description of Artificial Sequence: Synthetic peptide
  Seed: RLLQNSQVF
RALQNSQVI

SEQ ID NO: 12934 - protein, 9 aa, Artificial Sequence
  Description of Artificial Sequence: Synthetic peptide
  Seed: RLLQNSQVF
RALQNSQVL

SEQ ID NO: 12935 - protein, 9 aa, Artificial Sequence
  Description of Artificial Sequence: Synthetic peptide
  Seed: RLLQNSQVF
RALQNSQVM

SEQ ID NO: 12936 - protein, 9 aa, Artificial Sequence
  Description of Artificial Sequence: Synthetic peptide
  Seed: RLLQNSQVF
RALQNSQVF

SEQ ID NO: 12937 - protein, 9 aa, Artificial Sequence
  Description of Artificial Sequence: Synthetic peptide
  Seed: RLLQNSQVF
RALQNSQVW

SEQ ID NO: 12938 - protein, 9 aa, Artificial Sequence
  Description of Artificial Sequence: Synthetic peptide
  Seed: RLLQNSQVF
RALQNSQVY

SEQ ID NO: 12939 - protein, 9 aa, Artificial Sequence
  Description of Artificial Sequence: Synthetic peptide
  Seed: RLLQNSQVF
RALQNSQVV

SEQ ID NO: 12940 - protein, 9 aa, Artificial Sequence
  Description of Artificial Sequence: Synthetic peptide
  Seed: RLLQNSQVF
RRLQNSQVH

SEQ ID NO: 12941 - protein, 9 aa, Artificial Sequence
  Description of Artificial Sequence: Synthetic peptide
  Seed: RLLQNSQVF
RRLQNSQVI

SEQ ID NO: 12942 - protein, 9 aa, Artificial Sequence
  Description of Artificial Sequence: Synthetic peptide
  Seed: RLLQNSQVF
RRLQNSQVL

SEQ ID NO: 12943 - protein, 9 aa, Artificial Sequence
  Description of Artificial Sequence: Synthetic peptide
  Seed: RLLQNSQVF
RRLQNSQVM

SEQ ID NO: 12944 - protein, 9 aa, Artificial Sequence
  Description of Artificial Sequence: Synthetic peptide
  Seed: RLIQNSLTI
RTIQNSLTV

SEQ ID NO: 12945 - protein, 9 aa, Artificial Sequence
  Description of Artificial Sequence: Synthetic peptide
  Seed: RLIQNSLTI
RTIQNSLTY

SEQ ID NO: 12946 - protein, 9 aa, Artificial Sequence
  Description of Artificial Sequence: Synthetic peptide
  Seed: RLIQNSLTI
RTIQNSLTW

SEQ ID NO: 12947 - protein, 9 aa, Artificial Sequence
  Description of Artificial Sequence: Synthetic peptide
  Seed: RLIQNSLTI
RLIQNSLTY

SEQ ID NO: 12948 - protein, 9 aa, Artificial Sequence
  Description of Artificial Sequence: Synthetic peptide
  Seed: RLIQNSLTI
RLIQNSLTA

SEQ ID NO: 12949 - protein, 9 aa, Artificial Sequence
  Description of Artificial Sequence: Synthetic peptide
  Seed: RLIQNSLTI
RLIQNSLTC

SEQ ID NO: 12950 - protein, 9 aa, Artificial Sequence
  Description of Artificial Sequence: Synthetic peptide
  Seed: RLIQNSLTI
RLIQNSLTG

SEQ ID NO: 12951 - protein, 9 aa, Artificial Sequence
  Description of Artificial Sequence: Synthetic peptide
  Seed: RLIQNSLTI
RLIQNSLTH

SEQ ID NO: 12952 - protein, 9 aa, Artificial Sequence
  Description of Artificial Sequence: Synthetic peptide
  Seed: RLIQNSLTI
RLIQNSLTL

SEQ ID NO: 12953 - protein, 9 aa, Artificial Sequence
  Description of Artificial Sequence: Synthetic peptide
  Seed: RLIQNSLTI
RLIQNSLTM

SEQ ID NO: 12954 - protein, 9 aa, Artificial Sequence
  Description of Artificial Sequence: Synthetic peptide
  Seed: RLIQNSLTI
RLIQNSLTF

SEQ ID NO: 12955 - protein, 9 aa, Artificial Sequence
  Description of Artificial Sequence: Synthetic peptide
  Seed: RLIQNSLTI
RLIQNSLTT

SEQ ID NO: 12956 - protein, 9 aa, Artificial Sequence
  Description of Artificial Sequence: Synthetic peptide
  Seed: RLIQNSLTI
RLIQNSLTW

SEQ ID NO: 12957 - protein, 9 aa, Artificial Sequence
  Description of Artificial Sequence: Synthetic peptide
  Seed: RLIQNSLTI
RTIQNSLTF

SEQ ID NO: 12958 - protein, 9 aa, Artificial Sequence
  Description of Artificial Sequence: Synthetic peptide
  Seed: RLIQNSLTI
RKIQNSLTA

SEQ ID NO: 12959 - protein, 9 aa, Artificial Sequence
  Description of Artificial Sequence: Synthetic peptide
  Seed: RLIQNSLTI
RKIQNSLTN

SEQ ID NO: 12960 - protein, 9 aa, Artificial Sequence
  Description of Artificial Sequence: Synthetic peptide
  Seed: RLIQNSLTI
RKIQNSLTC

SEQ ID NO: 12961 - protein, 9 aa, Artificial Sequence
  Description of Artificial Sequence: Synthetic peptide
  Seed: RLIQNSLTI
RKIQNSLTG

SEQ ID NO: 12962 - protein, 9 aa, Artificial Sequence
  Description of Artificial Sequence: Synthetic peptide
  Seed: RLIQNSLTI
RKIQNSLTH

SEQ ID NO: 12963 - protein, 9 aa, Artificial Sequence
  Description of Artificial Sequence: Synthetic peptide
  Seed: RLIQNSLTI
RKIQNSLTI

SEQ ID NO: 12964 - protein, 9 aa, Artificial Sequence
  Description of Artificial Sequence: Synthetic peptide
  Seed: RLIQNSLTI
RKIQNSLTL

SEQ ID NO: 12965 - protein, 9 aa, Artificial Sequence
  Description of Artificial Sequence: Synthetic peptide
  Seed: RLIQNSLTI
RKIQNSLTM

SEQ ID NO: 12966 - protein, 9 aa, Artificial Sequence
  Description of Artificial Sequence: Synthetic peptide
  Seed: RLIQNSLTI
RKIQNSLTF

SEQ ID NO: 12967 - protein, 9 aa, Artificial Sequence
  Description of Artificial Sequence: Synthetic peptide
  Seed: RLIQNSLTI
RIIQNSLTV

SEQ ID NO: 12968 - protein, 9 aa, Artificial Sequence
  Description of Artificial Sequence: Synthetic peptide
  Seed: RLIQNSLTI
RIIQNSLTY

SEQ ID NO: 12969 - protein, 9 aa, Artificial Sequence
  Description of Artificial Sequence: Synthetic peptide
  Seed: RLIQNSLTI
RIIQNSLTW

SEQ ID NO: 12970 - protein, 9 aa, Artificial Sequence
  Description of Artificial Sequence: Synthetic peptide
  Seed: RLIQNSLTI
RIIQNSLTF

SEQ ID NO: 12971 - protein, 9 aa, Artificial Sequence
  Description of Artificial Sequence: Synthetic peptide
  Seed: RLIQNSLTI
RGIQNSLTL

SEQ ID NO: 12972 - protein, 9 aa, Artificial Sequence
  Description of Artificial Sequence: Synthetic peptide
  Seed: RLIQNSLTI
RGIQNSLTM

SEQ ID NO: 12973 - protein, 9 aa, Artificial Sequence
  Description of Artificial Sequence: Synthetic peptide
  Seed: RLIQNSLTI
RGIQNSLTF

SEQ ID NO: 12974 - protein, 9 aa, Artificial Sequence
  Description of Artificial Sequence: Synthetic peptide
  Seed: RLIQNSLTI
RGIQNSLTW

SEQ ID NO: 12975 - protein, 9 aa, Artificial Sequence
  Description of Artificial Sequence: Synthetic peptide
  Seed: RLIQNSLTI
RGIQNSLTY

SEQ ID NO: 12976 - protein, 9 aa, Artificial Sequence
  Description of Artificial Sequence: Synthetic peptide
  Seed: RLIQNSLTI
RHIQNSLTA

SEQ ID NO: 12977 - protein, 9 aa, Artificial Sequence
  Description of Artificial Sequence: Synthetic peptide
  Seed: RLIQNSLTI
RHIQNSLTH

SEQ ID NO: 12978 - protein, 9 aa, Artificial Sequence
  Description of Artificial Sequence: Synthetic peptide
  Seed: RLIQNSLTI
RHIQNSLTI

SEQ ID NO: 12979 - protein, 9 aa, Artificial Sequence
  Description of Artificial Sequence: Synthetic peptide
  Seed: RLIQNSLTI
RHIQNSLTL

SEQ ID NO: 12980 - protein, 9 aa, Artificial Sequence
  Description of Artificial Sequence: Synthetic peptide
  Seed: RLIQNSLTI
RHIQNSLTM

SEQ ID NO: 12981 - protein, 9 aa, Artificial Sequence
  Description of Artificial Sequence: Synthetic peptide
  Seed: RLIQNSLTI
RHIQNSLTF

SEQ ID NO: 12982 - protein, 9 aa, Artificial Sequence
  Description of Artificial Sequence: Synthetic peptide
  Seed: RLIQNSLTI
RHIQNSLTW

SEQ ID NO: 12983 - protein, 9 aa, Artificial Sequence
  Description of Artificial Sequence: Synthetic peptide
  Seed: RLIQNSLTI
RHIQNSLTY

SEQ ID NO: 12984 - protein, 9 aa, Artificial Sequence
  Description of Artificial Sequence: Synthetic peptide
  Seed: RLIQNSLTI
RHIQNSLTV

SEQ ID NO: 12985 - protein, 9 aa, Artificial Sequence
  Description of Artificial Sequence: Synthetic peptide
  Seed: RLIQNSLTI
RIIQNSLTA

SEQ ID NO: 12986 - protein, 9 aa, Artificial Sequence
  Description of Artificial Sequence: Synthetic peptide
  Seed: RLIQNSLTI
RIIQNSLTH

SEQ ID NO: 12987 - protein, 9 aa, Artificial Sequence
  Description of Artificial Sequence: Synthetic peptide
  Seed: RLIQNSLTI
RIIQNSLTI

SEQ ID NO: 12988 - protein, 9 aa, Artificial Sequence
  Description of Artificial Sequence: Synthetic peptide
  Seed: RLIQNSLTI
RIIQNSLTL

SEQ ID NO: 12989 - protein, 9 aa, Artificial Sequence
  Description of Artificial Sequence: Synthetic peptide
  Seed: RLIQNSLTI
RIIQNSLTM

SEQ ID NO: 12990 - protein, 9 aa, Artificial Sequence
  Description of Artificial Sequence: Synthetic peptide
  Seed: RLIQNSLTI
RKIQNSLTS

SEQ ID NO: 12991 - protein, 9 aa, Artificial Sequence
  Description of Artificial Sequence: Synthetic peptide
  Seed: RLIQNSLTI
RKIQNSLTT

SEQ ID NO: 12992 - protein, 9 aa, Artificial Sequence
  Description of Artificial Sequence: Synthetic peptide
  Seed: RLIQNSLTI
RKIQNSLTW

SEQ ID NO: 12993 - protein, 9 aa, Artificial Sequence
  Description of Artificial Sequence: Synthetic peptide
  Seed: RLIQNSLTI
RFIQNSLTM

SEQ ID NO: 12994 - protein, 9 aa, Artificial Sequence
  Description of Artificial Sequence: Synthetic peptide
  Seed: RLIQNSLTI
RFIQNSLTW

SEQ ID NO: 12995 - protein, 9 aa, Artificial Sequence
  Description of Artificial Sequence: Synthetic peptide
  Seed: RLIQNSLTI
RFIQNSLTY

SEQ ID NO: 12996 - protein, 9 aa, Artificial Sequence
  Description of Artificial Sequence: Synthetic peptide
  Seed: RLIQNSLTI
RPIQNSLTM

SEQ ID NO: 12997 - protein, 9 aa, Artificial Sequence
  Description of Artificial Sequence: Synthetic peptide
  Seed: RLIQNSLTI
RPIQNSLTF

SEQ ID NO: 12998 - protein, 9 aa, Artificial Sequence
  Description of Artificial Sequence: Synthetic peptide
  Seed: RLIQNSLTI
RPIQNSLTY

SEQ ID NO: 12999 - protein, 9 aa, Artificial Sequence
  Description of Artificial Sequence: Synthetic peptide
  Seed: RLIQNSLTI
RSIQNSLTA

SEQ ID NO: 13000 - protein, 9 aa, Artificial Sequence
  Description of Artificial Sequence: Synthetic peptide
  Seed: RLIQNSLTI
RSIQNSLTH

SEQ ID NO: 13001 - protein, 9 aa, Artificial Sequence
  Description of Artificial Sequence: Synthetic peptide
  Seed: RLIQNSLTI
RSIQNSLTI

SEQ ID NO: 13002 - protein, 9 aa, Artificial Sequence
  Description of Artificial Sequence: Synthetic peptide
  Seed: RLIQNSLTI
RSIQNSLTL

SEQ ID NO: 13003 - protein, 9 aa, Artificial Sequence
  Description of Artificial Sequence: Synthetic peptide
  Seed: RLIQNSLTI
RSIQNSLTM

SEQ ID NO: 13004 - protein, 9 aa, Artificial Sequence
  Description of Artificial Sequence: Synthetic peptide
  Seed: RLIQNSLTI
RSIQNSLTF

SEQ ID NO: 13005 - protein, 9 aa, Artificial Sequence
  Description of Artificial Sequence: Synthetic peptide
  Seed: RLIQNSLTI
RSIQNSLTW

SEQ ID NO: 13006 - protein, 9 aa, Artificial Sequence
  Description of Artificial Sequence: Synthetic peptide
  Seed: RLIQNSLTI
RSIQNSLTY

SEQ ID NO: 13007 - protein, 9 aa, Artificial Sequence
  Description of Artificial Sequence: Synthetic peptide
  Seed: RLIQNSLTI
RSIQNSLTV

SEQ ID NO: 13008 - protein, 9 aa, Artificial Sequence
  Description of Artificial Sequence: Synthetic peptide
  Seed: RLIQNSLTI
RTIQNSLTA

SEQ ID NO: 13009 - protein, 9 aa, Artificial Sequence
  Description of Artificial Sequence: Synthetic peptide
  Seed: RLIQNSLTI
RTIQNSLTH

SEQ ID NO: 13010 - protein, 9 aa, Artificial Sequence
  Description of Artificial Sequence: Synthetic peptide
  Seed: RLIQNSLTI
RTIQNSLTI

SEQ ID NO: 13011 - protein, 9 aa, Artificial Sequence
  Description of Artificial Sequence: Synthetic peptide
  Seed: RLIQNSLTI
RTIQNSLTL

SEQ ID NO: 13012 - protein, 9 aa, Artificial Sequence
  Description of Artificial Sequence: Synthetic peptide
  Seed: RLIQNSLTI
RTIQNSLTM

SEQ ID NO: 13013 - protein, 9 aa, Artificial Sequence
  Description of Artificial Sequence: Synthetic peptide
  Seed: RLIQNSLTI
RFIQNSLTF

SEQ ID NO: 13014 - protein, 9 aa, Artificial Sequence
  Description of Artificial Sequence: Synthetic peptide
  Seed: RLIQNSLTI
RFIQNSLTL

SEQ ID NO: 13015 - protein, 9 aa, Artificial Sequence
  Description of Artificial Sequence: Synthetic peptide
  Seed: RLIQNSLTI
RKIQNSLTY

SEQ ID NO: 13016 - protein, 9 aa, Artificial Sequence
  Description of Artificial Sequence: Synthetic peptide
  Seed: RLIQNSLTI
RFIQNSLTI

SEQ ID NO: 13017 - protein, 9 aa, Artificial Sequence
  Description of Artificial Sequence: Synthetic peptide
  Seed: RLIQNSLTI
RKIQNSLTV

SEQ ID NO: 13018 - protein, 9 aa, Artificial Sequence
  Description of Artificial Sequence: Synthetic peptide
  Seed: RLIQNSLTI
RMIQNSLTA

SEQ ID NO: 13019 - protein, 9 aa, Artificial Sequence
  Description of Artificial Sequence: Synthetic peptide
  Seed: RLIQNSLTI
RMIQNSLTN

SEQ ID NO: 13020 - protein, 9 aa, Artificial Sequence
  Description of Artificial Sequence: Synthetic peptide
  Seed: RLIQNSLTI
RMIQNSLTC

SEQ ID NO: 13021 - protein, 9 aa, Artificial Sequence
  Description of Artificial Sequence: Synthetic peptide
  Seed: RLIQNSLTI
RMIQNSLTQ

SEQ ID NO: 13022 - protein, 9 aa, Artificial Sequence
  Description of Artificial Sequence: Synthetic peptide
  Seed: RLIQNSLTI
RMIQNSLTE

SEQ ID NO: 13023 - protein, 9 aa, Artificial Sequence
  Description of Artificial Sequence: Synthetic peptide
  Seed: RLIQNSLTI
RMIQNSLTG

SEQ ID NO: 13024 - protein, 9 aa, Artificial Sequence
  Description of Artificial Sequence: Synthetic peptide
  Seed: RLIQNSLTI
RMIQNSLTH

SEQ ID NO: 13025 - protein, 9 aa, Artificial Sequence
  Description of Artificial Sequence: Synthetic peptide
  Seed: RLIQNSLTI
RMIQNSLTI

SEQ ID NO: 13026 - protein, 9 aa, Artificial Sequence
  Description of Artificial Sequence: Synthetic peptide
  Seed: RLIQNSLTI
RMIQNSLTL

SEQ ID NO: 13027 - protein, 9 aa, Artificial Sequence
  Description of Artificial Sequence: Synthetic peptide
  Seed: RLIQNSLTI
RMIQNSLTM

SEQ ID NO: 13028 - protein, 9 aa, Artificial Sequence
  Description of Artificial Sequence: Synthetic peptide
  Seed: RLIQNSLTI
RMIQNSLTF

SEQ ID NO: 13029 - protein, 9 aa, Artificial Sequence
  Description of Artificial Sequence: Synthetic peptide
  Seed: RLIQNSLTI
RMIQNSLTP

SEQ ID NO: 13030 - protein, 9 aa, Artificial Sequence
  Description of Artificial Sequence: Synthetic peptide
  Seed: RLIQNSLTI
RMIQNSLTS

SEQ ID NO: 13031 - protein, 9 aa, Artificial Sequence
  Description of Artificial Sequence: Synthetic peptide
  Seed: RLIQNSLTI
RMIQNSLTT

SEQ ID NO: 13032 - protein, 9 aa, Artificial Sequence
  Description of Artificial Sequence: Synthetic peptide
  Seed: RLIQNSLTI
RMIQNSLTW

SEQ ID NO: 13033 - protein, 9 aa, Artificial Sequence
  Description of Artificial Sequence: Synthetic peptide
  Seed: RLIQNSLTI
RMIQNSLTY

SEQ ID NO: 13034 - protein, 9 aa, Artificial Sequence
  Description of Artificial Sequence: Synthetic peptide
  Seed: RLIQNSLTI
RMIQNSLTV

SEQ ID NO: 13035 - protein, 9 aa, Artificial Sequence
  Description of Artificial Sequence: Synthetic peptide
  Seed: RLIQNSLTI
RFIQNSLTH

SEQ ID NO: 13036 - protein, 9 aa, Artificial Sequence
  Description of Artificial Sequence: Synthetic peptide
  Seed: RLLSFIRGT
RMLSFIRGF

SEQ ID NO: 13037 - protein, 9 aa, Artificial Sequence
  Description of Artificial Sequence: Synthetic peptide
  Seed: RLLSFIRGT
RMLSFIRGS

SEQ ID NO: 13038 - protein, 9 aa, Artificial Sequence
  Description of Artificial Sequence: Synthetic peptide
  Seed: RLIQNSITI
RIIQNSITV

SEQ ID NO: 13039 - protein, 9 aa, Artificial Sequence
  Description of Artificial Sequence: Synthetic peptide
  Seed: RMIGGIGRF
RWIGGIGRI

SEQ ID NO: 13040 - protein, 9 aa, Artificial Sequence
  Description of Artificial Sequence: Synthetic peptide
  Seed: RMIGGIGRF
RTIGGIGRA

SEQ ID NO: 13041 - protein, 9 aa, Artificial Sequence
  Description of Artificial Sequence: Synthetic peptide
  Seed: RMIGGIGRF
RTIGGIGRH

SEQ ID NO: 13042 - protein, 9 aa, Artificial Sequence
  Description of Artificial Sequence: Synthetic peptide
  Seed: RMIGGIGRF
RTIGGIGRI

SEQ ID NO: 13043 - protein, 9 aa, Artificial Sequence
  Description of Artificial Sequence: Synthetic peptide
  Seed: RMIGGIGRF
RTIGGIGRL

SEQ ID NO: 13044 - protein, 9 aa, Artificial Sequence
  Description of Artificial Sequence: Synthetic peptide
  Seed: RMIGGIGRF
RTIGGIGRM

SEQ ID NO: 13045 - protein, 9 aa, Artificial Sequence
  Description of Artificial Sequence: Synthetic peptide
  Seed: RMIGGIGRF
RTIGGIGRF

SEQ ID NO: 13046 - protein, 9 aa, Artificial Sequence
  Description of Artificial Sequence: Synthetic peptide
  Seed: RMIGGIGRF
RTIGGIGRW

SEQ ID NO: 13047 - protein, 9 aa, Artificial Sequence
  Description of Artificial Sequence: Synthetic peptide
  Seed: RMIGGIGRF
RTIGGIGRY

SEQ ID NO: 13048 - protein, 9 aa, Artificial Sequence
  Description of Artificial Sequence: Synthetic peptide
  Seed: RMIGGIGRF
RTIGGIGRV

SEQ ID NO: 13049 - protein, 9 aa, Artificial Sequence
  Description of Artificial Sequence: Synthetic peptide
  Seed: RMIGGIGRF
RWIGGIGRL

SEQ ID NO: 13050 - protein, 9 aa, Artificial Sequence
  Description of Artificial Sequence: Synthetic peptide
  Seed: RMIGGIGRF
RYIGGIGRF

SEQ ID NO: 13051 - protein, 9 aa, Artificial Sequence
  Description of Artificial Sequence: Synthetic peptide
  Seed: RMIGGIGRF
RWIGGIGRM

SEQ ID NO: 13052 - protein, 9 aa, Artificial Sequence
  Description of Artificial Sequence: Synthetic peptide
  Seed: RMIGGIGRF
RWIGGIGRF

SEQ ID NO: 13053 - protein, 9 aa, Artificial Sequence
  Description of Artificial Sequence: Synthetic peptide
  Seed: RMIGGIGRF
RWIGGIGRW

SEQ ID NO: 13054 - protein, 9 aa, Artificial Sequence
  Description of Artificial Sequence: Synthetic peptide
  Seed: RMIGGIGRF
RWIGGIGRY

SEQ ID NO: 13055 - protein, 9 aa, Artificial Sequence
  Description of Artificial Sequence: Synthetic peptide
  Seed: RMIGGIGRF
RWIGGIGRV

SEQ ID NO: 13056 - protein, 9 aa, Artificial Sequence
  Description of Artificial Sequence: Synthetic peptide
  Seed: RMIGGIGRF
RYIGGIGRC

SEQ ID NO: 13057 - protein, 9 aa, Artificial Sequence
  Description of Artificial Sequence: Synthetic peptide
  Seed: RMIGGIGRF
RYIGGIGRH

SEQ ID NO: 13058 - protein, 9 aa, Artificial Sequence
  Description of Artificial Sequence: Synthetic peptide
  Seed: RMIGGIGRF
RYIGGIGRI

SEQ ID NO: 13059 - protein, 9 aa, Artificial Sequence
  Description of Artificial Sequence: Synthetic peptide
  Seed: RMIGGIGRF
RYIGGIGRL

SEQ ID NO: 13060 - protein, 9 aa, Artificial Sequence
  Description of Artificial Sequence: Synthetic peptide
  Seed: RMIGGIGRF
RSIGGIGRV

SEQ ID NO: 13061 - protein, 9 aa, Artificial Sequence
  Description of Artificial Sequence: Synthetic peptide
  Seed: RMIGGIGRF
RSIGGIGRY

SEQ ID NO: 13062 - protein, 9 aa, Artificial Sequence
  Description of Artificial Sequence: Synthetic peptide
  Seed: RMIGGIGRF
RSIGGIGRW

SEQ ID NO: 13063 - protein, 9 aa, Artificial Sequence
  Description of Artificial Sequence: Synthetic peptide
  Seed: RMIGGIGRF
RSIGGIGRF

SEQ ID NO: 13064 - protein, 9 aa, Artificial Sequence
  Description of Artificial Sequence: Synthetic peptide
  Seed: RMIGGIGRF
RMIGGIGRM

SEQ ID NO: 13065 - protein, 9 aa, Artificial Sequence
  Description of Artificial Sequence: Synthetic peptide
  Seed: RMIGGIGRF
RMIGGIGRP

SEQ ID NO: 13066 - protein, 9 aa, Artificial Sequence
  Description of Artificial Sequence: Synthetic peptide
  Seed: RMIGGIGRF
RMIGGIGRS

SEQ ID NO: 13067 - protein, 9 aa, Artificial Sequence
  Description of Artificial Sequence: Synthetic peptide
  Seed: RMIGGIGRF
RMIGGIGRT

SEQ ID NO: 13068 - protein, 9 aa, Artificial Sequence
  Description of Artificial Sequence: Synthetic peptide
  Seed: RMIGGIGRF
RMIGGIGRW

SEQ ID NO: 13069 - protein, 9 aa, Artificial Sequence
  Description of Artificial Sequence: Synthetic peptide
  Seed: RMIGGIGRF
RMIGGIGRY

SEQ ID NO: 13070 - protein, 9 aa, Artificial Sequence
  Description of Artificial Sequence: Synthetic peptide
  Seed: RMIGGIGRF
RMIGGIGRV

SEQ ID NO: 13071 - protein, 9 aa, Artificial Sequence
  Description of Artificial Sequence: Synthetic peptide
  Seed: RMIGGIGRF
RFIGGIGRI

SEQ ID NO: 13072 - protein, 9 aa, Artificial Sequence
  Description of Artificial Sequence: Synthetic peptide
  Seed: RMIGGIGRF
RFIGGIGRL

SEQ ID NO: 13073 - protein, 9 aa, Artificial Sequence
  Description of Artificial Sequence: Synthetic peptide
  Seed: RMIGGIGRF
RFIGGIGRM

SEQ ID NO: 13074 - protein, 9 aa, Artificial Sequence
  Description of Artificial Sequence: Synthetic peptide
  Seed: RMIGGIGRF
RFIGGIGRF

SEQ ID NO: 13075 - protein, 9 aa, Artificial Sequence
  Description of Artificial Sequence: Synthetic peptide
  Seed: RMIGGIGRF
RFIGGIGRW

SEQ ID NO: 13076 - protein, 9 aa, Artificial Sequence
  Description of Artificial Sequence: Synthetic peptide
  Seed: RMIGGIGRF
RFIGGIGRY

SEQ ID NO: 13077 - protein, 9 aa, Artificial Sequence
  Description of Artificial Sequence: Synthetic peptide
  Seed: RMIGGIGRF
RFIGGIGRV

SEQ ID NO: 13078 - protein, 9 aa, Artificial Sequence
  Description of Artificial Sequence: Synthetic peptide
  Seed: RMIGGIGRF
RPIGGIGRY

SEQ ID NO: 13079 - protein, 9 aa, Artificial Sequence
  Description of Artificial Sequence: Synthetic peptide
  Seed: RMIGGIGRF
RSIGGIGRH

SEQ ID NO: 13080 - protein, 9 aa, Artificial Sequence
  Description of Artificial Sequence: Synthetic peptide
  Seed: RMIGGIGRF
RSIGGIGRI

SEQ ID NO: 13081 - protein, 9 aa, Artificial Sequence
  Description of Artificial Sequence: Synthetic peptide
  Seed: RMIGGIGRF
RSIGGIGRL

SEQ ID NO: 13082 - protein, 9 aa, Artificial Sequence
  Description of Artificial Sequence: Synthetic peptide
  Seed: RMIGGIGRF
RSIGGIGRM

SEQ ID NO: 13083 - protein, 9 aa, Artificial Sequence
  Description of Artificial Sequence: Synthetic peptide
  Seed: RMIGGIGRF
RYIGGIGRM

SEQ ID NO: 13084 - protein, 9 aa, Artificial Sequence
  Description of Artificial Sequence: Synthetic peptide
  Seed: RMIGGIGRF
RYIGGIGRW

SEQ ID NO: 13085 - protein, 9 aa, Artificial Sequence
  Description of Artificial Sequence: Synthetic peptide
  Seed: RMIGGIGRF
RMIGGIGRI

SEQ ID NO: 13086 - protein, 10 aa, Artificial Sequence
  Description of Artificial Sequence: Synthetic peptide
  Seed: RMIGGIGRFY
RQIGGIGRFC

SEQ ID NO: 13087 - protein, 10 aa, Artificial Sequence
  Description of Artificial Sequence: Synthetic peptide
  Seed: RMIGGIGRFY
RNIGGIGRFY

SEQ ID NO: 13088 - protein, 10 aa, Artificial Sequence
  Description of Artificial Sequence: Synthetic peptide
  Seed: RMIGGIGRFY
RDIGGIGRFK

SEQ ID NO: 13089 - protein, 10 aa, Artificial Sequence
  Description of Artificial Sequence: Synthetic peptide
  Seed: RMIGGIGRFY
RDIGGIGRFY

SEQ ID NO: 13090 - protein, 10 aa, Artificial Sequence
  Description of Artificial Sequence: Synthetic peptide
  Seed: RMIGGIGRFY
RCIGGIGRFK

SEQ ID NO: 13091 - protein, 10 aa, Artificial Sequence
  Description of Artificial Sequence: Synthetic peptide
  Seed: RMIGGIGRFY
RCIGGIGRFY

SEQ ID NO: 13092 - protein, 10 aa, Artificial Sequence
  Description of Artificial Sequence: Synthetic peptide
  Seed: RMIGGIGRFY
RQIGGIGRFA

SEQ ID NO: 13093 - protein, 10 aa, Artificial Sequence
  Description of Artificial Sequence: Synthetic peptide
  Seed: RMIGGIGRFY
RQIGGIGRFR

SEQ ID NO: 13094 - protein, 10 aa, Artificial Sequence
  Description of Artificial Sequence: Synthetic peptide
  Seed: RMIGGIGRFY
RQIGGIGRFN

SEQ ID NO: 13095 - protein, 10 aa, Artificial Sequence
  Description of Artificial Sequence: Synthetic peptide
  Seed: RMIGGIGRFY
RQIGGIGRFD

SEQ ID NO: 13096 - protein, 10 aa, Artificial Sequence
  Description of Artificial Sequence: Synthetic peptide
  Seed: RMIGGIGRFY
RQIGGIGRFQ

SEQ ID NO: 13097 - protein, 9 aa, Artificial Sequence
  Description of Artificial Sequence: Synthetic peptide
  Seed: RMIGGIGRF
RYIGGIGRY

SEQ ID NO: 13098 - protein, 10 aa, Artificial Sequence
  Description of Artificial Sequence: Synthetic peptide
  Seed: RMIGGIGRFY
RQIGGIGRFE

SEQ ID NO: 13099 - protein, 10 aa, Artificial Sequence
  Description of Artificial Sequence: Synthetic peptide
  Seed: RMIGGIGRFY
RQIGGIGRFG

SEQ ID NO: 13100 - protein, 10 aa, Artificial Sequence
  Description of Artificial Sequence: Synthetic peptide
  Seed: RMIGGIGRFY
RQIGGIGRFH

SEQ ID NO: 13101 - protein, 10 aa, Artificial Sequence
  Description of Artificial Sequence: Synthetic peptide
  Seed: RMIGGIGRFY
RQIGGIGRFI

SEQ ID NO: 13102 - protein, 10 aa, Artificial Sequence
  Description of Artificial Sequence: Synthetic peptide
  Seed: RMIGGIGRFY
RQIGGIGRFL

SEQ ID NO: 13103 - protein, 10 aa, Artificial Sequence
  Description of Artificial Sequence: Synthetic peptide
  Seed: RMIGGIGRFY
RQIGGIGRFK

SEQ ID NO: 13104 - protein, 10 aa, Artificial Sequence
  Description of Artificial Sequence: Synthetic peptide
  Seed: RMIGGIGRFY
RQIGGIGRFM

SEQ ID NO: 13105 - protein, 10 aa, Artificial Sequence
  Description of Artificial Sequence: Synthetic peptide
  Seed: RMIGGIGRFY
RQIGGIGRFF

SEQ ID NO: 13106 - protein, 10 aa, Artificial Sequence
  Description of Artificial Sequence: Synthetic peptide
  Seed: RMIGGIGRFY
RQIGGIGRFP

SEQ ID NO: 13107 - protein, 10 aa, Artificial Sequence
  Description of Artificial Sequence: Synthetic peptide
  Seed: RMIGGIGRFY
RNIGGIGRFF

SEQ ID NO: 13108 - protein, 10 aa, Artificial Sequence
  Description of Artificial Sequence: Synthetic peptide
  Seed: RMIGGIGRFY
RNIGGIGRFK

SEQ ID NO: 13109 - protein, 10 aa, Artificial Sequence
  Description of Artificial Sequence: Synthetic peptide
  Seed: RMIGGIGRFY
RRIGGIGRFY

SEQ ID NO: 13110 - protein, 10 aa, Artificial Sequence
  Description of Artificial Sequence: Synthetic peptide
  Seed: RMIGGIGRFY
RRIGGIGRFF

SEQ ID NO: 13111 - protein, 9 aa, Artificial Sequence
  Description of Artificial Sequence: Synthetic peptide
  Seed: RMIGGIGRF
RYIGGIGRV

SEQ ID NO: 13112 - protein, 9 aa, Artificial Sequence
  Description of Artificial Sequence: Synthetic peptide
  Seed: RMIGGIGRF
RVIGGIGRA

SEQ ID NO: 13113 - protein, 9 aa, Artificial Sequence
  Description of Artificial Sequence: Synthetic peptide
  Seed: RMIGGIGRF
RVIGGIGRH

SEQ ID NO: 13114 - protein, 9 aa, Artificial Sequence
  Description of Artificial Sequence: Synthetic peptide
  Seed: RTSDMRAEI
RVSDMRAEL

SEQ ID NO: 13115 - protein, 9 aa, Artificial Sequence
  Description of Artificial Sequence: Synthetic peptide
  Seed: RMIGGIGRF
RVIGGIGRI

SEQ ID NO: 13116 - protein, 9 aa, Artificial Sequence
  Description of Artificial Sequence: Synthetic peptide
  Seed: RMIGGIGRF
RVIGGIGRL

SEQ ID NO: 13117 - protein, 9 aa, Artificial Sequence
  Description of Artificial Sequence: Synthetic peptide
  Seed: RMIGGIGRF
RVIGGIGRM

SEQ ID NO: 13118 - protein, 9 aa, Artificial Sequence
  Description of Artificial Sequence: Synthetic peptide
  Seed: RMIGGIGRF
RVIGGIGRF

SEQ ID NO: 13119 - protein, 9 aa, Artificial Sequence
  Description of Artificial Sequence: Synthetic peptide
  Seed: RMIGGIGRF
RVIGGIGRW

SEQ ID NO: 13120 - protein, 9 aa, Artificial Sequence
  Description of Artificial Sequence: Synthetic peptide
  Seed: RMIGGIGRF
RVIGGIGRY

SEQ ID NO: 13121 - protein, 9 aa, Artificial Sequence
  Description of Artificial Sequence: Synthetic peptide
  Seed: RMIGGIGRF
RVIGGIGRV

SEQ ID NO: 13122 - protein, 10 aa, Artificial Sequence
  Description of Artificial Sequence: Synthetic peptide
  Seed: RMIGGIGRFY
RAIGGIGRFI

SEQ ID NO: 13123 - protein, 10 aa, Artificial Sequence
  Description of Artificial Sequence: Synthetic peptide
  Seed: RMIGGIGRFY
RAIGGIGRFL

SEQ ID NO: 13124 - protein, 10 aa, Artificial Sequence
  Description of Artificial Sequence: Synthetic peptide
  Seed: RMIGGIGRFY
RAIGGIGRFK

SEQ ID NO: 13125 - protein, 10 aa, Artificial Sequence
  Description of Artificial Sequence: Synthetic peptide
  Seed: RMIGGIGRFY
RAIGGIGRFM

SEQ ID NO: 13126 - protein, 10 aa, Artificial Sequence
  Description of Artificial Sequence: Synthetic peptide
  Seed: RMIGGIGRFY
RAIGGIGRFF

SEQ ID NO: 13127 - protein, 10 aa, Artificial Sequence
  Description of Artificial Sequence: Synthetic peptide
  Seed: RMIGGIGRFY
RAIGGIGRFW

SEQ ID NO: 13128 - protein, 10 aa, Artificial Sequence
  Description of Artificial Sequence: Synthetic peptide
  Seed: RMIGGIGRFY
RAIGGIGRFY

SEQ ID NO: 13129 - protein, 10 aa, Artificial Sequence
  Description of Artificial Sequence: Synthetic peptide
  Seed: RMIGGIGRFY
RRIGGIGRFK

SEQ ID NO: 13130 - protein, 9 aa, Artificial Sequence
  Description of Artificial Sequence: Synthetic peptide
  Seed: RMIGGIGRF
RMIGGIGRL

SEQ ID NO: 13131 - protein, 9 aa, Artificial Sequence
  Description of Artificial Sequence: Synthetic peptide
  Seed: RMIGGIGRF
RMIGGIGRH

SEQ ID NO: 13132 - protein, 10 aa, Artificial Sequence
  Description of Artificial Sequence: Synthetic peptide
  Seed: RMIGGIGRFY
RQIGGIGRFT

SEQ ID NO: 13133 - protein, 9 aa, Artificial Sequence
  Description of Artificial Sequence: Synthetic peptide
  Seed: RMIGGIGRF
RNIGGIGRW

SEQ ID NO: 13134 - protein, 9 aa, Artificial Sequence
  Description of Artificial Sequence: Synthetic peptide
  Seed: RMIGGIGRF
RAIGGIGRF

SEQ ID NO: 13135 - protein, 9 aa, Artificial Sequence
  Description of Artificial Sequence: Synthetic peptide
  Seed: RMIGGIGRF
RAIGGIGRW

SEQ ID NO: 13136 - protein, 9 aa, Artificial Sequence
  Description of Artificial Sequence: Synthetic peptide
  Seed: RMIGGIGRF
RAIGGIGRY

SEQ ID NO: 13137 - protein, 9 aa, Artificial Sequence
  Description of Artificial Sequence: Synthetic peptide
  Seed: RMIGGIGRF
RAIGGIGRV

SEQ ID NO: 13138 - protein, 9 aa, Artificial Sequence
  Description of Artificial Sequence: Synthetic peptide
  Seed: RMIGGIGRF
RRIGGIGRM

SEQ ID NO: 13139 - protein, 9 aa, Artificial Sequence
  Description of Artificial Sequence: Synthetic peptide
  Seed: RMIGGIGRF
RRIGGIGRF

SEQ ID NO: 13140 - protein, 9 aa, Artificial Sequence
  Description of Artificial Sequence: Synthetic peptide
  Seed: RMIGGIGRF
RRIGGIGRY

SEQ ID NO: 13141 - protein, 9 aa, Artificial Sequence
  Description of Artificial Sequence: Synthetic peptide
  Seed: RMIGGIGRF
RNIGGIGRM

SEQ ID NO: 13142 - protein, 9 aa, Artificial Sequence
  Description of Artificial Sequence: Synthetic peptide
  Seed: RMIGGIGRF
RNIGGIGRF

SEQ ID NO: 13143 - protein, 9 aa, Artificial Sequence
  Description of Artificial Sequence: Synthetic peptide
  Seed: RMIGGIGRF
RNIGGIGRY

SEQ ID NO: 13144 - protein, 9 aa, Artificial Sequence
  Description of Artificial Sequence: Synthetic peptide
  Seed: RMIGGIGRF
RQIGGIGRF

SEQ ID NO: 13145 - protein, 9 aa, Artificial Sequence
  Description of Artificial Sequence: Synthetic peptide
  Seed: RMIGGIGRF
RDIGGIGRY

SEQ ID NO: 13146 - protein, 9 aa, Artificial Sequence
  Description of Artificial Sequence: Synthetic peptide
  Seed: RMIGGIGRF
RCIGGIGRF

SEQ ID NO: 13147 - protein, 9 aa, Artificial Sequence
  Description of Artificial Sequence: Synthetic peptide
  Seed: RMIGGIGRF
RCIGGIGRW

SEQ ID NO: 13148 - protein, 9 aa, Artificial Sequence
  Description of Artificial Sequence: Synthetic peptide
  Seed: RMIGGIGRF
RCIGGIGRY

SEQ ID NO: 13149 - protein, 9 aa, Artificial Sequence
  Description of Artificial Sequence: Synthetic peptide
  Seed: RMIGGIGRF
RQIGGIGRA

SEQ ID NO: 13150 - protein, 9 aa, Artificial Sequence
  Description of Artificial Sequence: Synthetic peptide
  Seed: RMIGGIGRF
RQIGGIGRC

SEQ ID NO: 13151 - protein, 9 aa, Artificial Sequence
  Description of Artificial Sequence: Synthetic peptide
  Seed: RMIGGIGRF
RQIGGIGRH

SEQ ID NO: 13152 - protein, 9 aa, Artificial Sequence
  Description of Artificial Sequence: Synthetic peptide
  Seed: RMIGGIGRF
RQIGGIGRI

SEQ ID NO: 13153 - protein, 9 aa, Artificial Sequence
  Description of Artificial Sequence: Synthetic peptide
  Seed: RMIGGIGRF
RQIGGIGRL

SEQ ID NO: 13154 - protein, 9 aa, Artificial Sequence
  Description of Artificial Sequence: Synthetic peptide
  Seed: RMIGGIGRF
RAIGGIGRM

SEQ ID NO: 13155 - protein, 9 aa, Artificial Sequence
  Description of Artificial Sequence: Synthetic peptide
  Seed: RMIGGIGRF
RAIGGIGRL

SEQ ID NO: 13156 - protein, 9 aa, Artificial Sequence
  Description of Artificial Sequence: Synthetic peptide
  Seed: RMIGGIGRF
RAIGGIGRI

SEQ ID NO: 13157 - protein, 9 aa, Artificial Sequence
  Description of Artificial Sequence: Synthetic peptide
  Seed: RMIGGIGRF
RAIGGIGRH

SEQ ID NO: 13158 - protein, 11 aa, Artificial Sequence
  Description of Artificial Sequence: Synthetic peptide
  Seed: RMCSLMQGSTL
RYCSLMQGSTM

SEQ ID NO: 13159 - protein, 11 aa, Artificial Sequence
  Description of Artificial Sequence: Synthetic peptide
  Seed: RMCSLMQGSTL
RYCSLMQGSTF

SEQ ID NO: 13160 - protein, 11 aa, Artificial Sequence
  Description of Artificial Sequence: Synthetic peptide
  Seed: RMCSLMQGSTL
RYCSLMQGSTW

SEQ ID NO: 13161 - protein, 11 aa, Artificial Sequence
  Description of Artificial Sequence: Synthetic peptide
  Seed: RMCSLMQGSTL
RYCSLMQGSTY

SEQ ID NO: 13162 - protein, 11 aa, Artificial Sequence
  Description of Artificial Sequence: Synthetic peptide
  Seed: RMCSLMQGSTL
RVCSLMQGSTI

SEQ ID NO: 13163 - protein, 11 aa, Artificial Sequence
  Description of Artificial Sequence: Synthetic peptide
  Seed: RMCSLMQGSTL
RVCSLMQGSTL

SEQ ID NO: 13164 - protein, 11 aa, Artificial Sequence
  Description of Artificial Sequence: Synthetic peptide
  Seed: RMCSLMQGSTL
RVCSLMQGSTM

SEQ ID NO: 13165 - protein, 11 aa, Artificial Sequence
  Description of Artificial Sequence: Synthetic peptide
  Seed: RMCSLMQGSTL
RVCSLMQGSTF

SEQ ID NO: 13166 - protein, 11 aa, Artificial Sequence
  Description of Artificial Sequence: Synthetic peptide
  Seed: RMCSLMQGSTL
RVCSLMQGSTW

SEQ ID NO: 13167 - protein, 11 aa, Artificial Sequence
  Description of Artificial Sequence: Synthetic peptide
  Seed: RMCSLMQGSTL
RVCSLMQGSTY

SEQ ID NO: 13168 - protein, 8 aa, Artificial Sequence
  Description of Artificial Sequence: Synthetic peptide
  Seed: RMIGGIGR
RQIGGIGR

SEQ ID NO: 13169 - protein, 8 aa, Artificial Sequence
  Description of Artificial Sequence: Synthetic peptide
  Seed: RMIGGIGR
RIIGGIGR

SEQ ID NO: 13170 - protein, 8 aa, Artificial Sequence
  Description of Artificial Sequence: Synthetic peptide
  Seed: RMIGGIGR
RLIGGIGR

SEQ ID NO: 13171 - protein, 8 aa, Artificial Sequence
  Description of Artificial Sequence: Synthetic peptide
  Seed: RMIGGIGR
RFIGGIGR

SEQ ID NO: 13172 - protein, 8 aa, Artificial Sequence
  Description of Artificial Sequence: Synthetic peptide
  Seed: RMIGGIGR
RSIGGIGR

SEQ ID NO: 13173 - protein, 8 aa, Artificial Sequence
  Description of Artificial Sequence: Synthetic peptide
  Seed: RMIGGIGR
RTIGGIGR

SEQ ID NO: 13174 - protein, 8 aa, Artificial Sequence
  Description of Artificial Sequence: Synthetic peptide
  Seed: RMIGGIGR
RWIGGIGR

SEQ ID NO: 13175 - protein, 8 aa, Artificial Sequence
  Description of Artificial Sequence: Synthetic peptide
  Seed: RMIGGIGR
RYIGGIGR

SEQ ID NO: 13176 - protein, 8 aa, Artificial Sequence
  Description of Artificial Sequence: Synthetic peptide
  Seed: RMIGGIGR
RVIGGIGR

SEQ ID NO: 13177 - protein, 9 aa, Artificial Sequence
  Description of Artificial Sequence: Synthetic peptide
  Seed: RMIGGIGRF
RQIGGIGRM

SEQ ID NO: 13178 - protein, 9 aa, Artificial Sequence
  Description of Artificial Sequence: Synthetic peptide
  Seed: RMIGGIGRF
RQIGGIGRT

SEQ ID NO: 13179 - protein, 9 aa, Artificial Sequence
  Description of Artificial Sequence: Synthetic peptide
  Seed: RMIGGIGRF
RMIGGIGRC

SEQ ID NO: 13180 - protein, 9 aa, Artificial Sequence
  Description of Artificial Sequence: Synthetic peptide
  Seed: RMIGGIGRF
RLIGGIGRW

SEQ ID NO: 13181 - protein, 9 aa, Artificial Sequence
  Description of Artificial Sequence: Synthetic peptide
  Seed: RMIGGIGRF
RLIGGIGRA

SEQ ID NO: 13182 - protein, 9 aa, Artificial Sequence
  Description of Artificial Sequence: Synthetic peptide
  Seed: RMIGGIGRF
RLIGGIGRC

SEQ ID NO: 13183 - protein, 9 aa, Artificial Sequence
  Description of Artificial Sequence: Synthetic peptide
  Seed: RMIGGIGRF
RLIGGIGRI

SEQ ID NO: 13184 - protein, 9 aa, Artificial Sequence
  Description of Artificial Sequence: Synthetic peptide
  Seed: RMIGGIGRF
RLIGGIGRL

SEQ ID NO: 13185 - protein, 9 aa, Artificial Sequence
  Description of Artificial Sequence: Synthetic peptide
  Seed: RMIGGIGRF
RLIGGIGRM

SEQ ID NO: 13186 - protein, 9 aa, Artificial Sequence
  Description of Artificial Sequence: Synthetic peptide
  Seed: RMIGGIGRF
RLIGGIGRF

SEQ ID NO: 13187 - protein, 9 aa, Artificial Sequence
  Description of Artificial Sequence: Synthetic peptide
  Seed: RMIGGIGRF
RLIGGIGRP

SEQ ID NO: 13188 - protein, 9 aa, Artificial Sequence
  Description of Artificial Sequence: Synthetic peptide
  Seed: RMIGGIGRF
RLIGGIGRS

SEQ ID NO: 13189 - protein, 9 aa, Artificial Sequence
  Description of Artificial Sequence: Synthetic peptide
  Seed: RMIGGIGRF
RLIGGIGRT

SEQ ID NO: 13190 - protein, 9 aa, Artificial Sequence
  Description of Artificial Sequence: Synthetic peptide
  Seed: RMIGGIGRF
RLIGGIGRY

SEQ ID NO: 13191 - protein, 9 aa, Artificial Sequence
  Description of Artificial Sequence: Synthetic peptide
  Seed: RMIGGIGRF
RQIGGIGRW

SEQ ID NO: 13192 - protein, 9 aa, Artificial Sequence
  Description of Artificial Sequence: Synthetic peptide
  Seed: RMIGGIGRF
RLIGGIGRV

SEQ ID NO: 13193 - protein, 9 aa, Artificial Sequence
  Description of Artificial Sequence: Synthetic peptide
  Seed: RMIGGIGRF
RKIGGIGRH

SEQ ID NO: 13194 - protein, 9 aa, Artificial Sequence
  Description of Artificial Sequence: Synthetic peptide
  Seed: RMIGGIGRF
RKIGGIGRI

SEQ ID NO: 13195 - protein, 9 aa, Artificial Sequence
  Description of Artificial Sequence: Synthetic peptide
  Seed: RMIGGIGRF
RKIGGIGRL

SEQ ID NO: 13196 - protein, 9 aa, Artificial Sequence
  Description of Artificial Sequence: Synthetic peptide
  Seed: RMIGGIGRF
RKIGGIGRM

SEQ ID NO: 13197 - protein, 9 aa, Artificial Sequence
  Description of Artificial Sequence: Synthetic peptide
  Seed: RMIGGIGRF
RKIGGIGRF

SEQ ID NO: 13198 - protein, 9 aa, Artificial Sequence
  Description of Artificial Sequence: Synthetic peptide
  Seed: RMIGGIGRF
RKIGGIGRW

SEQ ID NO: 13199 - protein, 9 aa, Artificial Sequence
  Description of Artificial Sequence: Synthetic peptide
  Seed: RMIGGIGRF
RKIGGIGRY

SEQ ID NO: 13200 - protein, 9 aa, Artificial Sequence
  Description of Artificial Sequence: Synthetic peptide
  Seed: RMIGGIGRF
RMIGGIGRA

SEQ ID NO: 13201 - protein, 9 aa, Artificial Sequence
  Description of Artificial Sequence: Synthetic peptide
  Seed: RMIGGIGRF
RIIGGIGRV

SEQ ID NO: 13202 - protein, 9 aa, Artificial Sequence
  Description of Artificial Sequence: Synthetic peptide
  Seed: RMIGGIGRF
RIIGGIGRY

SEQ ID NO: 13203 - protein, 9 aa, Artificial Sequence
  Description of Artificial Sequence: Synthetic peptide
  Seed: RMIGGIGRF
RIIGGIGRW

SEQ ID NO: 13204 - protein, 9 aa, Artificial Sequence
  Description of Artificial Sequence: Synthetic peptide
  Seed: RMIGGIGRF
RIIGGIGRT

SEQ ID NO: 13205 - protein, 9 aa, Artificial Sequence
  Description of Artificial Sequence: Synthetic peptide
  Seed: RMIGGIGRF
RQIGGIGRY

SEQ ID NO: 13206 - protein, 9 aa, Artificial Sequence
  Description of Artificial Sequence: Synthetic peptide
  Seed: RMIGGIGRF
RQIGGIGRV

SEQ ID NO: 13207 - protein, 9 aa, Artificial Sequence
  Description of Artificial Sequence: Synthetic peptide
  Seed: RMIGGIGRF
REIGGIGRI

SEQ ID NO: 13208 - protein, 9 aa, Artificial Sequence
  Description of Artificial Sequence: Synthetic peptide
  Seed: RMIGGIGRF
REIGGIGRL

SEQ ID NO: 13209 - protein, 9 aa, Artificial Sequence
  Description of Artificial Sequence: Synthetic peptide
  Seed: RMIGGIGRF
REIGGIGRM

SEQ ID NO: 13210 - protein, 9 aa, Artificial Sequence
  Description of Artificial Sequence: Synthetic peptide
  Seed: RMIGGIGRF
REIGGIGRF

SEQ ID NO: 13211 - protein, 9 aa, Artificial Sequence
  Description of Artificial Sequence: Synthetic peptide
  Seed: RMIGGIGRF
REIGGIGRY

SEQ ID NO: 13212 - protein, 9 aa, Artificial Sequence
  Description of Artificial Sequence: Synthetic peptide
  Seed: RMIGGIGRF
RGIGGIGRM

SEQ ID NO: 13213 - protein, 9 aa, Artificial Sequence
  Description of Artificial Sequence: Synthetic peptide
  Seed: RMIGGIGRF
RGIGGIGRF

SEQ ID NO: 13214 - protein, 9 aa, Artificial Sequence
  Description of Artificial Sequence: Synthetic peptide
  Seed: RMIGGIGRF
RGIGGIGRW

SEQ ID NO: 13215 - protein, 9 aa, Artificial Sequence
  Description of Artificial Sequence: Synthetic peptide
  Seed: RMIGGIGRF
RGIGGIGRY

SEQ ID NO: 13216 - protein, 9 aa, Artificial Sequence
  Description of Artificial Sequence: Synthetic peptide
  Seed: RMIGGIGRF
RHIGGIGRM

SEQ ID NO: 13217 - protein, 9 aa, Artificial Sequence
  Description of Artificial Sequence: Synthetic peptide
  Seed: RMIGGIGRF
RHIGGIGRF

SEQ ID NO: 13218 - protein, 9 aa, Artificial Sequence
  Description of Artificial Sequence: Synthetic peptide
  Seed: RMIGGIGRF
RHIGGIGRY

SEQ ID NO: 13219 - protein, 9 aa, Artificial Sequence
  Description of Artificial Sequence: Synthetic peptide
  Seed: RMIGGIGRF
RIIGGIGRA

SEQ ID NO: 13220 - protein, 9 aa, Artificial Sequence
  Description of Artificial Sequence: Synthetic peptide
  Seed: RMIGGIGRF
RIIGGIGRI

SEQ ID NO: 13221 - protein, 9 aa, Artificial Sequence
  Description of Artificial Sequence: Synthetic peptide
  Seed: RMIGGIGRF
RIIGGIGRL

SEQ ID NO: 13222 - protein, 9 aa, Artificial Sequence
  Description of Artificial Sequence: Synthetic peptide
  Seed: RMIGGIGRF
RIIGGIGRM

SEQ ID NO: 13223 - protein, 9 aa, Artificial Sequence
  Description of Artificial Sequence: Synthetic peptide
  Seed: RMIGGIGRF
RIIGGIGRF

SEQ ID NO: 13224 - protein, 10 aa, Artificial Sequence
  Description of Artificial Sequence: Synthetic peptide
  Seed: RMIGGIGRFY
RQIGGIGRFS

SEQ ID NO: 13225 - protein, 10 aa, Artificial Sequence
  Description of Artificial Sequence: Synthetic peptide
  Seed: RMIGGIGRFY
RQIGGIGRFW

SEQ ID NO: 13226 - protein, 9 aa, Artificial Sequence
  Description of Artificial Sequence: Synthetic peptide
  Seed: RLLSFIRGT
RMLSFIRGT

SEQ ID NO: 13227 - protein, 11 aa, Artificial Sequence
  Description of Artificial Sequence: Synthetic peptide
  Seed: RMIGGIGRFYI
RQIGGIGRFYE

SEQ ID NO: 13228 - protein, 11 aa, Artificial Sequence
  Description of Artificial Sequence: Synthetic peptide
  Seed: RMIGGIGRFYI
RNIGGIGRFYY

SEQ ID NO: 13229 - protein, 11 aa, Artificial Sequence
  Description of Artificial Sequence: Synthetic peptide
  Seed: RMIGGIGRFYI
RDIGGIGRFYY

SEQ ID NO: 13230 - protein, 11 aa, Artificial Sequence
  Description of Artificial Sequence: Synthetic peptide
  Seed: RMIGGIGRFYI
RCIGGIGRFYY

SEQ ID NO: 13231 - protein, 11 aa, Artificial Sequence
  Description of Artificial Sequence: Synthetic peptide
  Seed: RMIGGIGRFYI
RQIGGIGRFYA

SEQ ID NO: 13232 - protein, 11 aa, Artificial Sequence
  Description of Artificial Sequence: Synthetic peptide
  Seed: RMIGGIGRFYI
RQIGGIGRFYR

SEQ ID NO: 13233 - protein, 11 aa, Artificial Sequence
  Description of Artificial Sequence: Synthetic peptide
  Seed: RMIGGIGRFYI
RQIGGIGRFYN

SEQ ID NO: 13234 - protein, 11 aa, Artificial Sequence
  Description of Artificial Sequence: Synthetic peptide
  Seed: RMIGGIGRFYI
RQIGGIGRFYD

SEQ ID NO: 13235 - protein, 11 aa, Artificial Sequence
  Description of Artificial Sequence: Synthetic peptide
  Seed: RMIGGIGRFYI
RQIGGIGRFYC

SEQ ID NO: 13236 - protein, 11 aa, Artificial Sequence
  Description of Artificial Sequence: Synthetic peptide
  Seed: RMIGGIGRFYI
RQIGGIGRFYQ

SEQ ID NO: 13237 - protein, 11 aa, Artificial Sequence
  Description of Artificial Sequence: Synthetic peptide
  Seed: RMIGGIGRFYI
RQIGGIGRFYG

SEQ ID NO: 13238 - protein, 11 aa, Artificial Sequence
  Description of Artificial Sequence: Synthetic peptide
  Seed: RMIGGIGRFYI
RQIGGIGRFYY

SEQ ID NO: 13239 - protein, 11 aa, Artificial Sequence
  Description of Artificial Sequence: Synthetic peptide
  Seed: RMIGGIGRFYI
RQIGGIGRFYH

SEQ ID NO: 13240 - protein, 11 aa, Artificial Sequence
  Description of Artificial Sequence: Synthetic peptide
  Seed: RMIGGIGRFYI
RQIGGIGRFYI

SEQ ID NO: 13241 - protein, 11 aa, Artificial Sequence
  Description of Artificial Sequence: Synthetic peptide
  Seed: RMIGGIGRFYI
RQIGGIGRFYL

SEQ ID NO: 13242 - protein, 11 aa, Artificial Sequence
  Description of Artificial Sequence: Synthetic peptide
  Seed: RMIGGIGRFYI
RQIGGIGRFYK

SEQ ID NO: 13243 - protein, 11 aa, Artificial Sequence
  Description of Artificial Sequence: Synthetic peptide
  Seed: RMIGGIGRFYI
RQIGGIGRFYM

SEQ ID NO: 13244 - protein, 11 aa, Artificial Sequence
  Description of Artificial Sequence: Synthetic peptide
  Seed: RMIGGIGRFYI
RQIGGIGRFYF

SEQ ID NO: 13245 - protein, 11 aa, Artificial Sequence
  Description of Artificial Sequence: Synthetic peptide
  Seed: RMIGGIGRFYI
RQIGGIGRFYP

SEQ ID NO: 13246 - protein, 11 aa, Artificial Sequence
  Description of Artificial Sequence: Synthetic peptide
  Seed: RMIGGIGRFYI
RQIGGIGRFYS

SEQ ID NO: 13247 - protein, 11 aa, Artificial Sequence
  Description of Artificial Sequence: Synthetic peptide
  Seed: RMIGGIGRFYI
RQIGGIGRFYT

SEQ ID NO: 13248 - protein, 11 aa, Artificial Sequence
  Description of Artificial Sequence: Synthetic peptide
  Seed: RMIGGIGRFYI
RRIGGIGRFYY

SEQ ID NO: 13249 - protein, 11 aa, Artificial Sequence
  Description of Artificial Sequence: Synthetic peptide
  Seed: RMIGGIGRFYI
RAIGGIGRFYV

SEQ ID NO: 13250 - protein, 11 aa, Artificial Sequence
  Description of Artificial Sequence: Synthetic peptide
  Seed: RMIGGIGRFYI
RAIGGIGRFYY

SEQ ID NO: 13251 - protein, 11 aa, Artificial Sequence
  Description of Artificial Sequence: Synthetic peptide
  Seed: RMIGGIGRFYI
RAIGGIGRFYF

SEQ ID NO: 13252 - protein, 10 aa, Artificial Sequence
  Description of Artificial Sequence: Synthetic peptide
  Seed: RMIGGIGRFY
RWIGGIGRFK

SEQ ID NO: 13253 - protein, 10 aa, Artificial Sequence
  Description of Artificial Sequence: Synthetic peptide
  Seed: RMIGGIGRFY
RWIGGIGRFM

SEQ ID NO: 13254 - protein, 10 aa, Artificial Sequence
  Description of Artificial Sequence: Synthetic peptide
  Seed: RMIGGIGRFY
RWIGGIGRFF

SEQ ID NO: 13255 - protein, 10 aa, Artificial Sequence
  Description of Artificial Sequence: Synthetic peptide
  Seed: RMIGGIGRFY
RWIGGIGRFY

SEQ ID NO: 13256 - protein, 10 aa, Artificial Sequence
  Description of Artificial Sequence: Synthetic peptide
  Seed: RMIGGIGRFY
RYIGGIGRFH

SEQ ID NO: 13257 - protein, 10 aa, Artificial Sequence
  Description of Artificial Sequence: Synthetic peptide
  Seed: RMIGGIGRFY
RYIGGIGRFK

SEQ ID NO: 13258 - protein, 10 aa, Artificial Sequence
  Description of Artificial Sequence: Synthetic peptide
  Seed: RMIGGIGRFY
RYIGGIGRFM

SEQ ID NO: 13259 - protein, 10 aa, Artificial Sequence
  Description of Artificial Sequence: Synthetic peptide
  Seed: RMIGGIGRFY
RYIGGIGRFF

SEQ ID NO: 13260 - protein, 10 aa, Artificial Sequence
  Description of Artificial Sequence: Synthetic peptide
  Seed: RMIGGIGRFY
RYIGGIGRFY

SEQ ID NO: 13261 - protein, 10 aa, Artificial Sequence
  Description of Artificial Sequence: Synthetic peptide
  Seed: RMIGGIGRFY
RVIGGIGRFR

SEQ ID NO: 13262 - protein, 10 aa, Artificial Sequence
  Description of Artificial Sequence: Synthetic peptide
  Seed: RMIGGIGRFY
RVIGGIGRFL

SEQ ID NO: 13263 - protein, 10 aa, Artificial Sequence
  Description of Artificial Sequence: Synthetic peptide
  Seed: RMIGGIGRFY
RVIGGIGRFK

SEQ ID NO: 13264 - protein, 10 aa, Artificial Sequence
  Description of Artificial Sequence: Synthetic peptide
  Seed: RMIGGIGRFY
RVIGGIGRFM

SEQ ID NO: 13265 - protein, 10 aa, Artificial Sequence
  Description of Artificial Sequence: Synthetic peptide
  Seed: RMIGGIGRFY
RVIGGIGRFF

SEQ ID NO: 13266 - protein, 10 aa, Artificial Sequence
  Description of Artificial Sequence: Synthetic peptide
  Seed: RMIGGIGRFY
RVIGGIGRFW

SEQ ID NO: 13267 - protein, 10 aa, Artificial Sequence
  Description of Artificial Sequence: Synthetic peptide
  Seed: RMIGGIGRFY
RVIGGIGRFY

SEQ ID NO: 13268 - protein, 11 aa, Artificial Sequence
  Description of Artificial Sequence: Synthetic peptide
  Seed: RMIGGIGRFYI
RAIGGIGRFYA

SEQ ID NO: 13269 - protein, 11 aa, Artificial Sequence
  Description of Artificial Sequence: Synthetic peptide
  Seed: RMIGGIGRFYI
RAIGGIGRFYI

SEQ ID NO: 13270 - protein, 11 aa, Artificial Sequence
  Description of Artificial Sequence: Synthetic peptide
  Seed: RMIGGIGRFYI
RAIGGIGRFYL

SEQ ID NO: 13271 - protein, 11 aa, Artificial Sequence
  Description of Artificial Sequence: Synthetic peptide
  Seed: RMIGGIGRFYI
RQIGGIGRFYW

SEQ ID NO: 13272 - protein, 11 aa, Artificial Sequence
  Description of Artificial Sequence: Synthetic peptide
  Seed: RMIGGIGRFYI
RQIGGIGRFYV

SEQ ID NO: 13273 - protein, 10 aa, Artificial Sequence
  Description of Artificial Sequence: Synthetic peptide
  Seed: RMIGGIGRFY
RTIGGIGRFY

SEQ ID NO: 13274 - protein, 11 aa, Artificial Sequence
  Description of Artificial Sequence: Synthetic peptide
  Seed: RMIGGIGRFYI
RMIGGIGRFYG

SEQ ID NO: 13275 - protein, 11 aa, Artificial Sequence
  Description of Artificial Sequence: Synthetic peptide
  Seed: RMIGGIGRFYI
RLIGGIGRFYV

SEQ ID NO: 13276 - protein, 11 aa, Artificial Sequence
  Description of Artificial Sequence: Synthetic peptide
  Seed: RMIGGIGRFYI
RKIGGIGRFYY

SEQ ID NO: 13277 - protein, 11 aa, Artificial Sequence
  Description of Artificial Sequence: Synthetic peptide
  Seed: RMIGGIGRFYI
RMIGGIGRFYA

SEQ ID NO: 13278 - protein, 11 aa, Artificial Sequence
  Description of Artificial Sequence: Synthetic peptide
  Seed: RMIGGIGRFYI
RMIGGIGRFYR

SEQ ID NO: 13279 - protein, 11 aa, Artificial Sequence
  Description of Artificial Sequence: Synthetic peptide
  Seed: RMIGGIGRFYI
RMIGGIGRFYN

SEQ ID NO: 13280 - protein, 11 aa, Artificial Sequence
  Description of Artificial Sequence: Synthetic peptide
  Seed: RMIGGIGRFYI
RMIGGIGRFYD

SEQ ID NO: 13281 - protein, 11 aa, Artificial Sequence
  Description of Artificial Sequence: Synthetic peptide
  Seed: RMIGGIGRFYI
RMIGGIGRFYC

SEQ ID NO: 13282 - protein, 11 aa, Artificial Sequence
  Description of Artificial Sequence: Synthetic peptide
  Seed: RMIGGIGRFYI
RMIGGIGRFYQ

SEQ ID NO: 13283 - protein, 11 aa, Artificial Sequence
  Description of Artificial Sequence: Synthetic peptide
  Seed: RMIGGIGRFYI
RMIGGIGRFYE

SEQ ID NO: 13284 - protein, 11 aa, Artificial Sequence
  Description of Artificial Sequence: Synthetic peptide
  Seed: RMIGGIGRFYI
RMIGGIGRFYH

SEQ ID NO: 13285 - protein, 11 aa, Artificial Sequence
  Description of Artificial Sequence: Synthetic peptide
  Seed: RMIGGIGRFYI
REIGGIGRFYI

SEQ ID NO: 13286 - protein, 11 aa, Artificial Sequence
  Description of Artificial Sequence: Synthetic peptide
  Seed: RMIGGIGRFYI
RMIGGIGRFYL

SEQ ID NO: 13287 - protein, 11 aa, Artificial Sequence
  Description of Artificial Sequence: Synthetic peptide
  Seed: RMIGGIGRFYI
RMIGGIGRFYK

SEQ ID NO: 13288 - protein, 11 aa, Artificial Sequence
  Description of Artificial Sequence: Synthetic peptide
  Seed: RMIGGIGRFYI
RMIGGIGRFYM

SEQ ID NO: 13289 - protein, 11 aa, Artificial Sequence
  Description of Artificial Sequence: Synthetic peptide
  Seed: RMIGGIGRFYI
RMIGGIGRFYF

SEQ ID NO: 13290 - protein, 11 aa, Artificial Sequence
  Description of Artificial Sequence: Synthetic peptide
  Seed: RMIGGIGRFYI
RMIGGIGRFYP

SEQ ID NO: 13291 - protein, 11 aa, Artificial Sequence
  Description of Artificial Sequence: Synthetic peptide
  Seed: RMIGGIGRFYI
RMIGGIGRFYS

SEQ ID NO: 13292 - protein, 11 aa, Artificial Sequence
  Description of Artificial Sequence: Synthetic peptide
  Seed: RMIGGIGRFYI
RMIGGIGRFYT

SEQ ID NO: 13293 - protein, 11 aa, Artificial Sequence
  Description of Artificial Sequence: Synthetic peptide
  Seed: RMIGGIGRFYI
RMIGGIGRFYW

SEQ ID NO: 13294 - protein, 11 aa, Artificial Sequence
  Description of Artificial Sequence: Synthetic peptide
  Seed: RMIGGIGRFYI
RMIGGIGRFYY

SEQ ID NO: 13295 - protein, 11 aa, Artificial Sequence
  Description of Artificial Sequence: Synthetic peptide
  Seed: RMIGGIGRFYI
RLIGGIGRFYY

SEQ ID NO: 13296 - protein, 11 aa, Artificial Sequence
  Description of Artificial Sequence: Synthetic peptide
  Seed: RMIGGIGRFYI
RLIGGIGRFYW

SEQ ID NO: 13297 - protein, 11 aa, Artificial Sequence
  Description of Artificial Sequence: Synthetic peptide
  Seed: RMIGGIGRFYI
RLIGGIGRFYT

SEQ ID NO: 13298 - protein, 11 aa, Artificial Sequence
  Description of Artificial Sequence: Synthetic peptide
  Seed: RMIGGIGRFYI
RLIGGIGRFYS

SEQ ID NO: 13299 - protein, 11 aa, Artificial Sequence
  Description of Artificial Sequence: Synthetic peptide
  Seed: RMIGGIGRFYI
REIGGIGRFYL

SEQ ID NO: 13300 - protein, 11 aa, Artificial Sequence
  Description of Artificial Sequence: Synthetic peptide
  Seed: RMIGGIGRFYI
REIGGIGRFYY

SEQ ID NO: 13301 - protein, 11 aa, Artificial Sequence
  Description of Artificial Sequence: Synthetic peptide
  Seed: RMIGGIGRFYI
RGIGGIGRFYY

SEQ ID NO: 13302 - protein, 11 aa, Artificial Sequence
  Description of Artificial Sequence: Synthetic peptide
  Seed: RMIGGIGRFYI
RHIGGIGRFYY

SEQ ID NO: 13303 - protein, 11 aa, Artificial Sequence
  Description of Artificial Sequence: Synthetic peptide
  Seed: RMIGGIGRFYI
RIIGGIGRFYA

SEQ ID NO: 13304 - protein, 11 aa, Artificial Sequence
  Description of Artificial Sequence: Synthetic peptide
  Seed: RMIGGIGRFYI
RIIGGIGRFYI

SEQ ID NO: 13305 - protein, 11 aa, Artificial Sequence
  Description of Artificial Sequence: Synthetic peptide
  Seed: RMIGGIGRFYI
RIIGGIGRFYL

SEQ ID NO: 13306 - protein, 11 aa, Artificial Sequence
  Description of Artificial Sequence: Synthetic peptide
  Seed: RMIGGIGRFYI
RIIGGIGRFYM

SEQ ID NO: 13307 - protein, 11 aa, Artificial Sequence
  Description of Artificial Sequence: Synthetic peptide
  Seed: RMIGGIGRFYI
RIIGGIGRFYF

SEQ ID NO: 13308 - protein, 11 aa, Artificial Sequence
  Description of Artificial Sequence: Synthetic peptide
  Seed: RMIGGIGRFYI
RIIGGIGRFYT

SEQ ID NO: 13309 - protein, 11 aa, Artificial Sequence
  Description of Artificial Sequence: Synthetic peptide
  Seed: RMIGGIGRFYI
RIIGGIGRFYW

SEQ ID NO: 13310 - protein, 11 aa, Artificial Sequence
  Description of Artificial Sequence: Synthetic peptide
  Seed: RMIGGIGRFYI
RIIGGIGRFYY

SEQ ID NO: 13311 - protein, 11 aa, Artificial Sequence
  Description of Artificial Sequence: Synthetic peptide
  Seed: RMIGGIGRFYI
RIIGGIGRFYV

SEQ ID NO: 13312 - protein, 11 aa, Artificial Sequence
  Description of Artificial Sequence: Synthetic peptide
  Seed: RMIGGIGRFYI
RLIGGIGRFYA

SEQ ID NO: 13313 - protein, 11 aa, Artificial Sequence
  Description of Artificial Sequence: Synthetic peptide
  Seed: RMIGGIGRFYI
RLIGGIGRFYC

SEQ ID NO: 13314 - protein, 11 aa, Artificial Sequence
  Description of Artificial Sequence: Synthetic peptide
  Seed: RMIGGIGRFYI
RLIGGIGRFYI

SEQ ID NO: 13315 - protein, 11 aa, Artificial Sequence
  Description of Artificial Sequence: Synthetic peptide
  Seed: RMIGGIGRFYI
RLIGGIGRFYL

SEQ ID NO: 13316 - protein, 11 aa, Artificial Sequence
  Description of Artificial Sequence: Synthetic peptide
  Seed: RMIGGIGRFYI
RLIGGIGRFYM

SEQ ID NO: 13317 - protein, 11 aa, Artificial Sequence
  Description of Artificial Sequence: Synthetic peptide
  Seed: RMIGGIGRFYI
RLIGGIGRFYF

SEQ ID NO: 13318 - protein, 10 aa, Artificial Sequence
  Description of Artificial Sequence: Synthetic peptide
  Seed: RMIGGIGRFY
RTIGGIGRFV

SEQ ID NO: 13319 - protein, 10 aa, Artificial Sequence
  Description of Artificial Sequence: Synthetic peptide
  Seed: RMIGGIGRFY
RTIGGIGRFW

SEQ ID NO: 13320 - protein, 10 aa, Artificial Sequence
  Description of Artificial Sequence: Synthetic peptide
  Seed: RMIGGIGRFY
RQIGGIGRFY

SEQ ID NO: 13321 - protein, 10 aa, Artificial Sequence
  Description of Artificial Sequence: Synthetic peptide
  Seed: RMIGGIGRFY
RMIGGIGRFN

SEQ ID NO: 13322 - protein, 10 aa, Artificial Sequence
  Description of Artificial Sequence: Synthetic peptide
  Seed: RMIGGIGRFY
RLIGGIGRFW

SEQ ID NO: 13323 - protein, 10 aa, Artificial Sequence
  Description of Artificial Sequence: Synthetic peptide
  Seed: RMIGGIGRFY
RLIGGIGRFY

SEQ ID NO: 13324 - protein, 10 aa, Artificial Sequence
  Description of Artificial Sequence: Synthetic peptide
  Seed: RMIGGIGRFY
RKIGGIGRFL

SEQ ID NO: 13325 - protein, 10 aa, Artificial Sequence
  Description of Artificial Sequence: Synthetic peptide
  Seed: RMIGGIGRFY
RKIGGIGRFK

SEQ ID NO: 13326 - protein, 10 aa, Artificial Sequence
  Description of Artificial Sequence: Synthetic peptide
  Seed: RMIGGIGRFY
RKIGGIGRFM

SEQ ID NO: 13327 - protein, 10 aa, Artificial Sequence
  Description of Artificial Sequence: Synthetic peptide
  Seed: RMIGGIGRFY
RKIGGIGRFF

SEQ ID NO: 13328 - protein, 10 aa, Artificial Sequence
  Description of Artificial Sequence: Synthetic peptide
  Seed: RMIGGIGRFY
RKIGGIGRFY

SEQ ID NO: 13329 - protein, 10 aa, Artificial Sequence
  Description of Artificial Sequence: Synthetic peptide
  Seed: RMIGGIGRFY
RMIGGIGRFA

SEQ ID NO: 13330 - protein, 10 aa, Artificial Sequence
  Description of Artificial Sequence: Synthetic peptide
  Seed: RMIGGIGRFY
RMIGGIGRFR

SEQ ID NO: 13331 - protein, 10 aa, Artificial Sequence
  Description of Artificial Sequence: Synthetic peptide
  Seed: RMIGGIGRFY
RMIGGIGRFD

SEQ ID NO: 13332 - protein, 10 aa, Artificial Sequence
  Description of Artificial Sequence: Synthetic peptide
  Seed: RMIGGIGRFY
RMIGGIGRFP

SEQ ID NO: 13333 - protein, 10 aa, Artificial Sequence
  Description of Artificial Sequence: Synthetic peptide
  Seed: RMIGGIGRFY
RMIGGIGRFC

SEQ ID NO: 13334 - protein, 10 aa, Artificial Sequence
  Description of Artificial Sequence: Synthetic peptide
  Seed: RMIGGIGRFY
RMIGGIGRFQ

SEQ ID NO: 13335 - protein, 10 aa, Artificial Sequence
  Description of Artificial Sequence: Synthetic peptide
  Seed: RMIGGIGRFY
RMIGGIGRFE

SEQ ID NO: 13336 - protein, 10 aa, Artificial Sequence
  Description of Artificial Sequence: Synthetic peptide
  Seed: RMIGGIGRFY
RMIGGIGRFG

SEQ ID NO: 13337 - protein, 10 aa, Artificial Sequence
  Description of Artificial Sequence: Synthetic peptide
  Seed: RMIGGIGRFY
RMIGGIGRFH

SEQ ID NO: 13338 - protein, 10 aa, Artificial Sequence
  Description of Artificial Sequence: Synthetic peptide
  Seed: RMIGGIGRFY
RMIGGIGRFI

SEQ ID NO: 13339 - protein, 10 aa, Artificial Sequence
  Description of Artificial Sequence: Synthetic peptide
  Seed: RMIGGIGRFY
RMIGGIGRFL

SEQ ID NO: 13340 - protein, 10 aa, Artificial Sequence
  Description of Artificial Sequence: Synthetic peptide
  Seed: RMIGGIGRFY
RMIGGIGRFK

SEQ ID NO: 13341 - protein, 10 aa, Artificial Sequence
  Description of Artificial Sequence: Synthetic peptide
  Seed: RMIGGIGRFY
RMIGGIGRFM

SEQ ID NO: 13342 - protein, 10 aa, Artificial Sequence
  Description of Artificial Sequence: Synthetic peptide
  Seed: RMIGGIGRFY
RLIGGIGRFF

SEQ ID NO: 13343 - protein, 10 aa, Artificial Sequence
  Description of Artificial Sequence: Synthetic peptide
  Seed: RMIGGIGRFY
RLIGGIGRFM

SEQ ID NO: 13344 - protein, 10 aa, Artificial Sequence
  Description of Artificial Sequence: Synthetic peptide
  Seed: RMIGGIGRFY
RLIGGIGRFK

SEQ ID NO: 13345 - protein, 10 aa, Artificial Sequence
  Description of Artificial Sequence: Synthetic peptide
  Seed: RMIGGIGRFY
RLIGGIGRFR

SEQ ID NO: 13346 - protein, 10 aa, Artificial Sequence
  Description of Artificial Sequence: Synthetic peptide
  Seed: RMIGGIGRFY
RQIGGIGRFV

SEQ ID NO: 13347 - protein, 10 aa, Artificial Sequence
  Description of Artificial Sequence: Synthetic peptide
  Seed: RMIGGIGRFY
REIGGIGRFK

SEQ ID NO: 13348 - protein, 10 aa, Artificial Sequence
  Description of Artificial Sequence: Synthetic peptide
  Seed: RMIGGIGRFY
REIGGIGRFM

SEQ ID NO: 13349 - protein, 10 aa, Artificial Sequence
  Description of Artificial Sequence: Synthetic peptide
  Seed: RMIGGIGRFY
REIGGIGRFF

SEQ ID NO: 13350 - protein, 10 aa, Artificial Sequence
  Description of Artificial Sequence: Synthetic peptide
  Seed: RMIGGIGRFY
REIGGIGRFY

SEQ ID NO: 13351 - protein, 10 aa, Artificial Sequence
  Description of Artificial Sequence: Synthetic peptide
  Seed: RMIGGIGRFY
RGIGGIGRFK

SEQ ID NO: 13352 - protein, 10 aa, Artificial Sequence
  Description of Artificial Sequence: Synthetic peptide
  Seed: RMIGGIGRFY
RGIGGIGRFF

SEQ ID NO: 13353 - protein, 10 aa, Artificial Sequence
  Description of Artificial Sequence: Synthetic peptide
  Seed: RMIGGIGRFY
RGIGGIGRFW

SEQ ID NO: 13354 - protein, 10 aa, Artificial Sequence
  Description of Artificial Sequence: Synthetic peptide
  Seed: RMIGGIGRFY
RGIGGIGRFY

SEQ ID NO: 13355 - protein, 10 aa, Artificial Sequence
  Description of Artificial Sequence: Synthetic peptide
  Seed: RMIGGIGRFY
RHIGGIGRFK

SEQ ID NO: 13356 - protein, 10 aa, Artificial Sequence
  Description of Artificial Sequence: Synthetic peptide
  Seed: RMIGGIGRFY
RHIGGIGRFM

SEQ ID NO: 13357 - protein, 10 aa, Artificial Sequence
  Description of Artificial Sequence: Synthetic peptide
  Seed: RMIGGIGRFY
RHIGGIGRFF

SEQ ID NO: 13358 - protein, 10 aa, Artificial Sequence
  Description of Artificial Sequence: Synthetic peptide
  Seed: RMIGGIGRFY
RHIGGIGRFY

SEQ ID NO: 13359 - protein, 10 aa, Artificial Sequence
  Description of Artificial Sequence: Synthetic peptide
  Seed: RMIGGIGRFY
RIIGGIGRFR

SEQ ID NO: 13360 - protein, 10 aa, Artificial Sequence
  Description of Artificial Sequence: Synthetic peptide
  Seed: RMIGGIGRFY
RIIGGIGRFK

SEQ ID NO: 13361 - protein, 10 aa, Artificial Sequence
  Description of Artificial Sequence: Synthetic peptide
  Seed: RMIGGIGRFY
RIIGGIGRFM

SEQ ID NO: 13362 - protein, 10 aa, Artificial Sequence
  Description of Artificial Sequence: Synthetic peptide
  Seed: RMIGGIGRFY
RIIGGIGRFF

SEQ ID NO: 13363 - protein, 10 aa, Artificial Sequence
  Description of Artificial Sequence: Synthetic peptide
  Seed: RMIGGIGRFY
RIIGGIGRFW

SEQ ID NO: 13364 - protein, 10 aa, Artificial Sequence
  Description of Artificial Sequence: Synthetic peptide
  Seed: RMIGGIGRFY
RIIGGIGRFY

SEQ ID NO: 13365 - protein, 10 aa, Artificial Sequence
  Description of Artificial Sequence: Synthetic peptide
  Seed: RMIGGIGRFY
RMIGGIGRFF

SEQ ID NO: 13366 - protein, 10 aa, Artificial Sequence
  Description of Artificial Sequence: Synthetic peptide
  Seed: RMIGGIGRFY
RMIGGIGRFS

SEQ ID NO: 13367 - protein, 10 aa, Artificial Sequence
  Description of Artificial Sequence: Synthetic peptide
  Seed: RMIGGIGRFY
RTIGGIGRFT

SEQ ID NO: 13368 - protein, 10 aa, Artificial Sequence
  Description of Artificial Sequence: Synthetic peptide
  Seed: RMIGGIGRFY
RTIGGIGRFQ

SEQ ID NO: 13369 - protein, 10 aa, Artificial Sequence
  Description of Artificial Sequence: Synthetic peptide
  Seed: RMIGGIGRFY
RSIGGIGRFT

SEQ ID NO: 13370 - protein, 10 aa, Artificial Sequence
  Description of Artificial Sequence: Synthetic peptide
  Seed: RMIGGIGRFY
RSIGGIGRFW

SEQ ID NO: 13371 - protein, 10 aa, Artificial Sequence
  Description of Artificial Sequence: Synthetic peptide
  Seed: RMIGGIGRFY
RSIGGIGRFY

SEQ ID NO: 13372 - protein, 10 aa, Artificial Sequence
  Description of Artificial Sequence: Synthetic peptide
  Seed: RMIGGIGRFY
RSIGGIGRFV

SEQ ID NO: 13373 - protein, 10 aa, Artificial Sequence
  Description of Artificial Sequence: Synthetic peptide
  Seed: RMIGGIGRFY
RTIGGIGRFA

SEQ ID NO: 13374 - protein, 10 aa, Artificial Sequence
  Description of Artificial Sequence: Synthetic peptide
  Seed: RMIGGIGRFY
RTIGGIGRFR

SEQ ID NO: 13375 - protein, 10 aa, Artificial Sequence
  Description of Artificial Sequence: Synthetic peptide
  Seed: RMIGGIGRFY
RTIGGIGRFN

SEQ ID NO: 13376 - protein, 10 aa, Artificial Sequence
  Description of Artificial Sequence: Synthetic peptide
  Seed: RMIGGIGRFY
RTIGGIGRFD

SEQ ID NO: 13377 - protein, 10 aa, Artificial Sequence
  Description of Artificial Sequence: Synthetic peptide
  Seed: RMIGGIGRFY
RTIGGIGRFC

SEQ ID NO: 13378 - protein, 10 aa, Artificial Sequence
  Description of Artificial Sequence: Synthetic peptide
  Seed: RMIGGIGRFY
RTIGGIGRFE

SEQ ID NO: 13379 - protein, 10 aa, Artificial Sequence
  Description of Artificial Sequence: Synthetic peptide
  Seed: RMIGGIGRFY
RMIGGIGRFT

SEQ ID NO: 13380 - protein, 10 aa, Artificial Sequence
  Description of Artificial Sequence: Synthetic peptide
  Seed: RMIGGIGRFY
RTIGGIGRFG

SEQ ID NO: 13381 - protein, 10 aa, Artificial Sequence
  Description of Artificial Sequence: Synthetic peptide
  Seed: RMIGGIGRFY
RTIGGIGRFH

SEQ ID NO: 13382 - protein, 10 aa, Artificial Sequence
  Description of Artificial Sequence: Synthetic peptide
  Seed: RMIGGIGRFY
RTIGGIGRFI

SEQ ID NO: 13383 - protein, 10 aa, Artificial Sequence
  Description of Artificial Sequence: Synthetic peptide
  Seed: RMIGGIGRFY
RTIGGIGRFL

SEQ ID NO: 13384 - protein, 10 aa, Artificial Sequence
  Description of Artificial Sequence: Synthetic peptide
  Seed: RMIGGIGRFY
RTIGGIGRFK

SEQ ID NO: 13385 - protein, 10 aa, Artificial Sequence
  Description of Artificial Sequence: Synthetic peptide
  Seed: RMIGGIGRFY
RTIGGIGRFM

SEQ ID NO: 13386 - protein, 10 aa, Artificial Sequence
  Description of Artificial Sequence: Synthetic peptide
  Seed: RMIGGIGRFY
RTIGGIGRFF

SEQ ID NO: 13387 - protein, 10 aa, Artificial Sequence
  Description of Artificial Sequence: Synthetic peptide
  Seed: RMIGGIGRFY
RTIGGIGRFP

SEQ ID NO: 13388 - protein, 10 aa, Artificial Sequence
  Description of Artificial Sequence: Synthetic peptide
  Seed: RMIGGIGRFY
RTIGGIGRFS

SEQ ID NO: 13389 - protein, 10 aa, Artificial Sequence
  Description of Artificial Sequence: Synthetic peptide
  Seed: RMIGGIGRFY
RSIGGIGRFS

SEQ ID NO: 13390 - protein, 10 aa, Artificial Sequence
  Description of Artificial Sequence: Synthetic peptide
  Seed: RMIGGIGRFY
RSIGGIGRFP

SEQ ID NO: 13391 - protein, 10 aa, Artificial Sequence
  Description of Artificial Sequence: Synthetic peptide
  Seed: RMIGGIGRFY
RSIGGIGRFF

SEQ ID NO: 13392 - protein, 10 aa, Artificial Sequence
  Description of Artificial Sequence: Synthetic peptide
  Seed: RMIGGIGRFY
RSIGGIGRFM

SEQ ID NO: 13393 - protein, 10 aa, Artificial Sequence
  Description of Artificial Sequence: Synthetic peptide
  Seed: RMIGGIGRFY
RMIGGIGRFW

SEQ ID NO: 13394 - protein, 10 aa, Artificial Sequence
  Description of Artificial Sequence: Synthetic peptide
  Seed: RMIGGIGRFY
RMIGGIGRFV

SEQ ID NO: 13395 - protein, 10 aa, Artificial Sequence
  Description of Artificial Sequence: Synthetic peptide
  Seed: RMIGGIGRFY
RFIGGIGRFK

SEQ ID NO: 13396 - protein, 10 aa, Artificial Sequence
  Description of Artificial Sequence: Synthetic peptide
  Seed: RMIGGIGRFY
RFIGGIGRFF

SEQ ID NO: 13397 - protein, 10 aa, Artificial Sequence
  Description of Artificial Sequence: Synthetic peptide
  Seed: RMIGGIGRFY
RFIGGIGRFY

SEQ ID NO: 13398 - protein, 10 aa, Artificial Sequence
  Description of Artificial Sequence: Synthetic peptide
  Seed: RMIGGIGRFY
RPIGGIGRFK

SEQ ID NO: 13399 - protein, 10 aa, Artificial Sequence
  Description of Artificial Sequence: Synthetic peptide
  Seed: RMIGGIGRFY
RPIGGIGRFY

SEQ ID NO: 13400 - protein, 10 aa, Artificial Sequence
  Description of Artificial Sequence: Synthetic peptide
  Seed: RMIGGIGRFY
RSIGGIGRFA

SEQ ID NO: 13401 - protein, 10 aa, Artificial Sequence
  Description of Artificial Sequence: Synthetic peptide
  Seed: RMIGGIGRFY
RSIGGIGRFR

SEQ ID NO: 13402 - protein, 10 aa, Artificial Sequence
  Description of Artificial Sequence: Synthetic peptide
  Seed: RMIGGIGRFY
RSIGGIGRFN

SEQ ID NO: 13403 - protein, 10 aa, Artificial Sequence
  Description of Artificial Sequence: Synthetic peptide
  Seed: RMIGGIGRFY
RSIGGIGRFD

SEQ ID NO: 13404 - protein, 10 aa, Artificial Sequence
  Description of Artificial Sequence: Synthetic peptide
  Seed: RMIGGIGRFY
RSIGGIGRFC

SEQ ID NO: 13405 - protein, 10 aa, Artificial Sequence
  Description of Artificial Sequence: Synthetic peptide
  Seed: RMIGGIGRFY
RSIGGIGRFQ

SEQ ID NO: 13406 - protein, 10 aa, Artificial Sequence
  Description of Artificial Sequence: Synthetic peptide
  Seed: RMIGGIGRFY
RSIGGIGRFE

SEQ ID NO: 13407 - protein, 10 aa, Artificial Sequence
  Description of Artificial Sequence: Synthetic peptide
  Seed: RMIGGIGRFY
RSIGGIGRFG

SEQ ID NO: 13408 - protein, 10 aa, Artificial Sequence
  Description of Artificial Sequence: Synthetic peptide
  Seed: RMIGGIGRFY
RSIGGIGRFH

SEQ ID NO: 13409 - protein, 10 aa, Artificial Sequence
  Description of Artificial Sequence: Synthetic peptide
  Seed: RMIGGIGRFY
RSIGGIGRFI

SEQ ID NO: 13410 - protein, 10 aa, Artificial Sequence
  Description of Artificial Sequence: Synthetic peptide
  Seed: RMIGGIGRFY
RSIGGIGRFL

SEQ ID NO: 13411 - protein, 10 aa, Artificial Sequence
  Description of Artificial Sequence: Synthetic peptide
  Seed: RMIGGIGRFY
RSIGGIGRFK

SEQ ID NO: 13412 - protein, 11 aa, Artificial Sequence
  Description of Artificial Sequence: Synthetic peptide
  Seed: RMCSLMQGSTL
RYCSLMQGSTL

SEQ ID NO: 13413 - protein, 11 aa, Artificial Sequence
  Description of Artificial Sequence: Synthetic peptide
  Seed: RMCSLMQGSTL
RYCSLMQGSTI

SEQ ID NO: 13414 - protein, 11 aa, Artificial Sequence
  Description of Artificial Sequence: Synthetic peptide
  Seed: RMCSLMQGSTL
RWCSLMQGSTY

SEQ ID NO: 13415 - protein, 10 aa, Artificial Sequence
  Description of Artificial Sequence: Synthetic peptide
  Seed: RLLSFIRGTK
RWLSFIRGTY

SEQ ID NO: 13416 - protein, 10 aa, Artificial Sequence
  Description of Artificial Sequence: Synthetic peptide
  Seed: RLLSFIRGTK
RTLSFIRGTY

SEQ ID NO: 13417 - protein, 10 aa, Artificial Sequence
  Description of Artificial Sequence: Synthetic peptide
  Seed: RLLSFIRGTK
RTLSFIRGTV

SEQ ID NO: 13418 - protein, 10 aa, Artificial Sequence
  Description of Artificial Sequence: Synthetic peptide
  Seed: RLLSFIRGTK
RWLSFIRGTA

SEQ ID NO: 13419 - protein, 10 aa, Artificial Sequence
  Description of Artificial Sequence: Synthetic peptide
  Seed: RLLSFIRGTK
RWLSFIRGTR

SEQ ID NO: 13420 - protein, 10 aa, Artificial Sequence
  Description of Artificial Sequence: Synthetic peptide
  Seed: RLLSFIRGTK
RWLSFIRGTH

SEQ ID NO: 13421 - protein, 10 aa, Artificial Sequence
  Description of Artificial Sequence: Synthetic peptide
  Seed: RLLSFIRGTK
RWLSFIRGTI

SEQ ID NO: 13422 - protein, 10 aa, Artificial Sequence
  Description of Artificial Sequence: Synthetic peptide
  Seed: RLLSFIRGTK
RWLSFIRGTL

SEQ ID NO: 13423 - protein, 10 aa, Artificial Sequence
  Description of Artificial Sequence: Synthetic peptide
  Seed: RLLSFIRGTK
RWLSFIRGTK

SEQ ID NO: 13424 - protein, 10 aa, Artificial Sequence
  Description of Artificial Sequence: Synthetic peptide
  Seed: RLLSFIRGTK
RWLSFIRGTM

SEQ ID NO: 13425 - protein, 10 aa, Artificial Sequence
  Description of Artificial Sequence: Synthetic peptide
  Seed: RLLSFIRGTK
RWLSFIRGTV

SEQ ID NO: 13426 - protein, 10 aa, Artificial Sequence
  Description of Artificial Sequence: Synthetic peptide
  Seed: RLLSFIRGTK
RYLSFIRGTV

SEQ ID NO: 13427 - protein, 10 aa, Artificial Sequence
  Description of Artificial Sequence: Synthetic peptide
  Seed: RLLSFIRGTK
RYLSFIRGTA

SEQ ID NO: 13428 - protein, 10 aa, Artificial Sequence
  Description of Artificial Sequence: Synthetic peptide
  Seed: RLLSFIRGTK
RYLSFIRGTR

SEQ ID NO: 13429 - protein, 10 aa, Artificial Sequence
  Description of Artificial Sequence: Synthetic peptide
  Seed: RLLSFIRGTK
RYLSFIRGTG

SEQ ID NO: 13430 - protein, 10 aa, Artificial Sequence
  Description of Artificial Sequence: Synthetic peptide
  Seed: RLLSFIRGTK
RYLSFIRGTH

SEQ ID NO: 13431 - protein, 10 aa, Artificial Sequence
  Description of Artificial Sequence: Synthetic peptide
  Seed: RLLSFIRGTK
RYLSFIRGTI

SEQ ID NO: 13432 - protein, 10 aa, Artificial Sequence
  Description of Artificial Sequence: Synthetic peptide
  Seed: RLLSFIRGTK
RYLSFIRGTL

SEQ ID NO: 13433 - protein, 10 aa, Artificial Sequence
  Description of Artificial Sequence: Synthetic peptide
  Seed: RLLSFIRGTK
RYLSFIRGTK

SEQ ID NO: 13434 - protein, 10 aa, Artificial Sequence
  Description of Artificial Sequence: Synthetic peptide
  Seed: RLLSFIRGTK
RYLSFIRGTM

SEQ ID NO: 13435 - protein, 10 aa, Artificial Sequence
  Description of Artificial Sequence: Synthetic peptide
  Seed: RLLSFIRGTK
RYLSFIRGTS

SEQ ID NO: 13436 - protein, 10 aa, Artificial Sequence
  Description of Artificial Sequence: Synthetic peptide
  Seed: RLLSFIRGTK
RTLSFIRGTT

SEQ ID NO: 13437 - protein, 10 aa, Artificial Sequence
  Description of Artificial Sequence: Synthetic peptide
  Seed: RLLSFIRGTK
RTLSFIRGTS

SEQ ID NO: 13438 - protein, 10 aa, Artificial Sequence
  Description of Artificial Sequence: Synthetic peptide
  Seed: RLLSFIRGTK
RTLSFIRGTP

SEQ ID NO: 13439 - protein, 10 aa, Artificial Sequence
  Description of Artificial Sequence: Synthetic peptide
  Seed: RLLSFIRGTK
RTLSFIRGTF

SEQ ID NO: 13440 - protein, 10 aa, Artificial Sequence
  Description of Artificial Sequence: Synthetic peptide
  Seed: RLLSFIRGTK
RSLSFIRGTG

SEQ ID NO: 13441 - protein, 10 aa, Artificial Sequence
  Description of Artificial Sequence: Synthetic peptide
  Seed: RLLSFIRGTK
RSLSFIRGTI

SEQ ID NO: 13442 - protein, 10 aa, Artificial Sequence
  Description of Artificial Sequence: Synthetic peptide
  Seed: RLLSFIRGTK
RSLSFIRGTL

SEQ ID NO: 13443 - protein, 10 aa, Artificial Sequence
  Description of Artificial Sequence: Synthetic peptide
  Seed: RLLSFIRGTK
RSLSFIRGTK

SEQ ID NO: 13444 - protein, 10 aa, Artificial Sequence
  Description of Artificial Sequence: Synthetic peptide
  Seed: RLLSFIRGTK
RSLSFIRGTM

SEQ ID NO: 13445 - protein, 10 aa, Artificial Sequence
  Description of Artificial Sequence: Synthetic peptide
  Seed: RLLSFIRGTK
RSLSFIRGTS

SEQ ID NO: 13446 - protein, 10 aa, Artificial Sequence
  Description of Artificial Sequence: Synthetic peptide
  Seed: RLLSFIRGTK
RSLSFIRGTT

SEQ ID NO: 13447 - protein, 10 aa, Artificial Sequence
  Description of Artificial Sequence: Synthetic peptide
  Seed: RLLSFIRGTK
RSLSFIRGTY

SEQ ID NO: 13448 - protein, 10 aa, Artificial Sequence
  Description of Artificial Sequence: Synthetic peptide
  Seed: RLLSFIRGTK
RSLSFIRGTV

SEQ ID NO: 13449 - protein, 10 aa, Artificial Sequence
  Description of Artificial Sequence: Synthetic peptide
  Seed: RLLSFIRGTK
RTLSFIRGTA

SEQ ID NO: 13450 - protein, 10 aa, Artificial Sequence
  Description of Artificial Sequence: Synthetic peptide
  Seed: RLLSFIRGTK
RTLSFIRGTR

SEQ ID NO: 13451 - protein, 10 aa, Artificial Sequence
  Description of Artificial Sequence: Synthetic peptide
  Seed: RLLSFIRGTK
RTLSFIRGTC

SEQ ID NO: 13452 - protein, 10 aa, Artificial Sequence
  Description of Artificial Sequence: Synthetic peptide
  Seed: RLLSFIRGTK
RTLSFIRGTQ

SEQ ID NO: 13453 - protein, 10 aa, Artificial Sequence
  Description of Artificial Sequence: Synthetic peptide
  Seed: RLLSFIRGTK
RTLSFIRGTG

SEQ ID NO: 13454 - protein, 10 aa, Artificial Sequence
  Description of Artificial Sequence: Synthetic peptide
  Seed: RLLSFIRGTK
RTLSFIRGTH

SEQ ID NO: 13455 - protein, 10 aa, Artificial Sequence
  Description of Artificial Sequence: Synthetic peptide
  Seed: RLLSFIRGTK
RTLSFIRGTI

SEQ ID NO: 13456 - protein, 10 aa, Artificial Sequence
  Description of Artificial Sequence: Synthetic peptide
  Seed: RLLSFIRGTK
RTLSFIRGTL

SEQ ID NO: 13457 - protein, 10 aa, Artificial Sequence
  Description of Artificial Sequence: Synthetic peptide
  Seed: RLLSFIRGTK
RTLSFIRGTK

SEQ ID NO: 13458 - protein, 10 aa, Artificial Sequence
  Description of Artificial Sequence: Synthetic peptide
  Seed: RLLSFIRGTK
RTLSFIRGTM

SEQ ID NO: 13459 - protein, 10 aa, Artificial Sequence
  Description of Artificial Sequence: Synthetic peptide
  Seed: RLLSFIRGTK
RYLSFIRGTY

SEQ ID NO: 13460 - protein, 10 aa, Artificial Sequence
  Description of Artificial Sequence: Synthetic peptide
  Seed: RLLSFIRGTK
RVLSFIRGTA

SEQ ID NO: 13461 - protein, 10 aa, Artificial Sequence
  Description of Artificial Sequence: Synthetic peptide
  Seed: RLLSFIRGTK
RSLSFIRGTA

SEQ ID NO: 13462 - protein, 11 aa, Artificial Sequence
  Description of Artificial Sequence: Synthetic peptide
  Seed: RLLSFIRGTKV
RLLSFIRGTKQ

SEQ ID NO: 13463 - protein, 11 aa, Artificial Sequence
  Description of Artificial Sequence: Synthetic peptide
  Seed: RLLSFIRGTKV
RILSFIRGTKI

SEQ ID NO: 13464 - protein, 11 aa, Artificial Sequence
  Description of Artificial Sequence: Synthetic peptide
  Seed: RLLSFIRGTKV
RILSFIRGTKK

SEQ ID NO: 13465 - protein, 11 aa, Artificial Sequence
  Description of Artificial Sequence: Synthetic peptide
  Seed: RLLSFIRGTKV
RILSFIRGTKY

SEQ ID NO: 13466 - protein, 11 aa, Artificial Sequence
  Description of Artificial Sequence: Synthetic peptide
  Seed: RLLSFIRGTKV
RILSFIRGTKV

SEQ ID NO: 13467 - protein, 11 aa, Artificial Sequence
  Description of Artificial Sequence: Synthetic peptide
  Seed: RLLSFIRGTKV
RLLSFIRGTKA

SEQ ID NO: 13468 - protein, 11 aa, Artificial Sequence
  Description of Artificial Sequence: Synthetic peptide
  Seed: RLLSFIRGTKV
RLLSFIRGTKR

SEQ ID NO: 13469 - protein, 11 aa, Artificial Sequence
  Description of Artificial Sequence: Synthetic peptide
  Seed: RLLSFIRGTKV
RLLSFIRGTKN

SEQ ID NO: 13470 - protein, 11 aa, Artificial Sequence
  Description of Artificial Sequence: Synthetic peptide
  Seed: RLLSFIRGTKV
RLLSFIRGTKD

SEQ ID NO: 13471 - protein, 11 aa, Artificial Sequence
  Description of Artificial Sequence: Synthetic peptide
  Seed: RLLSFIRGTKV
RLLSFIRGTKC

SEQ ID NO: 13472 - protein, 11 aa, Artificial Sequence
  Description of Artificial Sequence: Synthetic peptide
  Seed: RLLSFIRGTKV
RLLSFIRGTKE

SEQ ID NO: 13473 - protein, 11 aa, Artificial Sequence
  Description of Artificial Sequence: Synthetic peptide
  Seed: RLLSFIRGTKV
RLLSFIRGTKG

SEQ ID NO: 13474 - protein, 11 aa, Artificial Sequence
  Description of Artificial Sequence: Synthetic peptide
  Seed: RLLSFIRGTKV
RLLSFIRGTKH

SEQ ID NO: 13475 - protein, 11 aa, Artificial Sequence
  Description of Artificial Sequence: Synthetic peptide
  Seed: RLLSFIRGTKV
RLLSFIRGTKI

SEQ ID NO: 13476 - protein, 11 aa, Artificial Sequence
  Description of Artificial Sequence: Synthetic peptide
  Seed: RLLSFIRGTKV
RLLSFIRGTKL

SEQ ID NO: 13477 - protein, 11 aa, Artificial Sequence
  Description of Artificial Sequence: Synthetic peptide
  Seed: RLLSFIRGTKV
RLLSFIRGTKK

SEQ ID NO: 13478 - protein, 11 aa, Artificial Sequence
  Description of Artificial Sequence: Synthetic peptide
  Seed: RLLSFIRGTKV
RLLSFIRGTKM

SEQ ID NO: 13479 - protein, 11 aa, Artificial Sequence
  Description of Artificial Sequence: Synthetic peptide
  Seed: RLLSFIRGTKV
RLLSFIRGTKF

SEQ ID NO: 13480 - protein, 11 aa, Artificial Sequence
  Description of Artificial Sequence: Synthetic peptide
  Seed: RLLSFIRGTKV
RLLSFIRGTKP

SEQ ID NO: 13481 - protein, 11 aa, Artificial Sequence
  Description of Artificial Sequence: Synthetic peptide
  Seed: RLLSFIRGTKV
RLLSFIRGTKS

SEQ ID NO: 13482 - protein, 11 aa, Artificial Sequence
  Description of Artificial Sequence: Synthetic peptide
  Seed: RLLSFIRGTKV
RILSFIRGTKR

SEQ ID NO: 13483 - protein, 11 aa, Artificial Sequence
  Description of Artificial Sequence: Synthetic peptide
  Seed: RLLSFIRGTKV
RHLSFIRGTKK

SEQ ID NO: 13484 - protein, 11 aa, Artificial Sequence
  Description of Artificial Sequence: Synthetic peptide
  Seed: RLLSFIRGTKV
RGLSFIRGTKK

SEQ ID NO: 13485 - protein, 11 aa, Artificial Sequence
  Description of Artificial Sequence: Synthetic peptide
  Seed: RLLSFIRGTKV
RELSFIRGTKK

SEQ ID NO: 13486 - protein, 10 aa, Artificial Sequence
  Description of Artificial Sequence: Synthetic peptide
  Seed: RLLSFIRGTK
RVLSFIRGTG

SEQ ID NO: 13487 - protein, 10 aa, Artificial Sequence
  Description of Artificial Sequence: Synthetic peptide
  Seed: RLLSFIRGTK
RVLSFIRGTH

SEQ ID NO: 13488 - protein, 10 aa, Artificial Sequence
  Description of Artificial Sequence: Synthetic peptide
  Seed: RLLSFIRGTK
RVLSFIRGTI

SEQ ID NO: 13489 - protein, 10 aa, Artificial Sequence
  Description of Artificial Sequence: Synthetic peptide
  Seed: RLLSFIRGTK
RVLSFIRGTL

SEQ ID NO: 13490 - protein, 10 aa, Artificial Sequence
  Description of Artificial Sequence: Synthetic peptide
  Seed: RLLSFIRGTK
RVLSFIRGTM

SEQ ID NO: 13491 - protein, 10 aa, Artificial Sequence
  Description of Artificial Sequence: Synthetic peptide
  Seed: RLLSFIRGTK
RVLSFIRGTS

SEQ ID NO: 13492 - protein, 10 aa, Artificial Sequence
  Description of Artificial Sequence: Synthetic peptide
  Seed: RLLSFIRGTK
RVLSFIRGTT

SEQ ID NO: 13493 - protein, 10 aa, Artificial Sequence
  Description of Artificial Sequence: Synthetic peptide
  Seed: RLLSFIRGTK
RVLSFIRGTY

SEQ ID NO: 13494 - protein, 10 aa, Artificial Sequence
  Description of Artificial Sequence: Synthetic peptide
  Seed: RLLSFIRGTK
RVLSFIRGTV

SEQ ID NO: 13495 - protein, 11 aa, Artificial Sequence
  Description of Artificial Sequence: Synthetic peptide
  Seed: RLLSFIRGTKV
RALSFIRGTKK

SEQ ID NO: 13496 - protein, 11 aa, Artificial Sequence
  Description of Artificial Sequence: Synthetic peptide
  Seed: RLLSFIRGTKV
RRLSFIRGTKK

SEQ ID NO: 13497 - protein, 11 aa, Artificial Sequence
  Description of Artificial Sequence: Synthetic peptide
  Seed: RLLSFIRGTKV
RNLSFIRGTKK

SEQ ID NO: 13498 - protein, 11 aa, Artificial Sequence
  Description of Artificial Sequence: Synthetic peptide
  Seed: RLLSFIRGTKV
RDLSFIRGTKK

SEQ ID NO: 13499 - protein, 11 aa, Artificial Sequence
  Description of Artificial Sequence: Synthetic peptide
  Seed: RLLSFIRGTKV
RCLSFIRGTKK

SEQ ID NO: 13500 - protein, 11 aa, Artificial Sequence
  Description of Artificial Sequence: Synthetic peptide
  Seed: RLLSFIRGTKV
RQLSFIRGTKI

SEQ ID NO: 13501 - protein, 11 aa, Artificial Sequence
  Description of Artificial Sequence: Synthetic peptide
  Seed: RLLSFIRGTKV
RQLSFIRGTKL

SEQ ID NO: 13502 - protein, 11 aa, Artificial Sequence
  Description of Artificial Sequence: Synthetic peptide
  Seed: RLLSFIRGTKV
RQLSFIRGTKK

SEQ ID NO: 13503 - protein, 11 aa, Artificial Sequence
  Description of Artificial Sequence: Synthetic peptide
  Seed: RLLSFIRGTKV
RQLSFIRGTKV

SEQ ID NO: 13504 - protein, 10 aa, Artificial Sequence
  Description of Artificial Sequence: Synthetic peptide
  Seed: RLLSFIRGTK
RSLSFIRGTR

SEQ ID NO: 13505 - protein, 10 aa, Artificial Sequence
  Description of Artificial Sequence: Synthetic peptide
  Seed: RLLSFIRGTK
RPLSFIRGTY

SEQ ID NO: 13506 - protein, 11 aa, Artificial Sequence
  Description of Artificial Sequence: Synthetic peptide
  Seed: RMCSLMQGSTL
RWCSLMQGSTW

SEQ ID NO: 13507 - protein, 10 aa, Artificial Sequence
  Description of Artificial Sequence: Synthetic peptide
  Seed: RLLSFIRGTK
RNLSFIRGTK

SEQ ID NO: 13508 - protein, 10 aa, Artificial Sequence
  Description of Artificial Sequence: Synthetic peptide
  Seed: RLLSFIRGTK
RALSFIRGTM

SEQ ID NO: 13509 - protein, 10 aa, Artificial Sequence
  Description of Artificial Sequence: Synthetic peptide
  Seed: RLLSFIRGTK
RALSFIRGTS

SEQ ID NO: 13510 - protein, 10 aa, Artificial Sequence
  Description of Artificial Sequence: Synthetic peptide
  Seed: RLLSFIRGTK
RALSFIRGTY

SEQ ID NO: 13511 - protein, 10 aa, Artificial Sequence
  Description of Artificial Sequence: Synthetic peptide
  Seed: RLLSFIRGTK
RALSFIRGTV

SEQ ID NO: 13512 - protein, 10 aa, Artificial Sequence
  Description of Artificial Sequence: Synthetic peptide
  Seed: RLLSFIRGTK
RRLSFIRGTR

SEQ ID NO: 13513 - protein, 10 aa, Artificial Sequence
  Description of Artificial Sequence: Synthetic peptide
  Seed: RLLSFIRGTK
RRLSFIRGTK

SEQ ID NO: 13514 - protein, 10 aa, Artificial Sequence
  Description of Artificial Sequence: Synthetic peptide
  Seed: RLLSFIRGTK
RRLSFIRGTY

SEQ ID NO: 13515 - protein, 10 aa, Artificial Sequence
  Description of Artificial Sequence: Synthetic peptide
  Seed: RLLSFIRGTK
RNLSFIRGTA

SEQ ID NO: 13516 - protein, 10 aa, Artificial Sequence
  Description of Artificial Sequence: Synthetic peptide
  Seed: RLLSFIRGTK
RNLSFIRGTR

SEQ ID NO: 13517 - protein, 10 aa, Artificial Sequence
  Description of Artificial Sequence: Synthetic peptide
  Seed: RLLSFIRGTK
RNLSFIRGTY

SEQ ID NO: 13518 - protein, 10 aa, Artificial Sequence
  Description of Artificial Sequence: Synthetic peptide
  Seed: RLLSFIRGTK
RELSFIRGTR

SEQ ID NO: 13519 - protein, 10 aa, Artificial Sequence
  Description of Artificial Sequence: Synthetic peptide
  Seed: RLLSFIRGTK
RDLSFIRGTR

SEQ ID NO: 13520 - protein, 10 aa, Artificial Sequence
  Description of Artificial Sequence: Synthetic peptide
  Seed: RLLSFIRGTK
RDLSFIRGTK

SEQ ID NO: 13521 - protein, 10 aa, Artificial Sequence
  Description of Artificial Sequence: Synthetic peptide
  Seed: RLLSFIRGTK
RDLSFIRGTY

SEQ ID NO: 13522 - protein, 10 aa, Artificial Sequence
  Description of Artificial Sequence: Synthetic peptide
  Seed: RLLSFIRGTK
RCLSFIRGTR

SEQ ID NO: 13523 - protein, 10 aa, Artificial Sequence
  Description of Artificial Sequence: Synthetic peptide
  Seed: RLLSFIRGTK
RCLSFIRGTK

SEQ ID NO: 13524 - protein, 10 aa, Artificial Sequence
  Description of Artificial Sequence: Synthetic peptide
  Seed: RLLSFIRGTK
RCLSFIRGTY

SEQ ID NO: 13525 - protein, 10 aa, Artificial Sequence
  Description of Artificial Sequence: Synthetic peptide
  Seed: RLLSFIRGTK
RQLSFIRGTA

SEQ ID NO: 13526 - protein, 10 aa, Artificial Sequence
  Description of Artificial Sequence: Synthetic peptide
  Seed: RLLSFIRGTK
RQLSFIRGTR

SEQ ID NO: 13527 - protein, 10 aa, Artificial Sequence
  Description of Artificial Sequence: Synthetic peptide
  Seed: RLLSFIRGTK
RQLSFIRGTK

SEQ ID NO: 13528 - protein, 10 aa, Artificial Sequence
  Description of Artificial Sequence: Synthetic peptide
  Seed: RLLSFIRGTK
RALSFIRGTK

SEQ ID NO: 13529 - protein, 10 aa, Artificial Sequence
  Description of Artificial Sequence: Synthetic peptide
  Seed: RLLSFIRGTK
RALSFIRGTL

SEQ ID NO: 13530 - protein, 10 aa, Artificial Sequence
  Description of Artificial Sequence: Synthetic peptide
  Seed: RLLSFIRGTK
RALSFIRGTI

SEQ ID NO: 13531 - protein, 10 aa, Artificial Sequence
  Description of Artificial Sequence: Synthetic peptide
  Seed: RLLSFIRGTK
RALSFIRGTR

SEQ ID NO: 13532 - protein, 9 aa, Artificial Sequence
  Description of Artificial Sequence: Synthetic peptide
  Seed: RLLSFIRGT
RMLSFIRGV

SEQ ID NO: 13533 - protein, 9 aa, Artificial Sequence
  Description of Artificial Sequence: Synthetic peptide
  Seed: RLLSFIRGT
RFLSFIRGV

SEQ ID NO: 13534 - protein, 9 aa, Artificial Sequence
  Description of Artificial Sequence: Synthetic peptide
  Seed: RLLSFIRGT
RSLSFIRGA

SEQ ID NO: 13535 - protein, 9 aa, Artificial Sequence
  Description of Artificial Sequence: Synthetic peptide
  Seed: RLLSFIRGT
RSLSFIRGI

SEQ ID NO: 13536 - protein, 9 aa, Artificial Sequence
  Description of Artificial Sequence: Synthetic peptide
  Seed: RLLSFIRGT
RSLSFIRGL

SEQ ID NO: 13537 - protein, 9 aa, Artificial Sequence
  Description of Artificial Sequence: Synthetic peptide
  Seed: RLLSFIRGT
RSLSFIRGV

SEQ ID NO: 13538 - protein, 9 aa, Artificial Sequence
  Description of Artificial Sequence: Synthetic peptide
  Seed: RLLSFIRGT
RTLSFIRGA

SEQ ID NO: 13539 - protein, 9 aa, Artificial Sequence
  Description of Artificial Sequence: Synthetic peptide
  Seed: RLLSFIRGT
RTLSFIRGI

SEQ ID NO: 13540 - protein, 9 aa, Artificial Sequence
  Description of Artificial Sequence: Synthetic peptide
  Seed: RLLSFIRGT
RTLSFIRGL

SEQ ID NO: 13541 - protein, 9 aa, Artificial Sequence
  Description of Artificial Sequence: Synthetic peptide
  Seed: RLLSFIRGT
RTLSFIRGM

SEQ ID NO: 13542 - protein, 9 aa, Artificial Sequence
  Description of Artificial Sequence: Synthetic peptide
  Seed: RLLSFIRGT
RTLSFIRGV

SEQ ID NO: 13543 - protein, 9 aa, Artificial Sequence
  Description of Artificial Sequence: Synthetic peptide
  Seed: RLLSFIRGT
RVLSFIRGA

SEQ ID NO: 13544 - protein, 9 aa, Artificial Sequence
  Description of Artificial Sequence: Synthetic peptide
  Seed: RLLSFIRGT
RVLSFIRGC

SEQ ID NO: 13545 - protein, 9 aa, Artificial Sequence
  Description of Artificial Sequence: Synthetic peptide
  Seed: RLLSFIRGT
RVLSFIRGI

SEQ ID NO: 13546 - protein, 9 aa, Artificial Sequence
  Description of Artificial Sequence: Synthetic peptide
  Seed: RLLSFIRGT
RVLSFIRGL

SEQ ID NO: 13547 - protein, 9 aa, Artificial Sequence
  Description of Artificial Sequence: Synthetic peptide
  Seed: RLLSFIRGT
RVLSFIRGM

SEQ ID NO: 13548 - protein, 9 aa, Artificial Sequence
  Description of Artificial Sequence: Synthetic peptide
  Seed: RLLSFIRGT
RVLSFIRGV

SEQ ID NO: 13549 - protein, 10 aa, Artificial Sequence
  Description of Artificial Sequence: Synthetic peptide
  Seed: RLLSFIRGTK
RALSFIRGTA

SEQ ID NO: 13550 - protein, 10 aa, Artificial Sequence
  Description of Artificial Sequence: Synthetic peptide
  Seed: RLLSFIRGTK
RQLSFIRGTY

SEQ ID NO: 13551 - protein, 10 aa, Artificial Sequence
  Description of Artificial Sequence: Synthetic peptide
  Seed: RLLSFIRGTK
RELSFIRGTK

SEQ ID NO: 13552 - protein, 10 aa, Artificial Sequence
  Description of Artificial Sequence: Synthetic peptide
  Seed: RLLSFIRGTK
RPLSFIRGTK

SEQ ID NO: 13553 - protein, 10 aa, Artificial Sequence
  Description of Artificial Sequence: Synthetic peptide
  Seed: RLLSFIRGTK
RFLSFIRGTA

SEQ ID NO: 13554 - protein, 10 aa, Artificial Sequence
  Description of Artificial Sequence: Synthetic peptide
  Seed: RLLSFIRGTK
RMLSFIRGTA

SEQ ID NO: 13555 - protein, 10 aa, Artificial Sequence
  Description of Artificial Sequence: Synthetic peptide
  Seed: RLLSFIRGTK
RMLSFIRGTR

SEQ ID NO: 13556 - protein, 10 aa, Artificial Sequence
  Description of Artificial Sequence: Synthetic peptide
  Seed: RLLSFIRGTK
RMLSFIRGTH

SEQ ID NO: 13557 - protein, 10 aa, Artificial Sequence
  Description of Artificial Sequence: Synthetic peptide
  Seed: RLLSFIRGTK
RMLSFIRGTI

SEQ ID NO: 13558 - protein, 10 aa, Artificial Sequence
  Description of Artificial Sequence: Synthetic peptide
  Seed: RLLSFIRGTK
RMLSFIRGTL

SEQ ID NO: 13559 - protein, 10 aa, Artificial Sequence
  Description of Artificial Sequence: Synthetic peptide
  Seed: RLLSFIRGTK
RMLSFIRGTK

SEQ ID NO: 13560 - protein, 10 aa, Artificial Sequence
  Description of Artificial Sequence: Synthetic peptide
  Seed: RLLSFIRGTK
RMLSFIRGTM

SEQ ID NO: 13561 - protein, 10 aa, Artificial Sequence
  Description of Artificial Sequence: Synthetic peptide
  Seed: RLLSFIRGTK
RMLSFIRGTY

SEQ ID NO: 13562 - protein, 10 aa, Artificial Sequence
  Description of Artificial Sequence: Synthetic peptide
  Seed: RLLSFIRGTK
RMLSFIRGTV

SEQ ID NO: 13563 - protein, 10 aa, Artificial Sequence
  Description of Artificial Sequence: Synthetic peptide
  Seed: RLLSFIRGTK
RFLSFIRGTR

SEQ ID NO: 13564 - protein, 10 aa, Artificial Sequence
  Description of Artificial Sequence: Synthetic peptide
  Seed: RLLSFIRGTK
RELSFIRGTY

SEQ ID NO: 13565 - protein, 10 aa, Artificial Sequence
  Description of Artificial Sequence: Synthetic peptide
  Seed: RLLSFIRGTK
RFLSFIRGTH

SEQ ID NO: 13566 - protein, 10 aa, Artificial Sequence
  Description of Artificial Sequence: Synthetic peptide
  Seed: RLLSFIRGTK
RFLSFIRGTI

SEQ ID NO: 13567 - protein, 10 aa, Artificial Sequence
  Description of Artificial Sequence: Synthetic peptide
  Seed: RLLSFIRGTK
RFLSFIRGTL

SEQ ID NO: 13568 - protein, 10 aa, Artificial Sequence
  Description of Artificial Sequence: Synthetic peptide
  Seed: RLLSFIRGTK
RFLSFIRGTK

SEQ ID NO: 13569 - protein, 10 aa, Artificial Sequence
  Description of Artificial Sequence: Synthetic peptide
  Seed: RLLSFIRGTK
RFLSFIRGTM

SEQ ID NO: 13570 - protein, 10 aa, Artificial Sequence
  Description of Artificial Sequence: Synthetic peptide
  Seed: RLLSFIRGTK
RFLSFIRGTS

SEQ ID NO: 13571 - protein, 10 aa, Artificial Sequence
  Description of Artificial Sequence: Synthetic peptide
  Seed: RLLSFIRGTK
RFLSFIRGTY

SEQ ID NO: 13572 - protein, 10 aa, Artificial Sequence
  Description of Artificial Sequence: Synthetic peptide
  Seed: RLLSFIRGTK
RFLSFIRGTV

SEQ ID NO: 13573 - protein, 10 aa, Artificial Sequence
  Description of Artificial Sequence: Synthetic peptide
  Seed: RLLSFIRGTK
RPLSFIRGTR

SEQ ID NO: 13574 - protein, 10 aa, Artificial Sequence
  Description of Artificial Sequence: Synthetic peptide
  Seed: RLLSFIRGTK
RKLSFIRGTY

SEQ ID NO: 13575 - protein, 10 aa, Artificial Sequence
  Description of Artificial Sequence: Synthetic peptide
  Seed: RLLSFIRGTK
RKLSFIRGTK

SEQ ID NO: 13576 - protein, 10 aa, Artificial Sequence
  Description of Artificial Sequence: Synthetic peptide
  Seed: RLLSFIRGTK
RKLSFIRGTR

SEQ ID NO: 13577 - protein, 10 aa, Artificial Sequence
  Description of Artificial Sequence: Synthetic peptide
  Seed: RLLSFIRGTK
RLLSFIRGTY

SEQ ID NO: 13578 - protein, 10 aa, Artificial Sequence
  Description of Artificial Sequence: Synthetic peptide
  Seed: RLLSFIRGTK
RGLSFIRGTA

SEQ ID NO: 13579 - protein, 10 aa, Artificial Sequence
  Description of Artificial Sequence: Synthetic peptide
  Seed: RLLSFIRGTK
RGLSFIRGTR

SEQ ID NO: 13580 - protein, 10 aa, Artificial Sequence
  Description of Artificial Sequence: Synthetic peptide
  Seed: RLLSFIRGTK
RGLSFIRGTK

SEQ ID NO: 13581 - protein, 10 aa, Artificial Sequence
  Description of Artificial Sequence: Synthetic peptide
  Seed: RLLSFIRGTK
RGLSFIRGTY

SEQ ID NO: 13582 - protein, 10 aa, Artificial Sequence
  Description of Artificial Sequence: Synthetic peptide
  Seed: RLLSFIRGTK
RGLSFIRGTV

SEQ ID NO: 13583 - protein, 10 aa, Artificial Sequence
  Description of Artificial Sequence: Synthetic peptide
  Seed: RLLSFIRGTK
RHLSFIRGTR

SEQ ID NO: 13584 - protein, 10 aa, Artificial Sequence
  Description of Artificial Sequence: Synthetic peptide
  Seed: RLLSFIRGTK
RHLSFIRGTK

SEQ ID NO: 13585 - protein, 10 aa, Artificial Sequence
  Description of Artificial Sequence: Synthetic peptide
  Seed: RLLSFIRGTK
RHLSFIRGTY

SEQ ID NO: 13586 - protein, 10 aa, Artificial Sequence
  Description of Artificial Sequence: Synthetic peptide
  Seed: RLLSFIRGTK
RILSFIRGTA

SEQ ID NO: 13587 - protein, 10 aa, Artificial Sequence
  Description of Artificial Sequence: Synthetic peptide
  Seed: RLLSFIRGTK
RILSFIRGTR

SEQ ID NO: 13588 - protein, 10 aa, Artificial Sequence
  Description of Artificial Sequence: Synthetic peptide
  Seed: RLLSFIRGTK
RILSFIRGTI

SEQ ID NO: 13589 - protein, 10 aa, Artificial Sequence
  Description of Artificial Sequence: Synthetic peptide
  Seed: RLLSFIRGTK
RILSFIRGTL

SEQ ID NO: 13590 - protein, 10 aa, Artificial Sequence
  Description of Artificial Sequence: Synthetic peptide
  Seed: RLLSFIRGTK
RILSFIRGTK

SEQ ID NO: 13591 - protein, 10 aa, Artificial Sequence
  Description of Artificial Sequence: Synthetic peptide
  Seed: RLLSFIRGTK
RILSFIRGTM

SEQ ID NO: 13592 - protein, 10 aa, Artificial Sequence
  Description of Artificial Sequence: Synthetic peptide
  Seed: RLLSFIRGTK
RILSFIRGTY

SEQ ID NO: 13593 - protein, 10 aa, Artificial Sequence
  Description of Artificial Sequence: Synthetic peptide
  Seed: RLLSFIRGTK
RILSFIRGTV

SEQ ID NO: 13594 - protein, 10 aa, Artificial Sequence
  Description of Artificial Sequence: Synthetic peptide
  Seed: RLLSFIRGTK
RLLSFIRGTA

SEQ ID NO: 13595 - protein, 10 aa, Artificial Sequence
  Description of Artificial Sequence: Synthetic peptide
  Seed: RLLSFIRGTK
RLLSFIRGTR

SEQ ID NO: 13596 - protein, 10 aa, Artificial Sequence
  Description of Artificial Sequence: Synthetic peptide
  Seed: RLLSFIRGTK
RLLSFIRGTH

SEQ ID NO: 13597 - protein, 11 aa, Artificial Sequence
  Description of Artificial Sequence: Synthetic peptide
  Seed: RLLSFIRGTKV
RLLSFIRGTKT

SEQ ID NO: 13598 - protein, 11 aa, Artificial Sequence
  Description of Artificial Sequence: Synthetic peptide
  Seed: RLLSFIRGTKV
RLLSFIRGTKW

SEQ ID NO: 13599 - protein, 11 aa, Artificial Sequence
  Description of Artificial Sequence: Synthetic peptide
  Seed: RLLSFIRGTKV
RLLSFIRGTKY

SEQ ID NO: 13600 - protein, 11 aa, Artificial Sequence
  Description of Artificial Sequence: Synthetic peptide
  Seed: RMCSLMQGSTL
RHCSLMQGSTL

SEQ ID NO: 13601 - protein, 11 aa, Artificial Sequence
  Description of Artificial Sequence: Synthetic peptide
  Seed: RMCSLMQGSTL
RECSLMQGSTW

SEQ ID NO: 13602 - protein, 11 aa, Artificial Sequence
  Description of Artificial Sequence: Synthetic peptide
  Seed: RMCSLMQGSTL
RECSLMQGSTY

SEQ ID NO: 13603 - protein, 11 aa, Artificial Sequence
  Description of Artificial Sequence: Synthetic peptide
  Seed: RMCSLMQGSTL
RGCSLMQGSTI

SEQ ID NO: 13604 - protein, 11 aa, Artificial Sequence
  Description of Artificial Sequence: Synthetic peptide
  Seed: RMCSLMQGSTL
RGCSLMQGSTL

SEQ ID NO: 13605 - protein, 11 aa, Artificial Sequence
  Description of Artificial Sequence: Synthetic peptide
  Seed: RMCSLMQGSTL
RGCSLMQGSTM

SEQ ID NO: 13606 - protein, 11 aa, Artificial Sequence
  Description of Artificial Sequence: Synthetic peptide
  Seed: RMCSLMQGSTL
RGCSLMQGSTF

SEQ ID NO: 13607 - protein, 11 aa, Artificial Sequence
  Description of Artificial Sequence: Synthetic peptide
  Seed: RMCSLMQGSTL
RGCSLMQGSTW

SEQ ID NO: 13608 - protein, 11 aa, Artificial Sequence
  Description of Artificial Sequence: Synthetic peptide
  Seed: RMCSLMQGSTL
RGCSLMQGSTY

SEQ ID NO: 13609 - protein, 11 aa, Artificial Sequence
  Description of Artificial Sequence: Synthetic peptide
  Seed: RMCSLMQGSTL
RHCSLMQGSTI

SEQ ID NO: 13610 - protein, 11 aa, Artificial Sequence
  Description of Artificial Sequence: Synthetic peptide
  Seed: RMCSLMQGSTL
RHCSLMQGSTM

SEQ ID NO: 13611 - protein, 11 aa, Artificial Sequence
  Description of Artificial Sequence: Synthetic peptide
  Seed: RMCSLMQGSTL
RLCSLMQGSTL

SEQ ID NO: 13612 - protein, 11 aa, Artificial Sequence
  Description of Artificial Sequence: Synthetic peptide
  Seed: RMCSLMQGSTL
RHCSLMQGSTF

SEQ ID NO: 13613 - protein, 11 aa, Artificial Sequence
  Description of Artificial Sequence: Synthetic peptide
  Seed: RMCSLMQGSTL
RHCSLMQGSTW

SEQ ID NO: 13614 - protein, 11 aa, Artificial Sequence
  Description of Artificial Sequence: Synthetic peptide
  Seed: RMCSLMQGSTL
RHCSLMQGSTY

SEQ ID NO: 13615 - protein, 11 aa, Artificial Sequence
  Description of Artificial Sequence: Synthetic peptide
  Seed: RMCSLMQGSTL
RICSLMQGSTI

SEQ ID NO: 13616 - protein, 11 aa, Artificial Sequence
  Description of Artificial Sequence: Synthetic peptide
  Seed: RMCSLMQGSTL
RICSLMQGSTL

SEQ ID NO: 13617 - protein, 11 aa, Artificial Sequence
  Description of Artificial Sequence: Synthetic peptide
  Seed: RMCSLMQGSTL
RICSLMQGSTM

SEQ ID NO: 13618 - protein, 11 aa, Artificial Sequence
  Description of Artificial Sequence: Synthetic peptide
  Seed: RMCSLMQGSTL
RICSLMQGSTF

SEQ ID NO: 13619 - protein, 11 aa, Artificial Sequence
  Description of Artificial Sequence: Synthetic peptide
  Seed: RMCSLMQGSTL
RICSLMQGSTW

SEQ ID NO: 13620 - protein, 11 aa, Artificial Sequence
  Description of Artificial Sequence: Synthetic peptide
  Seed: RMCSLMQGSTL
RICSLMQGSTY

SEQ ID NO: 13621 - protein, 11 aa, Artificial Sequence
  Description of Artificial Sequence: Synthetic peptide
  Seed: RMCSLMQGSTL
RECSLMQGSTF

SEQ ID NO: 13622 - protein, 11 aa, Artificial Sequence
  Description of Artificial Sequence: Synthetic peptide
  Seed: RMCSLMQGSTL
RECSLMQGSTM

SEQ ID NO: 13623 - protein, 11 aa, Artificial Sequence
  Description of Artificial Sequence: Synthetic peptide
  Seed: RMCSLMQGSTL
RECSLMQGSTL

SEQ ID NO: 13624 - protein, 11 aa, Artificial Sequence
  Description of Artificial Sequence: Synthetic peptide
  Seed: RMCSLMQGSTL
RECSLMQGSTI

SEQ ID NO: 13625 - protein, 11 aa, Artificial Sequence
  Description of Artificial Sequence: Synthetic peptide
  Seed: RMCSLMQGSTL
RDCSLMQGSTI

SEQ ID NO: 13626 - protein, 11 aa, Artificial Sequence
  Description of Artificial Sequence: Synthetic peptide
  Seed: RMCSLMQGSTL
RDCSLMQGSTL

SEQ ID NO: 13627 - protein, 11 aa, Artificial Sequence
  Description of Artificial Sequence: Synthetic peptide
  Seed: RMCSLMQGSTL
RDCSLMQGSTM

SEQ ID NO: 13628 - protein, 11 aa, Artificial Sequence
  Description of Artificial Sequence: Synthetic peptide
  Seed: RMCSLMQGSTL
RDCSLMQGSTF

SEQ ID NO: 13629 - protein, 11 aa, Artificial Sequence
  Description of Artificial Sequence: Synthetic peptide
  Seed: RMCSLMQGSTL
RDCSLMQGSTW

SEQ ID NO: 13630 - protein, 11 aa, Artificial Sequence
  Description of Artificial Sequence: Synthetic peptide
  Seed: RMCSLMQGSTL
RDCSLMQGSTY

SEQ ID NO: 13631 - protein, 11 aa, Artificial Sequence
  Description of Artificial Sequence: Synthetic peptide
  Seed: RMCSLMQGSTL
RCCSLMQGSTI

SEQ ID NO: 13632 - protein, 11 aa, Artificial Sequence
  Description of Artificial Sequence: Synthetic peptide
  Seed: RMCSLMQGSTL
RCCSLMQGSTL

SEQ ID NO: 13633 - protein, 11 aa, Artificial Sequence
  Description of Artificial Sequence: Synthetic peptide
  Seed: RMCSLMQGSTL
RCCSLMQGSTM

SEQ ID NO: 13634 - protein, 11 aa, Artificial Sequence
  Description of Artificial Sequence: Synthetic peptide
  Seed: RMCSLMQGSTL
RCCSLMQGSTF

SEQ ID NO: 13635 - protein, 11 aa, Artificial Sequence
  Description of Artificial Sequence: Synthetic peptide
  Seed: RMCSLMQGSTL
RCCSLMQGSTW

SEQ ID NO: 13636 - protein, 11 aa, Artificial Sequence
  Description of Artificial Sequence: Synthetic peptide
  Seed: RMCSLMQGSTL
RCCSLMQGSTY

SEQ ID NO: 13637 - protein, 11 aa, Artificial Sequence
  Description of Artificial Sequence: Synthetic peptide
  Seed: RMCSLMQGSTL
RQCSLMQGSTH

SEQ ID NO: 13638 - protein, 11 aa, Artificial Sequence
  Description of Artificial Sequence: Synthetic peptide
  Seed: RMCSLMQGSTL
RQCSLMQGSTI

SEQ ID NO: 13639 - protein, 11 aa, Artificial Sequence
  Description of Artificial Sequence: Synthetic peptide
  Seed: RMCSLMQGSTL
RQCSLMQGSTL

SEQ ID NO: 13640 - protein, 11 aa, Artificial Sequence
  Description of Artificial Sequence: Synthetic peptide
  Seed: RMCSLMQGSTL
RQCSLMQGSTM

SEQ ID NO: 13641 - protein, 11 aa, Artificial Sequence
  Description of Artificial Sequence: Synthetic peptide
  Seed: RMCSLMQGSTL
RQCSLMQGSTW

SEQ ID NO: 13642 - protein, 11 aa, Artificial Sequence
  Description of Artificial Sequence: Synthetic peptide
  Seed: RMCSLMQGSTL
RLCSLMQGSTI

SEQ ID NO: 13643 - protein, 11 aa, Artificial Sequence
  Description of Artificial Sequence: Synthetic peptide
  Seed: RMCSLMQGSTL
RLCSLMQGSTM

SEQ ID NO: 13644 - protein, 11 aa, Artificial Sequence
  Description of Artificial Sequence: Synthetic peptide
  Seed: RLLSFIRGTKV
RKLSFIRGTKK

SEQ ID NO: 13645 - protein, 11 aa, Artificial Sequence
  Description of Artificial Sequence: Synthetic peptide
  Seed: RMCSLMQGSTL
RSCSLMQGSTY

SEQ ID NO: 13646 - protein, 11 aa, Artificial Sequence
  Description of Artificial Sequence: Synthetic peptide
  Seed: RMCSLMQGSTL
RPCSLMQGSTM

SEQ ID NO: 13647 - protein, 11 aa, Artificial Sequence
  Description of Artificial Sequence: Synthetic peptide
  Seed: RMCSLMQGSTL
RPCSLMQGSTF

SEQ ID NO: 13648 - protein, 11 aa, Artificial Sequence
  Description of Artificial Sequence: Synthetic peptide
  Seed: RMCSLMQGSTL
RPCSLMQGSTW

SEQ ID NO: 13649 - protein, 11 aa, Artificial Sequence
  Description of Artificial Sequence: Synthetic peptide
  Seed: RMCSLMQGSTL
RPCSLMQGSTY

SEQ ID NO: 13650 - protein, 11 aa, Artificial Sequence
  Description of Artificial Sequence: Synthetic peptide
  Seed: RMCSLMQGSTL
RSCSLMQGSTI

SEQ ID NO: 13651 - protein, 11 aa, Artificial Sequence
  Description of Artificial Sequence: Synthetic peptide
  Seed: RMCSLMQGSTL
RSCSLMQGSTL

SEQ ID NO: 13652 - protein, 11 aa, Artificial Sequence
  Description of Artificial Sequence: Synthetic peptide
  Seed: RMCSLMQGSTL
RSCSLMQGSTM

SEQ ID NO: 13653 - protein, 11 aa, Artificial Sequence
  Description of Artificial Sequence: Synthetic peptide
  Seed: RMCSLMQGSTL
RSCSLMQGSTF

SEQ ID NO: 13654 - protein, 11 aa, Artificial Sequence
  Description of Artificial Sequence: Synthetic peptide
  Seed: RMCSLMQGSTL
RSCSLMQGSTW

SEQ ID NO: 13655 - protein, 11 aa, Artificial Sequence
  Description of Artificial Sequence: Synthetic peptide
  Seed: RMCSLMQGSTL
RTCSLMQGSTI

SEQ ID NO: 13656 - protein, 11 aa, Artificial Sequence
  Description of Artificial Sequence: Synthetic peptide
  Seed: RMCSLMQGSTL
RLCSLMQGSTF

SEQ ID NO: 13657 - protein, 11 aa, Artificial Sequence
  Description of Artificial Sequence: Synthetic peptide
  Seed: RMCSLMQGSTL
RTCSLMQGSTL

SEQ ID NO: 13658 - protein, 11 aa, Artificial Sequence
  Description of Artificial Sequence: Synthetic peptide
  Seed: RMCSLMQGSTL
RTCSLMQGSTM

SEQ ID NO: 13659 - protein, 11 aa, Artificial Sequence
  Description of Artificial Sequence: Synthetic peptide
  Seed: RMCSLMQGSTL
RTCSLMQGSTF

SEQ ID NO: 13660 - protein, 11 aa, Artificial Sequence
  Description of Artificial Sequence: Synthetic peptide
  Seed: RMCSLMQGSTL
RTCSLMQGSTW

SEQ ID NO: 13661 - protein, 11 aa, Artificial Sequence
  Description of Artificial Sequence: Synthetic peptide
  Seed: RMCSLMQGSTL
RTCSLMQGSTY

SEQ ID NO: 13662 - protein, 11 aa, Artificial Sequence
  Description of Artificial Sequence: Synthetic peptide
  Seed: RMCSLMQGSTL
RWCSLMQGSTI

SEQ ID NO: 13663 - protein, 11 aa, Artificial Sequence
  Description of Artificial Sequence: Synthetic peptide
  Seed: RMCSLMQGSTL
RWCSLMQGSTL

SEQ ID NO: 13664 - protein, 11 aa, Artificial Sequence
  Description of Artificial Sequence: Synthetic peptide
  Seed: RMCSLMQGSTL
RWCSLMQGSTM

SEQ ID NO: 13665 - protein, 11 aa, Artificial Sequence
  Description of Artificial Sequence: Synthetic peptide
  Seed: RMCSLMQGSTL
RWCSLMQGSTF

SEQ ID NO: 13666 - protein, 11 aa, Artificial Sequence
  Description of Artificial Sequence: Synthetic peptide
  Seed: RMCSLMQGSTL
RPCSLMQGSTL

SEQ ID NO: 13667 - protein, 11 aa, Artificial Sequence
  Description of Artificial Sequence: Synthetic peptide
  Seed: RMCSLMQGSTL
RPCSLMQGSTI

SEQ ID NO: 13668 - protein, 11 aa, Artificial Sequence
  Description of Artificial Sequence: Synthetic peptide
  Seed: RMCSLMQGSTL
RFCSLMQGSTY

SEQ ID NO: 13669 - protein, 11 aa, Artificial Sequence
  Description of Artificial Sequence: Synthetic peptide
  Seed: RMCSLMQGSTL
RFCSLMQGSTW

SEQ ID NO: 13670 - protein, 11 aa, Artificial Sequence
  Description of Artificial Sequence: Synthetic peptide
  Seed: RMCSLMQGSTL
RLCSLMQGSTW

SEQ ID NO: 13671 - protein, 11 aa, Artificial Sequence
  Description of Artificial Sequence: Synthetic peptide
  Seed: RMCSLMQGSTL
RLCSLMQGSTY

SEQ ID NO: 13672 - protein, 11 aa, Artificial Sequence
  Description of Artificial Sequence: Synthetic peptide
  Seed: RMCSLMQGSTL
RLCSLMQGSTV

SEQ ID NO: 13673 - protein, 11 aa, Artificial Sequence
  Description of Artificial Sequence: Synthetic peptide
  Seed: RMCSLMQGSTL
RKCSLMQGSTI

SEQ ID NO: 13674 - protein, 11 aa, Artificial Sequence
  Description of Artificial Sequence: Synthetic peptide
  Seed: RMCSLMQGSTL
RKCSLMQGSTL

SEQ ID NO: 13675 - protein, 11 aa, Artificial Sequence
  Description of Artificial Sequence: Synthetic peptide
  Seed: RMCSLMQGSTL
RKCSLMQGSTM

SEQ ID NO: 13676 - protein, 11 aa, Artificial Sequence
  Description of Artificial Sequence: Synthetic peptide
  Seed: RMCSLMQGSTL
RKCSLMQGSTF

SEQ ID NO: 13677 - protein, 11 aa, Artificial Sequence
  Description of Artificial Sequence: Synthetic peptide
  Seed: RMCSLMQGSTL
RKCSLMQGSTW

SEQ ID NO: 13678 - protein, 11 aa, Artificial Sequence
  Description of Artificial Sequence: Synthetic peptide
  Seed: RMCSLMQGSTL
RKCSLMQGSTY

SEQ ID NO: 13679 - protein, 11 aa, Artificial Sequence
  Description of Artificial Sequence: Synthetic peptide
  Seed: RMCSLMQGSTL
RMCSLMQGSTI

SEQ ID NO: 13680 - protein, 11 aa, Artificial Sequence
  Description of Artificial Sequence: Synthetic peptide
  Seed: RMCSLMQGSTL
RMCSLMQGSTM

SEQ ID NO: 13681 - protein, 11 aa, Artificial Sequence
  Description of Artificial Sequence: Synthetic peptide
  Seed: RMCSLMQGSTL
RMCSLMQGSTW

SEQ ID NO: 13682 - protein, 11 aa, Artificial Sequence
  Description of Artificial Sequence: Synthetic peptide
  Seed: RMCSLMQGSTL
RMCSLMQGSTY

SEQ ID NO: 13683 - protein, 11 aa, Artificial Sequence
  Description of Artificial Sequence: Synthetic peptide
  Seed: RMCSLMQGSTL
RMCSLMQGSTV

SEQ ID NO: 13684 - protein, 11 aa, Artificial Sequence
  Description of Artificial Sequence: Synthetic peptide
  Seed: RMCSLMQGSTL
RFCSLMQGSTI

SEQ ID NO: 13685 - protein, 11 aa, Artificial Sequence
  Description of Artificial Sequence: Synthetic peptide
  Seed: RMCSLMQGSTL
RFCSLMQGSTL

SEQ ID NO: 13686 - protein, 11 aa, Artificial Sequence
  Description of Artificial Sequence: Synthetic peptide
  Seed: RMCSLMQGSTL
RFCSLMQGSTM

SEQ ID NO: 13687 - protein, 11 aa, Artificial Sequence
  Description of Artificial Sequence: Synthetic peptide
  Seed: RMCSLMQGSTL
RFCSLMQGSTF

SEQ ID NO: 13688 - protein, 11 aa, Artificial Sequence
  Description of Artificial Sequence: Synthetic peptide
  Seed: RMCSLMQGSTL
RNCSLMQGSTY

SEQ ID NO: 13689 - protein, 11 aa, Artificial Sequence
  Description of Artificial Sequence: Synthetic peptide
  Seed: RMCSLMQGSTL
RNCSLMQGSTW

SEQ ID NO: 13690 - protein, 11 aa, Artificial Sequence
  Description of Artificial Sequence: Synthetic peptide
  Seed: RMCSLMQGSTL
RNCSLMQGSTF

SEQ ID NO: 13691 - protein, 11 aa, Artificial Sequence
  Description of Artificial Sequence: Synthetic peptide
  Seed: RLLSFIRGTKV
RYLSFIRGTKV

SEQ ID NO: 13692 - protein, 11 aa, Artificial Sequence
  Description of Artificial Sequence: Synthetic peptide
  Seed: RLLSFIRGTKV
RPLSFIRGTKK

SEQ ID NO: 13693 - protein, 11 aa, Artificial Sequence
  Description of Artificial Sequence: Synthetic peptide
  Seed: RLLSFIRGTKV
RSLSFIRGTKK

SEQ ID NO: 13694 - protein, 11 aa, Artificial Sequence
  Description of Artificial Sequence: Synthetic peptide
  Seed: RLLSFIRGTKV
RTLSFIRGTKR

SEQ ID NO: 13695 - protein, 11 aa, Artificial Sequence
  Description of Artificial Sequence: Synthetic peptide
  Seed: RLLSFIRGTKV
RTLSFIRGTKK

SEQ ID NO: 13696 - protein, 11 aa, Artificial Sequence
  Description of Artificial Sequence: Synthetic peptide
  Seed: RLLSFIRGTKV
RTLSFIRGTKY

SEQ ID NO: 13697 - protein, 11 aa, Artificial Sequence
  Description of Artificial Sequence: Synthetic peptide
  Seed: RLLSFIRGTKV
RTLSFIRGTKV

SEQ ID NO: 13698 - protein, 11 aa, Artificial Sequence
  Description of Artificial Sequence: Synthetic peptide
  Seed: RLLSFIRGTKV
RWLSFIRGTKK

SEQ ID NO: 13699 - protein, 11 aa, Artificial Sequence
  Description of Artificial Sequence: Synthetic peptide
  Seed: RLLSFIRGTKV
RYLSFIRGTKL

SEQ ID NO: 13700 - protein, 11 aa, Artificial Sequence
  Description of Artificial Sequence: Synthetic peptide
  Seed: RLLSFIRGTKV
RYLSFIRGTKK

SEQ ID NO: 13701 - protein, 11 aa, Artificial Sequence
  Description of Artificial Sequence: Synthetic peptide
  Seed: RLLSFIRGTKV
RVLSFIRGTKR

SEQ ID NO: 13702 - protein, 11 aa, Artificial Sequence
  Description of Artificial Sequence: Synthetic peptide
  Seed: RMCSLMQGSTL
RNCSLMQGSTM

SEQ ID NO: 13703 - protein, 11 aa, Artificial Sequence
  Description of Artificial Sequence: Synthetic peptide
  Seed: RLLSFIRGTKV
RVLSFIRGTKK

SEQ ID NO: 13704 - protein, 11 aa, Artificial Sequence
  Description of Artificial Sequence: Synthetic peptide
  Seed: RLLSFIRGTKV
RVLSFIRGTKY

SEQ ID NO: 13705 - protein, 9 aa, Artificial Sequence
  Description of Artificial Sequence: Synthetic peptide
  Seed: RMCNILKGK
RACNILKGR

SEQ ID NO: 13706 - protein, 9 aa, Artificial Sequence
  Description of Artificial Sequence: Synthetic peptide
  Seed: RMCNILKGK
RACNILKGK

SEQ ID NO: 13707 - protein, 9 aa, Artificial Sequence
  Description of Artificial Sequence: Synthetic peptide
  Seed: RMCNILKGK
RNCNILKGR

SEQ ID NO: 13708 - protein, 9 aa, Artificial Sequence
  Description of Artificial Sequence: Synthetic peptide
  Seed: RMCNILKGK
RNCNILKGK

SEQ ID NO: 13709 - protein, 9 aa, Artificial Sequence
  Description of Artificial Sequence: Synthetic peptide
  Seed: RMCNILKGK
RCCNILKGR

SEQ ID NO: 13710 - protein, 9 aa, Artificial Sequence
  Description of Artificial Sequence: Synthetic peptide
  Seed: RMCNILKGK
RQCNILKGR

SEQ ID NO: 13711 - protein, 11 aa, Artificial Sequence
  Description of Artificial Sequence: Synthetic peptide
  Seed: RLLSFIRGTKV
RFLSFIRGTKV

SEQ ID NO: 13712 - protein, 11 aa, Artificial Sequence
  Description of Artificial Sequence: Synthetic peptide
  Seed: RLLSFIRGTKV
RFLSFIRGTKK

SEQ ID NO: 13713 - protein, 11 aa, Artificial Sequence
  Description of Artificial Sequence: Synthetic peptide
  Seed: RLLSFIRGTKV
RFLSFIRGTKL

SEQ ID NO: 13714 - protein, 11 aa, Artificial Sequence
  Description of Artificial Sequence: Synthetic peptide
  Seed: RLLSFIRGTKV
RMLSFIRGTKV

SEQ ID NO: 13715 - protein, 11 aa, Artificial Sequence
  Description of Artificial Sequence: Synthetic peptide
  Seed: RLLSFIRGTKV
RMLSFIRGTKA

SEQ ID NO: 13716 - protein, 11 aa, Artificial Sequence
  Description of Artificial Sequence: Synthetic peptide
  Seed: RLLSFIRGTKV
RMLSFIRGTKR

SEQ ID NO: 13717 - protein, 11 aa, Artificial Sequence
  Description of Artificial Sequence: Synthetic peptide
  Seed: RLLSFIRGTKV
RMLSFIRGTKN

SEQ ID NO: 13718 - protein, 11 aa, Artificial Sequence
  Description of Artificial Sequence: Synthetic peptide
  Seed: RLLSFIRGTKV
RMLSFIRGTKD

SEQ ID NO: 13719 - protein, 11 aa, Artificial Sequence
  Description of Artificial Sequence: Synthetic peptide
  Seed: RLLSFIRGTKV
RMLSFIRGTKC

SEQ ID NO: 13720 - protein, 11 aa, Artificial Sequence
  Description of Artificial Sequence: Synthetic peptide
  Seed: RLLSFIRGTKV
RMLSFIRGTKQ

SEQ ID NO: 13721 - protein, 11 aa, Artificial Sequence
  Description of Artificial Sequence: Synthetic peptide
  Seed: RLLSFIRGTKV
RMLSFIRGTKE

SEQ ID NO: 13722 - protein, 11 aa, Artificial Sequence
  Description of Artificial Sequence: Synthetic peptide
  Seed: RLLSFIRGTKV
RMLSFIRGTKG

SEQ ID NO: 13723 - protein, 11 aa, Artificial Sequence
  Description of Artificial Sequence: Synthetic peptide
  Seed: RLLSFIRGTKV
RMLSFIRGTKH

SEQ ID NO: 13724 - protein, 11 aa, Artificial Sequence
  Description of Artificial Sequence: Synthetic peptide
  Seed: RLLSFIRGTKV
RMLSFIRGTKI

SEQ ID NO: 13725 - protein, 11 aa, Artificial Sequence
  Description of Artificial Sequence: Synthetic peptide
  Seed: RLLSFIRGTKV
RMLSFIRGTKL

SEQ ID NO: 13726 - protein, 11 aa, Artificial Sequence
  Description of Artificial Sequence: Synthetic peptide
  Seed: RLLSFIRGTKV
RMLSFIRGTKK

SEQ ID NO: 13727 - protein, 11 aa, Artificial Sequence
  Description of Artificial Sequence: Synthetic peptide
  Seed: RLLSFIRGTKV
RMLSFIRGTKM

SEQ ID NO: 13728 - protein, 11 aa, Artificial Sequence
  Description of Artificial Sequence: Synthetic peptide
  Seed: RLLSFIRGTKV
RMLSFIRGTKF

SEQ ID NO: 13729 - protein, 11 aa, Artificial Sequence
  Description of Artificial Sequence: Synthetic peptide
  Seed: RLLSFIRGTKV
RMLSFIRGTKP

SEQ ID NO: 13730 - protein, 11 aa, Artificial Sequence
  Description of Artificial Sequence: Synthetic peptide
  Seed: RLLSFIRGTKV
RMLSFIRGTKS

SEQ ID NO: 13731 - protein, 11 aa, Artificial Sequence
  Description of Artificial Sequence: Synthetic peptide
  Seed: RLLSFIRGTKV
RMLSFIRGTKT

SEQ ID NO: 13732 - protein, 11 aa, Artificial Sequence
  Description of Artificial Sequence: Synthetic peptide
  Seed: RLLSFIRGTKV
RMLSFIRGTKW

SEQ ID NO: 13733 - protein, 11 aa, Artificial Sequence
  Description of Artificial Sequence: Synthetic peptide
  Seed: RLLSFIRGTKV
RMLSFIRGTKY

SEQ ID NO: 13734 - protein, 9 aa, Artificial Sequence
  Description of Artificial Sequence: Synthetic peptide
  Seed: RMCNILKGK
RQCNILKGK

SEQ ID NO: 13735 - protein, 9 aa, Artificial Sequence
  Description of Artificial Sequence: Synthetic peptide
  Seed: RMCNILKGK
RGCNILKGR

SEQ ID NO: 13736 - protein, 9 aa, Artificial Sequence
  Description of Artificial Sequence: Synthetic peptide
  Seed: RMCNILKGK
RGCNILKGK

SEQ ID NO: 13737 - protein, 9 aa, Artificial Sequence
  Description of Artificial Sequence: Synthetic peptide
  Seed: RMCNILKGK
RVCNILKGK

SEQ ID NO: 13738 - protein, 10 aa, Artificial Sequence
  Description of Artificial Sequence: Synthetic peptide
  Seed: RMCNILKGKF
RQCNILKGKF

SEQ ID NO: 13739 - protein, 10 aa, Artificial Sequence
  Description of Artificial Sequence: Synthetic peptide
  Seed: RMCNILKGKF
RQCNILKGKY

SEQ ID NO: 13740 - protein, 10 aa, Artificial Sequence
  Description of Artificial Sequence: Synthetic peptide
  Seed: RMCNILKGKF
RLCNILKGKF

SEQ ID NO: 13741 - protein, 10 aa, Artificial Sequence
  Description of Artificial Sequence: Synthetic peptide
  Seed: RMCNILKGKF
RLCNILKGKY

SEQ ID NO: 13742 - protein, 10 aa, Artificial Sequence
  Description of Artificial Sequence: Synthetic peptide
  Seed: RMCNILKGKF
RMCNILKGKY

SEQ ID NO: 13743 - protein, 11 aa, Artificial Sequence
  Description of Artificial Sequence: Synthetic peptide
  Seed: RMCSLMQGSTL
RACSLMQGSTI

SEQ ID NO: 13744 - protein, 11 aa, Artificial Sequence
  Description of Artificial Sequence: Synthetic peptide
  Seed: RMCSLMQGSTL
RACSLMQGSTL

SEQ ID NO: 13745 - protein, 11 aa, Artificial Sequence
  Description of Artificial Sequence: Synthetic peptide
  Seed: RMCSLMQGSTL
RACSLMQGSTM

SEQ ID NO: 13746 - protein, 11 aa, Artificial Sequence
  Description of Artificial Sequence: Synthetic peptide
  Seed: RMCSLMQGSTL
RACSLMQGSTF

SEQ ID NO: 13747 - protein, 11 aa, Artificial Sequence
  Description of Artificial Sequence: Synthetic peptide
  Seed: RMCSLMQGSTL
RACSLMQGSTW

SEQ ID NO: 13748 - protein, 11 aa, Artificial Sequence
  Description of Artificial Sequence: Synthetic peptide
  Seed: RMCSLMQGSTL
RACSLMQGSTY

SEQ ID NO: 13749 - protein, 11 aa, Artificial Sequence
  Description of Artificial Sequence: Synthetic peptide
  Seed: RMCSLMQGSTL
RRCSLMQGSTI

SEQ ID NO: 13750 - protein, 11 aa, Artificial Sequence
  Description of Artificial Sequence: Synthetic peptide
  Seed: RMCSLMQGSTL
RRCSLMQGSTL

SEQ ID NO: 13751 - protein, 11 aa, Artificial Sequence
  Description of Artificial Sequence: Synthetic peptide
  Seed: RMCSLMQGSTL
RRCSLMQGSTM

SEQ ID NO: 13752 - protein, 11 aa, Artificial Sequence
  Description of Artificial Sequence: Synthetic peptide
  Seed: RMCSLMQGSTL
RRCSLMQGSTF

SEQ ID NO: 13753 - protein, 11 aa, Artificial Sequence
  Description of Artificial Sequence: Synthetic peptide
  Seed: RMCSLMQGSTL
RRCSLMQGSTW

SEQ ID NO: 13754 - protein, 11 aa, Artificial Sequence
  Description of Artificial Sequence: Synthetic peptide
  Seed: RMCSLMQGSTL
RRCSLMQGSTY

SEQ ID NO: 13755 - protein, 11 aa, Artificial Sequence
  Description of Artificial Sequence: Synthetic peptide
  Seed: RMCSLMQGSTL
RNCSLMQGSTI

SEQ ID NO: 13756 - protein, 11 aa, Artificial Sequence
  Description of Artificial Sequence: Synthetic peptide
  Seed: RMCSLMQGSTL
RNCSLMQGSTL

SEQ ID NO: 13757 - protein, 10 aa, Artificial Sequence
  Description of Artificial Sequence: Synthetic peptide
  Seed: RMCNILKGKF
RQCNILKGKM

SEQ ID NO: 13758 - protein, 9 aa, Artificial Sequence
  Description of Artificial Sequence: Synthetic peptide
  Seed: RMCNILKGK
RVCNILKGR

SEQ ID NO: 13759 - protein, 9 aa, Artificial Sequence
  Description of Artificial Sequence: Synthetic peptide
  Seed: RMCNILKGK
RICNILKGR

SEQ ID NO: 13760 - protein, 9 aa, Artificial Sequence
  Description of Artificial Sequence: Synthetic peptide
  Seed: RMCNILKGK
RVCNILKGA

SEQ ID NO: 13761 - protein, 9 aa, Artificial Sequence
  Description of Artificial Sequence: Synthetic peptide
  Seed: RMCNILKGK
RICNILKGK

SEQ ID NO: 13762 - protein, 9 aa, Artificial Sequence
  Description of Artificial Sequence: Synthetic peptide
  Seed: RMCNILKGK
RLCNILKGR

SEQ ID NO: 13763 - protein, 9 aa, Artificial Sequence
  Description of Artificial Sequence: Synthetic peptide
  Seed: RMCNILKGK
RLCNILKGK

SEQ ID NO: 13764 - protein, 9 aa, Artificial Sequence
  Description of Artificial Sequence: Synthetic peptide
  Seed: RMCNILKGK
RMCNILKGR

SEQ ID NO: 13765 - protein, 9 aa, Artificial Sequence
  Description of Artificial Sequence: Synthetic peptide
  Seed: RMCNILKGK
RMCNILKGY

SEQ ID NO: 13766 - protein, 9 aa, Artificial Sequence
  Description of Artificial Sequence: Synthetic peptide
  Seed: RMCNILKGK
RFCNILKGR

SEQ ID NO: 13767 - protein, 9 aa, Artificial Sequence
  Description of Artificial Sequence: Synthetic peptide
  Seed: RMCNILKGK
RFCNILKGK

SEQ ID NO: 13768 - protein, 9 aa, Artificial Sequence
  Description of Artificial Sequence: Synthetic peptide
  Seed: RMCNILKGK
RSCNILKGA

SEQ ID NO: 13769 - protein, 9 aa, Artificial Sequence
  Description of Artificial Sequence: Synthetic peptide
  Seed: RMCNILKGK
RSCNILKGR

SEQ ID NO: 13770 - protein, 9 aa, Artificial Sequence
  Description of Artificial Sequence: Synthetic peptide
  Seed: RMCNILKGK
RSCNILKGK

SEQ ID NO: 13771 - protein, 9 aa, Artificial Sequence
  Description of Artificial Sequence: Synthetic peptide
  Seed: RMCNILKGK
RTCNILKGA

SEQ ID NO: 13772 - protein, 9 aa, Artificial Sequence
  Description of Artificial Sequence: Synthetic peptide
  Seed: RMCNILKGK
RTCNILKGR

SEQ ID NO: 13773 - protein, 9 aa, Artificial Sequence
  Description of Artificial Sequence: Synthetic peptide
  Seed: RMCNILKGK
RTCNILKGI

SEQ ID NO: 13774 - protein, 9 aa, Artificial Sequence
  Description of Artificial Sequence: Synthetic peptide
  Seed: RMCNILKGK
RTCNILKGK

SEQ ID NO: 13775 - protein, 9 aa, Artificial Sequence
  Description of Artificial Sequence: Synthetic peptide
  Seed: RMCNILKGK
RTCNILKGV

SEQ ID NO: 13776 - protein, 9 aa, Artificial Sequence
  Description of Artificial Sequence: Synthetic peptide
  Seed: RMCNILKGK
RWCNILKGR

SEQ ID NO: 13777 - protein, 9 aa, Artificial Sequence
  Description of Artificial Sequence: Synthetic peptide
  Seed: RMCNILKGK
RWCNILKGK

SEQ ID NO: 13778 - protein, 9 aa, Artificial Sequence
  Description of Artificial Sequence: Synthetic peptide
  Seed: RMCNILKGK
RYCNILKGR

SEQ ID NO: 13779 - protein, 9 aa, Artificial Sequence
  Description of Artificial Sequence: Synthetic peptide
  Seed: RMCNILKGK
RYCNILKGK

SEQ ID NO: 13780 - protein, 9 aa, Artificial Sequence
  Description of Artificial Sequence: Synthetic peptide
  Seed: RLIQNSITI
RLIQNSITA

SEQ ID NO: 13781 - protein, 9 aa, Artificial Sequence
  Description of Artificial Sequence: Synthetic peptide
  Seed: RLIQNSITI
RIIQNSITY

SEQ ID NO: 13782 - protein, 10 aa, Artificial Sequence
  Description of Artificial Sequence: Synthetic peptide
  Seed: RGTKVSPRGK
RETKVSPRGK

SEQ ID NO: 13783 - protein, 10 aa, Artificial Sequence
  Description of Artificial Sequence: Synthetic peptide
  Seed: RGTRVVPRGQ
RVTRVVPRGY

SEQ ID NO: 13784 - protein, 10 aa, Artificial Sequence
  Description of Artificial Sequence: Synthetic peptide
  Seed: RGTRVVPRGQ
RVTRVVPRGG

SEQ ID NO: 13785 - protein, 10 aa, Artificial Sequence
  Description of Artificial Sequence: Synthetic peptide
  Seed: RGTRVVPRGQ
RVTRVVPRGI

SEQ ID NO: 13786 - protein, 10 aa, Artificial Sequence
  Description of Artificial Sequence: Synthetic peptide
  Seed: RGTRVVPRGQ
RVTRVVPRGL

SEQ ID NO: 13787 - protein, 10 aa, Artificial Sequence
  Description of Artificial Sequence: Synthetic peptide
  Seed: RGTRVVPRGQ
RVTRVVPRGK

SEQ ID NO: 13788 - protein, 10 aa, Artificial Sequence
  Description of Artificial Sequence: Synthetic peptide
  Seed: RGTRVVPRGQ
RVTRVVPRGM

SEQ ID NO: 13789 - protein, 10 aa, Artificial Sequence
  Description of Artificial Sequence: Synthetic peptide
  Seed: RGTRVVPRGQ
RVTRVVPRGF

SEQ ID NO: 13790 - protein, 10 aa, Artificial Sequence
  Description of Artificial Sequence: Synthetic peptide
  Seed: RGTRVVPRGQ
RVTRVVPRGP

SEQ ID NO: 13791 - protein, 10 aa, Artificial Sequence
  Description of Artificial Sequence: Synthetic peptide
  Seed: RGTRVVPRGQ
RVTRVVPRGS

SEQ ID NO: 13792 - protein, 10 aa, Artificial Sequence
  Description of Artificial Sequence: Synthetic peptide
  Seed: RGTRVVPRGQ
RVTRVVPRGT

SEQ ID NO: 13793 - protein, 10 aa, Artificial Sequence
  Description of Artificial Sequence: Synthetic peptide
  Seed: RGTRVVPRGQ
RVTRVVPRGV

SEQ ID NO: 13794 - protein, 10 aa, Artificial Sequence
  Description of Artificial Sequence: Synthetic peptide
  Seed: RGVFELSDEK
REVFELSDER

SEQ ID NO: 13795 - protein, 10 aa, Artificial Sequence
  Description of Artificial Sequence: Synthetic peptide
  Seed: RGVFELSDEK
RAVFELSDER

SEQ ID NO: 13796 - protein, 10 aa, Artificial Sequence
  Description of Artificial Sequence: Synthetic peptide
  Seed: RGVFELSDEK
RRVFELSDER

SEQ ID NO: 13797 - protein, 10 aa, Artificial Sequence
  Description of Artificial Sequence: Synthetic peptide
  Seed: RGVFELSDEK
RNVFELSDER

SEQ ID NO: 13798 - protein, 10 aa, Artificial Sequence
  Description of Artificial Sequence: Synthetic peptide
  Seed: RGVFELSDEK
RNVFELSDEK

SEQ ID NO: 13799 - protein, 10 aa, Artificial Sequence
  Description of Artificial Sequence: Synthetic peptide
  Seed: RGVFELSDEK
RDVFELSDER

SEQ ID NO: 13800 - protein, 10 aa, Artificial Sequence
  Description of Artificial Sequence: Synthetic peptide
  Seed: RGVFELSDEK
RDVFELSDEK

SEQ ID NO: 13801 - protein, 10 aa, Artificial Sequence
  Description of Artificial Sequence: Synthetic peptide
  Seed: RGVFELSDEK
RCVFELSDER

SEQ ID NO: 13802 - protein, 10 aa, Artificial Sequence
  Description of Artificial Sequence: Synthetic peptide
  Seed: RGVFELSDEK
RCVFELSDEK

SEQ ID NO: 13803 - protein, 10 aa, Artificial Sequence
  Description of Artificial Sequence: Synthetic peptide
  Seed: RGVFELSDEK
RQVFELSDER

SEQ ID NO: 13804 - protein, 10 aa, Artificial Sequence
  Description of Artificial Sequence: Synthetic peptide
  Seed: RGTRVVPRGQ
RVTRVVPRGE

SEQ ID NO: 13805 - protein, 10 aa, Artificial Sequence
  Description of Artificial Sequence: Synthetic peptide
  Seed: RGTRVVPRGQ
RVTRVVPRGQ

SEQ ID NO: 13806 - protein, 10 aa, Artificial Sequence
  Description of Artificial Sequence: Synthetic peptide
  Seed: RGTRVVPRGQ
RVTRVVPRGC

SEQ ID NO: 13807 - protein, 10 aa, Artificial Sequence
  Description of Artificial Sequence: Synthetic peptide
  Seed: RGTRVVPRGQ
RVTRVVPRGN

SEQ ID NO: 13808 - protein, 10 aa, Artificial Sequence
  Description of Artificial Sequence: Synthetic peptide
  Seed: RGTRVVPRGQ
RYTRVVPRGA

SEQ ID NO: 13809 - protein, 10 aa, Artificial Sequence
  Description of Artificial Sequence: Synthetic peptide
  Seed: RGTRVVPRGQ
RYTRVVPRGR

SEQ ID NO: 13810 - protein, 10 aa, Artificial Sequence
  Description of Artificial Sequence: Synthetic peptide
  Seed: RGTRVVPRGQ
RYTRVVPRGN

SEQ ID NO: 13811 - protein, 10 aa, Artificial Sequence
  Description of Artificial Sequence: Synthetic peptide
  Seed: RGTRVVPRGQ
RYTRVVPRGC

SEQ ID NO: 13812 - protein, 10 aa, Artificial Sequence
  Description of Artificial Sequence: Synthetic peptide
  Seed: RGTRVVPRGQ
RYTRVVPRGQ

SEQ ID NO: 13813 - protein, 10 aa, Artificial Sequence
  Description of Artificial Sequence: Synthetic peptide
  Seed: RGTRVVPRGQ
RYTRVVPRGE

SEQ ID NO: 13814 - protein, 10 aa, Artificial Sequence
  Description of Artificial Sequence: Synthetic peptide
  Seed: RGTRVVPRGQ
RYTRVVPRGG

SEQ ID NO: 13815 - protein, 10 aa, Artificial Sequence
  Description of Artificial Sequence: Synthetic peptide
  Seed: RGTRVVPRGQ
RYTRVVPRGI

SEQ ID NO: 13816 - protein, 10 aa, Artificial Sequence
  Description of Artificial Sequence: Synthetic peptide
  Seed: RGTRVVPRGQ
RYTRVVPRGL

SEQ ID NO: 13817 - protein, 10 aa, Artificial Sequence
  Description of Artificial Sequence: Synthetic peptide
  Seed: RGTRVVPRGQ
RYTRVVPRGK

SEQ ID NO: 13818 - protein, 10 aa, Artificial Sequence
  Description of Artificial Sequence: Synthetic peptide
  Seed: RGTRVVPRGQ
RYTRVVPRGM

SEQ ID NO: 13819 - protein, 10 aa, Artificial Sequence
  Description of Artificial Sequence: Synthetic peptide
  Seed: RGTRVVPRGQ
RYTRVVPRGF

SEQ ID NO: 13820 - protein, 10 aa, Artificial Sequence
  Description of Artificial Sequence: Synthetic peptide
  Seed: RGTRVVPRGQ
RYTRVVPRGP

SEQ ID NO: 13821 - protein, 10 aa, Artificial Sequence
  Description of Artificial Sequence: Synthetic peptide
  Seed: RGTRVVPRGQ
RYTRVVPRGS

SEQ ID NO: 13822 - protein, 10 aa, Artificial Sequence
  Description of Artificial Sequence: Synthetic peptide
  Seed: RGTRVVPRGQ
RYTRVVPRGT

SEQ ID NO: 13823 - protein, 10 aa, Artificial Sequence
  Description of Artificial Sequence: Synthetic peptide
  Seed: RGTRVVPRGQ
RYTRVVPRGY

SEQ ID NO: 13824 - protein, 10 aa, Artificial Sequence
  Description of Artificial Sequence: Synthetic peptide
  Seed: RGTRVVPRGQ
RYTRVVPRGV

SEQ ID NO: 13825 - protein, 10 aa, Artificial Sequence
  Description of Artificial Sequence: Synthetic peptide
  Seed: RGTRVVPRGQ
RVTRVVPRGA

SEQ ID NO: 13826 - protein, 10 aa, Artificial Sequence
  Description of Artificial Sequence: Synthetic peptide
  Seed: RGTRVVPRGQ
RVTRVVPRGR

SEQ ID NO: 13827 - protein, 10 aa, Artificial Sequence
  Description of Artificial Sequence: Synthetic peptide
  Seed: RGVFELSDEK
RQVFELSDEK

SEQ ID NO: 13828 - protein, 10 aa, Artificial Sequence
  Description of Artificial Sequence: Synthetic peptide
  Seed: RGVFELSDEK
REVFELSDEK

SEQ ID NO: 13829 - protein, 10 aa, Artificial Sequence
  Description of Artificial Sequence: Synthetic peptide
  Seed: RGTRVVPRGQ
RWTRVVPRGY

SEQ ID NO: 13830 - protein, 11 aa, Artificial Sequence
  Description of Artificial Sequence: Synthetic peptide
  Seed: RGVQIASNENM
RCVQIASNENM

SEQ ID NO: 13831 - protein, 11 aa, Artificial Sequence
  Description of Artificial Sequence: Synthetic peptide
  Seed: RGVQIASNENM
RRVQIASNENM

SEQ ID NO: 13832 - protein, 11 aa, Artificial Sequence
  Description of Artificial Sequence: Synthetic peptide
  Seed: RGVQIASNENM
RRVQIASNENF

SEQ ID NO: 13833 - protein, 11 aa, Artificial Sequence
  Description of Artificial Sequence: Synthetic peptide
  Seed: RGVQIASNENM
RRVQIASNENY

SEQ ID NO: 13834 - protein, 11 aa, Artificial Sequence
  Description of Artificial Sequence: Synthetic peptide
  Seed: RGVQIASNENM
RNVQIASNENM

SEQ ID NO: 13835 - protein, 11 aa, Artificial Sequence
  Description of Artificial Sequence: Synthetic peptide
  Seed: RGVQIASNENM
RNVQIASNENF

SEQ ID NO: 13836 - protein, 11 aa, Artificial Sequence
  Description of Artificial Sequence: Synthetic peptide
  Seed: RGVQIASNENM
RNVQIASNENY

SEQ ID NO: 13837 - protein, 11 aa, Artificial Sequence
  Description of Artificial Sequence: Synthetic peptide
  Seed: RGVQIASNENM
RDVQIASNENM

SEQ ID NO: 13838 - protein, 11 aa, Artificial Sequence
  Description of Artificial Sequence: Synthetic peptide
  Seed: RGVQIASNENM
RDVQIASNENF

SEQ ID NO: 13839 - protein, 11 aa, Artificial Sequence
  Description of Artificial Sequence: Synthetic peptide
  Seed: RGVQIASNENM
RDVQIASNENY

SEQ ID NO: 13840 - protein, 11 aa, Artificial Sequence
  Description of Artificial Sequence: Synthetic peptide
  Seed: RGVQIASNENM
RCVQIASNENF

SEQ ID NO: 13841 - protein, 11 aa, Artificial Sequence
  Description of Artificial Sequence: Synthetic peptide
  Seed: RGVQIASNENM
RCVQIASNENY

SEQ ID NO: 13842 - protein, 11 aa, Artificial Sequence
  Description of Artificial Sequence: Synthetic peptide
  Seed: RGVQIASNENM
RQVQIASNENM

SEQ ID NO: 13843 - protein, 11 aa, Artificial Sequence
  Description of Artificial Sequence: Synthetic peptide
  Seed: RGVQIASNENM
RQVQIASNENF

SEQ ID NO: 13844 - protein, 11 aa, Artificial Sequence
  Description of Artificial Sequence: Synthetic peptide
  Seed: RGVQIASNENM
RQVQIASNENY

SEQ ID NO: 13845 - protein, 11 aa, Artificial Sequence
  Description of Artificial Sequence: Synthetic peptide
  Seed: RGVQIASNENM
REVQIASNENM

SEQ ID NO: 13846 - protein, 11 aa, Artificial Sequence
  Description of Artificial Sequence: Synthetic peptide
  Seed: RGVQIASNENM
REVQIASNENF

SEQ ID NO: 13847 - protein, 11 aa, Artificial Sequence
  Description of Artificial Sequence: Synthetic peptide
  Seed: RGVQIASNENM
REVQIASNENY

SEQ ID NO: 13848 - protein, 11 aa, Artificial Sequence
  Description of Artificial Sequence: Synthetic peptide
  Seed: RGVQIASNENM
RGVQIASNENF

SEQ ID NO: 13849 - protein, 11 aa, Artificial Sequence
  Description of Artificial Sequence: Synthetic peptide
  Seed: RGVQIASNENM
RGVQIASNENY

SEQ ID NO: 13850 - protein, 11 aa, Artificial Sequence
  Description of Artificial Sequence: Synthetic peptide
  Seed: RGVQIASNENM
RAVQIASNENY

SEQ ID NO: 13851 - protein, 11 aa, Artificial Sequence
  Description of Artificial Sequence: Synthetic peptide
  Seed: RGVQIASNENM
RAVQIASNENF

SEQ ID NO: 13852 - protein, 11 aa, Artificial Sequence
  Description of Artificial Sequence: Synthetic peptide
  Seed: RGVQIASNENM
RAVQIASNENM

SEQ ID NO: 13853 - protein, 10 aa, Artificial Sequence
  Description of Artificial Sequence: Synthetic peptide
  Seed: RGVFELSDEK
RVVFELSDEK

SEQ ID NO: 13854 - protein, 10 aa, Artificial Sequence
  Description of Artificial Sequence: Synthetic peptide
  Seed: RGVFELSDEK
RHVFELSDER

SEQ ID NO: 13855 - protein, 10 aa, Artificial Sequence
  Description of Artificial Sequence: Synthetic peptide
  Seed: RGVFELSDEK
RHVFELSDEK

SEQ ID NO: 13856 - protein, 10 aa, Artificial Sequence
  Description of Artificial Sequence: Synthetic peptide
  Seed: RGVFELSDEK
RIVFELSDER

SEQ ID NO: 13857 - protein, 10 aa, Artificial Sequence
  Description of Artificial Sequence: Synthetic peptide
  Seed: RGVFELSDEK
RLVFELSDER

SEQ ID NO: 13858 - protein, 10 aa, Artificial Sequence
  Description of Artificial Sequence: Synthetic peptide
  Seed: RGVFELSDEK
RLVFELSDEK

SEQ ID NO: 13859 - protein, 10 aa, Artificial Sequence
  Description of Artificial Sequence: Synthetic peptide
  Seed: RGVFELSDEK
RKVFELSDER

SEQ ID NO: 13860 - protein, 10 aa, Artificial Sequence
  Description of Artificial Sequence: Synthetic peptide
  Seed: RGVFELSDEK
RMVFELSDER

SEQ ID NO: 13861 - protein, 10 aa, Artificial Sequence
  Description of Artificial Sequence: Synthetic peptide
  Seed: RGVFELSDEK
RMVFELSDEK

SEQ ID NO: 13862 - protein, 10 aa, Artificial Sequence
  Description of Artificial Sequence: Synthetic peptide
  Seed: RGVFELSDEK
RFVFELSDER

SEQ ID NO: 13863 - protein, 10 aa, Artificial Sequence
  Description of Artificial Sequence: Synthetic peptide
  Seed: RGVFELSDEK
RFVFELSDEK

SEQ ID NO: 13864 - protein, 10 aa, Artificial Sequence
  Description of Artificial Sequence: Synthetic peptide
  Seed: RGVFELSDEK
RPVFELSDER

SEQ ID NO: 13865 - protein, 10 aa, Artificial Sequence
  Description of Artificial Sequence: Synthetic peptide
  Seed: RGVFELSDEK
RSVFELSDER

SEQ ID NO: 13866 - protein, 10 aa, Artificial Sequence
  Description of Artificial Sequence: Synthetic peptide
  Seed: RGVFELSDEK
RSVFELSDEK

SEQ ID NO: 13867 - protein, 10 aa, Artificial Sequence
  Description of Artificial Sequence: Synthetic peptide
  Seed: RGVFELSDEK
RTVFELSDER

SEQ ID NO: 13868 - protein, 10 aa, Artificial Sequence
  Description of Artificial Sequence: Synthetic peptide
  Seed: RGVFELSDEK
RTVFELSDEK

SEQ ID NO: 13869 - protein, 10 aa, Artificial Sequence
  Description of Artificial Sequence: Synthetic peptide
  Seed: RGVFELSDEK
RWVFELSDER

SEQ ID NO: 13870 - protein, 10 aa, Artificial Sequence
  Description of Artificial Sequence: Synthetic peptide
  Seed: RGVFELSDEK
RWVFELSDEK

SEQ ID NO: 13871 - protein, 10 aa, Artificial Sequence
  Description of Artificial Sequence: Synthetic peptide
  Seed: RGVFELSDEK
RYVFELSDEK

SEQ ID NO: 13872 - protein, 10 aa, Artificial Sequence
  Description of Artificial Sequence: Synthetic peptide
  Seed: RGVFELSDEK
RVVFELSDER

SEQ ID NO: 13873 - protein, 10 aa, Artificial Sequence
  Description of Artificial Sequence: Synthetic peptide
  Seed: RGTRVVPRGQ
RWTRVVPRGV

SEQ ID NO: 13874 - protein, 10 aa, Artificial Sequence
  Description of Artificial Sequence: Synthetic peptide
  Seed: RGTRVVPRGQ
RWTRVVPRGT

SEQ ID NO: 13875 - protein, 11 aa, Artificial Sequence
  Description of Artificial Sequence: Synthetic peptide
  Seed: RGVQIASNENM
RHVQIASNENF

SEQ ID NO: 13876 - protein, 10 aa, Artificial Sequence
  Description of Artificial Sequence: Synthetic peptide
  Seed: RGTRVVPRGQ
RPTRVVPRGQ

SEQ ID NO: 13877 - protein, 10 aa, Artificial Sequence
  Description of Artificial Sequence: Synthetic peptide
  Seed: RGTRVVPRGQ
RFTRVVPRGF

SEQ ID NO: 13878 - protein, 10 aa, Artificial Sequence
  Description of Artificial Sequence: Synthetic peptide
  Seed: RGTRVVPRGQ
RFTRVVPRGP

SEQ ID NO: 13879 - protein, 10 aa, Artificial Sequence
  Description of Artificial Sequence: Synthetic peptide
  Seed: RGTRVVPRGQ
RFTRVVPRGS

SEQ ID NO: 13880 - protein, 10 aa, Artificial Sequence
  Description of Artificial Sequence: Synthetic peptide
  Seed: RGTRVVPRGQ
RFTRVVPRGT

SEQ ID NO: 13881 - protein, 10 aa, Artificial Sequence
  Description of Artificial Sequence: Synthetic peptide
  Seed: RGTRVVPRGQ
RFTRVVPRGY

SEQ ID NO: 13882 - protein, 10 aa, Artificial Sequence
  Description of Artificial Sequence: Synthetic peptide
  Seed: RGTRVVPRGQ
RFTRVVPRGV

SEQ ID NO: 13883 - protein, 10 aa, Artificial Sequence
  Description of Artificial Sequence: Synthetic peptide
  Seed: RGTRVVPRGQ
RPTRVVPRGA

SEQ ID NO: 13884 - protein, 10 aa, Artificial Sequence
  Description of Artificial Sequence: Synthetic peptide
  Seed: RGTRVVPRGQ
RPTRVVPRGR

SEQ ID NO: 13885 - protein, 10 aa, Artificial Sequence
  Description of Artificial Sequence: Synthetic peptide
  Seed: RGTRVVPRGQ
RPTRVVPRGC

SEQ ID NO: 13886 - protein, 10 aa, Artificial Sequence
  Description of Artificial Sequence: Synthetic peptide
  Seed: RGTRVVPRGQ
RPTRVVPRGE

SEQ ID NO: 13887 - protein, 10 aa, Artificial Sequence
  Description of Artificial Sequence: Synthetic peptide
  Seed: RGTRVVPRGQ
RPTRVVPRGV

SEQ ID NO: 13888 - protein, 10 aa, Artificial Sequence
  Description of Artificial Sequence: Synthetic peptide
  Seed: RGTRVVPRGQ
RPTRVVPRGG

SEQ ID NO: 13889 - protein, 10 aa, Artificial Sequence
  Description of Artificial Sequence: Synthetic peptide
  Seed: RGTRVVPRGQ
RPTRVVPRGI

SEQ ID NO: 13890 - protein, 10 aa, Artificial Sequence
  Description of Artificial Sequence: Synthetic peptide
  Seed: RGTRVVPRGQ
RPTRVVPRGL

SEQ ID NO: 13891 - protein, 10 aa, Artificial Sequence
  Description of Artificial Sequence: Synthetic peptide
  Seed: RGTRVVPRGQ
RPTRVVPRGK

SEQ ID NO: 13892 - protein, 10 aa, Artificial Sequence
  Description of Artificial Sequence: Synthetic peptide
  Seed: RGTRVVPRGQ
RPTRVVPRGM

SEQ ID NO: 13893 - protein, 10 aa, Artificial Sequence
  Description of Artificial Sequence: Synthetic peptide
  Seed: RGTRVVPRGQ
RPTRVVPRGF

SEQ ID NO: 13894 - protein, 10 aa, Artificial Sequence
  Description of Artificial Sequence: Synthetic peptide
  Seed: RGTRVVPRGQ
RPTRVVPRGP

SEQ ID NO: 13895 - protein, 10 aa, Artificial Sequence
  Description of Artificial Sequence: Synthetic peptide
  Seed: RGTRVVPRGQ
RPTRVVPRGS

SEQ ID NO: 13896 - protein, 10 aa, Artificial Sequence
  Description of Artificial Sequence: Synthetic peptide
  Seed: RGTRVVPRGQ
RPTRVVPRGT

SEQ ID NO: 13897 - protein, 10 aa, Artificial Sequence
  Description of Artificial Sequence: Synthetic peptide
  Seed: RGTRVVPRGQ
RFTRVVPRGM

SEQ ID NO: 13898 - protein, 10 aa, Artificial Sequence
  Description of Artificial Sequence: Synthetic peptide
  Seed: RGTRVVPRGQ
RFTRVVPRGK

SEQ ID NO: 13899 - protein, 10 aa, Artificial Sequence
  Description of Artificial Sequence: Synthetic peptide
  Seed: RGTRVVPRGQ
RFTRVVPRGL

SEQ ID NO: 13900 - protein, 10 aa, Artificial Sequence
  Description of Artificial Sequence: Synthetic peptide
  Seed: RGTRVVPRGQ
RFTRVVPRGI

SEQ ID NO: 13901 - protein, 10 aa, Artificial Sequence
  Description of Artificial Sequence: Synthetic peptide
  Seed: RGTRVVPRGQ
RMTRVVPRGE

SEQ ID NO: 13902 - protein, 10 aa, Artificial Sequence
  Description of Artificial Sequence: Synthetic peptide
  Seed: RGTRVVPRGQ
RMTRVVPRGG

SEQ ID NO: 13903 - protein, 10 aa, Artificial Sequence
  Description of Artificial Sequence: Synthetic peptide
  Seed: RGTRVVPRGQ
RMTRVVPRGI

SEQ ID NO: 13904 - protein, 10 aa, Artificial Sequence
  Description of Artificial Sequence: Synthetic peptide
  Seed: RGTRVVPRGQ
RMTRVVPRGL

SEQ ID NO: 13905 - protein, 10 aa, Artificial Sequence
  Description of Artificial Sequence: Synthetic peptide
  Seed: RGTRVVPRGQ
RMTRVVPRGK

SEQ ID NO: 13906 - protein, 10 aa, Artificial Sequence
  Description of Artificial Sequence: Synthetic peptide
  Seed: RGTRVVPRGQ
RMTRVVPRGM

SEQ ID NO: 13907 - protein, 10 aa, Artificial Sequence
  Description of Artificial Sequence: Synthetic peptide
  Seed: RGTRVVPRGQ
RMTRVVPRGF

SEQ ID NO: 13908 - protein, 10 aa, Artificial Sequence
  Description of Artificial Sequence: Synthetic peptide
  Seed: RGTRVVPRGQ
RMTRVVPRGP

SEQ ID NO: 13909 - protein, 10 aa, Artificial Sequence
  Description of Artificial Sequence: Synthetic peptide
  Seed: RGTRVVPRGQ
RMTRVVPRGS

SEQ ID NO: 13910 - protein, 10 aa, Artificial Sequence
  Description of Artificial Sequence: Synthetic peptide
  Seed: RGTRVVPRGQ
RMTRVVPRGT

SEQ ID NO: 13911 - protein, 10 aa, Artificial Sequence
  Description of Artificial Sequence: Synthetic peptide
  Seed: RGTRVVPRGQ
RMTRVVPRGY

SEQ ID NO: 13912 - protein, 10 aa, Artificial Sequence
  Description of Artificial Sequence: Synthetic peptide
  Seed: RGTRVVPRGQ
RMTRVVPRGV

SEQ ID NO: 13913 - protein, 10 aa, Artificial Sequence
  Description of Artificial Sequence: Synthetic peptide
  Seed: RGTRVVPRGQ
RFTRVVPRGA

SEQ ID NO: 13914 - protein, 10 aa, Artificial Sequence
  Description of Artificial Sequence: Synthetic peptide
  Seed: RGTRVVPRGQ
RFTRVVPRGR

SEQ ID NO: 13915 - protein, 10 aa, Artificial Sequence
  Description of Artificial Sequence: Synthetic peptide
  Seed: RGTRVVPRGQ
RFTRVVPRGN

SEQ ID NO: 13916 - protein, 10 aa, Artificial Sequence
  Description of Artificial Sequence: Synthetic peptide
  Seed: RGTRVVPRGQ
RFTRVVPRGC

SEQ ID NO: 13917 - protein, 10 aa, Artificial Sequence
  Description of Artificial Sequence: Synthetic peptide
  Seed: RGTRVVPRGQ
RFTRVVPRGQ

SEQ ID NO: 13918 - protein, 10 aa, Artificial Sequence
  Description of Artificial Sequence: Synthetic peptide
  Seed: RGTRVVPRGQ
RFTRVVPRGE

SEQ ID NO: 13919 - protein, 10 aa, Artificial Sequence
  Description of Artificial Sequence: Synthetic peptide
  Seed: RGTRVVPRGQ
RFTRVVPRGG

SEQ ID NO: 13920 - protein, 10 aa, Artificial Sequence
  Description of Artificial Sequence: Synthetic peptide
  Seed: RGTRVVPRGQ
RPTRVVPRGY

SEQ ID NO: 13921 - protein, 10 aa, Artificial Sequence
  Description of Artificial Sequence: Synthetic peptide
  Seed: RGTRVVPRGQ
RSTRVVPRGA

SEQ ID NO: 13922 - protein, 10 aa, Artificial Sequence
  Description of Artificial Sequence: Synthetic peptide
  Seed: RGTRVVPRGQ
RWTRVVPRGS

SEQ ID NO: 13923 - protein, 10 aa, Artificial Sequence
  Description of Artificial Sequence: Synthetic peptide
  Seed: RGTRVVPRGQ
RWTRVVPRGN

SEQ ID NO: 13924 - protein, 10 aa, Artificial Sequence
  Description of Artificial Sequence: Synthetic peptide
  Seed: RGTRVVPRGQ
RTTRVVPRGM

SEQ ID NO: 13925 - protein, 10 aa, Artificial Sequence
  Description of Artificial Sequence: Synthetic peptide
  Seed: RGTRVVPRGQ
RTTRVVPRGF

SEQ ID NO: 13926 - protein, 10 aa, Artificial Sequence
  Description of Artificial Sequence: Synthetic peptide
  Seed: RGTRVVPRGQ
RTTRVVPRGP

SEQ ID NO: 13927 - protein, 10 aa, Artificial Sequence
  Description of Artificial Sequence: Synthetic peptide
  Seed: RGTRVVPRGQ
RTTRVVPRGS

SEQ ID NO: 13928 - protein, 10 aa, Artificial Sequence
  Description of Artificial Sequence: Synthetic peptide
  Seed: RGTRVVPRGQ
RTTRVVPRGT

SEQ ID NO: 13929 - protein, 10 aa, Artificial Sequence
  Description of Artificial Sequence: Synthetic peptide
  Seed: RGTRVVPRGQ
RTTRVVPRGY

SEQ ID NO: 13930 - protein, 10 aa, Artificial Sequence
  Description of Artificial Sequence: Synthetic peptide
  Seed: RGTRVVPRGQ
RTTRVVPRGV

SEQ ID NO: 13931 - protein, 10 aa, Artificial Sequence
  Description of Artificial Sequence: Synthetic peptide
  Seed: RGTRVVPRGQ
RWTRVVPRGA

SEQ ID NO: 13932 - protein, 10 aa, Artificial Sequence
  Description of Artificial Sequence: Synthetic peptide
  Seed: RGTRVVPRGQ
RWTRVVPRGR

SEQ ID NO: 13933 - protein, 10 aa, Artificial Sequence
  Description of Artificial Sequence: Synthetic peptide
  Seed: RGTRVVPRGQ
RWTRVVPRGC

SEQ ID NO: 13934 - protein, 10 aa, Artificial Sequence
  Description of Artificial Sequence: Synthetic peptide
  Seed: RGTRVVPRGQ
RSTRVVPRGR

SEQ ID NO: 13935 - protein, 10 aa, Artificial Sequence
  Description of Artificial Sequence: Synthetic peptide
  Seed: RGTRVVPRGQ
RWTRVVPRGQ

SEQ ID NO: 13936 - protein, 10 aa, Artificial Sequence
  Description of Artificial Sequence: Synthetic peptide
  Seed: RGTRVVPRGQ
RWTRVVPRGE

SEQ ID NO: 13937 - protein, 10 aa, Artificial Sequence
  Description of Artificial Sequence: Synthetic peptide
  Seed: RGTRVVPRGQ
RWTRVVPRGG

SEQ ID NO: 13938 - protein, 10 aa, Artificial Sequence
  Description of Artificial Sequence: Synthetic peptide
  Seed: RGTRVVPRGQ
RWTRVVPRGI

SEQ ID NO: 13939 - protein, 10 aa, Artificial Sequence
  Description of Artificial Sequence: Synthetic peptide
  Seed: RGTRVVPRGQ
RWTRVVPRGL

SEQ ID NO: 13940 - protein, 10 aa, Artificial Sequence
  Description of Artificial Sequence: Synthetic peptide
  Seed: RGTRVVPRGQ
RWTRVVPRGK

SEQ ID NO: 13941 - protein, 10 aa, Artificial Sequence
  Description of Artificial Sequence: Synthetic peptide
  Seed: RGTRVVPRGQ
RWTRVVPRGM

SEQ ID NO: 13942 - protein, 10 aa, Artificial Sequence
  Description of Artificial Sequence: Synthetic peptide
  Seed: RGTRVVPRGQ
RWTRVVPRGF

SEQ ID NO: 13943 - protein, 10 aa, Artificial Sequence
  Description of Artificial Sequence: Synthetic peptide
  Seed: RGTRVVPRGQ
RWTRVVPRGP

SEQ ID NO: 13944 - protein, 10 aa, Artificial Sequence
  Description of Artificial Sequence: Synthetic peptide
  Seed: RGTRVVPRGQ
RTTRVVPRGK

SEQ ID NO: 13945 - protein, 10 aa, Artificial Sequence
  Description of Artificial Sequence: Synthetic peptide
  Seed: RGTRVVPRGQ
RTTRVVPRGL

SEQ ID NO: 13946 - protein, 10 aa, Artificial Sequence
  Description of Artificial Sequence: Synthetic peptide
  Seed: RGTRVVPRGQ
RTTRVVPRGI

SEQ ID NO: 13947 - protein, 10 aa, Artificial Sequence
  Description of Artificial Sequence: Synthetic peptide
  Seed: RGTRVVPRGQ
RTTRVVPRGG

SEQ ID NO: 13948 - protein, 10 aa, Artificial Sequence
  Description of Artificial Sequence: Synthetic peptide
  Seed: RGTRVVPRGQ
RSTRVVPRGC

SEQ ID NO: 13949 - protein, 10 aa, Artificial Sequence
  Description of Artificial Sequence: Synthetic peptide
  Seed: RGTRVVPRGQ
RSTRVVPRGQ

SEQ ID NO: 13950 - protein, 10 aa, Artificial Sequence
  Description of Artificial Sequence: Synthetic peptide
  Seed: RGTRVVPRGQ
RSTRVVPRGE

SEQ ID NO: 13951 - protein, 10 aa, Artificial Sequence
  Description of Artificial Sequence: Synthetic peptide
  Seed: RGTRVVPRGQ
RSTRVVPRGG

SEQ ID NO: 13952 - protein, 10 aa, Artificial Sequence
  Description of Artificial Sequence: Synthetic peptide
  Seed: RGTRVVPRGQ
RSTRVVPRGI

SEQ ID NO: 13953 - protein, 10 aa, Artificial Sequence
  Description of Artificial Sequence: Synthetic peptide
  Seed: RGTRVVPRGQ
RSTRVVPRGL

SEQ ID NO: 13954 - protein, 10 aa, Artificial Sequence
  Description of Artificial Sequence: Synthetic peptide
  Seed: RGTRVVPRGQ
RSTRVVPRGK

SEQ ID NO: 13955 - protein, 10 aa, Artificial Sequence
  Description of Artificial Sequence: Synthetic peptide
  Seed: RGTRVVPRGQ
RSTRVVPRGM

SEQ ID NO: 13956 - protein, 10 aa, Artificial Sequence
  Description of Artificial Sequence: Synthetic peptide
  Seed: RGTRVVPRGQ
RSTRVVPRGF

SEQ ID NO: 13957 - protein, 10 aa, Artificial Sequence
  Description of Artificial Sequence: Synthetic peptide
  Seed: RGTRVVPRGQ
RSTRVVPRGP

SEQ ID NO: 13958 - protein, 10 aa, Artificial Sequence
  Description of Artificial Sequence: Synthetic peptide
  Seed: RGTRVVPRGQ
RSTRVVPRGS

SEQ ID NO: 13959 - protein, 10 aa, Artificial Sequence
  Description of Artificial Sequence: Synthetic peptide
  Seed: RGTRVVPRGQ
RSTRVVPRGT

SEQ ID NO: 13960 - protein, 10 aa, Artificial Sequence
  Description of Artificial Sequence: Synthetic peptide
  Seed: RGTRVVPRGQ
RSTRVVPRGY

SEQ ID NO: 13961 - protein, 10 aa, Artificial Sequence
  Description of Artificial Sequence: Synthetic peptide
  Seed: RGTRVVPRGQ
RSTRVVPRGV

SEQ ID NO: 13962 - protein, 10 aa, Artificial Sequence
  Description of Artificial Sequence: Synthetic peptide
  Seed: RGTRVVPRGQ
RTTRVVPRGA

SEQ ID NO: 13963 - protein, 10 aa, Artificial Sequence
  Description of Artificial Sequence: Synthetic peptide
  Seed: RGTRVVPRGQ
RTTRVVPRGR

SEQ ID NO: 13964 - protein, 10 aa, Artificial Sequence
  Description of Artificial Sequence: Synthetic peptide
  Seed: RGTRVVPRGQ
RTTRVVPRGC

SEQ ID NO: 13965 - protein, 10 aa, Artificial Sequence
  Description of Artificial Sequence: Synthetic peptide
  Seed: RGTRVVPRGQ
RTTRVVPRGQ

SEQ ID NO: 13966 - protein, 10 aa, Artificial Sequence
  Description of Artificial Sequence: Synthetic peptide
  Seed: RGTRVVPRGQ
RTTRVVPRGE

SEQ ID NO: 13967 - protein, 11 aa, Artificial Sequence
  Description of Artificial Sequence: Synthetic peptide
  Seed: RGVQIASNENM
RHVQIASNENM

SEQ ID NO: 13968 - protein, 11 aa, Artificial Sequence
  Description of Artificial Sequence: Synthetic peptide
  Seed: RGVQIASNENM
RHVQIASNENY

SEQ ID NO: 13969 - protein, 11 aa, Artificial Sequence
  Description of Artificial Sequence: Synthetic peptide
  Seed: RGVQIASNENM
RIVQIASNENM

SEQ ID NO: 13970 - protein, 11 aa, Artificial Sequence
  Description of Artificial Sequence: Synthetic peptide
  Seed: RGVQIASNENM
RWVQIASNENM

SEQ ID NO: 13971 - protein, 11 aa, Artificial Sequence
  Description of Artificial Sequence: Synthetic peptide
  Seed: RGVQIASNENM
RWVQIASNENF

SEQ ID NO: 13972 - protein, 11 aa, Artificial Sequence
  Description of Artificial Sequence: Synthetic peptide
  Seed: RGVQIASNENM
RWVQIASNENY

SEQ ID NO: 13973 - protein, 11 aa, Artificial Sequence
  Description of Artificial Sequence: Synthetic peptide
  Seed: RGVQIASNENM
RYVQIASNENM

SEQ ID NO: 13974 - protein, 11 aa, Artificial Sequence
  Description of Artificial Sequence: Synthetic peptide
  Seed: RGVQIASNENM
RYVQIASNENF

SEQ ID NO: 13975 - protein, 11 aa, Artificial Sequence
  Description of Artificial Sequence: Synthetic peptide
  Seed: RGVQIASNENM
RYVQIASNENY

SEQ ID NO: 13976 - protein, 11 aa, Artificial Sequence
  Description of Artificial Sequence: Synthetic peptide
  Seed: RGVQIASNENM
RVVQIASNENM

SEQ ID NO: 13977 - protein, 11 aa, Artificial Sequence
  Description of Artificial Sequence: Synthetic peptide
  Seed: RGVQIASNENM
RVVQIASNENF

SEQ ID NO: 13978 - protein, 11 aa, Artificial Sequence
  Description of Artificial Sequence: Synthetic peptide
  Seed: RGVQIASNENM
RVVQIASNENY

SEQ ID NO: 13979 - protein, 11 aa, Artificial Sequence
  Description of Artificial Sequence: Synthetic peptide
  Seed: RGVQIASNENM
RTVQIASNENY

SEQ ID NO: 13980 - protein, 11 aa, Artificial Sequence
  Description of Artificial Sequence: Synthetic peptide
  Seed: RGVQIASNENM
RTVQIASNENF

SEQ ID NO: 13981 - protein, 11 aa, Artificial Sequence
  Description of Artificial Sequence: Synthetic peptide
  Seed: RGVQIASNENM
RTVQIASNENM

SEQ ID NO: 13982 - protein, 11 aa, Artificial Sequence
  Description of Artificial Sequence: Synthetic peptide
  Seed: RGVQIASNENM
RSVQIASNENY

SEQ ID NO: 13983 - protein, 11 aa, Artificial Sequence
  Description of Artificial Sequence: Synthetic peptide
  Seed: RGVQIASNENM
RIVQIASNENF

SEQ ID NO: 13984 - protein, 11 aa, Artificial Sequence
  Description of Artificial Sequence: Synthetic peptide
  Seed: RGVQIASNENM
RIVQIASNENY

SEQ ID NO: 13985 - protein, 11 aa, Artificial Sequence
  Description of Artificial Sequence: Synthetic peptide
  Seed: RGVQIASNENM
RLVQIASNENM

SEQ ID NO: 13986 - protein, 11 aa, Artificial Sequence
  Description of Artificial Sequence: Synthetic peptide
  Seed: RGVQIASNENM
RLVQIASNENF

SEQ ID NO: 13987 - protein, 11 aa, Artificial Sequence
  Description of Artificial Sequence: Synthetic peptide
  Seed: RGVQIASNENM
RLVQIASNENY

SEQ ID NO: 13988 - protein, 11 aa, Artificial Sequence
  Description of Artificial Sequence: Synthetic peptide
  Seed: RGVQIASNENM
RKVQIASNENM

SEQ ID NO: 13989 - protein, 11 aa, Artificial Sequence
  Description of Artificial Sequence: Synthetic peptide
  Seed: RGVQIASNENM
RKVQIASNENF

SEQ ID NO: 13990 - protein, 11 aa, Artificial Sequence
  Description of Artificial Sequence: Synthetic peptide
  Seed: RGVQIASNENM
RKVQIASNENY

SEQ ID NO: 13991 - protein, 11 aa, Artificial Sequence
  Description of Artificial Sequence: Synthetic peptide
  Seed: RGVQIASNENM
RMVQIASNENM

SEQ ID NO: 13992 - protein, 11 aa, Artificial Sequence
  Description of Artificial Sequence: Synthetic peptide
  Seed: RGVQIASNENM
RMVQIASNENF

SEQ ID NO: 13993 - protein, 11 aa, Artificial Sequence
  Description of Artificial Sequence: Synthetic peptide
  Seed: RGVQIASNENM
RMVQIASNENY

SEQ ID NO: 13994 - protein, 11 aa, Artificial Sequence
  Description of Artificial Sequence: Synthetic peptide
  Seed: RGVQIASNENM
RFVQIASNENM

SEQ ID NO: 13995 - protein, 11 aa, Artificial Sequence
  Description of Artificial Sequence: Synthetic peptide
  Seed: RGVQIASNENM
RFVQIASNENF

SEQ ID NO: 13996 - protein, 11 aa, Artificial Sequence
  Description of Artificial Sequence: Synthetic peptide
  Seed: RGVQIASNENM
RFVQIASNENY

SEQ ID NO: 13997 - protein, 11 aa, Artificial Sequence
  Description of Artificial Sequence: Synthetic peptide
  Seed: RGVQIASNENM
RPVQIASNENM

SEQ ID NO: 13998 - protein, 11 aa, Artificial Sequence
  Description of Artificial Sequence: Synthetic peptide
  Seed: RGVQIASNENM
RPVQIASNENF

SEQ ID NO: 13999 - protein, 11 aa, Artificial Sequence
  Description of Artificial Sequence: Synthetic peptide
  Seed: RGVQIASNENM
RPVQIASNENY

SEQ ID NO: 14000 - protein, 11 aa, Artificial Sequence
  Description of Artificial Sequence: Synthetic peptide
  Seed: RGVQIASNENM
RSVQIASNENM

SEQ ID NO: 14001 - protein, 11 aa, Artificial Sequence
  Description of Artificial Sequence: Synthetic peptide
  Seed: RGVQIASNENM
RSVQIASNENF

SEQ ID NO: 14002 - protein, 10 aa, Artificial Sequence
  Description of Artificial Sequence: Synthetic peptide
  Seed: RGTRVVPRGQ
RMTRVVPRGQ

SEQ ID NO: 14003 - protein, 10 aa, Artificial Sequence
  Description of Artificial Sequence: Synthetic peptide
  Seed: RGTRVVPRGQ
RMTRVVPRGC

SEQ ID NO: 14004 - protein, 10 aa, Artificial Sequence
  Description of Artificial Sequence: Synthetic peptide
  Seed: RGTRVVPRGQ
RMTRVVPRGN

SEQ ID NO: 14005 - protein, 10 aa, Artificial Sequence
  Description of Artificial Sequence: Synthetic peptide
  Seed: RGTKVSPRGK
RWTKVSPRGT

SEQ ID NO: 14006 - protein, 10 aa, Artificial Sequence
  Description of Artificial Sequence: Synthetic peptide
  Seed: RGTKVSPRGK
RWTKVSPRGA

SEQ ID NO: 14007 - protein, 10 aa, Artificial Sequence
  Description of Artificial Sequence: Synthetic peptide
  Seed: RGTKVSPRGK
RWTKVSPRGC

SEQ ID NO: 14008 - protein, 10 aa, Artificial Sequence
  Description of Artificial Sequence: Synthetic peptide
  Seed: RGTKVSPRGK
RWTKVSPRGG

SEQ ID NO: 14009 - protein, 10 aa, Artificial Sequence
  Description of Artificial Sequence: Synthetic peptide
  Seed: RGTKVSPRGK
RWTKVSPRGI

SEQ ID NO: 14010 - protein, 10 aa, Artificial Sequence
  Description of Artificial Sequence: Synthetic peptide
  Seed: RGTKVSPRGK
RWTKVSPRGL

SEQ ID NO: 14011 - protein, 10 aa, Artificial Sequence
  Description of Artificial Sequence: Synthetic peptide
  Seed: RGTKVSPRGK
RWTKVSPRGK

SEQ ID NO: 14012 - protein, 10 aa, Artificial Sequence
  Description of Artificial Sequence: Synthetic peptide
  Seed: RGTKVSPRGK
RWTKVSPRGM

SEQ ID NO: 14013 - protein, 10 aa, Artificial Sequence
  Description of Artificial Sequence: Synthetic peptide
  Seed: RGTKVSPRGK
RWTKVSPRGF

SEQ ID NO: 14014 - protein, 10 aa, Artificial Sequence
  Description of Artificial Sequence: Synthetic peptide
  Seed: RGTKVSPRGK
RWTKVSPRGS

SEQ ID NO: 14015 - protein, 10 aa, Artificial Sequence
  Description of Artificial Sequence: Synthetic peptide
  Seed: RGTKVSPRGK
RWTKVSPRGY

SEQ ID NO: 14016 - protein, 10 aa, Artificial Sequence
  Description of Artificial Sequence: Synthetic peptide
  Seed: RGTKVSPRGK
RYTKVSPRGS

SEQ ID NO: 14017 - protein, 10 aa, Artificial Sequence
  Description of Artificial Sequence: Synthetic peptide
  Seed: RGTKVSPRGK
RWTKVSPRGV

SEQ ID NO: 14018 - protein, 10 aa, Artificial Sequence
  Description of Artificial Sequence: Synthetic peptide
  Seed: RGTKVSPRGK
RYTKVSPRGA

SEQ ID NO: 14019 - protein, 10 aa, Artificial Sequence
  Description of Artificial Sequence: Synthetic peptide
  Seed: RGTKVSPRGK
RYTKVSPRGR

SEQ ID NO: 14020 - protein, 10 aa, Artificial Sequence
  Description of Artificial Sequence: Synthetic peptide
  Seed: RGTKVSPRGK
RYTKVSPRGC

SEQ ID NO: 14021 - protein, 10 aa, Artificial Sequence
  Description of Artificial Sequence: Synthetic peptide
  Seed: RGTKVSPRGK
RYTKVSPRGG

SEQ ID NO: 14022 - protein, 10 aa, Artificial Sequence
  Description of Artificial Sequence: Synthetic peptide
  Seed: RGTKVSPRGK
RYTKVSPRGI

SEQ ID NO: 14023 - protein, 10 aa, Artificial Sequence
  Description of Artificial Sequence: Synthetic peptide
  Seed: RGTKVSPRGK
RYTKVSPRGL

SEQ ID NO: 14024 - protein, 10 aa, Artificial Sequence
  Description of Artificial Sequence: Synthetic peptide
  Seed: RGTKVSPRGK
RYTKVSPRGK

SEQ ID NO: 14025 - protein, 10 aa, Artificial Sequence
  Description of Artificial Sequence: Synthetic peptide
  Seed: RGTKVSPRGK
RYTKVSPRGM

SEQ ID NO: 14026 - protein, 10 aa, Artificial Sequence
  Description of Artificial Sequence: Synthetic peptide
  Seed: RGTKVSPRGK
RTTKVSPRGV

SEQ ID NO: 14027 - protein, 10 aa, Artificial Sequence
  Description of Artificial Sequence: Synthetic peptide
  Seed: RGTKVSPRGK
RTTKVSPRGY

SEQ ID NO: 14028 - protein, 10 aa, Artificial Sequence
  Description of Artificial Sequence: Synthetic peptide
  Seed: RGTKVSPRGK
RTTKVSPRGT

SEQ ID NO: 14029 - protein, 10 aa, Artificial Sequence
  Description of Artificial Sequence: Synthetic peptide
  Seed: RGTKVSPRGK
RTTKVSPRGS

SEQ ID NO: 14030 - protein, 10 aa, Artificial Sequence
  Description of Artificial Sequence: Synthetic peptide
  Seed: RGTKVSPRGK
RSTKVSPRGA

SEQ ID NO: 14031 - protein, 10 aa, Artificial Sequence
  Description of Artificial Sequence: Synthetic peptide
  Seed: RGTKVSPRGK
RSTKVSPRGC

SEQ ID NO: 14032 - protein, 10 aa, Artificial Sequence
  Description of Artificial Sequence: Synthetic peptide
  Seed: RGTKVSPRGK
RSTKVSPRGI

SEQ ID NO: 14033 - protein, 10 aa, Artificial Sequence
  Description of Artificial Sequence: Synthetic peptide
  Seed: RGTKVSPRGK
RSTKVSPRGL

SEQ ID NO: 14034 - protein, 10 aa, Artificial Sequence
  Description of Artificial Sequence: Synthetic peptide
  Seed: RGTKVSPRGK
RSTKVSPRGK

SEQ ID NO: 14035 - protein, 10 aa, Artificial Sequence
  Description of Artificial Sequence: Synthetic peptide
  Seed: RGTKVSPRGK
RSTKVSPRGM

SEQ ID NO: 14036 - protein, 10 aa, Artificial Sequence
  Description of Artificial Sequence: Synthetic peptide
  Seed: RGTKVSPRGK
RSTKVSPRGF

SEQ ID NO: 14037 - protein, 10 aa, Artificial Sequence
  Description of Artificial Sequence: Synthetic peptide
  Seed: RGTKVSPRGK
RSTKVSPRGS

SEQ ID NO: 14038 - protein, 10 aa, Artificial Sequence
  Description of Artificial Sequence: Synthetic peptide
  Seed: RGTKVSPRGK
RSTKVSPRGT

SEQ ID NO: 14039 - protein, 10 aa, Artificial Sequence
  Description of Artificial Sequence: Synthetic peptide
  Seed: RGTKVSPRGK
RSTKVSPRGY

SEQ ID NO: 14040 - protein, 10 aa, Artificial Sequence
  Description of Artificial Sequence: Synthetic peptide
  Seed: RGTKVSPRGK
RSTKVSPRGV

SEQ ID NO: 14041 - protein, 10 aa, Artificial Sequence
  Description of Artificial Sequence: Synthetic peptide
  Seed: RGTKVSPRGK
RTTKVSPRGA

SEQ ID NO: 14042 - protein, 10 aa, Artificial Sequence
  Description of Artificial Sequence: Synthetic peptide
  Seed: RGTKVSPRGK
RTTKVSPRGC

SEQ ID NO: 14043 - protein, 10 aa, Artificial Sequence
  Description of Artificial Sequence: Synthetic peptide
  Seed: RGTKVSPRGK
RTTKVSPRGG

SEQ ID NO: 14044 - protein, 10 aa, Artificial Sequence
  Description of Artificial Sequence: Synthetic peptide
  Seed: RGTKVSPRGK
RTTKVSPRGI

SEQ ID NO: 14045 - protein, 10 aa, Artificial Sequence
  Description of Artificial Sequence: Synthetic peptide
  Seed: RGTKVSPRGK
RTTKVSPRGL

SEQ ID NO: 14046 - protein, 10 aa, Artificial Sequence
  Description of Artificial Sequence: Synthetic peptide
  Seed: RGTKVSPRGK
RTTKVSPRGK

SEQ ID NO: 14047 - protein, 10 aa, Artificial Sequence
  Description of Artificial Sequence: Synthetic peptide
  Seed: RGTKVSPRGK
RTTKVSPRGM

SEQ ID NO: 14048 - protein, 10 aa, Artificial Sequence
  Description of Artificial Sequence: Synthetic peptide
  Seed: RGTKVSPRGK
RTTKVSPRGF

SEQ ID NO: 14049 - protein, 10 aa, Artificial Sequence
  Description of Artificial Sequence: Synthetic peptide
  Seed: RGTKVSPRGK
RYTKVSPRGF

SEQ ID NO: 14050 - protein, 10 aa, Artificial Sequence
  Description of Artificial Sequence: Synthetic peptide
  Seed: RGTKVSPRGK
RYTKVSPRGT

SEQ ID NO: 14051 - protein, 10 aa, Artificial Sequence
  Description of Artificial Sequence: Synthetic peptide
  Seed: RGTKVSPRGK
RPTKVSPRGY

SEQ ID NO: 14052 - protein, 8 aa, Artificial Sequence
  Description of Artificial Sequence: Synthetic peptide
  Seed: RGTRVVPR
RWTRVVPR

SEQ ID NO: 14053 - protein, 8 aa, Artificial Sequence
  Description of Artificial Sequence: Synthetic peptide
  Seed: RGTRVVPR
RLTRVVPK

SEQ ID NO: 14054 - protein, 8 aa, Artificial Sequence
  Description of Artificial Sequence: Synthetic peptide
  Seed: RGTRVVPR
RKTRVVPR

SEQ ID NO: 14055 - protein, 8 aa, Artificial Sequence
  Description of Artificial Sequence: Synthetic peptide
  Seed: RGTRVVPR
RMTRVVPR

SEQ ID NO: 14056 - protein, 8 aa, Artificial Sequence
  Description of Artificial Sequence: Synthetic peptide
  Seed: RGTRVVPR
RMTRVVPK

SEQ ID NO: 14057 - protein, 8 aa, Artificial Sequence
  Description of Artificial Sequence: Synthetic peptide
  Seed: RGTRVVPR
RFTRVVPR

SEQ ID NO: 14058 - protein, 8 aa, Artificial Sequence
  Description of Artificial Sequence: Synthetic peptide
  Seed: RGTRVVPR
RFTRVVPK

SEQ ID NO: 14059 - protein, 8 aa, Artificial Sequence
  Description of Artificial Sequence: Synthetic peptide
  Seed: RGTRVVPR
RSTRVVPR

SEQ ID NO: 14060 - protein, 8 aa, Artificial Sequence
  Description of Artificial Sequence: Synthetic peptide
  Seed: RGTRVVPR
RTTRVVPR

SEQ ID NO: 14061 - protein, 8 aa, Artificial Sequence
  Description of Artificial Sequence: Synthetic peptide
  Seed: RGTRVVPR
RTTRVVPK

SEQ ID NO: 14062 - protein, 8 aa, Artificial Sequence
  Description of Artificial Sequence: Synthetic peptide
  Seed: RGTRVVPR
RWTRVVPK

SEQ ID NO: 14063 - protein, 10 aa, Artificial Sequence
  Description of Artificial Sequence: Synthetic peptide
  Seed: RGTKVSPRGK
RYTKVSPRGY

SEQ ID NO: 14064 - protein, 8 aa, Artificial Sequence
  Description of Artificial Sequence: Synthetic peptide
  Seed: RGTRVVPR
RYTRVVPR

SEQ ID NO: 14065 - protein, 8 aa, Artificial Sequence
  Description of Artificial Sequence: Synthetic peptide
  Seed: RGTRVVPR
RYTRVVPK

SEQ ID NO: 14066 - protein, 8 aa, Artificial Sequence
  Description of Artificial Sequence: Synthetic peptide
  Seed: RGTRVVPR
RVTRVVPR

SEQ ID NO: 14067 - protein, 8 aa, Artificial Sequence
  Description of Artificial Sequence: Synthetic peptide
  Seed: RGTRVVPR
RVTRVVPK

SEQ ID NO: 14068 - protein, 10 aa, Artificial Sequence
  Description of Artificial Sequence: Synthetic peptide
  Seed: RGTRVVPRGQ
RATRVVPRGA

SEQ ID NO: 14069 - protein, 10 aa, Artificial Sequence
  Description of Artificial Sequence: Synthetic peptide
  Seed: RGTRVVPRGQ
RATRVVPRGR

SEQ ID NO: 14070 - protein, 10 aa, Artificial Sequence
  Description of Artificial Sequence: Synthetic peptide
  Seed: RGTRVVPRGQ
RATRVVPRGC

SEQ ID NO: 14071 - protein, 10 aa, Artificial Sequence
  Description of Artificial Sequence: Synthetic peptide
  Seed: RGTRVVPRGQ
RATRVVPRGQ

SEQ ID NO: 14072 - protein, 10 aa, Artificial Sequence
  Description of Artificial Sequence: Synthetic peptide
  Seed: RGTRVVPRGQ
RATRVVPRGE

SEQ ID NO: 14073 - protein, 8 aa, Artificial Sequence
  Description of Artificial Sequence: Synthetic peptide
  Seed: RGTRVVPR
RLTRVVPR

SEQ ID NO: 14074 - protein, 8 aa, Artificial Sequence
  Description of Artificial Sequence: Synthetic peptide
  Seed: RGTRVVPR
RITRVVPK

SEQ ID NO: 14075 - protein, 8 aa, Artificial Sequence
  Description of Artificial Sequence: Synthetic peptide
  Seed: RGTRVVPR
RITRVVPR

SEQ ID NO: 14076 - protein, 8 aa, Artificial Sequence
  Description of Artificial Sequence: Synthetic peptide
  Seed: RGTRVVPR
RHTRVVPR

SEQ ID NO: 14077 - protein, 10 aa, Artificial Sequence
  Description of Artificial Sequence: Synthetic peptide
  Seed: RGTKVSPRGK
RYTKVSPRGV

SEQ ID NO: 14078 - protein, 10 aa, Artificial Sequence
  Description of Artificial Sequence: Synthetic peptide
  Seed: RGTKVSPRGK
RVTKVSPRGA

SEQ ID NO: 14079 - protein, 10 aa, Artificial Sequence
  Description of Artificial Sequence: Synthetic peptide
  Seed: RGTKVSPRGK
RVTKVSPRGC

SEQ ID NO: 14080 - protein, 10 aa, Artificial Sequence
  Description of Artificial Sequence: Synthetic peptide
  Seed: RGTKVSPRGK
RVTKVSPRGG

SEQ ID NO: 14081 - protein, 10 aa, Artificial Sequence
  Description of Artificial Sequence: Synthetic peptide
  Seed: RGTKVSPRGK
RVTKVSPRGI

SEQ ID NO: 14082 - protein, 10 aa, Artificial Sequence
  Description of Artificial Sequence: Synthetic peptide
  Seed: RGTKVSPRGK
RVTKVSPRGL

SEQ ID NO: 14083 - protein, 10 aa, Artificial Sequence
  Description of Artificial Sequence: Synthetic peptide
  Seed: RGTKVSPRGK
RVTKVSPRGK

SEQ ID NO: 14084 - protein, 10 aa, Artificial Sequence
  Description of Artificial Sequence: Synthetic peptide
  Seed: RGTKVSPRGK
RVTKVSPRGM

SEQ ID NO: 14085 - protein, 10 aa, Artificial Sequence
  Description of Artificial Sequence: Synthetic peptide
  Seed: RGTKVSPRGK
RVTKVSPRGF

SEQ ID NO: 14086 - protein, 10 aa, Artificial Sequence
  Description of Artificial Sequence: Synthetic peptide
  Seed: RGTKVSPRGK
RVTKVSPRGS

SEQ ID NO: 14087 - protein, 10 aa, Artificial Sequence
  Description of Artificial Sequence: Synthetic peptide
  Seed: RGTKVSPRGK
RVTKVSPRGT

SEQ ID NO: 14088 - protein, 10 aa, Artificial Sequence
  Description of Artificial Sequence: Synthetic peptide
  Seed: RGTKVSPRGK
RVTKVSPRGY

SEQ ID NO: 14089 - protein, 10 aa, Artificial Sequence
  Description of Artificial Sequence: Synthetic peptide
  Seed: RGTKVSPRGK
RVTKVSPRGV

SEQ ID NO: 14090 - protein, 8 aa, Artificial Sequence
  Description of Artificial Sequence: Synthetic peptide
  Seed: RGTRVVPR
RATRVVPR

SEQ ID NO: 14091 - protein, 8 aa, Artificial Sequence
  Description of Artificial Sequence: Synthetic peptide
  Seed: RGTRVVPR
RRTRVVPR

SEQ ID NO: 14092 - protein, 8 aa, Artificial Sequence
  Description of Artificial Sequence: Synthetic peptide
  Seed: RGTRVVPR
RNTRVVPR

SEQ ID NO: 14093 - protein, 8 aa, Artificial Sequence
  Description of Artificial Sequence: Synthetic peptide
  Seed: RGTRVVPR
RCTRVVPR

SEQ ID NO: 14094 - protein, 8 aa, Artificial Sequence
  Description of Artificial Sequence: Synthetic peptide
  Seed: RGTRVVPR
RQTRVVPR

SEQ ID NO: 14095 - protein, 8 aa, Artificial Sequence
  Description of Artificial Sequence: Synthetic peptide
  Seed: RGTRVVPR
RQTRVVPK

SEQ ID NO: 14096 - protein, 10 aa, Artificial Sequence
  Description of Artificial Sequence: Synthetic peptide
  Seed: RGTKVSPRGK
RPTKVSPRGV

SEQ ID NO: 14097 - protein, 10 aa, Artificial Sequence
  Description of Artificial Sequence: Synthetic peptide
  Seed: RGTKVSPRGK
RPTKVSPRGT

SEQ ID NO: 14098 - protein, 10 aa, Artificial Sequence
  Description of Artificial Sequence: Synthetic peptide
  Seed: RGTRVVPRGQ
RMTRVVPRGR

SEQ ID NO: 14099 - protein, 10 aa, Artificial Sequence
  Description of Artificial Sequence: Synthetic peptide
  Seed: RGTKVSPRGK
RITKVSPRGF

SEQ ID NO: 14100 - protein, 10 aa, Artificial Sequence
  Description of Artificial Sequence: Synthetic peptide
  Seed: RGTKVSPRGK
RHTKVSPRGY

SEQ ID NO: 14101 - protein, 10 aa, Artificial Sequence
  Description of Artificial Sequence: Synthetic peptide
  Seed: RGTKVSPRGK
RHTKVSPRGV

SEQ ID NO: 14102 - protein, 10 aa, Artificial Sequence
  Description of Artificial Sequence: Synthetic peptide
  Seed: RGTKVSPRGK
RITKVSPRGA

SEQ ID NO: 14103 - protein, 10 aa, Artificial Sequence
  Description of Artificial Sequence: Synthetic peptide
  Seed: RGTKVSPRGK
RITKVSPRGC

SEQ ID NO: 14104 - protein, 10 aa, Artificial Sequence
  Description of Artificial Sequence: Synthetic peptide
  Seed: RGTKVSPRGK
RITKVSPRGG

SEQ ID NO: 14105 - protein, 10 aa, Artificial Sequence
  Description of Artificial Sequence: Synthetic peptide
  Seed: RGTKVSPRGK
RITKVSPRGI

SEQ ID NO: 14106 - protein, 10 aa, Artificial Sequence
  Description of Artificial Sequence: Synthetic peptide
  Seed: RGTKVSPRGK
RITKVSPRGL

SEQ ID NO: 14107 - protein, 10 aa, Artificial Sequence
  Description of Artificial Sequence: Synthetic peptide
  Seed: RGTKVSPRGK
RITKVSPRGK

SEQ ID NO: 14108 - protein, 10 aa, Artificial Sequence
  Description of Artificial Sequence: Synthetic peptide
  Seed: RGTKVSPRGK
RITKVSPRGM

SEQ ID NO: 14109 - protein, 10 aa, Artificial Sequence
  Description of Artificial Sequence: Synthetic peptide
  Seed: RGTKVSPRGK
RITKVSPRGS

SEQ ID NO: 14110 - protein, 10 aa, Artificial Sequence
  Description of Artificial Sequence: Synthetic peptide
  Seed: RGTKVSPRGK
RLTKVSPRGS

SEQ ID NO: 14111 - protein, 10 aa, Artificial Sequence
  Description of Artificial Sequence: Synthetic peptide
  Seed: RGTKVSPRGK
RITKVSPRGT

SEQ ID NO: 14112 - protein, 10 aa, Artificial Sequence
  Description of Artificial Sequence: Synthetic peptide
  Seed: RGTKVSPRGK
RITKVSPRGY

SEQ ID NO: 14113 - protein, 10 aa, Artificial Sequence
  Description of Artificial Sequence: Synthetic peptide
  Seed: RGTKVSPRGK
RITKVSPRGV

SEQ ID NO: 14114 - protein, 10 aa, Artificial Sequence
  Description of Artificial Sequence: Synthetic peptide
  Seed: RGTKVSPRGK
RLTKVSPRGA

SEQ ID NO: 14115 - protein, 10 aa, Artificial Sequence
  Description of Artificial Sequence: Synthetic peptide
  Seed: RGTKVSPRGK
RLTKVSPRGC

SEQ ID NO: 14116 - protein, 10 aa, Artificial Sequence
  Description of Artificial Sequence: Synthetic peptide
  Seed: RGTKVSPRGK
RLTKVSPRGI

SEQ ID NO: 14117 - protein, 10 aa, Artificial Sequence
  Description of Artificial Sequence: Synthetic peptide
  Seed: RGTKVSPRGK
RLTKVSPRGL

SEQ ID NO: 14118 - protein, 10 aa, Artificial Sequence
  Description of Artificial Sequence: Synthetic peptide
  Seed: RGTKVSPRGK
RLTKVSPRGK

SEQ ID NO: 14119 - protein, 10 aa, Artificial Sequence
  Description of Artificial Sequence: Synthetic peptide
  Seed: RGTKVSPRGK
RLTKVSPRGM

SEQ ID NO: 14120 - protein, 10 aa, Artificial Sequence
  Description of Artificial Sequence: Synthetic peptide
  Seed: RGTKVSPRGK
RHTKVSPRGT

SEQ ID NO: 14121 - protein, 10 aa, Artificial Sequence
  Description of Artificial Sequence: Synthetic peptide
  Seed: RGTKVSPRGK
RHTKVSPRGS

SEQ ID NO: 14122 - protein, 10 aa, Artificial Sequence
  Description of Artificial Sequence: Synthetic peptide
  Seed: RGTKVSPRGK
RHTKVSPRGF

SEQ ID NO: 14123 - protein, 10 aa, Artificial Sequence
  Description of Artificial Sequence: Synthetic peptide
  Seed: RGTKVSPRGK
RHTKVSPRGM

SEQ ID NO: 14124 - protein, 10 aa, Artificial Sequence
  Description of Artificial Sequence: Synthetic peptide
  Seed: RGTKVSPRGK
RETKVSPRGM

SEQ ID NO: 14125 - protein, 10 aa, Artificial Sequence
  Description of Artificial Sequence: Synthetic peptide
  Seed: RGTKVSPRGK
RETKVSPRGS

SEQ ID NO: 14126 - protein, 10 aa, Artificial Sequence
  Description of Artificial Sequence: Synthetic peptide
  Seed: RGTKVSPRGK
RETKVSPRGT

SEQ ID NO: 14127 - protein, 10 aa, Artificial Sequence
  Description of Artificial Sequence: Synthetic peptide
  Seed: RGTKVSPRGK
RETKVSPRGY

SEQ ID NO: 14128 - protein, 10 aa, Artificial Sequence
  Description of Artificial Sequence: Synthetic peptide
  Seed: RGTKVSPRGK
RETKVSPRGV

SEQ ID NO: 14129 - protein, 10 aa, Artificial Sequence
  Description of Artificial Sequence: Synthetic peptide
  Seed: RGTKVSPRGK
RGTKVSPRGA

SEQ ID NO: 14130 - protein, 10 aa, Artificial Sequence
  Description of Artificial Sequence: Synthetic peptide
  Seed: RGTKVSPRGK
RGTKVSPRGC

SEQ ID NO: 14131 - protein, 10 aa, Artificial Sequence
  Description of Artificial Sequence: Synthetic peptide
  Seed: RGTKVSPRGK
RGTKVSPRGI

SEQ ID NO: 14132 - protein, 10 aa, Artificial Sequence
  Description of Artificial Sequence: Synthetic peptide
  Seed: RGTKVSPRGK
RGTKVSPRGL

SEQ ID NO: 14133 - protein, 10 aa, Artificial Sequence
  Description of Artificial Sequence: Synthetic peptide
  Seed: RGTKVSPRGK
RGTKVSPRGM

SEQ ID NO: 14134 - protein, 10 aa, Artificial Sequence
  Description of Artificial Sequence: Synthetic peptide
  Seed: RGTKVSPRGK
RGTKVSPRGS

SEQ ID NO: 14135 - protein, 10 aa, Artificial Sequence
  Description of Artificial Sequence: Synthetic peptide
  Seed: RGTKVSPRGK
RGTKVSPRGT

SEQ ID NO: 14136 - protein, 10 aa, Artificial Sequence
  Description of Artificial Sequence: Synthetic peptide
  Seed: RGTKVSPRGK
RGTKVSPRGY

SEQ ID NO: 14137 - protein, 10 aa, Artificial Sequence
  Description of Artificial Sequence: Synthetic peptide
  Seed: RGTKVSPRGK
RGTKVSPRGV

SEQ ID NO: 14138 - protein, 10 aa, Artificial Sequence
  Description of Artificial Sequence: Synthetic peptide
  Seed: RGTKVSPRGK
RHTKVSPRGA

SEQ ID NO: 14139 - protein, 10 aa, Artificial Sequence
  Description of Artificial Sequence: Synthetic peptide
  Seed: RGTKVSPRGK
RHTKVSPRGC

SEQ ID NO: 14140 - protein, 10 aa, Artificial Sequence
  Description of Artificial Sequence: Synthetic peptide
  Seed: RGTKVSPRGK
RHTKVSPRGI

SEQ ID NO: 14141 - protein, 10 aa, Artificial Sequence
  Description of Artificial Sequence: Synthetic peptide
  Seed: RGTKVSPRGK
RHTKVSPRGL

SEQ ID NO: 14142 - protein, 10 aa, Artificial Sequence
  Description of Artificial Sequence: Synthetic peptide
  Seed: RGTKVSPRGK
RHTKVSPRGK

SEQ ID NO: 14143 - protein, 10 aa, Artificial Sequence
  Description of Artificial Sequence: Synthetic peptide
  Seed: RGTKVSPRGK
RLTKVSPRGF

SEQ ID NO: 14144 - protein, 10 aa, Artificial Sequence
  Description of Artificial Sequence: Synthetic peptide
  Seed: RGTKVSPRGK
RLTKVSPRGT

SEQ ID NO: 14145 - protein, 10 aa, Artificial Sequence
  Description of Artificial Sequence: Synthetic peptide
  Seed: RGTKVSPRGK
RPTKVSPRGS

SEQ ID NO: 14146 - protein, 10 aa, Artificial Sequence
  Description of Artificial Sequence: Synthetic peptide
  Seed: RGTKVSPRGK
RFTKVSPRGF

SEQ ID NO: 14147 - protein, 10 aa, Artificial Sequence
  Description of Artificial Sequence: Synthetic peptide
  Seed: RGTKVSPRGK
RMTKVSPRGY

SEQ ID NO: 14148 - protein, 10 aa, Artificial Sequence
  Description of Artificial Sequence: Synthetic peptide
  Seed: RGTKVSPRGK
RMTKVSPRGV

SEQ ID NO: 14149 - protein, 10 aa, Artificial Sequence
  Description of Artificial Sequence: Synthetic peptide
  Seed: RGTKVSPRGK
RFTKVSPRGA

SEQ ID NO: 14150 - protein, 10 aa, Artificial Sequence
  Description of Artificial Sequence: Synthetic peptide
  Seed: RGTKVSPRGK
RFTKVSPRGC

SEQ ID NO: 14151 - protein, 10 aa, Artificial Sequence
  Description of Artificial Sequence: Synthetic peptide
  Seed: RGTKVSPRGK
RFTKVSPRGG

SEQ ID NO: 14152 - protein, 10 aa, Artificial Sequence
  Description of Artificial Sequence: Synthetic peptide
  Seed: RGTKVSPRGK
RFTKVSPRGI

SEQ ID NO: 14153 - protein, 10 aa, Artificial Sequence
  Description of Artificial Sequence: Synthetic peptide
  Seed: RGTKVSPRGK
RFTKVSPRGL

SEQ ID NO: 14154 - protein, 10 aa, Artificial Sequence
  Description of Artificial Sequence: Synthetic peptide
  Seed: RGTKVSPRGK
RFTKVSPRGK

SEQ ID NO: 14155 - protein, 10 aa, Artificial Sequence
  Description of Artificial Sequence: Synthetic peptide
  Seed: RGTKVSPRGK
RFTKVSPRGM

SEQ ID NO: 14156 - protein, 10 aa, Artificial Sequence
  Description of Artificial Sequence: Synthetic peptide
  Seed: RGTKVSPRGK
RFTKVSPRGS

SEQ ID NO: 14157 - protein, 10 aa, Artificial Sequence
  Description of Artificial Sequence: Synthetic peptide
  Seed: RGTKVSPRGK
RLTKVSPRGY

SEQ ID NO: 14158 - protein, 10 aa, Artificial Sequence
  Description of Artificial Sequence: Synthetic peptide
  Seed: RGTKVSPRGK
RFTKVSPRGT

SEQ ID NO: 14159 - protein, 10 aa, Artificial Sequence
  Description of Artificial Sequence: Synthetic peptide
  Seed: RGTKVSPRGK
RFTKVSPRGY

SEQ ID NO: 14160 - protein, 10 aa, Artificial Sequence
  Description of Artificial Sequence: Synthetic peptide
  Seed: RGTKVSPRGK
RFTKVSPRGV

SEQ ID NO: 14161 - protein, 10 aa, Artificial Sequence
  Description of Artificial Sequence: Synthetic peptide
  Seed: RGTKVSPRGK
RPTKVSPRGA

SEQ ID NO: 14162 - protein, 10 aa, Artificial Sequence
  Description of Artificial Sequence: Synthetic peptide
  Seed: RGTKVSPRGK
RPTKVSPRGC

SEQ ID NO: 14163 - protein, 10 aa, Artificial Sequence
  Description of Artificial Sequence: Synthetic peptide
  Seed: RGTKVSPRGK
RPTKVSPRGI

SEQ ID NO: 14164 - protein, 10 aa, Artificial Sequence
  Description of Artificial Sequence: Synthetic peptide
  Seed: RGTKVSPRGK
RPTKVSPRGL

SEQ ID NO: 14165 - protein, 10 aa, Artificial Sequence
  Description of Artificial Sequence: Synthetic peptide
  Seed: RGTKVSPRGK
RPTKVSPRGK

SEQ ID NO: 14166 - protein, 10 aa, Artificial Sequence
  Description of Artificial Sequence: Synthetic peptide
  Seed: RGTKVSPRGK
RPTKVSPRGM

SEQ ID NO: 14167 - protein, 10 aa, Artificial Sequence
  Description of Artificial Sequence: Synthetic peptide
  Seed: RGTKVSPRGK
RMTKVSPRGT

SEQ ID NO: 14168 - protein, 10 aa, Artificial Sequence
  Description of Artificial Sequence: Synthetic peptide
  Seed: RGTKVSPRGK
RMTKVSPRGS

SEQ ID NO: 14169 - protein, 10 aa, Artificial Sequence
  Description of Artificial Sequence: Synthetic peptide
  Seed: RGTKVSPRGK
RMTKVSPRGF

SEQ ID NO: 14170 - protein, 10 aa, Artificial Sequence
  Description of Artificial Sequence: Synthetic peptide
  Seed: RGTKVSPRGK
RMTKVSPRGM

SEQ ID NO: 14171 - protein, 10 aa, Artificial Sequence
  Description of Artificial Sequence: Synthetic peptide
  Seed: RGTKVSPRGK
RLTKVSPRGV

SEQ ID NO: 14172 - protein, 10 aa, Artificial Sequence
  Description of Artificial Sequence: Synthetic peptide
  Seed: RGTKVSPRGK
RKTKVSPRGA

SEQ ID NO: 14173 - protein, 10 aa, Artificial Sequence
  Description of Artificial Sequence: Synthetic peptide
  Seed: RGTKVSPRGK
RKTKVSPRGC

SEQ ID NO: 14174 - protein, 10 aa, Artificial Sequence
  Description of Artificial Sequence: Synthetic peptide
  Seed: RGTKVSPRGK
RKTKVSPRGI

SEQ ID NO: 14175 - protein, 10 aa, Artificial Sequence
  Description of Artificial Sequence: Synthetic peptide
  Seed: RGTKVSPRGK
RKTKVSPRGL

SEQ ID NO: 14176 - protein, 10 aa, Artificial Sequence
  Description of Artificial Sequence: Synthetic peptide
  Seed: RGTKVSPRGK
RKTKVSPRGK

SEQ ID NO: 14177 - protein, 10 aa, Artificial Sequence
  Description of Artificial Sequence: Synthetic peptide
  Seed: RGTKVSPRGK
RKTKVSPRGM

SEQ ID NO: 14178 - protein, 10 aa, Artificial Sequence
  Description of Artificial Sequence: Synthetic peptide
  Seed: RGTKVSPRGK
RKTKVSPRGF

SEQ ID NO: 14179 - protein, 10 aa, Artificial Sequence
  Description of Artificial Sequence: Synthetic peptide
  Seed: RGTKVSPRGK
RKTKVSPRGS

SEQ ID NO: 14180 - protein, 10 aa, Artificial Sequence
  Description of Artificial Sequence: Synthetic peptide
  Seed: RGTKVSPRGK
RKTKVSPRGT

SEQ ID NO: 14181 - protein, 10 aa, Artificial Sequence
  Description of Artificial Sequence: Synthetic peptide
  Seed: RGTKVSPRGK
RKTKVSPRGY

SEQ ID NO: 14182 - protein, 10 aa, Artificial Sequence
  Description of Artificial Sequence: Synthetic peptide
  Seed: RGTKVSPRGK
RKTKVSPRGV

SEQ ID NO: 14183 - protein, 10 aa, Artificial Sequence
  Description of Artificial Sequence: Synthetic peptide
  Seed: RGTKVSPRGK
RMTKVSPRGA

SEQ ID NO: 14184 - protein, 10 aa, Artificial Sequence
  Description of Artificial Sequence: Synthetic peptide
  Seed: RGTKVSPRGK
RMTKVSPRGR

SEQ ID NO: 14185 - protein, 10 aa, Artificial Sequence
  Description of Artificial Sequence: Synthetic peptide
  Seed: RGTKVSPRGK
RMTKVSPRGC

SEQ ID NO: 14186 - protein, 10 aa, Artificial Sequence
  Description of Artificial Sequence: Synthetic peptide
  Seed: RGTKVSPRGK
RMTKVSPRGG

SEQ ID NO: 14187 - protein, 10 aa, Artificial Sequence
  Description of Artificial Sequence: Synthetic peptide
  Seed: RGTKVSPRGK
RMTKVSPRGI

SEQ ID NO: 14188 - protein, 10 aa, Artificial Sequence
  Description of Artificial Sequence: Synthetic peptide
  Seed: RGTKVSPRGK
RMTKVSPRGL

SEQ ID NO: 14189 - protein, 10 aa, Artificial Sequence
  Description of Artificial Sequence: Synthetic peptide
  Seed: RGTKVSPRGK
RMTKVSPRGK

SEQ ID NO: 14190 - protein, 10 aa, Artificial Sequence
  Description of Artificial Sequence: Synthetic peptide
  Seed: RGTRVVPRGQ
RATRVVPRGG

SEQ ID NO: 14191 - protein, 10 aa, Artificial Sequence
  Description of Artificial Sequence: Synthetic peptide
  Seed: RGTRVVPRGQ
RATRVVPRGI

SEQ ID NO: 14192 - protein, 10 aa, Artificial Sequence
  Description of Artificial Sequence: Synthetic peptide
  Seed: RGTRVVPRGQ
RATRVVPRGL

SEQ ID NO: 14193 - protein, 10 aa, Artificial Sequence
  Description of Artificial Sequence: Synthetic peptide
  Seed: RGTRVVPRGQ
RHTRVVPRGL

SEQ ID NO: 14194 - protein, 10 aa, Artificial Sequence
  Description of Artificial Sequence: Synthetic peptide
  Seed: RGTRVVPRGQ
RGTRVVPRGY

SEQ ID NO: 14195 - protein, 10 aa, Artificial Sequence
  Description of Artificial Sequence: Synthetic peptide
  Seed: RGTRVVPRGQ
RGTRVVPRGV

SEQ ID NO: 14196 - protein, 10 aa, Artificial Sequence
  Description of Artificial Sequence: Synthetic peptide
  Seed: RGTRVVPRGQ
RHTRVVPRGA

SEQ ID NO: 14197 - protein, 10 aa, Artificial Sequence
  Description of Artificial Sequence: Synthetic peptide
  Seed: RGTRVVPRGQ
RHTRVVPRGR

SEQ ID NO: 14198 - protein, 10 aa, Artificial Sequence
  Description of Artificial Sequence: Synthetic peptide
  Seed: RGTRVVPRGQ
RHTRVVPRGC

SEQ ID NO: 14199 - protein, 10 aa, Artificial Sequence
  Description of Artificial Sequence: Synthetic peptide
  Seed: RGTRVVPRGQ
RHTRVVPRGQ

SEQ ID NO: 14200 - protein, 10 aa, Artificial Sequence
  Description of Artificial Sequence: Synthetic peptide
  Seed: RGTRVVPRGQ
RHTRVVPRGE

SEQ ID NO: 14201 - protein, 10 aa, Artificial Sequence
  Description of Artificial Sequence: Synthetic peptide
  Seed: RGTRVVPRGQ
RHTRVVPRGG

SEQ ID NO: 14202 - protein, 10 aa, Artificial Sequence
  Description of Artificial Sequence: Synthetic peptide
  Seed: RGTRVVPRGQ
RHTRVVPRGI

SEQ ID NO: 14203 - protein, 10 aa, Artificial Sequence
  Description of Artificial Sequence: Synthetic peptide
  Seed: RGTRVVPRGQ
RHTRVVPRGK

SEQ ID NO: 14204 - protein, 10 aa, Artificial Sequence
  Description of Artificial Sequence: Synthetic peptide
  Seed: RGTRVVPRGQ
RITRVVPRGQ

SEQ ID NO: 14205 - protein, 10 aa, Artificial Sequence
  Description of Artificial Sequence: Synthetic peptide
  Seed: RGTRVVPRGQ
RHTRVVPRGM

SEQ ID NO: 14206 - protein, 10 aa, Artificial Sequence
  Description of Artificial Sequence: Synthetic peptide
  Seed: RGTRVVPRGQ
RHTRVVPRGF

SEQ ID NO: 14207 - protein, 10 aa, Artificial Sequence
  Description of Artificial Sequence: Synthetic peptide
  Seed: RGTRVVPRGQ
RHTRVVPRGP

SEQ ID NO: 14208 - protein, 10 aa, Artificial Sequence
  Description of Artificial Sequence: Synthetic peptide
  Seed: RGTRVVPRGQ
RHTRVVPRGS

SEQ ID NO: 14209 - protein, 10 aa, Artificial Sequence
  Description of Artificial Sequence: Synthetic peptide
  Seed: RGTRVVPRGQ
RHTRVVPRGT

SEQ ID NO: 14210 - protein, 10 aa, Artificial Sequence
  Description of Artificial Sequence: Synthetic peptide
  Seed: RGTRVVPRGQ
RHTRVVPRGY

SEQ ID NO: 14211 - protein, 10 aa, Artificial Sequence
  Description of Artificial Sequence: Synthetic peptide
  Seed: RGTRVVPRGQ
RHTRVVPRGV

SEQ ID NO: 14212 - protein, 10 aa, Artificial Sequence
  Description of Artificial Sequence: Synthetic peptide
  Seed: RGTRVVPRGQ
RITRVVPRGA

SEQ ID NO: 14213 - protein, 10 aa, Artificial Sequence
  Description of Artificial Sequence: Synthetic peptide
  Seed: RGTRVVPRGQ
RITRVVPRGR

SEQ ID NO: 14214 - protein, 10 aa, Artificial Sequence
  Description of Artificial Sequence: Synthetic peptide
  Seed: RGTRVVPRGQ
RGTRVVPRGT

SEQ ID NO: 14215 - protein, 10 aa, Artificial Sequence
  Description of Artificial Sequence: Synthetic peptide
  Seed: RGTRVVPRGQ
RGTRVVPRGS

SEQ ID NO: 14216 - protein, 10 aa, Artificial Sequence
  Description of Artificial Sequence: Synthetic peptide
  Seed: RGTRVVPRGQ
RGTRVVPRGP

SEQ ID NO: 14217 - protein, 10 aa, Artificial Sequence
  Description of Artificial Sequence: Synthetic peptide
  Seed: RGTRVVPRGQ
RGTRVVPRGF

SEQ ID NO: 14218 - protein, 10 aa, Artificial Sequence
  Description of Artificial Sequence: Synthetic peptide
  Seed: RGTRVVPRGQ
RETRVVPRGI

SEQ ID NO: 14219 - protein, 10 aa, Artificial Sequence
  Description of Artificial Sequence: Synthetic peptide
  Seed: RGTRVVPRGQ
RETRVVPRGL

SEQ ID NO: 14220 - protein, 10 aa, Artificial Sequence
  Description of Artificial Sequence: Synthetic peptide
  Seed: RGTRVVPRGQ
RETRVVPRGK

SEQ ID NO: 14221 - protein, 10 aa, Artificial Sequence
  Description of Artificial Sequence: Synthetic peptide
  Seed: RGTRVVPRGQ
RETRVVPRGM

SEQ ID NO: 14222 - protein, 10 aa, Artificial Sequence
  Description of Artificial Sequence: Synthetic peptide
  Seed: RGTRVVPRGQ
RETRVVPRGF

SEQ ID NO: 14223 - protein, 10 aa, Artificial Sequence
  Description of Artificial Sequence: Synthetic peptide
  Seed: RGTRVVPRGQ
RETRVVPRGP

SEQ ID NO: 14224 - protein, 10 aa, Artificial Sequence
  Description of Artificial Sequence: Synthetic peptide
  Seed: RGTRVVPRGQ
RETRVVPRGS

SEQ ID NO: 14225 - protein, 10 aa, Artificial Sequence
  Description of Artificial Sequence: Synthetic peptide
  Seed: RGTRVVPRGQ
RETRVVPRGT

SEQ ID NO: 14226 - protein, 10 aa, Artificial Sequence
  Description of Artificial Sequence: Synthetic peptide
  Seed: RGTRVVPRGQ
RETRVVPRGY

SEQ ID NO: 14227 - protein, 10 aa, Artificial Sequence
  Description of Artificial Sequence: Synthetic peptide
  Seed: RGTRVVPRGQ
RETRVVPRGV

SEQ ID NO: 14228 - protein, 10 aa, Artificial Sequence
  Description of Artificial Sequence: Synthetic peptide
  Seed: RGTRVVPRGQ
RGTRVVPRGA

SEQ ID NO: 14229 - protein, 10 aa, Artificial Sequence
  Description of Artificial Sequence: Synthetic peptide
  Seed: RGTRVVPRGQ
RGTRVVPRGR

SEQ ID NO: 14230 - protein, 10 aa, Artificial Sequence
  Description of Artificial Sequence: Synthetic peptide
  Seed: RGTRVVPRGQ
RGTRVVPRGC

SEQ ID NO: 14231 - protein, 10 aa, Artificial Sequence
  Description of Artificial Sequence: Synthetic peptide
  Seed: RGTRVVPRGQ
RGTRVVPRGE

SEQ ID NO: 14232 - protein, 10 aa, Artificial Sequence
  Description of Artificial Sequence: Synthetic peptide
  Seed: RGTRVVPRGQ
RGTRVVPRGG

SEQ ID NO: 14233 - protein, 10 aa, Artificial Sequence
  Description of Artificial Sequence: Synthetic peptide
  Seed: RGTRVVPRGQ
RGTRVVPRGI

SEQ ID NO: 14234 - protein, 10 aa, Artificial Sequence
  Description of Artificial Sequence: Synthetic peptide
  Seed: RGTRVVPRGQ
RGTRVVPRGL

SEQ ID NO: 14235 - protein, 10 aa, Artificial Sequence
  Description of Artificial Sequence: Synthetic peptide
  Seed: RGTRVVPRGQ
RGTRVVPRGM

SEQ ID NO: 14236 - protein, 10 aa, Artificial Sequence
  Description of Artificial Sequence: Synthetic peptide
  Seed: RGTRVVPRGQ
RITRVVPRGC

SEQ ID NO: 14237 - protein, 10 aa, Artificial Sequence
  Description of Artificial Sequence: Synthetic peptide
  Seed: RGTRVVPRGQ
RITRVVPRGE

SEQ ID NO: 14238 - protein, 10 aa, Artificial Sequence
  Description of Artificial Sequence: Synthetic peptide
  Seed: RGTRVVPRGQ
RATRVVPRGK

SEQ ID NO: 14239 - protein, 10 aa, Artificial Sequence
  Description of Artificial Sequence: Synthetic peptide
  Seed: RGTRVVPRGQ
RKTRVVPRGI

SEQ ID NO: 14240 - protein, 10 aa, Artificial Sequence
  Description of Artificial Sequence: Synthetic peptide
  Seed: RGTRVVPRGQ
RLTRVVPRGT

SEQ ID NO: 14241 - protein, 10 aa, Artificial Sequence
  Description of Artificial Sequence: Synthetic peptide
  Seed: RGTRVVPRGQ
RLTRVVPRGY

SEQ ID NO: 14242 - protein, 10 aa, Artificial Sequence
  Description of Artificial Sequence: Synthetic peptide
  Seed: RGTRVVPRGQ
RLTRVVPRGV

SEQ ID NO: 14243 - protein, 10 aa, Artificial Sequence
  Description of Artificial Sequence: Synthetic peptide
  Seed: RGTRVVPRGQ
RKTRVVPRGA

SEQ ID NO: 14244 - protein, 10 aa, Artificial Sequence
  Description of Artificial Sequence: Synthetic peptide
  Seed: RGTRVVPRGQ
RKTRVVPRGR

SEQ ID NO: 14245 - protein, 10 aa, Artificial Sequence
  Description of Artificial Sequence: Synthetic peptide
  Seed: RGTRVVPRGQ
RKTRVVPRGC

SEQ ID NO: 14246 - protein, 10 aa, Artificial Sequence
  Description of Artificial Sequence: Synthetic peptide
  Seed: RGTRVVPRGQ
RKTRVVPRGQ

SEQ ID NO: 14247 - protein, 10 aa, Artificial Sequence
  Description of Artificial Sequence: Synthetic peptide
  Seed: RGTRVVPRGQ
RKTRVVPRGE

SEQ ID NO: 14248 - protein, 10 aa, Artificial Sequence
  Description of Artificial Sequence: Synthetic peptide
  Seed: RGTRVVPRGQ
RKTRVVPRGG

SEQ ID NO: 14249 - protein, 10 aa, Artificial Sequence
  Description of Artificial Sequence: Synthetic peptide
  Seed: RGTRVVPRGQ
RKTRVVPRGL

SEQ ID NO: 14250 - protein, 10 aa, Artificial Sequence
  Description of Artificial Sequence: Synthetic peptide
  Seed: RGTRVVPRGQ
RITRVVPRGG

SEQ ID NO: 14251 - protein, 10 aa, Artificial Sequence
  Description of Artificial Sequence: Synthetic peptide
  Seed: RGTRVVPRGQ
RKTRVVPRGK

SEQ ID NO: 14252 - protein, 10 aa, Artificial Sequence
  Description of Artificial Sequence: Synthetic peptide
  Seed: RGTRVVPRGQ
RKTRVVPRGM

SEQ ID NO: 14253 - protein, 10 aa, Artificial Sequence
  Description of Artificial Sequence: Synthetic peptide
  Seed: RGTRVVPRGQ
RKTRVVPRGF

SEQ ID NO: 14254 - protein, 10 aa, Artificial Sequence
  Description of Artificial Sequence: Synthetic peptide
  Seed: RGTRVVPRGQ
RKTRVVPRGP

SEQ ID NO: 14255 - protein, 10 aa, Artificial Sequence
  Description of Artificial Sequence: Synthetic peptide
  Seed: RGTRVVPRGQ
RKTRVVPRGS

SEQ ID NO: 14256 - protein, 10 aa, Artificial Sequence
  Description of Artificial Sequence: Synthetic peptide
  Seed: RGTRVVPRGQ
RKTRVVPRGT

SEQ ID NO: 14257 - protein, 10 aa, Artificial Sequence
  Description of Artificial Sequence: Synthetic peptide
  Seed: RGTRVVPRGQ
RKTRVVPRGY

SEQ ID NO: 14258 - protein, 10 aa, Artificial Sequence
  Description of Artificial Sequence: Synthetic peptide
  Seed: RGTRVVPRGQ
RKTRVVPRGV

SEQ ID NO: 14259 - protein, 10 aa, Artificial Sequence
  Description of Artificial Sequence: Synthetic peptide
  Seed: RGTRVVPRGQ
RMTRVVPRGA

SEQ ID NO: 14260 - protein, 10 aa, Artificial Sequence
  Description of Artificial Sequence: Synthetic peptide
  Seed: RGTRVVPRGQ
RLTRVVPRGS

SEQ ID NO: 14261 - protein, 10 aa, Artificial Sequence
  Description of Artificial Sequence: Synthetic peptide
  Seed: RGTRVVPRGQ
RLTRVVPRGP

SEQ ID NO: 14262 - protein, 10 aa, Artificial Sequence
  Description of Artificial Sequence: Synthetic peptide
  Seed: RGTRVVPRGQ
RLTRVVPRGF

SEQ ID NO: 14263 - protein, 10 aa, Artificial Sequence
  Description of Artificial Sequence: Synthetic peptide
  Seed: RGTRVVPRGQ
RLTRVVPRGM

SEQ ID NO: 14264 - protein, 10 aa, Artificial Sequence
  Description of Artificial Sequence: Synthetic peptide
  Seed: RGTRVVPRGQ
RITRVVPRGI

SEQ ID NO: 14265 - protein, 10 aa, Artificial Sequence
  Description of Artificial Sequence: Synthetic peptide
  Seed: RGTRVVPRGQ
RITRVVPRGL

SEQ ID NO: 14266 - protein, 10 aa, Artificial Sequence
  Description of Artificial Sequence: Synthetic peptide
  Seed: RGTRVVPRGQ
RITRVVPRGK

SEQ ID NO: 14267 - protein, 10 aa, Artificial Sequence
  Description of Artificial Sequence: Synthetic peptide
  Seed: RGTRVVPRGQ
RITRVVPRGM

SEQ ID NO: 14268 - protein, 10 aa, Artificial Sequence
  Description of Artificial Sequence: Synthetic peptide
  Seed: RGTRVVPRGQ
RITRVVPRGF

SEQ ID NO: 14269 - protein, 10 aa, Artificial Sequence
  Description of Artificial Sequence: Synthetic peptide
  Seed: RGTRVVPRGQ
RITRVVPRGP

SEQ ID NO: 14270 - protein, 10 aa, Artificial Sequence
  Description of Artificial Sequence: Synthetic peptide
  Seed: RGTRVVPRGQ
RITRVVPRGS

SEQ ID NO: 14271 - protein, 10 aa, Artificial Sequence
  Description of Artificial Sequence: Synthetic peptide
  Seed: RGTRVVPRGQ
RITRVVPRGT

SEQ ID NO: 14272 - protein, 10 aa, Artificial Sequence
  Description of Artificial Sequence: Synthetic peptide
  Seed: RGTRVVPRGQ
RITRVVPRGY

SEQ ID NO: 14273 - protein, 10 aa, Artificial Sequence
  Description of Artificial Sequence: Synthetic peptide
  Seed: RGTRVVPRGQ
RITRVVPRGV

SEQ ID NO: 14274 - protein, 10 aa, Artificial Sequence
  Description of Artificial Sequence: Synthetic peptide
  Seed: RGTRVVPRGQ
RLTRVVPRGA

SEQ ID NO: 14275 - protein, 10 aa, Artificial Sequence
  Description of Artificial Sequence: Synthetic peptide
  Seed: RGTRVVPRGQ
RLTRVVPRGR

SEQ ID NO: 14276 - protein, 10 aa, Artificial Sequence
  Description of Artificial Sequence: Synthetic peptide
  Seed: RGTRVVPRGQ
RLTRVVPRGC

SEQ ID NO: 14277 - protein, 10 aa, Artificial Sequence
  Description of Artificial Sequence: Synthetic peptide
  Seed: RGTRVVPRGQ
RLTRVVPRGQ

SEQ ID NO: 14278 - protein, 10 aa, Artificial Sequence
  Description of Artificial Sequence: Synthetic peptide
  Seed: RGTRVVPRGQ
RLTRVVPRGE

SEQ ID NO: 14279 - protein, 10 aa, Artificial Sequence
  Description of Artificial Sequence: Synthetic peptide
  Seed: RGTRVVPRGQ
RLTRVVPRGG

SEQ ID NO: 14280 - protein, 10 aa, Artificial Sequence
  Description of Artificial Sequence: Synthetic peptide
  Seed: RGTRVVPRGQ
RLTRVVPRGI

SEQ ID NO: 14281 - protein, 10 aa, Artificial Sequence
  Description of Artificial Sequence: Synthetic peptide
  Seed: RGTRVVPRGQ
RLTRVVPRGL

SEQ ID NO: 14282 - protein, 10 aa, Artificial Sequence
  Description of Artificial Sequence: Synthetic peptide
  Seed: RGTRVVPRGQ
RLTRVVPRGK

SEQ ID NO: 14283 - protein, 10 aa, Artificial Sequence
  Description of Artificial Sequence: Synthetic peptide
  Seed: RGTRVVPRGQ
RETRVVPRGG

SEQ ID NO: 14284 - protein, 10 aa, Artificial Sequence
  Description of Artificial Sequence: Synthetic peptide
  Seed: RGTRVVPRGQ
RETRVVPRGE

SEQ ID NO: 14285 - protein, 10 aa, Artificial Sequence
  Description of Artificial Sequence: Synthetic peptide
  Seed: RGTRVVPRGQ
RETRVVPRGQ

SEQ ID NO: 14286 - protein, 10 aa, Artificial Sequence
  Description of Artificial Sequence: Synthetic peptide
  Seed: RGTRVVPRGQ
RNTRVVPRGM

SEQ ID NO: 14287 - protein, 10 aa, Artificial Sequence
  Description of Artificial Sequence: Synthetic peptide
  Seed: RGTRVVPRGQ
RNTRVVPRGA

SEQ ID NO: 14288 - protein, 10 aa, Artificial Sequence
  Description of Artificial Sequence: Synthetic peptide
  Seed: RGTRVVPRGQ
RNTRVVPRGR

SEQ ID NO: 14289 - protein, 10 aa, Artificial Sequence
  Description of Artificial Sequence: Synthetic peptide
  Seed: RGTRVVPRGQ
RNTRVVPRGC

SEQ ID NO: 14290 - protein, 10 aa, Artificial Sequence
  Description of Artificial Sequence: Synthetic peptide
  Seed: RGTRVVPRGQ
RNTRVVPRGQ

SEQ ID NO: 14291 - protein, 10 aa, Artificial Sequence
  Description of Artificial Sequence: Synthetic peptide
  Seed: RGTRVVPRGQ
RNTRVVPRGE

SEQ ID NO: 14292 - protein, 10 aa, Artificial Sequence
  Description of Artificial Sequence: Synthetic peptide
  Seed: RGTRVVPRGQ
RNTRVVPRGG

SEQ ID NO: 14293 - protein, 10 aa, Artificial Sequence
  Description of Artificial Sequence: Synthetic peptide
  Seed: RGTRVVPRGQ
RNTRVVPRGI

SEQ ID NO: 14294 - protein, 10 aa, Artificial Sequence
  Description of Artificial Sequence: Synthetic peptide
  Seed: RGTRVVPRGQ
RNTRVVPRGL

SEQ ID NO: 14295 - protein, 10 aa, Artificial Sequence
  Description of Artificial Sequence: Synthetic peptide
  Seed: RGTRVVPRGQ
RNTRVVPRGK

SEQ ID NO: 14296 - protein, 10 aa, Artificial Sequence
  Description of Artificial Sequence: Synthetic peptide
  Seed: RGTRVVPRGQ
RNTRVVPRGF

SEQ ID NO: 14297 - protein, 10 aa, Artificial Sequence
  Description of Artificial Sequence: Synthetic peptide
  Seed: RGTRVVPRGQ
RETRVVPRGC

SEQ ID NO: 14298 - protein, 10 aa, Artificial Sequence
  Description of Artificial Sequence: Synthetic peptide
  Seed: RGTRVVPRGQ
RNTRVVPRGP

SEQ ID NO: 14299 - protein, 10 aa, Artificial Sequence
  Description of Artificial Sequence: Synthetic peptide
  Seed: RGTRVVPRGQ
RNTRVVPRGS

SEQ ID NO: 14300 - protein, 10 aa, Artificial Sequence
  Description of Artificial Sequence: Synthetic peptide
  Seed: RGTRVVPRGQ
RNTRVVPRGT

SEQ ID NO: 14301 - protein, 10 aa, Artificial Sequence
  Description of Artificial Sequence: Synthetic peptide
  Seed: RGTRVVPRGQ
RNTRVVPRGY

SEQ ID NO: 14302 - protein, 10 aa, Artificial Sequence
  Description of Artificial Sequence: Synthetic peptide
  Seed: RGTRVVPRGQ
RNTRVVPRGV

SEQ ID NO: 14303 - protein, 10 aa, Artificial Sequence
  Description of Artificial Sequence: Synthetic peptide
  Seed: RGTRVVPRGQ
RDTRVVPRGA

SEQ ID NO: 14304 - protein, 10 aa, Artificial Sequence
  Description of Artificial Sequence: Synthetic peptide
  Seed: RGTRVVPRGQ
RDTRVVPRGR

SEQ ID NO: 14305 - protein, 10 aa, Artificial Sequence
  Description of Artificial Sequence: Synthetic peptide
  Seed: RGTRVVPRGQ
RDTRVVPRGC

SEQ ID NO: 14306 - protein, 10 aa, Artificial Sequence
  Description of Artificial Sequence: Synthetic peptide
  Seed: RGTRVVPRGQ
RDTRVVPRGQ

SEQ ID NO: 14307 - protein, 10 aa, Artificial Sequence
  Description of Artificial Sequence: Synthetic peptide
  Seed: RGTRVVPRGQ
RRTRVVPRGV

SEQ ID NO: 14308 - protein, 10 aa, Artificial Sequence
  Description of Artificial Sequence: Synthetic peptide
  Seed: RGTRVVPRGQ
RRTRVVPRGY

SEQ ID NO: 14309 - protein, 10 aa, Artificial Sequence
  Description of Artificial Sequence: Synthetic peptide
  Seed: RGTRVVPRGQ
RRTRVVPRGT

SEQ ID NO: 14310 - protein, 10 aa, Artificial Sequence
  Description of Artificial Sequence: Synthetic peptide
  Seed: RGTRVVPRGQ
RRTRVVPRGS

SEQ ID NO: 14311 - protein, 10 aa, Artificial Sequence
  Description of Artificial Sequence: Synthetic peptide
  Seed: RGTRVVPRGQ
RATRVVPRGM

SEQ ID NO: 14312 - protein, 10 aa, Artificial Sequence
  Description of Artificial Sequence: Synthetic peptide
  Seed: RGTRVVPRGQ
RATRVVPRGF

SEQ ID NO: 14313 - protein, 10 aa, Artificial Sequence
  Description of Artificial Sequence: Synthetic peptide
  Seed: RGTRVVPRGQ
RATRVVPRGP

SEQ ID NO: 14314 - protein, 10 aa, Artificial Sequence
  Description of Artificial Sequence: Synthetic peptide
  Seed: RGTRVVPRGQ
RATRVVPRGS

SEQ ID NO: 14315 - protein, 10 aa, Artificial Sequence
  Description of Artificial Sequence: Synthetic peptide
  Seed: RGTRVVPRGQ
RATRVVPRGT

SEQ ID NO: 14316 - protein, 10 aa, Artificial Sequence
  Description of Artificial Sequence: Synthetic peptide
  Seed: RGTRVVPRGQ
RATRVVPRGY

SEQ ID NO: 14317 - protein, 10 aa, Artificial Sequence
  Description of Artificial Sequence: Synthetic peptide
  Seed: RGTRVVPRGQ
RATRVVPRGV

SEQ ID NO: 14318 - protein, 10 aa, Artificial Sequence
  Description of Artificial Sequence: Synthetic peptide
  Seed: RGTRVVPRGQ
RRTRVVPRGA

SEQ ID NO: 14319 - protein, 10 aa, Artificial Sequence
  Description of Artificial Sequence: Synthetic peptide
  Seed: RGTRVVPRGQ
RRTRVVPRGR

SEQ ID NO: 14320 - protein, 10 aa, Artificial Sequence
  Description of Artificial Sequence: Synthetic peptide
  Seed: RGTRVVPRGQ
RRTRVVPRGC

SEQ ID NO: 14321 - protein, 10 aa, Artificial Sequence
  Description of Artificial Sequence: Synthetic peptide
  Seed: RGTRVVPRGQ
RRTRVVPRGQ

SEQ ID NO: 14322 - protein, 10 aa, Artificial Sequence
  Description of Artificial Sequence: Synthetic peptide
  Seed: RGTRVVPRGQ
RRTRVVPRGE

SEQ ID NO: 14323 - protein, 10 aa, Artificial Sequence
  Description of Artificial Sequence: Synthetic peptide
  Seed: RGTRVVPRGQ
RRTRVVPRGG

SEQ ID NO: 14324 - protein, 10 aa, Artificial Sequence
  Description of Artificial Sequence: Synthetic peptide
  Seed: RGTRVVPRGQ
RRTRVVPRGI

SEQ ID NO: 14325 - protein, 10 aa, Artificial Sequence
  Description of Artificial Sequence: Synthetic peptide
  Seed: RGTRVVPRGQ
RRTRVVPRGL

SEQ ID NO: 14326 - protein, 10 aa, Artificial Sequence
  Description of Artificial Sequence: Synthetic peptide
  Seed: RGTRVVPRGQ
RRTRVVPRGK

SEQ ID NO: 14327 - protein, 10 aa, Artificial Sequence
  Description of Artificial Sequence: Synthetic peptide
  Seed: RGTRVVPRGQ
RRTRVVPRGM

SEQ ID NO: 14328 - protein, 10 aa, Artificial Sequence
  Description of Artificial Sequence: Synthetic peptide
  Seed: RGTRVVPRGQ
RRTRVVPRGF

SEQ ID NO: 14329 - protein, 10 aa, Artificial Sequence
  Description of Artificial Sequence: Synthetic peptide
  Seed: RGTRVVPRGQ
RRTRVVPRGP

SEQ ID NO: 14330 - protein, 10 aa, Artificial Sequence
  Description of Artificial Sequence: Synthetic peptide
  Seed: RGTRVVPRGQ
RDTRVVPRGE

SEQ ID NO: 14331 - protein, 10 aa, Artificial Sequence
  Description of Artificial Sequence: Synthetic peptide
  Seed: RGTRVVPRGQ
RDTRVVPRGG

SEQ ID NO: 14332 - protein, 10 aa, Artificial Sequence
  Description of Artificial Sequence: Synthetic peptide
  Seed: RGTRVVPRGQ
RDTRVVPRGI

SEQ ID NO: 14333 - protein, 10 aa, Artificial Sequence
  Description of Artificial Sequence: Synthetic peptide
  Seed: RGTRVVPRGQ
RCTRVVPRGT

SEQ ID NO: 14334 - protein, 10 aa, Artificial Sequence
  Description of Artificial Sequence: Synthetic peptide
  Seed: RGTRVVPRGQ
RCTRVVPRGV

SEQ ID NO: 14335 - protein, 10 aa, Artificial Sequence
  Description of Artificial Sequence: Synthetic peptide
  Seed: RGTRVVPRGQ
RQTRVVPRGA

SEQ ID NO: 14336 - protein, 10 aa, Artificial Sequence
  Description of Artificial Sequence: Synthetic peptide
  Seed: RGTRVVPRGQ
RQTRVVPRGR

SEQ ID NO: 14337 - protein, 10 aa, Artificial Sequence
  Description of Artificial Sequence: Synthetic peptide
  Seed: RGTRVVPRGQ
RQTRVVPRGC

SEQ ID NO: 14338 - protein, 10 aa, Artificial Sequence
  Description of Artificial Sequence: Synthetic peptide
  Seed: RGTRVVPRGQ
RQTRVVPRGQ

SEQ ID NO: 14339 - protein, 10 aa, Artificial Sequence
  Description of Artificial Sequence: Synthetic peptide
  Seed: RGTRVVPRGQ
RQTRVVPRGE

SEQ ID NO: 14340 - protein, 10 aa, Artificial Sequence
  Description of Artificial Sequence: Synthetic peptide
  Seed: RGTRVVPRGQ
RQTRVVPRGG

SEQ ID NO: 14341 - protein, 10 aa, Artificial Sequence
  Description of Artificial Sequence: Synthetic peptide
  Seed: RGTRVVPRGQ
RQTRVVPRGI

SEQ ID NO: 14342 - protein, 10 aa, Artificial Sequence
  Description of Artificial Sequence: Synthetic peptide
  Seed: RGTRVVPRGQ
RQTRVVPRGL

SEQ ID NO: 14343 - protein, 10 aa, Artificial Sequence
  Description of Artificial Sequence: Synthetic peptide
  Seed: RGTRVVPRGQ
RQTRVVPRGK

SEQ ID NO: 14344 - protein, 10 aa, Artificial Sequence
  Description of Artificial Sequence: Synthetic peptide
  Seed: RGTRVVPRGQ
RQTRVVPRGM

SEQ ID NO: 14345 - protein, 10 aa, Artificial Sequence
  Description of Artificial Sequence: Synthetic peptide
  Seed: RGTRVVPRGQ
RQTRVVPRGF

SEQ ID NO: 14346 - protein, 10 aa, Artificial Sequence
  Description of Artificial Sequence: Synthetic peptide
  Seed: RGTRVVPRGQ
RQTRVVPRGP

SEQ ID NO: 14347 - protein, 10 aa, Artificial Sequence
  Description of Artificial Sequence: Synthetic peptide
  Seed: RGTRVVPRGQ
RQTRVVPRGS

SEQ ID NO: 14348 - protein, 10 aa, Artificial Sequence
  Description of Artificial Sequence: Synthetic peptide
  Seed: RGTRVVPRGQ
RQTRVVPRGT

SEQ ID NO: 14349 - protein, 10 aa, Artificial Sequence
  Description of Artificial Sequence: Synthetic peptide
  Seed: RGTRVVPRGQ
RQTRVVPRGY

SEQ ID NO: 14350 - protein, 10 aa, Artificial Sequence
  Description of Artificial Sequence: Synthetic peptide
  Seed: RGTRVVPRGQ
RQTRVVPRGV

SEQ ID NO: 14351 - protein, 10 aa, Artificial Sequence
  Description of Artificial Sequence: Synthetic peptide
  Seed: RGTRVVPRGQ
RETRVVPRGA

SEQ ID NO: 14352 - protein, 10 aa, Artificial Sequence
  Description of Artificial Sequence: Synthetic peptide
  Seed: RGTRVVPRGQ
RETRVVPRGR

SEQ ID NO: 14353 - protein, 10 aa, Artificial Sequence
  Description of Artificial Sequence: Synthetic peptide
  Seed: RGTRVVPRGQ
RCTRVVPRGY

SEQ ID NO: 14354 - protein, 10 aa, Artificial Sequence
  Description of Artificial Sequence: Synthetic peptide
  Seed: RGTRVVPRGQ
RCTRVVPRGS

SEQ ID NO: 14355 - protein, 10 aa, Artificial Sequence
  Description of Artificial Sequence: Synthetic peptide
  Seed: RGTRVVPRGQ
RDTRVVPRGL

SEQ ID NO: 14356 - protein, 10 aa, Artificial Sequence
  Description of Artificial Sequence: Synthetic peptide
  Seed: RGTRVVPRGQ
RCTRVVPRGP

SEQ ID NO: 14357 - protein, 10 aa, Artificial Sequence
  Description of Artificial Sequence: Synthetic peptide
  Seed: RGTRVVPRGQ
RDTRVVPRGK

SEQ ID NO: 14358 - protein, 10 aa, Artificial Sequence
  Description of Artificial Sequence: Synthetic peptide
  Seed: RGTRVVPRGQ
RDTRVVPRGM

SEQ ID NO: 14359 - protein, 10 aa, Artificial Sequence
  Description of Artificial Sequence: Synthetic peptide
  Seed: RGTRVVPRGQ
RDTRVVPRGF

SEQ ID NO: 14360 - protein, 10 aa, Artificial Sequence
  Description of Artificial Sequence: Synthetic peptide
  Seed: RGTRVVPRGQ
RDTRVVPRGP

SEQ ID NO: 14361 - protein, 10 aa, Artificial Sequence
  Description of Artificial Sequence: Synthetic peptide
  Seed: RGTRVVPRGQ
RDTRVVPRGS

SEQ ID NO: 14362 - protein, 10 aa, Artificial Sequence
  Description of Artificial Sequence: Synthetic peptide
  Seed: RGTRVVPRGQ
RDTRVVPRGT

SEQ ID NO: 14363 - protein, 10 aa, Artificial Sequence
  Description of Artificial Sequence: Synthetic peptide
  Seed: RGTRVVPRGQ
RDTRVVPRGY

SEQ ID NO: 14364 - protein, 10 aa, Artificial Sequence
  Description of Artificial Sequence: Synthetic peptide
  Seed: RGTRVVPRGQ
RDTRVVPRGV

SEQ ID NO: 14365 - protein, 10 aa, Artificial Sequence
  Description of Artificial Sequence: Synthetic peptide
  Seed: RGTRVVPRGQ
RCTRVVPRGA

SEQ ID NO: 14366 - protein, 10 aa, Artificial Sequence
  Description of Artificial Sequence: Synthetic peptide
  Seed: RGTRVVPRGQ
RCTRVVPRGR

SEQ ID NO: 14367 - protein, 10 aa, Artificial Sequence
  Description of Artificial Sequence: Synthetic peptide
  Seed: RGTRVVPRGQ
RCTRVVPRGC

SEQ ID NO: 14368 - protein, 10 aa, Artificial Sequence
  Description of Artificial Sequence: Synthetic peptide
  Seed: RGTRVVPRGQ
RCTRVVPRGQ

SEQ ID NO: 14369 - protein, 10 aa, Artificial Sequence
  Description of Artificial Sequence: Synthetic peptide
  Seed: RGTRVVPRGQ
RCTRVVPRGE

SEQ ID NO: 14370 - protein, 10 aa, Artificial Sequence
  Description of Artificial Sequence: Synthetic peptide
  Seed: RGTRVVPRGQ
RCTRVVPRGG

SEQ ID NO: 14371 - protein, 10 aa, Artificial Sequence
  Description of Artificial Sequence: Synthetic peptide
  Seed: RGTRVVPRGQ
RCTRVVPRGI

SEQ ID NO: 14372 - protein, 10 aa, Artificial Sequence
  Description of Artificial Sequence: Synthetic peptide
  Seed: RGTRVVPRGQ
RCTRVVPRGL

SEQ ID NO: 14373 - protein, 10 aa, Artificial Sequence
  Description of Artificial Sequence: Synthetic peptide
  Seed: RGTRVVPRGQ
RCTRVVPRGK

SEQ ID NO: 14374 - protein, 10 aa, Artificial Sequence
  Description of Artificial Sequence: Synthetic peptide
  Seed: RGTRVVPRGQ
RCTRVVPRGM

SEQ ID NO: 14375 - protein, 10 aa, Artificial Sequence
  Description of Artificial Sequence: Synthetic peptide
  Seed: RGTRVVPRGQ
RCTRVVPRGF

SEQ ID NO: 14376 - protein, 9 aa, Artificial Sequence
  Description of Artificial Sequence: Synthetic peptide
  Seed: RLIQNSITI
RIIQNSITW

SEQ ID NO: 14377 - protein, 10 aa, Artificial Sequence
  Description of Artificial Sequence: Synthetic peptide
  Seed: RKTRSAYERM
RLTRSAYERM

SEQ ID NO: 14378 - protein, 10 aa, Artificial Sequence
  Description of Artificial Sequence: Synthetic peptide
  Seed: RKTRSAYERM
RLTRSAYERA

SEQ ID NO: 14379 - protein, 10 aa, Artificial Sequence
  Description of Artificial Sequence: Synthetic peptide
  Seed: RKTRSAYERM
RLTRSAYERR

SEQ ID NO: 14380 - protein, 10 aa, Artificial Sequence
  Description of Artificial Sequence: Synthetic peptide
  Seed: RKTRSAYERM
RLTRSAYERC

SEQ ID NO: 14381 - protein, 10 aa, Artificial Sequence
  Description of Artificial Sequence: Synthetic peptide
  Seed: RKTRSAYERM
RLTRSAYERQ

SEQ ID NO: 14382 - protein, 10 aa, Artificial Sequence
  Description of Artificial Sequence: Synthetic peptide
  Seed: RKTRSAYERM
RLTRSAYERG

SEQ ID NO: 14383 - protein, 10 aa, Artificial Sequence
  Description of Artificial Sequence: Synthetic peptide
  Seed: RKTRSAYERM
RLTRSAYERH

SEQ ID NO: 14384 - protein, 10 aa, Artificial Sequence
  Description of Artificial Sequence: Synthetic peptide
  Seed: RKTRSAYERM
RLTRSAYERI

SEQ ID NO: 14385 - protein, 10 aa, Artificial Sequence
  Description of Artificial Sequence: Synthetic peptide
  Seed: RKTRSAYERM
RLTRSAYERL

SEQ ID NO: 14386 - protein, 10 aa, Artificial Sequence
  Description of Artificial Sequence: Synthetic peptide
  Seed: RKTRSAYERM
RLTRSAYERK

SEQ ID NO: 14387 - protein, 10 aa, Artificial Sequence
  Description of Artificial Sequence: Synthetic peptide
  Seed: RKTRSAYERM
RLTRSAYERF

SEQ ID NO: 14388 - protein, 10 aa, Artificial Sequence
  Description of Artificial Sequence: Synthetic peptide
  Seed: RKTRSAYERM
RKTRSAYERG

SEQ ID NO: 14389 - protein, 10 aa, Artificial Sequence
  Description of Artificial Sequence: Synthetic peptide
  Seed: RKTRSAYERM
RLTRSAYERP

SEQ ID NO: 14390 - protein, 10 aa, Artificial Sequence
  Description of Artificial Sequence: Synthetic peptide
  Seed: RKTRSAYERM
RLTRSAYERS

SEQ ID NO: 14391 - protein, 10 aa, Artificial Sequence
  Description of Artificial Sequence: Synthetic peptide
  Seed: RKTRSAYERM
RLTRSAYERT

SEQ ID NO: 14392 - protein, 10 aa, Artificial Sequence
  Description of Artificial Sequence: Synthetic peptide
  Seed: RKTRSAYERM
RLTRSAYERW

SEQ ID NO: 14393 - protein, 10 aa, Artificial Sequence
  Description of Artificial Sequence: Synthetic peptide
  Seed: RKTRSAYERM
RLTRSAYERY

SEQ ID NO: 14394 - protein, 10 aa, Artificial Sequence
  Description of Artificial Sequence: Synthetic peptide
  Seed: RKTRSAYERM
RLTRSAYERV

SEQ ID NO: 14395 - protein, 10 aa, Artificial Sequence
  Description of Artificial Sequence: Synthetic peptide
  Seed: RKTRSAYERM
RKTRSAYERA

SEQ ID NO: 14396 - protein, 10 aa, Artificial Sequence
  Description of Artificial Sequence: Synthetic peptide
  Seed: RKTRSAYERM
RKTRSAYERR

SEQ ID NO: 14397 - protein, 10 aa, Artificial Sequence
  Description of Artificial Sequence: Synthetic peptide
  Seed: RKTRSAYERM
RKTRSAYERC

SEQ ID NO: 14398 - protein, 10 aa, Artificial Sequence
  Description of Artificial Sequence: Synthetic peptide
  Seed: RKTRSAYERM
RITRSAYERV

SEQ ID NO: 14399 - protein, 10 aa, Artificial Sequence
  Description of Artificial Sequence: Synthetic peptide
  Seed: RKTRSAYERM
RITRSAYERY

SEQ ID NO: 14400 - protein, 10 aa, Artificial Sequence
  Description of Artificial Sequence: Synthetic peptide
  Seed: RKTRSAYERM
RITRSAYERW

SEQ ID NO: 14401 - protein, 10 aa, Artificial Sequence
  Description of Artificial Sequence: Synthetic peptide
  Seed: RKTRSAYERM
RITRSAYERT

SEQ ID NO: 14402 - protein, 10 aa, Artificial Sequence
  Description of Artificial Sequence: Synthetic peptide
  Seed: RKTRSAYERM
RHTRSAYERP

SEQ ID NO: 14403 - protein, 10 aa, Artificial Sequence
  Description of Artificial Sequence: Synthetic peptide
  Seed: RKTRSAYERM
RHTRSAYERS

SEQ ID NO: 14404 - protein, 10 aa, Artificial Sequence
  Description of Artificial Sequence: Synthetic peptide
  Seed: RKTRSAYERM
RHTRSAYERT

SEQ ID NO: 14405 - protein, 10 aa, Artificial Sequence
  Description of Artificial Sequence: Synthetic peptide
  Seed: RKTRSAYERM
RHTRSAYERW

SEQ ID NO: 14406 - protein, 10 aa, Artificial Sequence
  Description of Artificial Sequence: Synthetic peptide
  Seed: RKTRSAYERM
RHTRSAYERY

SEQ ID NO: 14407 - protein, 10 aa, Artificial Sequence
  Description of Artificial Sequence: Synthetic peptide
  Seed: RKTRSAYERM
RHTRSAYERV

SEQ ID NO: 14408 - protein, 10 aa, Artificial Sequence
  Description of Artificial Sequence: Synthetic peptide
  Seed: RKTRSAYERM
RITRSAYERA

SEQ ID NO: 14409 - protein, 10 aa, Artificial Sequence
  Description of Artificial Sequence: Synthetic peptide
  Seed: RKTRSAYERM
RITRSAYERR

SEQ ID NO: 14410 - protein, 10 aa, Artificial Sequence
  Description of Artificial Sequence: Synthetic peptide
  Seed: RKTRSAYERM
RITRSAYERC

SEQ ID NO: 14411 - protein, 10 aa, Artificial Sequence
  Description of Artificial Sequence: Synthetic peptide
  Seed: RKTRSAYERM
RITRSAYERQ

SEQ ID NO: 14412 - protein, 10 aa, Artificial Sequence
  Description of Artificial Sequence: Synthetic peptide
  Seed: RKTRSAYERM
RITRSAYERG

SEQ ID NO: 14413 - protein, 10 aa, Artificial Sequence
  Description of Artificial Sequence: Synthetic peptide
  Seed: RKTRSAYERM
RITRSAYERH

SEQ ID NO: 14414 - protein, 10 aa, Artificial Sequence
  Description of Artificial Sequence: Synthetic peptide
  Seed: RKTRSAYERM
RITRSAYERI

SEQ ID NO: 14415 - protein, 10 aa, Artificial Sequence
  Description of Artificial Sequence: Synthetic peptide
  Seed: RKTRSAYERM
RITRSAYERL

SEQ ID NO: 14416 - protein, 10 aa, Artificial Sequence
  Description of Artificial Sequence: Synthetic peptide
  Seed: RKTRSAYERM
RITRSAYERK

SEQ ID NO: 14417 - protein, 10 aa, Artificial Sequence
  Description of Artificial Sequence: Synthetic peptide
  Seed: RKTRSAYERM
RITRSAYERM

SEQ ID NO: 14418 - protein, 10 aa, Artificial Sequence
  Description of Artificial Sequence: Synthetic peptide
  Seed: RKTRSAYERM
RITRSAYERF

SEQ ID NO: 14419 - protein, 10 aa, Artificial Sequence
  Description of Artificial Sequence: Synthetic peptide
  Seed: RKTRSAYERM
RITRSAYERP

SEQ ID NO: 14420 - protein, 10 aa, Artificial Sequence
  Description of Artificial Sequence: Synthetic peptide
  Seed: RKTRSAYERM
RITRSAYERS

SEQ ID NO: 14421 - protein, 10 aa, Artificial Sequence
  Description of Artificial Sequence: Synthetic peptide
  Seed: RKTRSAYERM
RKTRSAYERQ

SEQ ID NO: 14422 - protein, 10 aa, Artificial Sequence
  Description of Artificial Sequence: Synthetic peptide
  Seed: RKTRSAYERM
RKTRSAYERH

SEQ ID NO: 14423 - protein, 10 aa, Artificial Sequence
  Description of Artificial Sequence: Synthetic peptide
  Seed: RKTRSAYERM
RHTRSAYERM

SEQ ID NO: 14424 - protein, 10 aa, Artificial Sequence
  Description of Artificial Sequence: Synthetic peptide
  Seed: RKTRSAYERM
RFTRSAYERE

SEQ ID NO: 14425 - protein, 10 aa, Artificial Sequence
  Description of Artificial Sequence: Synthetic peptide
  Seed: RKTRSAYERM
RMTRSAYERS

SEQ ID NO: 14426 - protein, 10 aa, Artificial Sequence
  Description of Artificial Sequence: Synthetic peptide
  Seed: RKTRSAYERM
RMTRSAYERT

SEQ ID NO: 14427 - protein, 10 aa, Artificial Sequence
  Description of Artificial Sequence: Synthetic peptide
  Seed: RKTRSAYERM
RMTRSAYERW

SEQ ID NO: 14428 - protein, 10 aa, Artificial Sequence
  Description of Artificial Sequence: Synthetic peptide
  Seed: RKTRSAYERM
RMTRSAYERY

SEQ ID NO: 14429 - protein, 10 aa, Artificial Sequence
  Description of Artificial Sequence: Synthetic peptide
  Seed: RKTRSAYERM
RMTRSAYERV

SEQ ID NO: 14430 - protein, 10 aa, Artificial Sequence
  Description of Artificial Sequence: Synthetic peptide
  Seed: RKTRSAYERM
RFTRSAYERA

SEQ ID NO: 14431 - protein, 10 aa, Artificial Sequence
  Description of Artificial Sequence: Synthetic peptide
  Seed: RKTRSAYERM
RFTRSAYERR

SEQ ID NO: 14432 - protein, 10 aa, Artificial Sequence
  Description of Artificial Sequence: Synthetic peptide
  Seed: RKTRSAYERM
RFTRSAYERC

SEQ ID NO: 14433 - protein, 10 aa, Artificial Sequence
  Description of Artificial Sequence: Synthetic peptide
  Seed: RKTRSAYERM
RFTRSAYERQ

SEQ ID NO: 14434 - protein, 10 aa, Artificial Sequence
  Description of Artificial Sequence: Synthetic peptide
  Seed: RKTRSAYERM
RFTRSAYERG

SEQ ID NO: 14435 - protein, 10 aa, Artificial Sequence
  Description of Artificial Sequence: Synthetic peptide
  Seed: RKTRSAYERM
RKTRSAYERI

SEQ ID NO: 14436 - protein, 10 aa, Artificial Sequence
  Description of Artificial Sequence: Synthetic peptide
  Seed: RKTRSAYERM
RFTRSAYERH

SEQ ID NO: 14437 - protein, 10 aa, Artificial Sequence
  Description of Artificial Sequence: Synthetic peptide
  Seed: RKTRSAYERM
RFTRSAYERI

SEQ ID NO: 14438 - protein, 10 aa, Artificial Sequence
  Description of Artificial Sequence: Synthetic peptide
  Seed: RKTRSAYERM
RFTRSAYERL

SEQ ID NO: 14439 - protein, 10 aa, Artificial Sequence
  Description of Artificial Sequence: Synthetic peptide
  Seed: RKTRSAYERM
RFTRSAYERK

SEQ ID NO: 14440 - protein, 10 aa, Artificial Sequence
  Description of Artificial Sequence: Synthetic peptide
  Seed: RKTRSAYERM
RFTRSAYERM

SEQ ID NO: 14441 - protein, 10 aa, Artificial Sequence
  Description of Artificial Sequence: Synthetic peptide
  Seed: RKTRSAYERM
RFTRSAYERF

SEQ ID NO: 14442 - protein, 10 aa, Artificial Sequence
  Description of Artificial Sequence: Synthetic peptide
  Seed: RKTRSAYERM
RFTRSAYERP

SEQ ID NO: 14443 - protein, 10 aa, Artificial Sequence
  Description of Artificial Sequence: Synthetic peptide
  Seed: RKTRSAYERM
RFTRSAYERS

SEQ ID NO: 14444 - protein, 10 aa, Artificial Sequence
  Description of Artificial Sequence: Synthetic peptide
  Seed: RKTRSAYERM
RFTRSAYERT

SEQ ID NO: 14445 - protein, 10 aa, Artificial Sequence
  Description of Artificial Sequence: Synthetic peptide
  Seed: RKTRSAYERM
RMTRSAYERP

SEQ ID NO: 14446 - protein, 10 aa, Artificial Sequence
  Description of Artificial Sequence: Synthetic peptide
  Seed: RKTRSAYERM
RMTRSAYERF

SEQ ID NO: 14447 - protein, 10 aa, Artificial Sequence
  Description of Artificial Sequence: Synthetic peptide
  Seed: RKTRSAYERM
RMTRSAYERM

SEQ ID NO: 14448 - protein, 10 aa, Artificial Sequence
  Description of Artificial Sequence: Synthetic peptide
  Seed: RKTRSAYERM
RMTRSAYERK

SEQ ID NO: 14449 - protein, 10 aa, Artificial Sequence
  Description of Artificial Sequence: Synthetic peptide
  Seed: RKTRSAYERM
RKTRSAYERL

SEQ ID NO: 14450 - protein, 10 aa, Artificial Sequence
  Description of Artificial Sequence: Synthetic peptide
  Seed: RKTRSAYERM
RKTRSAYERK

SEQ ID NO: 14451 - protein, 10 aa, Artificial Sequence
  Description of Artificial Sequence: Synthetic peptide
  Seed: RKTRSAYERM
RKTRSAYERF

SEQ ID NO: 14452 - protein, 10 aa, Artificial Sequence
  Description of Artificial Sequence: Synthetic peptide
  Seed: RKTRSAYERM
RKTRSAYERP

SEQ ID NO: 14453 - protein, 10 aa, Artificial Sequence
  Description of Artificial Sequence: Synthetic peptide
  Seed: RKTRSAYERM
RKTRSAYERS

SEQ ID NO: 14454 - protein, 10 aa, Artificial Sequence
  Description of Artificial Sequence: Synthetic peptide
  Seed: RKTRSAYERM
RKTRSAYERT

SEQ ID NO: 14455 - protein, 10 aa, Artificial Sequence
  Description of Artificial Sequence: Synthetic peptide
  Seed: RKTRSAYERM
RKTRSAYERW

SEQ ID NO: 14456 - protein, 10 aa, Artificial Sequence
  Description of Artificial Sequence: Synthetic peptide
  Seed: RKTRSAYERM
RKTRSAYERY

SEQ ID NO: 14457 - protein, 10 aa, Artificial Sequence
  Description of Artificial Sequence: Synthetic peptide
  Seed: RKTRSAYERM
RKTRSAYERV

SEQ ID NO: 14458 - protein, 10 aa, Artificial Sequence
  Description of Artificial Sequence: Synthetic peptide
  Seed: RKTRSAYERM
RMTRSAYERA

SEQ ID NO: 14459 - protein, 10 aa, Artificial Sequence
  Description of Artificial Sequence: Synthetic peptide
  Seed: RKTRSAYERM
RMTRSAYERR

SEQ ID NO: 14460 - protein, 10 aa, Artificial Sequence
  Description of Artificial Sequence: Synthetic peptide
  Seed: RKTRSAYERM
RMTRSAYERN

SEQ ID NO: 14461 - protein, 10 aa, Artificial Sequence
  Description of Artificial Sequence: Synthetic peptide
  Seed: RKTRSAYERM
RMTRSAYERC

SEQ ID NO: 14462 - protein, 10 aa, Artificial Sequence
  Description of Artificial Sequence: Synthetic peptide
  Seed: RKTRSAYERM
RMTRSAYERQ

SEQ ID NO: 14463 - protein, 10 aa, Artificial Sequence
  Description of Artificial Sequence: Synthetic peptide
  Seed: RKTRSAYERM
RMTRSAYERE

SEQ ID NO: 14464 - protein, 10 aa, Artificial Sequence
  Description of Artificial Sequence: Synthetic peptide
  Seed: RKTRSAYERM
RMTRSAYERG

SEQ ID NO: 14465 - protein, 10 aa, Artificial Sequence
  Description of Artificial Sequence: Synthetic peptide
  Seed: RKTRSAYERM
RMTRSAYERH

SEQ ID NO: 14466 - protein, 10 aa, Artificial Sequence
  Description of Artificial Sequence: Synthetic peptide
  Seed: RKTRSAYERM
RMTRSAYERI

SEQ ID NO: 14467 - protein, 10 aa, Artificial Sequence
  Description of Artificial Sequence: Synthetic peptide
  Seed: RKTRSAYERM
RMTRSAYERL

SEQ ID NO: 14468 - protein, 10 aa, Artificial Sequence
  Description of Artificial Sequence: Synthetic peptide
  Seed: RKTRSAYERM
RHTRSAYERF

SEQ ID NO: 14469 - protein, 10 aa, Artificial Sequence
  Description of Artificial Sequence: Synthetic peptide
  Seed: RKTRSAYERM
RHTRSAYERK

SEQ ID NO: 14470 - protein, 10 aa, Artificial Sequence
  Description of Artificial Sequence: Synthetic peptide
  Seed: RKTRSAYERM
RFTRSAYERY

SEQ ID NO: 14471 - protein, 10 aa, Artificial Sequence
  Description of Artificial Sequence: Synthetic peptide
  Seed: RKTRSAYERM
RQTRSAYERA

SEQ ID NO: 14472 - protein, 10 aa, Artificial Sequence
  Description of Artificial Sequence: Synthetic peptide
  Seed: RKTRSAYERM
RCTRSAYERK

SEQ ID NO: 14473 - protein, 10 aa, Artificial Sequence
  Description of Artificial Sequence: Synthetic peptide
  Seed: RKTRSAYERM
RCTRSAYERM

SEQ ID NO: 14474 - protein, 10 aa, Artificial Sequence
  Description of Artificial Sequence: Synthetic peptide
  Seed: RKTRSAYERM
RCTRSAYERF

SEQ ID NO: 14475 - protein, 10 aa, Artificial Sequence
  Description of Artificial Sequence: Synthetic peptide
  Seed: RKTRSAYERM
RCTRSAYERP

SEQ ID NO: 14476 - protein, 10 aa, Artificial Sequence
  Description of Artificial Sequence: Synthetic peptide
  Seed: RKTRSAYERM
RCTRSAYERS

SEQ ID NO: 14477 - protein, 10 aa, Artificial Sequence
  Description of Artificial Sequence: Synthetic peptide
  Seed: RKTRSAYERM
RCTRSAYERT

SEQ ID NO: 14478 - protein, 10 aa, Artificial Sequence
  Description of Artificial Sequence: Synthetic peptide
  Seed: RKTRSAYERM
RCTRSAYERW

SEQ ID NO: 14479 - protein, 10 aa, Artificial Sequence
  Description of Artificial Sequence: Synthetic peptide
  Seed: RKTRSAYERM
RCTRSAYERY

SEQ ID NO: 14480 - protein, 10 aa, Artificial Sequence
  Description of Artificial Sequence: Synthetic peptide
  Seed: RKTRSAYERM
RCTRSAYERV

SEQ ID NO: 14481 - protein, 10 aa, Artificial Sequence
  Description of Artificial Sequence: Synthetic peptide
  Seed: RKTRSAYERM
RQTRSAYERR

SEQ ID NO: 14482 - protein, 10 aa, Artificial Sequence
  Description of Artificial Sequence: Synthetic peptide
  Seed: RKTRSAYERM
RQTRSAYERS

SEQ ID NO: 14483 - protein, 10 aa, Artificial Sequence
  Description of Artificial Sequence: Synthetic peptide
  Seed: RKTRSAYERM
RQTRSAYERC

SEQ ID NO: 14484 - protein, 10 aa, Artificial Sequence
  Description of Artificial Sequence: Synthetic peptide
  Seed: RKTRSAYERM
RQTRSAYERQ

SEQ ID NO: 14485 - protein, 10 aa, Artificial Sequence
  Description of Artificial Sequence: Synthetic peptide
  Seed: RKTRSAYERM
RQTRSAYERG

SEQ ID NO: 14486 - protein, 10 aa, Artificial Sequence
  Description of Artificial Sequence: Synthetic peptide
  Seed: RKTRSAYERM
RQTRSAYERH

SEQ ID NO: 14487 - protein, 10 aa, Artificial Sequence
  Description of Artificial Sequence: Synthetic peptide
  Seed: RKTRSAYERM
RQTRSAYERI

SEQ ID NO: 14488 - protein, 10 aa, Artificial Sequence
  Description of Artificial Sequence: Synthetic peptide
  Seed: RKTRSAYERM
RQTRSAYERL

SEQ ID NO: 14489 - protein, 10 aa, Artificial Sequence
  Description of Artificial Sequence: Synthetic peptide
  Seed: RKTRSAYERM
RQTRSAYERK

SEQ ID NO: 14490 - protein, 10 aa, Artificial Sequence
  Description of Artificial Sequence: Synthetic peptide
  Seed: RKTRSAYERM
RQTRSAYERM

SEQ ID NO: 14491 - protein, 10 aa, Artificial Sequence
  Description of Artificial Sequence: Synthetic peptide
  Seed: RKTRSAYERM
RQTRSAYERF

SEQ ID NO: 14492 - protein, 10 aa, Artificial Sequence
  Description of Artificial Sequence: Synthetic peptide
  Seed: RKTRSAYERM
RCTRSAYERL

SEQ ID NO: 14493 - protein, 10 aa, Artificial Sequence
  Description of Artificial Sequence: Synthetic peptide
  Seed: RKTRSAYERM
RCTRSAYERI

SEQ ID NO: 14494 - protein, 10 aa, Artificial Sequence
  Description of Artificial Sequence: Synthetic peptide
  Seed: RKTRSAYERM
RCTRSAYERH

SEQ ID NO: 14495 - protein, 10 aa, Artificial Sequence
  Description of Artificial Sequence: Synthetic peptide
  Seed: RKTRSAYERM
RCTRSAYERG

SEQ ID NO: 14496 - protein, 10 aa, Artificial Sequence
  Description of Artificial Sequence: Synthetic peptide
  Seed: RKTRSAYERM
RDTRSAYERC

SEQ ID NO: 14497 - protein, 10 aa, Artificial Sequence
  Description of Artificial Sequence: Synthetic peptide
  Seed: RKTRSAYERM
RDTRSAYERQ

SEQ ID NO: 14498 - protein, 10 aa, Artificial Sequence
  Description of Artificial Sequence: Synthetic peptide
  Seed: RKTRSAYERM
RDTRSAYERG

SEQ ID NO: 14499 - protein, 10 aa, Artificial Sequence
  Description of Artificial Sequence: Synthetic peptide
  Seed: RKTRSAYERM
RDTRSAYERH

SEQ ID NO: 14500 - protein, 10 aa, Artificial Sequence
  Description of Artificial Sequence: Synthetic peptide
  Seed: RKTRSAYERM
RDTRSAYERI

SEQ ID NO: 14501 - protein, 10 aa, Artificial Sequence
  Description of Artificial Sequence: Synthetic peptide
  Seed: RKTRSAYERM
RDTRSAYERL

SEQ ID NO: 14502 - protein, 10 aa, Artificial Sequence
  Description of Artificial Sequence: Synthetic peptide
  Seed: RKTRSAYERM
RDTRSAYERK

SEQ ID NO: 14503 - protein, 10 aa, Artificial Sequence
  Description of Artificial Sequence: Synthetic peptide
  Seed: RKTRSAYERM
RDTRSAYERM

SEQ ID NO: 14504 - protein, 10 aa, Artificial Sequence
  Description of Artificial Sequence: Synthetic peptide
  Seed: RKTRSAYERM
RDTRSAYERF

SEQ ID NO: 14505 - protein, 10 aa, Artificial Sequence
  Description of Artificial Sequence: Synthetic peptide
  Seed: RKTRSAYERM
RDTRSAYERP

SEQ ID NO: 14506 - protein, 10 aa, Artificial Sequence
  Description of Artificial Sequence: Synthetic peptide
  Seed: RKTRSAYERM
RDTRSAYERS

SEQ ID NO: 14507 - protein, 10 aa, Artificial Sequence
  Description of Artificial Sequence: Synthetic peptide
  Seed: RKTRSAYERM
RDTRSAYERT

SEQ ID NO: 14508 - protein, 10 aa, Artificial Sequence
  Description of Artificial Sequence: Synthetic peptide
  Seed: RKTRSAYERM
RDTRSAYERW

SEQ ID NO: 14509 - protein, 10 aa, Artificial Sequence
  Description of Artificial Sequence: Synthetic peptide
  Seed: RKTRSAYERM
RDTRSAYERY

SEQ ID NO: 14510 - protein, 10 aa, Artificial Sequence
  Description of Artificial Sequence: Synthetic peptide
  Seed: RKTRSAYERM
RDTRSAYERV

SEQ ID NO: 14511 - protein, 10 aa, Artificial Sequence
  Description of Artificial Sequence: Synthetic peptide
  Seed: RKTRSAYERM
RCTRSAYERA

SEQ ID NO: 14512 - protein, 10 aa, Artificial Sequence
  Description of Artificial Sequence: Synthetic peptide
  Seed: RKTRSAYERM
RCTRSAYERR

SEQ ID NO: 14513 - protein, 10 aa, Artificial Sequence
  Description of Artificial Sequence: Synthetic peptide
  Seed: RKTRSAYERM
RCTRSAYERC

SEQ ID NO: 14514 - protein, 10 aa, Artificial Sequence
  Description of Artificial Sequence: Synthetic peptide
  Seed: RKTRSAYERM
RCTRSAYERQ

SEQ ID NO: 14515 - protein, 10 aa, Artificial Sequence
  Description of Artificial Sequence: Synthetic peptide
  Seed: RKTRSAYERM
RQTRSAYERP

SEQ ID NO: 14516 - protein, 10 aa, Artificial Sequence
  Description of Artificial Sequence: Synthetic peptide
  Seed: RKTRSAYERM
RQTRSAYERT

SEQ ID NO: 14517 - protein, 10 aa, Artificial Sequence
  Description of Artificial Sequence: Synthetic peptide
  Seed: RKTRSAYERM
RHTRSAYERL

SEQ ID NO: 14518 - protein, 10 aa, Artificial Sequence
  Description of Artificial Sequence: Synthetic peptide
  Seed: RKTRSAYERM
RGTRSAYERT

SEQ ID NO: 14519 - protein, 10 aa, Artificial Sequence
  Description of Artificial Sequence: Synthetic peptide
  Seed: RKTRSAYERM
RGTRSAYERG

SEQ ID NO: 14520 - protein, 10 aa, Artificial Sequence
  Description of Artificial Sequence: Synthetic peptide
  Seed: RKTRSAYERM
RGTRSAYERH

SEQ ID NO: 14521 - protein, 10 aa, Artificial Sequence
  Description of Artificial Sequence: Synthetic peptide
  Seed: RKTRSAYERM
RGTRSAYERI

SEQ ID NO: 14522 - protein, 10 aa, Artificial Sequence
  Description of Artificial Sequence: Synthetic peptide
  Seed: RKTRSAYERM
RGTRSAYERL

SEQ ID NO: 14523 - protein, 10 aa, Artificial Sequence
  Description of Artificial Sequence: Synthetic peptide
  Seed: RKTRSAYERM
RGTRSAYERK

SEQ ID NO: 14524 - protein, 10 aa, Artificial Sequence
  Description of Artificial Sequence: Synthetic peptide
  Seed: RKTRSAYERM
RGTRSAYERM

SEQ ID NO: 14525 - protein, 10 aa, Artificial Sequence
  Description of Artificial Sequence: Synthetic peptide
  Seed: RKTRSAYERM
RGTRSAYERF

SEQ ID NO: 14526 - protein, 10 aa, Artificial Sequence
  Description of Artificial Sequence: Synthetic peptide
  Seed: RKTRSAYERM
RGTRSAYERP

SEQ ID NO: 14527 - protein, 10 aa, Artificial Sequence
  Description of Artificial Sequence: Synthetic peptide
  Seed: RKTRSAYERM
RGTRSAYERS

SEQ ID NO: 14528 - protein, 10 aa, Artificial Sequence
  Description of Artificial Sequence: Synthetic peptide
  Seed: RKTRSAYERM
RGTRSAYERW

SEQ ID NO: 14529 - protein, 10 aa, Artificial Sequence
  Description of Artificial Sequence: Synthetic peptide
  Seed: RKTRSAYERM
RQTRSAYERW

SEQ ID NO: 14530 - protein, 10 aa, Artificial Sequence
  Description of Artificial Sequence: Synthetic peptide
  Seed: RKTRSAYERM
RGTRSAYERY

SEQ ID NO: 14531 - protein, 10 aa, Artificial Sequence
  Description of Artificial Sequence: Synthetic peptide
  Seed: RKTRSAYERM
RGTRSAYERV

SEQ ID NO: 14532 - protein, 10 aa, Artificial Sequence
  Description of Artificial Sequence: Synthetic peptide
  Seed: RKTRSAYERM
RHTRSAYERA

SEQ ID NO: 14533 - protein, 10 aa, Artificial Sequence
  Description of Artificial Sequence: Synthetic peptide
  Seed: RKTRSAYERM
RHTRSAYERR

SEQ ID NO: 14534 - protein, 10 aa, Artificial Sequence
  Description of Artificial Sequence: Synthetic peptide
  Seed: RKTRSAYERM
RHTRSAYERC

SEQ ID NO: 14535 - protein, 10 aa, Artificial Sequence
  Description of Artificial Sequence: Synthetic peptide
  Seed: RKTRSAYERM
RHTRSAYERQ

SEQ ID NO: 14536 - protein, 10 aa, Artificial Sequence
  Description of Artificial Sequence: Synthetic peptide
  Seed: RKTRSAYERM
RHTRSAYERG

SEQ ID NO: 14537 - protein, 10 aa, Artificial Sequence
  Description of Artificial Sequence: Synthetic peptide
  Seed: RKTRSAYERM
RHTRSAYERH

SEQ ID NO: 14538 - protein, 10 aa, Artificial Sequence
  Description of Artificial Sequence: Synthetic peptide
  Seed: RKTRSAYERM
RHTRSAYERI

SEQ ID NO: 14539 - protein, 10 aa, Artificial Sequence
  Description of Artificial Sequence: Synthetic peptide
  Seed: RKTRSAYERM
RGTRSAYERQ

SEQ ID NO: 14540 - protein, 10 aa, Artificial Sequence
  Description of Artificial Sequence: Synthetic peptide
  Seed: RKTRSAYERM
RGTRSAYERC

SEQ ID NO: 14541 - protein, 10 aa, Artificial Sequence
  Description of Artificial Sequence: Synthetic peptide
  Seed: RKTRSAYERM
RGTRSAYERR

SEQ ID NO: 14542 - protein, 10 aa, Artificial Sequence
  Description of Artificial Sequence: Synthetic peptide
  Seed: RKTRSAYERM
RGTRSAYERA

SEQ ID NO: 14543 - protein, 10 aa, Artificial Sequence
  Description of Artificial Sequence: Synthetic peptide
  Seed: RKTRSAYERM
RQTRSAYERY

SEQ ID NO: 14544 - protein, 10 aa, Artificial Sequence
  Description of Artificial Sequence: Synthetic peptide
  Seed: RKTRSAYERM
RQTRSAYERV

SEQ ID NO: 14545 - protein, 10 aa, Artificial Sequence
  Description of Artificial Sequence: Synthetic peptide
  Seed: RKTRSAYERM
RETRSAYERA

SEQ ID NO: 14546 - protein, 10 aa, Artificial Sequence
  Description of Artificial Sequence: Synthetic peptide
  Seed: RKTRSAYERM
RETRSAYERR

SEQ ID NO: 14547 - protein, 10 aa, Artificial Sequence
  Description of Artificial Sequence: Synthetic peptide
  Seed: RKTRSAYERM
RETRSAYERC

SEQ ID NO: 14548 - protein, 10 aa, Artificial Sequence
  Description of Artificial Sequence: Synthetic peptide
  Seed: RKTRSAYERM
RETRSAYERQ

SEQ ID NO: 14549 - protein, 10 aa, Artificial Sequence
  Description of Artificial Sequence: Synthetic peptide
  Seed: RKTRSAYERM
RETRSAYERG

SEQ ID NO: 14550 - protein, 10 aa, Artificial Sequence
  Description of Artificial Sequence: Synthetic peptide
  Seed: RKTRSAYERM
RETRSAYERH

SEQ ID NO: 14551 - protein, 10 aa, Artificial Sequence
  Description of Artificial Sequence: Synthetic peptide
  Seed: RKTRSAYERM
RETRSAYERI

SEQ ID NO: 14552 - protein, 10 aa, Artificial Sequence
  Description of Artificial Sequence: Synthetic peptide
  Seed: RKTRSAYERM
RETRSAYERL

SEQ ID NO: 14553 - protein, 10 aa, Artificial Sequence
  Description of Artificial Sequence: Synthetic peptide
  Seed: RKTRSAYERM
RETRSAYERK

SEQ ID NO: 14554 - protein, 10 aa, Artificial Sequence
  Description of Artificial Sequence: Synthetic peptide
  Seed: RKTRSAYERM
RETRSAYERM

SEQ ID NO: 14555 - protein, 10 aa, Artificial Sequence
  Description of Artificial Sequence: Synthetic peptide
  Seed: RKTRSAYERM
RETRSAYERF

SEQ ID NO: 14556 - protein, 10 aa, Artificial Sequence
  Description of Artificial Sequence: Synthetic peptide
  Seed: RKTRSAYERM
RETRSAYERP

SEQ ID NO: 14557 - protein, 10 aa, Artificial Sequence
  Description of Artificial Sequence: Synthetic peptide
  Seed: RKTRSAYERM
RETRSAYERS

SEQ ID NO: 14558 - protein, 10 aa, Artificial Sequence
  Description of Artificial Sequence: Synthetic peptide
  Seed: RKTRSAYERM
RETRSAYERT

SEQ ID NO: 14559 - protein, 10 aa, Artificial Sequence
  Description of Artificial Sequence: Synthetic peptide
  Seed: RKTRSAYERM
RETRSAYERW

SEQ ID NO: 14560 - protein, 10 aa, Artificial Sequence
  Description of Artificial Sequence: Synthetic peptide
  Seed: RKTRSAYERM
RETRSAYERY

SEQ ID NO: 14561 - protein, 10 aa, Artificial Sequence
  Description of Artificial Sequence: Synthetic peptide
  Seed: RKTRSAYERM
RETRSAYERV

SEQ ID NO: 14562 - protein, 10 aa, Artificial Sequence
  Description of Artificial Sequence: Synthetic peptide
  Seed: RKTRSAYERM
RFTRSAYERW

SEQ ID NO: 14563 - protein, 10 aa, Artificial Sequence
  Description of Artificial Sequence: Synthetic peptide
  Seed: RKTRSAYERM
RFTRSAYERV

SEQ ID NO: 14564 - protein, 9 aa, Artificial Sequence
  Description of Artificial Sequence: Synthetic peptide
  Seed: RLIQNSITI
RNIQNSITM

SEQ ID NO: 14565 - protein, 9 aa, Artificial Sequence
  Description of Artificial Sequence: Synthetic peptide
  Seed: RLIQNSITI
RRIQNSITL

SEQ ID NO: 14566 - protein, 9 aa, Artificial Sequence
  Description of Artificial Sequence: Synthetic peptide
  Seed: RLIQNSITI
RRIQNSITM

SEQ ID NO: 14567 - protein, 9 aa, Artificial Sequence
  Description of Artificial Sequence: Synthetic peptide
  Seed: RLIQNSITI
RRIQNSITF

SEQ ID NO: 14568 - protein, 9 aa, Artificial Sequence
  Description of Artificial Sequence: Synthetic peptide
  Seed: RLIQNSITI
RRIQNSITW

SEQ ID NO: 14569 - protein, 9 aa, Artificial Sequence
  Description of Artificial Sequence: Synthetic peptide
  Seed: RLIQNSITI
RRIQNSITY

SEQ ID NO: 14570 - protein, 9 aa, Artificial Sequence
  Description of Artificial Sequence: Synthetic peptide
  Seed: RLIQNSITI
RRIQNSITV

SEQ ID NO: 14571 - protein, 9 aa, Artificial Sequence
  Description of Artificial Sequence: Synthetic peptide
  Seed: RLIQNSITI
RNIQNSITH

SEQ ID NO: 14572 - protein, 9 aa, Artificial Sequence
  Description of Artificial Sequence: Synthetic peptide
  Seed: RLIQNSITI
RNIQNSITI

SEQ ID NO: 14573 - protein, 9 aa, Artificial Sequence
  Description of Artificial Sequence: Synthetic peptide
  Seed: RLIQNSITI
RNIQNSITL

SEQ ID NO: 14574 - protein, 9 aa, Artificial Sequence
  Description of Artificial Sequence: Synthetic peptide
  Seed: RLIQNSITI
RNIQNSITF

SEQ ID NO: 14575 - protein, 9 aa, Artificial Sequence
  Description of Artificial Sequence: Synthetic peptide
  Seed: RLIQNSITI
RQIQNSITN

SEQ ID NO: 14576 - protein, 9 aa, Artificial Sequence
  Description of Artificial Sequence: Synthetic peptide
  Seed: RLIQNSITI
RNIQNSITW

SEQ ID NO: 14577 - protein, 9 aa, Artificial Sequence
  Description of Artificial Sequence: Synthetic peptide
  Seed: RLIQNSITI
RNIQNSITY

SEQ ID NO: 14578 - protein, 9 aa, Artificial Sequence
  Description of Artificial Sequence: Synthetic peptide
  Seed: RLIQNSITI
RDIQNSITF

SEQ ID NO: 14579 - protein, 9 aa, Artificial Sequence
  Description of Artificial Sequence: Synthetic peptide
  Seed: RLIQNSITI
RDIQNSITY

SEQ ID NO: 14580 - protein, 9 aa, Artificial Sequence
  Description of Artificial Sequence: Synthetic peptide
  Seed: RLIQNSITI
RCIQNSITL

SEQ ID NO: 14581 - protein, 9 aa, Artificial Sequence
  Description of Artificial Sequence: Synthetic peptide
  Seed: RLIQNSITI
RCIQNSITM

SEQ ID NO: 14582 - protein, 9 aa, Artificial Sequence
  Description of Artificial Sequence: Synthetic peptide
  Seed: RLIQNSITI
RCIQNSITF

SEQ ID NO: 14583 - protein, 9 aa, Artificial Sequence
  Description of Artificial Sequence: Synthetic peptide
  Seed: RLIQNSITI
RCIQNSITW

SEQ ID NO: 14584 - protein, 9 aa, Artificial Sequence
  Description of Artificial Sequence: Synthetic peptide
  Seed: RLIQNSITI
RCIQNSITY

SEQ ID NO: 14585 - protein, 9 aa, Artificial Sequence
  Description of Artificial Sequence: Synthetic peptide
  Seed: RLIQNSITI
RRIQNSITI

SEQ ID NO: 14586 - protein, 9 aa, Artificial Sequence
  Description of Artificial Sequence: Synthetic peptide
  Seed: RLIQNSITI
RRIQNSITH

SEQ ID NO: 14587 - protein, 9 aa, Artificial Sequence
  Description of Artificial Sequence: Synthetic peptide
  Seed: RLIQNSITI
RAIQNSITV

SEQ ID NO: 14588 - protein, 9 aa, Artificial Sequence
  Description of Artificial Sequence: Synthetic peptide
  Seed: RLIQNSITI
RAIQNSITY

SEQ ID NO: 14589 - protein, 10 aa, Artificial Sequence
  Description of Artificial Sequence: Synthetic peptide
  Seed: RKTRSAYERM
RVTRSAYERI

SEQ ID NO: 14590 - protein, 10 aa, Artificial Sequence
  Description of Artificial Sequence: Synthetic peptide
  Seed: RKTRSAYERM
RVTRSAYERL

SEQ ID NO: 14591 - protein, 10 aa, Artificial Sequence
  Description of Artificial Sequence: Synthetic peptide
  Seed: RKTRSAYERM
RVTRSAYERK

SEQ ID NO: 14592 - protein, 10 aa, Artificial Sequence
  Description of Artificial Sequence: Synthetic peptide
  Seed: RKTRSAYERM
RVTRSAYERM

SEQ ID NO: 14593 - protein, 10 aa, Artificial Sequence
  Description of Artificial Sequence: Synthetic peptide
  Seed: RKTRSAYERM
RVTRSAYERF

SEQ ID NO: 14594 - protein, 10 aa, Artificial Sequence
  Description of Artificial Sequence: Synthetic peptide
  Seed: RKTRSAYERM
RVTRSAYERP

SEQ ID NO: 14595 - protein, 10 aa, Artificial Sequence
  Description of Artificial Sequence: Synthetic peptide
  Seed: RKTRSAYERM
RVTRSAYERS

SEQ ID NO: 14596 - protein, 10 aa, Artificial Sequence
  Description of Artificial Sequence: Synthetic peptide
  Seed: RKTRSAYERM
RVTRSAYERT

SEQ ID NO: 14597 - protein, 10 aa, Artificial Sequence
  Description of Artificial Sequence: Synthetic peptide
  Seed: RKTRSAYERM
RVTRSAYERW

SEQ ID NO: 14598 - protein, 10 aa, Artificial Sequence
  Description of Artificial Sequence: Synthetic peptide
  Seed: RKTRSAYERM
RVTRSAYERY

SEQ ID NO: 14599 - protein, 10 aa, Artificial Sequence
  Description of Artificial Sequence: Synthetic peptide
  Seed: RKTRSAYERM
RVTRSAYERV

SEQ ID NO: 14600 - protein, 9 aa, Artificial Sequence
  Description of Artificial Sequence: Synthetic peptide
  Seed: RLIQNSITI
RAIQNSITA

SEQ ID NO: 14601 - protein, 9 aa, Artificial Sequence
  Description of Artificial Sequence: Synthetic peptide
  Seed: RLIQNSITI
RAIQNSITC

SEQ ID NO: 14602 - protein, 9 aa, Artificial Sequence
  Description of Artificial Sequence: Synthetic peptide
  Seed: RLIQNSITI
RAIQNSITH

SEQ ID NO: 14603 - protein, 9 aa, Artificial Sequence
  Description of Artificial Sequence: Synthetic peptide
  Seed: RLIQNSITI
RAIQNSITI

SEQ ID NO: 14604 - protein, 9 aa, Artificial Sequence
  Description of Artificial Sequence: Synthetic peptide
  Seed: RLIQNSITI
RAIQNSITL

SEQ ID NO: 14605 - protein, 9 aa, Artificial Sequence
  Description of Artificial Sequence: Synthetic peptide
  Seed: RLIQNSITI
RAIQNSITM

SEQ ID NO: 14606 - protein, 9 aa, Artificial Sequence
  Description of Artificial Sequence: Synthetic peptide
  Seed: RLIQNSITI
RAIQNSITF

SEQ ID NO: 14607 - protein, 9 aa, Artificial Sequence
  Description of Artificial Sequence: Synthetic peptide
  Seed: RLIQNSITI
RAIQNSITW

SEQ ID NO: 14608 - protein, 9 aa, Artificial Sequence
  Description of Artificial Sequence: Synthetic peptide
  Seed: RLIQNSITI
RQIQNSITA

SEQ ID NO: 14609 - protein, 9 aa, Artificial Sequence
  Description of Artificial Sequence: Synthetic peptide
  Seed: RLIQNSITI
RQIQNSITC

SEQ ID NO: 14610 - protein, 10 aa, Artificial Sequence
  Description of Artificial Sequence: Synthetic peptide
  Seed: RKTRSAYERM
RVTRSAYERG

SEQ ID NO: 14611 - protein, 9 aa, Artificial Sequence
  Description of Artificial Sequence: Synthetic peptide
  Seed: RLIQNSITI
RHIQNSITM

SEQ ID NO: 14612 - protein, 9 aa, Artificial Sequence
  Description of Artificial Sequence: Synthetic peptide
  Seed: RLIQNSITI
RGIQNSITL

SEQ ID NO: 14613 - protein, 9 aa, Artificial Sequence
  Description of Artificial Sequence: Synthetic peptide
  Seed: RLIQNSITI
RGIQNSITM

SEQ ID NO: 14614 - protein, 9 aa, Artificial Sequence
  Description of Artificial Sequence: Synthetic peptide
  Seed: RLIQNSITI
RGIQNSITF

SEQ ID NO: 14615 - protein, 9 aa, Artificial Sequence
  Description of Artificial Sequence: Synthetic peptide
  Seed: RLIQNSITI
RGIQNSITW

SEQ ID NO: 14616 - protein, 9 aa, Artificial Sequence
  Description of Artificial Sequence: Synthetic peptide
  Seed: RLIQNSITI
RGIQNSITY

SEQ ID NO: 14617 - protein, 9 aa, Artificial Sequence
  Description of Artificial Sequence: Synthetic peptide
  Seed: RLIQNSITI
RHIQNSITA

SEQ ID NO: 14618 - protein, 9 aa, Artificial Sequence
  Description of Artificial Sequence: Synthetic peptide
  Seed: RLIQNSITI
RHIQNSITH

SEQ ID NO: 14619 - protein, 9 aa, Artificial Sequence
  Description of Artificial Sequence: Synthetic peptide
  Seed: RLIQNSITI
RHIQNSITI

SEQ ID NO: 14620 - protein, 9 aa, Artificial Sequence
  Description of Artificial Sequence: Synthetic peptide
  Seed: RLIQNSITI
RHIQNSITL

SEQ ID NO: 14621 - protein, 9 aa, Artificial Sequence
  Description of Artificial Sequence: Synthetic peptide
  Seed: RLIQNSITI
RHIQNSITF

SEQ ID NO: 14622 - protein, 9 aa, Artificial Sequence
  Description of Artificial Sequence: Synthetic peptide
  Seed: RLIQNSITI
RQIQNSITQ

SEQ ID NO: 14623 - protein, 9 aa, Artificial Sequence
  Description of Artificial Sequence: Synthetic peptide
  Seed: RLIQNSITI
RHIQNSITW

SEQ ID NO: 14624 - protein, 9 aa, Artificial Sequence
  Description of Artificial Sequence: Synthetic peptide
  Seed: RLIQNSITI
RHIQNSITY

SEQ ID NO: 14625 - protein, 9 aa, Artificial Sequence
  Description of Artificial Sequence: Synthetic peptide
  Seed: RLIQNSITI
RHIQNSITV

SEQ ID NO: 14626 - protein, 9 aa, Artificial Sequence
  Description of Artificial Sequence: Synthetic peptide
  Seed: RLIQNSITI
RIIQNSITA

SEQ ID NO: 14627 - protein, 9 aa, Artificial Sequence
  Description of Artificial Sequence: Synthetic peptide
  Seed: RLIQNSITI
RIIQNSITH

SEQ ID NO: 14628 - protein, 9 aa, Artificial Sequence
  Description of Artificial Sequence: Synthetic peptide
  Seed: RLIQNSITI
RIIQNSITI

SEQ ID NO: 14629 - protein, 9 aa, Artificial Sequence
  Description of Artificial Sequence: Synthetic peptide
  Seed: RLIQNSITI
RIIQNSITL

SEQ ID NO: 14630 - protein, 9 aa, Artificial Sequence
  Description of Artificial Sequence: Synthetic peptide
  Seed: RLIQNSITI
RIIQNSITM

SEQ ID NO: 14631 - protein, 9 aa, Artificial Sequence
  Description of Artificial Sequence: Synthetic peptide
  Seed: RLIQNSITI
RIIQNSITF

SEQ ID NO: 14632 - protein, 9 aa, Artificial Sequence
  Description of Artificial Sequence: Synthetic peptide
  Seed: RLIQNSITI
RGIQNSITI

SEQ ID NO: 14633 - protein, 9 aa, Artificial Sequence
  Description of Artificial Sequence: Synthetic peptide
  Seed: RLIQNSITI
REIQNSITV

SEQ ID NO: 14634 - protein, 9 aa, Artificial Sequence
  Description of Artificial Sequence: Synthetic peptide
  Seed: RLIQNSITI
REIQNSITY

SEQ ID NO: 14635 - protein, 9 aa, Artificial Sequence
  Description of Artificial Sequence: Synthetic peptide
  Seed: RLIQNSITI
REIQNSITW

SEQ ID NO: 14636 - protein, 9 aa, Artificial Sequence
  Description of Artificial Sequence: Synthetic peptide
  Seed: RLIQNSITI
RQIQNSITE

SEQ ID NO: 14637 - protein, 9 aa, Artificial Sequence
  Description of Artificial Sequence: Synthetic peptide
  Seed: RLIQNSITI
RQIQNSITG

SEQ ID NO: 14638 - protein, 9 aa, Artificial Sequence
  Description of Artificial Sequence: Synthetic peptide
  Seed: RLIQNSITI
RQIQNSITH

SEQ ID NO: 14639 - protein, 9 aa, Artificial Sequence
  Description of Artificial Sequence: Synthetic peptide
  Seed: RLIQNSITI
RQIQNSITI

SEQ ID NO: 14640 - protein, 9 aa, Artificial Sequence
  Description of Artificial Sequence: Synthetic peptide
  Seed: RLIQNSITI
RQIQNSITL

SEQ ID NO: 14641 - protein, 9 aa, Artificial Sequence
  Description of Artificial Sequence: Synthetic peptide
  Seed: RLIQNSITI
RQIQNSITM

SEQ ID NO: 14642 - protein, 9 aa, Artificial Sequence
  Description of Artificial Sequence: Synthetic peptide
  Seed: RLIQNSITI
RQIQNSITF

SEQ ID NO: 14643 - protein, 9 aa, Artificial Sequence
  Description of Artificial Sequence: Synthetic peptide
  Seed: RLIQNSITI
RQIQNSITP

SEQ ID NO: 14644 - protein, 9 aa, Artificial Sequence
  Description of Artificial Sequence: Synthetic peptide
  Seed: RLIQNSITI
RQIQNSITS

SEQ ID NO: 14645 - protein, 9 aa, Artificial Sequence
  Description of Artificial Sequence: Synthetic peptide
  Seed: RLIQNSITI
RQIQNSITT

SEQ ID NO: 14646 - protein, 9 aa, Artificial Sequence
  Description of Artificial Sequence: Synthetic peptide
  Seed: RLIQNSITI
RQIQNSITW

SEQ ID NO: 14647 - protein, 9 aa, Artificial Sequence
  Description of Artificial Sequence: Synthetic peptide
  Seed: RLIQNSITI
RQIQNSITY

SEQ ID NO: 14648 - protein, 9 aa, Artificial Sequence
  Description of Artificial Sequence: Synthetic peptide
  Seed: RLIQNSITI
RQIQNSITV

SEQ ID NO: 14649 - protein, 9 aa, Artificial Sequence
  Description of Artificial Sequence: Synthetic peptide
  Seed: RLIQNSITI
REIQNSITA

SEQ ID NO: 14650 - protein, 9 aa, Artificial Sequence
  Description of Artificial Sequence: Synthetic peptide
  Seed: RLIQNSITI
REIQNSITH

SEQ ID NO: 14651 - protein, 9 aa, Artificial Sequence
  Description of Artificial Sequence: Synthetic peptide
  Seed: RLIQNSITI
REIQNSITI

SEQ ID NO: 14652 - protein, 9 aa, Artificial Sequence
  Description of Artificial Sequence: Synthetic peptide
  Seed: RLIQNSITI
REIQNSITL

SEQ ID NO: 14653 - protein, 9 aa, Artificial Sequence
  Description of Artificial Sequence: Synthetic peptide
  Seed: RLIQNSITI
REIQNSITM

SEQ ID NO: 14654 - protein, 9 aa, Artificial Sequence
  Description of Artificial Sequence: Synthetic peptide
  Seed: RLIQNSITI
REIQNSITF

SEQ ID NO: 14655 - protein, 10 aa, Artificial Sequence
  Description of Artificial Sequence: Synthetic peptide
  Seed: RKTRSAYERM
RVTRSAYERH

SEQ ID NO: 14656 - protein, 10 aa, Artificial Sequence
  Description of Artificial Sequence: Synthetic peptide
  Seed: RKTRSAYERM
RVTRSAYERE

SEQ ID NO: 14657 - protein, 10 aa, Artificial Sequence
  Description of Artificial Sequence: Synthetic peptide
  Seed: RKTRSAYERM
RPTRSAYERA

SEQ ID NO: 14658 - protein, 10 aa, Artificial Sequence
  Description of Artificial Sequence: Synthetic peptide
  Seed: RKTRSAYERM
RSTRSAYERY

SEQ ID NO: 14659 - protein, 10 aa, Artificial Sequence
  Description of Artificial Sequence: Synthetic peptide
  Seed: RKTRSAYERM
RSTRSAYERI

SEQ ID NO: 14660 - protein, 10 aa, Artificial Sequence
  Description of Artificial Sequence: Synthetic peptide
  Seed: RKTRSAYERM
RSTRSAYERL

SEQ ID NO: 14661 - protein, 10 aa, Artificial Sequence
  Description of Artificial Sequence: Synthetic peptide
  Seed: RKTRSAYERM
RSTRSAYERK

SEQ ID NO: 14662 - protein, 10 aa, Artificial Sequence
  Description of Artificial Sequence: Synthetic peptide
  Seed: RKTRSAYERM
RSTRSAYERM

SEQ ID NO: 14663 - protein, 10 aa, Artificial Sequence
  Description of Artificial Sequence: Synthetic peptide
  Seed: RKTRSAYERM
RSTRSAYERF

SEQ ID NO: 14664 - protein, 10 aa, Artificial Sequence
  Description of Artificial Sequence: Synthetic peptide
  Seed: RKTRSAYERM
RSTRSAYERP

SEQ ID NO: 14665 - protein, 10 aa, Artificial Sequence
  Description of Artificial Sequence: Synthetic peptide
  Seed: RKTRSAYERM
RSTRSAYERS

SEQ ID NO: 14666 - protein, 10 aa, Artificial Sequence
  Description of Artificial Sequence: Synthetic peptide
  Seed: RKTRSAYERM
RSTRSAYERT

SEQ ID NO: 14667 - protein, 10 aa, Artificial Sequence
  Description of Artificial Sequence: Synthetic peptide
  Seed: RKTRSAYERM
RSTRSAYERW

SEQ ID NO: 14668 - protein, 10 aa, Artificial Sequence
  Description of Artificial Sequence: Synthetic peptide
  Seed: RKTRSAYERM
RSTRSAYERV

SEQ ID NO: 14669 - protein, 10 aa, Artificial Sequence
  Description of Artificial Sequence: Synthetic peptide
  Seed: RKTRSAYERM
RTTRSAYERF

SEQ ID NO: 14670 - protein, 10 aa, Artificial Sequence
  Description of Artificial Sequence: Synthetic peptide
  Seed: RKTRSAYERM
RTTRSAYERA

SEQ ID NO: 14671 - protein, 10 aa, Artificial Sequence
  Description of Artificial Sequence: Synthetic peptide
  Seed: RKTRSAYERM
RTTRSAYERR

SEQ ID NO: 14672 - protein, 10 aa, Artificial Sequence
  Description of Artificial Sequence: Synthetic peptide
  Seed: RKTRSAYERM
RTTRSAYERC

SEQ ID NO: 14673 - protein, 10 aa, Artificial Sequence
  Description of Artificial Sequence: Synthetic peptide
  Seed: RKTRSAYERM
RTTRSAYERQ

SEQ ID NO: 14674 - protein, 10 aa, Artificial Sequence
  Description of Artificial Sequence: Synthetic peptide
  Seed: RKTRSAYERM
RTTRSAYERG

SEQ ID NO: 14675 - protein, 10 aa, Artificial Sequence
  Description of Artificial Sequence: Synthetic peptide
  Seed: RKTRSAYERM
RTTRSAYERH

SEQ ID NO: 14676 - protein, 10 aa, Artificial Sequence
  Description of Artificial Sequence: Synthetic peptide
  Seed: RKTRSAYERM
RTTRSAYERI

SEQ ID NO: 14677 - protein, 10 aa, Artificial Sequence
  Description of Artificial Sequence: Synthetic peptide
  Seed: RKTRSAYERM
RTTRSAYERL

SEQ ID NO: 14678 - protein, 10 aa, Artificial Sequence
  Description of Artificial Sequence: Synthetic peptide
  Seed: RKTRSAYERM
RTTRSAYERK

SEQ ID NO: 14679 - protein, 10 aa, Artificial Sequence
  Description of Artificial Sequence: Synthetic peptide
  Seed: RKTRSAYERM
RSTRSAYERH

SEQ ID NO: 14680 - protein, 10 aa, Artificial Sequence
  Description of Artificial Sequence: Synthetic peptide
  Seed: RKTRSAYERM
RSTRSAYERG

SEQ ID NO: 14681 - protein, 10 aa, Artificial Sequence
  Description of Artificial Sequence: Synthetic peptide
  Seed: RKTRSAYERM
RSTRSAYERE

SEQ ID NO: 14682 - protein, 10 aa, Artificial Sequence
  Description of Artificial Sequence: Synthetic peptide
  Seed: RKTRSAYERM
RSTRSAYERQ

SEQ ID NO: 14683 - protein, 10 aa, Artificial Sequence
  Description of Artificial Sequence: Synthetic peptide
  Seed: RKTRSAYERM
RPTRSAYERR

SEQ ID NO: 14684 - protein, 10 aa, Artificial Sequence
  Description of Artificial Sequence: Synthetic peptide
  Seed: RKTRSAYERM
RPTRSAYERC

SEQ ID NO: 14685 - protein, 10 aa, Artificial Sequence
  Description of Artificial Sequence: Synthetic peptide
  Seed: RKTRSAYERM
RPTRSAYERQ

SEQ ID NO: 14686 - protein, 10 aa, Artificial Sequence
  Description of Artificial Sequence: Synthetic peptide
  Seed: RKTRSAYERM
RPTRSAYERG

SEQ ID NO: 14687 - protein, 10 aa, Artificial Sequence
  Description of Artificial Sequence: Synthetic peptide
  Seed: RKTRSAYERM
RPTRSAYERH

SEQ ID NO: 14688 - protein, 10 aa, Artificial Sequence
  Description of Artificial Sequence: Synthetic peptide
  Seed: RKTRSAYERM
RPTRSAYERI

SEQ ID NO: 14689 - protein, 10 aa, Artificial Sequence
  Description of Artificial Sequence: Synthetic peptide
  Seed: RKTRSAYERM
RPTRSAYERL

SEQ ID NO: 14690 - protein, 10 aa, Artificial Sequence
  Description of Artificial Sequence: Synthetic peptide
  Seed: RKTRSAYERM
RPTRSAYERK

SEQ ID NO: 14691 - protein, 10 aa, Artificial Sequence
  Description of Artificial Sequence: Synthetic peptide
  Seed: RKTRSAYERM
RPTRSAYERM

SEQ ID NO: 14692 - protein, 10 aa, Artificial Sequence
  Description of Artificial Sequence: Synthetic peptide
  Seed: RKTRSAYERM
RPTRSAYERF

SEQ ID NO: 14693 - protein, 10 aa, Artificial Sequence
  Description of Artificial Sequence: Synthetic peptide
  Seed: RKTRSAYERM
RPTRSAYERP

SEQ ID NO: 14694 - protein, 10 aa, Artificial Sequence
  Description of Artificial Sequence: Synthetic peptide
  Seed: RKTRSAYERM
RPTRSAYERS

SEQ ID NO: 14695 - protein, 10 aa, Artificial Sequence
  Description of Artificial Sequence: Synthetic peptide
  Seed: RKTRSAYERM
RPTRSAYERT

SEQ ID NO: 14696 - protein, 10 aa, Artificial Sequence
  Description of Artificial Sequence: Synthetic peptide
  Seed: RKTRSAYERM
RPTRSAYERW

SEQ ID NO: 14697 - protein, 10 aa, Artificial Sequence
  Description of Artificial Sequence: Synthetic peptide
  Seed: RKTRSAYERM
RPTRSAYERY

SEQ ID NO: 14698 - protein, 10 aa, Artificial Sequence
  Description of Artificial Sequence: Synthetic peptide
  Seed: RKTRSAYERM
RPTRSAYERV

SEQ ID NO: 14699 - protein, 10 aa, Artificial Sequence
  Description of Artificial Sequence: Synthetic peptide
  Seed: RKTRSAYERM
RSTRSAYERA

SEQ ID NO: 14700 - protein, 10 aa, Artificial Sequence
  Description of Artificial Sequence: Synthetic peptide
  Seed: RKTRSAYERM
RSTRSAYERR

SEQ ID NO: 14701 - protein, 10 aa, Artificial Sequence
  Description of Artificial Sequence: Synthetic peptide
  Seed: RKTRSAYERM
RSTRSAYERC

SEQ ID NO: 14702 - protein, 10 aa, Artificial Sequence
  Description of Artificial Sequence: Synthetic peptide
  Seed: RKTRSAYERM
RTTRSAYERM

SEQ ID NO: 14703 - protein, 10 aa, Artificial Sequence
  Description of Artificial Sequence: Synthetic peptide
  Seed: RKTRSAYERM
RTTRSAYERP

SEQ ID NO: 14704 - protein, 10 aa, Artificial Sequence
  Description of Artificial Sequence: Synthetic peptide
  Seed: RKTRSAYERM
RVTRSAYERQ

SEQ ID NO: 14705 - protein, 10 aa, Artificial Sequence
  Description of Artificial Sequence: Synthetic peptide
  Seed: RKTRSAYERM
RYTRSAYERF

SEQ ID NO: 14706 - protein, 10 aa, Artificial Sequence
  Description of Artificial Sequence: Synthetic peptide
  Seed: RKTRSAYERM
RYTRSAYERC

SEQ ID NO: 14707 - protein, 10 aa, Artificial Sequence
  Description of Artificial Sequence: Synthetic peptide
  Seed: RKTRSAYERM
RYTRSAYERQ

SEQ ID NO: 14708 - protein, 10 aa, Artificial Sequence
  Description of Artificial Sequence: Synthetic peptide
  Seed: RKTRSAYERM
RYTRSAYERE

SEQ ID NO: 14709 - protein, 10 aa, Artificial Sequence
  Description of Artificial Sequence: Synthetic peptide
  Seed: RKTRSAYERM
RYTRSAYERG

SEQ ID NO: 14710 - protein, 10 aa, Artificial Sequence
  Description of Artificial Sequence: Synthetic peptide
  Seed: RKTRSAYERM
RYTRSAYERH

SEQ ID NO: 14711 - protein, 10 aa, Artificial Sequence
  Description of Artificial Sequence: Synthetic peptide
  Seed: RKTRSAYERM
RYTRSAYERI

SEQ ID NO: 14712 - protein, 10 aa, Artificial Sequence
  Description of Artificial Sequence: Synthetic peptide
  Seed: RKTRSAYERM
RYTRSAYERL

SEQ ID NO: 14713 - protein, 10 aa, Artificial Sequence
  Description of Artificial Sequence: Synthetic peptide
  Seed: RKTRSAYERM
RYTRSAYERK

SEQ ID NO: 14714 - protein, 10 aa, Artificial Sequence
  Description of Artificial Sequence: Synthetic peptide
  Seed: RKTRSAYERM
RYTRSAYERM

SEQ ID NO: 14715 - protein, 10 aa, Artificial Sequence
  Description of Artificial Sequence: Synthetic peptide
  Seed: RKTRSAYERM
RYTRSAYERP

SEQ ID NO: 14716 - protein, 10 aa, Artificial Sequence
  Description of Artificial Sequence: Synthetic peptide
  Seed: RKTRSAYERM
RTTRSAYERS

SEQ ID NO: 14717 - protein, 10 aa, Artificial Sequence
  Description of Artificial Sequence: Synthetic peptide
  Seed: RKTRSAYERM
RYTRSAYERS

SEQ ID NO: 14718 - protein, 10 aa, Artificial Sequence
  Description of Artificial Sequence: Synthetic peptide
  Seed: RKTRSAYERM
RYTRSAYERT

SEQ ID NO: 14719 - protein, 10 aa, Artificial Sequence
  Description of Artificial Sequence: Synthetic peptide
  Seed: RKTRSAYERM
RYTRSAYERW

SEQ ID NO: 14720 - protein, 10 aa, Artificial Sequence
  Description of Artificial Sequence: Synthetic peptide
  Seed: RKTRSAYERM
RYTRSAYERY

SEQ ID NO: 14721 - protein, 10 aa, Artificial Sequence
  Description of Artificial Sequence: Synthetic peptide
  Seed: RKTRSAYERM
RYTRSAYERV

SEQ ID NO: 14722 - protein, 10 aa, Artificial Sequence
  Description of Artificial Sequence: Synthetic peptide
  Seed: RKTRSAYERM
RVTRSAYERA

SEQ ID NO: 14723 - protein, 10 aa, Artificial Sequence
  Description of Artificial Sequence: Synthetic peptide
  Seed: RKTRSAYERM
RVTRSAYERR

SEQ ID NO: 14724 - protein, 10 aa, Artificial Sequence
  Description of Artificial Sequence: Synthetic peptide
  Seed: RKTRSAYERM
RVTRSAYERN

SEQ ID NO: 14725 - protein, 10 aa, Artificial Sequence
  Description of Artificial Sequence: Synthetic peptide
  Seed: RKTRSAYERM
RVTRSAYERC

SEQ ID NO: 14726 - protein, 10 aa, Artificial Sequence
  Description of Artificial Sequence: Synthetic peptide
  Seed: RKTRSAYERM
RYTRSAYERR

SEQ ID NO: 14727 - protein, 10 aa, Artificial Sequence
  Description of Artificial Sequence: Synthetic peptide
  Seed: RKTRSAYERM
RYTRSAYERA

SEQ ID NO: 14728 - protein, 10 aa, Artificial Sequence
  Description of Artificial Sequence: Synthetic peptide
  Seed: RKTRSAYERM
RWTRSAYERV

SEQ ID NO: 14729 - protein, 10 aa, Artificial Sequence
  Description of Artificial Sequence: Synthetic peptide
  Seed: RKTRSAYERM
RWTRSAYERY

SEQ ID NO: 14730 - protein, 10 aa, Artificial Sequence
  Description of Artificial Sequence: Synthetic peptide
  Seed: RKTRSAYERM
RTTRSAYERT

SEQ ID NO: 14731 - protein, 10 aa, Artificial Sequence
  Description of Artificial Sequence: Synthetic peptide
  Seed: RKTRSAYERM
RTTRSAYERW

SEQ ID NO: 14732 - protein, 10 aa, Artificial Sequence
  Description of Artificial Sequence: Synthetic peptide
  Seed: RKTRSAYERM
RTTRSAYERY

SEQ ID NO: 14733 - protein, 10 aa, Artificial Sequence
  Description of Artificial Sequence: Synthetic peptide
  Seed: RKTRSAYERM
RTTRSAYERV

SEQ ID NO: 14734 - protein, 10 aa, Artificial Sequence
  Description of Artificial Sequence: Synthetic peptide
  Seed: RKTRSAYERM
RWTRSAYERA

SEQ ID NO: 14735 - protein, 10 aa, Artificial Sequence
  Description of Artificial Sequence: Synthetic peptide
  Seed: RKTRSAYERM
RWTRSAYERR

SEQ ID NO: 14736 - protein, 10 aa, Artificial Sequence
  Description of Artificial Sequence: Synthetic peptide
  Seed: RKTRSAYERM
RWTRSAYERC

SEQ ID NO: 14737 - protein, 10 aa, Artificial Sequence
  Description of Artificial Sequence: Synthetic peptide
  Seed: RKTRSAYERM
RWTRSAYERQ

SEQ ID NO: 14738 - protein, 10 aa, Artificial Sequence
  Description of Artificial Sequence: Synthetic peptide
  Seed: RKTRSAYERM
RWTRSAYERG

SEQ ID NO: 14739 - protein, 10 aa, Artificial Sequence
  Description of Artificial Sequence: Synthetic peptide
  Seed: RKTRSAYERM
RWTRSAYERH

SEQ ID NO: 14740 - protein, 10 aa, Artificial Sequence
  Description of Artificial Sequence: Synthetic peptide
  Seed: RKTRSAYERM
RWTRSAYERI

SEQ ID NO: 14741 - protein, 10 aa, Artificial Sequence
  Description of Artificial Sequence: Synthetic peptide
  Seed: RKTRSAYERM
RWTRSAYERL

SEQ ID NO: 14742 - protein, 10 aa, Artificial Sequence
  Description of Artificial Sequence: Synthetic peptide
  Seed: RKTRSAYERM
RWTRSAYERK

SEQ ID NO: 14743 - protein, 10 aa, Artificial Sequence
  Description of Artificial Sequence: Synthetic peptide
  Seed: RKTRSAYERM
RWTRSAYERM

SEQ ID NO: 14744 - protein, 10 aa, Artificial Sequence
  Description of Artificial Sequence: Synthetic peptide
  Seed: RKTRSAYERM
RWTRSAYERF

SEQ ID NO: 14745 - protein, 10 aa, Artificial Sequence
  Description of Artificial Sequence: Synthetic peptide
  Seed: RKTRSAYERM
RWTRSAYERP

SEQ ID NO: 14746 - protein, 10 aa, Artificial Sequence
  Description of Artificial Sequence: Synthetic peptide
  Seed: RKTRSAYERM
RWTRSAYERS

SEQ ID NO: 14747 - protein, 10 aa, Artificial Sequence
  Description of Artificial Sequence: Synthetic peptide
  Seed: RKTRSAYERM
RWTRSAYERT

SEQ ID NO: 14748 - protein, 10 aa, Artificial Sequence
  Description of Artificial Sequence: Synthetic peptide
  Seed: RKTRSAYERM
RWTRSAYERW

SEQ ID NO: 14749 - protein, 10 aa, Artificial Sequence
  Description of Artificial Sequence: Synthetic peptide
  Seed: RKTRSAYERM
RDTRSAYERR

SEQ ID NO: 14750 - protein, 10 aa, Artificial Sequence
  Description of Artificial Sequence: Synthetic peptide
  Seed: RKTRSAYERM
RDTRSAYERA

SEQ ID NO: 14751 - protein, 10 aa, Artificial Sequence
  Description of Artificial Sequence: Synthetic peptide
  Seed: RKTRSAYERM
RNTRSAYERV

SEQ ID NO: 14752 - protein, 10 aa, Artificial Sequence
  Description of Artificial Sequence: Synthetic peptide
  Seed: RKTRSAYERM
RNTRSAYERY

SEQ ID NO: 14753 - protein, 10 aa, Artificial Sequence
  Description of Artificial Sequence: Synthetic peptide
  Seed: RKTRSAYERM
RATRSAYERQ

SEQ ID NO: 14754 - protein, 10 aa, Artificial Sequence
  Description of Artificial Sequence: Synthetic peptide
  Seed: RKTRSAYERM
RATRSAYERA

SEQ ID NO: 14755 - protein, 10 aa, Artificial Sequence
  Description of Artificial Sequence: Synthetic peptide
  Seed: RKTRSAYERM
RATRSAYERR

SEQ ID NO: 14756 - protein, 10 aa, Artificial Sequence
  Description of Artificial Sequence: Synthetic peptide
  Seed: RKTRSAYERM
RATRSAYERC

SEQ ID NO: 14757 - protein, 10 aa, Artificial Sequence
  Description of Artificial Sequence: Synthetic peptide
  Seed: RKTRSAYERM
RATRSAYERG

SEQ ID NO: 14758 - protein, 10 aa, Artificial Sequence
  Description of Artificial Sequence: Synthetic peptide
  Seed: RKTRSAYERM
RNTRSAYERG

SEQ ID NO: 14759 - protein, 10 aa, Artificial Sequence
  Description of Artificial Sequence: Synthetic peptide
  Seed: RKTRSAYERM
RRTRSAYERS

SEQ ID NO: 14760 - protein, 10 aa, Artificial Sequence
  Description of Artificial Sequence: Synthetic peptide
  Seed: RKTRSAYERM
RRTRSAYERT

SEQ ID NO: 14761 - protein, 10 aa, Artificial Sequence
  Description of Artificial Sequence: Synthetic peptide
  Seed: RKTRSAYERM
RRTRSAYERW

SEQ ID NO: 14762 - protein, 10 aa, Artificial Sequence
  Description of Artificial Sequence: Synthetic peptide
  Seed: RKTRSAYERM
RRTRSAYERY

SEQ ID NO: 14763 - protein, 10 aa, Artificial Sequence
  Description of Artificial Sequence: Synthetic peptide
  Seed: RKTRSAYERM
RRTRSAYERV

SEQ ID NO: 14764 - protein, 10 aa, Artificial Sequence
  Description of Artificial Sequence: Synthetic peptide
  Seed: RKTRSAYERM
RNTRSAYERA

SEQ ID NO: 14765 - protein, 10 aa, Artificial Sequence
  Description of Artificial Sequence: Synthetic peptide
  Seed: RKTRSAYERM
RNTRSAYERR

SEQ ID NO: 14766 - protein, 10 aa, Artificial Sequence
  Description of Artificial Sequence: Synthetic peptide
  Seed: RKTRSAYERM
RNTRSAYERC

SEQ ID NO: 14767 - protein, 10 aa, Artificial Sequence
  Description of Artificial Sequence: Synthetic peptide
  Seed: RKTRSAYERM
RNTRSAYERQ

SEQ ID NO: 14768 - protein, 10 aa, Artificial Sequence
  Description of Artificial Sequence: Synthetic peptide
  Seed: RKTRSAYERM
RNTRSAYERH

SEQ ID NO: 14769 - protein, 10 aa, Artificial Sequence
  Description of Artificial Sequence: Synthetic peptide
  Seed: RKTRSAYERM
RATRSAYERH

SEQ ID NO: 14770 - protein, 10 aa, Artificial Sequence
  Description of Artificial Sequence: Synthetic peptide
  Seed: RKTRSAYERM
RNTRSAYERI

SEQ ID NO: 14771 - protein, 10 aa, Artificial Sequence
  Description of Artificial Sequence: Synthetic peptide
  Seed: RKTRSAYERM
RNTRSAYERL

SEQ ID NO: 14772 - protein, 10 aa, Artificial Sequence
  Description of Artificial Sequence: Synthetic peptide
  Seed: RKTRSAYERM
RNTRSAYERK

SEQ ID NO: 14773 - protein, 10 aa, Artificial Sequence
  Description of Artificial Sequence: Synthetic peptide
  Seed: RKTRSAYERM
RNTRSAYERM

SEQ ID NO: 14774 - protein, 10 aa, Artificial Sequence
  Description of Artificial Sequence: Synthetic peptide
  Seed: RKTRSAYERM
RNTRSAYERF

SEQ ID NO: 14775 - protein, 10 aa, Artificial Sequence
  Description of Artificial Sequence: Synthetic peptide
  Seed: RKTRSAYERM
RNTRSAYERP

SEQ ID NO: 14776 - protein, 10 aa, Artificial Sequence
  Description of Artificial Sequence: Synthetic peptide
  Seed: RKTRSAYERM
RNTRSAYERS

SEQ ID NO: 14777 - protein, 10 aa, Artificial Sequence
  Description of Artificial Sequence: Synthetic peptide
  Seed: RKTRSAYERM
RNTRSAYERT

SEQ ID NO: 14778 - protein, 10 aa, Artificial Sequence
  Description of Artificial Sequence: Synthetic peptide
  Seed: RKTRSAYERM
RNTRSAYERW

SEQ ID NO: 14779 - protein, 10 aa, Artificial Sequence
  Description of Artificial Sequence: Synthetic peptide
  Seed: RKTRSAYERM
RRTRSAYERP

SEQ ID NO: 14780 - protein, 10 aa, Artificial Sequence
  Description of Artificial Sequence: Synthetic peptide
  Seed: RKTRSAYERM
RRTRSAYERF

SEQ ID NO: 14781 - protein, 10 aa, Artificial Sequence
  Description of Artificial Sequence: Synthetic peptide
  Seed: RKTRSAYERM
RRTRSAYERM

SEQ ID NO: 14782 - protein, 10 aa, Artificial Sequence
  Description of Artificial Sequence: Synthetic peptide
  Seed: RKTRSAYERM
RRTRSAYERK

SEQ ID NO: 14783 - protein, 10 aa, Artificial Sequence
  Description of Artificial Sequence: Synthetic peptide
  Seed: RKTRSAYERM
RATRSAYERI

SEQ ID NO: 14784 - protein, 10 aa, Artificial Sequence
  Description of Artificial Sequence: Synthetic peptide
  Seed: RKTRSAYERM
RATRSAYERL

SEQ ID NO: 14785 - protein, 10 aa, Artificial Sequence
  Description of Artificial Sequence: Synthetic peptide
  Seed: RKTRSAYERM
RATRSAYERK

SEQ ID NO: 14786 - protein, 10 aa, Artificial Sequence
  Description of Artificial Sequence: Synthetic peptide
  Seed: RKTRSAYERM
RATRSAYERM

SEQ ID NO: 14787 - protein, 10 aa, Artificial Sequence
  Description of Artificial Sequence: Synthetic peptide
  Seed: RKTRSAYERM
RATRSAYERF

SEQ ID NO: 14788 - protein, 10 aa, Artificial Sequence
  Description of Artificial Sequence: Synthetic peptide
  Seed: RKTRSAYERM
RATRSAYERP

SEQ ID NO: 14789 - protein, 10 aa, Artificial Sequence
  Description of Artificial Sequence: Synthetic peptide
  Seed: RKTRSAYERM
RATRSAYERS

SEQ ID NO: 14790 - protein, 10 aa, Artificial Sequence
  Description of Artificial Sequence: Synthetic peptide
  Seed: RKTRSAYERM
RATRSAYERT

SEQ ID NO: 14791 - protein, 10 aa, Artificial Sequence
  Description of Artificial Sequence: Synthetic peptide
  Seed: RKTRSAYERM
RATRSAYERW

SEQ ID NO: 14792 - protein, 10 aa, Artificial Sequence
  Description of Artificial Sequence: Synthetic peptide
  Seed: RKTRSAYERM
RATRSAYERY

SEQ ID NO: 14793 - protein, 10 aa, Artificial Sequence
  Description of Artificial Sequence: Synthetic peptide
  Seed: RKTRSAYERM
RATRSAYERV

SEQ ID NO: 14794 - protein, 10 aa, Artificial Sequence
  Description of Artificial Sequence: Synthetic peptide
  Seed: RKTRSAYERM
RRTRSAYERA

SEQ ID NO: 14795 - protein, 10 aa, Artificial Sequence
  Description of Artificial Sequence: Synthetic peptide
  Seed: RKTRSAYERM
RRTRSAYERR

SEQ ID NO: 14796 - protein, 10 aa, Artificial Sequence
  Description of Artificial Sequence: Synthetic peptide
  Seed: RKTRSAYERM
RRTRSAYERC

SEQ ID NO: 14797 - protein, 10 aa, Artificial Sequence
  Description of Artificial Sequence: Synthetic peptide
  Seed: RKTRSAYERM
RRTRSAYERQ

SEQ ID NO: 14798 - protein, 10 aa, Artificial Sequence
  Description of Artificial Sequence: Synthetic peptide
  Seed: RKTRSAYERM
RRTRSAYERG

SEQ ID NO: 14799 - protein, 10 aa, Artificial Sequence
  Description of Artificial Sequence: Synthetic peptide
  Seed: RKTRSAYERM
RRTRSAYERH

SEQ ID NO: 14800 - protein, 10 aa, Artificial Sequence
  Description of Artificial Sequence: Synthetic peptide
  Seed: RKTRSAYERM
RRTRSAYERI

SEQ ID NO: 14801 - protein, 10 aa, Artificial Sequence
  Description of Artificial Sequence: Synthetic peptide
  Seed: RKTRSAYERM
RRTRSAYERL

SEQ ID NO: 14802 - protein, 9 aa, Artificial Sequence
  Description of Artificial Sequence: Synthetic peptide
  Seed: RTSDMRAEI
RVSDMRAEI

SEQ ID NO: 14803 - protein, 10 aa, Artificial Sequence
  Description of Artificial Sequence: Synthetic peptide
  Seed: RVSSFIRGTK
RDSSFIRGTR

SEQ ID NO: 14804 - protein, 9 aa, Artificial Sequence
  Description of Artificial Sequence: Synthetic peptide
  Seed: RTSDMRAEI
RVSDMRAEK

SEQ ID NO: 14805 - protein, 10 aa, Artificial Sequence
  Description of Artificial Sequence: Synthetic peptide
  Seed: VGRMVGGIGR
VERMVGGIGY

SEQ ID NO: 14806 - protein, 10 aa, Artificial Sequence
  Description of Artificial Sequence: Synthetic peptide
  Seed: VGRMVGGIGR
VQRMVGGIGF

SEQ ID NO: 14807 - protein, 10 aa, Artificial Sequence
  Description of Artificial Sequence: Synthetic peptide
  Seed: VGRMVGGIGR
VQRMVGGIGY

SEQ ID NO: 14808 - protein, 10 aa, Artificial Sequence
  Description of Artificial Sequence: Synthetic peptide
  Seed: VGRMVGGIGR
VQRMVGGIGV

SEQ ID NO: 14809 - protein, 10 aa, Artificial Sequence
  Description of Artificial Sequence: Synthetic peptide
  Seed: VGRMVGGIGR
VERMVGGIGR

SEQ ID NO: 14810 - protein, 10 aa, Artificial Sequence
  Description of Artificial Sequence: Synthetic peptide
  Seed: VGRMVGGIGR
VERMVGGIGI

SEQ ID NO: 14811 - protein, 10 aa, Artificial Sequence
  Description of Artificial Sequence: Synthetic peptide
  Seed: VGRMVGGIGR
VERMVGGIGL

SEQ ID NO: 14812 - protein, 10 aa, Artificial Sequence
  Description of Artificial Sequence: Synthetic peptide
  Seed: VGRMVGGIGR
VERMVGGIGK

SEQ ID NO: 14813 - protein, 10 aa, Artificial Sequence
  Description of Artificial Sequence: Synthetic peptide
  Seed: VGRMVGGIGR
VERMVGGIGM

SEQ ID NO: 14814 - protein, 10 aa, Artificial Sequence
  Description of Artificial Sequence: Synthetic peptide
  Seed: VGRMVGGIGR
VERMVGGIGF

SEQ ID NO: 14815 - protein, 10 aa, Artificial Sequence
  Description of Artificial Sequence: Synthetic peptide
  Seed: VGRMVGGIGR
VERMVGGIGV

SEQ ID NO: 14816 - protein, 10 aa, Artificial Sequence
  Description of Artificial Sequence: Synthetic peptide
  Seed: VGRMVGGIGR
VHRMVGGIGK

SEQ ID NO: 14817 - protein, 10 aa, Artificial Sequence
  Description of Artificial Sequence: Synthetic peptide
  Seed: VGRMVGGIGR
VGRMVGGIGI

SEQ ID NO: 14818 - protein, 10 aa, Artificial Sequence
  Description of Artificial Sequence: Synthetic peptide
  Seed: VGRMVGGIGR
VGRMVGGIGL

SEQ ID NO: 14819 - protein, 10 aa, Artificial Sequence
  Description of Artificial Sequence: Synthetic peptide
  Seed: VGRMVGGIGR
VGRMVGGIGK

SEQ ID NO: 14820 - protein, 10 aa, Artificial Sequence
  Description of Artificial Sequence: Synthetic peptide
  Seed: VGRMVGGIGR
VGRMVGGIGM

SEQ ID NO: 14821 - protein, 10 aa, Artificial Sequence
  Description of Artificial Sequence: Synthetic peptide
  Seed: VGRMVGGIGR
VGRMVGGIGF

SEQ ID NO: 14822 - protein, 10 aa, Artificial Sequence
  Description of Artificial Sequence: Synthetic peptide
  Seed: VGRMVGGIGR
VGRMVGGIGY

SEQ ID NO: 14823 - protein, 10 aa, Artificial Sequence
  Description of Artificial Sequence: Synthetic peptide
  Seed: VGRMVGGIGR
VGRMVGGIGV

SEQ ID NO: 14824 - protein, 10 aa, Artificial Sequence
  Description of Artificial Sequence: Synthetic peptide
  Seed: VGRMVGGIGR
VHRMVGGIGR

SEQ ID NO: 14825 - protein, 10 aa, Artificial Sequence
  Description of Artificial Sequence: Synthetic peptide
  Seed: VGRMVGGIGR
VHRMVGGIGI

SEQ ID NO: 14826 - protein, 10 aa, Artificial Sequence
  Description of Artificial Sequence: Synthetic peptide
  Seed: VGRMVGGIGR
VQRMVGGIGM

SEQ ID NO: 14827 - protein, 10 aa, Artificial Sequence
  Description of Artificial Sequence: Synthetic peptide
  Seed: VGRMVGGIGR
VQRMVGGIGK

SEQ ID NO: 14828 - protein, 10 aa, Artificial Sequence
  Description of Artificial Sequence: Synthetic peptide
  Seed: VGRMVGGIGR
VQRMVGGIGL

SEQ ID NO: 14829 - protein, 10 aa, Artificial Sequence
  Description of Artificial Sequence: Synthetic peptide
  Seed: VGRMVGGIGR
VQRMVGGIGI

SEQ ID NO: 14830 - protein, 10 aa, Artificial Sequence
  Description of Artificial Sequence: Synthetic peptide
  Seed: VGRMVGGIGR
VNRMVGGIGY

SEQ ID NO: 14831 - protein, 10 aa, Artificial Sequence
  Description of Artificial Sequence: Synthetic peptide
  Seed: VGRMVGGIGR
VNRMVGGIGV

SEQ ID NO: 14832 - protein, 10 aa, Artificial Sequence
  Description of Artificial Sequence: Synthetic peptide
  Seed: VGRMVGGIGR
VDRMVGGIGR

SEQ ID NO: 14833 - protein, 10 aa, Artificial Sequence
  Description of Artificial Sequence: Synthetic peptide
  Seed: VGRMVGGIGR
VDRMVGGIGI

SEQ ID NO: 14834 - protein, 10 aa, Artificial Sequence
  Description of Artificial Sequence: Synthetic peptide
  Seed: VGRMVGGIGR
VDRMVGGIGL

SEQ ID NO: 14835 - protein, 10 aa, Artificial Sequence
  Description of Artificial Sequence: Synthetic peptide
  Seed: VGRMVGGIGR
VDRMVGGIGK

SEQ ID NO: 14836 - protein, 10 aa, Artificial Sequence
  Description of Artificial Sequence: Synthetic peptide
  Seed: VGRMVGGIGR
VDRMVGGIGM

SEQ ID NO: 14837 - protein, 10 aa, Artificial Sequence
  Description of Artificial Sequence: Synthetic peptide
  Seed: VGRMVGGIGR
VDRMVGGIGF

SEQ ID NO: 14838 - protein, 10 aa, Artificial Sequence
  Description of Artificial Sequence: Synthetic peptide
  Seed: VGRMVGGIGR
VDRMVGGIGY

SEQ ID NO: 14839 - protein, 10 aa, Artificial Sequence
  Description of Artificial Sequence: Synthetic peptide
  Seed: VGRMVGGIGR
VDRMVGGIGV

SEQ ID NO: 14840 - protein, 10 aa, Artificial Sequence
  Description of Artificial Sequence: Synthetic peptide
  Seed: VGRMVGGIGR
VCRMVGGIGR

SEQ ID NO: 14841 - protein, 10 aa, Artificial Sequence
  Description of Artificial Sequence: Synthetic peptide
  Seed: VGRMVGGIGR
VCRMVGGIGI

SEQ ID NO: 14842 - protein, 10 aa, Artificial Sequence
  Description of Artificial Sequence: Synthetic peptide
  Seed: VGRMVGGIGR
VCRMVGGIGL

SEQ ID NO: 14843 - protein, 10 aa, Artificial Sequence
  Description of Artificial Sequence: Synthetic peptide
  Seed: VGRMVGGIGR
VCRMVGGIGK

SEQ ID NO: 14844 - protein, 10 aa, Artificial Sequence
  Description of Artificial Sequence: Synthetic peptide
  Seed: VGRMVGGIGR
VCRMVGGIGM

SEQ ID NO: 14845 - protein, 10 aa, Artificial Sequence
  Description of Artificial Sequence: Synthetic peptide
  Seed: VGRMVGGIGR
VCRMVGGIGF

SEQ ID NO: 14846 - protein, 10 aa, Artificial Sequence
  Description of Artificial Sequence: Synthetic peptide
  Seed: VGRMVGGIGR
VCRMVGGIGY

SEQ ID NO: 14847 - protein, 10 aa, Artificial Sequence
  Description of Artificial Sequence: Synthetic peptide
  Seed: VGRMVGGIGR
VCRMVGGIGV

SEQ ID NO: 14848 - protein, 10 aa, Artificial Sequence
  Description of Artificial Sequence: Synthetic peptide
  Seed: VGRMVGGIGR
VQRMVGGIGR

SEQ ID NO: 14849 - protein, 10 aa, Artificial Sequence
  Description of Artificial Sequence: Synthetic peptide
  Seed: VGRMVGGIGR
VHRMVGGIGL

SEQ ID NO: 14850 - protein, 10 aa, Artificial Sequence
  Description of Artificial Sequence: Synthetic peptide
  Seed: VGRMVGGIGR
VHRMVGGIGM

SEQ ID NO: 14851 - protein, 10 aa, Artificial Sequence
  Description of Artificial Sequence: Synthetic peptide
  Seed: VGRMVGGIGR
VNRMVGGIGM

SEQ ID NO: 14852 - protein, 10 aa, Artificial Sequence
  Description of Artificial Sequence: Synthetic peptide
  Seed: VGRMVGGIGR
VMRMVGGIGY

SEQ ID NO: 14853 - protein, 10 aa, Artificial Sequence
  Description of Artificial Sequence: Synthetic peptide
  Seed: VGRMVGGIGR
VKRMVGGIGF

SEQ ID NO: 14854 - protein, 10 aa, Artificial Sequence
  Description of Artificial Sequence: Synthetic peptide
  Seed: VGRMVGGIGR
VKRMVGGIGY

SEQ ID NO: 14855 - protein, 10 aa, Artificial Sequence
  Description of Artificial Sequence: Synthetic peptide
  Seed: VGRMVGGIGR
VKRMVGGIGV

SEQ ID NO: 14856 - protein, 10 aa, Artificial Sequence
  Description of Artificial Sequence: Synthetic peptide
  Seed: VGRMVGGIGR
VMRMVGGIGR

SEQ ID NO: 14857 - protein, 10 aa, Artificial Sequence
  Description of Artificial Sequence: Synthetic peptide
  Seed: VGRMVGGIGR
VMRMVGGIGI

SEQ ID NO: 14858 - protein, 10 aa, Artificial Sequence
  Description of Artificial Sequence: Synthetic peptide
  Seed: VGRMVGGIGR
VMRMVGGIGL

SEQ ID NO: 14859 - protein, 10 aa, Artificial Sequence
  Description of Artificial Sequence: Synthetic peptide
  Seed: VGRMVGGIGR
VMRMVGGIGK

SEQ ID NO: 14860 - protein, 10 aa, Artificial Sequence
  Description of Artificial Sequence: Synthetic peptide
  Seed: VGRMVGGIGR
VMRMVGGIGM

SEQ ID NO: 14861 - protein, 10 aa, Artificial Sequence
  Description of Artificial Sequence: Synthetic peptide
  Seed: VGRMVGGIGR
VMRMVGGIGF

SEQ ID NO: 14862 - protein, 10 aa, Artificial Sequence
  Description of Artificial Sequence: Synthetic peptide
  Seed: VGRMVGGIGR
VMRMVGGIGV

SEQ ID NO: 14863 - protein, 10 aa, Artificial Sequence
  Description of Artificial Sequence: Synthetic peptide
  Seed: VGRMVGGIGR
VHRMVGGIGF

SEQ ID NO: 14864 - protein, 10 aa, Artificial Sequence
  Description of Artificial Sequence: Synthetic peptide
  Seed: VGRMVGGIGR
VFRMVGGIGR

SEQ ID NO: 14865 - protein, 10 aa, Artificial Sequence
  Description of Artificial Sequence: Synthetic peptide
  Seed: VGRMVGGIGR
VFRMVGGIGI

SEQ ID NO: 14866 - protein, 10 aa, Artificial Sequence
  Description of Artificial Sequence: Synthetic peptide
  Seed: VGRMVGGIGR
VFRMVGGIGL

SEQ ID NO: 14867 - protein, 10 aa, Artificial Sequence
  Description of Artificial Sequence: Synthetic peptide
  Seed: VGRMVGGIGR
VFRMVGGIGK

SEQ ID NO: 14868 - protein, 10 aa, Artificial Sequence
  Description of Artificial Sequence: Synthetic peptide
  Seed: VGRMVGGIGR
VFRMVGGIGM

SEQ ID NO: 14869 - protein, 10 aa, Artificial Sequence
  Description of Artificial Sequence: Synthetic peptide
  Seed: VGRMVGGIGR
VFRMVGGIGF

SEQ ID NO: 14870 - protein, 10 aa, Artificial Sequence
  Description of Artificial Sequence: Synthetic peptide
  Seed: VGRMVGGIGR
VFRMVGGIGY

SEQ ID NO: 14871 - protein, 10 aa, Artificial Sequence
  Description of Artificial Sequence: Synthetic peptide
  Seed: VGRMVGGIGR
VFRMVGGIGV

SEQ ID NO: 14872 - protein, 10 aa, Artificial Sequence
  Description of Artificial Sequence: Synthetic peptide
  Seed: VGRMVGGIGR
VPRMVGGIGR

SEQ ID NO: 14873 - protein, 10 aa, Artificial Sequence
  Description of Artificial Sequence: Synthetic peptide
  Seed: VGRMVGGIGR
VKRMVGGIGM

SEQ ID NO: 14874 - protein, 10 aa, Artificial Sequence
  Description of Artificial Sequence: Synthetic peptide
  Seed: VGRMVGGIGR
VKRMVGGIGK

SEQ ID NO: 14875 - protein, 10 aa, Artificial Sequence
  Description of Artificial Sequence: Synthetic peptide
  Seed: VGRMVGGIGR
VKRMVGGIGL

SEQ ID NO: 14876 - protein, 10 aa, Artificial Sequence
  Description of Artificial Sequence: Synthetic peptide
  Seed: VGRMVGGIGR
VKRMVGGIGI

SEQ ID NO: 14877 - protein, 10 aa, Artificial Sequence
  Description of Artificial Sequence: Synthetic peptide
  Seed: VGRMVGGIGR
VHRMVGGIGY

SEQ ID NO: 14878 - protein, 10 aa, Artificial Sequence
  Description of Artificial Sequence: Synthetic peptide
  Seed: VGRMVGGIGR
VHRMVGGIGV

SEQ ID NO: 14879 - protein, 10 aa, Artificial Sequence
  Description of Artificial Sequence: Synthetic peptide
  Seed: VGRMVGGIGR
VIRMVGGIGR

SEQ ID NO: 14880 - protein, 10 aa, Artificial Sequence
  Description of Artificial Sequence: Synthetic peptide
  Seed: VGRMVGGIGR
VIRMVGGIGI

SEQ ID NO: 14881 - protein, 10 aa, Artificial Sequence
  Description of Artificial Sequence: Synthetic peptide
  Seed: VGRMVGGIGR
VIRMVGGIGL

SEQ ID NO: 14882 - protein, 10 aa, Artificial Sequence
  Description of Artificial Sequence: Synthetic peptide
  Seed: VGRMVGGIGR
VIRMVGGIGK

SEQ ID NO: 14883 - protein, 10 aa, Artificial Sequence
  Description of Artificial Sequence: Synthetic peptide
  Seed: VGRMVGGIGR
VIRMVGGIGM

SEQ ID NO: 14884 - protein, 10 aa, Artificial Sequence
  Description of Artificial Sequence: Synthetic peptide
  Seed: VGRMVGGIGR
VIRMVGGIGF

SEQ ID NO: 14885 - protein, 10 aa, Artificial Sequence
  Description of Artificial Sequence: Synthetic peptide
  Seed: VGRMVGGIGR
VIRMVGGIGY

SEQ ID NO: 14886 - protein, 10 aa, Artificial Sequence
  Description of Artificial Sequence: Synthetic peptide
  Seed: VGRMVGGIGR
VIRMVGGIGV

SEQ ID NO: 14887 - protein, 10 aa, Artificial Sequence
  Description of Artificial Sequence: Synthetic peptide
  Seed: VGRMVGGIGR
VLRMVGGIGR

SEQ ID NO: 14888 - protein, 10 aa, Artificial Sequence
  Description of Artificial Sequence: Synthetic peptide
  Seed: VGRMVGGIGR
VLRMVGGIGI

SEQ ID NO: 14889 - protein, 10 aa, Artificial Sequence
  Description of Artificial Sequence: Synthetic peptide
  Seed: VGRMVGGIGR
VLRMVGGIGL

SEQ ID NO: 14890 - protein, 10 aa, Artificial Sequence
  Description of Artificial Sequence: Synthetic peptide
  Seed: VGRMVGGIGR
VLRMVGGIGK

SEQ ID NO: 14891 - protein, 10 aa, Artificial Sequence
  Description of Artificial Sequence: Synthetic peptide
  Seed: VGRMVGGIGR
VLRMVGGIGM

SEQ ID NO: 14892 - protein, 10 aa, Artificial Sequence
  Description of Artificial Sequence: Synthetic peptide
  Seed: VGRMVGGIGR
VLRMVGGIGF

SEQ ID NO: 14893 - protein, 10 aa, Artificial Sequence
  Description of Artificial Sequence: Synthetic peptide
  Seed: VGRMVGGIGR
VLRMVGGIGY

SEQ ID NO: 14894 - protein, 10 aa, Artificial Sequence
  Description of Artificial Sequence: Synthetic peptide
  Seed: VGRMVGGIGR
VLRMVGGIGV

SEQ ID NO: 14895 - protein, 10 aa, Artificial Sequence
  Description of Artificial Sequence: Synthetic peptide
  Seed: VGRMVGGIGR
VKRMVGGIGR

SEQ ID NO: 14896 - protein, 10 aa, Artificial Sequence
  Description of Artificial Sequence: Synthetic peptide
  Seed: VGRMVGGIGR
VNRMVGGIGF

SEQ ID NO: 14897 - protein, 10 aa, Artificial Sequence
  Description of Artificial Sequence: Synthetic peptide
  Seed: VGRMVGGIGR
VNRMVGGIGK

SEQ ID NO: 14898 - protein, 9 aa, Artificial Sequence
  Description of Artificial Sequence: Synthetic peptide
  Seed: VLSAFDERR
VFSAFDERR

SEQ ID NO: 14899 - protein, 11 aa, Artificial Sequence
  Description of Artificial Sequence: Synthetic peptide
  Seed: VGRMIGGIGRF
VARMIGGIGRF

SEQ ID NO: 14900 - protein, 10 aa, Artificial Sequence
  Description of Artificial Sequence: Synthetic peptide
  Seed: VGRMIGGIGR
VYRMIGGIGV

SEQ ID NO: 14901 - protein, 10 aa, Artificial Sequence
  Description of Artificial Sequence: Synthetic peptide
  Seed: VGRMIGGIGR
VVRMIGGIGR

SEQ ID NO: 14902 - protein, 10 aa, Artificial Sequence
  Description of Artificial Sequence: Synthetic peptide
  Seed: VGRMIGGIGR
VVRMIGGIGI

SEQ ID NO: 14903 - protein, 10 aa, Artificial Sequence
  Description of Artificial Sequence: Synthetic peptide
  Seed: VGRMIGGIGR
VVRMIGGIGL

SEQ ID NO: 14904 - protein, 10 aa, Artificial Sequence
  Description of Artificial Sequence: Synthetic peptide
  Seed: VGRMIGGIGR
VVRMIGGIGK

SEQ ID NO: 14905 - protein, 10 aa, Artificial Sequence
  Description of Artificial Sequence: Synthetic peptide
  Seed: VGRMIGGIGR
VVRMIGGIGM

SEQ ID NO: 14906 - protein, 10 aa, Artificial Sequence
  Description of Artificial Sequence: Synthetic peptide
  Seed: VGRMIGGIGR
VVRMIGGIGF

SEQ ID NO: 14907 - protein, 10 aa, Artificial Sequence
  Description of Artificial Sequence: Synthetic peptide
  Seed: VGRMIGGIGR
VVRMIGGIGY

SEQ ID NO: 14908 - protein, 10 aa, Artificial Sequence
  Description of Artificial Sequence: Synthetic peptide
  Seed: VGRMIGGIGR
VVRMIGGIGV

SEQ ID NO: 14909 - protein, 11 aa, Artificial Sequence
  Description of Artificial Sequence: Synthetic peptide
  Seed: VGRMIGGIGRF
VARMIGGIGRY

SEQ ID NO: 14910 - protein, 11 aa, Artificial Sequence
  Description of Artificial Sequence: Synthetic peptide
  Seed: VGRMIGGIGRF
VERMIGGIGRF

SEQ ID NO: 14911 - protein, 11 aa, Artificial Sequence
  Description of Artificial Sequence: Synthetic peptide
  Seed: VGRMIGGIGRF
VRRMIGGIGRF

SEQ ID NO: 14912 - protein, 11 aa, Artificial Sequence
  Description of Artificial Sequence: Synthetic peptide
  Seed: VGRMIGGIGRF
VRRMIGGIGRY

SEQ ID NO: 14913 - protein, 11 aa, Artificial Sequence
  Description of Artificial Sequence: Synthetic peptide
  Seed: VGRMIGGIGRF
VNRMIGGIGRF

SEQ ID NO: 14914 - protein, 11 aa, Artificial Sequence
  Description of Artificial Sequence: Synthetic peptide
  Seed: VGRMIGGIGRF
VNRMIGGIGRY

SEQ ID NO: 14915 - protein, 11 aa, Artificial Sequence
  Description of Artificial Sequence: Synthetic peptide
  Seed: VGRMIGGIGRF
VDRMIGGIGRF

SEQ ID NO: 14916 - protein, 11 aa, Artificial Sequence
  Description of Artificial Sequence: Synthetic peptide
  Seed: VGRMIGGIGRF
VDRMIGGIGRY

SEQ ID NO: 14917 - protein, 11 aa, Artificial Sequence
  Description of Artificial Sequence: Synthetic peptide
  Seed: VGRMIGGIGRF
VCRMIGGIGRF

SEQ ID NO: 14918 - protein, 11 aa, Artificial Sequence
  Description of Artificial Sequence: Synthetic peptide
  Seed: VGRMIGGIGRF
VCRMIGGIGRY

SEQ ID NO: 14919 - protein, 11 aa, Artificial Sequence
  Description of Artificial Sequence: Synthetic peptide
  Seed: VGRMIGGIGRF
VQRMIGGIGRF

SEQ ID NO: 14920 - protein, 10 aa, Artificial Sequence
  Description of Artificial Sequence: Synthetic peptide
  Seed: VGRMIGGIGR
VYRMIGGIGY

SEQ ID NO: 14921 - protein, 10 aa, Artificial Sequence
  Description of Artificial Sequence: Synthetic peptide
  Seed: VGRMIGGIGR
VYRMIGGIGF

SEQ ID NO: 14922 - protein, 10 aa, Artificial Sequence
  Description of Artificial Sequence: Synthetic peptide
  Seed: VGRMIGGIGR
VYRMIGGIGM

SEQ ID NO: 14923 - protein, 10 aa, Artificial Sequence
  Description of Artificial Sequence: Synthetic peptide
  Seed: VGRMIGGIGR
VYRMIGGIGK

SEQ ID NO: 14924 - protein, 10 aa, Artificial Sequence
  Description of Artificial Sequence: Synthetic peptide
  Seed: VGRMIGGIGR
VTRMIGGIGR

SEQ ID NO: 14925 - protein, 10 aa, Artificial Sequence
  Description of Artificial Sequence: Synthetic peptide
  Seed: VGRMIGGIGR
VTRMIGGIGI

SEQ ID NO: 14926 - protein, 10 aa, Artificial Sequence
  Description of Artificial Sequence: Synthetic peptide
  Seed: VGRMIGGIGR
VTRMIGGIGL

SEQ ID NO: 14927 - protein, 10 aa, Artificial Sequence
  Description of Artificial Sequence: Synthetic peptide
  Seed: VGRMIGGIGR
VTRMIGGIGK

SEQ ID NO: 14928 - protein, 10 aa, Artificial Sequence
  Description of Artificial Sequence: Synthetic peptide
  Seed: VGRMIGGIGR
VTRMIGGIGM

SEQ ID NO: 14929 - protein, 10 aa, Artificial Sequence
  Description of Artificial Sequence: Synthetic peptide
  Seed: VGRMIGGIGR
VTRMIGGIGF

SEQ ID NO: 14930 - protein, 10 aa, Artificial Sequence
  Description of Artificial Sequence: Synthetic peptide
  Seed: VGRMIGGIGR
VTRMIGGIGY

SEQ ID NO: 14931 - protein, 10 aa, Artificial Sequence
  Description of Artificial Sequence: Synthetic peptide
  Seed: VGRMIGGIGR
VTRMIGGIGV

SEQ ID NO: 14932 - protein, 10 aa, Artificial Sequence
  Description of Artificial Sequence: Synthetic peptide
  Seed: VGRMIGGIGR
VWRMIGGIGR

SEQ ID NO: 14933 - protein, 10 aa, Artificial Sequence
  Description of Artificial Sequence: Synthetic peptide
  Seed: VGRMIGGIGR
VWRMIGGIGI

SEQ ID NO: 14934 - protein, 10 aa, Artificial Sequence
  Description of Artificial Sequence: Synthetic peptide
  Seed: VGRMIGGIGR
VWRMIGGIGL

SEQ ID NO: 14935 - protein, 10 aa, Artificial Sequence
  Description of Artificial Sequence: Synthetic peptide
  Seed: VGRMIGGIGR
VWRMIGGIGK

SEQ ID NO: 14936 - protein, 10 aa, Artificial Sequence
  Description of Artificial Sequence: Synthetic peptide
  Seed: VGRMIGGIGR
VWRMIGGIGM

SEQ ID NO: 14937 - protein, 10 aa, Artificial Sequence
  Description of Artificial Sequence: Synthetic peptide
  Seed: VGRMIGGIGR
VWRMIGGIGF

SEQ ID NO: 14938 - protein, 10 aa, Artificial Sequence
  Description of Artificial Sequence: Synthetic peptide
  Seed: VGRMIGGIGR
VWRMIGGIGY

SEQ ID NO: 14939 - protein, 10 aa, Artificial Sequence
  Description of Artificial Sequence: Synthetic peptide
  Seed: VGRMIGGIGR
VWRMIGGIGV

SEQ ID NO: 14940 - protein, 10 aa, Artificial Sequence
  Description of Artificial Sequence: Synthetic peptide
  Seed: VGRMIGGIGR
VYRMIGGIGR

SEQ ID NO: 14941 - protein, 10 aa, Artificial Sequence
  Description of Artificial Sequence: Synthetic peptide
  Seed: VGRMIGGIGR
VYRMIGGIGI

SEQ ID NO: 14942 - protein, 10 aa, Artificial Sequence
  Description of Artificial Sequence: Synthetic peptide
  Seed: VGRMIGGIGR
VYRMIGGIGL

SEQ ID NO: 14943 - protein, 11 aa, Artificial Sequence
  Description of Artificial Sequence: Synthetic peptide
  Seed: VGRMIGGIGRF
VQRMIGGIGRY

SEQ ID NO: 14944 - protein, 11 aa, Artificial Sequence
  Description of Artificial Sequence: Synthetic peptide
  Seed: VGRMIGGIGRF
VERMIGGIGRY

SEQ ID NO: 14945 - protein, 10 aa, Artificial Sequence
  Description of Artificial Sequence: Synthetic peptide
  Seed: VGRMVGGIGR
VNRMVGGIGL

SEQ ID NO: 14946 - protein, 10 aa, Artificial Sequence
  Description of Artificial Sequence: Synthetic peptide
  Seed: VGRMVGGIGR
VRRMVGGIGR

SEQ ID NO: 14947 - protein, 11 aa, Artificial Sequence
  Description of Artificial Sequence: Synthetic peptide
  Seed: VGRMIGGIGRF
VVRMIGGIGRY

SEQ ID NO: 14948 - protein, 10 aa, Artificial Sequence
  Description of Artificial Sequence: Synthetic peptide
  Seed: VGRMVGGIGR
VARMVGGIGR

SEQ ID NO: 14949 - protein, 10 aa, Artificial Sequence
  Description of Artificial Sequence: Synthetic peptide
  Seed: VGRMVGGIGR
VARMVGGIGI

SEQ ID NO: 14950 - protein, 10 aa, Artificial Sequence
  Description of Artificial Sequence: Synthetic peptide
  Seed: VGRMVGGIGR
VARMVGGIGL

SEQ ID NO: 14951 - protein, 10 aa, Artificial Sequence
  Description of Artificial Sequence: Synthetic peptide
  Seed: VGRMVGGIGR
VARMVGGIGK

SEQ ID NO: 14952 - protein, 10 aa, Artificial Sequence
  Description of Artificial Sequence: Synthetic peptide
  Seed: VGRMVGGIGR
VARMVGGIGM

SEQ ID NO: 14953 - protein, 10 aa, Artificial Sequence
  Description of Artificial Sequence: Synthetic peptide
  Seed: VGRMVGGIGR
VARMVGGIGF

SEQ ID NO: 14954 - protein, 10 aa, Artificial Sequence
  Description of Artificial Sequence: Synthetic peptide
  Seed: VGRMVGGIGR
VARMVGGIGY

SEQ ID NO: 14955 - protein, 10 aa, Artificial Sequence
  Description of Artificial Sequence: Synthetic peptide
  Seed: VGRMVGGIGR
VARMVGGIGV

SEQ ID NO: 14956 - protein, 10 aa, Artificial Sequence
  Description of Artificial Sequence: Synthetic peptide
  Seed: VGRMVGGIGR
VRRMVGGIGI

SEQ ID NO: 14957 - protein, 11 aa, Artificial Sequence
  Description of Artificial Sequence: Synthetic peptide
  Seed: VGRMIGGIGRF
VGRMIGGIGRY

SEQ ID NO: 14958 - protein, 10 aa, Artificial Sequence
  Description of Artificial Sequence: Synthetic peptide
  Seed: VGRMVGGIGR
VRRMVGGIGL

SEQ ID NO: 14959 - protein, 10 aa, Artificial Sequence
  Description of Artificial Sequence: Synthetic peptide
  Seed: VGRMVGGIGR
VRRMVGGIGK

SEQ ID NO: 14960 - protein, 10 aa, Artificial Sequence
  Description of Artificial Sequence: Synthetic peptide
  Seed: VGRMVGGIGR
VRRMVGGIGM

SEQ ID NO: 14961 - protein, 10 aa, Artificial Sequence
  Description of Artificial Sequence: Synthetic peptide
  Seed: VGRMVGGIGR
VRRMVGGIGF

SEQ ID NO: 14962 - protein, 10 aa, Artificial Sequence
  Description of Artificial Sequence: Synthetic peptide
  Seed: VGRMVGGIGR
VRRMVGGIGW

SEQ ID NO: 14963 - protein, 10 aa, Artificial Sequence
  Description of Artificial Sequence: Synthetic peptide
  Seed: VGRMVGGIGR
VRRMVGGIGY

SEQ ID NO: 14964 - protein, 10 aa, Artificial Sequence
  Description of Artificial Sequence: Synthetic peptide
  Seed: VGRMVGGIGR
VRRMVGGIGV

SEQ ID NO: 14965 - protein, 10 aa, Artificial Sequence
  Description of Artificial Sequence: Synthetic peptide
  Seed: VGRMVGGIGR
VNRMVGGIGR

SEQ ID NO: 14966 - protein, 10 aa, Artificial Sequence
  Description of Artificial Sequence: Synthetic peptide
  Seed: VGRMVGGIGR
VNRMVGGIGI

SEQ ID NO: 14967 - protein, 11 aa, Artificial Sequence
  Description of Artificial Sequence: Synthetic peptide
  Seed: VGRMIGGIGRF
VVRMIGGIGRF

SEQ ID NO: 14968 - protein, 11 aa, Artificial Sequence
  Description of Artificial Sequence: Synthetic peptide
  Seed: VGRMIGGIGRF
VYRMIGGIGRY

SEQ ID NO: 14969 - protein, 11 aa, Artificial Sequence
  Description of Artificial Sequence: Synthetic peptide
  Seed: VGRMIGGIGRF
VYRMIGGIGRF

SEQ ID NO: 14970 - protein, 11 aa, Artificial Sequence
  Description of Artificial Sequence: Synthetic peptide
  Seed: VGRMIGGIGRF
VWRMIGGIGRY

SEQ ID NO: 14971 - protein, 11 aa, Artificial Sequence
  Description of Artificial Sequence: Synthetic peptide
  Seed: VGRMIGGIGRF
VHRMIGGIGRF

SEQ ID NO: 14972 - protein, 11 aa, Artificial Sequence
  Description of Artificial Sequence: Synthetic peptide
  Seed: VGRMIGGIGRF
VHRMIGGIGRY

SEQ ID NO: 14973 - protein, 11 aa, Artificial Sequence
  Description of Artificial Sequence: Synthetic peptide
  Seed: VGRMIGGIGRF
VIRMIGGIGRF

SEQ ID NO: 14974 - protein, 11 aa, Artificial Sequence
  Description of Artificial Sequence: Synthetic peptide
  Seed: VGRMIGGIGRF
VIRMIGGIGRY

SEQ ID NO: 14975 - protein, 11 aa, Artificial Sequence
  Description of Artificial Sequence: Synthetic peptide
  Seed: VGRMIGGIGRF
VLRMIGGIGRF

SEQ ID NO: 14976 - protein, 11 aa, Artificial Sequence
  Description of Artificial Sequence: Synthetic peptide
  Seed: VGRMIGGIGRF
VLRMIGGIGRY

SEQ ID NO: 14977 - protein, 11 aa, Artificial Sequence
  Description of Artificial Sequence: Synthetic peptide
  Seed: VGRMIGGIGRF
VKRMIGGIGRF

SEQ ID NO: 14978 - protein, 11 aa, Artificial Sequence
  Description of Artificial Sequence: Synthetic peptide
  Seed: VGRMIGGIGRF
VKRMIGGIGRY

SEQ ID NO: 14979 - protein, 11 aa, Artificial Sequence
  Description of Artificial Sequence: Synthetic peptide
  Seed: VGRMIGGIGRF
VMRMIGGIGRF

SEQ ID NO: 14980 - protein, 11 aa, Artificial Sequence
  Description of Artificial Sequence: Synthetic peptide
  Seed: VGRMIGGIGRF
VMRMIGGIGRY

SEQ ID NO: 14981 - protein, 11 aa, Artificial Sequence
  Description of Artificial Sequence: Synthetic peptide
  Seed: VGRMIGGIGRF
VFRMIGGIGRF

SEQ ID NO: 14982 - protein, 11 aa, Artificial Sequence
  Description of Artificial Sequence: Synthetic peptide
  Seed: VGRMIGGIGRF
VFRMIGGIGRY

SEQ ID NO: 14983 - protein, 11 aa, Artificial Sequence
  Description of Artificial Sequence: Synthetic peptide
  Seed: VGRMIGGIGRF
VPRMIGGIGRF

SEQ ID NO: 14984 - protein, 11 aa, Artificial Sequence
  Description of Artificial Sequence: Synthetic peptide
  Seed: VGRMIGGIGRF
VPRMIGGIGRY

SEQ ID NO: 14985 - protein, 11 aa, Artificial Sequence
  Description of Artificial Sequence: Synthetic peptide
  Seed: VGRMIGGIGRF
VSRMIGGIGRF

SEQ ID NO: 14986 - protein, 11 aa, Artificial Sequence
  Description of Artificial Sequence: Synthetic peptide
  Seed: VGRMIGGIGRF
VSRMIGGIGRY

SEQ ID NO: 14987 - protein, 11 aa, Artificial Sequence
  Description of Artificial Sequence: Synthetic peptide
  Seed: VGRMIGGIGRF
VTRMIGGIGRF

SEQ ID NO: 14988 - protein, 11 aa, Artificial Sequence
  Description of Artificial Sequence: Synthetic peptide
  Seed: VGRMIGGIGRF
VTRMIGGIGRY

SEQ ID NO: 14989 - protein, 11 aa, Artificial Sequence
  Description of Artificial Sequence: Synthetic peptide
  Seed: VGRMIGGIGRF
VWRMIGGIGRF

SEQ ID NO: 14990 - protein, 10 aa, Artificial Sequence
  Description of Artificial Sequence: Synthetic peptide
  Seed: VGRMVGGIGR
VPRMVGGIGI

SEQ ID NO: 14991 - protein, 10 aa, Artificial Sequence
  Description of Artificial Sequence: Synthetic peptide
  Seed: VGRMVGGIGR
VPRMVGGIGL

SEQ ID NO: 14992 - protein, 10 aa, Artificial Sequence
  Description of Artificial Sequence: Synthetic peptide
  Seed: VGRMVGGIGR
VPRMVGGIGK

SEQ ID NO: 14993 - protein, 9 aa, Artificial Sequence
  Description of Artificial Sequence: Synthetic peptide
  Seed: VKGVGTMVM
VAGVGTMVM

SEQ ID NO: 14994 - protein, 9 aa, Artificial Sequence
  Description of Artificial Sequence: Synthetic peptide
  Seed: VKGIGTMVM
VFGIGTMVF

SEQ ID NO: 14995 - protein, 9 aa, Artificial Sequence
  Description of Artificial Sequence: Synthetic peptide
  Seed: VKGIGTMVM
VSGIGTMVM

SEQ ID NO: 14996 - protein, 9 aa, Artificial Sequence
  Description of Artificial Sequence: Synthetic peptide
  Seed: VKGIGTMVM
VSGIGTMVF

SEQ ID NO: 14997 - protein, 9 aa, Artificial Sequence
  Description of Artificial Sequence: Synthetic peptide
  Seed: VKGIGTMVM
VSGIGTMVY

SEQ ID NO: 14998 - protein, 9 aa, Artificial Sequence
  Description of Artificial Sequence: Synthetic peptide
  Seed: VKGIGTMVM
VTGIGTMVF

SEQ ID NO: 14999 - protein, 9 aa, Artificial Sequence
  Description of Artificial Sequence: Synthetic peptide
  Seed: VKGIGTMVM
VTGIGTMVY

SEQ ID NO: 15000 - protein, 9 aa, Artificial Sequence
  Description of Artificial Sequence: Synthetic peptide
  Seed: VKGIGTMVM
VYGIGTMVF

SEQ ID NO: 15001 - protein, 9 aa, Artificial Sequence
  Description of Artificial Sequence: Synthetic peptide
  Seed: VKGIGTMVM
VVGIGTMVF

SEQ ID NO: 15002 - protein, 9 aa, Artificial Sequence
  Description of Artificial Sequence: Synthetic peptide
  Seed: VKGIGTMVM
VVGIGTMVY

SEQ ID NO: 15003 - protein, 9 aa, Artificial Sequence
  Description of Artificial Sequence: Synthetic peptide
  Seed: VKGVGTMVM
VAGVGTMVF

SEQ ID NO: 15004 - protein, 9 aa, Artificial Sequence
  Description of Artificial Sequence: Synthetic peptide
  Seed: VKGVGTMVM
VQGVGTMVM

SEQ ID NO: 15005 - protein, 9 aa, Artificial Sequence
  Description of Artificial Sequence: Synthetic peptide
  Seed: VKGVGTMVM
VAGVGTMVY

SEQ ID NO: 15006 - protein, 9 aa, Artificial Sequence
  Description of Artificial Sequence: Synthetic peptide
  Seed: VKGVGTMVM
VRGVGTMVM

SEQ ID NO: 15007 - protein, 9 aa, Artificial Sequence
  Description of Artificial Sequence: Synthetic peptide
  Seed: VKGVGTMVM
VRGVGTMVF

SEQ ID NO: 15008 - protein, 9 aa, Artificial Sequence
  Description of Artificial Sequence: Synthetic peptide
  Seed: VKGVGTMVM
VRGVGTMVY

SEQ ID NO: 15009 - protein, 9 aa, Artificial Sequence
  Description of Artificial Sequence: Synthetic peptide
  Seed: VKGVGTMVM
VNGVGTMVF

SEQ ID NO: 15010 - protein, 9 aa, Artificial Sequence
  Description of Artificial Sequence: Synthetic peptide
  Seed: VKGVGTMVM
VNGVGTMVY

SEQ ID NO: 15011 - protein, 9 aa, Artificial Sequence
  Description of Artificial Sequence: Synthetic peptide
  Seed: VKGVGTMVM
VQGVGTMVA

SEQ ID NO: 15012 - protein, 9 aa, Artificial Sequence
  Description of Artificial Sequence: Synthetic peptide
  Seed: VKGVGTMVM
VQGVGTMVH

SEQ ID NO: 15013 - protein, 9 aa, Artificial Sequence
  Description of Artificial Sequence: Synthetic peptide
  Seed: VKGVGTMVM
VQGVGTMVI

SEQ ID NO: 15014 - protein, 9 aa, Artificial Sequence
  Description of Artificial Sequence: Synthetic peptide
  Seed: VKGIGTMVM
VMGIGTMVY

SEQ ID NO: 15015 - protein, 9 aa, Artificial Sequence
  Description of Artificial Sequence: Synthetic peptide
  Seed: VKGIGTMVM
VMGIGTMVW

SEQ ID NO: 15016 - protein, 9 aa, Artificial Sequence
  Description of Artificial Sequence: Synthetic peptide
  Seed: VKGIGTMVM
VMGIGTMVF

SEQ ID NO: 15017 - protein, 9 aa, Artificial Sequence
  Description of Artificial Sequence: Synthetic peptide
  Seed: VKGIGTMVM
VMGIGTMVM

SEQ ID NO: 15018 - protein, 9 aa, Artificial Sequence
  Description of Artificial Sequence: Synthetic peptide
  Seed: VKGIGTMVM
VEGIGTMVF

SEQ ID NO: 15019 - protein, 9 aa, Artificial Sequence
  Description of Artificial Sequence: Synthetic peptide
  Seed: VKGIGTMVM
VEGIGTMVY

SEQ ID NO: 15020 - protein, 9 aa, Artificial Sequence
  Description of Artificial Sequence: Synthetic peptide
  Seed: VKGIGTMVM
VGGIGTMVF

SEQ ID NO: 15021 - protein, 9 aa, Artificial Sequence
  Description of Artificial Sequence: Synthetic peptide
  Seed: VKGIGTMVM
VGGIGTMVY

SEQ ID NO: 15022 - protein, 9 aa, Artificial Sequence
  Description of Artificial Sequence: Synthetic peptide
  Seed: VKGIGTMVM
VHGIGTMVM

SEQ ID NO: 15023 - protein, 9 aa, Artificial Sequence
  Description of Artificial Sequence: Synthetic peptide
  Seed: VKGIGTMVM
VHGIGTMVF

SEQ ID NO: 15024 - protein, 9 aa, Artificial Sequence
  Description of Artificial Sequence: Synthetic peptide
  Seed: VKGIGTMVM
VHGIGTMVY

SEQ ID NO: 15025 - protein, 9 aa, Artificial Sequence
  Description of Artificial Sequence: Synthetic peptide
  Seed: VKGIGTMVM
VIGIGTMVF

SEQ ID NO: 15026 - protein, 9 aa, Artificial Sequence
  Description of Artificial Sequence: Synthetic peptide
  Seed: VKGIGTMVM
VIGIGTMVY

SEQ ID NO: 15027 - protein, 9 aa, Artificial Sequence
  Description of Artificial Sequence: Synthetic peptide
  Seed: VKGIGTMVM
VLGIGTMVM

SEQ ID NO: 15028 - protein, 9 aa, Artificial Sequence
  Description of Artificial Sequence: Synthetic peptide
  Seed: VKGIGTMVM
VLGIGTMVF

SEQ ID NO: 15029 - protein, 9 aa, Artificial Sequence
  Description of Artificial Sequence: Synthetic peptide
  Seed: VKGIGTMVM
VLGIGTMVY

SEQ ID NO: 15030 - protein, 9 aa, Artificial Sequence
  Description of Artificial Sequence: Synthetic peptide
  Seed: VKGIGTMVM
VKGIGTMVI

SEQ ID NO: 15031 - protein, 9 aa, Artificial Sequence
  Description of Artificial Sequence: Synthetic peptide
  Seed: VKGIGTMVM
VKGIGTMVL

SEQ ID NO: 15032 - protein, 9 aa, Artificial Sequence
  Description of Artificial Sequence: Synthetic peptide
  Seed: VKGIGTMVM
VKGIGTMVF

SEQ ID NO: 15033 - protein, 9 aa, Artificial Sequence
  Description of Artificial Sequence: Synthetic peptide
  Seed: VKGIGTMVM
VKGIGTMVY

SEQ ID NO: 15034 - protein, 9 aa, Artificial Sequence
  Description of Artificial Sequence: Synthetic peptide
  Seed: VKGIGTMVM
VMGIGTMVH

SEQ ID NO: 15035 - protein, 9 aa, Artificial Sequence
  Description of Artificial Sequence: Synthetic peptide
  Seed: VKGIGTMVM
VMGIGTMVI

SEQ ID NO: 15036 - protein, 9 aa, Artificial Sequence
  Description of Artificial Sequence: Synthetic peptide
  Seed: VKGIGTMVM
VMGIGTMVL

SEQ ID NO: 15037 - protein, 9 aa, Artificial Sequence
  Description of Artificial Sequence: Synthetic peptide
  Seed: VKGVGTMVM
VQGVGTMVL

SEQ ID NO: 15038 - protein, 9 aa, Artificial Sequence
  Description of Artificial Sequence: Synthetic peptide
  Seed: VKGVGTMVM
VQGVGTMVF

SEQ ID NO: 15039 - protein, 10 aa, Artificial Sequence
  Description of Artificial Sequence: Synthetic peptide
  Seed: VGRMVGGIGR
VPRMVGGIGM

SEQ ID NO: 15040 - protein, 9 aa, Artificial Sequence
  Description of Artificial Sequence: Synthetic peptide
  Seed: VKGVGTMVM
VTGVGTMVY

SEQ ID NO: 15041 - protein, 9 aa, Artificial Sequence
  Description of Artificial Sequence: Synthetic peptide
  Seed: VKGVGTMVM
VMGVGTMVM

SEQ ID NO: 15042 - protein, 9 aa, Artificial Sequence
  Description of Artificial Sequence: Synthetic peptide
  Seed: VKGVGTMVM
VMGVGTMVF

SEQ ID NO: 15043 - protein, 9 aa, Artificial Sequence
  Description of Artificial Sequence: Synthetic peptide
  Seed: VKGVGTMVM
VMGVGTMVW

SEQ ID NO: 15044 - protein, 9 aa, Artificial Sequence
  Description of Artificial Sequence: Synthetic peptide
  Seed: VKGVGTMVM
VMGVGTMVY

SEQ ID NO: 15045 - protein, 9 aa, Artificial Sequence
  Description of Artificial Sequence: Synthetic peptide
  Seed: VKGVGTMVM
VFGVGTMVF

SEQ ID NO: 15046 - protein, 9 aa, Artificial Sequence
  Description of Artificial Sequence: Synthetic peptide
  Seed: VKGVGTMVM
VSGVGTMVM

SEQ ID NO: 15047 - protein, 9 aa, Artificial Sequence
  Description of Artificial Sequence: Synthetic peptide
  Seed: VKGVGTMVM
VSGVGTMVF

SEQ ID NO: 15048 - protein, 9 aa, Artificial Sequence
  Description of Artificial Sequence: Synthetic peptide
  Seed: VKGVGTMVM
VSGVGTMVY

SEQ ID NO: 15049 - protein, 9 aa, Artificial Sequence
  Description of Artificial Sequence: Synthetic peptide
  Seed: VKGVGTMVM
VTGVGTMVF

SEQ ID NO: 15050 - protein, 9 aa, Artificial Sequence
  Description of Artificial Sequence: Synthetic peptide
  Seed: VKGVGTMVM
VYGVGTMVF

SEQ ID NO: 15051 - protein, 9 aa, Artificial Sequence
  Description of Artificial Sequence: Synthetic peptide
  Seed: VKGVGTMVM
VQGVGTMVW

SEQ ID NO: 15052 - protein, 9 aa, Artificial Sequence
  Description of Artificial Sequence: Synthetic peptide
  Seed: VKGVGTMVM
VVGVGTMVF

SEQ ID NO: 15053 - protein, 9 aa, Artificial Sequence
  Description of Artificial Sequence: Synthetic peptide
  Seed: VKGVGTMVM
VVGVGTMVY

SEQ ID NO: 15054 - protein, 9 aa, Artificial Sequence
  Description of Artificial Sequence: Synthetic peptide
  Seed: VLSAFDERR
VASAFDERR

SEQ ID NO: 15055 - protein, 9 aa, Artificial Sequence
  Description of Artificial Sequence: Synthetic peptide
  Seed: VLSAFDERR
VASAFDERK

SEQ ID NO: 15056 - protein, 9 aa, Artificial Sequence
  Description of Artificial Sequence: Synthetic peptide
  Seed: VLSAFDERR
VQSAFDERR

SEQ ID NO: 15057 - protein, 9 aa, Artificial Sequence
  Description of Artificial Sequence: Synthetic peptide
  Seed: VLSAFDERR
VGSAFDERR

SEQ ID NO: 15058 - protein, 9 aa, Artificial Sequence
  Description of Artificial Sequence: Synthetic peptide
  Seed: VLSAFDERR
VISAFDERR

SEQ ID NO: 15059 - protein, 9 aa, Artificial Sequence
  Description of Artificial Sequence: Synthetic peptide
  Seed: VLSAFDERR
VISAFDERK

SEQ ID NO: 15060 - protein, 9 aa, Artificial Sequence
  Description of Artificial Sequence: Synthetic peptide
  Seed: VLSAFDERR
VMSAFDERR

SEQ ID NO: 15061 - protein, 9 aa, Artificial Sequence
  Description of Artificial Sequence: Synthetic peptide
  Seed: VKGVGTMVM
VMGVGTMVL

SEQ ID NO: 15062 - protein, 9 aa, Artificial Sequence
  Description of Artificial Sequence: Synthetic peptide
  Seed: VKGVGTMVM
VMGVGTMVI

SEQ ID NO: 15063 - protein, 9 aa, Artificial Sequence
  Description of Artificial Sequence: Synthetic peptide
  Seed: VKGVGTMVM
VMGVGTMVH

SEQ ID NO: 15064 - protein, 9 aa, Artificial Sequence
  Description of Artificial Sequence: Synthetic peptide
  Seed: VKGVGTMVM
VKGVGTMVY

SEQ ID NO: 15065 - protein, 9 aa, Artificial Sequence
  Description of Artificial Sequence: Synthetic peptide
  Seed: VKGVGTMVM
VQGVGTMVY

SEQ ID NO: 15066 - protein, 9 aa, Artificial Sequence
  Description of Artificial Sequence: Synthetic peptide
  Seed: VKGVGTMVM
VQGVGTMVV

SEQ ID NO: 15067 - protein, 9 aa, Artificial Sequence
  Description of Artificial Sequence: Synthetic peptide
  Seed: VKGVGTMVM
VEGVGTMVM

SEQ ID NO: 15068 - protein, 9 aa, Artificial Sequence
  Description of Artificial Sequence: Synthetic peptide
  Seed: VKGVGTMVM
VEGVGTMVF

SEQ ID NO: 15069 - protein, 9 aa, Artificial Sequence
  Description of Artificial Sequence: Synthetic peptide
  Seed: VKGVGTMVM
VEGVGTMVY

SEQ ID NO: 15070 - protein, 9 aa, Artificial Sequence
  Description of Artificial Sequence: Synthetic peptide
  Seed: VKGVGTMVM
VGGVGTMVF

SEQ ID NO: 15071 - protein, 9 aa, Artificial Sequence
  Description of Artificial Sequence: Synthetic peptide
  Seed: VKGVGTMVM
VGGVGTMVY

SEQ ID NO: 15072 - protein, 9 aa, Artificial Sequence
  Description of Artificial Sequence: Synthetic peptide
  Seed: VKGVGTMVM
VHGVGTMVM

SEQ ID NO: 15073 - protein, 9 aa, Artificial Sequence
  Description of Artificial Sequence: Synthetic peptide
  Seed: VKGVGTMVM
VHGVGTMVF

SEQ ID NO: 15074 - protein, 9 aa, Artificial Sequence
  Description of Artificial Sequence: Synthetic peptide
  Seed: VKGVGTMVM
VHGVGTMVY

SEQ ID NO: 15075 - protein, 9 aa, Artificial Sequence
  Description of Artificial Sequence: Synthetic peptide
  Seed: VKGVGTMVM
VIGVGTMVF

SEQ ID NO: 15076 - protein, 9 aa, Artificial Sequence
  Description of Artificial Sequence: Synthetic peptide
  Seed: VKGVGTMVM
VIGVGTMVY

SEQ ID NO: 15077 - protein, 9 aa, Artificial Sequence
  Description of Artificial Sequence: Synthetic peptide
  Seed: VKGVGTMVM
VLGVGTMVM

SEQ ID NO: 15078 - protein, 9 aa, Artificial Sequence
  Description of Artificial Sequence: Synthetic peptide
  Seed: VKGVGTMVM
VLGVGTMVF

SEQ ID NO: 15079 - protein, 9 aa, Artificial Sequence
  Description of Artificial Sequence: Synthetic peptide
  Seed: VKGVGTMVM
VLGVGTMVY

SEQ ID NO: 15080 - protein, 9 aa, Artificial Sequence
  Description of Artificial Sequence: Synthetic peptide
  Seed: VKGVGTMVM
VKGVGTMVI

SEQ ID NO: 15081 - protein, 9 aa, Artificial Sequence
  Description of Artificial Sequence: Synthetic peptide
  Seed: VKGVGTMVM
VKGVGTMVF

SEQ ID NO: 15082 - protein, 9 aa, Artificial Sequence
  Description of Artificial Sequence: Synthetic peptide
  Seed: VKGVGTMVM
VKGVGTMVW

SEQ ID NO: 15083 - protein, 9 aa, Artificial Sequence
  Description of Artificial Sequence: Synthetic peptide
  Seed: VKGIGTMVM
VEGIGTMVM

SEQ ID NO: 15084 - protein, 9 aa, Artificial Sequence
  Description of Artificial Sequence: Synthetic peptide
  Seed: VKGIGTMVM
VQGIGTMVV

SEQ ID NO: 15085 - protein, 9 aa, Artificial Sequence
  Description of Artificial Sequence: Synthetic peptide
  Seed: VKGIGTMVM
VQGIGTMVY

SEQ ID NO: 15086 - protein, 10 aa, Artificial Sequence
  Description of Artificial Sequence: Synthetic peptide
  Seed: VGRMVGGIGR
VYRMVGGIGF

SEQ ID NO: 15087 - protein, 10 aa, Artificial Sequence
  Description of Artificial Sequence: Synthetic peptide
  Seed: VGRMVGGIGR
VWRMVGGIGM

SEQ ID NO: 15088 - protein, 10 aa, Artificial Sequence
  Description of Artificial Sequence: Synthetic peptide
  Seed: VGRMVGGIGR
VWRMVGGIGF

SEQ ID NO: 15089 - protein, 10 aa, Artificial Sequence
  Description of Artificial Sequence: Synthetic peptide
  Seed: VGRMVGGIGR
VWRMVGGIGY

SEQ ID NO: 15090 - protein, 10 aa, Artificial Sequence
  Description of Artificial Sequence: Synthetic peptide
  Seed: VGRMVGGIGR
VWRMVGGIGV

SEQ ID NO: 15091 - protein, 10 aa, Artificial Sequence
  Description of Artificial Sequence: Synthetic peptide
  Seed: VGRMVGGIGR
VYRMVGGIGR

SEQ ID NO: 15092 - protein, 10 aa, Artificial Sequence
  Description of Artificial Sequence: Synthetic peptide
  Seed: VGRMVGGIGR
VYRMVGGIGI

SEQ ID NO: 15093 - protein, 10 aa, Artificial Sequence
  Description of Artificial Sequence: Synthetic peptide
  Seed: VGRMVGGIGR
VYRMVGGIGL

SEQ ID NO: 15094 - protein, 10 aa, Artificial Sequence
  Description of Artificial Sequence: Synthetic peptide
  Seed: VGRMVGGIGR
VYRMVGGIGK

SEQ ID NO: 15095 - protein, 10 aa, Artificial Sequence
  Description of Artificial Sequence: Synthetic peptide
  Seed: VGRMVGGIGR
VYRMVGGIGM

SEQ ID NO: 15096 - protein, 10 aa, Artificial Sequence
  Description of Artificial Sequence: Synthetic peptide
  Seed: VGRMVGGIGR
VYRMVGGIGY

SEQ ID NO: 15097 - protein, 9 aa, Artificial Sequence
  Description of Artificial Sequence: Synthetic peptide
  Seed: VKGIGTMVM
VQGIGTMVW

SEQ ID NO: 15098 - protein, 10 aa, Artificial Sequence
  Description of Artificial Sequence: Synthetic peptide
  Seed: VGRMVGGIGR
VYRMVGGIGV

SEQ ID NO: 15099 - protein, 10 aa, Artificial Sequence
  Description of Artificial Sequence: Synthetic peptide
  Seed: VGRMVGGIGR
VVRMVGGIGR

SEQ ID NO: 15100 - protein, 10 aa, Artificial Sequence
  Description of Artificial Sequence: Synthetic peptide
  Seed: VGRMVGGIGR
VVRMVGGIGI

SEQ ID NO: 15101 - protein, 10 aa, Artificial Sequence
  Description of Artificial Sequence: Synthetic peptide
  Seed: VGRMVGGIGR
VVRMVGGIGL

SEQ ID NO: 15102 - protein, 10 aa, Artificial Sequence
  Description of Artificial Sequence: Synthetic peptide
  Seed: VGRMVGGIGR
VVRMVGGIGK

SEQ ID NO: 15103 - protein, 10 aa, Artificial Sequence
  Description of Artificial Sequence: Synthetic peptide
  Seed: VGRMVGGIGR
VVRMVGGIGM

SEQ ID NO: 15104 - protein, 10 aa, Artificial Sequence
  Description of Artificial Sequence: Synthetic peptide
  Seed: VGRMVGGIGR
VVRMVGGIGF

SEQ ID NO: 15105 - protein, 10 aa, Artificial Sequence
  Description of Artificial Sequence: Synthetic peptide
  Seed: VGRMVGGIGR
VVRMVGGIGY

SEQ ID NO: 15106 - protein, 10 aa, Artificial Sequence
  Description of Artificial Sequence: Synthetic peptide
  Seed: VGRMVGGIGR
VVRMVGGIGV

SEQ ID NO: 15107 - protein, 10 aa, Artificial Sequence
  Description of Artificial Sequence: Synthetic peptide
  Seed: VGRMVGGIGR
VWRMVGGIGK

SEQ ID NO: 15108 - protein, 10 aa, Artificial Sequence
  Description of Artificial Sequence: Synthetic peptide
  Seed: VGRMVGGIGR
VWRMVGGIGL

SEQ ID NO: 15109 - protein, 10 aa, Artificial Sequence
  Description of Artificial Sequence: Synthetic peptide
  Seed: VGRMVGGIGR
VWRMVGGIGI

SEQ ID NO: 15110 - protein, 10 aa, Artificial Sequence
  Description of Artificial Sequence: Synthetic peptide
  Seed: VGRMVGGIGR
VWRMVGGIGR

SEQ ID NO: 15111 - protein, 10 aa, Artificial Sequence
  Description of Artificial Sequence: Synthetic peptide
  Seed: VGRMVGGIGR
VPRMVGGIGF

SEQ ID NO: 15112 - protein, 10 aa, Artificial Sequence
  Description of Artificial Sequence: Synthetic peptide
  Seed: VGRMVGGIGR
VPRMVGGIGY

SEQ ID NO: 15113 - protein, 10 aa, Artificial Sequence
  Description of Artificial Sequence: Synthetic peptide
  Seed: VGRMVGGIGR
VPRMVGGIGV

SEQ ID NO: 15114 - protein, 10 aa, Artificial Sequence
  Description of Artificial Sequence: Synthetic peptide
  Seed: VGRMVGGIGR
VSRMVGGIGR

SEQ ID NO: 15115 - protein, 10 aa, Artificial Sequence
  Description of Artificial Sequence: Synthetic peptide
  Seed: VGRMVGGIGR
VSRMVGGIGI

SEQ ID NO: 15116 - protein, 10 aa, Artificial Sequence
  Description of Artificial Sequence: Synthetic peptide
  Seed: VGRMVGGIGR
VSRMVGGIGL

SEQ ID NO: 15117 - protein, 10 aa, Artificial Sequence
  Description of Artificial Sequence: Synthetic peptide
  Seed: VGRMVGGIGR
VSRMVGGIGK

SEQ ID NO: 15118 - protein, 10 aa, Artificial Sequence
  Description of Artificial Sequence: Synthetic peptide
  Seed: VGRMVGGIGR
VSRMVGGIGM

SEQ ID NO: 15119 - protein, 10 aa, Artificial Sequence
  Description of Artificial Sequence: Synthetic peptide
  Seed: VGRMVGGIGR
VSRMVGGIGF

SEQ ID NO: 15120 - protein, 10 aa, Artificial Sequence
  Description of Artificial Sequence: Synthetic peptide
  Seed: VGRMVGGIGR
VSRMVGGIGY

SEQ ID NO: 15121 - protein, 10 aa, Artificial Sequence
  Description of Artificial Sequence: Synthetic peptide
  Seed: VGRMVGGIGR
VSRMVGGIGV

SEQ ID NO: 15122 - protein, 10 aa, Artificial Sequence
  Description of Artificial Sequence: Synthetic peptide
  Seed: VGRMVGGIGR
VTRMVGGIGR

SEQ ID NO: 15123 - protein, 10 aa, Artificial Sequence
  Description of Artificial Sequence: Synthetic peptide
  Seed: VGRMVGGIGR
VTRMVGGIGI

SEQ ID NO: 15124 - protein, 10 aa, Artificial Sequence
  Description of Artificial Sequence: Synthetic peptide
  Seed: VGRMVGGIGR
VTRMVGGIGL

SEQ ID NO: 15125 - protein, 10 aa, Artificial Sequence
  Description of Artificial Sequence: Synthetic peptide
  Seed: VGRMVGGIGR
VTRMVGGIGK

SEQ ID NO: 15126 - protein, 10 aa, Artificial Sequence
  Description of Artificial Sequence: Synthetic peptide
  Seed: VGRMVGGIGR
VTRMVGGIGM

SEQ ID NO: 15127 - protein, 10 aa, Artificial Sequence
  Description of Artificial Sequence: Synthetic peptide
  Seed: VGRMVGGIGR
VTRMVGGIGF

SEQ ID NO: 15128 - protein, 10 aa, Artificial Sequence
  Description of Artificial Sequence: Synthetic peptide
  Seed: VGRMVGGIGR
VTRMVGGIGY

SEQ ID NO: 15129 - protein, 10 aa, Artificial Sequence
  Description of Artificial Sequence: Synthetic peptide
  Seed: VGRMVGGIGR
VTRMVGGIGV

SEQ ID NO: 15130 - protein, 10 aa, Artificial Sequence
  Description of Artificial Sequence: Synthetic peptide
  Seed: VGTMVMELIR
VATMVMELIR

SEQ ID NO: 15131 - protein, 10 aa, Artificial Sequence
  Description of Artificial Sequence: Synthetic peptide
  Seed: VGTMVMELIR
VATMVMELIK

SEQ ID NO: 15132 - protein, 10 aa, Artificial Sequence
  Description of Artificial Sequence: Synthetic peptide
  Seed: VGTMVMELIR
VRTMVMELIR

SEQ ID NO: 15133 - protein, 10 aa, Artificial Sequence
  Description of Artificial Sequence: Synthetic peptide
  Seed: VGTMVMELIR
VTTMVMELIK

SEQ ID NO: 15134 - protein, 10 aa, Artificial Sequence
  Description of Artificial Sequence: Synthetic peptide
  Seed: VGTMVMELIR
VWTMVMELIK

SEQ ID NO: 15135 - protein, 10 aa, Artificial Sequence
  Description of Artificial Sequence: Synthetic peptide
  Seed: VGTMVMELIR
VYTMVMELIR

SEQ ID NO: 15136 - protein, 10 aa, Artificial Sequence
  Description of Artificial Sequence: Synthetic peptide
  Seed: VGTMVMELIR
VYTMVMELIK

SEQ ID NO: 15137 - protein, 10 aa, Artificial Sequence
  Description of Artificial Sequence: Synthetic peptide
  Seed: VGTMVMELIR
VVTMVMELIR

SEQ ID NO: 15138 - protein, 10 aa, Artificial Sequence
  Description of Artificial Sequence: Synthetic peptide
  Seed: VGTMVMELIR
VVTMVMELIK

SEQ ID NO: 15139 - protein, 9 aa, Artificial Sequence
  Description of Artificial Sequence: Synthetic peptide
  Seed: VKGIGTMVM
VAGIGTMVM

SEQ ID NO: 15140 - protein, 9 aa, Artificial Sequence
  Description of Artificial Sequence: Synthetic peptide
  Seed: VKGIGTMVM
VAGIGTMVF

SEQ ID NO: 15141 - protein, 9 aa, Artificial Sequence
  Description of Artificial Sequence: Synthetic peptide
  Seed: VKGIGTMVM
VAGIGTMVY

SEQ ID NO: 15142 - protein, 9 aa, Artificial Sequence
  Description of Artificial Sequence: Synthetic peptide
  Seed: VKGIGTMVM
VRGIGTMVM

SEQ ID NO: 15143 - protein, 9 aa, Artificial Sequence
  Description of Artificial Sequence: Synthetic peptide
  Seed: VKGIGTMVM
VRGIGTMVF

SEQ ID NO: 15144 - protein, 9 aa, Artificial Sequence
  Description of Artificial Sequence: Synthetic peptide
  Seed: VKGIGTMVM
VRGIGTMVY

SEQ ID NO: 15145 - protein, 9 aa, Artificial Sequence
  Description of Artificial Sequence: Synthetic peptide
  Seed: VKGIGTMVM
VNGIGTMVF

SEQ ID NO: 15146 - protein, 9 aa, Artificial Sequence
  Description of Artificial Sequence: Synthetic peptide
  Seed: VKGIGTMVM
VNGIGTMVY

SEQ ID NO: 15147 - protein, 9 aa, Artificial Sequence
  Description of Artificial Sequence: Synthetic peptide
  Seed: VKGIGTMVM
VQGIGTMVA

SEQ ID NO: 15148 - protein, 9 aa, Artificial Sequence
  Description of Artificial Sequence: Synthetic peptide
  Seed: VKGIGTMVM
VQGIGTMVH

SEQ ID NO: 15149 - protein, 9 aa, Artificial Sequence
  Description of Artificial Sequence: Synthetic peptide
  Seed: VKGIGTMVM
VQGIGTMVI

SEQ ID NO: 15150 - protein, 9 aa, Artificial Sequence
  Description of Artificial Sequence: Synthetic peptide
  Seed: VKGIGTMVM
VQGIGTMVL

SEQ ID NO: 15151 - protein, 9 aa, Artificial Sequence
  Description of Artificial Sequence: Synthetic peptide
  Seed: VKGIGTMVM
VQGIGTMVM

SEQ ID NO: 15152 - protein, 9 aa, Artificial Sequence
  Description of Artificial Sequence: Synthetic peptide
  Seed: VKGIGTMVM
VQGIGTMVF

SEQ ID NO: 15153 - protein, 10 aa, Artificial Sequence
  Description of Artificial Sequence: Synthetic peptide
  Seed: VGTMVMELIR
VWTMVMELIR

SEQ ID NO: 15154 - protein, 10 aa, Artificial Sequence
  Description of Artificial Sequence: Synthetic peptide
  Seed: VGTMVMELIR
VTTMVMELIR

SEQ ID NO: 15155 - protein, 10 aa, Artificial Sequence
  Description of Artificial Sequence: Synthetic peptide
  Seed: VGTMVMELIR
VRTMVMELIK

SEQ ID NO: 15156 - protein, 10 aa, Artificial Sequence
  Description of Artificial Sequence: Synthetic peptide
  Seed: VGTMVMELIR
VSTMVMELIK

SEQ ID NO: 15157 - protein, 10 aa, Artificial Sequence
  Description of Artificial Sequence: Synthetic peptide
  Seed: VGTMVMELIR
VNTMVMELIR

SEQ ID NO: 15158 - protein, 10 aa, Artificial Sequence
  Description of Artificial Sequence: Synthetic peptide
  Seed: VGTMVMELIR
VDTMVMELIR

SEQ ID NO: 15159 - protein, 10 aa, Artificial Sequence
  Description of Artificial Sequence: Synthetic peptide
  Seed: VGTMVMELIR
VCTMVMELIR

SEQ ID NO: 15160 - protein, 10 aa, Artificial Sequence
  Description of Artificial Sequence: Synthetic peptide
  Seed: VGTMVMELIR
VQTMVMELIR

SEQ ID NO: 15161 - protein, 10 aa, Artificial Sequence
  Description of Artificial Sequence: Synthetic peptide
  Seed: VGTMVMELIR
VQTMVMELIK

SEQ ID NO: 15162 - protein, 10 aa, Artificial Sequence
  Description of Artificial Sequence: Synthetic peptide
  Seed: VGTMVMELIR
VETMVMELIR

SEQ ID NO: 15163 - protein, 10 aa, Artificial Sequence
  Description of Artificial Sequence: Synthetic peptide
  Seed: VGTMVMELIR
VETMVMELIK

SEQ ID NO: 15164 - protein, 10 aa, Artificial Sequence
  Description of Artificial Sequence: Synthetic peptide
  Seed: VGTMVMELIR
VHTMVMELIR

SEQ ID NO: 15165 - protein, 10 aa, Artificial Sequence
  Description of Artificial Sequence: Synthetic peptide
  Seed: VGTMVMELIR
VITMVMELIR

SEQ ID NO: 15166 - protein, 10 aa, Artificial Sequence
  Description of Artificial Sequence: Synthetic peptide
  Seed: VGTMVMELIR
VITMVMELIK

SEQ ID NO: 15167 - protein, 10 aa, Artificial Sequence
  Description of Artificial Sequence: Synthetic peptide
  Seed: VGTMVMELIR
VLTMVMELIR

SEQ ID NO: 15168 - protein, 10 aa, Artificial Sequence
  Description of Artificial Sequence: Synthetic peptide
  Seed: VGTMVMELIR
VLTMVMELIK

SEQ ID NO: 15169 - protein, 10 aa, Artificial Sequence
  Description of Artificial Sequence: Synthetic peptide
  Seed: VGTMVMELIR
VKTMVMELIR

SEQ ID NO: 15170 - protein, 10 aa, Artificial Sequence
  Description of Artificial Sequence: Synthetic peptide
  Seed: VGTMVMELIR
VMTMVMELIR

SEQ ID NO: 15171 - protein, 10 aa, Artificial Sequence
  Description of Artificial Sequence: Synthetic peptide
  Seed: VGTMVMELIR
VMTMVMELIK

SEQ ID NO: 15172 - protein, 10 aa, Artificial Sequence
  Description of Artificial Sequence: Synthetic peptide
  Seed: VGTMVMELIR
VFTMVMELIR

SEQ ID NO: 15173 - protein, 10 aa, Artificial Sequence
  Description of Artificial Sequence: Synthetic peptide
  Seed: VGTMVMELIR
VFTMVMELIK

SEQ ID NO: 15174 - protein, 10 aa, Artificial Sequence
  Description of Artificial Sequence: Synthetic peptide
  Seed: VGTMVMELIR
VPTMVMELIR

SEQ ID NO: 15175 - protein, 10 aa, Artificial Sequence
  Description of Artificial Sequence: Synthetic peptide
  Seed: VGTMVMELIR
VSTMVMELIR

SEQ ID NO: 15176 - protein, 10 aa, Artificial Sequence
  Description of Artificial Sequence: Synthetic peptide
  Seed: VGRMIGGIGR
VSRMIGGIGV

SEQ ID NO: 15177 - protein, 10 aa, Artificial Sequence
  Description of Artificial Sequence: Synthetic peptide
  Seed: VGRMIGGIGR
VSRMIGGIGY

SEQ ID NO: 15178 - protein, 10 aa, Artificial Sequence
  Description of Artificial Sequence: Synthetic peptide
  Seed: VGRMIGGIGR
VSRMIGGIGF

SEQ ID NO: 15179 - protein, 9 aa, Artificial Sequence
  Description of Artificial Sequence: Synthetic peptide
  Seed: VASGYDFEK
VVSGYDFEY

SEQ ID NO: 15180 - protein, 9 aa, Artificial Sequence
  Description of Artificial Sequence: Synthetic peptide
  Seed: VASGYDFEK
VFSGYDFEK

SEQ ID NO: 15181 - protein, 9 aa, Artificial Sequence
  Description of Artificial Sequence: Synthetic peptide
  Seed: VASGYDFEK
VPSGYDFER

SEQ ID NO: 15182 - protein, 9 aa, Artificial Sequence
  Description of Artificial Sequence: Synthetic peptide
  Seed: VASGYDFEK
VSSGYDFER

SEQ ID NO: 15183 - protein, 9 aa, Artificial Sequence
  Description of Artificial Sequence: Synthetic peptide
  Seed: VASGYDFEK
VTSGYDFER

SEQ ID NO: 15184 - protein, 9 aa, Artificial Sequence
  Description of Artificial Sequence: Synthetic peptide
  Seed: VASGYDFEK
VTSGYDFEK

SEQ ID NO: 15185 - protein, 9 aa, Artificial Sequence
  Description of Artificial Sequence: Synthetic peptide
  Seed: VASGYDFEK
VTSGYDFEY

SEQ ID NO: 15186 - protein, 9 aa, Artificial Sequence
  Description of Artificial Sequence: Synthetic peptide
  Seed: VASGYDFEK
VVSGYDFER

SEQ ID NO: 15187 - protein, 9 aa, Artificial Sequence
  Description of Artificial Sequence: Synthetic peptide
  Seed: VASGYDFEK
VVSGYDFEK

SEQ ID NO: 15188 - protein, 9 aa, Artificial Sequence
  Description of Artificial Sequence: Synthetic peptide
  Seed: VASGYDFER
VMSGYDFEY

SEQ ID NO: 15189 - protein, 9 aa, Artificial Sequence
  Description of Artificial Sequence: Synthetic peptide
  Seed: VASGYDFER
VNSGYDFER

SEQ ID NO: 15190 - protein, 9 aa, Artificial Sequence
  Description of Artificial Sequence: Synthetic peptide
  Seed: VASGYDFER
VQSGYDFER

SEQ ID NO: 15191 - protein, 9 aa, Artificial Sequence
  Description of Artificial Sequence: Synthetic peptide
  Seed: VASGYDFER
VQSGYDFEK

SEQ ID NO: 15192 - protein, 9 aa, Artificial Sequence
  Description of Artificial Sequence: Synthetic peptide
  Seed: VASGYDFER
VGSGYDFER

SEQ ID NO: 15193 - protein, 9 aa, Artificial Sequence
  Description of Artificial Sequence: Synthetic peptide
  Seed: VASGYDFER
VISGYDFER

SEQ ID NO: 15194 - protein, 9 aa, Artificial Sequence
  Description of Artificial Sequence: Synthetic peptide
  Seed: VASGYDFER
VISGYDFEK

SEQ ID NO: 15195 - protein, 9 aa, Artificial Sequence
  Description of Artificial Sequence: Synthetic peptide
  Seed: VASGYDFER
VLSGYDFER

SEQ ID NO: 15196 - protein, 9 aa, Artificial Sequence
  Description of Artificial Sequence: Synthetic peptide
  Seed: VASGYDFER
VLSGYDFEK

SEQ ID NO: 15197 - protein, 9 aa, Artificial Sequence
  Description of Artificial Sequence: Synthetic peptide
  Seed: VASGYDFER
VMSGYDFER

SEQ ID NO: 15198 - protein, 9 aa, Artificial Sequence
  Description of Artificial Sequence: Synthetic peptide
  Seed: VASGYDFEK
VFSGYDFER

SEQ ID NO: 15199 - protein, 9 aa, Artificial Sequence
  Description of Artificial Sequence: Synthetic peptide
  Seed: VASGYDFEK
VMSGYDFEK

SEQ ID NO: 15200 - protein, 9 aa, Artificial Sequence
  Description of Artificial Sequence: Synthetic peptide
  Seed: VASGHDFER
VSSGHDFER

SEQ ID NO: 15201 - protein, 9 aa, Artificial Sequence
  Description of Artificial Sequence: Synthetic peptide
  Seed: VASGHDFER
VSSGHDFEK

SEQ ID NO: 15202 - protein, 9 aa, Artificial Sequence
  Description of Artificial Sequence: Synthetic peptide
  Seed: VASGHDFER
VTSGHDFER

SEQ ID NO: 15203 - protein, 9 aa, Artificial Sequence
  Description of Artificial Sequence: Synthetic peptide
  Seed: VASGHDFER
VTSGHDFEK

SEQ ID NO: 15204 - protein, 9 aa, Artificial Sequence
  Description of Artificial Sequence: Synthetic peptide
  Seed: VASGHDFER
VWSGHDFER

SEQ ID NO: 15205 - protein, 9 aa, Artificial Sequence
  Description of Artificial Sequence: Synthetic peptide
  Seed: VASGHDFER
VWSGHDFEK

SEQ ID NO: 15206 - protein, 9 aa, Artificial Sequence
  Description of Artificial Sequence: Synthetic peptide
  Seed: VASGHDFER
VYSGHDFER

SEQ ID NO: 15207 - protein, 9 aa, Artificial Sequence
  Description of Artificial Sequence: Synthetic peptide
  Seed: VASGHDFER
VYSGHDFEK

SEQ ID NO: 15208 - protein, 9 aa, Artificial Sequence
  Description of Artificial Sequence: Synthetic peptide
  Seed: VASGHDFER
VVSGHDFER

SEQ ID NO: 15209 - protein, 9 aa, Artificial Sequence
  Description of Artificial Sequence: Synthetic peptide
  Seed: VASGHDFER
VVSGHDFEK

SEQ ID NO: 15210 - protein, 9 aa, Artificial Sequence
  Description of Artificial Sequence: Synthetic peptide
  Seed: VGIDPFRLL
VTIDPFRLY

SEQ ID NO: 15211 - protein, 9 aa, Artificial Sequence
  Description of Artificial Sequence: Synthetic peptide
  Seed: VGIDPFRLL
VMIDPFRLF

SEQ ID NO: 15212 - protein, 9 aa, Artificial Sequence
  Description of Artificial Sequence: Synthetic peptide
  Seed: VGIDPFRLL
VGIDPFRLY

SEQ ID NO: 15213 - protein, 9 aa, Artificial Sequence
  Description of Artificial Sequence: Synthetic peptide
  Seed: VGIDPFRLL
VIIDPFRLL

SEQ ID NO: 15214 - protein, 9 aa, Artificial Sequence
  Description of Artificial Sequence: Synthetic peptide
  Seed: VGIDPFRLL
VIIDPFRLM

SEQ ID NO: 15215 - protein, 9 aa, Artificial Sequence
  Description of Artificial Sequence: Synthetic peptide
  Seed: VGIDPFRLL
VIIDPFRLF

SEQ ID NO: 15216 - protein, 9 aa, Artificial Sequence
  Description of Artificial Sequence: Synthetic peptide
  Seed: VGIDPFRLL
VIIDPFRLY

SEQ ID NO: 15217 - protein, 9 aa, Artificial Sequence
  Description of Artificial Sequence: Synthetic peptide
  Seed: VGIDPFRLL
VLIDPFRLL

SEQ ID NO: 15218 - protein, 9 aa, Artificial Sequence
  Description of Artificial Sequence: Synthetic peptide
  Seed: VGIDPFRLL
VLIDPFRLM

SEQ ID NO: 15219 - protein, 9 aa, Artificial Sequence
  Description of Artificial Sequence: Synthetic peptide
  Seed: VGIDPFRLL
VMIDPFRLL

SEQ ID NO: 15220 - protein, 9 aa, Artificial Sequence
  Description of Artificial Sequence: Synthetic peptide
  Seed: VGIDPFRLL
VMIDPFRLM

SEQ ID NO: 15221 - protein, 9 aa, Artificial Sequence
  Description of Artificial Sequence: Synthetic peptide
  Seed: VGIDPFRLL
VMIDPFRLY

SEQ ID NO: 15222 - protein, 9 aa, Artificial Sequence
  Description of Artificial Sequence: Synthetic peptide
  Seed: VGIDPFRLL
VSIDPFRLI

SEQ ID NO: 15223 - protein, 9 aa, Artificial Sequence
  Description of Artificial Sequence: Synthetic peptide
  Seed: VGIDPFRLL
VSIDPFRLL

SEQ ID NO: 15224 - protein, 9 aa, Artificial Sequence
  Description of Artificial Sequence: Synthetic peptide
  Seed: VGIDPFRLL
VSIDPFRLM

SEQ ID NO: 15225 - protein, 9 aa, Artificial Sequence
  Description of Artificial Sequence: Synthetic peptide
  Seed: VGIDPFRLL
VSIDPFRLF

SEQ ID NO: 15226 - protein, 9 aa, Artificial Sequence
  Description of Artificial Sequence: Synthetic peptide
  Seed: VGIDPFRLL
VSIDPFRLY

SEQ ID NO: 15227 - protein, 9 aa, Artificial Sequence
  Description of Artificial Sequence: Synthetic peptide
  Seed: VGIDPFRLL
VSIDPFRLV

SEQ ID NO: 15228 - protein, 9 aa, Artificial Sequence
  Description of Artificial Sequence: Synthetic peptide
  Seed: VGIDPFRLL
VTIDPFRLI

SEQ ID NO: 15229 - protein, 9 aa, Artificial Sequence
  Description of Artificial Sequence: Synthetic peptide
  Seed: VGIDPFRLL
VTIDPFRLL

SEQ ID NO: 15230 - protein, 9 aa, Artificial Sequence
  Description of Artificial Sequence: Synthetic peptide
  Seed: VGIDPFRLL
VTIDPFRLM

SEQ ID NO: 15231 - protein, 9 aa, Artificial Sequence
  Description of Artificial Sequence: Synthetic peptide
  Seed: VGIDPFRLL
VGIDPFRLF

SEQ ID NO: 15232 - protein, 9 aa, Artificial Sequence
  Description of Artificial Sequence: Synthetic peptide
  Seed: VGIDPFRLL
VGIDPFRLM

SEQ ID NO: 15233 - protein, 9 aa, Artificial Sequence
  Description of Artificial Sequence: Synthetic peptide
  Seed: VGIDPFRLL
VQIDPFRLM

SEQ ID NO: 15234 - protein, 9 aa, Artificial Sequence
  Description of Artificial Sequence: Synthetic peptide
  Seed: VGIDPFRLL
VQIDPFRLL

SEQ ID NO: 15235 - protein, 9 aa, Artificial Sequence
  Description of Artificial Sequence: Synthetic peptide
  Seed: VGIDPFRLL
VAIDPFRLA

SEQ ID NO: 15236 - protein, 9 aa, Artificial Sequence
  Description of Artificial Sequence: Synthetic peptide
  Seed: VGIDPFRLL
VAIDPFRLH

SEQ ID NO: 15237 - protein, 9 aa, Artificial Sequence
  Description of Artificial Sequence: Synthetic peptide
  Seed: VGIDPFRLL
VAIDPFRLI

SEQ ID NO: 15238 - protein, 9 aa, Artificial Sequence
  Description of Artificial Sequence: Synthetic peptide
  Seed: VGIDPFRLL
VAIDPFRLL

SEQ ID NO: 15239 - protein, 9 aa, Artificial Sequence
  Description of Artificial Sequence: Synthetic peptide
  Seed: VGIDPFRLL
VAIDPFRLM

SEQ ID NO: 15240 - protein, 9 aa, Artificial Sequence
  Description of Artificial Sequence: Synthetic peptide
  Seed: VGIDPFRLL
VAIDPFRLF

SEQ ID NO: 15241 - protein, 9 aa, Artificial Sequence
  Description of Artificial Sequence: Synthetic peptide
  Seed: VGIDPFRLL
VAIDPFRLW

SEQ ID NO: 15242 - protein, 9 aa, Artificial Sequence
  Description of Artificial Sequence: Synthetic peptide
  Seed: VGIDPFRLL
VAIDPFRLY

SEQ ID NO: 15243 - protein, 9 aa, Artificial Sequence
  Description of Artificial Sequence: Synthetic peptide
  Seed: VGIDPFRLL
VAIDPFRLV

SEQ ID NO: 15244 - protein, 9 aa, Artificial Sequence
  Description of Artificial Sequence: Synthetic peptide
  Seed: VGIDPFRLL
VCIDPFRLY

SEQ ID NO: 15245 - protein, 9 aa, Artificial Sequence
  Description of Artificial Sequence: Synthetic peptide
  Seed: VASGHDFER
VFSGHDFEK

SEQ ID NO: 15246 - protein, 9 aa, Artificial Sequence
  Description of Artificial Sequence: Synthetic peptide
  Seed: VASGHDFER
VFSGHDFER

SEQ ID NO: 15247 - protein, 9 aa, Artificial Sequence
  Description of Artificial Sequence: Synthetic peptide
  Seed: VASGHDFER
VMSGHDFEK

SEQ ID NO: 15248 - protein, 9 aa, Artificial Sequence
  Description of Artificial Sequence: Synthetic peptide
  Seed: VAHKSCLPA
VQHKSCLPK

SEQ ID NO: 15249 - protein, 9 aa, Artificial Sequence
  Description of Artificial Sequence: Synthetic peptide
  Seed: VAHKSCLPA
VAHKSCLPI

SEQ ID NO: 15250 - protein, 9 aa, Artificial Sequence
  Description of Artificial Sequence: Synthetic peptide
  Seed: VAHKSCLPA
VAHKSCLPL

SEQ ID NO: 15251 - protein, 9 aa, Artificial Sequence
  Description of Artificial Sequence: Synthetic peptide
  Seed: VAHKSCLPA
VAHKSCLPK

SEQ ID NO: 15252 - protein, 9 aa, Artificial Sequence
  Description of Artificial Sequence: Synthetic peptide
  Seed: VAHKSCLPA
VAHKSCLPM

SEQ ID NO: 15253 - protein, 9 aa, Artificial Sequence
  Description of Artificial Sequence: Synthetic peptide
  Seed: VAHKSCLPA
VAHKSCLPF

SEQ ID NO: 15254 - protein, 9 aa, Artificial Sequence
  Description of Artificial Sequence: Synthetic peptide
  Seed: VAHKSCLPA
VAHKSCLPW

SEQ ID NO: 15255 - protein, 9 aa, Artificial Sequence
  Description of Artificial Sequence: Synthetic peptide
  Seed: VAHKSCLPA
VAHKSCLPY

SEQ ID NO: 15256 - protein, 9 aa, Artificial Sequence
  Description of Artificial Sequence: Synthetic peptide
  Seed: VAHKSCLPA
VAHKSCLPV

SEQ ID NO: 15257 - protein, 9 aa, Artificial Sequence
  Description of Artificial Sequence: Synthetic peptide
  Seed: VAHKSCLPA
VNHKSCLPK

SEQ ID NO: 15258 - protein, 9 aa, Artificial Sequence
  Description of Artificial Sequence: Synthetic peptide
  Seed: VAHKSCLPA
VGHKSCLPK

SEQ ID NO: 15259 - protein, 9 aa, Artificial Sequence
  Description of Artificial Sequence: Synthetic peptide
  Seed: VASGHDFER
VMSGHDFER

SEQ ID NO: 15260 - protein, 9 aa, Artificial Sequence
  Description of Artificial Sequence: Synthetic peptide
  Seed: VAHKSCLPA
VGHKSCLPM

SEQ ID NO: 15261 - protein, 9 aa, Artificial Sequence
  Description of Artificial Sequence: Synthetic peptide
  Seed: VAHKSCLPA
VGHKSCLPF

SEQ ID NO: 15262 - protein, 9 aa, Artificial Sequence
  Description of Artificial Sequence: Synthetic peptide
  Seed: VAHKSCLPA
VGHKSCLPY

SEQ ID NO: 15263 - protein, 9 aa, Artificial Sequence
  Description of Artificial Sequence: Synthetic peptide
  Seed: VAHKSCLPA
VIHKSCLPA

SEQ ID NO: 15264 - protein, 9 aa, Artificial Sequence
  Description of Artificial Sequence: Synthetic peptide
  Seed: VAHKSCLPA
VIHKSCLPK

SEQ ID NO: 15265 - protein, 9 aa, Artificial Sequence
  Description of Artificial Sequence: Synthetic peptide
  Seed: VAHKSCLPA
VIHKSCLPM

SEQ ID NO: 15266 - protein, 9 aa, Artificial Sequence
  Description of Artificial Sequence: Synthetic peptide
  Seed: VAHKSCLPA
VLHKSCLPK

SEQ ID NO: 15267 - protein, 9 aa, Artificial Sequence
  Description of Artificial Sequence: Synthetic peptide
  Seed: VAHKSCLPA
VMHKSCLPA

SEQ ID NO: 15268 - protein, 9 aa, Artificial Sequence
  Description of Artificial Sequence: Synthetic peptide
  Seed: VAHKSCLPA
VMHKSCLPL

SEQ ID NO: 15269 - protein, 10 aa, Artificial Sequence
  Description of Artificial Sequence: Synthetic peptide
  Seed: TYQRTRALVR
TVQRTRALVK

SEQ ID NO: 15270 - protein, 10 aa, Artificial Sequence
  Description of Artificial Sequence: Synthetic peptide
  Seed: TYQRTRALVR
TVQRTRALVR

SEQ ID NO: 15271 - protein, 10 aa, Artificial Sequence
  Description of Artificial Sequence: Synthetic peptide
  Seed: TYQRTRALVR
TYQRTRALVK

SEQ ID NO: 15272 - protein, 10 aa, Artificial Sequence
  Description of Artificial Sequence: Synthetic peptide
  Seed: TYQRTRALVR
TWQRTRALVK

SEQ ID NO: 15273 - protein, 10 aa, Artificial Sequence
  Description of Artificial Sequence: Synthetic peptide
  Seed: TYQRTRALVR
TAQRTRALVR

SEQ ID NO: 15274 - protein, 10 aa, Artificial Sequence
  Description of Artificial Sequence: Synthetic peptide
  Seed: TYQRTRALVR
TRQRTRALVR

SEQ ID NO: 15275 - protein, 10 aa, Artificial Sequence
  Description of Artificial Sequence: Synthetic peptide
  Seed: TYQRTRALVR
TNQRTRALVR

SEQ ID NO: 15276 - protein, 10 aa, Artificial Sequence
  Description of Artificial Sequence: Synthetic peptide
  Seed: TYQRTRALVR
TCQRTRALVR

SEQ ID NO: 15277 - protein, 10 aa, Artificial Sequence
  Description of Artificial Sequence: Synthetic peptide
  Seed: TYQRTRALVR
TQQRTRALVR

SEQ ID NO: 15278 - protein, 10 aa, Artificial Sequence
  Description of Artificial Sequence: Synthetic peptide
  Seed: TYQRTRALVR
TGQRTRALVR

SEQ ID NO: 15279 - protein, 10 aa, Artificial Sequence
  Description of Artificial Sequence: Synthetic peptide
  Seed: TYQRTRALVR
TIQRTRALVR

SEQ ID NO: 15280 - protein, 10 aa, Artificial Sequence
  Description of Artificial Sequence: Synthetic peptide
  Seed: TYQRTRALVR
TIQRTRALVK

SEQ ID NO: 15281 - protein, 10 aa, Artificial Sequence
  Description of Artificial Sequence: Synthetic peptide
  Seed: TYQRTRALVR
TLQRTRALVR

SEQ ID NO: 15282 - protein, 10 aa, Artificial Sequence
  Description of Artificial Sequence: Synthetic peptide
  Seed: TYQRTRALVR
TLQRTRALVK

SEQ ID NO: 15283 - protein, 10 aa, Artificial Sequence
  Description of Artificial Sequence: Synthetic peptide
  Seed: TYQRTRALVR
TKQRTRALVR

SEQ ID NO: 15284 - protein, 10 aa, Artificial Sequence
  Description of Artificial Sequence: Synthetic peptide
  Seed: TYQRTRALVR
TMQRTRALVR

SEQ ID NO: 15285 - protein, 10 aa, Artificial Sequence
  Description of Artificial Sequence: Synthetic peptide
  Seed: TYQRTRALVR
TMQRTRALVK

SEQ ID NO: 15286 - protein, 10 aa, Artificial Sequence
  Description of Artificial Sequence: Synthetic peptide
  Seed: TYQRTRALVR
TFQRTRALVK

SEQ ID NO: 15287 - protein, 10 aa, Artificial Sequence
  Description of Artificial Sequence: Synthetic peptide
  Seed: TYQRTRALVR
TSQRTRALVR

SEQ ID NO: 15288 - protein, 10 aa, Artificial Sequence
  Description of Artificial Sequence: Synthetic peptide
  Seed: TYQRTRALVR
TTQRTRALVR

SEQ ID NO: 15289 - protein, 10 aa, Artificial Sequence
  Description of Artificial Sequence: Synthetic peptide
  Seed: TYQRTRALVR
TTQRTRALVK

SEQ ID NO: 15290 - protein, 10 aa, Artificial Sequence
  Description of Artificial Sequence: Synthetic peptide
  Seed: TYQRTRALVR
TWQRTRALVR

SEQ ID NO: 15291 - protein, 9 aa, Artificial Sequence
  Description of Artificial Sequence: Synthetic peptide
  Seed: VAHKSCLPA
VMHKSCLPK

SEQ ID NO: 15292 - protein, 9 aa, Artificial Sequence
  Description of Artificial Sequence: Synthetic peptide
  Seed: VAHKSCLPA
VMHKSCLPM

SEQ ID NO: 15293 - protein, 9 aa, Artificial Sequence
  Description of Artificial Sequence: Synthetic peptide
  Seed: VAHKSCLPA
VMHKSCLPF

SEQ ID NO: 15294 - protein, 9 aa, Artificial Sequence
  Description of Artificial Sequence: Synthetic peptide
  Seed: VAHKSCLPA
VTHKSCLPV

SEQ ID NO: 15295 - protein, 9 aa, Artificial Sequence
  Description of Artificial Sequence: Synthetic peptide
  Seed: VAHKSCLPA
VYHKSCLPA

SEQ ID NO: 15296 - protein, 9 aa, Artificial Sequence
  Description of Artificial Sequence: Synthetic peptide
  Seed: VAHKSCLPA
VYHKSCLPK

SEQ ID NO: 15297 - protein, 9 aa, Artificial Sequence
  Description of Artificial Sequence: Synthetic peptide
  Seed: VAHKSCLPA
VVHKSCLPA

SEQ ID NO: 15298 - protein, 9 aa, Artificial Sequence
  Description of Artificial Sequence: Synthetic peptide
  Seed: VAHKSCLPA
VVHKSCLPI

SEQ ID NO: 15299 - protein, 9 aa, Artificial Sequence
  Description of Artificial Sequence: Synthetic peptide
  Seed: VAHKSCLPA
VVHKSCLPL

SEQ ID NO: 15300 - protein, 9 aa, Artificial Sequence
  Description of Artificial Sequence: Synthetic peptide
  Seed: VAHKSCLPA
VVHKSCLPK

SEQ ID NO: 15301 - protein, 9 aa, Artificial Sequence
  Description of Artificial Sequence: Synthetic peptide
  Seed: VAHKSCLPA
VVHKSCLPM

SEQ ID NO: 15302 - protein, 9 aa, Artificial Sequence
  Description of Artificial Sequence: Synthetic peptide
  Seed: VAHKSCLPA
VVHKSCLPF

SEQ ID NO: 15303 - protein, 9 aa, Artificial Sequence
  Description of Artificial Sequence: Synthetic peptide
  Seed: VAHKSCLPA
VVHKSCLPY

SEQ ID NO: 15304 - protein, 9 aa, Artificial Sequence
  Description of Artificial Sequence: Synthetic peptide
  Seed: VAHKSCLPA
VVHKSCLPV

SEQ ID NO: 15305 - protein, 9 aa, Artificial Sequence
  Description of Artificial Sequence: Synthetic peptide
  Seed: VASGHDFER
VASGHDFEK

SEQ ID NO: 15306 - protein, 9 aa, Artificial Sequence
  Description of Artificial Sequence: Synthetic peptide
  Seed: VASGHDFER
VNSGHDFER

SEQ ID NO: 15307 - protein, 9 aa, Artificial Sequence
  Description of Artificial Sequence: Synthetic peptide
  Seed: VASGHDFER
VQSGHDFER

SEQ ID NO: 15308 - protein, 9 aa, Artificial Sequence
  Description of Artificial Sequence: Synthetic peptide
  Seed: VASGHDFER
VQSGHDFEK

SEQ ID NO: 15309 - protein, 9 aa, Artificial Sequence
  Description of Artificial Sequence: Synthetic peptide
  Seed: VASGHDFER
VGSGHDFER

SEQ ID NO: 15310 - protein, 9 aa, Artificial Sequence
  Description of Artificial Sequence: Synthetic peptide
  Seed: VASGHDFER
VISGHDFER

SEQ ID NO: 15311 - protein, 9 aa, Artificial Sequence
  Description of Artificial Sequence: Synthetic peptide
  Seed: VASGHDFER
VISGHDFEK

SEQ ID NO: 15312 - protein, 9 aa, Artificial Sequence
  Description of Artificial Sequence: Synthetic peptide
  Seed: VASGHDFER
VLSGHDFER

SEQ ID NO: 15313 - protein, 9 aa, Artificial Sequence
  Description of Artificial Sequence: Synthetic peptide
  Seed: VASGHDFER
VLSGHDFEK

SEQ ID NO: 15314 - protein, 9 aa, Artificial Sequence
  Description of Artificial Sequence: Synthetic peptide
  Seed: VAHKSCLPA
VWHKSCLPK

SEQ ID NO: 15315 - protein, 9 aa, Artificial Sequence
  Description of Artificial Sequence: Synthetic peptide
  Seed: VAHKSCLPA
VTHKSCLPY

SEQ ID NO: 15316 - protein, 9 aa, Artificial Sequence
  Description of Artificial Sequence: Synthetic peptide
  Seed: VAHKSCLPA
VMHKSCLPY

SEQ ID NO: 15317 - protein, 9 aa, Artificial Sequence
  Description of Artificial Sequence: Synthetic peptide
  Seed: VAHKSCLPA
VTHKSCLPT

SEQ ID NO: 15318 - protein, 9 aa, Artificial Sequence
  Description of Artificial Sequence: Synthetic peptide
  Seed: VAHKSCLPA
VFHKSCLPK

SEQ ID NO: 15319 - protein, 9 aa, Artificial Sequence
  Description of Artificial Sequence: Synthetic peptide
  Seed: VAHKSCLPA
VSHKSCLPA

SEQ ID NO: 15320 - protein, 9 aa, Artificial Sequence
  Description of Artificial Sequence: Synthetic peptide
  Seed: VAHKSCLPA
VSHKSCLPR

SEQ ID NO: 15321 - protein, 9 aa, Artificial Sequence
  Description of Artificial Sequence: Synthetic peptide
  Seed: VAHKSCLPA
VSHKSCLPI

SEQ ID NO: 15322 - protein, 9 aa, Artificial Sequence
  Description of Artificial Sequence: Synthetic peptide
  Seed: VAHKSCLPA
VSHKSCLPL

SEQ ID NO: 15323 - protein, 9 aa, Artificial Sequence
  Description of Artificial Sequence: Synthetic peptide
  Seed: VAHKSCLPA
VSHKSCLPK

SEQ ID NO: 15324 - protein, 9 aa, Artificial Sequence
  Description of Artificial Sequence: Synthetic peptide
  Seed: VAHKSCLPA
VSHKSCLPM

SEQ ID NO: 15325 - protein, 9 aa, Artificial Sequence
  Description of Artificial Sequence: Synthetic peptide
  Seed: VAHKSCLPA
VSHKSCLPF

SEQ ID NO: 15326 - protein, 9 aa, Artificial Sequence
  Description of Artificial Sequence: Synthetic peptide
  Seed: VAHKSCLPA
VSHKSCLPS

SEQ ID NO: 15327 - protein, 9 aa, Artificial Sequence
  Description of Artificial Sequence: Synthetic peptide
  Seed: VAHKSCLPA
VSHKSCLPY

SEQ ID NO: 15328 - protein, 9 aa, Artificial Sequence
  Description of Artificial Sequence: Synthetic peptide
  Seed: VAHKSCLPA
VSHKSCLPV

SEQ ID NO: 15329 - protein, 9 aa, Artificial Sequence
  Description of Artificial Sequence: Synthetic peptide
  Seed: VAHKSCLPA
VTHKSCLPA

SEQ ID NO: 15330 - protein, 9 aa, Artificial Sequence
  Description of Artificial Sequence: Synthetic peptide
  Seed: VAHKSCLPA
VTHKSCLPG

SEQ ID NO: 15331 - protein, 9 aa, Artificial Sequence
  Description of Artificial Sequence: Synthetic peptide
  Seed: VAHKSCLPA
VTHKSCLPI

SEQ ID NO: 15332 - protein, 9 aa, Artificial Sequence
  Description of Artificial Sequence: Synthetic peptide
  Seed: VAHKSCLPA
VTHKSCLPL

SEQ ID NO: 15333 - protein, 9 aa, Artificial Sequence
  Description of Artificial Sequence: Synthetic peptide
  Seed: VAHKSCLPA
VTHKSCLPK

SEQ ID NO: 15334 - protein, 9 aa, Artificial Sequence
  Description of Artificial Sequence: Synthetic peptide
  Seed: VAHKSCLPA
VTHKSCLPM

SEQ ID NO: 15335 - protein, 9 aa, Artificial Sequence
  Description of Artificial Sequence: Synthetic peptide
  Seed: VAHKSCLPA
VTHKSCLPF

SEQ ID NO: 15336 - protein, 9 aa, Artificial Sequence
  Description of Artificial Sequence: Synthetic peptide
  Seed: VAHKSCLPA
VTHKSCLPS

SEQ ID NO: 15337 - protein, 9 aa, Artificial Sequence
  Description of Artificial Sequence: Synthetic peptide
  Seed: VGIDPFRLL
VTIDPFRLF

SEQ ID NO: 15338 - protein, 9 aa, Artificial Sequence
  Description of Artificial Sequence: Synthetic peptide
  Seed: VGIDPFRLL
VTIDPFRLV

SEQ ID NO: 15339 - protein, 10 aa, Artificial Sequence
  Description of Artificial Sequence: Synthetic peptide
  Seed: VGRMIGGIGR
VSRMIGGIGM

SEQ ID NO: 15340 - protein, 10 aa, Artificial Sequence
  Description of Artificial Sequence: Synthetic peptide
  Seed: VGRMIGGIGR
VHRMIGGIGL

SEQ ID NO: 15341 - protein, 10 aa, Artificial Sequence
  Description of Artificial Sequence: Synthetic peptide
  Seed: VGRMIGGIGR
VGRMIGGIGI

SEQ ID NO: 15342 - protein, 10 aa, Artificial Sequence
  Description of Artificial Sequence: Synthetic peptide
  Seed: VGRMIGGIGR
VGRMIGGIGL

SEQ ID NO: 15343 - protein, 10 aa, Artificial Sequence
  Description of Artificial Sequence: Synthetic peptide
  Seed: VGRMIGGIGR
VGRMIGGIGK

SEQ ID NO: 15344 - protein, 10 aa, Artificial Sequence
  Description of Artificial Sequence: Synthetic peptide
  Seed: VGRMIGGIGR
VGRMIGGIGM

SEQ ID NO: 15345 - protein, 10 aa, Artificial Sequence
  Description of Artificial Sequence: Synthetic peptide
  Seed: VGRMIGGIGR
VGRMIGGIGF

SEQ ID NO: 15346 - protein, 10 aa, Artificial Sequence
  Description of Artificial Sequence: Synthetic peptide
  Seed: VGRMIGGIGR
VGRMIGGIGY

SEQ ID NO: 15347 - protein, 10 aa, Artificial Sequence
  Description of Artificial Sequence: Synthetic peptide
  Seed: VGRMIGGIGR
VGRMIGGIGV

SEQ ID NO: 15348 - protein, 10 aa, Artificial Sequence
  Description of Artificial Sequence: Synthetic peptide
  Seed: VGRMIGGIGR
VHRMIGGIGR

SEQ ID NO: 15349 - protein, 10 aa, Artificial Sequence
  Description of Artificial Sequence: Synthetic peptide
  Seed: VGRMIGGIGR
VHRMIGGIGI

SEQ ID NO: 15350 - protein, 10 aa, Artificial Sequence
  Description of Artificial Sequence: Synthetic peptide
  Seed: VGRMIGGIGR
VHRMIGGIGK

SEQ ID NO: 15351 - protein, 10 aa, Artificial Sequence
  Description of Artificial Sequence: Synthetic peptide
  Seed: VGRMIGGIGR
VIRMIGGIGY

SEQ ID NO: 15352 - protein, 10 aa, Artificial Sequence
  Description of Artificial Sequence: Synthetic peptide
  Seed: VGRMIGGIGR
VHRMIGGIGM

SEQ ID NO: 15353 - protein, 10 aa, Artificial Sequence
  Description of Artificial Sequence: Synthetic peptide
  Seed: VGRMIGGIGR
VHRMIGGIGF

SEQ ID NO: 15354 - protein, 10 aa, Artificial Sequence
  Description of Artificial Sequence: Synthetic peptide
  Seed: VGRMIGGIGR
VHRMIGGIGY

SEQ ID NO: 15355 - protein, 10 aa, Artificial Sequence
  Description of Artificial Sequence: Synthetic peptide
  Seed: VGRMIGGIGR
VHRMIGGIGV

SEQ ID NO: 15356 - protein, 10 aa, Artificial Sequence
  Description of Artificial Sequence: Synthetic peptide
  Seed: VGRMIGGIGR
VIRMIGGIGR

SEQ ID NO: 15357 - protein, 10 aa, Artificial Sequence
  Description of Artificial Sequence: Synthetic peptide
  Seed: VGRMIGGIGR
VIRMIGGIGI

SEQ ID NO: 15358 - protein, 10 aa, Artificial Sequence
  Description of Artificial Sequence: Synthetic peptide
  Seed: VGRMIGGIGR
VIRMIGGIGL

SEQ ID NO: 15359 - protein, 10 aa, Artificial Sequence
  Description of Artificial Sequence: Synthetic peptide
  Seed: VGRMIGGIGR
VIRMIGGIGK

SEQ ID NO: 15360 - protein, 10 aa, Artificial Sequence
  Description of Artificial Sequence: Synthetic peptide
  Seed: VGRMIGGIGR
VIRMIGGIGM

SEQ ID NO: 15361 - protein, 10 aa, Artificial Sequence
  Description of Artificial Sequence: Synthetic peptide
  Seed: VGRMIGGIGR
VERMIGGIGV

SEQ ID NO: 15362 - protein, 10 aa, Artificial Sequence
  Description of Artificial Sequence: Synthetic peptide
  Seed: VGRMIGGIGR
VERMIGGIGY

SEQ ID NO: 15363 - protein, 10 aa, Artificial Sequence
  Description of Artificial Sequence: Synthetic peptide
  Seed: VGRMIGGIGR
VERMIGGIGF

SEQ ID NO: 15364 - protein, 10 aa, Artificial Sequence
  Description of Artificial Sequence: Synthetic peptide
  Seed: VGRMIGGIGR
VERMIGGIGM

SEQ ID NO: 15365 - protein, 10 aa, Artificial Sequence
  Description of Artificial Sequence: Synthetic peptide
  Seed: VGRMIGGIGR
VCRMIGGIGI

SEQ ID NO: 15366 - protein, 10 aa, Artificial Sequence
  Description of Artificial Sequence: Synthetic peptide
  Seed: VGRMIGGIGR
VCRMIGGIGL

SEQ ID NO: 15367 - protein, 10 aa, Artificial Sequence
  Description of Artificial Sequence: Synthetic peptide
  Seed: VGRMIGGIGR
VCRMIGGIGK

SEQ ID NO: 15368 - protein, 10 aa, Artificial Sequence
  Description of Artificial Sequence: Synthetic peptide
  Seed: VGRMIGGIGR
VCRMIGGIGM

SEQ ID NO: 15369 - protein, 10 aa, Artificial Sequence
  Description of Artificial Sequence: Synthetic peptide
  Seed: VGRMIGGIGR
VCRMIGGIGF

SEQ ID NO: 15370 - protein, 10 aa, Artificial Sequence
  Description of Artificial Sequence: Synthetic peptide
  Seed: VGRMIGGIGR
VCRMIGGIGY

SEQ ID NO: 15371 - protein, 10 aa, Artificial Sequence
  Description of Artificial Sequence: Synthetic peptide
  Seed: VGRMIGGIGR
VCRMIGGIGV

SEQ ID NO: 15372 - protein, 10 aa, Artificial Sequence
  Description of Artificial Sequence: Synthetic peptide
  Seed: VGRMIGGIGR
VQRMIGGIGR

SEQ ID NO: 15373 - protein, 10 aa, Artificial Sequence
  Description of Artificial Sequence: Synthetic peptide
  Seed: VGRMIGGIGR
VQRMIGGIGI

SEQ ID NO: 15374 - protein, 10 aa, Artificial Sequence
  Description of Artificial Sequence: Synthetic peptide
  Seed: VGRMIGGIGR
VQRMIGGIGL

SEQ ID NO: 15375 - protein, 10 aa, Artificial Sequence
  Description of Artificial Sequence: Synthetic peptide
  Seed: VGRMIGGIGR
VQRMIGGIGK

SEQ ID NO: 15376 - protein, 10 aa, Artificial Sequence
  Description of Artificial Sequence: Synthetic peptide
  Seed: VGRMIGGIGR
VQRMIGGIGM

SEQ ID NO: 15377 - protein, 10 aa, Artificial Sequence
  Description of Artificial Sequence: Synthetic peptide
  Seed: VGRMIGGIGR
VQRMIGGIGF

SEQ ID NO: 15378 - protein, 10 aa, Artificial Sequence
  Description of Artificial Sequence: Synthetic peptide
  Seed: VGRMIGGIGR
VQRMIGGIGY

SEQ ID NO: 15379 - protein, 10 aa, Artificial Sequence
  Description of Artificial Sequence: Synthetic peptide
  Seed: VGRMIGGIGR
VQRMIGGIGV

SEQ ID NO: 15380 - protein, 10 aa, Artificial Sequence
  Description of Artificial Sequence: Synthetic peptide
  Seed: VGRMIGGIGR
VERMIGGIGR

SEQ ID NO: 15381 - protein, 10 aa, Artificial Sequence
  Description of Artificial Sequence: Synthetic peptide
  Seed: VGRMIGGIGR
VERMIGGIGI

SEQ ID NO: 15382 - protein, 10 aa, Artificial Sequence
  Description of Artificial Sequence: Synthetic peptide
  Seed: VGRMIGGIGR
VERMIGGIGL

SEQ ID NO: 15383 - protein, 10 aa, Artificial Sequence
  Description of Artificial Sequence: Synthetic peptide
  Seed: VGRMIGGIGR
VERMIGGIGK

SEQ ID NO: 15384 - protein, 10 aa, Artificial Sequence
  Description of Artificial Sequence: Synthetic peptide
  Seed: VGRMIGGIGR
VIRMIGGIGF

SEQ ID NO: 15385 - protein, 10 aa, Artificial Sequence
  Description of Artificial Sequence: Synthetic peptide
  Seed: VGRMIGGIGR
VIRMIGGIGV

SEQ ID NO: 15386 - protein, 9 aa, Artificial Sequence
  Description of Artificial Sequence: Synthetic peptide
  Seed: VGIDPFRLL
VVIDPFRLI

SEQ ID NO: 15387 - protein, 10 aa, Artificial Sequence
  Description of Artificial Sequence: Synthetic peptide
  Seed: VGRMIGGIGR
VPRMIGGIGI

SEQ ID NO: 15388 - protein, 10 aa, Artificial Sequence
  Description of Artificial Sequence: Synthetic peptide
  Seed: VGRMIGGIGR
VFRMIGGIGR

SEQ ID NO: 15389 - protein, 10 aa, Artificial Sequence
  Description of Artificial Sequence: Synthetic peptide
  Seed: VGRMIGGIGR
VFRMIGGIGI

SEQ ID NO: 15390 - protein, 10 aa, Artificial Sequence
  Description of Artificial Sequence: Synthetic peptide
  Seed: VGRMIGGIGR
VFRMIGGIGL

SEQ ID NO: 15391 - protein, 10 aa, Artificial Sequence
  Description of Artificial Sequence: Synthetic peptide
  Seed: VGRMIGGIGR
VFRMIGGIGK

SEQ ID NO: 15392 - protein, 10 aa, Artificial Sequence
  Description of Artificial Sequence: Synthetic peptide
  Seed: VGRMIGGIGR
VFRMIGGIGM

SEQ ID NO: 15393 - protein, 10 aa, Artificial Sequence
  Description of Artificial Sequence: Synthetic peptide
  Seed: VGRMIGGIGR
VFRMIGGIGF

SEQ ID NO: 15394 - protein, 10 aa, Artificial Sequence
  Description of Artificial Sequence: Synthetic peptide
  Seed: VGRMIGGIGR
VFRMIGGIGY

SEQ ID NO: 15395 - protein, 10 aa, Artificial Sequence
  Description of Artificial Sequence: Synthetic peptide
  Seed: VGRMIGGIGR
VFRMIGGIGV

SEQ ID NO: 15396 - protein, 10 aa, Artificial Sequence
  Description of Artificial Sequence: Synthetic peptide
  Seed: VGRMIGGIGR
VPRMIGGIGR

SEQ ID NO: 15397 - protein, 10 aa, Artificial Sequence
  Description of Artificial Sequence: Synthetic peptide
  Seed: VGRMIGGIGR
VPRMIGGIGL

SEQ ID NO: 15398 - protein, 10 aa, Artificial Sequence
  Description of Artificial Sequence: Synthetic peptide
  Seed: VGRMIGGIGR
VLRMIGGIGR

SEQ ID NO: 15399 - protein, 10 aa, Artificial Sequence
  Description of Artificial Sequence: Synthetic peptide
  Seed: VGRMIGGIGR
VPRMIGGIGK

SEQ ID NO: 15400 - protein, 10 aa, Artificial Sequence
  Description of Artificial Sequence: Synthetic peptide
  Seed: VGRMIGGIGR
VPRMIGGIGM

SEQ ID NO: 15401 - protein, 10 aa, Artificial Sequence
  Description of Artificial Sequence: Synthetic peptide
  Seed: VGRMIGGIGR
VPRMIGGIGF

SEQ ID NO: 15402 - protein, 10 aa, Artificial Sequence
  Description of Artificial Sequence: Synthetic peptide
  Seed: VGRMIGGIGR
VPRMIGGIGY

SEQ ID NO: 15403 - protein, 10 aa, Artificial Sequence
  Description of Artificial Sequence: Synthetic peptide
  Seed: VGRMIGGIGR
VPRMIGGIGV

SEQ ID NO: 15404 - protein, 10 aa, Artificial Sequence
  Description of Artificial Sequence: Synthetic peptide
  Seed: VGRMIGGIGR
VSRMIGGIGR

SEQ ID NO: 15405 - protein, 10 aa, Artificial Sequence
  Description of Artificial Sequence: Synthetic peptide
  Seed: VGRMIGGIGR
VSRMIGGIGI

SEQ ID NO: 15406 - protein, 10 aa, Artificial Sequence
  Description of Artificial Sequence: Synthetic peptide
  Seed: VGRMIGGIGR
VSRMIGGIGL

SEQ ID NO: 15407 - protein, 10 aa, Artificial Sequence
  Description of Artificial Sequence: Synthetic peptide
  Seed: VGRMIGGIGR
VSRMIGGIGK

SEQ ID NO: 15408 - protein, 10 aa, Artificial Sequence
  Description of Artificial Sequence: Synthetic peptide
  Seed: VGRMIGGIGR
VMRMIGGIGV

SEQ ID NO: 15409 - protein, 10 aa, Artificial Sequence
  Description of Artificial Sequence: Synthetic peptide
  Seed: VGRMIGGIGR
VMRMIGGIGY

SEQ ID NO: 15410 - protein, 10 aa, Artificial Sequence
  Description of Artificial Sequence: Synthetic peptide
  Seed: VGRMIGGIGR
VMRMIGGIGF

SEQ ID NO: 15411 - protein, 10 aa, Artificial Sequence
  Description of Artificial Sequence: Synthetic peptide
  Seed: VGRMIGGIGR
VMRMIGGIGM

SEQ ID NO: 15412 - protein, 10 aa, Artificial Sequence
  Description of Artificial Sequence: Synthetic peptide
  Seed: VGRMIGGIGR
VLRMIGGIGI

SEQ ID NO: 15413 - protein, 10 aa, Artificial Sequence
  Description of Artificial Sequence: Synthetic peptide
  Seed: VGRMIGGIGR
VLRMIGGIGL

SEQ ID NO: 15414 - protein, 10 aa, Artificial Sequence
  Description of Artificial Sequence: Synthetic peptide
  Seed: VGRMIGGIGR
VLRMIGGIGK

SEQ ID NO: 15415 - protein, 10 aa, Artificial Sequence
  Description of Artificial Sequence: Synthetic peptide
  Seed: VGRMIGGIGR
VLRMIGGIGM

SEQ ID NO: 15416 - protein, 10 aa, Artificial Sequence
  Description of Artificial Sequence: Synthetic peptide
  Seed: VGRMIGGIGR
VLRMIGGIGF

SEQ ID NO: 15417 - protein, 10 aa, Artificial Sequence
  Description of Artificial Sequence: Synthetic peptide
  Seed: VGRMIGGIGR
VLRMIGGIGY

SEQ ID NO: 15418 - protein, 10 aa, Artificial Sequence
  Description of Artificial Sequence: Synthetic peptide
  Seed: VGRMIGGIGR
VLRMIGGIGV

SEQ ID NO: 15419 - protein, 10 aa, Artificial Sequence
  Description of Artificial Sequence: Synthetic peptide
  Seed: VGRMIGGIGR
VKRMIGGIGR

SEQ ID NO: 15420 - protein, 10 aa, Artificial Sequence
  Description of Artificial Sequence: Synthetic peptide
  Seed: VGRMIGGIGR
VKRMIGGIGI

SEQ ID NO: 15421 - protein, 10 aa, Artificial Sequence
  Description of Artificial Sequence: Synthetic peptide
  Seed: VGRMIGGIGR
VKRMIGGIGL

SEQ ID NO: 15422 - protein, 10 aa, Artificial Sequence
  Description of Artificial Sequence: Synthetic peptide
  Seed: VGRMIGGIGR
VKRMIGGIGK

SEQ ID NO: 15423 - protein, 10 aa, Artificial Sequence
  Description of Artificial Sequence: Synthetic peptide
  Seed: VGRMIGGIGR
VKRMIGGIGM

SEQ ID NO: 15424 - protein, 10 aa, Artificial Sequence
  Description of Artificial Sequence: Synthetic peptide
  Seed: VGRMIGGIGR
VKRMIGGIGF

SEQ ID NO: 15425 - protein, 10 aa, Artificial Sequence
  Description of Artificial Sequence: Synthetic peptide
  Seed: VGRMIGGIGR
VKRMIGGIGY

SEQ ID NO: 15426 - protein, 10 aa, Artificial Sequence
  Description of Artificial Sequence: Synthetic peptide
  Seed: VGRMIGGIGR
VKRMIGGIGV

SEQ ID NO: 15427 - protein, 10 aa, Artificial Sequence
  Description of Artificial Sequence: Synthetic peptide
  Seed: VGRMIGGIGR
VMRMIGGIGR

SEQ ID NO: 15428 - protein, 10 aa, Artificial Sequence
  Description of Artificial Sequence: Synthetic peptide
  Seed: VGRMIGGIGR
VMRMIGGIGI

SEQ ID NO: 15429 - protein, 10 aa, Artificial Sequence
  Description of Artificial Sequence: Synthetic peptide
  Seed: VGRMIGGIGR
VMRMIGGIGL

SEQ ID NO: 15430 - protein, 10 aa, Artificial Sequence
  Description of Artificial Sequence: Synthetic peptide
  Seed: VGRMIGGIGR
VMRMIGGIGK

SEQ ID NO: 15431 - protein, 10 aa, Artificial Sequence
  Description of Artificial Sequence: Synthetic peptide
  Seed: VGRMIGGIGR
VCRMIGGIGR

SEQ ID NO: 15432 - protein, 10 aa, Artificial Sequence
  Description of Artificial Sequence: Synthetic peptide
  Seed: VGRMIGGIGR
VDRMIGGIGV

SEQ ID NO: 15433 - protein, 10 aa, Artificial Sequence
  Description of Artificial Sequence: Synthetic peptide
  Seed: VGRMIGGIGR
VDRMIGGIGY

SEQ ID NO: 15434 - protein, 11 aa, Artificial Sequence
  Description of Artificial Sequence: Synthetic peptide
  Seed: VGKMIDGIGRF
VEKMIDGIGRF

SEQ ID NO: 15435 - protein, 11 aa, Artificial Sequence
  Description of Artificial Sequence: Synthetic peptide
  Seed: VGKMIDGIGRF
VRKMIDGIGRY

SEQ ID NO: 15436 - protein, 11 aa, Artificial Sequence
  Description of Artificial Sequence: Synthetic peptide
  Seed: VGKMIDGIGRF
VNKMIDGIGRF

SEQ ID NO: 15437 - protein, 11 aa, Artificial Sequence
  Description of Artificial Sequence: Synthetic peptide
  Seed: VGKMIDGIGRF
VNKMIDGIGRY

SEQ ID NO: 15438 - protein, 11 aa, Artificial Sequence
  Description of Artificial Sequence: Synthetic peptide
  Seed: VGKMIDGIGRF
VDKMIDGIGRF

SEQ ID NO: 15439 - protein, 11 aa, Artificial Sequence
  Description of Artificial Sequence: Synthetic peptide
  Seed: VGKMIDGIGRF
VDKMIDGIGRY

SEQ ID NO: 15440 - protein, 11 aa, Artificial Sequence
  Description of Artificial Sequence: Synthetic peptide
  Seed: VGKMIDGIGRF
VCKMIDGIGRF

SEQ ID NO: 15441 - protein, 11 aa, Artificial Sequence
  Description of Artificial Sequence: Synthetic peptide
  Seed: VGKMIDGIGRF
VCKMIDGIGRY

SEQ ID NO: 15442 - protein, 11 aa, Artificial Sequence
  Description of Artificial Sequence: Synthetic peptide
  Seed: VGKMIDGIGRF
VQKMIDGIGRF

SEQ ID NO: 15443 - protein, 11 aa, Artificial Sequence
  Description of Artificial Sequence: Synthetic peptide
  Seed: VGKMIDGIGRF
VQKMIDGIGRY

SEQ ID NO: 15444 - protein, 11 aa, Artificial Sequence
  Description of Artificial Sequence: Synthetic peptide
  Seed: VGKMIDGIGRF
VEKMIDGIGRY

SEQ ID NO: 15445 - protein, 10 aa, Artificial Sequence
  Description of Artificial Sequence: Synthetic peptide
  Seed: VGRMIGGIGR
VDRMIGGIGF

SEQ ID NO: 15446 - protein, 11 aa, Artificial Sequence
  Description of Artificial Sequence: Synthetic peptide
  Seed: VGKMIDGIGRF
VGKMIDGIGRY

SEQ ID NO: 15447 - protein, 11 aa, Artificial Sequence
  Description of Artificial Sequence: Synthetic peptide
  Seed: VGKMIDGIGRF
VHKMIDGIGRF

SEQ ID NO: 15448 - protein, 11 aa, Artificial Sequence
  Description of Artificial Sequence: Synthetic peptide
  Seed: VGKMIDGIGRF
VHKMIDGIGRY

SEQ ID NO: 15449 - protein, 11 aa, Artificial Sequence
  Description of Artificial Sequence: Synthetic peptide
  Seed: VGKMIDGIGRF
VIKMIDGIGRF

SEQ ID NO: 15450 - protein, 11 aa, Artificial Sequence
  Description of Artificial Sequence: Synthetic peptide
  Seed: VGKMIDGIGRF
VIKMIDGIGRY

SEQ ID NO: 15451 - protein, 11 aa, Artificial Sequence
  Description of Artificial Sequence: Synthetic peptide
  Seed: VGKMIDGIGRF
VLKMIDGIGRF

SEQ ID NO: 15452 - protein, 11 aa, Artificial Sequence
  Description of Artificial Sequence: Synthetic peptide
  Seed: VGKMIDGIGRF
VLKMIDGIGRY

SEQ ID NO: 15453 - protein, 11 aa, Artificial Sequence
  Description of Artificial Sequence: Synthetic peptide
  Seed: VGKMIDGIGRF
VKKMIDGIGRF

SEQ ID NO: 15454 - protein, 11 aa, Artificial Sequence
  Description of Artificial Sequence: Synthetic peptide
  Seed: VGKMIDGIGRF
VKKMIDGIGRY

SEQ ID NO: 15455 - protein, 11 aa, Artificial Sequence
  Description of Artificial Sequence: Synthetic peptide
  Seed: VGKMIDGIGRF
VRKMIDGIGRF

SEQ ID NO: 15456 - protein, 11 aa, Artificial Sequence
  Description of Artificial Sequence: Synthetic peptide
  Seed: VGKMIDGIGRF
VAKMIDGIGRY

SEQ ID NO: 15457 - protein, 11 aa, Artificial Sequence
  Description of Artificial Sequence: Synthetic peptide
  Seed: VGKMIDGIGRF
VAKMIDGIGRF

SEQ ID NO: 15458 - protein, 10 aa, Artificial Sequence
  Description of Artificial Sequence: Synthetic peptide
  Seed: VGKMIDGIGR
VVKMIDGIGR

SEQ ID NO: 15459 - protein, 9 aa, Artificial Sequence
  Description of Artificial Sequence: Synthetic peptide
  Seed: VGIDPFRLL
VVIDPFRLL

SEQ ID NO: 15460 - protein, 9 aa, Artificial Sequence
  Description of Artificial Sequence: Synthetic peptide
  Seed: VGIDPFRLL
VVIDPFRLM

SEQ ID NO: 15461 - protein, 9 aa, Artificial Sequence
  Description of Artificial Sequence: Synthetic peptide
  Seed: VGIDPFRLL
VVIDPFRLF

SEQ ID NO: 15462 - protein, 9 aa, Artificial Sequence
  Description of Artificial Sequence: Synthetic peptide
  Seed: VGIDPFRLL
VVIDPFRLY

SEQ ID NO: 15463 - protein, 9 aa, Artificial Sequence
  Description of Artificial Sequence: Synthetic peptide
  Seed: VGIDPFRLL
VVIDPFRLV

SEQ ID NO: 15464 - protein, 10 aa, Artificial Sequence
  Description of Artificial Sequence: Synthetic peptide
  Seed: VGKMIDGIGR
VAKMIDGIGR

SEQ ID NO: 15465 - protein, 10 aa, Artificial Sequence
  Description of Artificial Sequence: Synthetic peptide
  Seed: VGKMIDGIGR
VQKMIDGIGR

SEQ ID NO: 15466 - protein, 10 aa, Artificial Sequence
  Description of Artificial Sequence: Synthetic peptide
  Seed: VGKMIDGIGR
VIKMIDGIGR

SEQ ID NO: 15467 - protein, 10 aa, Artificial Sequence
  Description of Artificial Sequence: Synthetic peptide
  Seed: VGKMIDGIGR
VLKMIDGIGR

SEQ ID NO: 15468 - protein, 10 aa, Artificial Sequence
  Description of Artificial Sequence: Synthetic peptide
  Seed: VGKMIDGIGR
VMKMIDGIGR

SEQ ID NO: 15469 - protein, 10 aa, Artificial Sequence
  Description of Artificial Sequence: Synthetic peptide
  Seed: VGKMIDGIGR
VMKMIDGIGK

SEQ ID NO: 15470 - protein, 10 aa, Artificial Sequence
  Description of Artificial Sequence: Synthetic peptide
  Seed: VGKMIDGIGR
VFKMIDGIGR

SEQ ID NO: 15471 - protein, 10 aa, Artificial Sequence
  Description of Artificial Sequence: Synthetic peptide
  Seed: VGKMIDGIGR
VFKMIDGIGK

SEQ ID NO: 15472 - protein, 10 aa, Artificial Sequence
  Description of Artificial Sequence: Synthetic peptide
  Seed: VGKMIDGIGR
VSKMIDGIGR

SEQ ID NO: 15473 - protein, 10 aa, Artificial Sequence
  Description of Artificial Sequence: Synthetic peptide
  Seed: VGKMIDGIGR
VTKMIDGIGR

SEQ ID NO: 15474 - protein, 10 aa, Artificial Sequence
  Description of Artificial Sequence: Synthetic peptide
  Seed: VGKMIDGIGR
VWKMIDGIGR

SEQ ID NO: 15475 - protein, 10 aa, Artificial Sequence
  Description of Artificial Sequence: Synthetic peptide
  Seed: VGKMIDGIGR
VWKMIDGIGK

SEQ ID NO: 15476 - protein, 10 aa, Artificial Sequence
  Description of Artificial Sequence: Synthetic peptide
  Seed: VGKMIDGIGR
VYKMIDGIGR

SEQ ID NO: 15477 - protein, 10 aa, Artificial Sequence
  Description of Artificial Sequence: Synthetic peptide
  Seed: VGKMIDGIGR
VYKMIDGIGK

SEQ ID NO: 15478 - protein, 11 aa, Artificial Sequence
  Description of Artificial Sequence: Synthetic peptide
  Seed: VGKMIDGIGRF
VMKMIDGIGRF

SEQ ID NO: 15479 - protein, 11 aa, Artificial Sequence
  Description of Artificial Sequence: Synthetic peptide
  Seed: VGKMIDGIGRF
VMKMIDGIGRY

SEQ ID NO: 15480 - protein, 11 aa, Artificial Sequence
  Description of Artificial Sequence: Synthetic peptide
  Seed: VGKMIDGIGRF
VFKMIDGIGRF

SEQ ID NO: 15481 - protein, 10 aa, Artificial Sequence
  Description of Artificial Sequence: Synthetic peptide
  Seed: VGRMIGGIGR
VRRMIGGIGI

SEQ ID NO: 15482 - protein, 10 aa, Artificial Sequence
  Description of Artificial Sequence: Synthetic peptide
  Seed: VGRMIGGIGR
VRRMIGGIGK

SEQ ID NO: 15483 - protein, 10 aa, Artificial Sequence
  Description of Artificial Sequence: Synthetic peptide
  Seed: VGRMIGGIGR
VRRMIGGIGM

SEQ ID NO: 15484 - protein, 10 aa, Artificial Sequence
  Description of Artificial Sequence: Synthetic peptide
  Seed: VGRMIGGIGR
VRRMIGGIGF

SEQ ID NO: 15485 - protein, 10 aa, Artificial Sequence
  Description of Artificial Sequence: Synthetic peptide
  Seed: VGRMIGGIGR
VRRMIGGIGW

SEQ ID NO: 15486 - protein, 10 aa, Artificial Sequence
  Description of Artificial Sequence: Synthetic peptide
  Seed: VGRMIGGIGR
VRRMIGGIGY

SEQ ID NO: 15487 - protein, 10 aa, Artificial Sequence
  Description of Artificial Sequence: Synthetic peptide
  Seed: VGRMIGGIGR
VRRMIGGIGV

SEQ ID NO: 15488 - protein, 10 aa, Artificial Sequence
  Description of Artificial Sequence: Synthetic peptide
  Seed: VGRMIGGIGR
VNRMIGGIGR

SEQ ID NO: 15489 - protein, 10 aa, Artificial Sequence
  Description of Artificial Sequence: Synthetic peptide
  Seed: VGRMIGGIGR
VNRMIGGIGI

SEQ ID NO: 15490 - protein, 10 aa, Artificial Sequence
  Description of Artificial Sequence: Synthetic peptide
  Seed: VGRMIGGIGR
VNRMIGGIGL

SEQ ID NO: 15491 - protein, 10 aa, Artificial Sequence
  Description of Artificial Sequence: Synthetic peptide
  Seed: VGRMIGGIGR
VNRMIGGIGK

SEQ ID NO: 15492 - protein, 10 aa, Artificial Sequence
  Description of Artificial Sequence: Synthetic peptide
  Seed: VGRMIGGIGR
VNRMIGGIGM

SEQ ID NO: 15493 - protein, 10 aa, Artificial Sequence
  Description of Artificial Sequence: Synthetic peptide
  Seed: VGRMIGGIGR
VNRMIGGIGF

SEQ ID NO: 15494 - protein, 10 aa, Artificial Sequence
  Description of Artificial Sequence: Synthetic peptide
  Seed: VGRMIGGIGR
VNRMIGGIGY

SEQ ID NO: 15495 - protein, 10 aa, Artificial Sequence
  Description of Artificial Sequence: Synthetic peptide
  Seed: VGRMIGGIGR
VNRMIGGIGV

SEQ ID NO: 15496 - protein, 10 aa, Artificial Sequence
  Description of Artificial Sequence: Synthetic peptide
  Seed: VGRMIGGIGR
VDRMIGGIGR

SEQ ID NO: 15497 - protein, 10 aa, Artificial Sequence
  Description of Artificial Sequence: Synthetic peptide
  Seed: VGRMIGGIGR
VDRMIGGIGI

SEQ ID NO: 15498 - protein, 10 aa, Artificial Sequence
  Description of Artificial Sequence: Synthetic peptide
  Seed: VGRMIGGIGR
VDRMIGGIGL

SEQ ID NO: 15499 - protein, 10 aa, Artificial Sequence
  Description of Artificial Sequence: Synthetic peptide
  Seed: VGRMIGGIGR
VDRMIGGIGK

SEQ ID NO: 15500 - protein, 10 aa, Artificial Sequence
  Description of Artificial Sequence: Synthetic peptide
  Seed: VGRMIGGIGR
VDRMIGGIGM

SEQ ID NO: 15501 - protein, 10 aa, Artificial Sequence
  Description of Artificial Sequence: Synthetic peptide
  Seed: VGRMIGGIGR
VRRMIGGIGL

SEQ ID NO: 15502 - protein, 10 aa, Artificial Sequence
  Description of Artificial Sequence: Synthetic peptide
  Seed: VGRMIGGIGR
VRRMIGGIGR

SEQ ID NO: 15503 - protein, 11 aa, Artificial Sequence
  Description of Artificial Sequence: Synthetic peptide
  Seed: VGKMIDGIGRF
VFKMIDGIGRY

SEQ ID NO: 15504 - protein, 10 aa, Artificial Sequence
  Description of Artificial Sequence: Synthetic peptide
  Seed: VGRMIGGIGR
VARMIGGIGV

SEQ ID NO: 15505 - protein, 11 aa, Artificial Sequence
  Description of Artificial Sequence: Synthetic peptide
  Seed: VGKMIDGIGRF
VPKMIDGIGRF

SEQ ID NO: 15506 - protein, 11 aa, Artificial Sequence
  Description of Artificial Sequence: Synthetic peptide
  Seed: VGKMIDGIGRF
VPKMIDGIGRY

SEQ ID NO: 15507 - protein, 11 aa, Artificial Sequence
  Description of Artificial Sequence: Synthetic peptide
  Seed: VGKMIDGIGRF
VSKMIDGIGRF

SEQ ID NO: 15508 - protein, 11 aa, Artificial Sequence
  Description of Artificial Sequence: Synthetic peptide
  Seed: VGKMIDGIGRF
VSKMIDGIGRY

SEQ ID NO: 15509 - protein, 11 aa, Artificial Sequence
  Description of Artificial Sequence: Synthetic peptide
  Seed: VGKMIDGIGRF
VTKMIDGIGRF

SEQ ID NO: 15510 - protein, 11 aa, Artificial Sequence
  Description of Artificial Sequence: Synthetic peptide
  Seed: VGKMIDGIGRF
VTKMIDGIGRY

SEQ ID NO: 15511 - protein, 11 aa, Artificial Sequence
  Description of Artificial Sequence: Synthetic peptide
  Seed: VGKMIDGIGRF
VWKMIDGIGRF

SEQ ID NO: 15512 - protein, 11 aa, Artificial Sequence
  Description of Artificial Sequence: Synthetic peptide
  Seed: VGKMIDGIGRF
VWKMIDGIGRY

SEQ ID NO: 15513 - protein, 11 aa, Artificial Sequence
  Description of Artificial Sequence: Synthetic peptide
  Seed: VGKMIDGIGRF
VYKMIDGIGRF

SEQ ID NO: 15514 - protein, 11 aa, Artificial Sequence
  Description of Artificial Sequence: Synthetic peptide
  Seed: VGKMIDGIGRF
VYKMIDGIGRY

SEQ ID NO: 15515 - protein, 11 aa, Artificial Sequence
  Description of Artificial Sequence: Synthetic peptide
  Seed: VGKMIDGIGRF
VVKMIDGIGRF

SEQ ID NO: 15516 - protein, 11 aa, Artificial Sequence
  Description of Artificial Sequence: Synthetic peptide
  Seed: VGKMIDGIGRF
VVKMIDGIGRY

SEQ ID NO: 15517 - protein, 10 aa, Artificial Sequence
  Description of Artificial Sequence: Synthetic peptide
  Seed: VGRMIGGIGR
VARMIGGIGR

SEQ ID NO: 15518 - protein, 10 aa, Artificial Sequence
  Description of Artificial Sequence: Synthetic peptide
  Seed: VGRMIGGIGR
VARMIGGIGI

SEQ ID NO: 15519 - protein, 10 aa, Artificial Sequence
  Description of Artificial Sequence: Synthetic peptide
  Seed: VGRMIGGIGR
VARMIGGIGL

SEQ ID NO: 15520 - protein, 10 aa, Artificial Sequence
  Description of Artificial Sequence: Synthetic peptide
  Seed: VGRMIGGIGR
VARMIGGIGK

SEQ ID NO: 15521 - protein, 10 aa, Artificial Sequence
  Description of Artificial Sequence: Synthetic peptide
  Seed: VGRMIGGIGR
VARMIGGIGM

SEQ ID NO: 15522 - protein, 10 aa, Artificial Sequence
  Description of Artificial Sequence: Synthetic peptide
  Seed: VGRMIGGIGR
VARMIGGIGF

SEQ ID NO: 15523 - protein, 10 aa, Artificial Sequence
  Description of Artificial Sequence: Synthetic peptide
  Seed: VGRMIGGIGR
VARMIGGIGY

SEQ ID NO: 15524 - protein, 9 aa, Artificial Sequence
  Description of Artificial Sequence: Synthetic peptide
  Seed: VLSAFDERR
VMSAFDERK

SEQ ID NO: 15525 - protein, 9 aa, Artificial Sequence
  Description of Artificial Sequence: Synthetic peptide
  Seed: VLSAFDERR
VFSAFDERK

SEQ ID NO: 15526 - protein, 9 aa, Artificial Sequence
  Description of Artificial Sequence: Synthetic peptide
  Seed: VSFQGRGVF
VHFQGRGVH

SEQ ID NO: 15527 - protein, 9 aa, Artificial Sequence
  Description of Artificial Sequence: Synthetic peptide
  Seed: VSFQGRGVF
VEFQGRGVF

SEQ ID NO: 15528 - protein, 9 aa, Artificial Sequence
  Description of Artificial Sequence: Synthetic peptide
  Seed: VSFQGRGVF
VEFQGRGVW

SEQ ID NO: 15529 - protein, 9 aa, Artificial Sequence
  Description of Artificial Sequence: Synthetic peptide
  Seed: VSFQGRGVF
VEFQGRGVY

SEQ ID NO: 15530 - protein, 9 aa, Artificial Sequence
  Description of Artificial Sequence: Synthetic peptide
  Seed: VSFQGRGVF
VEFQGRGVV

SEQ ID NO: 15531 - protein, 9 aa, Artificial Sequence
  Description of Artificial Sequence: Synthetic peptide
  Seed: VSFQGRGVF
VGFQGRGVL

SEQ ID NO: 15532 - protein, 9 aa, Artificial Sequence
  Description of Artificial Sequence: Synthetic peptide
  Seed: VSFQGRGVF
VGFQGRGVM

SEQ ID NO: 15533 - protein, 9 aa, Artificial Sequence
  Description of Artificial Sequence: Synthetic peptide
  Seed: VSFQGRGVF
VGFQGRGVF

SEQ ID NO: 15534 - protein, 9 aa, Artificial Sequence
  Description of Artificial Sequence: Synthetic peptide
  Seed: VSFQGRGVF
VGFQGRGVW

SEQ ID NO: 15535 - protein, 9 aa, Artificial Sequence
  Description of Artificial Sequence: Synthetic peptide
  Seed: VSFQGRGVF
VGFQGRGVY

SEQ ID NO: 15536 - protein, 9 aa, Artificial Sequence
  Description of Artificial Sequence: Synthetic peptide
  Seed: VSFQGRGVF
VHFQGRGVI

SEQ ID NO: 15537 - protein, 9 aa, Artificial Sequence
  Description of Artificial Sequence: Synthetic peptide
  Seed: VSFQGRGVF
VIFQGRGVW

SEQ ID NO: 15538 - protein, 9 aa, Artificial Sequence
  Description of Artificial Sequence: Synthetic peptide
  Seed: VSFQGRGVF
VHFQGRGVL

SEQ ID NO: 15539 - protein, 9 aa, Artificial Sequence
  Description of Artificial Sequence: Synthetic peptide
  Seed: VSFQGRGVF
VHFQGRGVM

SEQ ID NO: 15540 - protein, 9 aa, Artificial Sequence
  Description of Artificial Sequence: Synthetic peptide
  Seed: VSFQGRGVF
VHFQGRGVF

SEQ ID NO: 15541 - protein, 9 aa, Artificial Sequence
  Description of Artificial Sequence: Synthetic peptide
  Seed: VSFQGRGVF
VHFQGRGVW

SEQ ID NO: 15542 - protein, 9 aa, Artificial Sequence
  Description of Artificial Sequence: Synthetic peptide
  Seed: VSFQGRGVF
VHFQGRGVY

SEQ ID NO: 15543 - protein, 9 aa, Artificial Sequence
  Description of Artificial Sequence: Synthetic peptide
  Seed: VSFQGRGVF
VHFQGRGVV

SEQ ID NO: 15544 - protein, 9 aa, Artificial Sequence
  Description of Artificial Sequence: Synthetic peptide
  Seed: VSFQGRGVF
VIFQGRGVI

SEQ ID NO: 15545 - protein, 9 aa, Artificial Sequence
  Description of Artificial Sequence: Synthetic peptide
  Seed: VSFQGRGVF
VIFQGRGVL

SEQ ID NO: 15546 - protein, 9 aa, Artificial Sequence
  Description of Artificial Sequence: Synthetic peptide
  Seed: VSFQGRGVF
VIFQGRGVM

SEQ ID NO: 15547 - protein, 9 aa, Artificial Sequence
  Description of Artificial Sequence: Synthetic peptide
  Seed: VSFQGRGVF
VEFQGRGVM

SEQ ID NO: 15548 - protein, 9 aa, Artificial Sequence
  Description of Artificial Sequence: Synthetic peptide
  Seed: VSFQGRGVF
VEFQGRGVL

SEQ ID NO: 15549 - protein, 9 aa, Artificial Sequence
  Description of Artificial Sequence: Synthetic peptide
  Seed: VSFQGRGVF
VEFQGRGVI

SEQ ID NO: 15550 - protein, 9 aa, Artificial Sequence
  Description of Artificial Sequence: Synthetic peptide
  Seed: VSFQGRGVF
VEFQGRGVH

SEQ ID NO: 15551 - protein, 9 aa, Artificial Sequence
  Description of Artificial Sequence: Synthetic peptide
  Seed: VSFQGRGVF
VCFQGRGVW

SEQ ID NO: 15552 - protein, 9 aa, Artificial Sequence
  Description of Artificial Sequence: Synthetic peptide
  Seed: VSFQGRGVF
VCFQGRGVY

SEQ ID NO: 15553 - protein, 9 aa, Artificial Sequence
  Description of Artificial Sequence: Synthetic peptide
  Seed: VSFQGRGVF
VQFQGRGVA

SEQ ID NO: 15554 - protein, 9 aa, Artificial Sequence
  Description of Artificial Sequence: Synthetic peptide
  Seed: VSFQGRGVF
VQFQGRGVN

SEQ ID NO: 15555 - protein, 9 aa, Artificial Sequence
  Description of Artificial Sequence: Synthetic peptide
  Seed: VSFQGRGVF
VQFQGRGVC

SEQ ID NO: 15556 - protein, 9 aa, Artificial Sequence
  Description of Artificial Sequence: Synthetic peptide
  Seed: VSFQGRGVF
VQFQGRGVQ

SEQ ID NO: 15557 - protein, 9 aa, Artificial Sequence
  Description of Artificial Sequence: Synthetic peptide
  Seed: VSFQGRGVF
VQFQGRGVE

SEQ ID NO: 15558 - protein, 9 aa, Artificial Sequence
  Description of Artificial Sequence: Synthetic peptide
  Seed: VSFQGRGVF
VQFQGRGVG

SEQ ID NO: 15559 - protein, 9 aa, Artificial Sequence
  Description of Artificial Sequence: Synthetic peptide
  Seed: VSFQGRGVF
VQFQGRGVH

SEQ ID NO: 15560 - protein, 9 aa, Artificial Sequence
  Description of Artificial Sequence: Synthetic peptide
  Seed: VSFQGRGVF
VQFQGRGVI

SEQ ID NO: 15561 - protein, 9 aa, Artificial Sequence
  Description of Artificial Sequence: Synthetic peptide
  Seed: VSFQGRGVF
VQFQGRGVL

SEQ ID NO: 15562 - protein, 9 aa, Artificial Sequence
  Description of Artificial Sequence: Synthetic peptide
  Seed: VSFQGRGVF
VQFQGRGVM

SEQ ID NO: 15563 - protein, 9 aa, Artificial Sequence
  Description of Artificial Sequence: Synthetic peptide
  Seed: VSFQGRGVF
VQFQGRGVF

SEQ ID NO: 15564 - protein, 9 aa, Artificial Sequence
  Description of Artificial Sequence: Synthetic peptide
  Seed: VSFQGRGVF
VQFQGRGVP

SEQ ID NO: 15565 - protein, 9 aa, Artificial Sequence
  Description of Artificial Sequence: Synthetic peptide
  Seed: VSFQGRGVF
VQFQGRGVS

SEQ ID NO: 15566 - protein, 9 aa, Artificial Sequence
  Description of Artificial Sequence: Synthetic peptide
  Seed: VSFQGRGVF
VQFQGRGVT

SEQ ID NO: 15567 - protein, 9 aa, Artificial Sequence
  Description of Artificial Sequence: Synthetic peptide
  Seed: VSFQGRGVF
VQFQGRGVW

SEQ ID NO: 15568 - protein, 9 aa, Artificial Sequence
  Description of Artificial Sequence: Synthetic peptide
  Seed: VSFQGRGVF
VQFQGRGVY

SEQ ID NO: 15569 - protein, 9 aa, Artificial Sequence
  Description of Artificial Sequence: Synthetic peptide
  Seed: VSFQGRGVF
VQFQGRGVV

SEQ ID NO: 15570 - protein, 9 aa, Artificial Sequence
  Description of Artificial Sequence: Synthetic peptide
  Seed: VSFQGRGVF
VIFQGRGVF

SEQ ID NO: 15571 - protein, 9 aa, Artificial Sequence
  Description of Artificial Sequence: Synthetic peptide
  Seed: VSFQGRGVF
VIFQGRGVY

SEQ ID NO: 15572 - protein, 9 aa, Artificial Sequence
  Description of Artificial Sequence: Synthetic peptide
  Seed: VSFQGRGVF
VCFQGRGVM

SEQ ID NO: 15573 - protein, 9 aa, Artificial Sequence
  Description of Artificial Sequence: Synthetic peptide
  Seed: VSFQGRGVF
VFFQGRGVC

SEQ ID NO: 15574 - protein, 9 aa, Artificial Sequence
  Description of Artificial Sequence: Synthetic peptide
  Seed: VSFQGRGVF
VMFQGRGVL

SEQ ID NO: 15575 - protein, 9 aa, Artificial Sequence
  Description of Artificial Sequence: Synthetic peptide
  Seed: VSFQGRGVF
VMFQGRGVM

SEQ ID NO: 15576 - protein, 9 aa, Artificial Sequence
  Description of Artificial Sequence: Synthetic peptide
  Seed: VSFQGRGVF
VMFQGRGVF

SEQ ID NO: 15577 - protein, 9 aa, Artificial Sequence
  Description of Artificial Sequence: Synthetic peptide
  Seed: VSFQGRGVF
VMFQGRGVS

SEQ ID NO: 15578 - protein, 9 aa, Artificial Sequence
  Description of Artificial Sequence: Synthetic peptide
  Seed: VSFQGRGVF
VMFQGRGVT

SEQ ID NO: 15579 - protein, 9 aa, Artificial Sequence
  Description of Artificial Sequence: Synthetic peptide
  Seed: VSFQGRGVF
VMFQGRGVW

SEQ ID NO: 15580 - protein, 9 aa, Artificial Sequence
  Description of Artificial Sequence: Synthetic peptide
  Seed: VSFQGRGVF
VMFQGRGVY

SEQ ID NO: 15581 - protein, 9 aa, Artificial Sequence
  Description of Artificial Sequence: Synthetic peptide
  Seed: VSFQGRGVF
VMFQGRGVV

SEQ ID NO: 15582 - protein, 9 aa, Artificial Sequence
  Description of Artificial Sequence: Synthetic peptide
  Seed: VSFQGRGVF
VFFQGRGVA

SEQ ID NO: 15583 - protein, 9 aa, Artificial Sequence
  Description of Artificial Sequence: Synthetic peptide
  Seed: VSFQGRGVF
VFFQGRGVH

SEQ ID NO: 15584 - protein, 9 aa, Artificial Sequence
  Description of Artificial Sequence: Synthetic peptide
  Seed: VSFQGRGVF
VIFQGRGVV

SEQ ID NO: 15585 - protein, 9 aa, Artificial Sequence
  Description of Artificial Sequence: Synthetic peptide
  Seed: VSFQGRGVF
VFFQGRGVI

SEQ ID NO: 15586 - protein, 9 aa, Artificial Sequence
  Description of Artificial Sequence: Synthetic peptide
  Seed: VSFQGRGVF
VFFQGRGVL

SEQ ID NO: 15587 - protein, 9 aa, Artificial Sequence
  Description of Artificial Sequence: Synthetic peptide
  Seed: VSFQGRGVF
VFFQGRGVM

SEQ ID NO: 15588 - protein, 9 aa, Artificial Sequence
  Description of Artificial Sequence: Synthetic peptide
  Seed: VSFQGRGVF
VFFQGRGVF

SEQ ID NO: 15589 - protein, 9 aa, Artificial Sequence
  Description of Artificial Sequence: Synthetic peptide
  Seed: VSFQGRGVF
VFFQGRGVW

SEQ ID NO: 15590 - protein, 9 aa, Artificial Sequence
  Description of Artificial Sequence: Synthetic peptide
  Seed: VSFQGRGVF
VFFQGRGVY

SEQ ID NO: 15591 - protein, 9 aa, Artificial Sequence
  Description of Artificial Sequence: Synthetic peptide
  Seed: VSFQGRGVF
VFFQGRGVV

SEQ ID NO: 15592 - protein, 9 aa, Artificial Sequence
  Description of Artificial Sequence: Synthetic peptide
  Seed: VSFQGRGVF
VPFQGRGVM

SEQ ID NO: 15593 - protein, 9 aa, Artificial Sequence
  Description of Artificial Sequence: Synthetic peptide
  Seed: VSFQGRGVF
VPFQGRGVF

SEQ ID NO: 15594 - protein, 9 aa, Artificial Sequence
  Description of Artificial Sequence: Synthetic peptide
  Seed: VSFQGRGVF
VMFQGRGVI

SEQ ID NO: 15595 - protein, 9 aa, Artificial Sequence
  Description of Artificial Sequence: Synthetic peptide
  Seed: VSFQGRGVF
VMFQGRGVH

SEQ ID NO: 15596 - protein, 9 aa, Artificial Sequence
  Description of Artificial Sequence: Synthetic peptide
  Seed: VSFQGRGVF
VMFQGRGVG

SEQ ID NO: 15597 - protein, 9 aa, Artificial Sequence
  Description of Artificial Sequence: Synthetic peptide
  Seed: VSFQGRGVF
VMFQGRGVC

SEQ ID NO: 15598 - protein, 9 aa, Artificial Sequence
  Description of Artificial Sequence: Synthetic peptide
  Seed: VSFQGRGVF
VLFQGRGVA

SEQ ID NO: 15599 - protein, 9 aa, Artificial Sequence
  Description of Artificial Sequence: Synthetic peptide
  Seed: VSFQGRGVF
VLFQGRGVH

SEQ ID NO: 15600 - protein, 9 aa, Artificial Sequence
  Description of Artificial Sequence: Synthetic peptide
  Seed: VSFQGRGVF
VLFQGRGVI

SEQ ID NO: 15601 - protein, 9 aa, Artificial Sequence
  Description of Artificial Sequence: Synthetic peptide
  Seed: VSFQGRGVF
VLFQGRGVL

SEQ ID NO: 15602 - protein, 9 aa, Artificial Sequence
  Description of Artificial Sequence: Synthetic peptide
  Seed: VSFQGRGVF
VLFQGRGVM

SEQ ID NO: 15603 - protein, 9 aa, Artificial Sequence
  Description of Artificial Sequence: Synthetic peptide
  Seed: VSFQGRGVF
VLFQGRGVF

SEQ ID NO: 15604 - protein, 9 aa, Artificial Sequence
  Description of Artificial Sequence: Synthetic peptide
  Seed: VSFQGRGVF
VLFQGRGVW

SEQ ID NO: 15605 - protein, 9 aa, Artificial Sequence
  Description of Artificial Sequence: Synthetic peptide
  Seed: VSFQGRGVF
VLFQGRGVY

SEQ ID NO: 15606 - protein, 9 aa, Artificial Sequence
  Description of Artificial Sequence: Synthetic peptide
  Seed: VSFQGRGVF
VLFQGRGVV

SEQ ID NO: 15607 - protein, 9 aa, Artificial Sequence
  Description of Artificial Sequence: Synthetic peptide
  Seed: VSFQGRGVF
VKFQGRGVA

SEQ ID NO: 15608 - protein, 9 aa, Artificial Sequence
  Description of Artificial Sequence: Synthetic peptide
  Seed: VSFQGRGVF
VKFQGRGVH

SEQ ID NO: 15609 - protein, 9 aa, Artificial Sequence
  Description of Artificial Sequence: Synthetic peptide
  Seed: VSFQGRGVF
VKFQGRGVI

SEQ ID NO: 15610 - protein, 9 aa, Artificial Sequence
  Description of Artificial Sequence: Synthetic peptide
  Seed: VSFQGRGVF
VKFQGRGVL

SEQ ID NO: 15611 - protein, 9 aa, Artificial Sequence
  Description of Artificial Sequence: Synthetic peptide
  Seed: VSFQGRGVF
VKFQGRGVM

SEQ ID NO: 15612 - protein, 9 aa, Artificial Sequence
  Description of Artificial Sequence: Synthetic peptide
  Seed: VSFQGRGVF
VKFQGRGVF

SEQ ID NO: 15613 - protein, 9 aa, Artificial Sequence
  Description of Artificial Sequence: Synthetic peptide
  Seed: VSFQGRGVF
VKFQGRGVW

SEQ ID NO: 15614 - protein, 9 aa, Artificial Sequence
  Description of Artificial Sequence: Synthetic peptide
  Seed: VSFQGRGVF
VKFQGRGVY

SEQ ID NO: 15615 - protein, 9 aa, Artificial Sequence
  Description of Artificial Sequence: Synthetic peptide
  Seed: VSFQGRGVF
VKFQGRGVV

SEQ ID NO: 15616 - protein, 9 aa, Artificial Sequence
  Description of Artificial Sequence: Synthetic peptide
  Seed: VSFQGRGVF
VMFQGRGVA

SEQ ID NO: 15617 - protein, 9 aa, Artificial Sequence
  Description of Artificial Sequence: Synthetic peptide
  Seed: VSFQGRGVF
VCFQGRGVF

SEQ ID NO: 15618 - protein, 9 aa, Artificial Sequence
  Description of Artificial Sequence: Synthetic peptide
  Seed: VSFQGRGVF
VDFQGRGVY

SEQ ID NO: 15619 - protein, 9 aa, Artificial Sequence
  Description of Artificial Sequence: Synthetic peptide
  Seed: VLSAFDERR
VSSAFDERR

SEQ ID NO: 15620 - protein, 9 aa, Artificial Sequence
  Description of Artificial Sequence: Synthetic peptide
  Seed: VQRNLPFER
VTRNLPFER

SEQ ID NO: 15621 - protein, 9 aa, Artificial Sequence
  Description of Artificial Sequence: Synthetic peptide
  Seed: VQRNLPFER
VSRNLPFEI

SEQ ID NO: 15622 - protein, 9 aa, Artificial Sequence
  Description of Artificial Sequence: Synthetic peptide
  Seed: VQRNLPFER
VSRNLPFEL

SEQ ID NO: 15623 - protein, 9 aa, Artificial Sequence
  Description of Artificial Sequence: Synthetic peptide
  Seed: VQRNLPFER
VSRNLPFEK

SEQ ID NO: 15624 - protein, 9 aa, Artificial Sequence
  Description of Artificial Sequence: Synthetic peptide
  Seed: VQRNLPFER
VSRNLPFEM

SEQ ID NO: 15625 - protein, 9 aa, Artificial Sequence
  Description of Artificial Sequence: Synthetic peptide
  Seed: VQRNLPFER
VSRNLPFES

SEQ ID NO: 15626 - protein, 9 aa, Artificial Sequence
  Description of Artificial Sequence: Synthetic peptide
  Seed: VQRNLPFER
VSRNLPFET

SEQ ID NO: 15627 - protein, 9 aa, Artificial Sequence
  Description of Artificial Sequence: Synthetic peptide
  Seed: VQRNLPFER
VSRNLPFEY

SEQ ID NO: 15628 - protein, 9 aa, Artificial Sequence
  Description of Artificial Sequence: Synthetic peptide
  Seed: VQRNLPFER
VSRNLPFEV

SEQ ID NO: 15629 - protein, 9 aa, Artificial Sequence
  Description of Artificial Sequence: Synthetic peptide
  Seed: VQRNLPFER
VTRNLPFEA

SEQ ID NO: 15630 - protein, 9 aa, Artificial Sequence
  Description of Artificial Sequence: Synthetic peptide
  Seed: VQRNLPFER
VTRNLPFEC

SEQ ID NO: 15631 - protein, 9 aa, Artificial Sequence
  Description of Artificial Sequence: Synthetic peptide
  Seed: VQRNLPFER
VWRNLPFEA

SEQ ID NO: 15632 - protein, 9 aa, Artificial Sequence
  Description of Artificial Sequence: Synthetic peptide
  Seed: VQRNLPFER
VTRNLPFEG

SEQ ID NO: 15633 - protein, 9 aa, Artificial Sequence
  Description of Artificial Sequence: Synthetic peptide
  Seed: VQRNLPFER
VTRNLPFEI

SEQ ID NO: 15634 - protein, 9 aa, Artificial Sequence
  Description of Artificial Sequence: Synthetic peptide
  Seed: VQRNLPFER
VTRNLPFEL

SEQ ID NO: 15635 - protein, 9 aa, Artificial Sequence
  Description of Artificial Sequence: Synthetic peptide
  Seed: VQRNLPFER
VTRNLPFEK

SEQ ID NO: 15636 - protein, 9 aa, Artificial Sequence
  Description of Artificial Sequence: Synthetic peptide
  Seed: VQRNLPFER
VTRNLPFEM

SEQ ID NO: 15637 - protein, 9 aa, Artificial Sequence
  Description of Artificial Sequence: Synthetic peptide
  Seed: VQRNLPFER
VTRNLPFEF

SEQ ID NO: 15638 - protein, 9 aa, Artificial Sequence
  Description of Artificial Sequence: Synthetic peptide
  Seed: VQRNLPFER
VTRNLPFES

SEQ ID NO: 15639 - protein, 9 aa, Artificial Sequence
  Description of Artificial Sequence: Synthetic peptide
  Seed: VQRNLPFER
VTRNLPFET

SEQ ID NO: 15640 - protein, 9 aa, Artificial Sequence
  Description of Artificial Sequence: Synthetic peptide
  Seed: VQRNLPFER
VTRNLPFEY

SEQ ID NO: 15641 - protein, 9 aa, Artificial Sequence
  Description of Artificial Sequence: Synthetic peptide
  Seed: VQRNLPFER
VSRNLPFEG

SEQ ID NO: 15642 - protein, 9 aa, Artificial Sequence
  Description of Artificial Sequence: Synthetic peptide
  Seed: VQRNLPFER
VSRNLPFER

SEQ ID NO: 15643 - protein, 9 aa, Artificial Sequence
  Description of Artificial Sequence: Synthetic peptide
  Seed: VQRNLPFER
VSRNLPFEA

SEQ ID NO: 15644 - protein, 9 aa, Artificial Sequence
  Description of Artificial Sequence: Synthetic peptide
  Seed: VQRNLPFER
VFRNLPFEV

SEQ ID NO: 15645 - protein, 9 aa, Artificial Sequence
  Description of Artificial Sequence: Synthetic peptide
  Seed: VQRNLPFER
VLRNLPFEY

SEQ ID NO: 15646 - protein, 9 aa, Artificial Sequence
  Description of Artificial Sequence: Synthetic peptide
  Seed: VQRNLPFER
VLRNLPFEV

SEQ ID NO: 15647 - protein, 9 aa, Artificial Sequence
  Description of Artificial Sequence: Synthetic peptide
  Seed: VQRNLPFER
VMRNLPFEA

SEQ ID NO: 15648 - protein, 9 aa, Artificial Sequence
  Description of Artificial Sequence: Synthetic peptide
  Seed: VQRNLPFER
VMRNLPFER

SEQ ID NO: 15649 - protein, 9 aa, Artificial Sequence
  Description of Artificial Sequence: Synthetic peptide
  Seed: VQRNLPFER
VMRNLPFEG

SEQ ID NO: 15650 - protein, 9 aa, Artificial Sequence
  Description of Artificial Sequence: Synthetic peptide
  Seed: VQRNLPFER
VMRNLPFEH

SEQ ID NO: 15651 - protein, 9 aa, Artificial Sequence
  Description of Artificial Sequence: Synthetic peptide
  Seed: VQRNLPFER
VMRNLPFEI

SEQ ID NO: 15652 - protein, 9 aa, Artificial Sequence
  Description of Artificial Sequence: Synthetic peptide
  Seed: VQRNLPFER
VMRNLPFEL

SEQ ID NO: 15653 - protein, 9 aa, Artificial Sequence
  Description of Artificial Sequence: Synthetic peptide
  Seed: VQRNLPFER
VMRNLPFEK

SEQ ID NO: 15654 - protein, 9 aa, Artificial Sequence
  Description of Artificial Sequence: Synthetic peptide
  Seed: VQRNLPFER
VMRNLPFEM

SEQ ID NO: 15655 - protein, 9 aa, Artificial Sequence
  Description of Artificial Sequence: Synthetic peptide
  Seed: VQRNLPFER
VMRNLPFES

SEQ ID NO: 15656 - protein, 9 aa, Artificial Sequence
  Description of Artificial Sequence: Synthetic peptide
  Seed: VQRNLPFER
VMRNLPFEY

SEQ ID NO: 15657 - protein, 9 aa, Artificial Sequence
  Description of Artificial Sequence: Synthetic peptide
  Seed: VQRNLPFER
VMRNLPFEV

SEQ ID NO: 15658 - protein, 9 aa, Artificial Sequence
  Description of Artificial Sequence: Synthetic peptide
  Seed: VQRNLPFER
VFRNLPFEA

SEQ ID NO: 15659 - protein, 9 aa, Artificial Sequence
  Description of Artificial Sequence: Synthetic peptide
  Seed: VQRNLPFER
VFRNLPFER

SEQ ID NO: 15660 - protein, 9 aa, Artificial Sequence
  Description of Artificial Sequence: Synthetic peptide
  Seed: VQRNLPFER
VFRNLPFEI

SEQ ID NO: 15661 - protein, 9 aa, Artificial Sequence
  Description of Artificial Sequence: Synthetic peptide
  Seed: VQRNLPFER
VFRNLPFEK

SEQ ID NO: 15662 - protein, 9 aa, Artificial Sequence
  Description of Artificial Sequence: Synthetic peptide
  Seed: VQRNLPFER
VFRNLPFEM

SEQ ID NO: 15663 - protein, 9 aa, Artificial Sequence
  Description of Artificial Sequence: Synthetic peptide
  Seed: VQRNLPFER
VFRNLPFES

SEQ ID NO: 15664 - protein, 9 aa, Artificial Sequence
  Description of Artificial Sequence: Synthetic peptide
  Seed: VQRNLPFER
VTRNLPFEV

SEQ ID NO: 15665 - protein, 9 aa, Artificial Sequence
  Description of Artificial Sequence: Synthetic peptide
  Seed: VQRNLPFER
VWRNLPFER

SEQ ID NO: 15666 - protein, 9 aa, Artificial Sequence
  Description of Artificial Sequence: Synthetic peptide
  Seed: VSFQGRGVF
VDFQGRGVF

SEQ ID NO: 15667 - protein, 9 aa, Artificial Sequence
  Description of Artificial Sequence: Synthetic peptide
  Seed: VSFQGRGVF
VAFQGRGVV

SEQ ID NO: 15668 - protein, 9 aa, Artificial Sequence
  Description of Artificial Sequence: Synthetic peptide
  Seed: VRTGMDPRM
VRTGMDPRF

SEQ ID NO: 15669 - protein, 9 aa, Artificial Sequence
  Description of Artificial Sequence: Synthetic peptide
  Seed: VSFQGRGVF
VAFQGRGVA

SEQ ID NO: 15670 - protein, 9 aa, Artificial Sequence
  Description of Artificial Sequence: Synthetic peptide
  Seed: VSFQGRGVF
VAFQGRGVH

SEQ ID NO: 15671 - protein, 9 aa, Artificial Sequence
  Description of Artificial Sequence: Synthetic peptide
  Seed: VSFQGRGVF
VAFQGRGVI

SEQ ID NO: 15672 - protein, 9 aa, Artificial Sequence
  Description of Artificial Sequence: Synthetic peptide
  Seed: VSFQGRGVF
VAFQGRGVL

SEQ ID NO: 15673 - protein, 9 aa, Artificial Sequence
  Description of Artificial Sequence: Synthetic peptide
  Seed: VSFQGRGVF
VAFQGRGVM

SEQ ID NO: 15674 - protein, 9 aa, Artificial Sequence
  Description of Artificial Sequence: Synthetic peptide
  Seed: VSFQGRGVF
VAFQGRGVF

SEQ ID NO: 15675 - protein, 9 aa, Artificial Sequence
  Description of Artificial Sequence: Synthetic peptide
  Seed: VSFQGRGVF
VAFQGRGVW

SEQ ID NO: 15676 - protein, 9 aa, Artificial Sequence
  Description of Artificial Sequence: Synthetic peptide
  Seed: VSFQGRGVF
VAFQGRGVY

SEQ ID NO: 15677 - protein, 9 aa, Artificial Sequence
  Description of Artificial Sequence: Synthetic peptide
  Seed: VSFQGRGVF
VRFQGRGVL

SEQ ID NO: 15678 - protein, 9 aa, Artificial Sequence
  Description of Artificial Sequence: Synthetic peptide
  Seed: VQRNLPFER
VWRNLPFEI

SEQ ID NO: 15679 - protein, 9 aa, Artificial Sequence
  Description of Artificial Sequence: Synthetic peptide
  Seed: VSFQGRGVF
VRFQGRGVM

SEQ ID NO: 15680 - protein, 9 aa, Artificial Sequence
  Description of Artificial Sequence: Synthetic peptide
  Seed: VSFQGRGVF
VRFQGRGVF

SEQ ID NO: 15681 - protein, 9 aa, Artificial Sequence
  Description of Artificial Sequence: Synthetic peptide
  Seed: VSFQGRGVF
VRFQGRGVW

SEQ ID NO: 15682 - protein, 9 aa, Artificial Sequence
  Description of Artificial Sequence: Synthetic peptide
  Seed: VSFQGRGVF
VRFQGRGVY

SEQ ID NO: 15683 - protein, 9 aa, Artificial Sequence
  Description of Artificial Sequence: Synthetic peptide
  Seed: VSFQGRGVF
VNFQGRGVL

SEQ ID NO: 15684 - protein, 9 aa, Artificial Sequence
  Description of Artificial Sequence: Synthetic peptide
  Seed: VSFQGRGVF
VNFQGRGVM

SEQ ID NO: 15685 - protein, 9 aa, Artificial Sequence
  Description of Artificial Sequence: Synthetic peptide
  Seed: VSFQGRGVF
VNFQGRGVF

SEQ ID NO: 15686 - protein, 9 aa, Artificial Sequence
  Description of Artificial Sequence: Synthetic peptide
  Seed: VSFQGRGVF
VNFQGRGVW

SEQ ID NO: 15687 - protein, 9 aa, Artificial Sequence
  Description of Artificial Sequence: Synthetic peptide
  Seed: VSFQGRGVF
VNFQGRGVY

SEQ ID NO: 15688 - protein, 9 aa, Artificial Sequence
  Description of Artificial Sequence: Synthetic peptide
  Seed: VRTGMDPRM
VRTGMDPRL

SEQ ID NO: 15689 - protein, 9 aa, Artificial Sequence
  Description of Artificial Sequence: Synthetic peptide
  Seed: VRTGMDPRM
VRTGMDPRI

SEQ ID NO: 15690 - protein, 9 aa, Artificial Sequence
  Description of Artificial Sequence: Synthetic peptide
  Seed: VQRNLPFER
VVRNLPFEV

SEQ ID NO: 15691 - protein, 9 aa, Artificial Sequence
  Description of Artificial Sequence: Synthetic peptide
  Seed: VQRNLPFER
VVRNLPFEY

SEQ ID NO: 15692 - protein, 9 aa, Artificial Sequence
  Description of Artificial Sequence: Synthetic peptide
  Seed: VQRNLPFER
VWRNLPFEK

SEQ ID NO: 15693 - protein, 9 aa, Artificial Sequence
  Description of Artificial Sequence: Synthetic peptide
  Seed: VQRNLPFER
VWRNLPFEV

SEQ ID NO: 15694 - protein, 9 aa, Artificial Sequence
  Description of Artificial Sequence: Synthetic peptide
  Seed: VQRNLPFER
VYRNLPFEA

SEQ ID NO: 15695 - protein, 9 aa, Artificial Sequence
  Description of Artificial Sequence: Synthetic peptide
  Seed: VQRNLPFER
VYRNLPFER

SEQ ID NO: 15696 - protein, 9 aa, Artificial Sequence
  Description of Artificial Sequence: Synthetic peptide
  Seed: VQRNLPFER
VYRNLPFEI

SEQ ID NO: 15697 - protein, 9 aa, Artificial Sequence
  Description of Artificial Sequence: Synthetic peptide
  Seed: VQRNLPFER
VYRNLPFEL

SEQ ID NO: 15698 - protein, 9 aa, Artificial Sequence
  Description of Artificial Sequence: Synthetic peptide
  Seed: VQRNLPFER
VYRNLPFEK

SEQ ID NO: 15699 - protein, 9 aa, Artificial Sequence
  Description of Artificial Sequence: Synthetic peptide
  Seed: VQRNLPFER
VYRNLPFEM

SEQ ID NO: 15700 - protein, 9 aa, Artificial Sequence
  Description of Artificial Sequence: Synthetic peptide
  Seed: VQRNLPFER
VYRNLPFES

SEQ ID NO: 15701 - protein, 9 aa, Artificial Sequence
  Description of Artificial Sequence: Synthetic peptide
  Seed: VQRNLPFER
VYRNLPFEV

SEQ ID NO: 15702 - protein, 9 aa, Artificial Sequence
  Description of Artificial Sequence: Synthetic peptide
  Seed: VQRNLPFER
VVRNLPFEA

SEQ ID NO: 15703 - protein, 9 aa, Artificial Sequence
  Description of Artificial Sequence: Synthetic peptide
  Seed: VQRNLPFER
VVRNLPFER

SEQ ID NO: 15704 - protein, 9 aa, Artificial Sequence
  Description of Artificial Sequence: Synthetic peptide
  Seed: VQRNLPFER
VVRNLPFEG

SEQ ID NO: 15705 - protein, 9 aa, Artificial Sequence
  Description of Artificial Sequence: Synthetic peptide
  Seed: VQRNLPFER
VVRNLPFEI

SEQ ID NO: 15706 - protein, 9 aa, Artificial Sequence
  Description of Artificial Sequence: Synthetic peptide
  Seed: VQRNLPFER
VVRNLPFEL

SEQ ID NO: 15707 - protein, 9 aa, Artificial Sequence
  Description of Artificial Sequence: Synthetic peptide
  Seed: VQRNLPFER
VVRNLPFEK

SEQ ID NO: 15708 - protein, 9 aa, Artificial Sequence
  Description of Artificial Sequence: Synthetic peptide
  Seed: VQRNLPFER
VVRNLPFEM

SEQ ID NO: 15709 - protein, 9 aa, Artificial Sequence
  Description of Artificial Sequence: Synthetic peptide
  Seed: VQRNLPFER
VVRNLPFES

SEQ ID NO: 15710 - protein, 9 aa, Artificial Sequence
  Description of Artificial Sequence: Synthetic peptide
  Seed: VQRNLPFER
VVRNLPFET

SEQ ID NO: 15711 - protein, 9 aa, Artificial Sequence
  Description of Artificial Sequence: Synthetic peptide
  Seed: VSFQGRGVF
VPFQGRGVY

SEQ ID NO: 15712 - protein, 9 aa, Artificial Sequence
  Description of Artificial Sequence: Synthetic peptide
  Seed: VSFQGRGVF
VSFQGRGVA

SEQ ID NO: 15713 - protein, 9 aa, Artificial Sequence
  Description of Artificial Sequence: Synthetic peptide
  Seed: VSFQGRGVF
VSFQGRGVH

SEQ ID NO: 15714 - protein, 9 aa, Artificial Sequence
  Description of Artificial Sequence: Synthetic peptide
  Seed: VSFRGRGVF
VQFRGRGVN

SEQ ID NO: 15715 - protein, 9 aa, Artificial Sequence
  Description of Artificial Sequence: Synthetic peptide
  Seed: VSFRGRGVF
VNFRGRGVF

SEQ ID NO: 15716 - protein, 9 aa, Artificial Sequence
  Description of Artificial Sequence: Synthetic peptide
  Seed: VSFRGRGVF
VNFRGRGVW

SEQ ID NO: 15717 - protein, 9 aa, Artificial Sequence
  Description of Artificial Sequence: Synthetic peptide
  Seed: VSFRGRGVF
VNFRGRGVY

SEQ ID NO: 15718 - protein, 9 aa, Artificial Sequence
  Description of Artificial Sequence: Synthetic peptide
  Seed: VSFRGRGVF
VDFRGRGVF

SEQ ID NO: 15719 - protein, 9 aa, Artificial Sequence
  Description of Artificial Sequence: Synthetic peptide
  Seed: VSFRGRGVF
VDFRGRGVY

SEQ ID NO: 15720 - protein, 9 aa, Artificial Sequence
  Description of Artificial Sequence: Synthetic peptide
  Seed: VSFRGRGVF
VCFRGRGVF

SEQ ID NO: 15721 - protein, 9 aa, Artificial Sequence
  Description of Artificial Sequence: Synthetic peptide
  Seed: VSFRGRGVF
VCFRGRGVW

SEQ ID NO: 15722 - protein, 9 aa, Artificial Sequence
  Description of Artificial Sequence: Synthetic peptide
  Seed: VSFRGRGVF
VCFRGRGVY

SEQ ID NO: 15723 - protein, 9 aa, Artificial Sequence
  Description of Artificial Sequence: Synthetic peptide
  Seed: VSFRGRGVF
VQFRGRGVA

SEQ ID NO: 15724 - protein, 9 aa, Artificial Sequence
  Description of Artificial Sequence: Synthetic peptide
  Seed: VSFRGRGVF
VQFRGRGVC

SEQ ID NO: 15725 - protein, 9 aa, Artificial Sequence
  Description of Artificial Sequence: Synthetic peptide
  Seed: VSFRGRGVF
VQFRGRGVW

SEQ ID NO: 15726 - protein, 9 aa, Artificial Sequence
  Description of Artificial Sequence: Synthetic peptide
  Seed: VSFRGRGVF
VQFRGRGVQ

SEQ ID NO: 15727 - protein, 9 aa, Artificial Sequence
  Description of Artificial Sequence: Synthetic peptide
  Seed: VSFRGRGVF
VQFRGRGVG

SEQ ID NO: 15728 - protein, 9 aa, Artificial Sequence
  Description of Artificial Sequence: Synthetic peptide
  Seed: VSFRGRGVF
VQFRGRGVH

SEQ ID NO: 15729 - protein, 9 aa, Artificial Sequence
  Description of Artificial Sequence: Synthetic peptide
  Seed: VSFRGRGVF
VQFRGRGVI

SEQ ID NO: 15730 - protein, 9 aa, Artificial Sequence
  Description of Artificial Sequence: Synthetic peptide
  Seed: VSFRGRGVF
VQFRGRGVL

SEQ ID NO: 15731 - protein, 9 aa, Artificial Sequence
  Description of Artificial Sequence: Synthetic peptide
  Seed: VSFRGRGVF
VQFRGRGVM

SEQ ID NO: 15732 - protein, 9 aa, Artificial Sequence
  Description of Artificial Sequence: Synthetic peptide
  Seed: VSFRGRGVF
VQFRGRGVF

SEQ ID NO: 15733 - protein, 9 aa, Artificial Sequence
  Description of Artificial Sequence: Synthetic peptide
  Seed: VSFRGRGVF
VQFRGRGVP

SEQ ID NO: 15734 - protein, 9 aa, Artificial Sequence
  Description of Artificial Sequence: Synthetic peptide
  Seed: VSFRGRGVF
VQFRGRGVS

SEQ ID NO: 15735 - protein, 9 aa, Artificial Sequence
  Description of Artificial Sequence: Synthetic peptide
  Seed: VSFRGRGVF
VNFRGRGVM

SEQ ID NO: 15736 - protein, 9 aa, Artificial Sequence
  Description of Artificial Sequence: Synthetic peptide
  Seed: VSFRGRGVF
VNFRGRGVL

SEQ ID NO: 15737 - protein, 9 aa, Artificial Sequence
  Description of Artificial Sequence: Synthetic peptide
  Seed: VSFRGRGVF
VRFRGRGVY

SEQ ID NO: 15738 - protein, 9 aa, Artificial Sequence
  Description of Artificial Sequence: Synthetic peptide
  Seed: VSFRGRGVF
VRFRGRGVF

SEQ ID NO: 15739 - protein, 11 aa, Artificial Sequence
  Description of Artificial Sequence: Synthetic peptide
  Seed: VSFQGRGVFEL
VTFQGRGVFEL

SEQ ID NO: 15740 - protein, 11 aa, Artificial Sequence
  Description of Artificial Sequence: Synthetic peptide
  Seed: VSFQGRGVFEL
VTFQGRGVFEM

SEQ ID NO: 15741 - protein, 11 aa, Artificial Sequence
  Description of Artificial Sequence: Synthetic peptide
  Seed: VSFQGRGVFEL
VTFQGRGVFEF

SEQ ID NO: 15742 - protein, 11 aa, Artificial Sequence
  Description of Artificial Sequence: Synthetic peptide
  Seed: VSFQGRGVFEL
VTFQGRGVFEW

SEQ ID NO: 15743 - protein, 11 aa, Artificial Sequence
  Description of Artificial Sequence: Synthetic peptide
  Seed: VSFQGRGVFEL
VTFQGRGVFEY

SEQ ID NO: 15744 - protein, 11 aa, Artificial Sequence
  Description of Artificial Sequence: Synthetic peptide
  Seed: VSFQGRGVFEL
VVFQGRGVFEF

SEQ ID NO: 15745 - protein, 11 aa, Artificial Sequence
  Description of Artificial Sequence: Synthetic peptide
  Seed: VSFQGRGVFEL
VVFQGRGVFEW

SEQ ID NO: 15746 - protein, 11 aa, Artificial Sequence
  Description of Artificial Sequence: Synthetic peptide
  Seed: VSFQGRGVFEL
VVFQGRGVFEY

SEQ ID NO: 15747 - protein, 9 aa, Artificial Sequence
  Description of Artificial Sequence: Synthetic peptide
  Seed: VSFRGRGVF
VAFRGRGVA

SEQ ID NO: 15748 - protein, 9 aa, Artificial Sequence
  Description of Artificial Sequence: Synthetic peptide
  Seed: VSFRGRGVF
VAFRGRGVH

SEQ ID NO: 15749 - protein, 9 aa, Artificial Sequence
  Description of Artificial Sequence: Synthetic peptide
  Seed: VSFRGRGVF
VAFRGRGVI

SEQ ID NO: 15750 - protein, 9 aa, Artificial Sequence
  Description of Artificial Sequence: Synthetic peptide
  Seed: VSFRGRGVF
VAFRGRGVL

SEQ ID NO: 15751 - protein, 9 aa, Artificial Sequence
  Description of Artificial Sequence: Synthetic peptide
  Seed: VSFRGRGVF
VAFRGRGVM

SEQ ID NO: 15752 - protein, 9 aa, Artificial Sequence
  Description of Artificial Sequence: Synthetic peptide
  Seed: VSFRGRGVF
VAFRGRGVF

SEQ ID NO: 15753 - protein, 9 aa, Artificial Sequence
  Description of Artificial Sequence: Synthetic peptide
  Seed: VSFRGRGVF
VAFRGRGVW

SEQ ID NO: 15754 - protein, 9 aa, Artificial Sequence
  Description of Artificial Sequence: Synthetic peptide
  Seed: VSFRGRGVF
VAFRGRGVY

SEQ ID NO: 15755 - protein, 9 aa, Artificial Sequence
  Description of Artificial Sequence: Synthetic peptide
  Seed: VSFRGRGVF
VAFRGRGVV

SEQ ID NO: 15756 - protein, 9 aa, Artificial Sequence
  Description of Artificial Sequence: Synthetic peptide
  Seed: VSFRGRGVF
VRFRGRGVL

SEQ ID NO: 15757 - protein, 9 aa, Artificial Sequence
  Description of Artificial Sequence: Synthetic peptide
  Seed: VSFRGRGVF
VRFRGRGVM

SEQ ID NO: 15758 - protein, 9 aa, Artificial Sequence
  Description of Artificial Sequence: Synthetic peptide
  Seed: VSFRGRGVF
VQFRGRGVT

SEQ ID NO: 15759 - protein, 9 aa, Artificial Sequence
  Description of Artificial Sequence: Synthetic peptide
  Seed: VSFRGRGVF
VQFRGRGVY

SEQ ID NO: 15760 - protein, 9 aa, Artificial Sequence
  Description of Artificial Sequence: Synthetic peptide
  Seed: VSFQGRGVF
VSFQGRGVI

SEQ ID NO: 15761 - protein, 9 aa, Artificial Sequence
  Description of Artificial Sequence: Synthetic peptide
  Seed: VSFRGRGVF
VKFRGRGVI

SEQ ID NO: 15762 - protein, 9 aa, Artificial Sequence
  Description of Artificial Sequence: Synthetic peptide
  Seed: VSFRGRGVF
VIFRGRGVY

SEQ ID NO: 15763 - protein, 9 aa, Artificial Sequence
  Description of Artificial Sequence: Synthetic peptide
  Seed: VSFRGRGVF
VLFRGRGVH

SEQ ID NO: 15764 - protein, 9 aa, Artificial Sequence
  Description of Artificial Sequence: Synthetic peptide
  Seed: VSFRGRGVF
VLFRGRGVI

SEQ ID NO: 15765 - protein, 9 aa, Artificial Sequence
  Description of Artificial Sequence: Synthetic peptide
  Seed: VSFRGRGVF
VLFRGRGVL

SEQ ID NO: 15766 - protein, 9 aa, Artificial Sequence
  Description of Artificial Sequence: Synthetic peptide
  Seed: VSFRGRGVF
VLFRGRGVM

SEQ ID NO: 15767 - protein, 9 aa, Artificial Sequence
  Description of Artificial Sequence: Synthetic peptide
  Seed: VSFRGRGVF
VLFRGRGVF

SEQ ID NO: 15768 - protein, 9 aa, Artificial Sequence
  Description of Artificial Sequence: Synthetic peptide
  Seed: VSFRGRGVF
VLFRGRGVW

SEQ ID NO: 15769 - protein, 9 aa, Artificial Sequence
  Description of Artificial Sequence: Synthetic peptide
  Seed: VSFRGRGVF
VLFRGRGVY

SEQ ID NO: 15770 - protein, 9 aa, Artificial Sequence
  Description of Artificial Sequence: Synthetic peptide
  Seed: VSFRGRGVF
VKFRGRGVH

SEQ ID NO: 15771 - protein, 9 aa, Artificial Sequence
  Description of Artificial Sequence: Synthetic peptide
  Seed: VSFRGRGVF
VKFRGRGVL

SEQ ID NO: 15772 - protein, 9 aa, Artificial Sequence
  Description of Artificial Sequence: Synthetic peptide
  Seed: VSFRGRGVF
VQFRGRGVV

SEQ ID NO: 15773 - protein, 9 aa, Artificial Sequence
  Description of Artificial Sequence: Synthetic peptide
  Seed: VSFRGRGVF
VKFRGRGVM

SEQ ID NO: 15774 - protein, 9 aa, Artificial Sequence
  Description of Artificial Sequence: Synthetic peptide
  Seed: VSFRGRGVF
VKFRGRGVF

SEQ ID NO: 15775 - protein, 9 aa, Artificial Sequence
  Description of Artificial Sequence: Synthetic peptide
  Seed: VSFRGRGVF
VKFRGRGVW

SEQ ID NO: 15776 - protein, 9 aa, Artificial Sequence
  Description of Artificial Sequence: Synthetic peptide
  Seed: VSFRGRGVF
VKFRGRGVY

SEQ ID NO: 15777 - protein, 9 aa, Artificial Sequence
  Description of Artificial Sequence: Synthetic peptide
  Seed: VSFRGRGVF
VKFRGRGVV

SEQ ID NO: 15778 - protein, 9 aa, Artificial Sequence
  Description of Artificial Sequence: Synthetic peptide
  Seed: VSFRGRGVF
VMFRGRGVA

SEQ ID NO: 15779 - protein, 9 aa, Artificial Sequence
  Description of Artificial Sequence: Synthetic peptide
  Seed: VSFRGRGVF
VMFRGRGVG

SEQ ID NO: 15780 - protein, 9 aa, Artificial Sequence
  Description of Artificial Sequence: Synthetic peptide
  Seed: VSFRGRGVF
VMFRGRGVH

SEQ ID NO: 15781 - protein, 9 aa, Artificial Sequence
  Description of Artificial Sequence: Synthetic peptide
  Seed: VSFRGRGVF
VMFRGRGVI

SEQ ID NO: 15782 - protein, 9 aa, Artificial Sequence
  Description of Artificial Sequence: Synthetic peptide
  Seed: VSFRGRGVF
VIFRGRGVW

SEQ ID NO: 15783 - protein, 9 aa, Artificial Sequence
  Description of Artificial Sequence: Synthetic peptide
  Seed: VSFRGRGVF
VIFRGRGVF

SEQ ID NO: 15784 - protein, 9 aa, Artificial Sequence
  Description of Artificial Sequence: Synthetic peptide
  Seed: VSFRGRGVF
VIFRGRGVM

SEQ ID NO: 15785 - protein, 9 aa, Artificial Sequence
  Description of Artificial Sequence: Synthetic peptide
  Seed: VSFRGRGVF
VIFRGRGVL

SEQ ID NO: 15786 - protein, 9 aa, Artificial Sequence
  Description of Artificial Sequence: Synthetic peptide
  Seed: VSFRGRGVF
VEFRGRGVH

SEQ ID NO: 15787 - protein, 9 aa, Artificial Sequence
  Description of Artificial Sequence: Synthetic peptide
  Seed: VSFRGRGVF
VEFRGRGVI

SEQ ID NO: 15788 - protein, 9 aa, Artificial Sequence
  Description of Artificial Sequence: Synthetic peptide
  Seed: VSFRGRGVF
VEFRGRGVL

SEQ ID NO: 15789 - protein, 9 aa, Artificial Sequence
  Description of Artificial Sequence: Synthetic peptide
  Seed: VSFRGRGVF
VEFRGRGVM

SEQ ID NO: 15790 - protein, 9 aa, Artificial Sequence
  Description of Artificial Sequence: Synthetic peptide
  Seed: VSFRGRGVF
VEFRGRGVF

SEQ ID NO: 15791 - protein, 9 aa, Artificial Sequence
  Description of Artificial Sequence: Synthetic peptide
  Seed: VSFRGRGVF
VEFRGRGVW

SEQ ID NO: 15792 - protein, 9 aa, Artificial Sequence
  Description of Artificial Sequence: Synthetic peptide
  Seed: VSFRGRGVF
VEFRGRGVY

SEQ ID NO: 15793 - protein, 9 aa, Artificial Sequence
  Description of Artificial Sequence: Synthetic peptide
  Seed: VSFRGRGVF
VGFRGRGVL

SEQ ID NO: 15794 - protein, 9 aa, Artificial Sequence
  Description of Artificial Sequence: Synthetic peptide
  Seed: VSFRGRGVF
VGFRGRGVM

SEQ ID NO: 15795 - protein, 9 aa, Artificial Sequence
  Description of Artificial Sequence: Synthetic peptide
  Seed: VSFRGRGVF
VGFRGRGVF

SEQ ID NO: 15796 - protein, 9 aa, Artificial Sequence
  Description of Artificial Sequence: Synthetic peptide
  Seed: VSFRGRGVF
VGFRGRGVW

SEQ ID NO: 15797 - protein, 9 aa, Artificial Sequence
  Description of Artificial Sequence: Synthetic peptide
  Seed: VSFRGRGVF
VGFRGRGVY

SEQ ID NO: 15798 - protein, 9 aa, Artificial Sequence
  Description of Artificial Sequence: Synthetic peptide
  Seed: VSFRGRGVF
VHFRGRGVH

SEQ ID NO: 15799 - protein, 9 aa, Artificial Sequence
  Description of Artificial Sequence: Synthetic peptide
  Seed: VSFRGRGVF
VHFRGRGVI

SEQ ID NO: 15800 - protein, 9 aa, Artificial Sequence
  Description of Artificial Sequence: Synthetic peptide
  Seed: VSFRGRGVF
VHFRGRGVL

SEQ ID NO: 15801 - protein, 9 aa, Artificial Sequence
  Description of Artificial Sequence: Synthetic peptide
  Seed: VSFRGRGVF
VHFRGRGVM

SEQ ID NO: 15802 - protein, 9 aa, Artificial Sequence
  Description of Artificial Sequence: Synthetic peptide
  Seed: VSFRGRGVF
VHFRGRGVF

SEQ ID NO: 15803 - protein, 9 aa, Artificial Sequence
  Description of Artificial Sequence: Synthetic peptide
  Seed: VSFRGRGVF
VHFRGRGVW

SEQ ID NO: 15804 - protein, 9 aa, Artificial Sequence
  Description of Artificial Sequence: Synthetic peptide
  Seed: VSFRGRGVF
VHFRGRGVY

SEQ ID NO: 15805 - protein, 11 aa, Artificial Sequence
  Description of Artificial Sequence: Synthetic peptide
  Seed: VSFQGRGVFEL
VTFQGRGVFEI

SEQ ID NO: 15806 - protein, 11 aa, Artificial Sequence
  Description of Artificial Sequence: Synthetic peptide
  Seed: VSFQGRGVFEL
VSFQGRGVFEY

SEQ ID NO: 15807 - protein, 11 aa, Artificial Sequence
  Description of Artificial Sequence: Synthetic peptide
  Seed: VSFQGRGVFEL
VSFQGRGVFEW

SEQ ID NO: 15808 - protein, 9 aa, Artificial Sequence
  Description of Artificial Sequence: Synthetic peptide
  Seed: VSFQGRGVF
VVFQGRGVL

SEQ ID NO: 15809 - protein, 9 aa, Artificial Sequence
  Description of Artificial Sequence: Synthetic peptide
  Seed: VSFQGRGVF
VYFQGRGVI

SEQ ID NO: 15810 - protein, 9 aa, Artificial Sequence
  Description of Artificial Sequence: Synthetic peptide
  Seed: VSFQGRGVF
VYFQGRGVL

SEQ ID NO: 15811 - protein, 9 aa, Artificial Sequence
  Description of Artificial Sequence: Synthetic peptide
  Seed: VSFQGRGVF
VYFQGRGVM

SEQ ID NO: 15812 - protein, 9 aa, Artificial Sequence
  Description of Artificial Sequence: Synthetic peptide
  Seed: VSFQGRGVF
VYFQGRGVF

SEQ ID NO: 15813 - protein, 9 aa, Artificial Sequence
  Description of Artificial Sequence: Synthetic peptide
  Seed: VSFQGRGVF
VYFQGRGVT

SEQ ID NO: 15814 - protein, 9 aa, Artificial Sequence
  Description of Artificial Sequence: Synthetic peptide
  Seed: VSFQGRGVF
VYFQGRGVW

SEQ ID NO: 15815 - protein, 9 aa, Artificial Sequence
  Description of Artificial Sequence: Synthetic peptide
  Seed: VSFQGRGVF
VYFQGRGVY

SEQ ID NO: 15816 - protein, 9 aa, Artificial Sequence
  Description of Artificial Sequence: Synthetic peptide
  Seed: VSFQGRGVF
VYFQGRGVV

SEQ ID NO: 15817 - protein, 9 aa, Artificial Sequence
  Description of Artificial Sequence: Synthetic peptide
  Seed: VSFQGRGVF
VVFQGRGVI

SEQ ID NO: 15818 - protein, 9 aa, Artificial Sequence
  Description of Artificial Sequence: Synthetic peptide
  Seed: VSFQGRGVF
VVFQGRGVM

SEQ ID NO: 15819 - protein, 9 aa, Artificial Sequence
  Description of Artificial Sequence: Synthetic peptide
  Seed: VSFQGRGVF
VVFQGRGVF

SEQ ID NO: 15820 - protein, 9 aa, Artificial Sequence
  Description of Artificial Sequence: Synthetic peptide
  Seed: VSFQGRGVF
VVFQGRGVW

SEQ ID NO: 15821 - protein, 9 aa, Artificial Sequence
  Description of Artificial Sequence: Synthetic peptide
  Seed: VSFQGRGVF
VVFQGRGVY

SEQ ID NO: 15822 - protein, 9 aa, Artificial Sequence
  Description of Artificial Sequence: Synthetic peptide
  Seed: VSFQGRGVF
VVFQGRGVV

SEQ ID NO: 15823 - protein, 11 aa, Artificial Sequence
  Description of Artificial Sequence: Synthetic peptide
  Seed: VSFQGRGVFEL
VAFQGRGVFEM

SEQ ID NO: 15824 - protein, 11 aa, Artificial Sequence
  Description of Artificial Sequence: Synthetic peptide
  Seed: VSFQGRGVFEL
VAFQGRGVFEF

SEQ ID NO: 15825 - protein, 11 aa, Artificial Sequence
  Description of Artificial Sequence: Synthetic peptide
  Seed: VSFQGRGVFEL
VAFQGRGVFEW

SEQ ID NO: 15826 - protein, 11 aa, Artificial Sequence
  Description of Artificial Sequence: Synthetic peptide
  Seed: VSFQGRGVFEL
VAFQGRGVFEY

SEQ ID NO: 15827 - protein, 11 aa, Artificial Sequence
  Description of Artificial Sequence: Synthetic peptide
  Seed: VSFQGRGVFEL
VRFQGRGVFEF

SEQ ID NO: 15828 - protein, 9 aa, Artificial Sequence
  Description of Artificial Sequence: Synthetic peptide
  Seed: VSFQGRGVF
VYFQGRGVH

SEQ ID NO: 15829 - protein, 9 aa, Artificial Sequence
  Description of Artificial Sequence: Synthetic peptide
  Seed: VSFQGRGVF
VYFQGRGVQ

SEQ ID NO: 15830 - protein, 9 aa, Artificial Sequence
  Description of Artificial Sequence: Synthetic peptide
  Seed: VSFQGRGVF
VYFQGRGVC

SEQ ID NO: 15831 - protein, 9 aa, Artificial Sequence
  Description of Artificial Sequence: Synthetic peptide
  Seed: VSFQGRGVF
VYFQGRGVA

SEQ ID NO: 15832 - protein, 9 aa, Artificial Sequence
  Description of Artificial Sequence: Synthetic peptide
  Seed: VSFQGRGVF
VSFQGRGVL

SEQ ID NO: 15833 - protein, 9 aa, Artificial Sequence
  Description of Artificial Sequence: Synthetic peptide
  Seed: VSFQGRGVF
VSFQGRGVM

SEQ ID NO: 15834 - protein, 9 aa, Artificial Sequence
  Description of Artificial Sequence: Synthetic peptide
  Seed: VSFQGRGVF
VSFQGRGVW

SEQ ID NO: 15835 - protein, 9 aa, Artificial Sequence
  Description of Artificial Sequence: Synthetic peptide
  Seed: VSFQGRGVF
VSFQGRGVY

SEQ ID NO: 15836 - protein, 9 aa, Artificial Sequence
  Description of Artificial Sequence: Synthetic peptide
  Seed: VSFQGRGVF
VSFQGRGVV

SEQ ID NO: 15837 - protein, 9 aa, Artificial Sequence
  Description of Artificial Sequence: Synthetic peptide
  Seed: VSFQGRGVF
VTFQGRGVI

SEQ ID NO: 15838 - protein, 9 aa, Artificial Sequence
  Description of Artificial Sequence: Synthetic peptide
  Seed: VSFQGRGVF
VTFQGRGVL

SEQ ID NO: 15839 - protein, 9 aa, Artificial Sequence
  Description of Artificial Sequence: Synthetic peptide
  Seed: VSFQGRGVF
VTFQGRGVM

SEQ ID NO: 15840 - protein, 9 aa, Artificial Sequence
  Description of Artificial Sequence: Synthetic peptide
  Seed: VSFQGRGVF
VTFQGRGVF

SEQ ID NO: 15841 - protein, 9 aa, Artificial Sequence
  Description of Artificial Sequence: Synthetic peptide
  Seed: VSFQGRGVF
VTFQGRGVW

SEQ ID NO: 15842 - protein, 9 aa, Artificial Sequence
  Description of Artificial Sequence: Synthetic peptide
  Seed: VSFQGRGVF
VTFQGRGVY

SEQ ID NO: 15843 - protein, 9 aa, Artificial Sequence
  Description of Artificial Sequence: Synthetic peptide
  Seed: VSFQGRGVF
VTFQGRGVV

SEQ ID NO: 15844 - protein, 9 aa, Artificial Sequence
  Description of Artificial Sequence: Synthetic peptide
  Seed: VSFQGRGVF
VWFQGRGVI

SEQ ID NO: 15845 - protein, 9 aa, Artificial Sequence
  Description of Artificial Sequence: Synthetic peptide
  Seed: VSFQGRGVF
VWFQGRGVL

SEQ ID NO: 15846 - protein, 9 aa, Artificial Sequence
  Description of Artificial Sequence: Synthetic peptide
  Seed: VSFQGRGVF
VWFQGRGVM

SEQ ID NO: 15847 - protein, 9 aa, Artificial Sequence
  Description of Artificial Sequence: Synthetic peptide
  Seed: VSFQGRGVF
VWFQGRGVF

SEQ ID NO: 15848 - protein, 9 aa, Artificial Sequence
  Description of Artificial Sequence: Synthetic peptide
  Seed: VSFQGRGVF
VWFQGRGVW

SEQ ID NO: 15849 - protein, 9 aa, Artificial Sequence
  Description of Artificial Sequence: Synthetic peptide
  Seed: VSFQGRGVF
VWFQGRGVY

SEQ ID NO: 15850 - protein, 9 aa, Artificial Sequence
  Description of Artificial Sequence: Synthetic peptide
  Seed: VSFQGRGVF
VWFQGRGVV

SEQ ID NO: 15851 - protein, 11 aa, Artificial Sequence
  Description of Artificial Sequence: Synthetic peptide
  Seed: VSFQGRGVFEL
VRFQGRGVFEY

SEQ ID NO: 15852 - protein, 11 aa, Artificial Sequence
  Description of Artificial Sequence: Synthetic peptide
  Seed: VSFQGRGVFEL
VNFQGRGVFEY

SEQ ID NO: 15853 - protein, 11 aa, Artificial Sequence
  Description of Artificial Sequence: Synthetic peptide
  Seed: VSFQGRGVFEL
VCFQGRGVFEW

SEQ ID NO: 15854 - protein, 11 aa, Artificial Sequence
  Description of Artificial Sequence: Synthetic peptide
  Seed: VSFQGRGVFEL
VGFQGRGVFEW

SEQ ID NO: 15855 - protein, 11 aa, Artificial Sequence
  Description of Artificial Sequence: Synthetic peptide
  Seed: VSFQGRGVFEL
VHFQGRGVFEF

SEQ ID NO: 15856 - protein, 11 aa, Artificial Sequence
  Description of Artificial Sequence: Synthetic peptide
  Seed: VSFQGRGVFEL
VHFQGRGVFEY

SEQ ID NO: 15857 - protein, 11 aa, Artificial Sequence
  Description of Artificial Sequence: Synthetic peptide
  Seed: VSFQGRGVFEL
VIFQGRGVFEF

SEQ ID NO: 15858 - protein, 11 aa, Artificial Sequence
  Description of Artificial Sequence: Synthetic peptide
  Seed: VSFQGRGVFEL
VIFQGRGVFEW

SEQ ID NO: 15859 - protein, 11 aa, Artificial Sequence
  Description of Artificial Sequence: Synthetic peptide
  Seed: VSFQGRGVFEL
VIFQGRGVFEY

SEQ ID NO: 15860 - protein, 11 aa, Artificial Sequence
  Description of Artificial Sequence: Synthetic peptide
  Seed: VSFQGRGVFEL
VLFQGRGVFEM

SEQ ID NO: 15861 - protein, 11 aa, Artificial Sequence
  Description of Artificial Sequence: Synthetic peptide
  Seed: VSFQGRGVFEL
VLFQGRGVFEF

SEQ ID NO: 15862 - protein, 11 aa, Artificial Sequence
  Description of Artificial Sequence: Synthetic peptide
  Seed: VSFQGRGVFEL
VLFQGRGVFEW

SEQ ID NO: 15863 - protein, 11 aa, Artificial Sequence
  Description of Artificial Sequence: Synthetic peptide
  Seed: VSFQGRGVFEL
VLFQGRGVFEY

SEQ ID NO: 15864 - protein, 11 aa, Artificial Sequence
  Description of Artificial Sequence: Synthetic peptide
  Seed: VSFQGRGVFEL
VKFQGRGVFEM

SEQ ID NO: 15865 - protein, 11 aa, Artificial Sequence
  Description of Artificial Sequence: Synthetic peptide
  Seed: VSFQGRGVFEL
VKFQGRGVFEF

SEQ ID NO: 15866 - protein, 11 aa, Artificial Sequence
  Description of Artificial Sequence: Synthetic peptide
  Seed: VSFQGRGVFEL
VKFQGRGVFEY

SEQ ID NO: 15867 - protein, 11 aa, Artificial Sequence
  Description of Artificial Sequence: Synthetic peptide
  Seed: VSFQGRGVFEL
VMFQGRGVFEL

SEQ ID NO: 15868 - protein, 11 aa, Artificial Sequence
  Description of Artificial Sequence: Synthetic peptide
  Seed: VSFQGRGVFEL
VMFQGRGVFEM

SEQ ID NO: 15869 - protein, 11 aa, Artificial Sequence
  Description of Artificial Sequence: Synthetic peptide
  Seed: VSFQGRGVFEL
VMFQGRGVFEF

SEQ ID NO: 15870 - protein, 11 aa, Artificial Sequence
  Description of Artificial Sequence: Synthetic peptide
  Seed: VSFQGRGVFEL
VMFQGRGVFEW

SEQ ID NO: 15871 - protein, 11 aa, Artificial Sequence
  Description of Artificial Sequence: Synthetic peptide
  Seed: VSFQGRGVFEL
VMFQGRGVFEY

SEQ ID NO: 15872 - protein, 11 aa, Artificial Sequence
  Description of Artificial Sequence: Synthetic peptide
  Seed: VSFQGRGVFEL
VSFQGRGVFEI

SEQ ID NO: 15873 - protein, 11 aa, Artificial Sequence
  Description of Artificial Sequence: Synthetic peptide
  Seed: VSFQGRGVFEL
VSFQGRGVFEM

SEQ ID NO: 15874 - protein, 11 aa, Artificial Sequence
  Description of Artificial Sequence: Synthetic peptide
  Seed: VSFQGRGVFEL
VGFQGRGVFEY

SEQ ID NO: 15875 - protein, 11 aa, Artificial Sequence
  Description of Artificial Sequence: Synthetic peptide
  Seed: VSFQGRGVFEL
VEFQGRGVFEY

SEQ ID NO: 15876 - protein, 11 aa, Artificial Sequence
  Description of Artificial Sequence: Synthetic peptide
  Seed: VSFQGRGVFEL
VQFQGRGVFEA

SEQ ID NO: 15877 - protein, 11 aa, Artificial Sequence
  Description of Artificial Sequence: Synthetic peptide
  Seed: VSFQGRGVFEL
VEFQGRGVFEF

SEQ ID NO: 15878 - protein, 11 aa, Artificial Sequence
  Description of Artificial Sequence: Synthetic peptide
  Seed: VSFQGRGVFEL
VQFQGRGVFER

SEQ ID NO: 15879 - protein, 11 aa, Artificial Sequence
  Description of Artificial Sequence: Synthetic peptide
  Seed: VSFQGRGVFEL
VQFQGRGVFEN

SEQ ID NO: 15880 - protein, 11 aa, Artificial Sequence
  Description of Artificial Sequence: Synthetic peptide
  Seed: VSFQGRGVFEL
VQFQGRGVFED

SEQ ID NO: 15881 - protein, 11 aa, Artificial Sequence
  Description of Artificial Sequence: Synthetic peptide
  Seed: VSFQGRGVFEL
VQFQGRGVFEC

SEQ ID NO: 15882 - protein, 11 aa, Artificial Sequence
  Description of Artificial Sequence: Synthetic peptide
  Seed: VSFQGRGVFEL
VQFQGRGVFEQ

SEQ ID NO: 15883 - protein, 11 aa, Artificial Sequence
  Description of Artificial Sequence: Synthetic peptide
  Seed: VSFQGRGVFEL
VQFQGRGVFEE

SEQ ID NO: 15884 - protein, 11 aa, Artificial Sequence
  Description of Artificial Sequence: Synthetic peptide
  Seed: VSFQGRGVFEL
VQFQGRGVFEG

SEQ ID NO: 15885 - protein, 11 aa, Artificial Sequence
  Description of Artificial Sequence: Synthetic peptide
  Seed: VSFQGRGVFEL
VQFQGRGVFEH

SEQ ID NO: 15886 - protein, 11 aa, Artificial Sequence
  Description of Artificial Sequence: Synthetic peptide
  Seed: VSFQGRGVFEL
VQFQGRGVFEI

SEQ ID NO: 15887 - protein, 11 aa, Artificial Sequence
  Description of Artificial Sequence: Synthetic peptide
  Seed: VSFQGRGVFEL
VQFQGRGVFEL

SEQ ID NO: 15888 - protein, 11 aa, Artificial Sequence
  Description of Artificial Sequence: Synthetic peptide
  Seed: VSFQGRGVFEL
VQFQGRGVFEK

SEQ ID NO: 15889 - protein, 11 aa, Artificial Sequence
  Description of Artificial Sequence: Synthetic peptide
  Seed: VSFQGRGVFEL
VQFQGRGVFEM

SEQ ID NO: 15890 - protein, 11 aa, Artificial Sequence
  Description of Artificial Sequence: Synthetic peptide
  Seed: VSFQGRGVFEL
VQFQGRGVFEF

SEQ ID NO: 15891 - protein, 11 aa, Artificial Sequence
  Description of Artificial Sequence: Synthetic peptide
  Seed: VSFQGRGVFEL
VQFQGRGVFEP

SEQ ID NO: 15892 - protein, 11 aa, Artificial Sequence
  Description of Artificial Sequence: Synthetic peptide
  Seed: VSFQGRGVFEL
VQFQGRGVFES

SEQ ID NO: 15893 - protein, 11 aa, Artificial Sequence
  Description of Artificial Sequence: Synthetic peptide
  Seed: VSFQGRGVFEL
VQFQGRGVFET

SEQ ID NO: 15894 - protein, 11 aa, Artificial Sequence
  Description of Artificial Sequence: Synthetic peptide
  Seed: VSFQGRGVFEL
VQFQGRGVFEW

SEQ ID NO: 15895 - protein, 11 aa, Artificial Sequence
  Description of Artificial Sequence: Synthetic peptide
  Seed: VSFQGRGVFEL
VQFQGRGVFEY

SEQ ID NO: 15896 - protein, 11 aa, Artificial Sequence
  Description of Artificial Sequence: Synthetic peptide
  Seed: VSFQGRGVFEL
VQFQGRGVFEV

SEQ ID NO: 15897 - protein, 9 aa, Artificial Sequence
  Description of Artificial Sequence: Synthetic peptide
  Seed: VQRNLPFER
VLRNLPFEK

SEQ ID NO: 15898 - protein, 9 aa, Artificial Sequence
  Description of Artificial Sequence: Synthetic peptide
  Seed: VQRNLPFER
VLRNLPFEI

SEQ ID NO: 15899 - protein, 9 aa, Artificial Sequence
  Description of Artificial Sequence: Synthetic peptide
  Seed: VQRNLPFER
VLRNLPFER

SEQ ID NO: 15900 - protein, 10 aa, Artificial Sequence
  Description of Artificial Sequence: Synthetic peptide
  Seed: VMELIRMIKR
VTELIRMIKR

SEQ ID NO: 15901 - protein, 9 aa, Artificial Sequence
  Description of Artificial Sequence: Synthetic peptide
  Seed: VMELIRMIK
VVELIRMIK

SEQ ID NO: 15902 - protein, 10 aa, Artificial Sequence
  Description of Artificial Sequence: Synthetic peptide
  Seed: VMELIRMIKR
VAELIRMIKR

SEQ ID NO: 15903 - protein, 10 aa, Artificial Sequence
  Description of Artificial Sequence: Synthetic peptide
  Seed: VMELIRMIKR
VQELIRMIKR

SEQ ID NO: 15904 - protein, 10 aa, Artificial Sequence
  Description of Artificial Sequence: Synthetic peptide
  Seed: VMELIRMIKR
VIELIRMIKR

SEQ ID NO: 15905 - protein, 10 aa, Artificial Sequence
  Description of Artificial Sequence: Synthetic peptide
  Seed: VMELIRMIKR
VMELIRMIKK

SEQ ID NO: 15906 - protein, 10 aa, Artificial Sequence
  Description of Artificial Sequence: Synthetic peptide
  Seed: VMELIRMIKR
VFELIRMIKR

SEQ ID NO: 15907 - protein, 10 aa, Artificial Sequence
  Description of Artificial Sequence: Synthetic peptide
  Seed: VMELIRMIKR
VFELIRMIKK

SEQ ID NO: 15908 - protein, 10 aa, Artificial Sequence
  Description of Artificial Sequence: Synthetic peptide
  Seed: VMELIRMIKR
VSELIRMIKR

SEQ ID NO: 15909 - protein, 10 aa, Artificial Sequence
  Description of Artificial Sequence: Synthetic peptide
  Seed: VMELIRMIKR
VWELIRMIKR

SEQ ID NO: 15910 - protein, 11 aa, Artificial Sequence
  Description of Artificial Sequence: Synthetic peptide
  Seed: VPRGQLSTRGV
VPRGQLSTRGI

SEQ ID NO: 15911 - protein, 10 aa, Artificial Sequence
  Description of Artificial Sequence: Synthetic peptide
  Seed: VMELIRMIKR
VWELIRMIKK

SEQ ID NO: 15912 - protein, 10 aa, Artificial Sequence
  Description of Artificial Sequence: Synthetic peptide
  Seed: VMELIRMIKR
VYELIRMIKR

SEQ ID NO: 15913 - protein, 10 aa, Artificial Sequence
  Description of Artificial Sequence: Synthetic peptide
  Seed: VMELIRMIKR
VYELIRMIKK

SEQ ID NO: 15914 - protein, 10 aa, Artificial Sequence
  Description of Artificial Sequence: Synthetic peptide
  Seed: VMELIRMIKR
VVELIRMIKR

SEQ ID NO: 15915 - protein, 11 aa, Artificial Sequence
  Description of Artificial Sequence: Synthetic peptide
  Seed: VPRGKLSTRGV
VPRGKLSTRGA

SEQ ID NO: 15916 - protein, 11 aa, Artificial Sequence
  Description of Artificial Sequence: Synthetic peptide
  Seed: VPRGKLSTRGV
VPRGKLSTRGI

SEQ ID NO: 15917 - protein, 11 aa, Artificial Sequence
  Description of Artificial Sequence: Synthetic peptide
  Seed: VPRGKLSTRGV
VPRGKLSTRGL

SEQ ID NO: 15918 - protein, 11 aa, Artificial Sequence
  Description of Artificial Sequence: Synthetic peptide
  Seed: VPRGKLSTRGV
VPRGKLSTRGM

SEQ ID NO: 15919 - protein, 11 aa, Artificial Sequence
  Description of Artificial Sequence: Synthetic peptide
  Seed: VPRGKLSTRGV
VPRGKLSTRGF

SEQ ID NO: 15920 - protein, 9 aa, Artificial Sequence
  Description of Artificial Sequence: Synthetic peptide
  Seed: VMELIRMIK
VVELIRMIR

SEQ ID NO: 15921 - protein, 9 aa, Artificial Sequence
  Description of Artificial Sequence: Synthetic peptide
  Seed: VMELIRMIK
VYELIRMIK

SEQ ID NO: 15922 - protein, 9 aa, Artificial Sequence
  Description of Artificial Sequence: Synthetic peptide
  Seed: VMELIRMIK
VYELIRMIR

SEQ ID NO: 15923 - protein, 9 aa, Artificial Sequence
  Description of Artificial Sequence: Synthetic peptide
  Seed: VMELIRMIK
VWELIRMIK

SEQ ID NO: 15924 - protein, 9 aa, Artificial Sequence
  Description of Artificial Sequence: Synthetic peptide
  Seed: VMAAFTGNT
VVAAFTGNL

SEQ ID NO: 15925 - protein, 9 aa, Artificial Sequence
  Description of Artificial Sequence: Synthetic peptide
  Seed: VMAAFTGNT
VVAAFTGNV

SEQ ID NO: 15926 - protein, 9 aa, Artificial Sequence
  Description of Artificial Sequence: Synthetic peptide
  Seed: VMELIRMIK
VAELIRMIR

SEQ ID NO: 15927 - protein, 9 aa, Artificial Sequence
  Description of Artificial Sequence: Synthetic peptide
  Seed: VMELIRMIK
VAELIRMIK

SEQ ID NO: 15928 - protein, 9 aa, Artificial Sequence
  Description of Artificial Sequence: Synthetic peptide
  Seed: VMELIRMIK
VQELIRMIR

SEQ ID NO: 15929 - protein, 9 aa, Artificial Sequence
  Description of Artificial Sequence: Synthetic peptide
  Seed: VMELIRMIK
VQELIRMIK

SEQ ID NO: 15930 - protein, 9 aa, Artificial Sequence
  Description of Artificial Sequence: Synthetic peptide
  Seed: VMELIRMIK
VGELIRMIR

SEQ ID NO: 15931 - protein, 9 aa, Artificial Sequence
  Description of Artificial Sequence: Synthetic peptide
  Seed: VMELIRMIK
VIELIRMIR

SEQ ID NO: 15932 - protein, 9 aa, Artificial Sequence
  Description of Artificial Sequence: Synthetic peptide
  Seed: VMELIRMIK
VIELIRMIK

SEQ ID NO: 15933 - protein, 9 aa, Artificial Sequence
  Description of Artificial Sequence: Synthetic peptide
  Seed: VMELIRMIK
VLELIRMIR

SEQ ID NO: 15934 - protein, 9 aa, Artificial Sequence
  Description of Artificial Sequence: Synthetic peptide
  Seed: VMELIRMIK
VMELIRMIR

SEQ ID NO: 15935 - protein, 9 aa, Artificial Sequence
  Description of Artificial Sequence: Synthetic peptide
  Seed: VMELIRMIK
VFELIRMIR

SEQ ID NO: 15936 - protein, 9 aa, Artificial Sequence
  Description of Artificial Sequence: Synthetic peptide
  Seed: VMELIRMIK
VFELIRMIK

SEQ ID NO: 15937 - protein, 9 aa, Artificial Sequence
  Description of Artificial Sequence: Synthetic peptide
  Seed: VMELIRMIK
VSELIRMIR

SEQ ID NO: 15938 - protein, 9 aa, Artificial Sequence
  Description of Artificial Sequence: Synthetic peptide
  Seed: VMELIRMIK
VSELIRMIK

SEQ ID NO: 15939 - protein, 9 aa, Artificial Sequence
  Description of Artificial Sequence: Synthetic peptide
  Seed: VMELIRMIK
VTELIRMIR

SEQ ID NO: 15940 - protein, 9 aa, Artificial Sequence
  Description of Artificial Sequence: Synthetic peptide
  Seed: VMELIRMIK
VTELIRMIK

SEQ ID NO: 15941 - protein, 9 aa, Artificial Sequence
  Description of Artificial Sequence: Synthetic peptide
  Seed: VMELIRMIK
VWELIRMIR

SEQ ID NO: 15942 - protein, 11 aa, Artificial Sequence
  Description of Artificial Sequence: Synthetic peptide
  Seed: VPRGQLSTRGV
VPRGQLSTRGA

SEQ ID NO: 15943 - protein, 11 aa, Artificial Sequence
  Description of Artificial Sequence: Synthetic peptide
  Seed: VPRGQLSTRGV
VPRGQLSTRGL

SEQ ID NO: 15944 - protein, 9 aa, Artificial Sequence
  Description of Artificial Sequence: Synthetic peptide
  Seed: VQIASNENM
VSIASNENY

SEQ ID NO: 15945 - protein, 9 aa, Artificial Sequence
  Description of Artificial Sequence: Synthetic peptide
  Seed: VQIASNENM
VKIASNENY

SEQ ID NO: 15946 - protein, 9 aa, Artificial Sequence
  Description of Artificial Sequence: Synthetic peptide
  Seed: VQIASNENM
VIIASNENM

SEQ ID NO: 15947 - protein, 9 aa, Artificial Sequence
  Description of Artificial Sequence: Synthetic peptide
  Seed: VQIASNENM
VIIASNENF

SEQ ID NO: 15948 - protein, 9 aa, Artificial Sequence
  Description of Artificial Sequence: Synthetic peptide
  Seed: VQIASNENM
VIIASNENY

SEQ ID NO: 15949 - protein, 9 aa, Artificial Sequence
  Description of Artificial Sequence: Synthetic peptide
  Seed: VQIASNENM
VLIASNENM

SEQ ID NO: 15950 - protein, 9 aa, Artificial Sequence
  Description of Artificial Sequence: Synthetic peptide
  Seed: VQIASNENM
VLIASNENF

SEQ ID NO: 15951 - protein, 9 aa, Artificial Sequence
  Description of Artificial Sequence: Synthetic peptide
  Seed: VQIASNENM
VLIASNENY

SEQ ID NO: 15952 - protein, 9 aa, Artificial Sequence
  Description of Artificial Sequence: Synthetic peptide
  Seed: VQIASNENM
VKIASNENL

SEQ ID NO: 15953 - protein, 9 aa, Artificial Sequence
  Description of Artificial Sequence: Synthetic peptide
  Seed: VQIASNENM
VKIASNENM

SEQ ID NO: 15954 - protein, 9 aa, Artificial Sequence
  Description of Artificial Sequence: Synthetic peptide
  Seed: VQIASNENM
VKIASNENF

SEQ ID NO: 15955 - protein, 9 aa, Artificial Sequence
  Description of Artificial Sequence: Synthetic peptide
  Seed: VQIASNENM
VMIASNENA

SEQ ID NO: 15956 - protein, 11 aa, Artificial Sequence
  Description of Artificial Sequence: Synthetic peptide
  Seed: VPRGQLSTRGV
VPRGQLSTRGM

SEQ ID NO: 15957 - protein, 9 aa, Artificial Sequence
  Description of Artificial Sequence: Synthetic peptide
  Seed: VQIASNENM
VMIASNENI

SEQ ID NO: 15958 - protein, 9 aa, Artificial Sequence
  Description of Artificial Sequence: Synthetic peptide
  Seed: VQIASNENM
VMIASNENL

SEQ ID NO: 15959 - protein, 9 aa, Artificial Sequence
  Description of Artificial Sequence: Synthetic peptide
  Seed: VQIASNENM
VMIASNENM

SEQ ID NO: 15960 - protein, 9 aa, Artificial Sequence
  Description of Artificial Sequence: Synthetic peptide
  Seed: VQIASNENM
VMIASNENF

SEQ ID NO: 15961 - protein, 9 aa, Artificial Sequence
  Description of Artificial Sequence: Synthetic peptide
  Seed: VQIASNENM
VMIASNENW

SEQ ID NO: 15962 - protein, 9 aa, Artificial Sequence
  Description of Artificial Sequence: Synthetic peptide
  Seed: VQIASNENM
VMIASNENY

SEQ ID NO: 15963 - protein, 9 aa, Artificial Sequence
  Description of Artificial Sequence: Synthetic peptide
  Seed: VQIASNENM
VMIASNENV

SEQ ID NO: 15964 - protein, 9 aa, Artificial Sequence
  Description of Artificial Sequence: Synthetic peptide
  Seed: VQIASNENM
VFIASNENF

SEQ ID NO: 15965 - protein, 9 aa, Artificial Sequence
  Description of Artificial Sequence: Synthetic peptide
  Seed: VQIASNENM
VSIASNENM

SEQ ID NO: 15966 - protein, 9 aa, Artificial Sequence
  Description of Artificial Sequence: Synthetic peptide
  Seed: VQIASNENM
VHIASNENY

SEQ ID NO: 15967 - protein, 9 aa, Artificial Sequence
  Description of Artificial Sequence: Synthetic peptide
  Seed: VQIASNENM
VHIASNENF

SEQ ID NO: 15968 - protein, 9 aa, Artificial Sequence
  Description of Artificial Sequence: Synthetic peptide
  Seed: VQIASNENM
VHIASNENM

SEQ ID NO: 15969 - protein, 9 aa, Artificial Sequence
  Description of Artificial Sequence: Synthetic peptide
  Seed: VQIASNENM
VGIASNENY

SEQ ID NO: 15970 - protein, 9 aa, Artificial Sequence
  Description of Artificial Sequence: Synthetic peptide
  Seed: VQIASNENM
VAIASNENM

SEQ ID NO: 15971 - protein, 9 aa, Artificial Sequence
  Description of Artificial Sequence: Synthetic peptide
  Seed: VQIASNENM
VAIASNENF

SEQ ID NO: 15972 - protein, 9 aa, Artificial Sequence
  Description of Artificial Sequence: Synthetic peptide
  Seed: VQIASNENM
VAIASNENY

SEQ ID NO: 15973 - protein, 9 aa, Artificial Sequence
  Description of Artificial Sequence: Synthetic peptide
  Seed: VQIASNENM
VRIASNENM

SEQ ID NO: 15974 - protein, 9 aa, Artificial Sequence
  Description of Artificial Sequence: Synthetic peptide
  Seed: VQIASNENM
VRIASNENF

SEQ ID NO: 15975 - protein, 9 aa, Artificial Sequence
  Description of Artificial Sequence: Synthetic peptide
  Seed: VQIASNENM
VRIASNENY

SEQ ID NO: 15976 - protein, 9 aa, Artificial Sequence
  Description of Artificial Sequence: Synthetic peptide
  Seed: VQIASNENM
VNIASNENF

SEQ ID NO: 15977 - protein, 9 aa, Artificial Sequence
  Description of Artificial Sequence: Synthetic peptide
  Seed: VQIASNENM
VNIASNENY

SEQ ID NO: 15978 - protein, 9 aa, Artificial Sequence
  Description of Artificial Sequence: Synthetic peptide
  Seed: VQIASNENM
VQIASNENH

SEQ ID NO: 15979 - protein, 9 aa, Artificial Sequence
  Description of Artificial Sequence: Synthetic peptide
  Seed: VQIASNENM
VQIASNENI

SEQ ID NO: 15980 - protein, 9 aa, Artificial Sequence
  Description of Artificial Sequence: Synthetic peptide
  Seed: VQIASNENM
VQIASNENL

SEQ ID NO: 15981 - protein, 9 aa, Artificial Sequence
  Description of Artificial Sequence: Synthetic peptide
  Seed: VQIASNENM
VQIASNENF

SEQ ID NO: 15982 - protein, 9 aa, Artificial Sequence
  Description of Artificial Sequence: Synthetic peptide
  Seed: VQIASNENM
VQIASNENW

SEQ ID NO: 15983 - protein, 9 aa, Artificial Sequence
  Description of Artificial Sequence: Synthetic peptide
  Seed: VQIASNENM
VQIASNENY

SEQ ID NO: 15984 - protein, 9 aa, Artificial Sequence
  Description of Artificial Sequence: Synthetic peptide
  Seed: VQIASNENM
VEIASNENF

SEQ ID NO: 15985 - protein, 9 aa, Artificial Sequence
  Description of Artificial Sequence: Synthetic peptide
  Seed: VQIASNENM
VEIASNENY

SEQ ID NO: 15986 - protein, 9 aa, Artificial Sequence
  Description of Artificial Sequence: Synthetic peptide
  Seed: VQIASNENM
VGIASNENF

SEQ ID NO: 15987 - protein, 9 aa, Artificial Sequence
  Description of Artificial Sequence: Synthetic peptide
  Seed: VMAAFTGNT
VVAAFTGNI

SEQ ID NO: 15988 - protein, 9 aa, Artificial Sequence
  Description of Artificial Sequence: Synthetic peptide
  Seed: VMAAFTGNT
VVAAFTGNA

SEQ ID NO: 15989 - protein, 9 aa, Artificial Sequence
  Description of Artificial Sequence: Synthetic peptide
  Seed: VMAAFTGNT
VTAAFTGNV

SEQ ID NO: 15990 - protein, 9 aa, Artificial Sequence
  Description of Artificial Sequence: Synthetic peptide
  Seed: VLYDKEEIR
VMYDKEEIR

SEQ ID NO: 15991 - protein, 11 aa, Artificial Sequence
  Description of Artificial Sequence: Synthetic peptide
  Seed: VLSAFDERRNR
VFSAFDERRNK

SEQ ID NO: 15992 - protein, 11 aa, Artificial Sequence
  Description of Artificial Sequence: Synthetic peptide
  Seed: VLSAFDERRNR
VSSAFDERRNR

SEQ ID NO: 15993 - protein, 11 aa, Artificial Sequence
  Description of Artificial Sequence: Synthetic peptide
  Seed: VLSAFDERRNR
VTSAFDERRNR

SEQ ID NO: 15994 - protein, 11 aa, Artificial Sequence
  Description of Artificial Sequence: Synthetic peptide
  Seed: VLSAFDERRNR
VWSAFDERRNR

SEQ ID NO: 15995 - protein, 11 aa, Artificial Sequence
  Description of Artificial Sequence: Synthetic peptide
  Seed: VLSAFDERRNR
VYSAFDERRNR

SEQ ID NO: 15996 - protein, 11 aa, Artificial Sequence
  Description of Artificial Sequence: Synthetic peptide
  Seed: VLSAFDERRNR
VVSAFDERRNR

SEQ ID NO: 15997 - protein, 9 aa, Artificial Sequence
  Description of Artificial Sequence: Synthetic peptide
  Seed: VLYDKEEIR
VAYDKEEIR

SEQ ID NO: 15998 - protein, 9 aa, Artificial Sequence
  Description of Artificial Sequence: Synthetic peptide
  Seed: VLYDKEEIR
VQYDKEEIR

SEQ ID NO: 15999 - protein, 9 aa, Artificial Sequence
  Description of Artificial Sequence: Synthetic peptide
  Seed: VLYDKEEIR
VIYDKEEIR

SEQ ID NO: 16000 - protein, 9 aa, Artificial Sequence
  Description of Artificial Sequence: Synthetic peptide
  Seed: VLYDKEEIR
VMYDKEEIK

SEQ ID NO: 16001 - protein, 9 aa, Artificial Sequence
  Description of Artificial Sequence: Synthetic peptide
  Seed: VMAAFTGNT
VTAAFTGNL

SEQ ID NO: 16002 - protein, 9 aa, Artificial Sequence
  Description of Artificial Sequence: Synthetic peptide
  Seed: VLYDKEEIR
VFYDKEEIR

SEQ ID NO: 16003 - protein, 9 aa, Artificial Sequence
  Description of Artificial Sequence: Synthetic peptide
  Seed: VLYDKEEIR
VFYDKEEIK

SEQ ID NO: 16004 - protein, 9 aa, Artificial Sequence
  Description of Artificial Sequence: Synthetic peptide
  Seed: VLYDKEEIR
VSYDKEEIR

SEQ ID NO: 16005 - protein, 9 aa, Artificial Sequence
  Description of Artificial Sequence: Synthetic peptide
  Seed: VLYDKEEIR
VTYDKEEIR

SEQ ID NO: 16006 - protein, 9 aa, Artificial Sequence
  Description of Artificial Sequence: Synthetic peptide
  Seed: VLYDKEEIR
VWYDKEEIR

SEQ ID NO: 16007 - protein, 9 aa, Artificial Sequence
  Description of Artificial Sequence: Synthetic peptide
  Seed: VLYDKEEIR
VYYDKEEIR

SEQ ID NO: 16008 - protein, 9 aa, Artificial Sequence
  Description of Artificial Sequence: Synthetic peptide
  Seed: VLYDKEEIR
VVYDKEEIR

SEQ ID NO: 16009 - protein, 10 aa, Artificial Sequence
  Description of Artificial Sequence: Synthetic peptide
  Seed: VLYDKEEIRR
VAYDKEEIRR

SEQ ID NO: 16010 - protein, 10 aa, Artificial Sequence
  Description of Artificial Sequence: Synthetic peptide
  Seed: VLYDKEEIRR
VQYDKEEIRR

SEQ ID NO: 16011 - protein, 11 aa, Artificial Sequence
  Description of Artificial Sequence: Synthetic peptide
  Seed: VLSAFDERRNR
VFSAFDERRNR

SEQ ID NO: 16012 - protein, 11 aa, Artificial Sequence
  Description of Artificial Sequence: Synthetic peptide
  Seed: VLSAFDERRNR
VMSAFDERRNK

SEQ ID NO: 16013 - protein, 11 aa, Artificial Sequence
  Description of Artificial Sequence: Synthetic peptide
  Seed: VLSAFDERRNR
VMSAFDERRNR

SEQ ID NO: 16014 - protein, 9 aa, Artificial Sequence
  Description of Artificial Sequence: Synthetic peptide
  Seed: VLSAFDERR
VSSAFDERK

SEQ ID NO: 16015 - protein, 9 aa, Artificial Sequence
  Description of Artificial Sequence: Synthetic peptide
  Seed: VLSAFDERR
VTSAFDERR

SEQ ID NO: 16016 - protein, 9 aa, Artificial Sequence
  Description of Artificial Sequence: Synthetic peptide
  Seed: VLSAFDERR
VTSAFDERK

SEQ ID NO: 16017 - protein, 9 aa, Artificial Sequence
  Description of Artificial Sequence: Synthetic peptide
  Seed: VLSAFDERR
VWSAFDERR

SEQ ID NO: 16018 - protein, 9 aa, Artificial Sequence
  Description of Artificial Sequence: Synthetic peptide
  Seed: VLSAFDERR
VWSAFDERK

SEQ ID NO: 16019 - protein, 9 aa, Artificial Sequence
  Description of Artificial Sequence: Synthetic peptide
  Seed: VLSAFDERR
VYSAFDERR

SEQ ID NO: 16020 - protein, 9 aa, Artificial Sequence
  Description of Artificial Sequence: Synthetic peptide
  Seed: VLSAFDERR
VYSAFDERK

SEQ ID NO: 16021 - protein, 9 aa, Artificial Sequence
  Description of Artificial Sequence: Synthetic peptide
  Seed: VLSAFDERR
VVSAFDERR

SEQ ID NO: 16022 - protein, 9 aa, Artificial Sequence
  Description of Artificial Sequence: Synthetic peptide
  Seed: VLSAFDERR
VVSAFDERK

SEQ ID NO: 16023 - protein, 10 aa, Artificial Sequence
  Description of Artificial Sequence: Synthetic peptide
  Seed: VLYDKEEIRR
VIYDKEEIRR

SEQ ID NO: 16024 - protein, 10 aa, Artificial Sequence
  Description of Artificial Sequence: Synthetic peptide
  Seed: VLYDKEEIRR
VMYDKEEIRR

SEQ ID NO: 16025 - protein, 10 aa, Artificial Sequence
  Description of Artificial Sequence: Synthetic peptide
  Seed: VLYDKEEIRR
VMYDKEEIRK

SEQ ID NO: 16026 - protein, 9 aa, Artificial Sequence
  Description of Artificial Sequence: Synthetic peptide
  Seed: VMAAFTGNT
VIAAFTGNV

SEQ ID NO: 16027 - protein, 9 aa, Artificial Sequence
  Description of Artificial Sequence: Synthetic peptide
  Seed: VMAAFTGNT
VLAAFTGNC

SEQ ID NO: 16028 - protein, 9 aa, Artificial Sequence
  Description of Artificial Sequence: Synthetic peptide
  Seed: VMAAFTGNT
VLAAFTGNI

SEQ ID NO: 16029 - protein, 9 aa, Artificial Sequence
  Description of Artificial Sequence: Synthetic peptide
  Seed: VMAAFTGNT
VLAAFTGNL

SEQ ID NO: 16030 - protein, 9 aa, Artificial Sequence
  Description of Artificial Sequence: Synthetic peptide
  Seed: VMAAFTGNT
VLAAFTGNM

SEQ ID NO: 16031 - protein, 9 aa, Artificial Sequence
  Description of Artificial Sequence: Synthetic peptide
  Seed: VMAAFTGNT
VLAAFTGNF

SEQ ID NO: 16032 - protein, 9 aa, Artificial Sequence
  Description of Artificial Sequence: Synthetic peptide
  Seed: VMAAFTGNT
VLAAFTGNS

SEQ ID NO: 16033 - protein, 9 aa, Artificial Sequence
  Description of Artificial Sequence: Synthetic peptide
  Seed: VMAAFTGNT
VLAAFTGNT

SEQ ID NO: 16034 - protein, 9 aa, Artificial Sequence
  Description of Artificial Sequence: Synthetic peptide
  Seed: VMAAFTGNT
VLAAFTGNV

SEQ ID NO: 16035 - protein, 9 aa, Artificial Sequence
  Description of Artificial Sequence: Synthetic peptide
  Seed: VMAAFTGNT
VMAAFTGNA

SEQ ID NO: 16036 - protein, 9 aa, Artificial Sequence
  Description of Artificial Sequence: Synthetic peptide
  Seed: VMAAFTGNT
VMAAFTGNC

SEQ ID NO: 16037 - protein, 9 aa, Artificial Sequence
  Description of Artificial Sequence: Synthetic peptide
  Seed: VMAAFTGNT
VMAAFTGNI

SEQ ID NO: 16038 - protein, 9 aa, Artificial Sequence
  Description of Artificial Sequence: Synthetic peptide
  Seed: VMAAFTGNT
VMAAFTGNL

SEQ ID NO: 16039 - protein, 9 aa, Artificial Sequence
  Description of Artificial Sequence: Synthetic peptide
  Seed: VMAAFTGNT
VMAAFTGNM

SEQ ID NO: 16040 - protein, 9 aa, Artificial Sequence
  Description of Artificial Sequence: Synthetic peptide
  Seed: VMAAFTGNT
VMAAFTGNF

SEQ ID NO: 16041 - protein, 9 aa, Artificial Sequence
  Description of Artificial Sequence: Synthetic peptide
  Seed: VMAAFTGNT
VMAAFTGNP

SEQ ID NO: 16042 - protein, 9 aa, Artificial Sequence
  Description of Artificial Sequence: Synthetic peptide
  Seed: VMAAFTGNT
VMAAFTGNS

SEQ ID NO: 16043 - protein, 9 aa, Artificial Sequence
  Description of Artificial Sequence: Synthetic peptide
  Seed: VMAAFTGNT
VMAAFTGNV

SEQ ID NO: 16044 - protein, 9 aa, Artificial Sequence
  Description of Artificial Sequence: Synthetic peptide
  Seed: VMAAFTGNT
VSAAFTGNV

SEQ ID NO: 16045 - protein, 9 aa, Artificial Sequence
  Description of Artificial Sequence: Synthetic peptide
  Seed: VMAAFTGNT
VTAAFTGNI

SEQ ID NO: 16046 - protein, 9 aa, Artificial Sequence
  Description of Artificial Sequence: Synthetic peptide
  Seed: VMAAFTGNT
VLAAFTGNA

SEQ ID NO: 16047 - protein, 9 aa, Artificial Sequence
  Description of Artificial Sequence: Synthetic peptide
  Seed: VMAAFTGNT
VIAAFTGNM

SEQ ID NO: 16048 - protein, 10 aa, Artificial Sequence
  Description of Artificial Sequence: Synthetic peptide
  Seed: VLYDKEEIRR
VFYDKEEIRR

SEQ ID NO: 16049 - protein, 9 aa, Artificial Sequence
  Description of Artificial Sequence: Synthetic peptide
  Seed: VMAAFTGNT
VIAAFTGNL

SEQ ID NO: 16050 - protein, 10 aa, Artificial Sequence
  Description of Artificial Sequence: Synthetic peptide
  Seed: VLYDKEEIRR
VFYDKEEIRK

SEQ ID NO: 16051 - protein, 10 aa, Artificial Sequence
  Description of Artificial Sequence: Synthetic peptide
  Seed: VLYDKEEIRR
VSYDKEEIRR

SEQ ID NO: 16052 - protein, 10 aa, Artificial Sequence
  Description of Artificial Sequence: Synthetic peptide
  Seed: VLYDKEEIRR
VTYDKEEIRR

SEQ ID NO: 16053 - protein, 10 aa, Artificial Sequence
  Description of Artificial Sequence: Synthetic peptide
  Seed: VLYDKEEIRR
VWYDKEEIRR

SEQ ID NO: 16054 - protein, 10 aa, Artificial Sequence
  Description of Artificial Sequence: Synthetic peptide
  Seed: VLYDKEEIRR
VYYDKEEIRR

SEQ ID NO: 16055 - protein, 10 aa, Artificial Sequence
  Description of Artificial Sequence: Synthetic peptide
  Seed: VLYDKEEIRR
VVYDKEEIRR

SEQ ID NO: 16056 - protein, 11 aa, Artificial Sequence
  Description of Artificial Sequence: Synthetic peptide
  Seed: VLYDKEEIRRI
VLYDKEEIRRA

SEQ ID NO: 16057 - protein, 11 aa, Artificial Sequence
  Description of Artificial Sequence: Synthetic peptide
  Seed: VLYDKEEIRRI
VLYDKEEIRRL

SEQ ID NO: 16058 - protein, 11 aa, Artificial Sequence
  Description of Artificial Sequence: Synthetic peptide
  Seed: VLYDKEEIRRI
VLYDKEEIRRV

SEQ ID NO: 16059 - protein, 11 aa, Artificial Sequence
  Description of Artificial Sequence: Synthetic peptide
  Seed: VLYDKEEIRRI
VMYDKEEIRRA

SEQ ID NO: 16060 - protein, 11 aa, Artificial Sequence
  Description of Artificial Sequence: Synthetic peptide
  Seed: VLYDKEEIRRI
VMYDKEEIRRL

SEQ ID NO: 16061 - protein, 11 aa, Artificial Sequence
  Description of Artificial Sequence: Synthetic peptide
  Seed: VLYDKEEIRRI
VMYDKEEIRRV

SEQ ID NO: 16062 - protein, 9 aa, Artificial Sequence
  Description of Artificial Sequence: Synthetic peptide
  Seed: VMAAFTGNT
VAAAFTGNV

SEQ ID NO: 16063 - protein, 9 aa, Artificial Sequence
  Description of Artificial Sequence: Synthetic peptide
  Seed: VMAAFTGNT
VQAAFTGNA

SEQ ID NO: 16064 - protein, 9 aa, Artificial Sequence
  Description of Artificial Sequence: Synthetic peptide
  Seed: VMAAFTGNT
VQAAFTGNI

SEQ ID NO: 16065 - protein, 9 aa, Artificial Sequence
  Description of Artificial Sequence: Synthetic peptide
  Seed: VMAAFTGNT
VQAAFTGNL

SEQ ID NO: 16066 - protein, 9 aa, Artificial Sequence
  Description of Artificial Sequence: Synthetic peptide
  Seed: VMAAFTGNT
VQAAFTGNV

SEQ ID NO: 16067 - protein, 9 aa, Artificial Sequence
  Description of Artificial Sequence: Synthetic peptide
  Seed: VMAAFTGNT
VIAAFTGNA

SEQ ID NO: 16068 - protein, 9 aa, Artificial Sequence
  Description of Artificial Sequence: Synthetic peptide
  Seed: VMAAFTGNT
VIAAFTGNI

SEQ ID NO: 16069 - protein, 9 aa, Artificial Sequence
  Description of Artificial Sequence: Synthetic peptide
  Seed: VQIASNENM
VSIASNENF

SEQ ID NO: 16070 - protein, 9 aa, Artificial Sequence
  Description of Artificial Sequence: Synthetic peptide
  Seed: VQIASNENM
VTIASNENL

SEQ ID NO: 16071 - protein, 9 aa, Artificial Sequence
  Description of Artificial Sequence: Synthetic peptide
  Seed: VQRNLPFER
VLRNLPFEA

SEQ ID NO: 16072 - protein, 9 aa, Artificial Sequence
  Description of Artificial Sequence: Synthetic peptide
  Seed: VQIASNENM
VTIASNENF

SEQ ID NO: 16073 - protein, 9 aa, Artificial Sequence
  Description of Artificial Sequence: Synthetic peptide
  Seed: VQRNLPFER
VHRNLPFER

SEQ ID NO: 16074 - protein, 9 aa, Artificial Sequence
  Description of Artificial Sequence: Synthetic peptide
  Seed: VQRNLPFER
VARNLPFER

SEQ ID NO: 16075 - protein, 9 aa, Artificial Sequence
  Description of Artificial Sequence: Synthetic peptide
  Seed: VQRNLPFER
VARNLPFEK

SEQ ID NO: 16076 - protein, 9 aa, Artificial Sequence
  Description of Artificial Sequence: Synthetic peptide
  Seed: VQRNLPFER
VNRNLPFER

SEQ ID NO: 16077 - protein, 9 aa, Artificial Sequence
  Description of Artificial Sequence: Synthetic peptide
  Seed: VQRNLPFER
VNRNLPFEK

SEQ ID NO: 16078 - protein, 9 aa, Artificial Sequence
  Description of Artificial Sequence: Synthetic peptide
  Seed: VQRNLPFER
VCRNLPFER

SEQ ID NO: 16079 - protein, 9 aa, Artificial Sequence
  Description of Artificial Sequence: Synthetic peptide
  Seed: VQRNLPFER
VGRNLPFER

SEQ ID NO: 16080 - protein, 9 aa, Artificial Sequence
  Description of Artificial Sequence: Synthetic peptide
  Seed: VQRNLPFER
VGRNLPFEK

SEQ ID NO: 16081 - protein, 9 aa, Artificial Sequence
  Description of Artificial Sequence: Synthetic peptide
  Seed: VQRNLPFER
VIRNLPFEA

SEQ ID NO: 16082 - protein, 9 aa, Artificial Sequence
  Description of Artificial Sequence: Synthetic peptide
  Seed: VQRNLPFER
VIRNLPFER

SEQ ID NO: 16083 - protein, 9 aa, Artificial Sequence
  Description of Artificial Sequence: Synthetic peptide
  Seed: VQRNLPFER
VIRNLPFEG

SEQ ID NO: 16084 - protein, 9 aa, Artificial Sequence
  Description of Artificial Sequence: Synthetic peptide
  Seed: VQRNLPFER
VIRNLPFEI

SEQ ID NO: 16085 - protein, 9 aa, Artificial Sequence
  Description of Artificial Sequence: Synthetic peptide
  Seed: VQRNLPFER
VIRNLPFEL

SEQ ID NO: 16086 - protein, 9 aa, Artificial Sequence
  Description of Artificial Sequence: Synthetic peptide
  Seed: VQRNLPFER
VIRNLPFEK

SEQ ID NO: 16087 - protein, 9 aa, Artificial Sequence
  Description of Artificial Sequence: Synthetic peptide
  Seed: VQRNLPFER
VIRNLPFEM

SEQ ID NO: 16088 - protein, 9 aa, Artificial Sequence
  Description of Artificial Sequence: Synthetic peptide
  Seed: VQRNLPFER
VIRNLPFES

SEQ ID NO: 16089 - protein, 9 aa, Artificial Sequence
  Description of Artificial Sequence: Synthetic peptide
  Seed: VQRNLPFER
VIRNLPFEY

SEQ ID NO: 16090 - protein, 9 aa, Artificial Sequence
  Description of Artificial Sequence: Synthetic peptide
  Seed: VQRNLPFER
VIRNLPFEV

SEQ ID NO: 16091 - protein, 9 aa, Artificial Sequence
  Description of Artificial Sequence: Synthetic peptide
  Seed: VQRNLPFDK
VGRNLPFDR

SEQ ID NO: 16092 - protein, 9 aa, Artificial Sequence
  Description of Artificial Sequence: Synthetic peptide
  Seed: VQPTFSVQR
VYPTFSVQR

SEQ ID NO: 16093 - protein, 9 aa, Artificial Sequence
  Description of Artificial Sequence: Synthetic peptide
  Seed: VQPTFSVQR
VYPTFSVQK

SEQ ID NO: 16094 - protein, 9 aa, Artificial Sequence
  Description of Artificial Sequence: Synthetic peptide
  Seed: VQPTFSVQR
VVPTFSVQR

SEQ ID NO: 16095 - protein, 9 aa, Artificial Sequence
  Description of Artificial Sequence: Synthetic peptide
  Seed: VQPTFSVQR
VVPTFSVQK

SEQ ID NO: 16096 - protein, 9 aa, Artificial Sequence
  Description of Artificial Sequence: Synthetic peptide
  Seed: VQRNLPFDK
VARNLPFDA

SEQ ID NO: 16097 - protein, 9 aa, Artificial Sequence
  Description of Artificial Sequence: Synthetic peptide
  Seed: VQRNLPFDK
VARNLPFDR

SEQ ID NO: 16098 - protein, 9 aa, Artificial Sequence
  Description of Artificial Sequence: Synthetic peptide
  Seed: VQRNLPFDK
VARNLPFDK

SEQ ID NO: 16099 - protein, 9 aa, Artificial Sequence
  Description of Artificial Sequence: Synthetic peptide
  Seed: VQRNLPFDK
VNRNLPFDR

SEQ ID NO: 16100 - protein, 9 aa, Artificial Sequence
  Description of Artificial Sequence: Synthetic peptide
  Seed: VQRNLPFDK
VGRNLPFDK

SEQ ID NO: 16101 - protein, 9 aa, Artificial Sequence
  Description of Artificial Sequence: Synthetic peptide
  Seed: VQRNLPFDK
VIRNLPFDA

SEQ ID NO: 16102 - protein, 9 aa, Artificial Sequence
  Description of Artificial Sequence: Synthetic peptide
  Seed: VQRNLPFDK
VIRNLPFDR

SEQ ID NO: 16103 - protein, 9 aa, Artificial Sequence
  Description of Artificial Sequence: Synthetic peptide
  Seed: VQRNLPFDK
VIRNLPFDK

SEQ ID NO: 16104 - protein, 9 aa, Artificial Sequence
  Description of Artificial Sequence: Synthetic peptide
  Seed: VQRNLPFDK
VIRNLPFDV

SEQ ID NO: 16105 - protein, 9 aa, Artificial Sequence
  Description of Artificial Sequence: Synthetic peptide
  Seed: VQRNLPFDK
VLRNLPFDR

SEQ ID NO: 16106 - protein, 9 aa, Artificial Sequence
  Description of Artificial Sequence: Synthetic peptide
  Seed: VQRNLPFDK
VLRNLPFDK

SEQ ID NO: 16107 - protein, 9 aa, Artificial Sequence
  Description of Artificial Sequence: Synthetic peptide
  Seed: VQRNLPFDK
VMRNLPFDA

SEQ ID NO: 16108 - protein, 9 aa, Artificial Sequence
  Description of Artificial Sequence: Synthetic peptide
  Seed: VQRNLPFDK
VMRNLPFDR

SEQ ID NO: 16109 - protein, 9 aa, Artificial Sequence
  Description of Artificial Sequence: Synthetic peptide
  Seed: VQRNLPFDK
VMRNLPFDK

SEQ ID NO: 16110 - protein, 9 aa, Artificial Sequence
  Description of Artificial Sequence: Synthetic peptide
  Seed: VQPTFSVQR
VWPTFSVQK

SEQ ID NO: 16111 - protein, 9 aa, Artificial Sequence
  Description of Artificial Sequence: Synthetic peptide
  Seed: VQPTFSVQR
VWPTFSVQR

SEQ ID NO: 16112 - protein, 9 aa, Artificial Sequence
  Description of Artificial Sequence: Synthetic peptide
  Seed: VQPTFSVQR
VTPTFSVQK

SEQ ID NO: 16113 - protein, 9 aa, Artificial Sequence
  Description of Artificial Sequence: Synthetic peptide
  Seed: VQPTFSVQR
VTPTFSVQR

SEQ ID NO: 16114 - protein, 9 aa, Artificial Sequence
  Description of Artificial Sequence: Synthetic peptide
  Seed: VQIASNENM
VTIASNENY

SEQ ID NO: 16115 - protein, 9 aa, Artificial Sequence
  Description of Artificial Sequence: Synthetic peptide
  Seed: VQIASNENM
VTIASNENV

SEQ ID NO: 16116 - protein, 9 aa, Artificial Sequence
  Description of Artificial Sequence: Synthetic peptide
  Seed: VQIASNENM
VYIASNENF

SEQ ID NO: 16117 - protein, 9 aa, Artificial Sequence
  Description of Artificial Sequence: Synthetic peptide
  Seed: VQIASNENM
VVIASNENI

SEQ ID NO: 16118 - protein, 9 aa, Artificial Sequence
  Description of Artificial Sequence: Synthetic peptide
  Seed: VQIASNENM
VVIASNENL

SEQ ID NO: 16119 - protein, 9 aa, Artificial Sequence
  Description of Artificial Sequence: Synthetic peptide
  Seed: VQIASNENM
VVIASNENF

SEQ ID NO: 16120 - protein, 9 aa, Artificial Sequence
  Description of Artificial Sequence: Synthetic peptide
  Seed: VQIASNENM
VVIASNENY

SEQ ID NO: 16121 - protein, 9 aa, Artificial Sequence
  Description of Artificial Sequence: Synthetic peptide
  Seed: VQIASNENM
VVIASNENV

SEQ ID NO: 16122 - protein, 9 aa, Artificial Sequence
  Description of Artificial Sequence: Synthetic peptide
  Seed: VQPTFSVQR
VAPTFSVQR

SEQ ID NO: 16123 - protein, 9 aa, Artificial Sequence
  Description of Artificial Sequence: Synthetic peptide
  Seed: VQPTFSVQR
VGPTFSVQR

SEQ ID NO: 16124 - protein, 9 aa, Artificial Sequence
  Description of Artificial Sequence: Synthetic peptide
  Seed: VQPTFSVQR
VIPTFSVQR

SEQ ID NO: 16125 - protein, 9 aa, Artificial Sequence
  Description of Artificial Sequence: Synthetic peptide
  Seed: VQPTFSVQR
VIPTFSVQK

SEQ ID NO: 16126 - protein, 9 aa, Artificial Sequence
  Description of Artificial Sequence: Synthetic peptide
  Seed: VQPTFSVQR
VLPTFSVQR

SEQ ID NO: 16127 - protein, 9 aa, Artificial Sequence
  Description of Artificial Sequence: Synthetic peptide
  Seed: VQPTFSVQR
VLPTFSVQK

SEQ ID NO: 16128 - protein, 9 aa, Artificial Sequence
  Description of Artificial Sequence: Synthetic peptide
  Seed: VQPTFSVQR
VMPTFSVQR

SEQ ID NO: 16129 - protein, 9 aa, Artificial Sequence
  Description of Artificial Sequence: Synthetic peptide
  Seed: VQPTFSVQR
VMPTFSVQK

SEQ ID NO: 16130 - protein, 9 aa, Artificial Sequence
  Description of Artificial Sequence: Synthetic peptide
  Seed: VQPTFSVQR
VFPTFSVQR

SEQ ID NO: 16131 - protein, 9 aa, Artificial Sequence
  Description of Artificial Sequence: Synthetic peptide
  Seed: VQPTFSVQR
VFPTFSVQK

SEQ ID NO: 16132 - protein, 9 aa, Artificial Sequence
  Description of Artificial Sequence: Synthetic peptide
  Seed: VQPTFSVQR
VSPTFSVQR

SEQ ID NO: 16133 - protein, 9 aa, Artificial Sequence
  Description of Artificial Sequence: Synthetic peptide
  Seed: VQRNLPFDK
VMRNLPFDV

SEQ ID NO: 16134 - protein, 9 aa, Artificial Sequence
  Description of Artificial Sequence: Synthetic peptide
  Seed: VQRNLPFDK
VFRNLPFDA

SEQ ID NO: 16135 - protein, 9 aa, Artificial Sequence
  Description of Artificial Sequence: Synthetic peptide
  Seed: VQRNLPFDK
VFRNLPFDR

SEQ ID NO: 16136 - protein, 9 aa, Artificial Sequence
  Description of Artificial Sequence: Synthetic peptide
  Seed: VQRNLPFDK
VVRNLPFDR

SEQ ID NO: 16137 - protein, 9 aa, Artificial Sequence
  Description of Artificial Sequence: Synthetic peptide
  Seed: VQRNLPFDK
VVRNLPFDL

SEQ ID NO: 16138 - protein, 9 aa, Artificial Sequence
  Description of Artificial Sequence: Synthetic peptide
  Seed: VQRNLPFDK
VVRNLPFDK

SEQ ID NO: 16139 - protein, 9 aa, Artificial Sequence
  Description of Artificial Sequence: Synthetic peptide
  Seed: VQRNLPFDK
VVRNLPFDV

SEQ ID NO: 16140 - protein, 9 aa, Artificial Sequence
  Description of Artificial Sequence: Synthetic peptide
  Seed: VQRNLPFDK
VVRNLPFDI

SEQ ID NO: 16141 - protein, 9 aa, Artificial Sequence
  Description of Artificial Sequence: Synthetic peptide
  Seed: VQRNLPFDK
VVRNLPFDA

SEQ ID NO: 16142 - protein, 9 aa, Artificial Sequence
  Description of Artificial Sequence: Synthetic peptide
  Seed: VQRNLPFDK
VFRNLPFDK

SEQ ID NO: 16143 - protein, 9 aa, Artificial Sequence
  Description of Artificial Sequence: Synthetic peptide
  Seed: VQRNLPFDK
VYRNLPFDV

SEQ ID NO: 16144 - protein, 9 aa, Artificial Sequence
  Description of Artificial Sequence: Synthetic peptide
  Seed: VQRNLPFDK
VSRNLPFDA

SEQ ID NO: 16145 - protein, 9 aa, Artificial Sequence
  Description of Artificial Sequence: Synthetic peptide
  Seed: VQRNLPFDK
VSRNLPFDR

SEQ ID NO: 16146 - protein, 9 aa, Artificial Sequence
  Description of Artificial Sequence: Synthetic peptide
  Seed: VQRNLPFDK
VSRNLPFDI

SEQ ID NO: 16147 - protein, 9 aa, Artificial Sequence
  Description of Artificial Sequence: Synthetic peptide
  Seed: VQRNLPFDK
VSRNLPFDK

SEQ ID NO: 16148 - protein, 9 aa, Artificial Sequence
  Description of Artificial Sequence: Synthetic peptide
  Seed: VQRNLPFDK
VSRNLPFDV

SEQ ID NO: 16149 - protein, 9 aa, Artificial Sequence
  Description of Artificial Sequence: Synthetic peptide
  Seed: VQRNLPFDK
VTRNLPFDA

SEQ ID NO: 16150 - protein, 9 aa, Artificial Sequence
  Description of Artificial Sequence: Synthetic peptide
  Seed: VQRNLPFDK
VTRNLPFDR

SEQ ID NO: 16151 - protein, 9 aa, Artificial Sequence
  Description of Artificial Sequence: Synthetic peptide
  Seed: VQRNLPFDK
VTRNLPFDI

SEQ ID NO: 16152 - protein, 9 aa, Artificial Sequence
  Description of Artificial Sequence: Synthetic peptide
  Seed: VQRNLPFDK
VTRNLPFDL

SEQ ID NO: 16153 - protein, 9 aa, Artificial Sequence
  Description of Artificial Sequence: Synthetic peptide
  Seed: VQRNLPFDK
VTRNLPFDK

SEQ ID NO: 16154 - protein, 9 aa, Artificial Sequence
  Description of Artificial Sequence: Synthetic peptide
  Seed: VQRNLPFDK
VTRNLPFDM

SEQ ID NO: 16155 - protein, 9 aa, Artificial Sequence
  Description of Artificial Sequence: Synthetic peptide
  Seed: VQRNLPFDK
VTRNLPFDS

SEQ ID NO: 16156 - protein, 9 aa, Artificial Sequence
  Description of Artificial Sequence: Synthetic peptide
  Seed: VQRNLPFDK
VTRNLPFDY

SEQ ID NO: 16157 - protein, 9 aa, Artificial Sequence
  Description of Artificial Sequence: Synthetic peptide
  Seed: VQRNLPFDK
VTRNLPFDV

SEQ ID NO: 16158 - protein, 9 aa, Artificial Sequence
  Description of Artificial Sequence: Synthetic peptide
  Seed: VQRNLPFDK
VWRNLPFDR

SEQ ID NO: 16159 - protein, 9 aa, Artificial Sequence
  Description of Artificial Sequence: Synthetic peptide
  Seed: VQRNLPFDK
VWRNLPFDK

SEQ ID NO: 16160 - protein, 9 aa, Artificial Sequence
  Description of Artificial Sequence: Synthetic peptide
  Seed: VQRNLPFDK
VYRNLPFDA

SEQ ID NO: 16161 - protein, 9 aa, Artificial Sequence
  Description of Artificial Sequence: Synthetic peptide
  Seed: VQRNLPFDK
VYRNLPFDR

SEQ ID NO: 16162 - protein, 9 aa, Artificial Sequence
  Description of Artificial Sequence: Synthetic peptide
  Seed: VQRNLPFDK
VYRNLPFDK

SEQ ID NO: 16163 - protein, 9 aa, Artificial Sequence
  Description of Artificial Sequence: Synthetic peptide
  Seed: TYQRTRALV
TYQRTRALY

SEQ ID NO: 16164 - protein, 9 aa, Artificial Sequence
  Description of Artificial Sequence: Synthetic peptide
  Seed: VSFRGRGVF
VMFRGRGVM

SEQ ID NO: 16165 - protein, 10 aa, Artificial Sequence
  Description of Artificial Sequence: Synthetic peptide
  Seed: TLPRRSGAAG
THPRRSGAAM

SEQ ID NO: 16166 - protein, 10 aa, Artificial Sequence
  Description of Artificial Sequence: Synthetic peptide
  Seed: TLPRRSGAAG
TGPRRSGAAT

SEQ ID NO: 16167 - protein, 10 aa, Artificial Sequence
  Description of Artificial Sequence: Synthetic peptide
  Seed: TLPRRSGAAG
TGPRRSGAAW

SEQ ID NO: 16168 - protein, 10 aa, Artificial Sequence
  Description of Artificial Sequence: Synthetic peptide
  Seed: TLPRRSGAAG
TGPRRSGAAY

SEQ ID NO: 16169 - protein, 10 aa, Artificial Sequence
  Description of Artificial Sequence: Synthetic peptide
  Seed: TLPRRSGAAG
TGPRRSGAAV

SEQ ID NO: 16170 - protein, 10 aa, Artificial Sequence
  Description of Artificial Sequence: Synthetic peptide
  Seed: TLPRRSGAAG
THPRRSGAAA

SEQ ID NO: 16171 - protein, 10 aa, Artificial Sequence
  Description of Artificial Sequence: Synthetic peptide
  Seed: TLPRRSGAAG
THPRRSGAAC

SEQ ID NO: 16172 - protein, 10 aa, Artificial Sequence
  Description of Artificial Sequence: Synthetic peptide
  Seed: TLPRRSGAAG
THPRRSGAAG

SEQ ID NO: 16173 - protein, 10 aa, Artificial Sequence
  Description of Artificial Sequence: Synthetic peptide
  Seed: TLPRRSGAAG
THPRRSGAAI

SEQ ID NO: 16174 - protein, 10 aa, Artificial Sequence
  Description of Artificial Sequence: Synthetic peptide
  Seed: TLPRRSGAAG
THPRRSGAAL

SEQ ID NO: 16175 - protein, 10 aa, Artificial Sequence
  Description of Artificial Sequence: Synthetic peptide
  Seed: TLPRRSGAAG
THPRRSGAAF

SEQ ID NO: 16176 - protein, 10 aa, Artificial Sequence
  Description of Artificial Sequence: Synthetic peptide
  Seed: TLPRRSGAAG
TIPRRSGAAL

SEQ ID NO: 16177 - protein, 10 aa, Artificial Sequence
  Description of Artificial Sequence: Synthetic peptide
  Seed: TLPRRSGAAG
THPRRSGAAP

SEQ ID NO: 16178 - protein, 10 aa, Artificial Sequence
  Description of Artificial Sequence: Synthetic peptide
  Seed: TLPRRSGAAG
THPRRSGAAS

SEQ ID NO: 16179 - protein, 10 aa, Artificial Sequence
  Description of Artificial Sequence: Synthetic peptide
  Seed: TLPRRSGAAG
THPRRSGAAT

SEQ ID NO: 16180 - protein, 10 aa, Artificial Sequence
  Description of Artificial Sequence: Synthetic peptide
  Seed: TLPRRSGAAG
THPRRSGAAW

SEQ ID NO: 16181 - protein, 10 aa, Artificial Sequence
  Description of Artificial Sequence: Synthetic peptide
  Seed: TLPRRSGAAG
THPRRSGAAY

SEQ ID NO: 16182 - protein, 10 aa, Artificial Sequence
  Description of Artificial Sequence: Synthetic peptide
  Seed: TLPRRSGAAG
THPRRSGAAV

SEQ ID NO: 16183 - protein, 10 aa, Artificial Sequence
  Description of Artificial Sequence: Synthetic peptide
  Seed: TLPRRSGAAG
TIPRRSGAAA

SEQ ID NO: 16184 - protein, 10 aa, Artificial Sequence
  Description of Artificial Sequence: Synthetic peptide
  Seed: TLPRRSGAAG
TIPRRSGAAC

SEQ ID NO: 16185 - protein, 10 aa, Artificial Sequence
  Description of Artificial Sequence: Synthetic peptide
  Seed: TLPRRSGAAG
TIPRRSGAAG

SEQ ID NO: 16186 - protein, 10 aa, Artificial Sequence
  Description of Artificial Sequence: Synthetic peptide
  Seed: TLPRRSGAAG
TGPRRSGAAS

SEQ ID NO: 16187 - protein, 10 aa, Artificial Sequence
  Description of Artificial Sequence: Synthetic peptide
  Seed: TLPRRSGAAG
TGPRRSGAAP

SEQ ID NO: 16188 - protein, 10 aa, Artificial Sequence
  Description of Artificial Sequence: Synthetic peptide
  Seed: TLPRRSGAAG
TGPRRSGAAF

SEQ ID NO: 16189 - protein, 10 aa, Artificial Sequence
  Description of Artificial Sequence: Synthetic peptide
  Seed: TLPRRSGAAG
TGPRRSGAAM

SEQ ID NO: 16190 - protein, 10 aa, Artificial Sequence
  Description of Artificial Sequence: Synthetic peptide
  Seed: TLPRRSGAAG
TQPRRSGAAV

SEQ ID NO: 16191 - protein, 10 aa, Artificial Sequence
  Description of Artificial Sequence: Synthetic peptide
  Seed: TLPRRSGAAG
TEPRRSGAAA

SEQ ID NO: 16192 - protein, 10 aa, Artificial Sequence
  Description of Artificial Sequence: Synthetic peptide
  Seed: TLPRRSGAAG
TEPRRSGAAC

SEQ ID NO: 16193 - protein, 10 aa, Artificial Sequence
  Description of Artificial Sequence: Synthetic peptide
  Seed: TLPRRSGAAG
TEPRRSGAAG

SEQ ID NO: 16194 - protein, 10 aa, Artificial Sequence
  Description of Artificial Sequence: Synthetic peptide
  Seed: TLPRRSGAAG
TEPRRSGAAI

SEQ ID NO: 16195 - protein, 10 aa, Artificial Sequence
  Description of Artificial Sequence: Synthetic peptide
  Seed: TLPRRSGAAG
TEPRRSGAAL

SEQ ID NO: 16196 - protein, 10 aa, Artificial Sequence
  Description of Artificial Sequence: Synthetic peptide
  Seed: TLPRRSGAAG
TEPRRSGAAM

SEQ ID NO: 16197 - protein, 10 aa, Artificial Sequence
  Description of Artificial Sequence: Synthetic peptide
  Seed: TLPRRSGAAG
TEPRRSGAAF

SEQ ID NO: 16198 - protein, 10 aa, Artificial Sequence
  Description of Artificial Sequence: Synthetic peptide
  Seed: TLPRRSGAAG
TEPRRSGAAP

SEQ ID NO: 16199 - protein, 10 aa, Artificial Sequence
  Description of Artificial Sequence: Synthetic peptide
  Seed: TLPRRSGAAG
TEPRRSGAAS

SEQ ID NO: 16200 - protein, 10 aa, Artificial Sequence
  Description of Artificial Sequence: Synthetic peptide
  Seed: TLPRRSGAAG
TEPRRSGAAT

SEQ ID NO: 16201 - protein, 10 aa, Artificial Sequence
  Description of Artificial Sequence: Synthetic peptide
  Seed: TLPRRSGAAG
TEPRRSGAAW

SEQ ID NO: 16202 - protein, 10 aa, Artificial Sequence
  Description of Artificial Sequence: Synthetic peptide
  Seed: TLPRRSGAAG
TEPRRSGAAY

SEQ ID NO: 16203 - protein, 10 aa, Artificial Sequence
  Description of Artificial Sequence: Synthetic peptide
  Seed: TLPRRSGAAG
TEPRRSGAAV

SEQ ID NO: 16204 - protein, 10 aa, Artificial Sequence
  Description of Artificial Sequence: Synthetic peptide
  Seed: TLPRRSGAAG
TGPRRSGAAA

SEQ ID NO: 16205 - protein, 10 aa, Artificial Sequence
  Description of Artificial Sequence: Synthetic peptide
  Seed: TLPRRSGAAG
TGPRRSGAAC

SEQ ID NO: 16206 - protein, 10 aa, Artificial Sequence
  Description of Artificial Sequence: Synthetic peptide
  Seed: TLPRRSGAAG
TGPRRSGAAG

SEQ ID NO: 16207 - protein, 10 aa, Artificial Sequence
  Description of Artificial Sequence: Synthetic peptide
  Seed: TLPRRSGAAG
TGPRRSGAAI

SEQ ID NO: 16208 - protein, 10 aa, Artificial Sequence
  Description of Artificial Sequence: Synthetic peptide
  Seed: TLPRRSGAAG
TGPRRSGAAL

SEQ ID NO: 16209 - protein, 10 aa, Artificial Sequence
  Description of Artificial Sequence: Synthetic peptide
  Seed: TLPRRSGAAG
TIPRRSGAAI

SEQ ID NO: 16210 - protein, 10 aa, Artificial Sequence
  Description of Artificial Sequence: Synthetic peptide
  Seed: TLPRRSGAAG
TIPRRSGAAM

SEQ ID NO: 16211 - protein, 10 aa, Artificial Sequence
  Description of Artificial Sequence: Synthetic peptide
  Seed: TLPRRSGAAG
TQPRRSGAAW

SEQ ID NO: 16212 - protein, 10 aa, Artificial Sequence
  Description of Artificial Sequence: Synthetic peptide
  Seed: TLPRRSGAAG
TMPRRSGAAC

SEQ ID NO: 16213 - protein, 10 aa, Artificial Sequence
  Description of Artificial Sequence: Synthetic peptide
  Seed: TLPRRSGAAG
TKPRRSGAAM

SEQ ID NO: 16214 - protein, 10 aa, Artificial Sequence
  Description of Artificial Sequence: Synthetic peptide
  Seed: TLPRRSGAAG
TKPRRSGAAF

SEQ ID NO: 16215 - protein, 10 aa, Artificial Sequence
  Description of Artificial Sequence: Synthetic peptide
  Seed: TLPRRSGAAG
TKPRRSGAAP

SEQ ID NO: 16216 - protein, 10 aa, Artificial Sequence
  Description of Artificial Sequence: Synthetic peptide
  Seed: TLPRRSGAAG
TKPRRSGAAS

SEQ ID NO: 16217 - protein, 10 aa, Artificial Sequence
  Description of Artificial Sequence: Synthetic peptide
  Seed: TLPRRSGAAG
TKPRRSGAAT

SEQ ID NO: 16218 - protein, 10 aa, Artificial Sequence
  Description of Artificial Sequence: Synthetic peptide
  Seed: TLPRRSGAAG
TKPRRSGAAW

SEQ ID NO: 16219 - protein, 10 aa, Artificial Sequence
  Description of Artificial Sequence: Synthetic peptide
  Seed: TLPRRSGAAG
TKPRRSGAAY

SEQ ID NO: 16220 - protein, 10 aa, Artificial Sequence
  Description of Artificial Sequence: Synthetic peptide
  Seed: TLPRRSGAAG
TKPRRSGAAV

SEQ ID NO: 16221 - protein, 10 aa, Artificial Sequence
  Description of Artificial Sequence: Synthetic peptide
  Seed: TLPRRSGAAG
TMPRRSGAAA

SEQ ID NO: 16222 - protein, 10 aa, Artificial Sequence
  Description of Artificial Sequence: Synthetic peptide
  Seed: TLPRRSGAAG
TMPRRSGAAG

SEQ ID NO: 16223 - protein, 10 aa, Artificial Sequence
  Description of Artificial Sequence: Synthetic peptide
  Seed: TLPRRSGAAG
TIPRRSGAAF

SEQ ID NO: 16224 - protein, 10 aa, Artificial Sequence
  Description of Artificial Sequence: Synthetic peptide
  Seed: TLPRRSGAAG
TMPRRSGAAH

SEQ ID NO: 16225 - protein, 10 aa, Artificial Sequence
  Description of Artificial Sequence: Synthetic peptide
  Seed: TLPRRSGAAG
TMPRRSGAAI

SEQ ID NO: 16226 - protein, 10 aa, Artificial Sequence
  Description of Artificial Sequence: Synthetic peptide
  Seed: TLPRRSGAAG
TMPRRSGAAL

SEQ ID NO: 16227 - protein, 10 aa, Artificial Sequence
  Description of Artificial Sequence: Synthetic peptide
  Seed: TLPRRSGAAG
TMPRRSGAAM

SEQ ID NO: 16228 - protein, 10 aa, Artificial Sequence
  Description of Artificial Sequence: Synthetic peptide
  Seed: TLPRRSGAAG
TMPRRSGAAF

SEQ ID NO: 16229 - protein, 10 aa, Artificial Sequence
  Description of Artificial Sequence: Synthetic peptide
  Seed: TLPRRSGAAG
TMPRRSGAAP

SEQ ID NO: 16230 - protein, 10 aa, Artificial Sequence
  Description of Artificial Sequence: Synthetic peptide
  Seed: TLPRRSGAAG
TMPRRSGAAS

SEQ ID NO: 16231 - protein, 10 aa, Artificial Sequence
  Description of Artificial Sequence: Synthetic peptide
  Seed: TLPRRSGAAG
TMPRRSGAAT

SEQ ID NO: 16232 - protein, 10 aa, Artificial Sequence
  Description of Artificial Sequence: Synthetic peptide
  Seed: TLPRRSGAAG
TMPRRSGAAW

SEQ ID NO: 16233 - protein, 10 aa, Artificial Sequence
  Description of Artificial Sequence: Synthetic peptide
  Seed: TLPRRSGAAG
TKPRRSGAAL

SEQ ID NO: 16234 - protein, 10 aa, Artificial Sequence
  Description of Artificial Sequence: Synthetic peptide
  Seed: TLPRRSGAAG
TKPRRSGAAI

SEQ ID NO: 16235 - protein, 10 aa, Artificial Sequence
  Description of Artificial Sequence: Synthetic peptide
  Seed: TLPRRSGAAG
TKPRRSGAAG

SEQ ID NO: 16236 - protein, 10 aa, Artificial Sequence
  Description of Artificial Sequence: Synthetic peptide
  Seed: TLPRRSGAAG
TKPRRSGAAC

SEQ ID NO: 16237 - protein, 10 aa, Artificial Sequence
  Description of Artificial Sequence: Synthetic peptide
  Seed: TLPRRSGAAG
TIPRRSGAAP

SEQ ID NO: 16238 - protein, 10 aa, Artificial Sequence
  Description of Artificial Sequence: Synthetic peptide
  Seed: TLPRRSGAAG
TIPRRSGAAS

SEQ ID NO: 16239 - protein, 10 aa, Artificial Sequence
  Description of Artificial Sequence: Synthetic peptide
  Seed: TLPRRSGAAG
TIPRRSGAAT

SEQ ID NO: 16240 - protein, 10 aa, Artificial Sequence
  Description of Artificial Sequence: Synthetic peptide
  Seed: TLPRRSGAAG
TIPRRSGAAW

SEQ ID NO: 16241 - protein, 10 aa, Artificial Sequence
  Description of Artificial Sequence: Synthetic peptide
  Seed: TLPRRSGAAG
TIPRRSGAAY

SEQ ID NO: 16242 - protein, 10 aa, Artificial Sequence
  Description of Artificial Sequence: Synthetic peptide
  Seed: TLPRRSGAAG
TIPRRSGAAV

SEQ ID NO: 16243 - protein, 10 aa, Artificial Sequence
  Description of Artificial Sequence: Synthetic peptide
  Seed: TLPRRSGAAG
TLPRRSGAAA

SEQ ID NO: 16244 - protein, 10 aa, Artificial Sequence
  Description of Artificial Sequence: Synthetic peptide
  Seed: TLPRRSGAAG
TLPRRSGAAC

SEQ ID NO: 16245 - protein, 10 aa, Artificial Sequence
  Description of Artificial Sequence: Synthetic peptide
  Seed: TLPRRSGAAG
TLPRRSGAAI

SEQ ID NO: 16246 - protein, 10 aa, Artificial Sequence
  Description of Artificial Sequence: Synthetic peptide
  Seed: TLPRRSGAAG
TLPRRSGAAL

SEQ ID NO: 16247 - protein, 10 aa, Artificial Sequence
  Description of Artificial Sequence: Synthetic peptide
  Seed: TLPRRSGAAG
TLPRRSGAAM

SEQ ID NO: 16248 - protein, 10 aa, Artificial Sequence
  Description of Artificial Sequence: Synthetic peptide
  Seed: TLPRRSGAAG
TLPRRSGAAF

SEQ ID NO: 16249 - protein, 10 aa, Artificial Sequence
  Description of Artificial Sequence: Synthetic peptide
  Seed: TLPRRSGAAG
TLPRRSGAAP

SEQ ID NO: 16250 - protein, 10 aa, Artificial Sequence
  Description of Artificial Sequence: Synthetic peptide
  Seed: TLPRRSGAAG
TLPRRSGAAS

SEQ ID NO: 16251 - protein, 10 aa, Artificial Sequence
  Description of Artificial Sequence: Synthetic peptide
  Seed: TLPRRSGAAG
TLPRRSGAAT

SEQ ID NO: 16252 - protein, 10 aa, Artificial Sequence
  Description of Artificial Sequence: Synthetic peptide
  Seed: TLPRRSGAAG
TLPRRSGAAW

SEQ ID NO: 16253 - protein, 10 aa, Artificial Sequence
  Description of Artificial Sequence: Synthetic peptide
  Seed: TLPRRSGAAG
TLPRRSGAAY

SEQ ID NO: 16254 - protein, 10 aa, Artificial Sequence
  Description of Artificial Sequence: Synthetic peptide
  Seed: TLPRRSGAAG
TLPRRSGAAV

SEQ ID NO: 16255 - protein, 10 aa, Artificial Sequence
  Description of Artificial Sequence: Synthetic peptide
  Seed: TLPRRSGAAG
TKPRRSGAAA

SEQ ID NO: 16256 - protein, 10 aa, Artificial Sequence
  Description of Artificial Sequence: Synthetic peptide
  Seed: TLPRRSGAAG
TQPRRSGAAY

SEQ ID NO: 16257 - protein, 10 aa, Artificial Sequence
  Description of Artificial Sequence: Synthetic peptide
  Seed: TLPRRSGAAG
TQPRRSGAAT

SEQ ID NO: 16258 - protein, 9 aa, Artificial Sequence
  Description of Artificial Sequence: Synthetic peptide
  Seed: TMESSTLEL
TAESSTLEY

SEQ ID NO: 16259 - protein, 10 aa, Artificial Sequence
  Description of Artificial Sequence: Synthetic peptide
  Seed: TLPRRSGAAG
TRPRRSGAAH

SEQ ID NO: 16260 - protein, 10 aa, Artificial Sequence
  Description of Artificial Sequence: Synthetic peptide
  Seed: TLPRRSGAAG
TAPRRSGAAP

SEQ ID NO: 16261 - protein, 10 aa, Artificial Sequence
  Description of Artificial Sequence: Synthetic peptide
  Seed: TLPRRSGAAG
TAPRRSGAAS

SEQ ID NO: 16262 - protein, 10 aa, Artificial Sequence
  Description of Artificial Sequence: Synthetic peptide
  Seed: TLPRRSGAAG
TAPRRSGAAT

SEQ ID NO: 16263 - protein, 10 aa, Artificial Sequence
  Description of Artificial Sequence: Synthetic peptide
  Seed: TLPRRSGAAG
TAPRRSGAAW

SEQ ID NO: 16264 - protein, 10 aa, Artificial Sequence
  Description of Artificial Sequence: Synthetic peptide
  Seed: TLPRRSGAAG
TAPRRSGAAY

SEQ ID NO: 16265 - protein, 10 aa, Artificial Sequence
  Description of Artificial Sequence: Synthetic peptide
  Seed: TLPRRSGAAG
TAPRRSGAAV

SEQ ID NO: 16266 - protein, 10 aa, Artificial Sequence
  Description of Artificial Sequence: Synthetic peptide
  Seed: TLPRRSGAAG
TRPRRSGAAA

SEQ ID NO: 16267 - protein, 10 aa, Artificial Sequence
  Description of Artificial Sequence: Synthetic peptide
  Seed: TLPRRSGAAG
TRPRRSGAAC

SEQ ID NO: 16268 - protein, 10 aa, Artificial Sequence
  Description of Artificial Sequence: Synthetic peptide
  Seed: TLPRRSGAAG
TRPRRSGAAG

SEQ ID NO: 16269 - protein, 10 aa, Artificial Sequence
  Description of Artificial Sequence: Synthetic peptide
  Seed: TLPRRSGAAG
TRPRRSGAAI

SEQ ID NO: 16270 - protein, 10 aa, Artificial Sequence
  Description of Artificial Sequence: Synthetic peptide
  Seed: TLPRRSGAAG
TNPRRSGAAC

SEQ ID NO: 16271 - protein, 10 aa, Artificial Sequence
  Description of Artificial Sequence: Synthetic peptide
  Seed: TLPRRSGAAG
TRPRRSGAAL

SEQ ID NO: 16272 - protein, 10 aa, Artificial Sequence
  Description of Artificial Sequence: Synthetic peptide
  Seed: TLPRRSGAAG
TRPRRSGAAM

SEQ ID NO: 16273 - protein, 10 aa, Artificial Sequence
  Description of Artificial Sequence: Synthetic peptide
  Seed: TLPRRSGAAG
TRPRRSGAAF

SEQ ID NO: 16274 - protein, 10 aa, Artificial Sequence
  Description of Artificial Sequence: Synthetic peptide
  Seed: TLPRRSGAAG
TRPRRSGAAP

SEQ ID NO: 16275 - protein, 10 aa, Artificial Sequence
  Description of Artificial Sequence: Synthetic peptide
  Seed: TLPRRSGAAG
TRPRRSGAAS

SEQ ID NO: 16276 - protein, 10 aa, Artificial Sequence
  Description of Artificial Sequence: Synthetic peptide
  Seed: TLPRRSGAAG
TRPRRSGAAT

SEQ ID NO: 16277 - protein, 10 aa, Artificial Sequence
  Description of Artificial Sequence: Synthetic peptide
  Seed: TLPRRSGAAG
TRPRRSGAAW

SEQ ID NO: 16278 - protein, 10 aa, Artificial Sequence
  Description of Artificial Sequence: Synthetic peptide
  Seed: TLPRRSGAAG
TRPRRSGAAY

SEQ ID NO: 16279 - protein, 10 aa, Artificial Sequence
  Description of Artificial Sequence: Synthetic peptide
  Seed: TLPRRSGAAG
TRPRRSGAAV

SEQ ID NO: 16280 - protein, 10 aa, Artificial Sequence
  Description of Artificial Sequence: Synthetic peptide
  Seed: TLPRRSGAAG
TAPRRSGAAF

SEQ ID NO: 16281 - protein, 10 aa, Artificial Sequence
  Description of Artificial Sequence: Synthetic peptide
  Seed: TLPRRSGAAG
TAPRRSGAAM

SEQ ID NO: 16282 - protein, 10 aa, Artificial Sequence
  Description of Artificial Sequence: Synthetic peptide
  Seed: TLPRRSGAAG
TAPRRSGAAL

SEQ ID NO: 16283 - protein, 10 aa, Artificial Sequence
  Description of Artificial Sequence: Synthetic peptide
  Seed: TLPRRSGAAG
TAPRRSGAAI

SEQ ID NO: 16284 - protein, 11 aa, Artificial Sequence
  Description of Artificial Sequence: Synthetic peptide
  Seed: TLELRSRYWAI
TWELRSRYWAL

SEQ ID NO: 16285 - protein, 11 aa, Artificial Sequence
  Description of Artificial Sequence: Synthetic peptide
  Seed: TLELRSRYWAI
TWELRSRYWAM

SEQ ID NO: 16286 - protein, 11 aa, Artificial Sequence
  Description of Artificial Sequence: Synthetic peptide
  Seed: TLELRSRYWAI
TWELRSRYWAF

SEQ ID NO: 16287 - protein, 11 aa, Artificial Sequence
  Description of Artificial Sequence: Synthetic peptide
  Seed: TLELRSRYWAI
TWELRSRYWAV

SEQ ID NO: 16288 - protein, 11 aa, Artificial Sequence
  Description of Artificial Sequence: Synthetic peptide
  Seed: TLELRSRYWAI
TYELRSRYWAA

SEQ ID NO: 16289 - protein, 11 aa, Artificial Sequence
  Description of Artificial Sequence: Synthetic peptide
  Seed: TLELRSRYWAI
TYELRSRYWAI

SEQ ID NO: 16290 - protein, 11 aa, Artificial Sequence
  Description of Artificial Sequence: Synthetic peptide
  Seed: TLELRSRYWAI
TYELRSRYWAL

SEQ ID NO: 16291 - protein, 11 aa, Artificial Sequence
  Description of Artificial Sequence: Synthetic peptide
  Seed: TLELRSRYWAI
TYELRSRYWAM

SEQ ID NO: 16292 - protein, 11 aa, Artificial Sequence
  Description of Artificial Sequence: Synthetic peptide
  Seed: TLELRSRYWAI
TYELRSRYWAF

SEQ ID NO: 16293 - protein, 11 aa, Artificial Sequence
  Description of Artificial Sequence: Synthetic peptide
  Seed: TLELRSRYWAI
TYELRSRYWAV

SEQ ID NO: 16294 - protein, 11 aa, Artificial Sequence
  Description of Artificial Sequence: Synthetic peptide
  Seed: TLELRSRYWAI
TVELRSRYWAA

SEQ ID NO: 16295 - protein, 11 aa, Artificial Sequence
  Description of Artificial Sequence: Synthetic peptide
  Seed: TLELRSRYWAI
TVELRSRYWAI

SEQ ID NO: 16296 - protein, 11 aa, Artificial Sequence
  Description of Artificial Sequence: Synthetic peptide
  Seed: TLELRSRYWAI
TVELRSRYWAL

SEQ ID NO: 16297 - protein, 11 aa, Artificial Sequence
  Description of Artificial Sequence: Synthetic peptide
  Seed: TLELRSRYWAI
TVELRSRYWAM

SEQ ID NO: 16298 - protein, 11 aa, Artificial Sequence
  Description of Artificial Sequence: Synthetic peptide
  Seed: TLELRSRYWAI
TVELRSRYWAF

SEQ ID NO: 16299 - protein, 11 aa, Artificial Sequence
  Description of Artificial Sequence: Synthetic peptide
  Seed: TLELRSRYWAI
TVELRSRYWAV

SEQ ID NO: 16300 - protein, 10 aa, Artificial Sequence
  Description of Artificial Sequence: Synthetic peptide
  Seed: TLPRRSGAAG
TAPRRSGAAA

SEQ ID NO: 16301 - protein, 10 aa, Artificial Sequence
  Description of Artificial Sequence: Synthetic peptide
  Seed: TLPRRSGAAG
TAPRRSGAAC

SEQ ID NO: 16302 - protein, 10 aa, Artificial Sequence
  Description of Artificial Sequence: Synthetic peptide
  Seed: TLPRRSGAAG
TAPRRSGAAG

SEQ ID NO: 16303 - protein, 10 aa, Artificial Sequence
  Description of Artificial Sequence: Synthetic peptide
  Seed: TLPRRSGAAG
TNPRRSGAAA

SEQ ID NO: 16304 - protein, 10 aa, Artificial Sequence
  Description of Artificial Sequence: Synthetic peptide
  Seed: TLPRRSGAAG
TNPRRSGAAG

SEQ ID NO: 16305 - protein, 10 aa, Artificial Sequence
  Description of Artificial Sequence: Synthetic peptide
  Seed: TLPRRSGAAG
TQPRRSGAAS

SEQ ID NO: 16306 - protein, 10 aa, Artificial Sequence
  Description of Artificial Sequence: Synthetic peptide
  Seed: TLPRRSGAAG
TCPRRSGAAW

SEQ ID NO: 16307 - protein, 10 aa, Artificial Sequence
  Description of Artificial Sequence: Synthetic peptide
  Seed: TLPRRSGAAG
TCPRRSGAAC

SEQ ID NO: 16308 - protein, 10 aa, Artificial Sequence
  Description of Artificial Sequence: Synthetic peptide
  Seed: TLPRRSGAAG
TCPRRSGAAG

SEQ ID NO: 16309 - protein, 10 aa, Artificial Sequence
  Description of Artificial Sequence: Synthetic peptide
  Seed: TLPRRSGAAG
TCPRRSGAAI

SEQ ID NO: 16310 - protein, 10 aa, Artificial Sequence
  Description of Artificial Sequence: Synthetic peptide
  Seed: TLPRRSGAAG
TCPRRSGAAL

SEQ ID NO: 16311 - protein, 10 aa, Artificial Sequence
  Description of Artificial Sequence: Synthetic peptide
  Seed: TLPRRSGAAG
TCPRRSGAAM

SEQ ID NO: 16312 - protein, 10 aa, Artificial Sequence
  Description of Artificial Sequence: Synthetic peptide
  Seed: TLPRRSGAAG
TCPRRSGAAF

SEQ ID NO: 16313 - protein, 10 aa, Artificial Sequence
  Description of Artificial Sequence: Synthetic peptide
  Seed: TLPRRSGAAG
TCPRRSGAAP

SEQ ID NO: 16314 - protein, 10 aa, Artificial Sequence
  Description of Artificial Sequence: Synthetic peptide
  Seed: TLPRRSGAAG
TCPRRSGAAS

SEQ ID NO: 16315 - protein, 10 aa, Artificial Sequence
  Description of Artificial Sequence: Synthetic peptide
  Seed: TLPRRSGAAG
TCPRRSGAAT

SEQ ID NO: 16316 - protein, 10 aa, Artificial Sequence
  Description of Artificial Sequence: Synthetic peptide
  Seed: TLPRRSGAAG
TCPRRSGAAY

SEQ ID NO: 16317 - protein, 10 aa, Artificial Sequence
  Description of Artificial Sequence: Synthetic peptide
  Seed: TLPRRSGAAG
TNPRRSGAAI

SEQ ID NO: 16318 - protein, 10 aa, Artificial Sequence
  Description of Artificial Sequence: Synthetic peptide
  Seed: TLPRRSGAAG
TCPRRSGAAV

SEQ ID NO: 16319 - protein, 10 aa, Artificial Sequence
  Description of Artificial Sequence: Synthetic peptide
  Seed: TLPRRSGAAG
TQPRRSGAAA

SEQ ID NO: 16320 - protein, 10 aa, Artificial Sequence
  Description of Artificial Sequence: Synthetic peptide
  Seed: TLPRRSGAAG
TQPRRSGAAC

SEQ ID NO: 16321 - protein, 10 aa, Artificial Sequence
  Description of Artificial Sequence: Synthetic peptide
  Seed: TLPRRSGAAG
TQPRRSGAAG

SEQ ID NO: 16322 - protein, 10 aa, Artificial Sequence
  Description of Artificial Sequence: Synthetic peptide
  Seed: TLPRRSGAAG
TQPRRSGAAI

SEQ ID NO: 16323 - protein, 10 aa, Artificial Sequence
  Description of Artificial Sequence: Synthetic peptide
  Seed: TLPRRSGAAG
TQPRRSGAAL

SEQ ID NO: 16324 - protein, 10 aa, Artificial Sequence
  Description of Artificial Sequence: Synthetic peptide
  Seed: TLPRRSGAAG
TQPRRSGAAM

SEQ ID NO: 16325 - protein, 10 aa, Artificial Sequence
  Description of Artificial Sequence: Synthetic peptide
  Seed: TLPRRSGAAG
TQPRRSGAAF

SEQ ID NO: 16326 - protein, 10 aa, Artificial Sequence
  Description of Artificial Sequence: Synthetic peptide
  Seed: TLPRRSGAAG
TQPRRSGAAP

SEQ ID NO: 16327 - protein, 10 aa, Artificial Sequence
  Description of Artificial Sequence: Synthetic peptide
  Seed: TLPRRSGAAG
TCPRRSGAAA

SEQ ID NO: 16328 - protein, 10 aa, Artificial Sequence
  Description of Artificial Sequence: Synthetic peptide
  Seed: TLPRRSGAAG
TDPRRSGAAV

SEQ ID NO: 16329 - protein, 10 aa, Artificial Sequence
  Description of Artificial Sequence: Synthetic peptide
  Seed: TLPRRSGAAG
TDPRRSGAAY

SEQ ID NO: 16330 - protein, 10 aa, Artificial Sequence
  Description of Artificial Sequence: Synthetic peptide
  Seed: TLPRRSGAAG
TDPRRSGAAW

SEQ ID NO: 16331 - protein, 10 aa, Artificial Sequence
  Description of Artificial Sequence: Synthetic peptide
  Seed: TLPRRSGAAG
TNPRRSGAAL

SEQ ID NO: 16332 - protein, 10 aa, Artificial Sequence
  Description of Artificial Sequence: Synthetic peptide
  Seed: TLPRRSGAAG
TNPRRSGAAM

SEQ ID NO: 16333 - protein, 10 aa, Artificial Sequence
  Description of Artificial Sequence: Synthetic peptide
  Seed: TLPRRSGAAG
TNPRRSGAAF

SEQ ID NO: 16334 - protein, 10 aa, Artificial Sequence
  Description of Artificial Sequence: Synthetic peptide
  Seed: TLPRRSGAAG
TNPRRSGAAP

SEQ ID NO: 16335 - protein, 10 aa, Artificial Sequence
  Description of Artificial Sequence: Synthetic peptide
  Seed: TLPRRSGAAG
TNPRRSGAAS

SEQ ID NO: 16336 - protein, 10 aa, Artificial Sequence
  Description of Artificial Sequence: Synthetic peptide
  Seed: TLPRRSGAAG
TNPRRSGAAT

SEQ ID NO: 16337 - protein, 10 aa, Artificial Sequence
  Description of Artificial Sequence: Synthetic peptide
  Seed: TLPRRSGAAG
TNPRRSGAAW

SEQ ID NO: 16338 - protein, 10 aa, Artificial Sequence
  Description of Artificial Sequence: Synthetic peptide
  Seed: TLPRRSGAAG
TNPRRSGAAY

SEQ ID NO: 16339 - protein, 10 aa, Artificial Sequence
  Description of Artificial Sequence: Synthetic peptide
  Seed: TLPRRSGAAG
TNPRRSGAAV

SEQ ID NO: 16340 - protein, 10 aa, Artificial Sequence
  Description of Artificial Sequence: Synthetic peptide
  Seed: TLPRRSGAAG
TDPRRSGAAA

SEQ ID NO: 16341 - protein, 10 aa, Artificial Sequence
  Description of Artificial Sequence: Synthetic peptide
  Seed: TLPRRSGAAG
TDPRRSGAAC

SEQ ID NO: 16342 - protein, 10 aa, Artificial Sequence
  Description of Artificial Sequence: Synthetic peptide
  Seed: TLPRRSGAAG
TDPRRSGAAG

SEQ ID NO: 16343 - protein, 10 aa, Artificial Sequence
  Description of Artificial Sequence: Synthetic peptide
  Seed: TLPRRSGAAG
TDPRRSGAAI

SEQ ID NO: 16344 - protein, 10 aa, Artificial Sequence
  Description of Artificial Sequence: Synthetic peptide
  Seed: TLPRRSGAAG
TDPRRSGAAL

SEQ ID NO: 16345 - protein, 10 aa, Artificial Sequence
  Description of Artificial Sequence: Synthetic peptide
  Seed: TLPRRSGAAG
TDPRRSGAAM

SEQ ID NO: 16346 - protein, 10 aa, Artificial Sequence
  Description of Artificial Sequence: Synthetic peptide
  Seed: TLPRRSGAAG
TDPRRSGAAF

SEQ ID NO: 16347 - protein, 10 aa, Artificial Sequence
  Description of Artificial Sequence: Synthetic peptide
  Seed: TLPRRSGAAG
TDPRRSGAAP

SEQ ID NO: 16348 - protein, 10 aa, Artificial Sequence
  Description of Artificial Sequence: Synthetic peptide
  Seed: TLPRRSGAAG
TDPRRSGAAS

SEQ ID NO: 16349 - protein, 10 aa, Artificial Sequence
  Description of Artificial Sequence: Synthetic peptide
  Seed: TLPRRSGAAG
TDPRRSGAAT

SEQ ID NO: 16350 - protein, 10 aa, Artificial Sequence
  Description of Artificial Sequence: Synthetic peptide
  Seed: TLPRRSGAAG
TMPRRSGAAY

SEQ ID NO: 16351 - protein, 10 aa, Artificial Sequence
  Description of Artificial Sequence: Synthetic peptide
  Seed: TLPRRSGAAG
TMPRRSGAAV

SEQ ID NO: 16352 - protein, 10 aa, Artificial Sequence
  Description of Artificial Sequence: Synthetic peptide
  Seed: TLPRRSGAAG
TFPRRSGAAA

SEQ ID NO: 16353 - protein, 9 aa, Artificial Sequence
  Description of Artificial Sequence: Synthetic peptide
  Seed: TMDSSTLEL
TLDSSTLEC

SEQ ID NO: 16354 - protein, 9 aa, Artificial Sequence
  Description of Artificial Sequence: Synthetic peptide
  Seed: TMDSSTLEL
TGDSSTLEM

SEQ ID NO: 16355 - protein, 9 aa, Artificial Sequence
  Description of Artificial Sequence: Synthetic peptide
  Seed: TMDSSTLEL
TGDSSTLEF

SEQ ID NO: 16356 - protein, 9 aa, Artificial Sequence
  Description of Artificial Sequence: Synthetic peptide
  Seed: TMDSSTLEL
TGDSSTLEV

SEQ ID NO: 16357 - protein, 9 aa, Artificial Sequence
  Description of Artificial Sequence: Synthetic peptide
  Seed: TMDSSTLEL
TIDSSTLEI

SEQ ID NO: 16358 - protein, 9 aa, Artificial Sequence
  Description of Artificial Sequence: Synthetic peptide
  Seed: TMDSSTLEL
TIDSSTLEM

SEQ ID NO: 16359 - protein, 9 aa, Artificial Sequence
  Description of Artificial Sequence: Synthetic peptide
  Seed: TMDSSTLEL
TIDSSTLEF

SEQ ID NO: 16360 - protein, 9 aa, Artificial Sequence
  Description of Artificial Sequence: Synthetic peptide
  Seed: TMDSSTLEL
TIDSSTLEV

SEQ ID NO: 16361 - protein, 9 aa, Artificial Sequence
  Description of Artificial Sequence: Synthetic peptide
  Seed: TMDSSTLEL
TLDSSTLEA

SEQ ID NO: 16362 - protein, 9 aa, Artificial Sequence
  Description of Artificial Sequence: Synthetic peptide
  Seed: TMDSSTLEL
TLDSSTLEI

SEQ ID NO: 16363 - protein, 9 aa, Artificial Sequence
  Description of Artificial Sequence: Synthetic peptide
  Seed: TMDSSTLEL
TFDSSTLEI

SEQ ID NO: 16364 - protein, 9 aa, Artificial Sequence
  Description of Artificial Sequence: Synthetic peptide
  Seed: TMDSSTLEL
TLDSSTLEL

SEQ ID NO: 16365 - protein, 9 aa, Artificial Sequence
  Description of Artificial Sequence: Synthetic peptide
  Seed: TMDSSTLEL
TLDSSTLEM

SEQ ID NO: 16366 - protein, 9 aa, Artificial Sequence
  Description of Artificial Sequence: Synthetic peptide
  Seed: TMDSSTLEL
TLDSSTLEF

SEQ ID NO: 16367 - protein, 9 aa, Artificial Sequence
  Description of Artificial Sequence: Synthetic peptide
  Seed: TMDSSTLEL
TLDSSTLEV

SEQ ID NO: 16368 - protein, 9 aa, Artificial Sequence
  Description of Artificial Sequence: Synthetic peptide
  Seed: TMDSSTLEL
TMDSSTLEA

SEQ ID NO: 16369 - protein, 9 aa, Artificial Sequence
  Description of Artificial Sequence: Synthetic peptide
  Seed: TMDSSTLEL
TMDSSTLEC

SEQ ID NO: 16370 - protein, 9 aa, Artificial Sequence
  Description of Artificial Sequence: Synthetic peptide
  Seed: TMDSSTLEL
TMDSSTLEI

SEQ ID NO: 16371 - protein, 9 aa, Artificial Sequence
  Description of Artificial Sequence: Synthetic peptide
  Seed: TMDSSTLEL
TMDSSTLEM

SEQ ID NO: 16372 - protein, 9 aa, Artificial Sequence
  Description of Artificial Sequence: Synthetic peptide
  Seed: TMDSSTLEL
TMDSSTLEF

SEQ ID NO: 16373 - protein, 9 aa, Artificial Sequence
  Description of Artificial Sequence: Synthetic peptide
  Seed: TMDSSTLEL
TGDSSTLEL

SEQ ID NO: 16374 - protein, 9 aa, Artificial Sequence
  Description of Artificial Sequence: Synthetic peptide
  Seed: TMDSSTLEL
TGDSSTLEI

SEQ ID NO: 16375 - protein, 9 aa, Artificial Sequence
  Description of Artificial Sequence: Synthetic peptide
  Seed: TMDSSTLEL
TQDSSTLEV

SEQ ID NO: 16376 - protein, 9 aa, Artificial Sequence
  Description of Artificial Sequence: Synthetic peptide
  Seed: TMDSSTLEL
TQDSSTLEF

SEQ ID NO: 16377 - protein, 9 aa, Artificial Sequence
  Description of Artificial Sequence: Synthetic peptide
  Seed: TMDSSTLEL
TADSSTLEI

SEQ ID NO: 16378 - protein, 9 aa, Artificial Sequence
  Description of Artificial Sequence: Synthetic peptide
  Seed: TMDSSTLEL
TADSSTLEL

SEQ ID NO: 16379 - protein, 9 aa, Artificial Sequence
  Description of Artificial Sequence: Synthetic peptide
  Seed: TMDSSTLEL
TADSSTLEM

SEQ ID NO: 16380 - protein, 9 aa, Artificial Sequence
  Description of Artificial Sequence: Synthetic peptide
  Seed: TMDSSTLEL
TADSSTLEF

SEQ ID NO: 16381 - protein, 9 aa, Artificial Sequence
  Description of Artificial Sequence: Synthetic peptide
  Seed: TMDSSTLEL
TADSSTLEW

SEQ ID NO: 16382 - protein, 9 aa, Artificial Sequence
  Description of Artificial Sequence: Synthetic peptide
  Seed: TMDSSTLEL
TADSSTLEY

SEQ ID NO: 16383 - protein, 9 aa, Artificial Sequence
  Description of Artificial Sequence: Synthetic peptide
  Seed: TMDSSTLEL
TADSSTLEV

SEQ ID NO: 16384 - protein, 9 aa, Artificial Sequence
  Description of Artificial Sequence: Synthetic peptide
  Seed: TMDSSTLEL
TNDSSTLEI

SEQ ID NO: 16385 - protein, 9 aa, Artificial Sequence
  Description of Artificial Sequence: Synthetic peptide
  Seed: TMDSSTLEL
TNDSSTLEL

SEQ ID NO: 16386 - protein, 9 aa, Artificial Sequence
  Description of Artificial Sequence: Synthetic peptide
  Seed: TMDSSTLEL
TNDSSTLEM

SEQ ID NO: 16387 - protein, 9 aa, Artificial Sequence
  Description of Artificial Sequence: Synthetic peptide
  Seed: TMDSSTLEL
TNDSSTLEF

SEQ ID NO: 16388 - protein, 9 aa, Artificial Sequence
  Description of Artificial Sequence: Synthetic peptide
  Seed: TMDSSTLEL
TCDSSTLEI

SEQ ID NO: 16389 - protein, 9 aa, Artificial Sequence
  Description of Artificial Sequence: Synthetic peptide
  Seed: TMDSSTLEL
TCDSSTLEL

SEQ ID NO: 16390 - protein, 9 aa, Artificial Sequence
  Description of Artificial Sequence: Synthetic peptide
  Seed: TMDSSTLEL
TCDSSTLEM

SEQ ID NO: 16391 - protein, 9 aa, Artificial Sequence
  Description of Artificial Sequence: Synthetic peptide
  Seed: TMDSSTLEL
TCDSSTLEF

SEQ ID NO: 16392 - protein, 9 aa, Artificial Sequence
  Description of Artificial Sequence: Synthetic peptide
  Seed: TMDSSTLEL
TCDSSTLEV

SEQ ID NO: 16393 - protein, 9 aa, Artificial Sequence
  Description of Artificial Sequence: Synthetic peptide
  Seed: TMDSSTLEL
TQDSSTLEI

SEQ ID NO: 16394 - protein, 9 aa, Artificial Sequence
  Description of Artificial Sequence: Synthetic peptide
  Seed: TMDSSTLEL
TQDSSTLEL

SEQ ID NO: 16395 - protein, 9 aa, Artificial Sequence
  Description of Artificial Sequence: Synthetic peptide
  Seed: TMDSSTLEL
TQDSSTLEM

SEQ ID NO: 16396 - protein, 9 aa, Artificial Sequence
  Description of Artificial Sequence: Synthetic peptide
  Seed: TMDSSTLEL
TMDSSTLEV

SEQ ID NO: 16397 - protein, 9 aa, Artificial Sequence
  Description of Artificial Sequence: Synthetic peptide
  Seed: TMDSSTLEL
TFDSSTLEL

SEQ ID NO: 16398 - protein, 10 aa, Artificial Sequence
  Description of Artificial Sequence: Synthetic peptide
  Seed: TLPRRSGAAG
TFPRRSGAAC

SEQ ID NO: 16399 - protein, 10 aa, Artificial Sequence
  Description of Artificial Sequence: Synthetic peptide
  Seed: TMDSSTLELR
TSDSSTLELK

SEQ ID NO: 16400 - protein, 10 aa, Artificial Sequence
  Description of Artificial Sequence: Synthetic peptide
  Seed: TMDSSTLELR
TQDSSTLELK

SEQ ID NO: 16401 - protein, 10 aa, Artificial Sequence
  Description of Artificial Sequence: Synthetic peptide
  Seed: TMDSSTLELR
TIDSSTLELK

SEQ ID NO: 16402 - protein, 10 aa, Artificial Sequence
  Description of Artificial Sequence: Synthetic peptide
  Seed: TMDSSTLELR
TLDSSTLELR

SEQ ID NO: 16403 - protein, 10 aa, Artificial Sequence
  Description of Artificial Sequence: Synthetic peptide
  Seed: TMDSSTLELR
TLDSSTLELK

SEQ ID NO: 16404 - protein, 10 aa, Artificial Sequence
  Description of Artificial Sequence: Synthetic peptide
  Seed: TMDSSTLELR
TMDSSTLELK

SEQ ID NO: 16405 - protein, 10 aa, Artificial Sequence
  Description of Artificial Sequence: Synthetic peptide
  Seed: TMDSSTLELR
TFDSSTLELR

SEQ ID NO: 16406 - protein, 10 aa, Artificial Sequence
  Description of Artificial Sequence: Synthetic peptide
  Seed: TMDSSTLELR
TFDSSTLELK

SEQ ID NO: 16407 - protein, 10 aa, Artificial Sequence
  Description of Artificial Sequence: Synthetic peptide
  Seed: TMDSSTLELR
TSDSSTLELR

SEQ ID NO: 16408 - protein, 10 aa, Artificial Sequence
  Description of Artificial Sequence: Synthetic peptide
  Seed: TMDSSTLELR
TTDSSTLELR

SEQ ID NO: 16409 - protein, 9 aa, Artificial Sequence
  Description of Artificial Sequence: Synthetic peptide
  Seed: TMDSSTLEL
TFDSSTLEM

SEQ ID NO: 16410 - protein, 10 aa, Artificial Sequence
  Description of Artificial Sequence: Synthetic peptide
  Seed: TMDSSTLELR
TTDSSTLELK

SEQ ID NO: 16411 - protein, 10 aa, Artificial Sequence
  Description of Artificial Sequence: Synthetic peptide
  Seed: TMDSSTLELR
TWDSSTLELR

SEQ ID NO: 16412 - protein, 10 aa, Artificial Sequence
  Description of Artificial Sequence: Synthetic peptide
  Seed: TMDSSTLELR
TYDSSTLELR

SEQ ID NO: 16413 - protein, 10 aa, Artificial Sequence
  Description of Artificial Sequence: Synthetic peptide
  Seed: TMDSSTLELR
TYDSSTLELK

SEQ ID NO: 16414 - protein, 10 aa, Artificial Sequence
  Description of Artificial Sequence: Synthetic peptide
  Seed: TMDSSTLELR
TVDSSTLELR

SEQ ID NO: 16415 - protein, 10 aa, Artificial Sequence
  Description of Artificial Sequence: Synthetic peptide
  Seed: TMDSSTLELR
TVDSSTLELK

SEQ ID NO: 16416 - protein, 9 aa, Artificial Sequence
  Description of Artificial Sequence: Synthetic peptide
  Seed: TMESSTLEL
TAESSTLEI

SEQ ID NO: 16417 - protein, 9 aa, Artificial Sequence
  Description of Artificial Sequence: Synthetic peptide
  Seed: TMESSTLEL
TAESSTLEL

SEQ ID NO: 16418 - protein, 9 aa, Artificial Sequence
  Description of Artificial Sequence: Synthetic peptide
  Seed: TMESSTLEL
TAESSTLEM

SEQ ID NO: 16419 - protein, 10 aa, Artificial Sequence
  Description of Artificial Sequence: Synthetic peptide
  Seed: TMDSSTLELR
TQDSSTLELR

SEQ ID NO: 16420 - protein, 10 aa, Artificial Sequence
  Description of Artificial Sequence: Synthetic peptide
  Seed: TMDSSTLELR
TADSSTLELK

SEQ ID NO: 16421 - protein, 10 aa, Artificial Sequence
  Description of Artificial Sequence: Synthetic peptide
  Seed: TMDSSTLELR
TADSSTLELR

SEQ ID NO: 16422 - protein, 9 aa, Artificial Sequence
  Description of Artificial Sequence: Synthetic peptide
  Seed: TMDSSTLEL
TVDSSTLEV

SEQ ID NO: 16423 - protein, 9 aa, Artificial Sequence
  Description of Artificial Sequence: Synthetic peptide
  Seed: TMDSSTLEL
TFDSSTLEF

SEQ ID NO: 16424 - protein, 9 aa, Artificial Sequence
  Description of Artificial Sequence: Synthetic peptide
  Seed: TMDSSTLEL
TFDSSTLEV

SEQ ID NO: 16425 - protein, 9 aa, Artificial Sequence
  Description of Artificial Sequence: Synthetic peptide
  Seed: TMDSSTLEL
TPDSSTLEL

SEQ ID NO: 16426 - protein, 9 aa, Artificial Sequence
  Description of Artificial Sequence: Synthetic peptide
  Seed: TMDSSTLEL
TSDSSTLEI

SEQ ID NO: 16427 - protein, 9 aa, Artificial Sequence
  Description of Artificial Sequence: Synthetic peptide
  Seed: TMDSSTLEL
TSDSSTLEL

SEQ ID NO: 16428 - protein, 9 aa, Artificial Sequence
  Description of Artificial Sequence: Synthetic peptide
  Seed: TMDSSTLEL
TSDSSTLEM

SEQ ID NO: 16429 - protein, 9 aa, Artificial Sequence
  Description of Artificial Sequence: Synthetic peptide
  Seed: TMDSSTLEL
TSDSSTLEF

SEQ ID NO: 16430 - protein, 9 aa, Artificial Sequence
  Description of Artificial Sequence: Synthetic peptide
  Seed: TMDSSTLEL
TSDSSTLEY

SEQ ID NO: 16431 - protein, 9 aa, Artificial Sequence
  Description of Artificial Sequence: Synthetic peptide
  Seed: TMDSSTLEL
TSDSSTLEV

SEQ ID NO: 16432 - protein, 9 aa, Artificial Sequence
  Description of Artificial Sequence: Synthetic peptide
  Seed: TMDSSTLEL
TTDSSTLEI

SEQ ID NO: 16433 - protein, 9 aa, Artificial Sequence
  Description of Artificial Sequence: Synthetic peptide
  Seed: TMDSSTLEL
TTDSSTLEL

SEQ ID NO: 16434 - protein, 9 aa, Artificial Sequence
  Description of Artificial Sequence: Synthetic peptide
  Seed: TMDSSTLEL
TTDSSTLEM

SEQ ID NO: 16435 - protein, 9 aa, Artificial Sequence
  Description of Artificial Sequence: Synthetic peptide
  Seed: TMDSSTLEL
TTDSSTLEF

SEQ ID NO: 16436 - protein, 9 aa, Artificial Sequence
  Description of Artificial Sequence: Synthetic peptide
  Seed: TMDSSTLEL
TTDSSTLEY

SEQ ID NO: 16437 - protein, 9 aa, Artificial Sequence
  Description of Artificial Sequence: Synthetic peptide
  Seed: TMDSSTLEL
TTDSSTLEV

SEQ ID NO: 16438 - protein, 9 aa, Artificial Sequence
  Description of Artificial Sequence: Synthetic peptide
  Seed: TMDSSTLEL
TVDSSTLEI

SEQ ID NO: 16439 - protein, 9 aa, Artificial Sequence
  Description of Artificial Sequence: Synthetic peptide
  Seed: TMDSSTLEL
TVDSSTLEL

SEQ ID NO: 16440 - protein, 9 aa, Artificial Sequence
  Description of Artificial Sequence: Synthetic peptide
  Seed: TMDSSTLEL
TVDSSTLEM

SEQ ID NO: 16441 - protein, 9 aa, Artificial Sequence
  Description of Artificial Sequence: Synthetic peptide
  Seed: TMDSSTLEL
TVDSSTLEF

SEQ ID NO: 16442 - protein, 9 aa, Artificial Sequence
  Description of Artificial Sequence: Synthetic peptide
  Seed: TMDSSTLEL
TADSSTLEC

SEQ ID NO: 16443 - protein, 10 aa, Artificial Sequence
  Description of Artificial Sequence: Synthetic peptide
  Seed: TLPRRSGAAG
TVPRRSGAAV

SEQ ID NO: 16444 - protein, 10 aa, Artificial Sequence
  Description of Artificial Sequence: Synthetic peptide
  Seed: TLPRRSGAAG
TVPRRSGAAY

SEQ ID NO: 16445 - protein, 10 aa, Artificial Sequence
  Description of Artificial Sequence: Synthetic peptide
  Seed: TLPRRSGAAG
TSPRRSGAAP

SEQ ID NO: 16446 - protein, 10 aa, Artificial Sequence
  Description of Artificial Sequence: Synthetic peptide
  Seed: TLPRRSGAAG
TPPRRSGAAY

SEQ ID NO: 16447 - protein, 10 aa, Artificial Sequence
  Description of Artificial Sequence: Synthetic peptide
  Seed: TLPRRSGAAG
TPPRRSGAAV

SEQ ID NO: 16448 - protein, 10 aa, Artificial Sequence
  Description of Artificial Sequence: Synthetic peptide
  Seed: TLPRRSGAAG
TSPRRSGAAA

SEQ ID NO: 16449 - protein, 10 aa, Artificial Sequence
  Description of Artificial Sequence: Synthetic peptide
  Seed: TLPRRSGAAG
TSPRRSGAAC

SEQ ID NO: 16450 - protein, 10 aa, Artificial Sequence
  Description of Artificial Sequence: Synthetic peptide
  Seed: TLPRRSGAAG
TSPRRSGAAG

SEQ ID NO: 16451 - protein, 10 aa, Artificial Sequence
  Description of Artificial Sequence: Synthetic peptide
  Seed: TLPRRSGAAG
TSPRRSGAAI

SEQ ID NO: 16452 - protein, 10 aa, Artificial Sequence
  Description of Artificial Sequence: Synthetic peptide
  Seed: TLPRRSGAAG
TSPRRSGAAL

SEQ ID NO: 16453 - protein, 10 aa, Artificial Sequence
  Description of Artificial Sequence: Synthetic peptide
  Seed: TLPRRSGAAG
TSPRRSGAAM

SEQ ID NO: 16454 - protein, 10 aa, Artificial Sequence
  Description of Artificial Sequence: Synthetic peptide
  Seed: TLPRRSGAAG
TSPRRSGAAF

SEQ ID NO: 16455 - protein, 10 aa, Artificial Sequence
  Description of Artificial Sequence: Synthetic peptide
  Seed: TLPRRSGAAG
TSPRRSGAAS

SEQ ID NO: 16456 - protein, 10 aa, Artificial Sequence
  Description of Artificial Sequence: Synthetic peptide
  Seed: TLPRRSGAAG
TVPRRSGAAW

SEQ ID NO: 16457 - protein, 10 aa, Artificial Sequence
  Description of Artificial Sequence: Synthetic peptide
  Seed: TLPRRSGAAG
TSPRRSGAAT

SEQ ID NO: 16458 - protein, 10 aa, Artificial Sequence
  Description of Artificial Sequence: Synthetic peptide
  Seed: TLPRRSGAAG
TSPRRSGAAW

SEQ ID NO: 16459 - protein, 10 aa, Artificial Sequence
  Description of Artificial Sequence: Synthetic peptide
  Seed: TLPRRSGAAG
TSPRRSGAAY

SEQ ID NO: 16460 - protein, 10 aa, Artificial Sequence
  Description of Artificial Sequence: Synthetic peptide
  Seed: TLPRRSGAAG
TSPRRSGAAV

SEQ ID NO: 16461 - protein, 10 aa, Artificial Sequence
  Description of Artificial Sequence: Synthetic peptide
  Seed: TLPRRSGAAG
TTPRRSGAAA

SEQ ID NO: 16462 - protein, 10 aa, Artificial Sequence
  Description of Artificial Sequence: Synthetic peptide
  Seed: TLPRRSGAAG
TTPRRSGAAC

SEQ ID NO: 16463 - protein, 10 aa, Artificial Sequence
  Description of Artificial Sequence: Synthetic peptide
  Seed: TLPRRSGAAG
TTPRRSGAAG

SEQ ID NO: 16464 - protein, 10 aa, Artificial Sequence
  Description of Artificial Sequence: Synthetic peptide
  Seed: TLPRRSGAAG
TTPRRSGAAI

SEQ ID NO: 16465 - protein, 10 aa, Artificial Sequence
  Description of Artificial Sequence: Synthetic peptide
  Seed: TLPRRSGAAG
TTPRRSGAAL

SEQ ID NO: 16466 - protein, 10 aa, Artificial Sequence
  Description of Artificial Sequence: Synthetic peptide
  Seed: TLPRRSGAAG
TPPRRSGAAW

SEQ ID NO: 16467 - protein, 10 aa, Artificial Sequence
  Description of Artificial Sequence: Synthetic peptide
  Seed: TLPRRSGAAG
TPPRRSGAAT

SEQ ID NO: 16468 - protein, 10 aa, Artificial Sequence
  Description of Artificial Sequence: Synthetic peptide
  Seed: TLPRRSGAAG
TPPRRSGAAS

SEQ ID NO: 16469 - protein, 10 aa, Artificial Sequence
  Description of Artificial Sequence: Synthetic peptide
  Seed: TLPRRSGAAG
TPPRRSGAAP

SEQ ID NO: 16470 - protein, 10 aa, Artificial Sequence
  Description of Artificial Sequence: Synthetic peptide
  Seed: TLPRRSGAAG
TFPRRSGAAG

SEQ ID NO: 16471 - protein, 10 aa, Artificial Sequence
  Description of Artificial Sequence: Synthetic peptide
  Seed: TLPRRSGAAG
TFPRRSGAAH

SEQ ID NO: 16472 - protein, 10 aa, Artificial Sequence
  Description of Artificial Sequence: Synthetic peptide
  Seed: TLPRRSGAAG
TFPRRSGAAI

SEQ ID NO: 16473 - protein, 10 aa, Artificial Sequence
  Description of Artificial Sequence: Synthetic peptide
  Seed: TLPRRSGAAG
TFPRRSGAAL

SEQ ID NO: 16474 - protein, 10 aa, Artificial Sequence
  Description of Artificial Sequence: Synthetic peptide
  Seed: TLPRRSGAAG
TFPRRSGAAM

SEQ ID NO: 16475 - protein, 10 aa, Artificial Sequence
  Description of Artificial Sequence: Synthetic peptide
  Seed: TLPRRSGAAG
TFPRRSGAAF

SEQ ID NO: 16476 - protein, 10 aa, Artificial Sequence
  Description of Artificial Sequence: Synthetic peptide
  Seed: TLPRRSGAAG
TFPRRSGAAP

SEQ ID NO: 16477 - protein, 10 aa, Artificial Sequence
  Description of Artificial Sequence: Synthetic peptide
  Seed: TLPRRSGAAG
TFPRRSGAAS

SEQ ID NO: 16478 - protein, 10 aa, Artificial Sequence
  Description of Artificial Sequence: Synthetic peptide
  Seed: TLPRRSGAAG
TFPRRSGAAT

SEQ ID NO: 16479 - protein, 10 aa, Artificial Sequence
  Description of Artificial Sequence: Synthetic peptide
  Seed: TLPRRSGAAG
TFPRRSGAAW

SEQ ID NO: 16480 - protein, 10 aa, Artificial Sequence
  Description of Artificial Sequence: Synthetic peptide
  Seed: TLPRRSGAAG
TFPRRSGAAY

SEQ ID NO: 16481 - protein, 10 aa, Artificial Sequence
  Description of Artificial Sequence: Synthetic peptide
  Seed: TLPRRSGAAG
TFPRRSGAAV

SEQ ID NO: 16482 - protein, 10 aa, Artificial Sequence
  Description of Artificial Sequence: Synthetic peptide
  Seed: TLPRRSGAAG
TPPRRSGAAA

SEQ ID NO: 16483 - protein, 10 aa, Artificial Sequence
  Description of Artificial Sequence: Synthetic peptide
  Seed: TLPRRSGAAG
TPPRRSGAAC

SEQ ID NO: 16484 - protein, 10 aa, Artificial Sequence
  Description of Artificial Sequence: Synthetic peptide
  Seed: TLPRRSGAAG
TPPRRSGAAG

SEQ ID NO: 16485 - protein, 10 aa, Artificial Sequence
  Description of Artificial Sequence: Synthetic peptide
  Seed: TLPRRSGAAG
TPPRRSGAAI

SEQ ID NO: 16486 - protein, 10 aa, Artificial Sequence
  Description of Artificial Sequence: Synthetic peptide
  Seed: TLPRRSGAAG
TPPRRSGAAL

SEQ ID NO: 16487 - protein, 10 aa, Artificial Sequence
  Description of Artificial Sequence: Synthetic peptide
  Seed: TLPRRSGAAG
TPPRRSGAAM

SEQ ID NO: 16488 - protein, 10 aa, Artificial Sequence
  Description of Artificial Sequence: Synthetic peptide
  Seed: TLPRRSGAAG
TPPRRSGAAF

SEQ ID NO: 16489 - protein, 10 aa, Artificial Sequence
  Description of Artificial Sequence: Synthetic peptide
  Seed: TLPRRSGAAG
TTPRRSGAAM

SEQ ID NO: 16490 - protein, 10 aa, Artificial Sequence
  Description of Artificial Sequence: Synthetic peptide
  Seed: TLPRRSGAAG
TTPRRSGAAF

SEQ ID NO: 16491 - protein, 10 aa, Artificial Sequence
  Description of Artificial Sequence: Synthetic peptide
  Seed: TLPRRSGAAG
TTPRRSGAAP

SEQ ID NO: 16492 - protein, 10 aa, Artificial Sequence
  Description of Artificial Sequence: Synthetic peptide
  Seed: TLPRRSGAAG
TYPRRSGAAH

SEQ ID NO: 16493 - protein, 10 aa, Artificial Sequence
  Description of Artificial Sequence: Synthetic peptide
  Seed: TLPRRSGAAG
TYPRRSGAAL

SEQ ID NO: 16494 - protein, 10 aa, Artificial Sequence
  Description of Artificial Sequence: Synthetic peptide
  Seed: TLPRRSGAAG
TYPRRSGAAM

SEQ ID NO: 16495 - protein, 10 aa, Artificial Sequence
  Description of Artificial Sequence: Synthetic peptide
  Seed: TLPRRSGAAG
TYPRRSGAAF

SEQ ID NO: 16496 - protein, 10 aa, Artificial Sequence
  Description of Artificial Sequence: Synthetic peptide
  Seed: TLPRRSGAAG
TYPRRSGAAP

SEQ ID NO: 16497 - protein, 10 aa, Artificial Sequence
  Description of Artificial Sequence: Synthetic peptide
  Seed: TLPRRSGAAG
TYPRRSGAAS

SEQ ID NO: 16498 - protein, 10 aa, Artificial Sequence
  Description of Artificial Sequence: Synthetic peptide
  Seed: TLPRRSGAAG
TYPRRSGAAT

SEQ ID NO: 16499 - protein, 10 aa, Artificial Sequence
  Description of Artificial Sequence: Synthetic peptide
  Seed: TLPRRSGAAG
TYPRRSGAAW

SEQ ID NO: 16500 - protein, 10 aa, Artificial Sequence
  Description of Artificial Sequence: Synthetic peptide
  Seed: TLPRRSGAAG
TYPRRSGAAY

SEQ ID NO: 16501 - protein, 10 aa, Artificial Sequence
  Description of Artificial Sequence: Synthetic peptide
  Seed: TLPRRSGAAG
TYPRRSGAAV

SEQ ID NO: 16502 - protein, 10 aa, Artificial Sequence
  Description of Artificial Sequence: Synthetic peptide
  Seed: TLPRRSGAAG
TVPRRSGAAA

SEQ ID NO: 16503 - protein, 10 aa, Artificial Sequence
  Description of Artificial Sequence: Synthetic peptide
  Seed: TLPRRSGAAG
TVPRRSGAAC

SEQ ID NO: 16504 - protein, 10 aa, Artificial Sequence
  Description of Artificial Sequence: Synthetic peptide
  Seed: TLPRRSGAAG
TVPRRSGAAG

SEQ ID NO: 16505 - protein, 10 aa, Artificial Sequence
  Description of Artificial Sequence: Synthetic peptide
  Seed: TLPRRSGAAG
TVPRRSGAAI

SEQ ID NO: 16506 - protein, 10 aa, Artificial Sequence
  Description of Artificial Sequence: Synthetic peptide
  Seed: TLPRRSGAAG
TVPRRSGAAL

SEQ ID NO: 16507 - protein, 10 aa, Artificial Sequence
  Description of Artificial Sequence: Synthetic peptide
  Seed: TLPRRSGAAG
TVPRRSGAAM

SEQ ID NO: 16508 - protein, 10 aa, Artificial Sequence
  Description of Artificial Sequence: Synthetic peptide
  Seed: TLPRRSGAAG
TVPRRSGAAF

SEQ ID NO: 16509 - protein, 10 aa, Artificial Sequence
  Description of Artificial Sequence: Synthetic peptide
  Seed: TLPRRSGAAG
TVPRRSGAAP

SEQ ID NO: 16510 - protein, 10 aa, Artificial Sequence
  Description of Artificial Sequence: Synthetic peptide
  Seed: TLPRRSGAAG
TVPRRSGAAS

SEQ ID NO: 16511 - protein, 10 aa, Artificial Sequence
  Description of Artificial Sequence: Synthetic peptide
  Seed: TLPRRSGAAG
TVPRRSGAAT

SEQ ID NO: 16512 - protein, 10 aa, Artificial Sequence
  Description of Artificial Sequence: Synthetic peptide
  Seed: TLPRRSGAAG
TYPRRSGAAI

SEQ ID NO: 16513 - protein, 10 aa, Artificial Sequence
  Description of Artificial Sequence: Synthetic peptide
  Seed: TLPRRSGAAG
TYPRRSGAAG

SEQ ID NO: 16514 - protein, 10 aa, Artificial Sequence
  Description of Artificial Sequence: Synthetic peptide
  Seed: TLPRRSGAAG
TTPRRSGAAS

SEQ ID NO: 16515 - protein, 10 aa, Artificial Sequence
  Description of Artificial Sequence: Synthetic peptide
  Seed: TLPRRSGAAG
TYPRRSGAAC

SEQ ID NO: 16516 - protein, 10 aa, Artificial Sequence
  Description of Artificial Sequence: Synthetic peptide
  Seed: TLPRRSGAAG
TTPRRSGAAT

SEQ ID NO: 16517 - protein, 10 aa, Artificial Sequence
  Description of Artificial Sequence: Synthetic peptide
  Seed: TLPRRSGAAG
TTPRRSGAAW

SEQ ID NO: 16518 - protein, 10 aa, Artificial Sequence
  Description of Artificial Sequence: Synthetic peptide
  Seed: TLPRRSGAAG
TTPRRSGAAY

SEQ ID NO: 16519 - protein, 10 aa, Artificial Sequence
  Description of Artificial Sequence: Synthetic peptide
  Seed: TLPRRSGAAG
TTPRRSGAAV

SEQ ID NO: 16520 - protein, 10 aa, Artificial Sequence
  Description of Artificial Sequence: Synthetic peptide
  Seed: TLPRRSGAAG
TWPRRSGAAA

SEQ ID NO: 16521 - protein, 10 aa, Artificial Sequence
  Description of Artificial Sequence: Synthetic peptide
  Seed: TLPRRSGAAG
TWPRRSGAAC

SEQ ID NO: 16522 - protein, 10 aa, Artificial Sequence
  Description of Artificial Sequence: Synthetic peptide
  Seed: TLPRRSGAAG
TWPRRSGAAG

SEQ ID NO: 16523 - protein, 10 aa, Artificial Sequence
  Description of Artificial Sequence: Synthetic peptide
  Seed: TLPRRSGAAG
TWPRRSGAAH

SEQ ID NO: 16524 - protein, 10 aa, Artificial Sequence
  Description of Artificial Sequence: Synthetic peptide
  Seed: TLPRRSGAAG
TWPRRSGAAI

SEQ ID NO: 16525 - protein, 10 aa, Artificial Sequence
  Description of Artificial Sequence: Synthetic peptide
  Seed: TLPRRSGAAG
TWPRRSGAAL

SEQ ID NO: 16526 - protein, 10 aa, Artificial Sequence
  Description of Artificial Sequence: Synthetic peptide
  Seed: TLPRRSGAAG
TWPRRSGAAM

SEQ ID NO: 16527 - protein, 10 aa, Artificial Sequence
  Description of Artificial Sequence: Synthetic peptide
  Seed: TLPRRSGAAG
TWPRRSGAAF

SEQ ID NO: 16528 - protein, 10 aa, Artificial Sequence
  Description of Artificial Sequence: Synthetic peptide
  Seed: TLPRRSGAAG
TWPRRSGAAP

SEQ ID NO: 16529 - protein, 10 aa, Artificial Sequence
  Description of Artificial Sequence: Synthetic peptide
  Seed: TLPRRSGAAG
TWPRRSGAAS

SEQ ID NO: 16530 - protein, 10 aa, Artificial Sequence
  Description of Artificial Sequence: Synthetic peptide
  Seed: TLPRRSGAAG
TWPRRSGAAT

SEQ ID NO: 16531 - protein, 10 aa, Artificial Sequence
  Description of Artificial Sequence: Synthetic peptide
  Seed: TLPRRSGAAG
TWPRRSGAAW

SEQ ID NO: 16532 - protein, 10 aa, Artificial Sequence
  Description of Artificial Sequence: Synthetic peptide
  Seed: TLPRRSGAAG
TWPRRSGAAY

SEQ ID NO: 16533 - protein, 10 aa, Artificial Sequence
  Description of Artificial Sequence: Synthetic peptide
  Seed: TLPRRSGAAG
TWPRRSGAAV

SEQ ID NO: 16534 - protein, 10 aa, Artificial Sequence
  Description of Artificial Sequence: Synthetic peptide
  Seed: TLPRRSGAAG
TYPRRSGAAA

SEQ ID NO: 16535 - protein, 11 aa, Artificial Sequence
  Description of Artificial Sequence: Synthetic peptide
  Seed: TLELRSRYWAI
TWELRSRYWAI

SEQ ID NO: 16536 - protein, 11 aa, Artificial Sequence
  Description of Artificial Sequence: Synthetic peptide
  Seed: TLELRSRYWAI
TWELRSRYWAA

SEQ ID NO: 16537 - protein, 11 aa, Artificial Sequence
  Description of Artificial Sequence: Synthetic peptide
  Seed: TLELRSRYWAI
TTELRSRYWAV

SEQ ID NO: 16538 - protein, 10 aa, Artificial Sequence
  Description of Artificial Sequence: Synthetic peptide
  Seed: TIMAAFTGNA
TFMAAFTGNL

SEQ ID NO: 16539 - protein, 10 aa, Artificial Sequence
  Description of Artificial Sequence: Synthetic peptide
  Seed: TIMAAFTGNA
TMMAAFTGNI

SEQ ID NO: 16540 - protein, 10 aa, Artificial Sequence
  Description of Artificial Sequence: Synthetic peptide
  Seed: TIMAAFTGNA
TMMAAFTGNL

SEQ ID NO: 16541 - protein, 10 aa, Artificial Sequence
  Description of Artificial Sequence: Synthetic peptide
  Seed: TIMAAFTGNA
TMMAAFTGNM

SEQ ID NO: 16542 - protein, 10 aa, Artificial Sequence
  Description of Artificial Sequence: Synthetic peptide
  Seed: TIMAAFTGNA
TMMAAFTGNP

SEQ ID NO: 16543 - protein, 10 aa, Artificial Sequence
  Description of Artificial Sequence: Synthetic peptide
  Seed: TIMAAFTGNA
TMMAAFTGNS

SEQ ID NO: 16544 - protein, 10 aa, Artificial Sequence
  Description of Artificial Sequence: Synthetic peptide
  Seed: TIMAAFTGNA
TMMAAFTGNT

SEQ ID NO: 16545 - protein, 10 aa, Artificial Sequence
  Description of Artificial Sequence: Synthetic peptide
  Seed: TIMAAFTGNA
TMMAAFTGNV

SEQ ID NO: 16546 - protein, 10 aa, Artificial Sequence
  Description of Artificial Sequence: Synthetic peptide
  Seed: TIMAAFTGNA
TFMAAFTGNA

SEQ ID NO: 16547 - protein, 10 aa, Artificial Sequence
  Description of Artificial Sequence: Synthetic peptide
  Seed: TIMAAFTGNA
TFMAAFTGNI

SEQ ID NO: 16548 - protein, 10 aa, Artificial Sequence
  Description of Artificial Sequence: Synthetic peptide
  Seed: TIMAAFTGNA
TFMAAFTGNM

SEQ ID NO: 16549 - protein, 10 aa, Artificial Sequence
  Description of Artificial Sequence: Synthetic peptide
  Seed: TIMAAFTGNA
TSMAAFTGNM

SEQ ID NO: 16550 - protein, 10 aa, Artificial Sequence
  Description of Artificial Sequence: Synthetic peptide
  Seed: TIMAAFTGNA
TFMAAFTGNT

SEQ ID NO: 16551 - protein, 10 aa, Artificial Sequence
  Description of Artificial Sequence: Synthetic peptide
  Seed: TIMAAFTGNA
TFMAAFTGNV

SEQ ID NO: 16552 - protein, 10 aa, Artificial Sequence
  Description of Artificial Sequence: Synthetic peptide
  Seed: TIMAAFTGNA
TPMAAFTGNA

SEQ ID NO: 16553 - protein, 10 aa, Artificial Sequence
  Description of Artificial Sequence: Synthetic peptide
  Seed: TIMAAFTGNA
TPMAAFTGNI

SEQ ID NO: 16554 - protein, 10 aa, Artificial Sequence
  Description of Artificial Sequence: Synthetic peptide
  Seed: TIMAAFTGNA
TPMAAFTGNL

SEQ ID NO: 16555 - protein, 10 aa, Artificial Sequence
  Description of Artificial Sequence: Synthetic peptide
  Seed: TIMAAFTGNA
TPMAAFTGNM

SEQ ID NO: 16556 - protein, 10 aa, Artificial Sequence
  Description of Artificial Sequence: Synthetic peptide
  Seed: TIMAAFTGNA
TPMAAFTGNV

SEQ ID NO: 16557 - protein, 10 aa, Artificial Sequence
  Description of Artificial Sequence: Synthetic peptide
  Seed: TIMAAFTGNA
TSMAAFTGNA

SEQ ID NO: 16558 - protein, 10 aa, Artificial Sequence
  Description of Artificial Sequence: Synthetic peptide
  Seed: TIMAAFTGNA
TSMAAFTGNI

SEQ ID NO: 16559 - protein, 10 aa, Artificial Sequence
  Description of Artificial Sequence: Synthetic peptide
  Seed: TIMAAFTGNA
TMMAAFTGNC

SEQ ID NO: 16560 - protein, 10 aa, Artificial Sequence
  Description of Artificial Sequence: Synthetic peptide
  Seed: TIMAAFTGNA
TMMAAFTGNA

SEQ ID NO: 16561 - protein, 10 aa, Artificial Sequence
  Description of Artificial Sequence: Synthetic peptide
  Seed: TIMAAFTGNA
TKMAAFTGNV

SEQ ID NO: 16562 - protein, 10 aa, Artificial Sequence
  Description of Artificial Sequence: Synthetic peptide
  Seed: TIMAAFTGNA
TKMAAFTGNM

SEQ ID NO: 16563 - protein, 10 aa, Artificial Sequence
  Description of Artificial Sequence: Synthetic peptide
  Seed: TIMAAFTGNA
THMAAFTGNM

SEQ ID NO: 16564 - protein, 10 aa, Artificial Sequence
  Description of Artificial Sequence: Synthetic peptide
  Seed: TIMAAFTGNA
THMAAFTGNV

SEQ ID NO: 16565 - protein, 10 aa, Artificial Sequence
  Description of Artificial Sequence: Synthetic peptide
  Seed: TIMAAFTGNA
TIMAAFTGNI

SEQ ID NO: 16566 - protein, 10 aa, Artificial Sequence
  Description of Artificial Sequence: Synthetic peptide
  Seed: TIMAAFTGNA
TIMAAFTGNL

SEQ ID NO: 16567 - protein, 10 aa, Artificial Sequence
  Description of Artificial Sequence: Synthetic peptide
  Seed: TIMAAFTGNA
TIMAAFTGNM

SEQ ID NO: 16568 - protein, 10 aa, Artificial Sequence
  Description of Artificial Sequence: Synthetic peptide
  Seed: TIMAAFTGNA
TIMAAFTGNV

SEQ ID NO: 16569 - protein, 10 aa, Artificial Sequence
  Description of Artificial Sequence: Synthetic peptide
  Seed: TIMAAFTGNA
TLMAAFTGNA

SEQ ID NO: 16570 - protein, 10 aa, Artificial Sequence
  Description of Artificial Sequence: Synthetic peptide
  Seed: TIMAAFTGNA
TLMAAFTGNC

SEQ ID NO: 16571 - protein, 10 aa, Artificial Sequence
  Description of Artificial Sequence: Synthetic peptide
  Seed: TIMAAFTGNA
TLMAAFTGNI

SEQ ID NO: 16572 - protein, 10 aa, Artificial Sequence
  Description of Artificial Sequence: Synthetic peptide
  Seed: TIMAAFTGNA
TLMAAFTGNL

SEQ ID NO: 16573 - protein, 10 aa, Artificial Sequence
  Description of Artificial Sequence: Synthetic peptide
  Seed: TIMAAFTGNA
TLMAAFTGNM

SEQ ID NO: 16574 - protein, 10 aa, Artificial Sequence
  Description of Artificial Sequence: Synthetic peptide
  Seed: TIMAAFTGNA
TLMAAFTGNP

SEQ ID NO: 16575 - protein, 10 aa, Artificial Sequence
  Description of Artificial Sequence: Synthetic peptide
  Seed: TIMAAFTGNA
TLMAAFTGNS

SEQ ID NO: 16576 - protein, 10 aa, Artificial Sequence
  Description of Artificial Sequence: Synthetic peptide
  Seed: TIMAAFTGNA
TLMAAFTGNT

SEQ ID NO: 16577 - protein, 10 aa, Artificial Sequence
  Description of Artificial Sequence: Synthetic peptide
  Seed: TIMAAFTGNA
TLMAAFTGNV

SEQ ID NO: 16578 - protein, 10 aa, Artificial Sequence
  Description of Artificial Sequence: Synthetic peptide
  Seed: TIMAAFTGNA
TKMAAFTGNA

SEQ ID NO: 16579 - protein, 10 aa, Artificial Sequence
  Description of Artificial Sequence: Synthetic peptide
  Seed: TIMAAFTGNA
TKMAAFTGNI

SEQ ID NO: 16580 - protein, 10 aa, Artificial Sequence
  Description of Artificial Sequence: Synthetic peptide
  Seed: TIMAAFTGNA
TKMAAFTGNL

SEQ ID NO: 16581 - protein, 10 aa, Artificial Sequence
  Description of Artificial Sequence: Synthetic peptide
  Seed: TIMAAFTGNA
TSMAAFTGNL

SEQ ID NO: 16582 - protein, 10 aa, Artificial Sequence
  Description of Artificial Sequence: Synthetic peptide
  Seed: TIMAAFTGNA
TSMAAFTGNV

SEQ ID NO: 16583 - protein, 10 aa, Artificial Sequence
  Description of Artificial Sequence: Synthetic peptide
  Seed: TIMAAFTGNT
TCMAAFTGNM

SEQ ID NO: 16584 - protein, 10 aa, Artificial Sequence
  Description of Artificial Sequence: Synthetic peptide
  Seed: TIMAAFTGNT
TNMAAFTGNI

SEQ ID NO: 16585 - protein, 10 aa, Artificial Sequence
  Description of Artificial Sequence: Synthetic peptide
  Seed: TIMAAFTGNT
TAMAAFTGNL

SEQ ID NO: 16586 - protein, 10 aa, Artificial Sequence
  Description of Artificial Sequence: Synthetic peptide
  Seed: TIMAAFTGNT
TAMAAFTGNM

SEQ ID NO: 16587 - protein, 10 aa, Artificial Sequence
  Description of Artificial Sequence: Synthetic peptide
  Seed: TIMAAFTGNT
TAMAAFTGNV

SEQ ID NO: 16588 - protein, 10 aa, Artificial Sequence
  Description of Artificial Sequence: Synthetic peptide
  Seed: TIMAAFTGNT
TRMAAFTGNA

SEQ ID NO: 16589 - protein, 10 aa, Artificial Sequence
  Description of Artificial Sequence: Synthetic peptide
  Seed: TIMAAFTGNT
TRMAAFTGNI

SEQ ID NO: 16590 - protein, 10 aa, Artificial Sequence
  Description of Artificial Sequence: Synthetic peptide
  Seed: TIMAAFTGNT
TRMAAFTGNL

SEQ ID NO: 16591 - protein, 10 aa, Artificial Sequence
  Description of Artificial Sequence: Synthetic peptide
  Seed: TIMAAFTGNT
TRMAAFTGNM

SEQ ID NO: 16592 - protein, 10 aa, Artificial Sequence
  Description of Artificial Sequence: Synthetic peptide
  Seed: TIMAAFTGNT
TRMAAFTGNV

SEQ ID NO: 16593 - protein, 10 aa, Artificial Sequence
  Description of Artificial Sequence: Synthetic peptide
  Seed: TIMAAFTGNT
TNMAAFTGNA

SEQ ID NO: 16594 - protein, 10 aa, Artificial Sequence
  Description of Artificial Sequence: Synthetic peptide
  Seed: TIMAAFTGNT
TNMAAFTGNL

SEQ ID NO: 16595 - protein, 10 aa, Artificial Sequence
  Description of Artificial Sequence: Synthetic peptide
  Seed: TIMAAFTGNA
TTMAAFTGNA

SEQ ID NO: 16596 - protein, 10 aa, Artificial Sequence
  Description of Artificial Sequence: Synthetic peptide
  Seed: TIMAAFTGNT
TNMAAFTGNM

SEQ ID NO: 16597 - protein, 10 aa, Artificial Sequence
  Description of Artificial Sequence: Synthetic peptide
  Seed: TIMAAFTGNT
TNMAAFTGNV

SEQ ID NO: 16598 - protein, 10 aa, Artificial Sequence
  Description of Artificial Sequence: Synthetic peptide
  Seed: TIMAAFTGNT
TDMAAFTGNA

SEQ ID NO: 16599 - protein, 10 aa, Artificial Sequence
  Description of Artificial Sequence: Synthetic peptide
  Seed: TIMAAFTGNT
TDMAAFTGNI

SEQ ID NO: 16600 - protein, 10 aa, Artificial Sequence
  Description of Artificial Sequence: Synthetic peptide
  Seed: TIMAAFTGNT
TDMAAFTGNL

SEQ ID NO: 16601 - protein, 10 aa, Artificial Sequence
  Description of Artificial Sequence: Synthetic peptide
  Seed: TIMAAFTGNT
TDMAAFTGNM

SEQ ID NO: 16602 - protein, 10 aa, Artificial Sequence
  Description of Artificial Sequence: Synthetic peptide
  Seed: TIMAAFTGNT
TDMAAFTGNV

SEQ ID NO: 16603 - protein, 10 aa, Artificial Sequence
  Description of Artificial Sequence: Synthetic peptide
  Seed: TIMAAFTGNT
TCMAAFTGNA

SEQ ID NO: 16604 - protein, 10 aa, Artificial Sequence
  Description of Artificial Sequence: Synthetic peptide
  Seed: TIMAAFTGNT
TCMAAFTGNI

SEQ ID NO: 16605 - protein, 10 aa, Artificial Sequence
  Description of Artificial Sequence: Synthetic peptide
  Seed: TIMAAFTGNT
TAMAAFTGNI

SEQ ID NO: 16606 - protein, 10 aa, Artificial Sequence
  Description of Artificial Sequence: Synthetic peptide
  Seed: TIMAAFTGNT
TAMAAFTGNA

SEQ ID NO: 16607 - protein, 10 aa, Artificial Sequence
  Description of Artificial Sequence: Synthetic peptide
  Seed: TIMAAFTGNA
TVMAAFTGNV

SEQ ID NO: 16608 - protein, 10 aa, Artificial Sequence
  Description of Artificial Sequence: Synthetic peptide
  Seed: TIMAAFTGNA
TTMAAFTGNI

SEQ ID NO: 16609 - protein, 10 aa, Artificial Sequence
  Description of Artificial Sequence: Synthetic peptide
  Seed: TIMAAFTGNA
TTMAAFTGNL

SEQ ID NO: 16610 - protein, 10 aa, Artificial Sequence
  Description of Artificial Sequence: Synthetic peptide
  Seed: TIMAAFTGNA
TTMAAFTGNM

SEQ ID NO: 16611 - protein, 10 aa, Artificial Sequence
  Description of Artificial Sequence: Synthetic peptide
  Seed: TIMAAFTGNA
TTMAAFTGNV

SEQ ID NO: 16612 - protein, 10 aa, Artificial Sequence
  Description of Artificial Sequence: Synthetic peptide
  Seed: TIMAAFTGNA
TWMAAFTGNA

SEQ ID NO: 16613 - protein, 10 aa, Artificial Sequence
  Description of Artificial Sequence: Synthetic peptide
  Seed: TIMAAFTGNA
TWMAAFTGNI

SEQ ID NO: 16614 - protein, 10 aa, Artificial Sequence
  Description of Artificial Sequence: Synthetic peptide
  Seed: TIMAAFTGNA
TWMAAFTGNL

SEQ ID NO: 16615 - protein, 10 aa, Artificial Sequence
  Description of Artificial Sequence: Synthetic peptide
  Seed: TIMAAFTGNA
TWMAAFTGNM

SEQ ID NO: 16616 - protein, 10 aa, Artificial Sequence
  Description of Artificial Sequence: Synthetic peptide
  Seed: TIMAAFTGNA
TWMAAFTGNV

SEQ ID NO: 16617 - protein, 10 aa, Artificial Sequence
  Description of Artificial Sequence: Synthetic peptide
  Seed: TIMAAFTGNA
TYMAAFTGNA

SEQ ID NO: 16618 - protein, 10 aa, Artificial Sequence
  Description of Artificial Sequence: Synthetic peptide
  Seed: TIMAAFTGNA
TYMAAFTGNI

SEQ ID NO: 16619 - protein, 10 aa, Artificial Sequence
  Description of Artificial Sequence: Synthetic peptide
  Seed: TIMAAFTGNA
TYMAAFTGNL

SEQ ID NO: 16620 - protein, 10 aa, Artificial Sequence
  Description of Artificial Sequence: Synthetic peptide
  Seed: TIMAAFTGNA
TYMAAFTGNM

SEQ ID NO: 16621 - protein, 10 aa, Artificial Sequence
  Description of Artificial Sequence: Synthetic peptide
  Seed: TIMAAFTGNA
TYMAAFTGNT

SEQ ID NO: 16622 - protein, 10 aa, Artificial Sequence
  Description of Artificial Sequence: Synthetic peptide
  Seed: TIMAAFTGNA
TYMAAFTGNV

SEQ ID NO: 16623 - protein, 10 aa, Artificial Sequence
  Description of Artificial Sequence: Synthetic peptide
  Seed: TIMAAFTGNA
TVMAAFTGNA

SEQ ID NO: 16624 - protein, 10 aa, Artificial Sequence
  Description of Artificial Sequence: Synthetic peptide
  Seed: TIMAAFTGNA
TVMAAFTGNI

SEQ ID NO: 16625 - protein, 10 aa, Artificial Sequence
  Description of Artificial Sequence: Synthetic peptide
  Seed: TIMAAFTGNA
TVMAAFTGNL

SEQ ID NO: 16626 - protein, 10 aa, Artificial Sequence
  Description of Artificial Sequence: Synthetic peptide
  Seed: TIMAAFTGNA
TVMAAFTGNM

SEQ ID NO: 16627 - protein, 10 aa, Artificial Sequence
  Description of Artificial Sequence: Synthetic peptide
  Seed: TIMAAFTGNA
THMAAFTGNL

SEQ ID NO: 16628 - protein, 10 aa, Artificial Sequence
  Description of Artificial Sequence: Synthetic peptide
  Seed: TIMAAFTGNA
THMAAFTGNI

SEQ ID NO: 16629 - protein, 10 aa, Artificial Sequence
  Description of Artificial Sequence: Synthetic peptide
  Seed: TIMAAFTGNA
THMAAFTGNA

SEQ ID NO: 16630 - protein, 10 aa, Artificial Sequence
  Description of Artificial Sequence: Synthetic peptide
  Seed: TIERMVLSAF
TWERMVLSAY

SEQ ID NO: 16631 - protein, 10 aa, Artificial Sequence
  Description of Artificial Sequence: Synthetic peptide
  Seed: TIERMVLSAF
TTERMVLSAM

SEQ ID NO: 16632 - protein, 10 aa, Artificial Sequence
  Description of Artificial Sequence: Synthetic peptide
  Seed: TIERMVLSAF
TTERMVLSAF

SEQ ID NO: 16633 - protein, 10 aa, Artificial Sequence
  Description of Artificial Sequence: Synthetic peptide
  Seed: TIERMVLSAF
TTERMVLSAY

SEQ ID NO: 16634 - protein, 10 aa, Artificial Sequence
  Description of Artificial Sequence: Synthetic peptide
  Seed: TIERMVLSAF
TTERMVLSAV

SEQ ID NO: 16635 - protein, 10 aa, Artificial Sequence
  Description of Artificial Sequence: Synthetic peptide
  Seed: TIERMVLSAF
TWERMVLSAA

SEQ ID NO: 16636 - protein, 10 aa, Artificial Sequence
  Description of Artificial Sequence: Synthetic peptide
  Seed: TIERMVLSAF
TWERMVLSAI

SEQ ID NO: 16637 - protein, 10 aa, Artificial Sequence
  Description of Artificial Sequence: Synthetic peptide
  Seed: TIERMVLSAF
TWERMVLSAL

SEQ ID NO: 16638 - protein, 10 aa, Artificial Sequence
  Description of Artificial Sequence: Synthetic peptide
  Seed: TIERMVLSAF
TWERMVLSAM

SEQ ID NO: 16639 - protein, 10 aa, Artificial Sequence
  Description of Artificial Sequence: Synthetic peptide
  Seed: TIERMVLSAF
TWERMVLSAF

SEQ ID NO: 16640 - protein, 10 aa, Artificial Sequence
  Description of Artificial Sequence: Synthetic peptide
  Seed: TIERMVLSAF
TWERMVLSAV

SEQ ID NO: 16641 - protein, 10 aa, Artificial Sequence
  Description of Artificial Sequence: Synthetic peptide
  Seed: TIMAAFTGNA
TGMAAFTGNV

SEQ ID NO: 16642 - protein, 10 aa, Artificial Sequence
  Description of Artificial Sequence: Synthetic peptide
  Seed: TIERMVLSAF
TYERMVLSAA

SEQ ID NO: 16643 - protein, 10 aa, Artificial Sequence
  Description of Artificial Sequence: Synthetic peptide
  Seed: TIERMVLSAF
TYERMVLSAI

SEQ ID NO: 16644 - protein, 10 aa, Artificial Sequence
  Description of Artificial Sequence: Synthetic peptide
  Seed: TIERMVLSAF
TYERMVLSAL

SEQ ID NO: 16645 - protein, 10 aa, Artificial Sequence
  Description of Artificial Sequence: Synthetic peptide
  Seed: TIERMVLSAF
TYERMVLSAM

SEQ ID NO: 16646 - protein, 10 aa, Artificial Sequence
  Description of Artificial Sequence: Synthetic peptide
  Seed: TIERMVLSAF
TYERMVLSAF

SEQ ID NO: 16647 - protein, 10 aa, Artificial Sequence
  Description of Artificial Sequence: Synthetic peptide
  Seed: TIERMVLSAF
TYERMVLSAY

SEQ ID NO: 16648 - protein, 10 aa, Artificial Sequence
  Description of Artificial Sequence: Synthetic peptide
  Seed: TIERMVLSAF
TYERMVLSAV

SEQ ID NO: 16649 - protein, 10 aa, Artificial Sequence
  Description of Artificial Sequence: Synthetic peptide
  Seed: TIERMVLSAF
TVERMVLSAA

SEQ ID NO: 16650 - protein, 10 aa, Artificial Sequence
  Description of Artificial Sequence: Synthetic peptide
  Seed: TIERMVLSAF
TVERMVLSAI

SEQ ID NO: 16651 - protein, 10 aa, Artificial Sequence
  Description of Artificial Sequence: Synthetic peptide
  Seed: TIERMVLSAF
TTERMVLSAL

SEQ ID NO: 16652 - protein, 10 aa, Artificial Sequence
  Description of Artificial Sequence: Synthetic peptide
  Seed: TIERMVLSAF
TTERMVLSAI

SEQ ID NO: 16653 - protein, 10 aa, Artificial Sequence
  Description of Artificial Sequence: Synthetic peptide
  Seed: TIERMVLSAF
TTERMVLSAA

SEQ ID NO: 16654 - protein, 10 aa, Artificial Sequence
  Description of Artificial Sequence: Synthetic peptide
  Seed: TIERMVLSAF
TSERMVLSAV

SEQ ID NO: 16655 - protein, 10 aa, Artificial Sequence
  Description of Artificial Sequence: Synthetic peptide
  Seed: TIERMVLSAF
TFERMVLSAI

SEQ ID NO: 16656 - protein, 10 aa, Artificial Sequence
  Description of Artificial Sequence: Synthetic peptide
  Seed: TIERMVLSAF
TFERMVLSAL

SEQ ID NO: 16657 - protein, 10 aa, Artificial Sequence
  Description of Artificial Sequence: Synthetic peptide
  Seed: TIERMVLSAF
TFERMVLSAM

SEQ ID NO: 16658 - protein, 10 aa, Artificial Sequence
  Description of Artificial Sequence: Synthetic peptide
  Seed: TIERMVLSAF
TFERMVLSAF

SEQ ID NO: 16659 - protein, 10 aa, Artificial Sequence
  Description of Artificial Sequence: Synthetic peptide
  Seed: TIERMVLSAF
TFERMVLSAY

SEQ ID NO: 16660 - protein, 10 aa, Artificial Sequence
  Description of Artificial Sequence: Synthetic peptide
  Seed: TIERMVLSAF
TFERMVLSAV

SEQ ID NO: 16661 - protein, 10 aa, Artificial Sequence
  Description of Artificial Sequence: Synthetic peptide
  Seed: TIERMVLSAF
TPERMVLSAA

SEQ ID NO: 16662 - protein, 10 aa, Artificial Sequence
  Description of Artificial Sequence: Synthetic peptide
  Seed: TIERMVLSAF
TPERMVLSAI

SEQ ID NO: 16663 - protein, 10 aa, Artificial Sequence
  Description of Artificial Sequence: Synthetic peptide
  Seed: TIERMVLSAF
TPERMVLSAL

SEQ ID NO: 16664 - protein, 10 aa, Artificial Sequence
  Description of Artificial Sequence: Synthetic peptide
  Seed: TIERMVLSAF
TPERMVLSAM

SEQ ID NO: 16665 - protein, 10 aa, Artificial Sequence
  Description of Artificial Sequence: Synthetic peptide
  Seed: TIERMVLSAF
TPERMVLSAF

SEQ ID NO: 16666 - protein, 10 aa, Artificial Sequence
  Description of Artificial Sequence: Synthetic peptide
  Seed: TIERMVLSAF
TPERMVLSAY

SEQ ID NO: 16667 - protein, 10 aa, Artificial Sequence
  Description of Artificial Sequence: Synthetic peptide
  Seed: TIERMVLSAF
TPERMVLSAV

SEQ ID NO: 16668 - protein, 10 aa, Artificial Sequence
  Description of Artificial Sequence: Synthetic peptide
  Seed: TIERMVLSAF
TSERMVLSAA

SEQ ID NO: 16669 - protein, 10 aa, Artificial Sequence
  Description of Artificial Sequence: Synthetic peptide
  Seed: TIERMVLSAF
TSERMVLSAI

SEQ ID NO: 16670 - protein, 10 aa, Artificial Sequence
  Description of Artificial Sequence: Synthetic peptide
  Seed: TIERMVLSAF
TSERMVLSAL

SEQ ID NO: 16671 - protein, 10 aa, Artificial Sequence
  Description of Artificial Sequence: Synthetic peptide
  Seed: TIERMVLSAF
TSERMVLSAM

SEQ ID NO: 16672 - protein, 10 aa, Artificial Sequence
  Description of Artificial Sequence: Synthetic peptide
  Seed: TIERMVLSAF
TSERMVLSAF

SEQ ID NO: 16673 - protein, 10 aa, Artificial Sequence
  Description of Artificial Sequence: Synthetic peptide
  Seed: TIERMVLSAF
TSERMVLSAY

SEQ ID NO: 16674 - protein, 10 aa, Artificial Sequence
  Description of Artificial Sequence: Synthetic peptide
  Seed: TIERMVLSAF
TVERMVLSAL

SEQ ID NO: 16675 - protein, 10 aa, Artificial Sequence
  Description of Artificial Sequence: Synthetic peptide
  Seed: TIERMVLSAF
TVERMVLSAM

SEQ ID NO: 16676 - protein, 10 aa, Artificial Sequence
  Description of Artificial Sequence: Synthetic peptide
  Seed: TIMAAFTGNA
TCMAAFTGNL

SEQ ID NO: 16677 - protein, 10 aa, Artificial Sequence
  Description of Artificial Sequence: Synthetic peptide
  Seed: TIMAAFTGNA
TCMAAFTGNV

SEQ ID NO: 16678 - protein, 10 aa, Artificial Sequence
  Description of Artificial Sequence: Synthetic peptide
  Seed: TIMAAFTGNA
TQMAAFTGNA

SEQ ID NO: 16679 - protein, 10 aa, Artificial Sequence
  Description of Artificial Sequence: Synthetic peptide
  Seed: TIMAAFTGNA
TQMAAFTGNI

SEQ ID NO: 16680 - protein, 10 aa, Artificial Sequence
  Description of Artificial Sequence: Synthetic peptide
  Seed: TIMAAFTGNA
TQMAAFTGNL

SEQ ID NO: 16681 - protein, 10 aa, Artificial Sequence
  Description of Artificial Sequence: Synthetic peptide
  Seed: TIMAAFTGNA
TQMAAFTGNM

SEQ ID NO: 16682 - protein, 10 aa, Artificial Sequence
  Description of Artificial Sequence: Synthetic peptide
  Seed: TIMAAFTGNA
TQMAAFTGNF

SEQ ID NO: 16683 - protein, 10 aa, Artificial Sequence
  Description of Artificial Sequence: Synthetic peptide
  Seed: TIMAAFTGNA
TQMAAFTGNT

SEQ ID NO: 16684 - protein, 10 aa, Artificial Sequence
  Description of Artificial Sequence: Synthetic peptide
  Seed: TIMAAFTGNA
TQMAAFTGNV

SEQ ID NO: 16685 - protein, 10 aa, Artificial Sequence
  Description of Artificial Sequence: Synthetic peptide
  Seed: TIMAAFTGNA
TEMAAFTGNA

SEQ ID NO: 16686 - protein, 10 aa, Artificial Sequence
  Description of Artificial Sequence: Synthetic peptide
  Seed: TIMAAFTGNA
TEMAAFTGNI

SEQ ID NO: 16687 - protein, 10 aa, Artificial Sequence
  Description of Artificial Sequence: Synthetic peptide
  Seed: TIMAAFTGNA
TEMAAFTGNL

SEQ ID NO: 16688 - protein, 10 aa, Artificial Sequence
  Description of Artificial Sequence: Synthetic peptide
  Seed: TIMAAFTGNA
TEMAAFTGNM

SEQ ID NO: 16689 - protein, 10 aa, Artificial Sequence
  Description of Artificial Sequence: Synthetic peptide
  Seed: TIMAAFTGNA
TEMAAFTGNV

SEQ ID NO: 16690 - protein, 10 aa, Artificial Sequence
  Description of Artificial Sequence: Synthetic peptide
  Seed: TIMAAFTGNA
TGMAAFTGNA

SEQ ID NO: 16691 - protein, 10 aa, Artificial Sequence
  Description of Artificial Sequence: Synthetic peptide
  Seed: TIMAAFTGNA
TGMAAFTGNI

SEQ ID NO: 16692 - protein, 10 aa, Artificial Sequence
  Description of Artificial Sequence: Synthetic peptide
  Seed: TIMAAFTGNA
TGMAAFTGNL

SEQ ID NO: 16693 - protein, 10 aa, Artificial Sequence
  Description of Artificial Sequence: Synthetic peptide
  Seed: TIMAAFTGNA
TGMAAFTGNM

SEQ ID NO: 16694 - protein, 10 aa, Artificial Sequence
  Description of Artificial Sequence: Synthetic peptide
  Seed: TIERMVLSAF
TVERMVLSAY

SEQ ID NO: 16695 - protein, 10 aa, Artificial Sequence
  Description of Artificial Sequence: Synthetic peptide
  Seed: TIERMVLSAF
TVERMVLSAV

SEQ ID NO: 16696 - protein, 11 aa, Artificial Sequence
  Description of Artificial Sequence: Synthetic peptide
  Seed: TLELRSRYWAI
TTELRSRYWAF

SEQ ID NO: 16697 - protein, 11 aa, Artificial Sequence
  Description of Artificial Sequence: Synthetic peptide
  Seed: TLELRSRYWAI
TEELRSRYWAF

SEQ ID NO: 16698 - protein, 11 aa, Artificial Sequence
  Description of Artificial Sequence: Synthetic peptide
  Seed: TLELRSRYWAI
TQELRSRYWAA

SEQ ID NO: 16699 - protein, 11 aa, Artificial Sequence
  Description of Artificial Sequence: Synthetic peptide
  Seed: TLELRSRYWAI
TQELRSRYWAI

SEQ ID NO: 16700 - protein, 11 aa, Artificial Sequence
  Description of Artificial Sequence: Synthetic peptide
  Seed: TLELRSRYWAI
TQELRSRYWAL

SEQ ID NO: 16701 - protein, 11 aa, Artificial Sequence
  Description of Artificial Sequence: Synthetic peptide
  Seed: TLELRSRYWAI
TQELRSRYWAM

SEQ ID NO: 16702 - protein, 11 aa, Artificial Sequence
  Description of Artificial Sequence: Synthetic peptide
  Seed: TLELRSRYWAI
TQELRSRYWAF

SEQ ID NO: 16703 - protein, 11 aa, Artificial Sequence
  Description of Artificial Sequence: Synthetic peptide
  Seed: TLELRSRYWAI
TQELRSRYWAV

SEQ ID NO: 16704 - protein, 11 aa, Artificial Sequence
  Description of Artificial Sequence: Synthetic peptide
  Seed: TLELRSRYWAI
TEELRSRYWAI

SEQ ID NO: 16705 - protein, 11 aa, Artificial Sequence
  Description of Artificial Sequence: Synthetic peptide
  Seed: TLELRSRYWAI
TEELRSRYWAL

SEQ ID NO: 16706 - protein, 11 aa, Artificial Sequence
  Description of Artificial Sequence: Synthetic peptide
  Seed: TLELRSRYWAI
TEELRSRYWAM

SEQ ID NO: 16707 - protein, 11 aa, Artificial Sequence
  Description of Artificial Sequence: Synthetic peptide
  Seed: TLELRSRYWAI
TEELRSRYWAV

SEQ ID NO: 16708 - protein, 11 aa, Artificial Sequence
  Description of Artificial Sequence: Synthetic peptide
  Seed: TLELRSRYWAI
THELRSRYWAF

SEQ ID NO: 16709 - protein, 11 aa, Artificial Sequence
  Description of Artificial Sequence: Synthetic peptide
  Seed: TLELRSRYWAI
TGELRSRYWAA

SEQ ID NO: 16710 - protein, 11 aa, Artificial Sequence
  Description of Artificial Sequence: Synthetic peptide
  Seed: TLELRSRYWAI
TGELRSRYWAI

SEQ ID NO: 16711 - protein, 11 aa, Artificial Sequence
  Description of Artificial Sequence: Synthetic peptide
  Seed: TLELRSRYWAI
TGELRSRYWAL

SEQ ID NO: 16712 - protein, 11 aa, Artificial Sequence
  Description of Artificial Sequence: Synthetic peptide
  Seed: TLELRSRYWAI
TGELRSRYWAM

SEQ ID NO: 16713 - protein, 11 aa, Artificial Sequence
  Description of Artificial Sequence: Synthetic peptide
  Seed: TLELRSRYWAI
TGELRSRYWAF

SEQ ID NO: 16714 - protein, 11 aa, Artificial Sequence
  Description of Artificial Sequence: Synthetic peptide
  Seed: TLELRSRYWAI
TGELRSRYWAV

SEQ ID NO: 16715 - protein, 11 aa, Artificial Sequence
  Description of Artificial Sequence: Synthetic peptide
  Seed: TLELRSRYWAI
THELRSRYWAA

SEQ ID NO: 16716 - protein, 11 aa, Artificial Sequence
  Description of Artificial Sequence: Synthetic peptide
  Seed: TLELRSRYWAI
THELRSRYWAI

SEQ ID NO: 16717 - protein, 11 aa, Artificial Sequence
  Description of Artificial Sequence: Synthetic peptide
  Seed: TLELRSRYWAI
THELRSRYWAL

SEQ ID NO: 16718 - protein, 11 aa, Artificial Sequence
  Description of Artificial Sequence: Synthetic peptide
  Seed: TLELRSRYWAI
TCELRSRYWAV

SEQ ID NO: 16719 - protein, 11 aa, Artificial Sequence
  Description of Artificial Sequence: Synthetic peptide
  Seed: TLELRSRYWAI
TCELRSRYWAF

SEQ ID NO: 16720 - protein, 11 aa, Artificial Sequence
  Description of Artificial Sequence: Synthetic peptide
  Seed: TLELRSRYWAI
TCELRSRYWAM

SEQ ID NO: 16721 - protein, 11 aa, Artificial Sequence
  Description of Artificial Sequence: Synthetic peptide
  Seed: TLELRSRYWAI
TCELRSRYWAL

SEQ ID NO: 16722 - protein, 11 aa, Artificial Sequence
  Description of Artificial Sequence: Synthetic peptide
  Seed: TLELRSRYWAI
TRELRSRYWAA

SEQ ID NO: 16723 - protein, 11 aa, Artificial Sequence
  Description of Artificial Sequence: Synthetic peptide
  Seed: TLELRSRYWAI
TRELRSRYWAI

SEQ ID NO: 16724 - protein, 11 aa, Artificial Sequence
  Description of Artificial Sequence: Synthetic peptide
  Seed: TLELRSRYWAI
TRELRSRYWAL

SEQ ID NO: 16725 - protein, 11 aa, Artificial Sequence
  Description of Artificial Sequence: Synthetic peptide
  Seed: TLELRSRYWAI
TRELRSRYWAM

SEQ ID NO: 16726 - protein, 11 aa, Artificial Sequence
  Description of Artificial Sequence: Synthetic peptide
  Seed: TLELRSRYWAI
TRELRSRYWAF

SEQ ID NO: 16727 - protein, 11 aa, Artificial Sequence
  Description of Artificial Sequence: Synthetic peptide
  Seed: TLELRSRYWAI
TRELRSRYWAV

SEQ ID NO: 16728 - protein, 11 aa, Artificial Sequence
  Description of Artificial Sequence: Synthetic peptide
  Seed: TLELRSRYWAI
TNELRSRYWAA

SEQ ID NO: 16729 - protein, 11 aa, Artificial Sequence
  Description of Artificial Sequence: Synthetic peptide
  Seed: TLELRSRYWAI
TNELRSRYWAI

SEQ ID NO: 16730 - protein, 11 aa, Artificial Sequence
  Description of Artificial Sequence: Synthetic peptide
  Seed: TLELRSRYWAI
TNELRSRYWAL

SEQ ID NO: 16731 - protein, 11 aa, Artificial Sequence
  Description of Artificial Sequence: Synthetic peptide
  Seed: TLELRSRYWAI
TNELRSRYWAM

SEQ ID NO: 16732 - protein, 11 aa, Artificial Sequence
  Description of Artificial Sequence: Synthetic peptide
  Seed: TLELRSRYWAI
TNELRSRYWAF

SEQ ID NO: 16733 - protein, 11 aa, Artificial Sequence
  Description of Artificial Sequence: Synthetic peptide
  Seed: TLELRSRYWAI
TNELRSRYWAV

SEQ ID NO: 16734 - protein, 11 aa, Artificial Sequence
  Description of Artificial Sequence: Synthetic peptide
  Seed: TLELRSRYWAI
TDELRSRYWAI

SEQ ID NO: 16735 - protein, 11 aa, Artificial Sequence
  Description of Artificial Sequence: Synthetic peptide
  Seed: TLELRSRYWAI
TDELRSRYWAL

SEQ ID NO: 16736 - protein, 11 aa, Artificial Sequence
  Description of Artificial Sequence: Synthetic peptide
  Seed: TLELRSRYWAI
TDELRSRYWAM

SEQ ID NO: 16737 - protein, 11 aa, Artificial Sequence
  Description of Artificial Sequence: Synthetic peptide
  Seed: TLELRSRYWAI
TDELRSRYWAF

SEQ ID NO: 16738 - protein, 11 aa, Artificial Sequence
  Description of Artificial Sequence: Synthetic peptide
  Seed: TLELRSRYWAI
TDELRSRYWAV

SEQ ID NO: 16739 - protein, 11 aa, Artificial Sequence
  Description of Artificial Sequence: Synthetic peptide
  Seed: TLELRSRYWAI
TCELRSRYWAA

SEQ ID NO: 16740 - protein, 11 aa, Artificial Sequence
  Description of Artificial Sequence: Synthetic peptide
  Seed: TLELRSRYWAI
TCELRSRYWAI

SEQ ID NO: 16741 - protein, 11 aa, Artificial Sequence
  Description of Artificial Sequence: Synthetic peptide
  Seed: TLELRSRYWAI
THELRSRYWAM

SEQ ID NO: 16742 - protein, 11 aa, Artificial Sequence
  Description of Artificial Sequence: Synthetic peptide
  Seed: TLELRSRYWAI
THELRSRYWAV

SEQ ID NO: 16743 - protein, 11 aa, Artificial Sequence
  Description of Artificial Sequence: Synthetic peptide
  Seed: TLELRSRYWAI
TPELRSRYWAV

SEQ ID NO: 16744 - protein, 11 aa, Artificial Sequence
  Description of Artificial Sequence: Synthetic peptide
  Seed: TLELRSRYWAI
TFELRSRYWAL

SEQ ID NO: 16745 - protein, 11 aa, Artificial Sequence
  Description of Artificial Sequence: Synthetic peptide
  Seed: TLELRSRYWAI
TFELRSRYWAM

SEQ ID NO: 16746 - protein, 11 aa, Artificial Sequence
  Description of Artificial Sequence: Synthetic peptide
  Seed: TLELRSRYWAI
TFELRSRYWAF

SEQ ID NO: 16747 - protein, 11 aa, Artificial Sequence
  Description of Artificial Sequence: Synthetic peptide
  Seed: TLELRSRYWAI
TFELRSRYWAV

SEQ ID NO: 16748 - protein, 11 aa, Artificial Sequence
  Description of Artificial Sequence: Synthetic peptide
  Seed: TLELRSRYWAI
TPELRSRYWAA

SEQ ID NO: 16749 - protein, 11 aa, Artificial Sequence
  Description of Artificial Sequence: Synthetic peptide
  Seed: TLELRSRYWAI
TPELRSRYWAI

SEQ ID NO: 16750 - protein, 11 aa, Artificial Sequence
  Description of Artificial Sequence: Synthetic peptide
  Seed: TLELRSRYWAI
TPELRSRYWAL

SEQ ID NO: 16751 - protein, 11 aa, Artificial Sequence
  Description of Artificial Sequence: Synthetic peptide
  Seed: TLELRSRYWAI
TPELRSRYWAM

SEQ ID NO: 16752 - protein, 11 aa, Artificial Sequence
  Description of Artificial Sequence: Synthetic peptide
  Seed: TLELRSRYWAI
TPELRSRYWAF

SEQ ID NO: 16753 - protein, 11 aa, Artificial Sequence
  Description of Artificial Sequence: Synthetic peptide
  Seed: TLELRSRYWAI
TSELRSRYWAA

SEQ ID NO: 16754 - protein, 11 aa, Artificial Sequence
  Description of Artificial Sequence: Synthetic peptide
  Seed: TLELRSRYWAI
TIELRSRYWAA

SEQ ID NO: 16755 - protein, 11 aa, Artificial Sequence
  Description of Artificial Sequence: Synthetic peptide
  Seed: TLELRSRYWAI
TSELRSRYWAI

SEQ ID NO: 16756 - protein, 11 aa, Artificial Sequence
  Description of Artificial Sequence: Synthetic peptide
  Seed: TLELRSRYWAI
TSELRSRYWAL

SEQ ID NO: 16757 - protein, 11 aa, Artificial Sequence
  Description of Artificial Sequence: Synthetic peptide
  Seed: TLELRSRYWAI
TSELRSRYWAM

SEQ ID NO: 16758 - protein, 11 aa, Artificial Sequence
  Description of Artificial Sequence: Synthetic peptide
  Seed: TLELRSRYWAI
TSELRSRYWAF

SEQ ID NO: 16759 - protein, 11 aa, Artificial Sequence
  Description of Artificial Sequence: Synthetic peptide
  Seed: TLELRSRYWAI
TSELRSRYWAV

SEQ ID NO: 16760 - protein, 11 aa, Artificial Sequence
  Description of Artificial Sequence: Synthetic peptide
  Seed: TLELRSRYWAI
TTELRSRYWAA

SEQ ID NO: 16761 - protein, 11 aa, Artificial Sequence
  Description of Artificial Sequence: Synthetic peptide
  Seed: TLELRSRYWAI
TTELRSRYWAI

SEQ ID NO: 16762 - protein, 11 aa, Artificial Sequence
  Description of Artificial Sequence: Synthetic peptide
  Seed: TLELRSRYWAI
TTELRSRYWAL

SEQ ID NO: 16763 - protein, 11 aa, Artificial Sequence
  Description of Artificial Sequence: Synthetic peptide
  Seed: TLELRSRYWAI
TTELRSRYWAM

SEQ ID NO: 16764 - protein, 11 aa, Artificial Sequence
  Description of Artificial Sequence: Synthetic peptide
  Seed: TLELRSRYWAI
TFELRSRYWAI

SEQ ID NO: 16765 - protein, 11 aa, Artificial Sequence
  Description of Artificial Sequence: Synthetic peptide
  Seed: TLELRSRYWAI
TFELRSRYWAA

SEQ ID NO: 16766 - protein, 11 aa, Artificial Sequence
  Description of Artificial Sequence: Synthetic peptide
  Seed: TLELRSRYWAI
TMELRSRYWAV

SEQ ID NO: 16767 - protein, 11 aa, Artificial Sequence
  Description of Artificial Sequence: Synthetic peptide
  Seed: TLELRSRYWAI
TMELRSRYWAF

SEQ ID NO: 16768 - protein, 11 aa, Artificial Sequence
  Description of Artificial Sequence: Synthetic peptide
  Seed: TLELRSRYWAI
TIELRSRYWAI

SEQ ID NO: 16769 - protein, 11 aa, Artificial Sequence
  Description of Artificial Sequence: Synthetic peptide
  Seed: TLELRSRYWAI
TIELRSRYWAL

SEQ ID NO: 16770 - protein, 11 aa, Artificial Sequence
  Description of Artificial Sequence: Synthetic peptide
  Seed: TLELRSRYWAI
TIELRSRYWAM

SEQ ID NO: 16771 - protein, 11 aa, Artificial Sequence
  Description of Artificial Sequence: Synthetic peptide
  Seed: TLELRSRYWAI
TIELRSRYWAF

SEQ ID NO: 16772 - protein, 11 aa, Artificial Sequence
  Description of Artificial Sequence: Synthetic peptide
  Seed: TLELRSRYWAI
TIELRSRYWAV

SEQ ID NO: 16773 - protein, 11 aa, Artificial Sequence
  Description of Artificial Sequence: Synthetic peptide
  Seed: TLELRSRYWAI
TLELRSRYWAL

SEQ ID NO: 16774 - protein, 11 aa, Artificial Sequence
  Description of Artificial Sequence: Synthetic peptide
  Seed: TLELRSRYWAI
TLELRSRYWAM

SEQ ID NO: 16775 - protein, 11 aa, Artificial Sequence
  Description of Artificial Sequence: Synthetic peptide
  Seed: TLELRSRYWAI
TLELRSRYWAF

SEQ ID NO: 16776 - protein, 11 aa, Artificial Sequence
  Description of Artificial Sequence: Synthetic peptide
  Seed: TLELRSRYWAI
TLELRSRYWAV

SEQ ID NO: 16777 - protein, 11 aa, Artificial Sequence
  Description of Artificial Sequence: Synthetic peptide
  Seed: TLELRSRYWAI
TKELRSRYWAA

SEQ ID NO: 16778 - protein, 11 aa, Artificial Sequence
  Description of Artificial Sequence: Synthetic peptide
  Seed: TLELRSRYWAI
TKELRSRYWAI

SEQ ID NO: 16779 - protein, 11 aa, Artificial Sequence
  Description of Artificial Sequence: Synthetic peptide
  Seed: TLELRSRYWAI
TKELRSRYWAL

SEQ ID NO: 16780 - protein, 11 aa, Artificial Sequence
  Description of Artificial Sequence: Synthetic peptide
  Seed: TLELRSRYWAI
TKELRSRYWAM

SEQ ID NO: 16781 - protein, 11 aa, Artificial Sequence
  Description of Artificial Sequence: Synthetic peptide
  Seed: TLELRSRYWAI
TKELRSRYWAF

SEQ ID NO: 16782 - protein, 11 aa, Artificial Sequence
  Description of Artificial Sequence: Synthetic peptide
  Seed: TLELRSRYWAI
TKELRSRYWAV

SEQ ID NO: 16783 - protein, 11 aa, Artificial Sequence
  Description of Artificial Sequence: Synthetic peptide
  Seed: TLELRSRYWAI
TMELRSRYWAA

SEQ ID NO: 16784 - protein, 11 aa, Artificial Sequence
  Description of Artificial Sequence: Synthetic peptide
  Seed: TLELRSRYWAI
TMELRSRYWAI

SEQ ID NO: 16785 - protein, 11 aa, Artificial Sequence
  Description of Artificial Sequence: Synthetic peptide
  Seed: TLELRSRYWAI
TMELRSRYWAL

SEQ ID NO: 16786 - protein, 11 aa, Artificial Sequence
  Description of Artificial Sequence: Synthetic peptide
  Seed: TLELRSRYWAI
TMELRSRYWAM

SEQ ID NO: 16787 - protein, 11 aa, Artificial Sequence
  Description of Artificial Sequence: Synthetic peptide
  Seed: TLELRSRYWAI
TAELRSRYWAV

SEQ ID NO: 16788 - protein, 11 aa, Artificial Sequence
  Description of Artificial Sequence: Synthetic peptide
  Seed: TLELRSRYWAI
TAELRSRYWAF

SEQ ID NO: 16789 - protein, 11 aa, Artificial Sequence
  Description of Artificial Sequence: Synthetic peptide
  Seed: TLELRSRYWAI
TAELRSRYWAM

SEQ ID NO: 16790 - protein, 11 aa, Artificial Sequence
  Description of Artificial Sequence: Synthetic peptide
  Seed: TLELRSRYWAI
TAELRSRYWAL

SEQ ID NO: 16791 - protein, 11 aa, Artificial Sequence
  Description of Artificial Sequence: Synthetic peptide
  Seed: TLELRSRYWAI
TAELRSRYWAA

SEQ ID NO: 16792 - protein, 11 aa, Artificial Sequence
  Description of Artificial Sequence: Synthetic peptide
  Seed: TLELRSRYWAI
TAELRSRYWAI

SEQ ID NO: 16793 - protein, 9 aa, Artificial Sequence
  Description of Artificial Sequence: Synthetic peptide
  Seed: TMESSTLEL
TAESSTLEF

SEQ ID NO: 16794 - protein, 9 aa, Artificial Sequence
  Description of Artificial Sequence: Synthetic peptide
  Seed: TMESSTLEL
TAESSTLEV

SEQ ID NO: 16795 - protein, 9 aa, Artificial Sequence
  Description of Artificial Sequence: Synthetic peptide
  Seed: TYQRTRALV
TYQRTRALM

SEQ ID NO: 16796 - protein, 9 aa, Artificial Sequence
  Description of Artificial Sequence: Synthetic peptide
  Seed: TTYQRTRAL
TPYQRTRAW

SEQ ID NO: 16797 - protein, 9 aa, Artificial Sequence
  Description of Artificial Sequence: Synthetic peptide
  Seed: TTYQRTRAL
TPYQRTRAG

SEQ ID NO: 16798 - protein, 9 aa, Artificial Sequence
  Description of Artificial Sequence: Synthetic peptide
  Seed: TTYQRTRAL
TPYQRTRAH

SEQ ID NO: 16799 - protein, 9 aa, Artificial Sequence
  Description of Artificial Sequence: Synthetic peptide
  Seed: TTYQRTRAL
TPYQRTRAI

SEQ ID NO: 16800 - protein, 9 aa, Artificial Sequence
  Description of Artificial Sequence: Synthetic peptide
  Seed: TTYQRTRAL
TPYQRTRAL

SEQ ID NO: 16801 - protein, 9 aa, Artificial Sequence
  Description of Artificial Sequence: Synthetic peptide
  Seed: TTYQRTRAL
TPYQRTRAM

SEQ ID NO: 16802 - protein, 9 aa, Artificial Sequence
  Description of Artificial Sequence: Synthetic peptide
  Seed: TTYQRTRAL
TPYQRTRAF

SEQ ID NO: 16803 - protein, 9 aa, Artificial Sequence
  Description of Artificial Sequence: Synthetic peptide
  Seed: TTYQRTRAL
TPYQRTRAP

SEQ ID NO: 16804 - protein, 9 aa, Artificial Sequence
  Description of Artificial Sequence: Synthetic peptide
  Seed: TTYQRTRAL
TPYQRTRAS

SEQ ID NO: 16805 - protein, 9 aa, Artificial Sequence
  Description of Artificial Sequence: Synthetic peptide
  Seed: TTYQRTRAL
TPYQRTRAT

SEQ ID NO: 16806 - protein, 9 aa, Artificial Sequence
  Description of Artificial Sequence: Synthetic peptide
  Seed: TTYQRTRAL
TPYQRTRAY

SEQ ID NO: 16807 - protein, 9 aa, Artificial Sequence
  Description of Artificial Sequence: Synthetic peptide
  Seed: TTYQRTRAL
TSYQRTRAW

SEQ ID NO: 16808 - protein, 9 aa, Artificial Sequence
  Description of Artificial Sequence: Synthetic peptide
  Seed: TTYQRTRAL
TPYQRTRAV

SEQ ID NO: 16809 - protein, 9 aa, Artificial Sequence
  Description of Artificial Sequence: Synthetic peptide
  Seed: TTYQRTRAL
TSYQRTRAA

SEQ ID NO: 16810 - protein, 9 aa, Artificial Sequence
  Description of Artificial Sequence: Synthetic peptide
  Seed: TTYQRTRAL
TSYQRTRAC

SEQ ID NO: 16811 - protein, 9 aa, Artificial Sequence
  Description of Artificial Sequence: Synthetic peptide
  Seed: TTYQRTRAL
TSYQRTRAH

SEQ ID NO: 16812 - protein, 9 aa, Artificial Sequence
  Description of Artificial Sequence: Synthetic peptide
  Seed: TTYQRTRAL
TSYQRTRAI

SEQ ID NO: 16813 - protein, 9 aa, Artificial Sequence
  Description of Artificial Sequence: Synthetic peptide
  Seed: TTYQRTRAL
TSYQRTRAL

SEQ ID NO: 16814 - protein, 9 aa, Artificial Sequence
  Description of Artificial Sequence: Synthetic peptide
  Seed: TTYQRTRAL
TSYQRTRAK

SEQ ID NO: 16815 - protein, 9 aa, Artificial Sequence
  Description of Artificial Sequence: Synthetic peptide
  Seed: TTYQRTRAL
TSYQRTRAM

SEQ ID NO: 16816 - protein, 9 aa, Artificial Sequence
  Description of Artificial Sequence: Synthetic peptide
  Seed: TTYQRTRAL
TSYQRTRAF

SEQ ID NO: 16817 - protein, 9 aa, Artificial Sequence
  Description of Artificial Sequence: Synthetic peptide
  Seed: TTYQRTRAL
TPYQRTRAE

SEQ ID NO: 16818 - protein, 9 aa, Artificial Sequence
  Description of Artificial Sequence: Synthetic peptide
  Seed: TTYQRTRAL
TPYQRTRAQ

SEQ ID NO: 16819 - protein, 9 aa, Artificial Sequence
  Description of Artificial Sequence: Synthetic peptide
  Seed: TTYQRTRAL
TPYQRTRAC

SEQ ID NO: 16820 - protein, 9 aa, Artificial Sequence
  Description of Artificial Sequence: Synthetic peptide
  Seed: TTYQRTRAL
TPYQRTRAA

SEQ ID NO: 16821 - protein, 9 aa, Artificial Sequence
  Description of Artificial Sequence: Synthetic peptide
  Seed: TTYQRTRAL
TMYQRTRAS

SEQ ID NO: 16822 - protein, 9 aa, Artificial Sequence
  Description of Artificial Sequence: Synthetic peptide
  Seed: TTYQRTRAL
TMYQRTRAT

SEQ ID NO: 16823 - protein, 9 aa, Artificial Sequence
  Description of Artificial Sequence: Synthetic peptide
  Seed: TTYQRTRAL
TMYQRTRAW

SEQ ID NO: 16824 - protein, 9 aa, Artificial Sequence
  Description of Artificial Sequence: Synthetic peptide
  Seed: TTYQRTRAL
TMYQRTRAY

SEQ ID NO: 16825 - protein, 9 aa, Artificial Sequence
  Description of Artificial Sequence: Synthetic peptide
  Seed: TTYQRTRAL
TMYQRTRAV

SEQ ID NO: 16826 - protein, 9 aa, Artificial Sequence
  Description of Artificial Sequence: Synthetic peptide
  Seed: TTYQRTRAL
TFYQRTRAA

SEQ ID NO: 16827 - protein, 9 aa, Artificial Sequence
  Description of Artificial Sequence: Synthetic peptide
  Seed: TTYQRTRAL
TFYQRTRAC

SEQ ID NO: 16828 - protein, 9 aa, Artificial Sequence
  Description of Artificial Sequence: Synthetic peptide
  Seed: TTYQRTRAL
TFYQRTRAQ

SEQ ID NO: 16829 - protein, 9 aa, Artificial Sequence
  Description of Artificial Sequence: Synthetic peptide
  Seed: TTYQRTRAL
TFYQRTRAH

SEQ ID NO: 16830 - protein, 9 aa, Artificial Sequence
  Description of Artificial Sequence: Synthetic peptide
  Seed: TTYQRTRAL
TFYQRTRAI

SEQ ID NO: 16831 - protein, 9 aa, Artificial Sequence
  Description of Artificial Sequence: Synthetic peptide
  Seed: TTYQRTRAL
TFYQRTRAL

SEQ ID NO: 16832 - protein, 9 aa, Artificial Sequence
  Description of Artificial Sequence: Synthetic peptide
  Seed: TTYQRTRAL
TFYQRTRAK

SEQ ID NO: 16833 - protein, 9 aa, Artificial Sequence
  Description of Artificial Sequence: Synthetic peptide
  Seed: TTYQRTRAL
TFYQRTRAM

SEQ ID NO: 16834 - protein, 9 aa, Artificial Sequence
  Description of Artificial Sequence: Synthetic peptide
  Seed: TTYQRTRAL
TFYQRTRAF

SEQ ID NO: 16835 - protein, 9 aa, Artificial Sequence
  Description of Artificial Sequence: Synthetic peptide
  Seed: TTYQRTRAL
TFYQRTRAS

SEQ ID NO: 16836 - protein, 9 aa, Artificial Sequence
  Description of Artificial Sequence: Synthetic peptide
  Seed: TTYQRTRAL
TFYQRTRAT

SEQ ID NO: 16837 - protein, 9 aa, Artificial Sequence
  Description of Artificial Sequence: Synthetic peptide
  Seed: TTYQRTRAL
TFYQRTRAW

SEQ ID NO: 16838 - protein, 9 aa, Artificial Sequence
  Description of Artificial Sequence: Synthetic peptide
  Seed: TTYQRTRAL
TFYQRTRAY

SEQ ID NO: 16839 - protein, 9 aa, Artificial Sequence
  Description of Artificial Sequence: Synthetic peptide
  Seed: TTYQRTRAL
TFYQRTRAV

SEQ ID NO: 16840 - protein, 9 aa, Artificial Sequence
  Description of Artificial Sequence: Synthetic peptide
  Seed: TTYQRTRAL
TSYQRTRAT

SEQ ID NO: 16841 - protein, 9 aa, Artificial Sequence
  Description of Artificial Sequence: Synthetic peptide
  Seed: TTYQRTRAL
TSYQRTRAY

SEQ ID NO: 16842 - protein, 9 aa, Artificial Sequence
  Description of Artificial Sequence: Synthetic peptide
  Seed: TTYQRTRAL
TMYQRTRAM

SEQ ID NO: 16843 - protein, 9 aa, Artificial Sequence
  Description of Artificial Sequence: Synthetic peptide
  Seed: TTYQRTRAL
TYYQRTRAK

SEQ ID NO: 16844 - protein, 9 aa, Artificial Sequence
  Description of Artificial Sequence: Synthetic peptide
  Seed: TTYQRTRAL
TYYQRTRAA

SEQ ID NO: 16845 - protein, 9 aa, Artificial Sequence
  Description of Artificial Sequence: Synthetic peptide
  Seed: TTYQRTRAL
TYYQRTRAR

SEQ ID NO: 16846 - protein, 9 aa, Artificial Sequence
  Description of Artificial Sequence: Synthetic peptide
  Seed: TTYQRTRAL
TYYQRTRAC

SEQ ID NO: 16847 - protein, 9 aa, Artificial Sequence
  Description of Artificial Sequence: Synthetic peptide
  Seed: TTYQRTRAL
TYYQRTRAQ

SEQ ID NO: 16848 - protein, 9 aa, Artificial Sequence
  Description of Artificial Sequence: Synthetic peptide
  Seed: TTYQRTRAL
TYYQRTRAE

SEQ ID NO: 16849 - protein, 9 aa, Artificial Sequence
  Description of Artificial Sequence: Synthetic peptide
  Seed: TTYQRTRAL
TYYQRTRAG

SEQ ID NO: 16850 - protein, 9 aa, Artificial Sequence
  Description of Artificial Sequence: Synthetic peptide
  Seed: TTYQRTRAL
TYYQRTRAH

SEQ ID NO: 16851 - protein, 9 aa, Artificial Sequence
  Description of Artificial Sequence: Synthetic peptide
  Seed: TTYQRTRAL
TYYQRTRAI

SEQ ID NO: 16852 - protein, 9 aa, Artificial Sequence
  Description of Artificial Sequence: Synthetic peptide
  Seed: TTYQRTRAL
TYYQRTRAL

SEQ ID NO: 16853 - protein, 9 aa, Artificial Sequence
  Description of Artificial Sequence: Synthetic peptide
  Seed: TTYQRTRAL
TYYQRTRAM

SEQ ID NO: 16854 - protein, 9 aa, Artificial Sequence
  Description of Artificial Sequence: Synthetic peptide
  Seed: TTYQRTRAL
TSYQRTRAV

SEQ ID NO: 16855 - protein, 9 aa, Artificial Sequence
  Description of Artificial Sequence: Synthetic peptide
  Seed: TTYQRTRAL
TYYQRTRAF

SEQ ID NO: 16856 - protein, 9 aa, Artificial Sequence
  Description of Artificial Sequence: Synthetic peptide
  Seed: TTYQRTRAL
TYYQRTRAS

SEQ ID NO: 16857 - protein, 9 aa, Artificial Sequence
  Description of Artificial Sequence: Synthetic peptide
  Seed: TTYQRTRAL
TYYQRTRAT

SEQ ID NO: 16858 - protein, 9 aa, Artificial Sequence
  Description of Artificial Sequence: Synthetic peptide
  Seed: TTYQRTRAL
TYYQRTRAW

SEQ ID NO: 16859 - protein, 9 aa, Artificial Sequence
  Description of Artificial Sequence: Synthetic peptide
  Seed: TTYQRTRAL
TYYQRTRAY

SEQ ID NO: 16860 - protein, 9 aa, Artificial Sequence
  Description of Artificial Sequence: Synthetic peptide
  Seed: TTYQRTRAL
TYYQRTRAV

SEQ ID NO: 16861 - protein, 9 aa, Artificial Sequence
  Description of Artificial Sequence: Synthetic peptide
  Seed: TTYQRTRAL
TVYQRTRAA

SEQ ID NO: 16862 - protein, 9 aa, Artificial Sequence
  Description of Artificial Sequence: Synthetic peptide
  Seed: TTYQRTRAL
TVYQRTRAR

SEQ ID NO: 16863 - protein, 9 aa, Artificial Sequence
  Description of Artificial Sequence: Synthetic peptide
  Seed: TTYQRTRAL
TVYQRTRAC

SEQ ID NO: 16864 - protein, 9 aa, Artificial Sequence
  Description of Artificial Sequence: Synthetic peptide
  Seed: TTYQRTRAL
TWYQRTRAV

SEQ ID NO: 16865 - protein, 9 aa, Artificial Sequence
  Description of Artificial Sequence: Synthetic peptide
  Seed: TTYQRTRAL
TWYQRTRAY

SEQ ID NO: 16866 - protein, 9 aa, Artificial Sequence
  Description of Artificial Sequence: Synthetic peptide
  Seed: TTYQRTRAL
TWYQRTRAW

SEQ ID NO: 16867 - protein, 9 aa, Artificial Sequence
  Description of Artificial Sequence: Synthetic peptide
  Seed: TTYQRTRAL
TWYQRTRAF

SEQ ID NO: 16868 - protein, 9 aa, Artificial Sequence
  Description of Artificial Sequence: Synthetic peptide
  Seed: TTYQRTRAL
TTYQRTRAA

SEQ ID NO: 16869 - protein, 9 aa, Artificial Sequence
  Description of Artificial Sequence: Synthetic peptide
  Seed: TTYQRTRAL
TTYQRTRAR

SEQ ID NO: 16870 - protein, 9 aa, Artificial Sequence
  Description of Artificial Sequence: Synthetic peptide
  Seed: TTYQRTRAL
TTYQRTRAC

SEQ ID NO: 16871 - protein, 9 aa, Artificial Sequence
  Description of Artificial Sequence: Synthetic peptide
  Seed: TTYQRTRAL
TTYQRTRAH

SEQ ID NO: 16872 - protein, 9 aa, Artificial Sequence
  Description of Artificial Sequence: Synthetic peptide
  Seed: TTYQRTRAL
TTYQRTRAI

SEQ ID NO: 16873 - protein, 9 aa, Artificial Sequence
  Description of Artificial Sequence: Synthetic peptide
  Seed: TTYQRTRAL
TTYQRTRAK

SEQ ID NO: 16874 - protein, 9 aa, Artificial Sequence
  Description of Artificial Sequence: Synthetic peptide
  Seed: TTYQRTRAL
TTYQRTRAM

SEQ ID NO: 16875 - protein, 9 aa, Artificial Sequence
  Description of Artificial Sequence: Synthetic peptide
  Seed: TTYQRTRAL
TTYQRTRAF

SEQ ID NO: 16876 - protein, 9 aa, Artificial Sequence
  Description of Artificial Sequence: Synthetic peptide
  Seed: TTYQRTRAL
TTYQRTRAS

SEQ ID NO: 16877 - protein, 9 aa, Artificial Sequence
  Description of Artificial Sequence: Synthetic peptide
  Seed: TTYQRTRAL
TTYQRTRAW

SEQ ID NO: 16878 - protein, 9 aa, Artificial Sequence
  Description of Artificial Sequence: Synthetic peptide
  Seed: TTYQRTRAL
TTYQRTRAY

SEQ ID NO: 16879 - protein, 9 aa, Artificial Sequence
  Description of Artificial Sequence: Synthetic peptide
  Seed: TTYQRTRAL
TTYQRTRAV

SEQ ID NO: 16880 - protein, 9 aa, Artificial Sequence
  Description of Artificial Sequence: Synthetic peptide
  Seed: TTYQRTRAL
TWYQRTRAA

SEQ ID NO: 16881 - protein, 9 aa, Artificial Sequence
  Description of Artificial Sequence: Synthetic peptide
  Seed: TTYQRTRAL
TWYQRTRAC

SEQ ID NO: 16882 - protein, 9 aa, Artificial Sequence
  Description of Artificial Sequence: Synthetic peptide
  Seed: TTYQRTRAL
TWYQRTRAH

SEQ ID NO: 16883 - protein, 9 aa, Artificial Sequence
  Description of Artificial Sequence: Synthetic peptide
  Seed: TTYQRTRAL
TWYQRTRAI

SEQ ID NO: 16884 - protein, 9 aa, Artificial Sequence
  Description of Artificial Sequence: Synthetic peptide
  Seed: TTYQRTRAL
TWYQRTRAL

SEQ ID NO: 16885 - protein, 9 aa, Artificial Sequence
  Description of Artificial Sequence: Synthetic peptide
  Seed: TTYQRTRAL
TWYQRTRAK

SEQ ID NO: 16886 - protein, 9 aa, Artificial Sequence
  Description of Artificial Sequence: Synthetic peptide
  Seed: TTYQRTRAL
TWYQRTRAM

SEQ ID NO: 16887 - protein, 9 aa, Artificial Sequence
  Description of Artificial Sequence: Synthetic peptide
  Seed: TTYQRTRAL
TMYQRTRAF

SEQ ID NO: 16888 - protein, 9 aa, Artificial Sequence
  Description of Artificial Sequence: Synthetic peptide
  Seed: TTYQRTRAL
TMYQRTRAK

SEQ ID NO: 16889 - protein, 9 aa, Artificial Sequence
  Description of Artificial Sequence: Synthetic peptide
  Seed: TMESSTLEL
TRESSTLEF

SEQ ID NO: 16890 - protein, 9 aa, Artificial Sequence
  Description of Artificial Sequence: Synthetic peptide
  Seed: TTYQRTRAL
TGYQRTRAM

SEQ ID NO: 16891 - protein, 9 aa, Artificial Sequence
  Description of Artificial Sequence: Synthetic peptide
  Seed: TTYQRTRAL
TEYQRTRAL

SEQ ID NO: 16892 - protein, 9 aa, Artificial Sequence
  Description of Artificial Sequence: Synthetic peptide
  Seed: TTYQRTRAL
TEYQRTRAM

SEQ ID NO: 16893 - protein, 9 aa, Artificial Sequence
  Description of Artificial Sequence: Synthetic peptide
  Seed: TTYQRTRAL
TEYQRTRAF

SEQ ID NO: 16894 - protein, 9 aa, Artificial Sequence
  Description of Artificial Sequence: Synthetic peptide
  Seed: TTYQRTRAL
TEYQRTRAW

SEQ ID NO: 16895 - protein, 9 aa, Artificial Sequence
  Description of Artificial Sequence: Synthetic peptide
  Seed: TTYQRTRAL
TEYQRTRAY

SEQ ID NO: 16896 - protein, 9 aa, Artificial Sequence
  Description of Artificial Sequence: Synthetic peptide
  Seed: TTYQRTRAL
TGYQRTRAA

SEQ ID NO: 16897 - protein, 9 aa, Artificial Sequence
  Description of Artificial Sequence: Synthetic peptide
  Seed: TTYQRTRAL
TGYQRTRAI

SEQ ID NO: 16898 - protein, 9 aa, Artificial Sequence
  Description of Artificial Sequence: Synthetic peptide
  Seed: TTYQRTRAL
TGYQRTRAL

SEQ ID NO: 16899 - protein, 9 aa, Artificial Sequence
  Description of Artificial Sequence: Synthetic peptide
  Seed: TTYQRTRAL
TGYQRTRAK

SEQ ID NO: 16900 - protein, 9 aa, Artificial Sequence
  Description of Artificial Sequence: Synthetic peptide
  Seed: TTYQRTRAL
TGYQRTRAF

SEQ ID NO: 16901 - protein, 9 aa, Artificial Sequence
  Description of Artificial Sequence: Synthetic peptide
  Seed: TTYQRTRAL
THYQRTRAT

SEQ ID NO: 16902 - protein, 9 aa, Artificial Sequence
  Description of Artificial Sequence: Synthetic peptide
  Seed: TTYQRTRAL
TGYQRTRAW

SEQ ID NO: 16903 - protein, 9 aa, Artificial Sequence
  Description of Artificial Sequence: Synthetic peptide
  Seed: TTYQRTRAL
TGYQRTRAY

SEQ ID NO: 16904 - protein, 9 aa, Artificial Sequence
  Description of Artificial Sequence: Synthetic peptide
  Seed: TTYQRTRAL
TGYQRTRAV

SEQ ID NO: 16905 - protein, 9 aa, Artificial Sequence
  Description of Artificial Sequence: Synthetic peptide
  Seed: TTYQRTRAL
THYQRTRAA

SEQ ID NO: 16906 - protein, 9 aa, Artificial Sequence
  Description of Artificial Sequence: Synthetic peptide
  Seed: TTYQRTRAL
THYQRTRAC

SEQ ID NO: 16907 - protein, 9 aa, Artificial Sequence
  Description of Artificial Sequence: Synthetic peptide
  Seed: TTYQRTRAL
THYQRTRAH

SEQ ID NO: 16908 - protein, 9 aa, Artificial Sequence
  Description of Artificial Sequence: Synthetic peptide
  Seed: TTYQRTRAL
THYQRTRAI

SEQ ID NO: 16909 - protein, 9 aa, Artificial Sequence
  Description of Artificial Sequence: Synthetic peptide
  Seed: TTYQRTRAL
THYQRTRAL

SEQ ID NO: 16910 - protein, 9 aa, Artificial Sequence
  Description of Artificial Sequence: Synthetic peptide
  Seed: TTYQRTRAL
THYQRTRAM

SEQ ID NO: 16911 - protein, 9 aa, Artificial Sequence
  Description of Artificial Sequence: Synthetic peptide
  Seed: TTYQRTRAL
TEYQRTRAI

SEQ ID NO: 16912 - protein, 9 aa, Artificial Sequence
  Description of Artificial Sequence: Synthetic peptide
  Seed: TTYQRTRAL
TEYQRTRAH

SEQ ID NO: 16913 - protein, 9 aa, Artificial Sequence
  Description of Artificial Sequence: Synthetic peptide
  Seed: TTYQRTRAL
TQYQRTRAV

SEQ ID NO: 16914 - protein, 9 aa, Artificial Sequence
  Description of Artificial Sequence: Synthetic peptide
  Seed: TTYQRTRAL
TQYQRTRAY

SEQ ID NO: 16915 - protein, 9 aa, Artificial Sequence
  Description of Artificial Sequence: Synthetic peptide
  Seed: TTYQRTRAL
TCYQRTRAW

SEQ ID NO: 16916 - protein, 9 aa, Artificial Sequence
  Description of Artificial Sequence: Synthetic peptide
  Seed: TTYQRTRAL
TCYQRTRAY

SEQ ID NO: 16917 - protein, 9 aa, Artificial Sequence
  Description of Artificial Sequence: Synthetic peptide
  Seed: TTYQRTRAL
TCYQRTRAV

SEQ ID NO: 16918 - protein, 9 aa, Artificial Sequence
  Description of Artificial Sequence: Synthetic peptide
  Seed: TTYQRTRAL
TQYQRTRAA

SEQ ID NO: 16919 - protein, 9 aa, Artificial Sequence
  Description of Artificial Sequence: Synthetic peptide
  Seed: TTYQRTRAL
TQYQRTRAN

SEQ ID NO: 16920 - protein, 9 aa, Artificial Sequence
  Description of Artificial Sequence: Synthetic peptide
  Seed: TTYQRTRAL
TQYQRTRAC

SEQ ID NO: 16921 - protein, 9 aa, Artificial Sequence
  Description of Artificial Sequence: Synthetic peptide
  Seed: TTYQRTRAL
TQYQRTRAQ

SEQ ID NO: 16922 - protein, 9 aa, Artificial Sequence
  Description of Artificial Sequence: Synthetic peptide
  Seed: TTYQRTRAL
TQYQRTRAE

SEQ ID NO: 16923 - protein, 9 aa, Artificial Sequence
  Description of Artificial Sequence: Synthetic peptide
  Seed: TTYQRTRAL
TQYQRTRAG

SEQ ID NO: 16924 - protein, 9 aa, Artificial Sequence
  Description of Artificial Sequence: Synthetic peptide
  Seed: TTYQRTRAL
TQYQRTRAH

SEQ ID NO: 16925 - protein, 9 aa, Artificial Sequence
  Description of Artificial Sequence: Synthetic peptide
  Seed: TTYQRTRAL
TQYQRTRAI

SEQ ID NO: 16926 - protein, 9 aa, Artificial Sequence
  Description of Artificial Sequence: Synthetic peptide
  Seed: TTYQRTRAL
TQYQRTRAL

SEQ ID NO: 16927 - protein, 9 aa, Artificial Sequence
  Description of Artificial Sequence: Synthetic peptide
  Seed: TTYQRTRAL
TQYQRTRAK

SEQ ID NO: 16928 - protein, 9 aa, Artificial Sequence
  Description of Artificial Sequence: Synthetic peptide
  Seed: TTYQRTRAL
TQYQRTRAM

SEQ ID NO: 16929 - protein, 9 aa, Artificial Sequence
  Description of Artificial Sequence: Synthetic peptide
  Seed: TTYQRTRAL
TQYQRTRAF

SEQ ID NO: 16930 - protein, 9 aa, Artificial Sequence
  Description of Artificial Sequence: Synthetic peptide
  Seed: TTYQRTRAL
TQYQRTRAP

SEQ ID NO: 16931 - protein, 9 aa, Artificial Sequence
  Description of Artificial Sequence: Synthetic peptide
  Seed: TTYQRTRAL
TQYQRTRAS

SEQ ID NO: 16932 - protein, 9 aa, Artificial Sequence
  Description of Artificial Sequence: Synthetic peptide
  Seed: TTYQRTRAL
TQYQRTRAT

SEQ ID NO: 16933 - protein, 9 aa, Artificial Sequence
  Description of Artificial Sequence: Synthetic peptide
  Seed: TTYQRTRAL
TQYQRTRAW

SEQ ID NO: 16934 - protein, 9 aa, Artificial Sequence
  Description of Artificial Sequence: Synthetic peptide
  Seed: TTYQRTRAL
THYQRTRAF

SEQ ID NO: 16935 - protein, 9 aa, Artificial Sequence
  Description of Artificial Sequence: Synthetic peptide
  Seed: TTYQRTRAL
THYQRTRAW

SEQ ID NO: 16936 - protein, 9 aa, Artificial Sequence
  Description of Artificial Sequence: Synthetic peptide
  Seed: TTYQRTRAL
TMYQRTRAL

SEQ ID NO: 16937 - protein, 9 aa, Artificial Sequence
  Description of Artificial Sequence: Synthetic peptide
  Seed: TTYQRTRAL
TKYQRTRAF

SEQ ID NO: 16938 - protein, 9 aa, Artificial Sequence
  Description of Artificial Sequence: Synthetic peptide
  Seed: TTYQRTRAL
TLYQRTRAT

SEQ ID NO: 16939 - protein, 9 aa, Artificial Sequence
  Description of Artificial Sequence: Synthetic peptide
  Seed: TTYQRTRAL
TLYQRTRAW

SEQ ID NO: 16940 - protein, 9 aa, Artificial Sequence
  Description of Artificial Sequence: Synthetic peptide
  Seed: TTYQRTRAL
TLYQRTRAY

SEQ ID NO: 16941 - protein, 9 aa, Artificial Sequence
  Description of Artificial Sequence: Synthetic peptide
  Seed: TTYQRTRAL
TLYQRTRAV

SEQ ID NO: 16942 - protein, 9 aa, Artificial Sequence
  Description of Artificial Sequence: Synthetic peptide
  Seed: TTYQRTRAL
TKYQRTRAA

SEQ ID NO: 16943 - protein, 9 aa, Artificial Sequence
  Description of Artificial Sequence: Synthetic peptide
  Seed: TTYQRTRAL
TKYQRTRAH

SEQ ID NO: 16944 - protein, 9 aa, Artificial Sequence
  Description of Artificial Sequence: Synthetic peptide
  Seed: TTYQRTRAL
TKYQRTRAI

SEQ ID NO: 16945 - protein, 9 aa, Artificial Sequence
  Description of Artificial Sequence: Synthetic peptide
  Seed: TTYQRTRAL
TKYQRTRAL

SEQ ID NO: 16946 - protein, 9 aa, Artificial Sequence
  Description of Artificial Sequence: Synthetic peptide
  Seed: TTYQRTRAL
TKYQRTRAM

SEQ ID NO: 16947 - protein, 9 aa, Artificial Sequence
  Description of Artificial Sequence: Synthetic peptide
  Seed: TTYQRTRAL
TKYQRTRAW

SEQ ID NO: 16948 - protein, 9 aa, Artificial Sequence
  Description of Artificial Sequence: Synthetic peptide
  Seed: TTYQRTRAL
THYQRTRAY

SEQ ID NO: 16949 - protein, 9 aa, Artificial Sequence
  Description of Artificial Sequence: Synthetic peptide
  Seed: TTYQRTRAL
TKYQRTRAY

SEQ ID NO: 16950 - protein, 9 aa, Artificial Sequence
  Description of Artificial Sequence: Synthetic peptide
  Seed: TTYQRTRAL
TKYQRTRAV

SEQ ID NO: 16951 - protein, 9 aa, Artificial Sequence
  Description of Artificial Sequence: Synthetic peptide
  Seed: TTYQRTRAL
TMYQRTRAA

SEQ ID NO: 16952 - protein, 9 aa, Artificial Sequence
  Description of Artificial Sequence: Synthetic peptide
  Seed: TTYQRTRAL
TMYQRTRAR

SEQ ID NO: 16953 - protein, 9 aa, Artificial Sequence
  Description of Artificial Sequence: Synthetic peptide
  Seed: TTYQRTRAL
TMYQRTRAC

SEQ ID NO: 16954 - protein, 9 aa, Artificial Sequence
  Description of Artificial Sequence: Synthetic peptide
  Seed: TTYQRTRAL
TMYQRTRAE

SEQ ID NO: 16955 - protein, 9 aa, Artificial Sequence
  Description of Artificial Sequence: Synthetic peptide
  Seed: TTYQRTRAL
TMYQRTRAG

SEQ ID NO: 16956 - protein, 9 aa, Artificial Sequence
  Description of Artificial Sequence: Synthetic peptide
  Seed: TTYQRTRAL
TMYQRTRAH

SEQ ID NO: 16957 - protein, 9 aa, Artificial Sequence
  Description of Artificial Sequence: Synthetic peptide
  Seed: TTYQRTRAL
TMYQRTRAI

SEQ ID NO: 16958 - protein, 9 aa, Artificial Sequence
  Description of Artificial Sequence: Synthetic peptide
  Seed: TTYQRTRAL
TLYQRTRAF

SEQ ID NO: 16959 - protein, 9 aa, Artificial Sequence
  Description of Artificial Sequence: Synthetic peptide
  Seed: TTYQRTRAL
TLYQRTRAM

SEQ ID NO: 16960 - protein, 9 aa, Artificial Sequence
  Description of Artificial Sequence: Synthetic peptide
  Seed: TTYQRTRAL
TLYQRTRAK

SEQ ID NO: 16961 - protein, 9 aa, Artificial Sequence
  Description of Artificial Sequence: Synthetic peptide
  Seed: TTYQRTRAL
TLYQRTRAL

SEQ ID NO: 16962 - protein, 9 aa, Artificial Sequence
  Description of Artificial Sequence: Synthetic peptide
  Seed: TTYQRTRAL
THYQRTRAV

SEQ ID NO: 16963 - protein, 9 aa, Artificial Sequence
  Description of Artificial Sequence: Synthetic peptide
  Seed: TTYQRTRAL
TIYQRTRAA

SEQ ID NO: 16964 - protein, 9 aa, Artificial Sequence
  Description of Artificial Sequence: Synthetic peptide
  Seed: TTYQRTRAL
TIYQRTRAR

SEQ ID NO: 16965 - protein, 9 aa, Artificial Sequence
  Description of Artificial Sequence: Synthetic peptide
  Seed: TTYQRTRAL
TIYQRTRAC

SEQ ID NO: 16966 - protein, 9 aa, Artificial Sequence
  Description of Artificial Sequence: Synthetic peptide
  Seed: TTYQRTRAL
TIYQRTRAH

SEQ ID NO: 16967 - protein, 9 aa, Artificial Sequence
  Description of Artificial Sequence: Synthetic peptide
  Seed: TTYQRTRAL
TIYQRTRAI

SEQ ID NO: 16968 - protein, 9 aa, Artificial Sequence
  Description of Artificial Sequence: Synthetic peptide
  Seed: TTYQRTRAL
TIYQRTRAL

SEQ ID NO: 16969 - protein, 9 aa, Artificial Sequence
  Description of Artificial Sequence: Synthetic peptide
  Seed: TTYQRTRAL
TIYQRTRAK

SEQ ID NO: 16970 - protein, 9 aa, Artificial Sequence
  Description of Artificial Sequence: Synthetic peptide
  Seed: TTYQRTRAL
TIYQRTRAM

SEQ ID NO: 16971 - protein, 9 aa, Artificial Sequence
  Description of Artificial Sequence: Synthetic peptide
  Seed: TTYQRTRAL
TIYQRTRAF

SEQ ID NO: 16972 - protein, 9 aa, Artificial Sequence
  Description of Artificial Sequence: Synthetic peptide
  Seed: TTYQRTRAL
TIYQRTRAW

SEQ ID NO: 16973 - protein, 9 aa, Artificial Sequence
  Description of Artificial Sequence: Synthetic peptide
  Seed: TTYQRTRAL
TIYQRTRAY

SEQ ID NO: 16974 - protein, 9 aa, Artificial Sequence
  Description of Artificial Sequence: Synthetic peptide
  Seed: TTYQRTRAL
TIYQRTRAV

SEQ ID NO: 16975 - protein, 9 aa, Artificial Sequence
  Description of Artificial Sequence: Synthetic peptide
  Seed: TTYQRTRAL
TLYQRTRAA

SEQ ID NO: 16976 - protein, 9 aa, Artificial Sequence
  Description of Artificial Sequence: Synthetic peptide
  Seed: TTYQRTRAL
TLYQRTRAR

SEQ ID NO: 16977 - protein, 9 aa, Artificial Sequence
  Description of Artificial Sequence: Synthetic peptide
  Seed: TTYQRTRAL
TLYQRTRAC

SEQ ID NO: 16978 - protein, 9 aa, Artificial Sequence
  Description of Artificial Sequence: Synthetic peptide
  Seed: TTYQRTRAL
TLYQRTRAG

SEQ ID NO: 16979 - protein, 9 aa, Artificial Sequence
  Description of Artificial Sequence: Synthetic peptide
  Seed: TTYQRTRAL
TLYQRTRAH

SEQ ID NO: 16980 - protein, 9 aa, Artificial Sequence
  Description of Artificial Sequence: Synthetic peptide
  Seed: TTYQRTRAL
TLYQRTRAI

SEQ ID NO: 16981 - protein, 9 aa, Artificial Sequence
  Description of Artificial Sequence: Synthetic peptide
  Seed: TTYQRTRAL
TVYQRTRAH

SEQ ID NO: 16982 - protein, 9 aa, Artificial Sequence
  Description of Artificial Sequence: Synthetic peptide
  Seed: TTYQRTRAL
TVYQRTRAI

SEQ ID NO: 16983 - protein, 9 aa, Artificial Sequence
  Description of Artificial Sequence: Synthetic peptide
  Seed: TTYQRTRAL
TVYQRTRAL

SEQ ID NO: 16984 - protein, 9 aa, Artificial Sequence
  Description of Artificial Sequence: Synthetic peptide
  Seed: TTYQRTRAL
TVYQRTRAK

SEQ ID NO: 16985 - protein, 9 aa, Artificial Sequence
  Description of Artificial Sequence: Synthetic peptide
  Seed: TYQRTRALV
TFQRTRALV

SEQ ID NO: 16986 - protein, 9 aa, Artificial Sequence
  Description of Artificial Sequence: Synthetic peptide
  Seed: TYQRTRALV
TMQRTRALF

SEQ ID NO: 16987 - protein, 9 aa, Artificial Sequence
  Description of Artificial Sequence: Synthetic peptide
  Seed: TYQRTRALV
TMQRTRALW

SEQ ID NO: 16988 - protein, 9 aa, Artificial Sequence
  Description of Artificial Sequence: Synthetic peptide
  Seed: TYQRTRALV
TMQRTRALY

SEQ ID NO: 16989 - protein, 9 aa, Artificial Sequence
  Description of Artificial Sequence: Synthetic peptide
  Seed: TYQRTRALV
TFQRTRALI

SEQ ID NO: 16990 - protein, 9 aa, Artificial Sequence
  Description of Artificial Sequence: Synthetic peptide
  Seed: TYQRTRALV
TFQRTRALL

SEQ ID NO: 16991 - protein, 9 aa, Artificial Sequence
  Description of Artificial Sequence: Synthetic peptide
  Seed: TYQRTRALV
TFQRTRALM

SEQ ID NO: 16992 - protein, 9 aa, Artificial Sequence
  Description of Artificial Sequence: Synthetic peptide
  Seed: TYQRTRALV
TFQRTRALF

SEQ ID NO: 16993 - protein, 9 aa, Artificial Sequence
  Description of Artificial Sequence: Synthetic peptide
  Seed: TYQRTRALV
TFQRTRALW

SEQ ID NO: 16994 - protein, 9 aa, Artificial Sequence
  Description of Artificial Sequence: Synthetic peptide
  Seed: TYQRTRALV
TFQRTRALY

SEQ ID NO: 16995 - protein, 9 aa, Artificial Sequence
  Description of Artificial Sequence: Synthetic peptide
  Seed: TYQRTRALV
TWQRTRALI

SEQ ID NO: 16996 - protein, 9 aa, Artificial Sequence
  Description of Artificial Sequence: Synthetic peptide
  Seed: TYQRTRALV
TWQRTRALL

SEQ ID NO: 16997 - protein, 9 aa, Artificial Sequence
  Description of Artificial Sequence: Synthetic peptide
  Seed: TYQRTRALV
TWQRTRALM

SEQ ID NO: 16998 - protein, 9 aa, Artificial Sequence
  Description of Artificial Sequence: Synthetic peptide
  Seed: TYQRTRALV
TWQRTRALW

SEQ ID NO: 16999 - protein, 9 aa, Artificial Sequence
  Description of Artificial Sequence: Synthetic peptide
  Seed: TYQRTRALV
TWQRTRALY

SEQ ID NO: 17000 - protein, 9 aa, Artificial Sequence
  Description of Artificial Sequence: Synthetic peptide
  Seed: TYQRTRALV
TWQRTRALV

SEQ ID NO: 17001 - protein, 9 aa, Artificial Sequence
  Description of Artificial Sequence: Synthetic peptide
  Seed: TYQRTRALV
TYQRTRALH

SEQ ID NO: 17002 - protein, 9 aa, Artificial Sequence
  Description of Artificial Sequence: Synthetic peptide
  Seed: TYQRTRALV
TYQRTRALL

SEQ ID NO: 17003 - protein, 9 aa, Artificial Sequence
  Description of Artificial Sequence: Synthetic peptide
  Seed: TYQRTRALV
TMQRTRALM

SEQ ID NO: 17004 - protein, 8 aa, Artificial Sequence
  Description of Artificial Sequence: Synthetic peptide
  Seed: TYQRTRAL
TYQRTRAV

SEQ ID NO: 17005 - protein, 8 aa, Artificial Sequence
  Description of Artificial Sequence: Synthetic peptide
  Seed: TYQRTRAL
TYQRTRAY

SEQ ID NO: 17006 - protein, 8 aa, Artificial Sequence
  Description of Artificial Sequence: Synthetic peptide
  Seed: TYQRTRAL
TYQRTRAF

SEQ ID NO: 17007 - protein, 8 aa, Artificial Sequence
  Description of Artificial Sequence: Synthetic peptide
  Seed: TYQRTRAL
TFQRTRAI

SEQ ID NO: 17008 - protein, 8 aa, Artificial Sequence
  Description of Artificial Sequence: Synthetic peptide
  Seed: TYQRTRAL
TFQRTRAL

SEQ ID NO: 17009 - protein, 8 aa, Artificial Sequence
  Description of Artificial Sequence: Synthetic peptide
  Seed: TYQRTRAL
TFQRTRAM

SEQ ID NO: 17010 - protein, 8 aa, Artificial Sequence
  Description of Artificial Sequence: Synthetic peptide
  Seed: TYQRTRAL
TFQRTRAF

SEQ ID NO: 17011 - protein, 8 aa, Artificial Sequence
  Description of Artificial Sequence: Synthetic peptide
  Seed: TYQRTRAL
TFQRTRAY

SEQ ID NO: 17012 - protein, 8 aa, Artificial Sequence
  Description of Artificial Sequence: Synthetic peptide
  Seed: TYQRTRAL
TWQRTRAL

SEQ ID NO: 17013 - protein, 8 aa, Artificial Sequence
  Description of Artificial Sequence: Synthetic peptide
  Seed: TYQRTRAL
TWQRTRAM

SEQ ID NO: 17014 - protein, 8 aa, Artificial Sequence
  Description of Artificial Sequence: Synthetic peptide
  Seed: TYQRTRAL
TWQRTRAF

SEQ ID NO: 17015 - protein, 8 aa, Artificial Sequence
  Description of Artificial Sequence: Synthetic peptide
  Seed: TYQRTRAL
TWQRTRAY

SEQ ID NO: 17016 - protein, 8 aa, Artificial Sequence
  Description of Artificial Sequence: Synthetic peptide
  Seed: TYQRTRAL
TYQRTRAI

SEQ ID NO: 17017 - protein, 8 aa, Artificial Sequence
  Description of Artificial Sequence: Synthetic peptide
  Seed: TYQRTRAL
TYQRTRAM

SEQ ID NO: 17018 - protein, 11 aa, Artificial Sequence
  Description of Artificial Sequence: Synthetic peptide
  Seed: TTYQRTRALVR
TVYQRTRALVR

SEQ ID NO: 17019 - protein, 11 aa, Artificial Sequence
  Description of Artificial Sequence: Synthetic peptide
  Seed: TTYQRTRALVR
TMYQRTRALVK

SEQ ID NO: 17020 - protein, 11 aa, Artificial Sequence
  Description of Artificial Sequence: Synthetic peptide
  Seed: TTYQRTRALVR
TFYQRTRALVR

SEQ ID NO: 17021 - protein, 11 aa, Artificial Sequence
  Description of Artificial Sequence: Synthetic peptide
  Seed: TTYQRTRALVR
TFYQRTRALVK

SEQ ID NO: 17022 - protein, 11 aa, Artificial Sequence
  Description of Artificial Sequence: Synthetic peptide
  Seed: TTYQRTRALVR
TSYQRTRALVR

SEQ ID NO: 17023 - protein, 11 aa, Artificial Sequence
  Description of Artificial Sequence: Synthetic peptide
  Seed: TTYQRTRALVR
TSYQRTRALVK

SEQ ID NO: 17024 - protein, 11 aa, Artificial Sequence
  Description of Artificial Sequence: Synthetic peptide
  Seed: TTYQRTRALVR
TTYQRTRALVK

SEQ ID NO: 17025 - protein, 11 aa, Artificial Sequence
  Description of Artificial Sequence: Synthetic peptide
  Seed: TTYQRTRALVR
TTYQRTRALVY

SEQ ID NO: 17026 - protein, 11 aa, Artificial Sequence
  Description of Artificial Sequence: Synthetic peptide
  Seed: TTYQRTRALVR
TWYQRTRALVR

SEQ ID NO: 17027 - protein, 11 aa, Artificial Sequence
  Description of Artificial Sequence: Synthetic peptide
  Seed: TTYQRTRALVR
TYYQRTRALVR

SEQ ID NO: 17028 - protein, 11 aa, Artificial Sequence
  Description of Artificial Sequence: Synthetic peptide
  Seed: TTYQRTRALVR
TVYQRTRALVK

SEQ ID NO: 17029 - protein, 11 aa, Artificial Sequence
  Description of Artificial Sequence: Synthetic peptide
  Seed: TTYQRTRALVR
TVYQRTRALVY

SEQ ID NO: 17030 - protein, 11 aa, Artificial Sequence
  Description of Artificial Sequence: Synthetic peptide
  Seed: TTYQRTRALVR
TMYQRTRALVR

SEQ ID NO: 17031 - protein, 11 aa, Artificial Sequence
  Description of Artificial Sequence: Synthetic peptide
  Seed: TTYQRTRALVR
TKYQRTRALVR

SEQ ID NO: 17032 - protein, 11 aa, Artificial Sequence
  Description of Artificial Sequence: Synthetic peptide
  Seed: TTYQRTRALVR
TLYQRTRALVK

SEQ ID NO: 17033 - protein, 11 aa, Artificial Sequence
  Description of Artificial Sequence: Synthetic peptide
  Seed: TTYQRTRALVR
TLYQRTRALVR

SEQ ID NO: 17034 - protein, 9 aa, Artificial Sequence
  Description of Artificial Sequence: Synthetic peptide
  Seed: TTYQRTRAL
TVYQRTRAM

SEQ ID NO: 17035 - protein, 9 aa, Artificial Sequence
  Description of Artificial Sequence: Synthetic peptide
  Seed: TTYQRTRAL
TVYQRTRAF

SEQ ID NO: 17036 - protein, 9 aa, Artificial Sequence
  Description of Artificial Sequence: Synthetic peptide
  Seed: TTYQRTRAL
TVYQRTRAW

SEQ ID NO: 17037 - protein, 9 aa, Artificial Sequence
  Description of Artificial Sequence: Synthetic peptide
  Seed: TTYQRTRAL
TVYQRTRAY

SEQ ID NO: 17038 - protein, 9 aa, Artificial Sequence
  Description of Artificial Sequence: Synthetic peptide
  Seed: TTYQRTRAL
TVYQRTRAV

SEQ ID NO: 17039 - protein, 10 aa, Artificial Sequence
  Description of Artificial Sequence: Synthetic peptide
  Seed: TTYQRTRALV
TAYQRTRALV

SEQ ID NO: 17040 - protein, 10 aa, Artificial Sequence
  Description of Artificial Sequence: Synthetic peptide
  Seed: TTYQRTRALV
TIYQRTRALV

SEQ ID NO: 17041 - protein, 10 aa, Artificial Sequence
  Description of Artificial Sequence: Synthetic peptide
  Seed: TTYQRTRALV
TSYQRTRALV

SEQ ID NO: 17042 - protein, 10 aa, Artificial Sequence
  Description of Artificial Sequence: Synthetic peptide
  Seed: TTYQRTRALV
TTYQRTRALA

SEQ ID NO: 17043 - protein, 10 aa, Artificial Sequence
  Description of Artificial Sequence: Synthetic peptide
  Seed: TTYQRTRALV
TTYQRTRALI

SEQ ID NO: 17044 - protein, 10 aa, Artificial Sequence
  Description of Artificial Sequence: Synthetic peptide
  Seed: TTYQRTRALV
TTYQRTRALL

SEQ ID NO: 17045 - protein, 10 aa, Artificial Sequence
  Description of Artificial Sequence: Synthetic peptide
  Seed: TTYQRTRALV
TVYQRTRALV

SEQ ID NO: 17046 - protein, 11 aa, Artificial Sequence
  Description of Artificial Sequence: Synthetic peptide
  Seed: TTYQRTRALVR
TAYQRTRALVR

SEQ ID NO: 17047 - protein, 11 aa, Artificial Sequence
  Description of Artificial Sequence: Synthetic peptide
  Seed: TTYQRTRALVR
TAYQRTRALVK

SEQ ID NO: 17048 - protein, 11 aa, Artificial Sequence
  Description of Artificial Sequence: Synthetic peptide
  Seed: TTYQRTRALVR
TRYQRTRALVR

SEQ ID NO: 17049 - protein, 11 aa, Artificial Sequence
  Description of Artificial Sequence: Synthetic peptide
  Seed: TTYQRTRALVR
TQYQRTRALVR

SEQ ID NO: 17050 - protein, 11 aa, Artificial Sequence
  Description of Artificial Sequence: Synthetic peptide
  Seed: TTYQRTRALVR
TIYQRTRALVR

SEQ ID NO: 17051 - protein, 11 aa, Artificial Sequence
  Description of Artificial Sequence: Synthetic peptide
  Seed: TTYQRTRALVR
TIYQRTRALVK

SEQ ID NO: 17052 - protein, 11 aa, Artificial Sequence
  Description of Artificial Sequence: Synthetic peptide
  Seed: TTYQRTRALVR
TIYQRTRALVY

SEQ ID NO: 17053 - protein, 9 aa, Artificial Sequence
  Description of Artificial Sequence: Synthetic peptide
  Seed: TTYQRTRAL
TCYQRTRAF

SEQ ID NO: 17054 - protein, 9 aa, Artificial Sequence
  Description of Artificial Sequence: Synthetic peptide
  Seed: TTYQRTRAL
TCYQRTRAM

SEQ ID NO: 17055 - protein, 9 aa, Artificial Sequence
  Description of Artificial Sequence: Synthetic peptide
  Seed: TTYQRTRAL
TCYQRTRAL

SEQ ID NO: 17056 - protein, 10 aa, Artificial Sequence
  Description of Artificial Sequence: Synthetic peptide
  Seed: TMVMELIRMI
TQVMELIRMI

SEQ ID NO: 17057 - protein, 10 aa, Artificial Sequence
  Description of Artificial Sequence: Synthetic peptide
  Seed: TMVMELIRMI
TRVMELIRMV

SEQ ID NO: 17058 - protein, 10 aa, Artificial Sequence
  Description of Artificial Sequence: Synthetic peptide
  Seed: TMVMELIRMI
TNVMELIRMI

SEQ ID NO: 17059 - protein, 10 aa, Artificial Sequence
  Description of Artificial Sequence: Synthetic peptide
  Seed: TMVMELIRMI
TNVMELIRMV

SEQ ID NO: 17060 - protein, 10 aa, Artificial Sequence
  Description of Artificial Sequence: Synthetic peptide
  Seed: TMVMELIRMI
TDVMELIRMI

SEQ ID NO: 17061 - protein, 10 aa, Artificial Sequence
  Description of Artificial Sequence: Synthetic peptide
  Seed: TMVMELIRMI
TDVMELIRMV

SEQ ID NO: 17062 - protein, 10 aa, Artificial Sequence
  Description of Artificial Sequence: Synthetic peptide
  Seed: TMVMELIRMI
TCVMELIRMA

SEQ ID NO: 17063 - protein, 10 aa, Artificial Sequence
  Description of Artificial Sequence: Synthetic peptide
  Seed: TMVMELIRMI
TCVMELIRMI

SEQ ID NO: 17064 - protein, 10 aa, Artificial Sequence
  Description of Artificial Sequence: Synthetic peptide
  Seed: TMVMELIRMI
TCVMELIRMV

SEQ ID NO: 17065 - protein, 10 aa, Artificial Sequence
  Description of Artificial Sequence: Synthetic peptide
  Seed: TMVMELIRMI
TQVMELIRMA

SEQ ID NO: 17066 - protein, 10 aa, Artificial Sequence
  Description of Artificial Sequence: Synthetic peptide
  Seed: TMVMELIRMI
TQVMELIRML

SEQ ID NO: 17067 - protein, 10 aa, Artificial Sequence
  Description of Artificial Sequence: Synthetic peptide
  Seed: TMVMELIRMI
TIVMELIRMA

SEQ ID NO: 17068 - protein, 10 aa, Artificial Sequence
  Description of Artificial Sequence: Synthetic peptide
  Seed: TMVMELIRMI
TQVMELIRMM

SEQ ID NO: 17069 - protein, 10 aa, Artificial Sequence
  Description of Artificial Sequence: Synthetic peptide
  Seed: TMVMELIRMI
TQVMELIRMV

SEQ ID NO: 17070 - protein, 10 aa, Artificial Sequence
  Description of Artificial Sequence: Synthetic peptide
  Seed: TMVMELIRMI
TEVMELIRMI

SEQ ID NO: 17071 - protein, 10 aa, Artificial Sequence
  Description of Artificial Sequence: Synthetic peptide
  Seed: TMVMELIRMI
TEVMELIRML

SEQ ID NO: 17072 - protein, 10 aa, Artificial Sequence
  Description of Artificial Sequence: Synthetic peptide
  Seed: TMVMELIRMI
TEVMELIRMV

SEQ ID NO: 17073 - protein, 10 aa, Artificial Sequence
  Description of Artificial Sequence: Synthetic peptide
  Seed: TMVMELIRMI
TGVMELIRMA

SEQ ID NO: 17074 - protein, 10 aa, Artificial Sequence
  Description of Artificial Sequence: Synthetic peptide
  Seed: TMVMELIRMI
TGVMELIRMI

SEQ ID NO: 17075 - protein, 10 aa, Artificial Sequence
  Description of Artificial Sequence: Synthetic peptide
  Seed: TMVMELIRMI
TGVMELIRMV

SEQ ID NO: 17076 - protein, 10 aa, Artificial Sequence
  Description of Artificial Sequence: Synthetic peptide
  Seed: TMVMELIRMI
THVMELIRMI

SEQ ID NO: 17077 - protein, 10 aa, Artificial Sequence
  Description of Artificial Sequence: Synthetic peptide
  Seed: TMVMELIRMI
TRVMELIRMI

SEQ ID NO: 17078 - protein, 10 aa, Artificial Sequence
  Description of Artificial Sequence: Synthetic peptide
  Seed: TMVMELIRMI
TRVMELIRMA

SEQ ID NO: 17079 - protein, 10 aa, Artificial Sequence
  Description of Artificial Sequence: Synthetic peptide
  Seed: TMVMELIRMI
TAVMELIRMV

SEQ ID NO: 17080 - protein, 10 aa, Artificial Sequence
  Description of Artificial Sequence: Synthetic peptide
  Seed: TMVMELIRMI
TAVMELIRML

SEQ ID NO: 17081 - protein, 9 aa, Artificial Sequence
  Description of Artificial Sequence: Synthetic peptide
  Seed: TMVMELIRM
TLVMELIRY

SEQ ID NO: 17082 - protein, 9 aa, Artificial Sequence
  Description of Artificial Sequence: Synthetic peptide
  Seed: TMVMELIRM
TLVMELIRV

SEQ ID NO: 17083 - protein, 9 aa, Artificial Sequence
  Description of Artificial Sequence: Synthetic peptide
  Seed: TMVMELIRM
TKVMELIRM

SEQ ID NO: 17084 - protein, 9 aa, Artificial Sequence
  Description of Artificial Sequence: Synthetic peptide
  Seed: TMVMELIRM
TKVMELIRF

SEQ ID NO: 17085 - protein, 9 aa, Artificial Sequence
  Description of Artificial Sequence: Synthetic peptide
  Seed: TMVMELIRM
TKVMELIRY

SEQ ID NO: 17086 - protein, 9 aa, Artificial Sequence
  Description of Artificial Sequence: Synthetic peptide
  Seed: TMVMELIRM
TMVMELIRA

SEQ ID NO: 17087 - protein, 9 aa, Artificial Sequence
  Description of Artificial Sequence: Synthetic peptide
  Seed: TMVMELIRM
TMVMELIRI

SEQ ID NO: 17088 - protein, 9 aa, Artificial Sequence
  Description of Artificial Sequence: Synthetic peptide
  Seed: TMVMELIRM
TMVMELIRL

SEQ ID NO: 17089 - protein, 9 aa, Artificial Sequence
  Description of Artificial Sequence: Synthetic peptide
  Seed: TMVMELIRM
TMVMELIRF

SEQ ID NO: 17090 - protein, 9 aa, Artificial Sequence
  Description of Artificial Sequence: Synthetic peptide
  Seed: TMVMELIRM
TMVMELIRY

SEQ ID NO: 17091 - protein, 9 aa, Artificial Sequence
  Description of Artificial Sequence: Synthetic peptide
  Seed: TMVMELIRM
TMVMELIRV

SEQ ID NO: 17092 - protein, 9 aa, Artificial Sequence
  Description of Artificial Sequence: Synthetic peptide
  Seed: TMVMELIRM
TSVMELIRF

SEQ ID NO: 17093 - protein, 9 aa, Artificial Sequence
  Description of Artificial Sequence: Synthetic peptide
  Seed: TMVMELIRM
TSVMELIRY

SEQ ID NO: 17094 - protein, 9 aa, Artificial Sequence
  Description of Artificial Sequence: Synthetic peptide
  Seed: TMVMELIRM
TTVMELIRY

SEQ ID NO: 17095 - protein, 9 aa, Artificial Sequence
  Description of Artificial Sequence: Synthetic peptide
  Seed: TMVMELIRM
TVVMELIRF

SEQ ID NO: 17096 - protein, 9 aa, Artificial Sequence
  Description of Artificial Sequence: Synthetic peptide
  Seed: TMVMELIRM
TVVMELIRY

SEQ ID NO: 17097 - protein, 9 aa, Artificial Sequence
  Description of Artificial Sequence: Synthetic peptide
  Seed: TMVMELIRM
TVVMELIRV

SEQ ID NO: 17098 - protein, 10 aa, Artificial Sequence
  Description of Artificial Sequence: Synthetic peptide
  Seed: TMVMELIRMI
TAVMELIRMA

SEQ ID NO: 17099 - protein, 10 aa, Artificial Sequence
  Description of Artificial Sequence: Synthetic peptide
  Seed: TMVMELIRMI
TAVMELIRMI

SEQ ID NO: 17100 - protein, 10 aa, Artificial Sequence
  Description of Artificial Sequence: Synthetic peptide
  Seed: TMVMELIRMI
THVMELIRMV

SEQ ID NO: 17101 - protein, 11 aa, Artificial Sequence
  Description of Artificial Sequence: Synthetic peptide
  Seed: TMVMELIRMIK
TKVMELIRMIK

SEQ ID NO: 17102 - protein, 10 aa, Artificial Sequence
  Description of Artificial Sequence: Synthetic peptide
  Seed: TMVMELIRMI
TWVMELIRMV

SEQ ID NO: 17103 - protein, 10 aa, Artificial Sequence
  Description of Artificial Sequence: Synthetic peptide
  Seed: TMVMELIRMI
TSVMELIRMI

SEQ ID NO: 17104 - protein, 10 aa, Artificial Sequence
  Description of Artificial Sequence: Synthetic peptide
  Seed: TMVMELIRMI
TSVMELIRML

SEQ ID NO: 17105 - protein, 10 aa, Artificial Sequence
  Description of Artificial Sequence: Synthetic peptide
  Seed: TMVMELIRMI
TSVMELIRMV

SEQ ID NO: 17106 - protein, 10 aa, Artificial Sequence
  Description of Artificial Sequence: Synthetic peptide
  Seed: TMVMELIRMI
TTVMELIRMA

SEQ ID NO: 17107 - protein, 10 aa, Artificial Sequence
  Description of Artificial Sequence: Synthetic peptide
  Seed: TMVMELIRMI
TTVMELIRMI

SEQ ID NO: 17108 - protein, 10 aa, Artificial Sequence
  Description of Artificial Sequence: Synthetic peptide
  Seed: TMVMELIRMI
TTVMELIRML

SEQ ID NO: 17109 - protein, 10 aa, Artificial Sequence
  Description of Artificial Sequence: Synthetic peptide
  Seed: TMVMELIRMI
TTVMELIRMV

SEQ ID NO: 17110 - protein, 10 aa, Artificial Sequence
  Description of Artificial Sequence: Synthetic peptide
  Seed: TMVMELIRMI
TWVMELIRMA

SEQ ID NO: 17111 - protein, 10 aa, Artificial Sequence
  Description of Artificial Sequence: Synthetic peptide
  Seed: TMVMELIRMI
TWVMELIRMI

SEQ ID NO: 17112 - protein, 10 aa, Artificial Sequence
  Description of Artificial Sequence: Synthetic peptide
  Seed: TMVMELIRMI
TYVMELIRMA

SEQ ID NO: 17113 - protein, 10 aa, Artificial Sequence
  Description of Artificial Sequence: Synthetic peptide
  Seed: TMVMELIRMI
TIVMELIRML

SEQ ID NO: 17114 - protein, 10 aa, Artificial Sequence
  Description of Artificial Sequence: Synthetic peptide
  Seed: TMVMELIRMI
TYVMELIRMI

SEQ ID NO: 17115 - protein, 10 aa, Artificial Sequence
  Description of Artificial Sequence: Synthetic peptide
  Seed: TMVMELIRMI
TYVMELIRML

SEQ ID NO: 17116 - protein, 10 aa, Artificial Sequence
  Description of Artificial Sequence: Synthetic peptide
  Seed: TMVMELIRMI
TYVMELIRMV

SEQ ID NO: 17117 - protein, 10 aa, Artificial Sequence
  Description of Artificial Sequence: Synthetic peptide
  Seed: TMVMELIRMI
TVVMELIRMA

SEQ ID NO: 17118 - protein, 10 aa, Artificial Sequence
  Description of Artificial Sequence: Synthetic peptide
  Seed: TMVMELIRMI
TVVMELIRML

SEQ ID NO: 17119 - protein, 10 aa, Artificial Sequence
  Description of Artificial Sequence: Synthetic peptide
  Seed: TMVMELIRMI
TVVMELIRMV

SEQ ID NO: 17120 - protein, 11 aa, Artificial Sequence
  Description of Artificial Sequence: Synthetic peptide
  Seed: TMVMELIRMIK
TAVMELIRMIK

SEQ ID NO: 17121 - protein, 11 aa, Artificial Sequence
  Description of Artificial Sequence: Synthetic peptide
  Seed: TMVMELIRMIK
TRVMELIRMIK

SEQ ID NO: 17122 - protein, 10 aa, Artificial Sequence
  Description of Artificial Sequence: Synthetic peptide
  Seed: TMVMELIRMI
TSVMELIRMA

SEQ ID NO: 17123 - protein, 10 aa, Artificial Sequence
  Description of Artificial Sequence: Synthetic peptide
  Seed: TMVMELIRMI
TPVMELIRMV

SEQ ID NO: 17124 - protein, 10 aa, Artificial Sequence
  Description of Artificial Sequence: Synthetic peptide
  Seed: TMVMELIRMI
TPVMELIRMI

SEQ ID NO: 17125 - protein, 10 aa, Artificial Sequence
  Description of Artificial Sequence: Synthetic peptide
  Seed: TMVMELIRMI
TFVMELIRMV

SEQ ID NO: 17126 - protein, 10 aa, Artificial Sequence
  Description of Artificial Sequence: Synthetic peptide
  Seed: TMVMELIRMI
TIVMELIRMV

SEQ ID NO: 17127 - protein, 10 aa, Artificial Sequence
  Description of Artificial Sequence: Synthetic peptide
  Seed: TMVMELIRMI
TLVMELIRMA

SEQ ID NO: 17128 - protein, 10 aa, Artificial Sequence
  Description of Artificial Sequence: Synthetic peptide
  Seed: TMVMELIRMI
TLVMELIRMC

SEQ ID NO: 17129 - protein, 10 aa, Artificial Sequence
  Description of Artificial Sequence: Synthetic peptide
  Seed: TMVMELIRMI
TLVMELIRMI

SEQ ID NO: 17130 - protein, 10 aa, Artificial Sequence
  Description of Artificial Sequence: Synthetic peptide
  Seed: TMVMELIRMI
TLVMELIRML

SEQ ID NO: 17131 - protein, 10 aa, Artificial Sequence
  Description of Artificial Sequence: Synthetic peptide
  Seed: TMVMELIRMI
TLVMELIRMM

SEQ ID NO: 17132 - protein, 10 aa, Artificial Sequence
  Description of Artificial Sequence: Synthetic peptide
  Seed: TMVMELIRMI
TLVMELIRMT

SEQ ID NO: 17133 - protein, 10 aa, Artificial Sequence
  Description of Artificial Sequence: Synthetic peptide
  Seed: TMVMELIRMI
TLVMELIRMV

SEQ ID NO: 17134 - protein, 10 aa, Artificial Sequence
  Description of Artificial Sequence: Synthetic peptide
  Seed: TMVMELIRMI
TKVMELIRMA

SEQ ID NO: 17135 - protein, 10 aa, Artificial Sequence
  Description of Artificial Sequence: Synthetic peptide
  Seed: TMVMELIRMI
TKVMELIRMI

SEQ ID NO: 17136 - protein, 10 aa, Artificial Sequence
  Description of Artificial Sequence: Synthetic peptide
  Seed: TMVMELIRMI
TKVMELIRMV

SEQ ID NO: 17137 - protein, 10 aa, Artificial Sequence
  Description of Artificial Sequence: Synthetic peptide
  Seed: TMVMELIRMI
TMVMELIRMA

SEQ ID NO: 17138 - protein, 10 aa, Artificial Sequence
  Description of Artificial Sequence: Synthetic peptide
  Seed: TMVMELIRMI
TMVMELIRML

SEQ ID NO: 17139 - protein, 10 aa, Artificial Sequence
  Description of Artificial Sequence: Synthetic peptide
  Seed: TMVMELIRMI
TMVMELIRMM

SEQ ID NO: 17140 - protein, 10 aa, Artificial Sequence
  Description of Artificial Sequence: Synthetic peptide
  Seed: TMVMELIRMI
TMVMELIRMT

SEQ ID NO: 17141 - protein, 10 aa, Artificial Sequence
  Description of Artificial Sequence: Synthetic peptide
  Seed: TMVMELIRMI
TFVMELIRMA

SEQ ID NO: 17142 - protein, 10 aa, Artificial Sequence
  Description of Artificial Sequence: Synthetic peptide
  Seed: TMVMELIRMI
TFVMELIRMI

SEQ ID NO: 17143 - protein, 10 aa, Artificial Sequence
  Description of Artificial Sequence: Synthetic peptide
  Seed: TMVMELIRMI
TFVMELIRML

SEQ ID NO: 17144 - protein, 9 aa, Artificial Sequence
  Description of Artificial Sequence: Synthetic peptide
  Seed: TMVMELIRM
TLVMELIRF

SEQ ID NO: 17145 - protein, 9 aa, Artificial Sequence
  Description of Artificial Sequence: Synthetic peptide
  Seed: TMVMELIRM
TLVMELIRM

SEQ ID NO: 17146 - protein, 9 aa, Artificial Sequence
  Description of Artificial Sequence: Synthetic peptide
  Seed: TMVMELIRM
TLVMELIRL

SEQ ID NO: 17147 - protein, 9 aa, Artificial Sequence
  Description of Artificial Sequence: Synthetic peptide
  Seed: TMESSTLEL
TSESSTLEF

SEQ ID NO: 17148 - protein, 9 aa, Artificial Sequence
  Description of Artificial Sequence: Synthetic peptide
  Seed: TMESSTLEL
TFESSTLEI

SEQ ID NO: 17149 - protein, 9 aa, Artificial Sequence
  Description of Artificial Sequence: Synthetic peptide
  Seed: TMESSTLEL
TFESSTLEL

SEQ ID NO: 17150 - protein, 9 aa, Artificial Sequence
  Description of Artificial Sequence: Synthetic peptide
  Seed: TMESSTLEL
TFESSTLEM

SEQ ID NO: 17151 - protein, 9 aa, Artificial Sequence
  Description of Artificial Sequence: Synthetic peptide
  Seed: TMESSTLEL
TFESSTLEF

SEQ ID NO: 17152 - protein, 9 aa, Artificial Sequence
  Description of Artificial Sequence: Synthetic peptide
  Seed: TMESSTLEL
TFESSTLEY

SEQ ID NO: 17153 - protein, 9 aa, Artificial Sequence
  Description of Artificial Sequence: Synthetic peptide
  Seed: TMESSTLEL
TFESSTLEV

SEQ ID NO: 17154 - protein, 9 aa, Artificial Sequence
  Description of Artificial Sequence: Synthetic peptide
  Seed: TMESSTLEL
TSESSTLEI

SEQ ID NO: 17155 - protein, 9 aa, Artificial Sequence
  Description of Artificial Sequence: Synthetic peptide
  Seed: TMESSTLEL
TSESSTLEL

SEQ ID NO: 17156 - protein, 9 aa, Artificial Sequence
  Description of Artificial Sequence: Synthetic peptide
  Seed: TMESSTLEL
TSESSTLEM

SEQ ID NO: 17157 - protein, 9 aa, Artificial Sequence
  Description of Artificial Sequence: Synthetic peptide
  Seed: TMESSTLEL
TSESSTLEY

SEQ ID NO: 17158 - protein, 9 aa, Artificial Sequence
  Description of Artificial Sequence: Synthetic peptide
  Seed: TMVMELIRM
TLVMELIRI

SEQ ID NO: 17159 - protein, 9 aa, Artificial Sequence
  Description of Artificial Sequence: Synthetic peptide
  Seed: TMESSTLEL
TSESSTLEV

SEQ ID NO: 17160 - protein, 9 aa, Artificial Sequence
  Description of Artificial Sequence: Synthetic peptide
  Seed: TMESSTLEL
TTESSTLEI

SEQ ID NO: 17161 - protein, 9 aa, Artificial Sequence
  Description of Artificial Sequence: Synthetic peptide
  Seed: TMESSTLEL
TTESSTLEL

SEQ ID NO: 17162 - protein, 9 aa, Artificial Sequence
  Description of Artificial Sequence: Synthetic peptide
  Seed: TMESSTLEL
TTESSTLEM

SEQ ID NO: 17163 - protein, 9 aa, Artificial Sequence
  Description of Artificial Sequence: Synthetic peptide
  Seed: TMESSTLEL
TTESSTLEF

SEQ ID NO: 17164 - protein, 9 aa, Artificial Sequence
  Description of Artificial Sequence: Synthetic peptide
  Seed: TMESSTLEL
TTESSTLEV

SEQ ID NO: 17165 - protein, 9 aa, Artificial Sequence
  Description of Artificial Sequence: Synthetic peptide
  Seed: TMESSTLEL
TWESSTLEL

SEQ ID NO: 17166 - protein, 9 aa, Artificial Sequence
  Description of Artificial Sequence: Synthetic peptide
  Seed: TMESSTLEL
TWESSTLEM

SEQ ID NO: 17167 - protein, 9 aa, Artificial Sequence
  Description of Artificial Sequence: Synthetic peptide
  Seed: TMESSTLEL
TWESSTLEF

SEQ ID NO: 17168 - protein, 9 aa, Artificial Sequence
  Description of Artificial Sequence: Synthetic peptide
  Seed: TMESSTLEL
TMESSTLEV

SEQ ID NO: 17169 - protein, 9 aa, Artificial Sequence
  Description of Artificial Sequence: Synthetic peptide
  Seed: TMESSTLEL
TMESSTLEY

SEQ ID NO: 17170 - protein, 9 aa, Artificial Sequence
  Description of Artificial Sequence: Synthetic peptide
  Seed: TMESSTLEL
TMESSTLEF

SEQ ID NO: 17171 - protein, 9 aa, Artificial Sequence
  Description of Artificial Sequence: Synthetic peptide
  Seed: TMESSTLEL
TMESSTLEM

SEQ ID NO: 17172 - protein, 9 aa, Artificial Sequence
  Description of Artificial Sequence: Synthetic peptide
  Seed: TMESSTLEL
TRESSTLEY

SEQ ID NO: 17173 - protein, 9 aa, Artificial Sequence
  Description of Artificial Sequence: Synthetic peptide
  Seed: TMESSTLEL
TQESSTLEL

SEQ ID NO: 17174 - protein, 9 aa, Artificial Sequence
  Description of Artificial Sequence: Synthetic peptide
  Seed: TMESSTLEL
TQESSTLEM

SEQ ID NO: 17175 - protein, 9 aa, Artificial Sequence
  Description of Artificial Sequence: Synthetic peptide
  Seed: TMESSTLEL
TQESSTLEF

SEQ ID NO: 17176 - protein, 9 aa, Artificial Sequence
  Description of Artificial Sequence: Synthetic peptide
  Seed: TMESSTLEL
TQESSTLEY

SEQ ID NO: 17177 - protein, 9 aa, Artificial Sequence
  Description of Artificial Sequence: Synthetic peptide
  Seed: TMESSTLEL
TEESSTLEF

SEQ ID NO: 17178 - protein, 9 aa, Artificial Sequence
  Description of Artificial Sequence: Synthetic peptide
  Seed: TMESSTLEL
THESSTLEF

SEQ ID NO: 17179 - protein, 9 aa, Artificial Sequence
  Description of Artificial Sequence: Synthetic peptide
  Seed: TMESSTLEL
THESSTLEY

SEQ ID NO: 17180 - protein, 9 aa, Artificial Sequence
  Description of Artificial Sequence: Synthetic peptide
  Seed: TMESSTLEL
TIESSTLEL

SEQ ID NO: 17181 - protein, 9 aa, Artificial Sequence
  Description of Artificial Sequence: Synthetic peptide
  Seed: TMESSTLEL
TIESSTLEF

SEQ ID NO: 17182 - protein, 9 aa, Artificial Sequence
  Description of Artificial Sequence: Synthetic peptide
  Seed: TMESSTLEL
TLESSTLEI

SEQ ID NO: 17183 - protein, 9 aa, Artificial Sequence
  Description of Artificial Sequence: Synthetic peptide
  Seed: TMESSTLEL
TLESSTLEL

SEQ ID NO: 17184 - protein, 9 aa, Artificial Sequence
  Description of Artificial Sequence: Synthetic peptide
  Seed: TMESSTLEL
TLESSTLEF

SEQ ID NO: 17185 - protein, 9 aa, Artificial Sequence
  Description of Artificial Sequence: Synthetic peptide
  Seed: TMESSTLEL
TLESSTLEY

SEQ ID NO: 17186 - protein, 9 aa, Artificial Sequence
  Description of Artificial Sequence: Synthetic peptide
  Seed: TMESSTLEL
TLESSTLEV

SEQ ID NO: 17187 - protein, 9 aa, Artificial Sequence
  Description of Artificial Sequence: Synthetic peptide
  Seed: TMESSTLEL
TKESSTLEM

SEQ ID NO: 17188 - protein, 9 aa, Artificial Sequence
  Description of Artificial Sequence: Synthetic peptide
  Seed: TMESSTLEL
TKESSTLEF

SEQ ID NO: 17189 - protein, 9 aa, Artificial Sequence
  Description of Artificial Sequence: Synthetic peptide
  Seed: TMESSTLEL
TKESSTLEY

SEQ ID NO: 17190 - protein, 9 aa, Artificial Sequence
  Description of Artificial Sequence: Synthetic peptide
  Seed: TMESSTLEL
TMESSTLEI

SEQ ID NO: 17191 - protein, 9 aa, Artificial Sequence
  Description of Artificial Sequence: Synthetic peptide
  Seed: TMESSTLEL
TWESSTLEY

SEQ ID NO: 17192 - protein, 9 aa, Artificial Sequence
  Description of Artificial Sequence: Synthetic peptide
  Seed: TMESSTLEL
TYESSTLEH

SEQ ID NO: 17193 - protein, 9 aa, Artificial Sequence
  Description of Artificial Sequence: Synthetic peptide
  Seed: TMESSTLEL
TYESSTLEI

SEQ ID NO: 17194 - protein, 10 aa, Artificial Sequence
  Description of Artificial Sequence: Synthetic peptide
  Seed: TMESSTLELR
TTESSTLELK

SEQ ID NO: 17195 - protein, 10 aa, Artificial Sequence
  Description of Artificial Sequence: Synthetic peptide
  Seed: TMESSTLELR
TYESSTLELR

SEQ ID NO: 17196 - protein, 10 aa, Artificial Sequence
  Description of Artificial Sequence: Synthetic peptide
  Seed: TMESSTLELR
TYESSTLELK

SEQ ID NO: 17197 - protein, 10 aa, Artificial Sequence
  Description of Artificial Sequence: Synthetic peptide
  Seed: TMESSTLELR
TVESSTLELR

SEQ ID NO: 17198 - protein, 10 aa, Artificial Sequence
  Description of Artificial Sequence: Synthetic peptide
  Seed: TMESSTLELR
TVESSTLELK

SEQ ID NO: 17199 - protein, 9 aa, Artificial Sequence
  Description of Artificial Sequence: Synthetic peptide
  Seed: TMVMELIRM
TAVMELIRF

SEQ ID NO: 17200 - protein, 9 aa, Artificial Sequence
  Description of Artificial Sequence: Synthetic peptide
  Seed: TMVMELIRM
TAVMELIRY

SEQ ID NO: 17201 - protein, 9 aa, Artificial Sequence
  Description of Artificial Sequence: Synthetic peptide
  Seed: TMVMELIRM
TRVMELIRF

SEQ ID NO: 17202 - protein, 9 aa, Artificial Sequence
  Description of Artificial Sequence: Synthetic peptide
  Seed: TMVMELIRM
TRVMELIRY

SEQ ID NO: 17203 - protein, 9 aa, Artificial Sequence
  Description of Artificial Sequence: Synthetic peptide
  Seed: TMVMELIRM
TQVMELIRL

SEQ ID NO: 17204 - protein, 9 aa, Artificial Sequence
  Description of Artificial Sequence: Synthetic peptide
  Seed: TMVMELIRM
TQVMELIRM

SEQ ID NO: 17205 - protein, 9 aa, Artificial Sequence
  Description of Artificial Sequence: Synthetic peptide
  Seed: TMVMELIRM
TQVMELIRF

SEQ ID NO: 17206 - protein, 9 aa, Artificial Sequence
  Description of Artificial Sequence: Synthetic peptide
  Seed: TMVMELIRM
TQVMELIRY

SEQ ID NO: 17207 - protein, 9 aa, Artificial Sequence
  Description of Artificial Sequence: Synthetic peptide
  Seed: TMVMELIRM
TQVMELIRV

SEQ ID NO: 17208 - protein, 9 aa, Artificial Sequence
  Description of Artificial Sequence: Synthetic peptide
  Seed: TMVMELIRM
THVMELIRF

SEQ ID NO: 17209 - protein, 9 aa, Artificial Sequence
  Description of Artificial Sequence: Synthetic peptide
  Seed: TMVMELIRM
THVMELIRY

SEQ ID NO: 17210 - protein, 9 aa, Artificial Sequence
  Description of Artificial Sequence: Synthetic peptide
  Seed: TMVMELIRM
TIVMELIRF

SEQ ID NO: 17211 - protein, 9 aa, Artificial Sequence
  Description of Artificial Sequence: Synthetic peptide
  Seed: TMVMELIRM
TIVMELIRY

SEQ ID NO: 17212 - protein, 9 aa, Artificial Sequence
  Description of Artificial Sequence: Synthetic peptide
  Seed: TMVMELIRM
TIVMELIRV

SEQ ID NO: 17213 - protein, 9 aa, Artificial Sequence
  Description of Artificial Sequence: Synthetic peptide
  Seed: TMVMELIRM
TLVMELIRA

SEQ ID NO: 17214 - protein, 10 aa, Artificial Sequence
  Description of Artificial Sequence: Synthetic peptide
  Seed: TMESSTLELR
TWESSTLELR

SEQ ID NO: 17215 - protein, 10 aa, Artificial Sequence
  Description of Artificial Sequence: Synthetic peptide
  Seed: TMESSTLELR
TTESSTLELR

SEQ ID NO: 17216 - protein, 9 aa, Artificial Sequence
  Description of Artificial Sequence: Synthetic peptide
  Seed: TMESSTLEL
TYESSTLEL

SEQ ID NO: 17217 - protein, 10 aa, Artificial Sequence
  Description of Artificial Sequence: Synthetic peptide
  Seed: TMESSTLELR
TSESSTLELK

SEQ ID NO: 17218 - protein, 9 aa, Artificial Sequence
  Description of Artificial Sequence: Synthetic peptide
  Seed: TMESSTLEL
TYESSTLEM

SEQ ID NO: 17219 - protein, 9 aa, Artificial Sequence
  Description of Artificial Sequence: Synthetic peptide
  Seed: TMESSTLEL
TYESSTLEF

SEQ ID NO: 17220 - protein, 9 aa, Artificial Sequence
  Description of Artificial Sequence: Synthetic peptide
  Seed: TMESSTLEL
TYESSTLEW

SEQ ID NO: 17221 - protein, 9 aa, Artificial Sequence
  Description of Artificial Sequence: Synthetic peptide
  Seed: TMESSTLEL
TYESSTLEY

SEQ ID NO: 17222 - protein, 9 aa, Artificial Sequence
  Description of Artificial Sequence: Synthetic peptide
  Seed: TMESSTLEL
TYESSTLEV

SEQ ID NO: 17223 - protein, 9 aa, Artificial Sequence
  Description of Artificial Sequence: Synthetic peptide
  Seed: TMESSTLEL
TVESSTLEL

SEQ ID NO: 17224 - protein, 9 aa, Artificial Sequence
  Description of Artificial Sequence: Synthetic peptide
  Seed: TMESSTLEL
TVESSTLEM

SEQ ID NO: 17225 - protein, 9 aa, Artificial Sequence
  Description of Artificial Sequence: Synthetic peptide
  Seed: TMESSTLEL
TVESSTLEF

SEQ ID NO: 17226 - protein, 10 aa, Artificial Sequence
  Description of Artificial Sequence: Synthetic peptide
  Seed: TMESSTLELR
TAESSTLELR

SEQ ID NO: 17227 - protein, 10 aa, Artificial Sequence
  Description of Artificial Sequence: Synthetic peptide
  Seed: TMESSTLELR
TAESSTLELK

SEQ ID NO: 17228 - protein, 10 aa, Artificial Sequence
  Description of Artificial Sequence: Synthetic peptide
  Seed: TMESSTLELR
TQESSTLELR

SEQ ID NO: 17229 - protein, 10 aa, Artificial Sequence
  Description of Artificial Sequence: Synthetic peptide
  Seed: TMESSTLELR
TIESSTLELR

SEQ ID NO: 17230 - protein, 10 aa, Artificial Sequence
  Description of Artificial Sequence: Synthetic peptide
  Seed: TMESSTLELR
TIESSTLELK

SEQ ID NO: 17231 - protein, 10 aa, Artificial Sequence
  Description of Artificial Sequence: Synthetic peptide
  Seed: TMESSTLELR
TLESSTLELR

SEQ ID NO: 17232 - protein, 10 aa, Artificial Sequence
  Description of Artificial Sequence: Synthetic peptide
  Seed: TMESSTLELR
TLESSTLELK

SEQ ID NO: 17233 - protein, 10 aa, Artificial Sequence
  Description of Artificial Sequence: Synthetic peptide
  Seed: TMESSTLELR
TMESSTLELK

SEQ ID NO: 17234 - protein, 10 aa, Artificial Sequence
  Description of Artificial Sequence: Synthetic peptide
  Seed: TMESSTLELR
TFESSTLELR

SEQ ID NO: 17235 - protein, 10 aa, Artificial Sequence
  Description of Artificial Sequence: Synthetic peptide
  Seed: TMESSTLELR
TFESSTLELK

SEQ ID NO: 17236 - protein, 10 aa, Artificial Sequence
  Description of Artificial Sequence: Synthetic peptide
  Seed: TMESSTLELR
TSESSTLELR

SEQ ID NO: 17237 - protein, 11 aa, Artificial Sequence
  Description of Artificial Sequence: Synthetic peptide
  Seed: TMVMELIRMIK
TSVMELIRMIK

SEQ ID NO: 17238 - protein, 9 aa, Artificial Sequence
  Description of Artificial Sequence: Synthetic peptide
  Seed: TTYQRTRAL
TCYQRTRAI

SEQ ID NO: 17239 - protein, 9 aa, Artificial Sequence
  Description of Artificial Sequence: Synthetic peptide
  Seed: TSDMRTEII
TLDMRTEIF

SEQ ID NO: 17240 - protein, 9 aa, Artificial Sequence
  Description of Artificial Sequence: Synthetic peptide
  Seed: TSDMRTEII
TADMRTEIM

SEQ ID NO: 17241 - protein, 9 aa, Artificial Sequence
  Description of Artificial Sequence: Synthetic peptide
  Seed: TSDMRTEII
TADMRTEIF

SEQ ID NO: 17242 - protein, 9 aa, Artificial Sequence
  Description of Artificial Sequence: Synthetic peptide
  Seed: TSDMRTEII
TADMRTEIV

SEQ ID NO: 17243 - protein, 9 aa, Artificial Sequence
  Description of Artificial Sequence: Synthetic peptide
  Seed: TSDMRTEII
TQDMRTEIF

SEQ ID NO: 17244 - protein, 9 aa, Artificial Sequence
  Description of Artificial Sequence: Synthetic peptide
  Seed: TSDMRTEII
TIDMRTEIL

SEQ ID NO: 17245 - protein, 9 aa, Artificial Sequence
  Description of Artificial Sequence: Synthetic peptide
  Seed: TSDMRTEII
TIDMRTEIM

SEQ ID NO: 17246 - protein, 9 aa, Artificial Sequence
  Description of Artificial Sequence: Synthetic peptide
  Seed: TSDMRTEII
TIDMRTEIF

SEQ ID NO: 17247 - protein, 9 aa, Artificial Sequence
  Description of Artificial Sequence: Synthetic peptide
  Seed: TSDMRTEII
TLDMRTEIL

SEQ ID NO: 17248 - protein, 9 aa, Artificial Sequence
  Description of Artificial Sequence: Synthetic peptide
  Seed: TSDMRTEII
TLDMRTEIM

SEQ ID NO: 17249 - protein, 9 aa, Artificial Sequence
  Description of Artificial Sequence: Synthetic peptide
  Seed: TSDMRTEII
TMDMRTEII

SEQ ID NO: 17250 - protein, 9 aa, Artificial Sequence
  Description of Artificial Sequence: Synthetic peptide
  Seed: TSDMRTEII
TTDMRTEIF

SEQ ID NO: 17251 - protein, 9 aa, Artificial Sequence
  Description of Artificial Sequence: Synthetic peptide
  Seed: TSDMRTEII
TMDMRTEIL

SEQ ID NO: 17252 - protein, 9 aa, Artificial Sequence
  Description of Artificial Sequence: Synthetic peptide
  Seed: TSDMRTEII
TMDMRTEIM

SEQ ID NO: 17253 - protein, 9 aa, Artificial Sequence
  Description of Artificial Sequence: Synthetic peptide
  Seed: TSDMRTEII
TMDMRTEIF

SEQ ID NO: 17254 - protein, 9 aa, Artificial Sequence
  Description of Artificial Sequence: Synthetic peptide
  Seed: TSDMRTEII
TSDMRTEIL

SEQ ID NO: 17255 - protein, 9 aa, Artificial Sequence
  Description of Artificial Sequence: Synthetic peptide
  Seed: TSDMRTEII
TSDMRTEIM

SEQ ID NO: 17256 - protein, 9 aa, Artificial Sequence
  Description of Artificial Sequence: Synthetic peptide
  Seed: TSDMRTEII
TSDMRTEIF

SEQ ID NO: 17257 - protein, 9 aa, Artificial Sequence
  Description of Artificial Sequence: Synthetic peptide
  Seed: TSDMRTEII
TSDMRTEIV

SEQ ID NO: 17258 - protein, 9 aa, Artificial Sequence
  Description of Artificial Sequence: Synthetic peptide
  Seed: TSDMRTEII
TTDMRTEII

SEQ ID NO: 17259 - protein, 9 aa, Artificial Sequence
  Description of Artificial Sequence: Synthetic peptide
  Seed: TSDMRTEII
TTDMRTEIL

SEQ ID NO: 17260 - protein, 9 aa, Artificial Sequence
  Description of Artificial Sequence: Synthetic peptide
  Seed: TSDMRTEII
TADMRTEIL

SEQ ID NO: 17261 - protein, 9 aa, Artificial Sequence
  Description of Artificial Sequence: Synthetic peptide
  Seed: TSDMRTEII
TADMRTEII

SEQ ID NO: 17262 - protein, 10 aa, Artificial Sequence
  Description of Artificial Sequence: Synthetic peptide
  Seed: TSDMRAEIIR
TVDMRAEIIK

SEQ ID NO: 17263 - protein, 10 aa, Artificial Sequence
  Description of Artificial Sequence: Synthetic peptide
  Seed: TSDMRAEIIR
TTDMRAEIIK

SEQ ID NO: 17264 - protein, 9 aa, Artificial Sequence
  Description of Artificial Sequence: Synthetic peptide
  Seed: TSDMRAEII
TMDMRAEIF

SEQ ID NO: 17265 - protein, 9 aa, Artificial Sequence
  Description of Artificial Sequence: Synthetic peptide
  Seed: TSDMRAEII
TSDMRAEIL

SEQ ID NO: 17266 - protein, 9 aa, Artificial Sequence
  Description of Artificial Sequence: Synthetic peptide
  Seed: TSDMRAEII
TSDMRAEIM

SEQ ID NO: 17267 - protein, 9 aa, Artificial Sequence
  Description of Artificial Sequence: Synthetic peptide
  Seed: TSDMRAEII
TSDMRAEIF

SEQ ID NO: 17268 - protein, 9 aa, Artificial Sequence
  Description of Artificial Sequence: Synthetic peptide
  Seed: TSDMRAEII
TSDMRAEIV

SEQ ID NO: 17269 - protein, 9 aa, Artificial Sequence
  Description of Artificial Sequence: Synthetic peptide
  Seed: TSDMRAEII
TTDMRAEII

SEQ ID NO: 17270 - protein, 9 aa, Artificial Sequence
  Description of Artificial Sequence: Synthetic peptide
  Seed: TSDMRAEII
TTDMRAEIL

SEQ ID NO: 17271 - protein, 9 aa, Artificial Sequence
  Description of Artificial Sequence: Synthetic peptide
  Seed: TSDMRAEII
TTDMRAEIM

SEQ ID NO: 17272 - protein, 9 aa, Artificial Sequence
  Description of Artificial Sequence: Synthetic peptide
  Seed: TSDMRAEII
TTDMRAEIF

SEQ ID NO: 17273 - protein, 9 aa, Artificial Sequence
  Description of Artificial Sequence: Synthetic peptide
  Seed: TSDMRAEII
TTDMRAEIV

SEQ ID NO: 17274 - protein, 9 aa, Artificial Sequence
  Description of Artificial Sequence: Synthetic peptide
  Seed: TSDMRAEII
TVDMRAEIL

SEQ ID NO: 17275 - protein, 9 aa, Artificial Sequence
  Description of Artificial Sequence: Synthetic peptide
  Seed: TSDMRAEII
TVDMRAEIM

SEQ ID NO: 17276 - protein, 9 aa, Artificial Sequence
  Description of Artificial Sequence: Synthetic peptide
  Seed: TSDMRAEII
TVDMRAEIF

SEQ ID NO: 17277 - protein, 10 aa, Artificial Sequence
  Description of Artificial Sequence: Synthetic peptide
  Seed: TSDMRAEIIR
TADMRAEIIK

SEQ ID NO: 17278 - protein, 10 aa, Artificial Sequence
  Description of Artificial Sequence: Synthetic peptide
  Seed: TSDMRAEIIR
TQDMRAEIIK

SEQ ID NO: 17279 - protein, 10 aa, Artificial Sequence
  Description of Artificial Sequence: Synthetic peptide
  Seed: TSDMRAEIIR
TIDMRAEIIK

SEQ ID NO: 17280 - protein, 10 aa, Artificial Sequence
  Description of Artificial Sequence: Synthetic peptide
  Seed: TSDMRAEIIR
TLDMRAEIIK

SEQ ID NO: 17281 - protein, 10 aa, Artificial Sequence
  Description of Artificial Sequence: Synthetic peptide
  Seed: TSDMRAEIIR
TMDMRAEIIK

SEQ ID NO: 17282 - protein, 9 aa, Artificial Sequence
  Description of Artificial Sequence: Synthetic peptide
  Seed: TSDMRTEII
TTDMRTEIM

SEQ ID NO: 17283 - protein, 9 aa, Artificial Sequence
  Description of Artificial Sequence: Synthetic peptide
  Seed: TSDMRTEII
TTDMRTEIV

SEQ ID NO: 17284 - protein, 11 aa, Artificial Sequence
  Description of Artificial Sequence: Synthetic peptide
  Seed: TMVMELIRMIK
TTVMELIRMIK

SEQ ID NO: 17285 - protein, 9 aa, Artificial Sequence
  Description of Artificial Sequence: Synthetic peptide
  Seed: TTYQRTRAL
TRYQRTRAY

SEQ ID NO: 17286 - protein, 9 aa, Artificial Sequence
  Description of Artificial Sequence: Synthetic peptide
  Seed: TTYQRTRAL
TAYQRTRAY

SEQ ID NO: 17287 - protein, 9 aa, Artificial Sequence
  Description of Artificial Sequence: Synthetic peptide
  Seed: TTYQRTRAL
TAYQRTRAV

SEQ ID NO: 17288 - protein, 9 aa, Artificial Sequence
  Description of Artificial Sequence: Synthetic peptide
  Seed: TTYQRTRAL
TRYQRTRAA

SEQ ID NO: 17289 - protein, 9 aa, Artificial Sequence
  Description of Artificial Sequence: Synthetic peptide
  Seed: TTYQRTRAL
TRYQRTRAC

SEQ ID NO: 17290 - protein, 9 aa, Artificial Sequence
  Description of Artificial Sequence: Synthetic peptide
  Seed: TTYQRTRAL
TRYQRTRAI

SEQ ID NO: 17291 - protein, 9 aa, Artificial Sequence
  Description of Artificial Sequence: Synthetic peptide
  Seed: TTYQRTRAL
TRYQRTRAL

SEQ ID NO: 17292 - protein, 9 aa, Artificial Sequence
  Description of Artificial Sequence: Synthetic peptide
  Seed: TTYQRTRAL
TRYQRTRAM

SEQ ID NO: 17293 - protein, 9 aa, Artificial Sequence
  Description of Artificial Sequence: Synthetic peptide
  Seed: TTYQRTRAL
TRYQRTRAF

SEQ ID NO: 17294 - protein, 9 aa, Artificial Sequence
  Description of Artificial Sequence: Synthetic peptide
  Seed: TTYQRTRAL
TRYQRTRAW

SEQ ID NO: 17295 - protein, 9 aa, Artificial Sequence
  Description of Artificial Sequence: Synthetic peptide
  Seed: TTYQRTRAL
TRYQRTRAV

SEQ ID NO: 17296 - protein, 9 aa, Artificial Sequence
  Description of Artificial Sequence: Synthetic peptide
  Seed: TSDMRTEII
TVDMRTEIL

SEQ ID NO: 17297 - protein, 9 aa, Artificial Sequence
  Description of Artificial Sequence: Synthetic peptide
  Seed: TTYQRTRAL
TNYQRTRAA

SEQ ID NO: 17298 - protein, 9 aa, Artificial Sequence
  Description of Artificial Sequence: Synthetic peptide
  Seed: TTYQRTRAL
TNYQRTRAI

SEQ ID NO: 17299 - protein, 9 aa, Artificial Sequence
  Description of Artificial Sequence: Synthetic peptide
  Seed: TTYQRTRAL
TNYQRTRAL

SEQ ID NO: 17300 - protein, 9 aa, Artificial Sequence
  Description of Artificial Sequence: Synthetic peptide
  Seed: TTYQRTRAL
TNYQRTRAK

SEQ ID NO: 17301 - protein, 9 aa, Artificial Sequence
  Description of Artificial Sequence: Synthetic peptide
  Seed: TTYQRTRAL
TNYQRTRAM

SEQ ID NO: 17302 - protein, 9 aa, Artificial Sequence
  Description of Artificial Sequence: Synthetic peptide
  Seed: TTYQRTRAL
TNYQRTRAF

SEQ ID NO: 17303 - protein, 9 aa, Artificial Sequence
  Description of Artificial Sequence: Synthetic peptide
  Seed: TTYQRTRAL
TNYQRTRAY

SEQ ID NO: 17304 - protein, 9 aa, Artificial Sequence
  Description of Artificial Sequence: Synthetic peptide
  Seed: TTYQRTRAL
TNYQRTRAV

SEQ ID NO: 17305 - protein, 9 aa, Artificial Sequence
  Description of Artificial Sequence: Synthetic peptide
  Seed: TTYQRTRAL
TDYQRTRAY

SEQ ID NO: 17306 - protein, 9 aa, Artificial Sequence
  Description of Artificial Sequence: Synthetic peptide
  Seed: TTYQRTRAL
TAYQRTRAW

SEQ ID NO: 17307 - protein, 9 aa, Artificial Sequence
  Description of Artificial Sequence: Synthetic peptide
  Seed: TTYQRTRAL
TAYQRTRAT

SEQ ID NO: 17308 - protein, 9 aa, Artificial Sequence
  Description of Artificial Sequence: Synthetic peptide
  Seed: TTYQRTRAL
TAYQRTRAS

SEQ ID NO: 17309 - protein, 9 aa, Artificial Sequence
  Description of Artificial Sequence: Synthetic peptide
  Seed: TTYQRTRAL
TAYQRTRAF

SEQ ID NO: 17310 - protein, 9 aa, Artificial Sequence
  Description of Artificial Sequence: Synthetic peptide
  Seed: TSDMRTEII
TVDMRTEIM

SEQ ID NO: 17311 - protein, 9 aa, Artificial Sequence
  Description of Artificial Sequence: Synthetic peptide
  Seed: TSDMRTEII
TVDMRTEIF

SEQ ID NO: 17312 - protein, 10 aa, Artificial Sequence
  Description of Artificial Sequence: Synthetic peptide
  Seed: TSDMRTEIIR
TADMRTEIIR

SEQ ID NO: 17313 - protein, 10 aa, Artificial Sequence
  Description of Artificial Sequence: Synthetic peptide
  Seed: TSDMRTEIIR
TQDMRTEIIR

SEQ ID NO: 17314 - protein, 10 aa, Artificial Sequence
  Description of Artificial Sequence: Synthetic peptide
  Seed: TSDMRTEIIR
TIDMRTEIIK

SEQ ID NO: 17315 - protein, 10 aa, Artificial Sequence
  Description of Artificial Sequence: Synthetic peptide
  Seed: TSDMRTEIIR
TLDMRTEIIK

SEQ ID NO: 17316 - protein, 10 aa, Artificial Sequence
  Description of Artificial Sequence: Synthetic peptide
  Seed: TSDMRTEIIR
TMDMRTEIIK

SEQ ID NO: 17317 - protein, 10 aa, Artificial Sequence
  Description of Artificial Sequence: Synthetic peptide
  Seed: TSDMRTEIIR
TTDMRTEIIR

SEQ ID NO: 17318 - protein, 10 aa, Artificial Sequence
  Description of Artificial Sequence: Synthetic peptide
  Seed: TSDMRTEIIR
TTDMRTEIIK

SEQ ID NO: 17319 - protein, 10 aa, Artificial Sequence
  Description of Artificial Sequence: Synthetic peptide
  Seed: TSDMRTEIIR
TVDMRTEIIK

SEQ ID NO: 17320 - protein, 9 aa, Artificial Sequence
  Description of Artificial Sequence: Synthetic peptide
  Seed: TTYQRTRAL
TAYQRTRAA

SEQ ID NO: 17321 - protein, 9 aa, Artificial Sequence
  Description of Artificial Sequence: Synthetic peptide
  Seed: TTYQRTRAL
TAYQRTRAR

SEQ ID NO: 17322 - protein, 9 aa, Artificial Sequence
  Description of Artificial Sequence: Synthetic peptide
  Seed: TTYQRTRAL
TAYQRTRAC

SEQ ID NO: 17323 - protein, 9 aa, Artificial Sequence
  Description of Artificial Sequence: Synthetic peptide
  Seed: TTYQRTRAL
TAYQRTRAH

SEQ ID NO: 17324 - protein, 9 aa, Artificial Sequence
  Description of Artificial Sequence: Synthetic peptide
  Seed: TTYQRTRAL
TAYQRTRAI

SEQ ID NO: 17325 - protein, 9 aa, Artificial Sequence
  Description of Artificial Sequence: Synthetic peptide
  Seed: TTYQRTRAL
TAYQRTRAL

SEQ ID NO: 17326 - protein, 9 aa, Artificial Sequence
  Description of Artificial Sequence: Synthetic peptide
  Seed: TTYQRTRAL
TAYQRTRAK

SEQ ID NO: 17327 - protein, 9 aa, Artificial Sequence
  Description of Artificial Sequence: Synthetic peptide
  Seed: TTYQRTRAL
TAYQRTRAM

SEQ ID NO: 17328 - protein, 9 aa, Artificial Sequence
  Description of Artificial Sequence: Synthetic peptide
  Seed: TSDMRAEII
TMDMRAEIM

SEQ ID NO: 17329 - protein, 9 aa, Artificial Sequence
  Description of Artificial Sequence: Synthetic peptide
  Seed: TSDMRAEII
TMDMRAEIL

SEQ ID NO: 17330 - protein, 9 aa, Artificial Sequence
  Description of Artificial Sequence: Synthetic peptide
  Seed: TSDMRAEII
TLDMRAEIF

SEQ ID NO: 17331 - protein, 10 aa, Artificial Sequence
  Description of Artificial Sequence: Synthetic peptide
  Seed: TNPIVPSFDM
TKPIVPSFDM

SEQ ID NO: 17332 - protein, 10 aa, Artificial Sequence
  Description of Artificial Sequence: Synthetic peptide
  Seed: TNPIVPSFDM
TMPIVPSFDL

SEQ ID NO: 17333 - protein, 10 aa, Artificial Sequence
  Description of Artificial Sequence: Synthetic peptide
  Seed: TNPIVPSFDM
TMPIVPSFDM

SEQ ID NO: 17334 - protein, 10 aa, Artificial Sequence
  Description of Artificial Sequence: Synthetic peptide
  Seed: TNPIVPSFDM
TMPIVPSFDF

SEQ ID NO: 17335 - protein, 10 aa, Artificial Sequence
  Description of Artificial Sequence: Synthetic peptide
  Seed: TNPIVPSFDM
TFPIVPSFDL

SEQ ID NO: 17336 - protein, 10 aa, Artificial Sequence
  Description of Artificial Sequence: Synthetic peptide
  Seed: TNPIVPSFDM
TFPIVPSFDM

SEQ ID NO: 17337 - protein, 10 aa, Artificial Sequence
  Description of Artificial Sequence: Synthetic peptide
  Seed: TNPIVPSFDM
TPPIVPSFDL

SEQ ID NO: 17338 - protein, 10 aa, Artificial Sequence
  Description of Artificial Sequence: Synthetic peptide
  Seed: TNPIVPSFDM
TPPIVPSFDM

SEQ ID NO: 17339 - protein, 10 aa, Artificial Sequence
  Description of Artificial Sequence: Synthetic peptide
  Seed: TNPIVPSFDM
TSPIVPSFDL

SEQ ID NO: 17340 - protein, 10 aa, Artificial Sequence
  Description of Artificial Sequence: Synthetic peptide
  Seed: TNPIVPSFDM
TTPIVPSFDL

SEQ ID NO: 17341 - protein, 9 aa, Artificial Sequence
  Description of Artificial Sequence: Synthetic peptide
  Seed: TSDMRAEII
TLDMRAEIM

SEQ ID NO: 17342 - protein, 10 aa, Artificial Sequence
  Description of Artificial Sequence: Synthetic peptide
  Seed: TNPIVPSFDM
TTPIVPSFDM

SEQ ID NO: 17343 - protein, 10 aa, Artificial Sequence
  Description of Artificial Sequence: Synthetic peptide
  Seed: TNPIVPSFDM
TWPIVPSFDL

SEQ ID NO: 17344 - protein, 10 aa, Artificial Sequence
  Description of Artificial Sequence: Synthetic peptide
  Seed: TNPIVPSFDM
TWPIVPSFDM

SEQ ID NO: 17345 - protein, 10 aa, Artificial Sequence
  Description of Artificial Sequence: Synthetic peptide
  Seed: TNPIVPSFDM
TYPIVPSFDL

SEQ ID NO: 17346 - protein, 10 aa, Artificial Sequence
  Description of Artificial Sequence: Synthetic peptide
  Seed: TNPIVPSFDM
TYPIVPSFDM

SEQ ID NO: 17347 - protein, 10 aa, Artificial Sequence
  Description of Artificial Sequence: Synthetic peptide
  Seed: TNPIVPSFDM
TVPIVPSFDL

SEQ ID NO: 17348 - protein, 10 aa, Artificial Sequence
  Description of Artificial Sequence: Synthetic peptide
  Seed: TNPIVPSFDM
TVPIVPSFDM

SEQ ID NO: 17349 - protein, 9 aa, Artificial Sequence
  Description of Artificial Sequence: Synthetic peptide
  Seed: TRALVRTGM
TRALVRTGR

SEQ ID NO: 17350 - protein, 9 aa, Artificial Sequence
  Description of Artificial Sequence: Synthetic peptide
  Seed: TRALVRTGM
TRALVRTGI

SEQ ID NO: 17351 - protein, 10 aa, Artificial Sequence
  Description of Artificial Sequence: Synthetic peptide
  Seed: TNPIVPSFDM
TKPIVPSFDL

SEQ ID NO: 17352 - protein, 10 aa, Artificial Sequence
  Description of Artificial Sequence: Synthetic peptide
  Seed: TNPIVPSFDM
TLPIVPSFDM

SEQ ID NO: 17353 - protein, 10 aa, Artificial Sequence
  Description of Artificial Sequence: Synthetic peptide
  Seed: TNPIVPSFDM
TLPIVPSFDL

SEQ ID NO: 17354 - protein, 10 aa, Artificial Sequence
  Description of Artificial Sequence: Synthetic peptide
  Seed: TNPIVPSFDM
TIPIVPSFDM

SEQ ID NO: 17355 - protein, 10 aa, Artificial Sequence
  Description of Artificial Sequence: Synthetic peptide
  Seed: TNPIVPSFDM
TAPIVPSFDL

SEQ ID NO: 17356 - protein, 10 aa, Artificial Sequence
  Description of Artificial Sequence: Synthetic peptide
  Seed: TNPIVPSFDM
TAPIVPSFDM

SEQ ID NO: 17357 - protein, 10 aa, Artificial Sequence
  Description of Artificial Sequence: Synthetic peptide
  Seed: TNPIVPSFDM
TRPIVPSFDL

SEQ ID NO: 17358 - protein, 10 aa, Artificial Sequence
  Description of Artificial Sequence: Synthetic peptide
  Seed: TNPIVPSFDM
TRPIVPSFDM

SEQ ID NO: 17359 - protein, 10 aa, Artificial Sequence
  Description of Artificial Sequence: Synthetic peptide
  Seed: TNPIVPSFDM
TNPIVPSFDL

SEQ ID NO: 17360 - protein, 10 aa, Artificial Sequence
  Description of Artificial Sequence: Synthetic peptide
  Seed: TNPIVPSFDM
TDPIVPSFDL

SEQ ID NO: 17361 - protein, 10 aa, Artificial Sequence
  Description of Artificial Sequence: Synthetic peptide
  Seed: TNPIVPSFDM
TDPIVPSFDM

SEQ ID NO: 17362 - protein, 10 aa, Artificial Sequence
  Description of Artificial Sequence: Synthetic peptide
  Seed: TNPIVPSFDM
TCPIVPSFDL

SEQ ID NO: 17363 - protein, 10 aa, Artificial Sequence
  Description of Artificial Sequence: Synthetic peptide
  Seed: TNPIVPSFDM
TCPIVPSFDM

SEQ ID NO: 17364 - protein, 10 aa, Artificial Sequence
  Description of Artificial Sequence: Synthetic peptide
  Seed: TNPIVPSFDM
TQPIVPSFDL

SEQ ID NO: 17365 - protein, 10 aa, Artificial Sequence
  Description of Artificial Sequence: Synthetic peptide
  Seed: TNPIVPSFDM
TQPIVPSFDM

SEQ ID NO: 17366 - protein, 10 aa, Artificial Sequence
  Description of Artificial Sequence: Synthetic peptide
  Seed: TNPIVPSFDM
TEPIVPSFDL

SEQ ID NO: 17367 - protein, 10 aa, Artificial Sequence
  Description of Artificial Sequence: Synthetic peptide
  Seed: TNPIVPSFDM
TEPIVPSFDM

SEQ ID NO: 17368 - protein, 10 aa, Artificial Sequence
  Description of Artificial Sequence: Synthetic peptide
  Seed: TNPIVPSFDM
TGPIVPSFDL

SEQ ID NO: 17369 - protein, 10 aa, Artificial Sequence
  Description of Artificial Sequence: Synthetic peptide
  Seed: TNPIVPSFDM
TGPIVPSFDM

SEQ ID NO: 17370 - protein, 10 aa, Artificial Sequence
  Description of Artificial Sequence: Synthetic peptide
  Seed: TNPIVPSFDM
THPIVPSFDL

SEQ ID NO: 17371 - protein, 10 aa, Artificial Sequence
  Description of Artificial Sequence: Synthetic peptide
  Seed: TNPIVPSFDM
THPIVPSFDM

SEQ ID NO: 17372 - protein, 10 aa, Artificial Sequence
  Description of Artificial Sequence: Synthetic peptide
  Seed: TNPIVPSFDM
TIPIVPSFDL

SEQ ID NO: 17373 - protein, 9 aa, Artificial Sequence
  Description of Artificial Sequence: Synthetic peptide
  Seed: TRALVRTGM
TRALVRTGL

SEQ ID NO: 17374 - protein, 9 aa, Artificial Sequence
  Description of Artificial Sequence: Synthetic peptide
  Seed: TRALVRTGM
TRALVRTGK

SEQ ID NO: 17375 - protein, 9 aa, Artificial Sequence
  Description of Artificial Sequence: Synthetic peptide
  Seed: TRALVRTGM
TRALVRTGF

SEQ ID NO: 17376 - protein, 10 aa, Artificial Sequence
  Description of Artificial Sequence: Synthetic peptide
  Seed: TRGLTHMMIW
TIGLTHMMIW

SEQ ID NO: 17377 - protein, 10 aa, Artificial Sequence
  Description of Artificial Sequence: Synthetic peptide
  Seed: TRGLTHMMIW
TKGLTHMMIW

SEQ ID NO: 17378 - protein, 10 aa, Artificial Sequence
  Description of Artificial Sequence: Synthetic peptide
  Seed: TRGLTHMMIW
TMGLTHMMIW

SEQ ID NO: 17379 - protein, 10 aa, Artificial Sequence
  Description of Artificial Sequence: Synthetic peptide
  Seed: TRGLTHMMIW
TFGLTHMMIW

SEQ ID NO: 17380 - protein, 10 aa, Artificial Sequence
  Description of Artificial Sequence: Synthetic peptide
  Seed: TRGLTHMMIW
TPGLTHMMIW

SEQ ID NO: 17381 - protein, 10 aa, Artificial Sequence
  Description of Artificial Sequence: Synthetic peptide
  Seed: TRGLTHMMIW
TSGLTHMMIF

SEQ ID NO: 17382 - protein, 10 aa, Artificial Sequence
  Description of Artificial Sequence: Synthetic peptide
  Seed: TRGLTHMMIW
TSGLTHMMIW

SEQ ID NO: 17383 - protein, 10 aa, Artificial Sequence
  Description of Artificial Sequence: Synthetic peptide
  Seed: TRGLTHMMIW
TTGLTHMMIW

SEQ ID NO: 17384 - protein, 10 aa, Artificial Sequence
  Description of Artificial Sequence: Synthetic peptide
  Seed: TRGLTHMMIW
TWGLTHMMIW

SEQ ID NO: 17385 - protein, 10 aa, Artificial Sequence
  Description of Artificial Sequence: Synthetic peptide
  Seed: TRGLTHMMIW
TYGLTHMMIW

SEQ ID NO: 17386 - protein, 10 aa, Artificial Sequence
  Description of Artificial Sequence: Synthetic peptide
  Seed: TRGLTHMMIW
TVGLTHMMIW

SEQ ID NO: 17387 - protein, 9 aa, Artificial Sequence
  Description of Artificial Sequence: Synthetic peptide
  Seed: TSDMRAEII
TADMRAEII

SEQ ID NO: 17388 - protein, 9 aa, Artificial Sequence
  Description of Artificial Sequence: Synthetic peptide
  Seed: TSDMRAEII
TADMRAEIL

SEQ ID NO: 17389 - protein, 9 aa, Artificial Sequence
  Description of Artificial Sequence: Synthetic peptide
  Seed: TSDMRAEII
TADMRAEIM

SEQ ID NO: 17390 - protein, 9 aa, Artificial Sequence
  Description of Artificial Sequence: Synthetic peptide
  Seed: TSDMRAEII
TADMRAEIF

SEQ ID NO: 17391 - protein, 9 aa, Artificial Sequence
  Description of Artificial Sequence: Synthetic peptide
  Seed: TSDMRAEII
TADMRAEIV

SEQ ID NO: 17392 - protein, 9 aa, Artificial Sequence
  Description of Artificial Sequence: Synthetic peptide
  Seed: TSDMRAEII
TIDMRAEIL

SEQ ID NO: 17393 - protein, 9 aa, Artificial Sequence
  Description of Artificial Sequence: Synthetic peptide
  Seed: TSDMRAEII
TIDMRAEIM

SEQ ID NO: 17394 - protein, 9 aa, Artificial Sequence
  Description of Artificial Sequence: Synthetic peptide
  Seed: TSDMRAEII
TIDMRAEIF

SEQ ID NO: 17395 - protein, 9 aa, Artificial Sequence
  Description of Artificial Sequence: Synthetic peptide
  Seed: TSDMRAEII
TLDMRAEIL

SEQ ID NO: 17396 - protein, 10 aa, Artificial Sequence
  Description of Artificial Sequence: Synthetic peptide
  Seed: TRGLTHMMIW
TLGLTHMMIW

SEQ ID NO: 17397 - protein, 10 aa, Artificial Sequence
  Description of Artificial Sequence: Synthetic peptide
  Seed: TRGLTHMMIW
THGLTHMMIW

SEQ ID NO: 17398 - protein, 9 aa, Artificial Sequence
  Description of Artificial Sequence: Synthetic peptide
  Seed: TRALVRTGM
TRALVRTGY

SEQ ID NO: 17399 - protein, 10 aa, Artificial Sequence
  Description of Artificial Sequence: Synthetic peptide
  Seed: TRGLTHMMIW
TGGLTHMMIW

SEQ ID NO: 17400 - protein, 9 aa, Artificial Sequence
  Description of Artificial Sequence: Synthetic peptide
  Seed: TRALVRTGM
TRALVRTGV

SEQ ID NO: 17401 - protein, 9 aa, Artificial Sequence
  Description of Artificial Sequence: Synthetic peptide
  Seed: TRALVRTGM
TQALVRTGL

SEQ ID NO: 17402 - protein, 9 aa, Artificial Sequence
  Description of Artificial Sequence: Synthetic peptide
  Seed: TRALVRTGM
THALVRTGA

SEQ ID NO: 17403 - protein, 9 aa, Artificial Sequence
  Description of Artificial Sequence: Synthetic peptide
  Seed: TRALVRTGM
THALVRTGI

SEQ ID NO: 17404 - protein, 9 aa, Artificial Sequence
  Description of Artificial Sequence: Synthetic peptide
  Seed: TRALVRTGM
THALVRTGL

SEQ ID NO: 17405 - protein, 9 aa, Artificial Sequence
  Description of Artificial Sequence: Synthetic peptide
  Seed: TRALVRTGM
THALVRTGM

SEQ ID NO: 17406 - protein, 9 aa, Artificial Sequence
  Description of Artificial Sequence: Synthetic peptide
  Seed: TRALVRTGM
THALVRTGF

SEQ ID NO: 17407 - protein, 9 aa, Artificial Sequence
  Description of Artificial Sequence: Synthetic peptide
  Seed: TRALVRTGM
THALVRTGV

SEQ ID NO: 17408 - protein, 9 aa, Artificial Sequence
  Description of Artificial Sequence: Synthetic peptide
  Seed: TRALVRTGM
TKALVRTGL

SEQ ID NO: 17409 - protein, 9 aa, Artificial Sequence
  Description of Artificial Sequence: Synthetic peptide
  Seed: TRGLTHMMI
TRGLTHMML

SEQ ID NO: 17410 - protein, 9 aa, Artificial Sequence
  Description of Artificial Sequence: Synthetic peptide
  Seed: TRGLTHMMI
TRGLTHMMM

SEQ ID NO: 17411 - protein, 9 aa, Artificial Sequence
  Description of Artificial Sequence: Synthetic peptide
  Seed: TRGLTHMMI
TRGLTHMMF

SEQ ID NO: 17412 - protein, 9 aa, Artificial Sequence
  Description of Artificial Sequence: Synthetic peptide
  Seed: TRGLTHMMI
TRGLTHMMV

SEQ ID NO: 17413 - protein, 10 aa, Artificial Sequence
  Description of Artificial Sequence: Synthetic peptide
  Seed: TRGLTHMMIW
TNGLTHMMIW

SEQ ID NO: 17414 - protein, 10 aa, Artificial Sequence
  Description of Artificial Sequence: Synthetic peptide
  Seed: TRGLTHMMIW
TDGLTHMMIW

SEQ ID NO: 17415 - protein, 10 aa, Artificial Sequence
  Description of Artificial Sequence: Synthetic peptide
  Seed: TRGLTHMMIW
TCGLTHMMIW

SEQ ID NO: 17416 - protein, 10 aa, Artificial Sequence
  Description of Artificial Sequence: Synthetic peptide
  Seed: TRGLTHMMIW
TQGLTHMMIW

SEQ ID NO: 17417 - protein, 10 aa, Artificial Sequence
  Description of Artificial Sequence: Synthetic peptide
  Seed: TRGLTHMMIW
TEGLTHMMIW

SEQ ID NO: 17418 - protein, 9 aa, Artificial Sequence
  Description of Artificial Sequence: Synthetic peptide
  Seed: VSFRGRGVF
VMFRGRGVL

SEQ ID NO: 17419 - protein, 9 aa, Artificial Sequence
  Description of Artificial Sequence: Synthetic peptide
  Seed: VSFRGRGVF
VMFRGRGVF

SEQ ID NO: 17420 - protein, 10 aa, Artificial Sequence
  Description of Artificial Sequence: Synthetic peptide
  Seed: TIERMVLSAF
TMERMVLSAV

SEQ ID NO: 17421 - protein, 9 aa, Artificial Sequence
  Description of Artificial Sequence: Synthetic peptide
  Seed: YGLAVASGY
YVLAVASGF

SEQ ID NO: 17422 - protein, 9 aa, Artificial Sequence
  Description of Artificial Sequence: Synthetic peptide
  Seed: YGLAVASGY
YTLAVASGV

SEQ ID NO: 17423 - protein, 9 aa, Artificial Sequence
  Description of Artificial Sequence: Synthetic peptide
  Seed: YGLAVASGY
YWLAVASGM

SEQ ID NO: 17424 - protein, 9 aa, Artificial Sequence
  Description of Artificial Sequence: Synthetic peptide
  Seed: YGLAVASGY
YWLAVASGF

SEQ ID NO: 17425 - protein, 9 aa, Artificial Sequence
  Description of Artificial Sequence: Synthetic peptide
  Seed: YGLAVASGY
YWLAVASGY

SEQ ID NO: 17426 - protein, 9 aa, Artificial Sequence
  Description of Artificial Sequence: Synthetic peptide
  Seed: YGLAVASGY
YYLAVASGM

SEQ ID NO: 17427 - protein, 9 aa, Artificial Sequence
  Description of Artificial Sequence: Synthetic peptide
  Seed: YGLAVASGY
YYLAVASGF

SEQ ID NO: 17428 - protein, 9 aa, Artificial Sequence
  Description of Artificial Sequence: Synthetic peptide
  Seed: YGLAVASGY
YYLAVASGY

SEQ ID NO: 17429 - protein, 9 aa, Artificial Sequence
  Description of Artificial Sequence: Synthetic peptide
  Seed: YGLAVASGY
YVLAVASGL

SEQ ID NO: 17430 - protein, 9 aa, Artificial Sequence
  Description of Artificial Sequence: Synthetic peptide
  Seed: YGLAVASGY
YVLAVASGM

SEQ ID NO: 17431 - protein, 9 aa, Artificial Sequence
  Description of Artificial Sequence: Synthetic peptide
  Seed: YGLAVASGY
YVLAVASGW

SEQ ID NO: 17432 - protein, 11 aa, Artificial Sequence
  Description of Artificial Sequence: Synthetic peptide
  Seed: YGLAVASGYDF
YCLAVASGYDF

SEQ ID NO: 17433 - protein, 9 aa, Artificial Sequence
  Description of Artificial Sequence: Synthetic peptide
  Seed: YGLAVASGY
YVLAVASGY

SEQ ID NO: 17434 - protein, 11 aa, Artificial Sequence
  Description of Artificial Sequence: Synthetic peptide
  Seed: YGLAVASGYDF
YALAVASGYDM

SEQ ID NO: 17435 - protein, 11 aa, Artificial Sequence
  Description of Artificial Sequence: Synthetic peptide
  Seed: YGLAVASGYDF
YALAVASGYDF

SEQ ID NO: 17436 - protein, 11 aa, Artificial Sequence
  Description of Artificial Sequence: Synthetic peptide
  Seed: YGLAVASGYDF
YALAVASGYDY

SEQ ID NO: 17437 - protein, 11 aa, Artificial Sequence
  Description of Artificial Sequence: Synthetic peptide
  Seed: YGLAVASGYDF
YRLAVASGYDF

SEQ ID NO: 17438 - protein, 11 aa, Artificial Sequence
  Description of Artificial Sequence: Synthetic peptide
  Seed: YGLAVASGYDF
YRLAVASGYDY

SEQ ID NO: 17439 - protein, 11 aa, Artificial Sequence
  Description of Artificial Sequence: Synthetic peptide
  Seed: YGLAVASGYDF
YNLAVASGYDF

SEQ ID NO: 17440 - protein, 11 aa, Artificial Sequence
  Description of Artificial Sequence: Synthetic peptide
  Seed: YGLAVASGYDF
YNLAVASGYDY

SEQ ID NO: 17441 - protein, 11 aa, Artificial Sequence
  Description of Artificial Sequence: Synthetic peptide
  Seed: YGLAVASGYDF
YDLAVASGYDF

SEQ ID NO: 17442 - protein, 9 aa, Artificial Sequence
  Description of Artificial Sequence: Synthetic peptide
  Seed: YGLAVASGY
YTLAVASGY

SEQ ID NO: 17443 - protein, 9 aa, Artificial Sequence
  Description of Artificial Sequence: Synthetic peptide
  Seed: YGLAVASGY
YTLAVASGW

SEQ ID NO: 17444 - protein, 9 aa, Artificial Sequence
  Description of Artificial Sequence: Synthetic peptide
  Seed: YGLAVASGY
YTLAVASGF

SEQ ID NO: 17445 - protein, 9 aa, Artificial Sequence
  Description of Artificial Sequence: Synthetic peptide
  Seed: YGLAVASGY
YTLAVASGM

SEQ ID NO: 17446 - protein, 9 aa, Artificial Sequence
  Description of Artificial Sequence: Synthetic peptide
  Seed: YGLAVASGY
YPLAVASGH

SEQ ID NO: 17447 - protein, 9 aa, Artificial Sequence
  Description of Artificial Sequence: Synthetic peptide
  Seed: YGLAVASGY
YPLAVASGI

SEQ ID NO: 17448 - protein, 9 aa, Artificial Sequence
  Description of Artificial Sequence: Synthetic peptide
  Seed: YGLAVASGY
YPLAVASGL

SEQ ID NO: 17449 - protein, 9 aa, Artificial Sequence
  Description of Artificial Sequence: Synthetic peptide
  Seed: YGLAVASGY
YPLAVASGM

SEQ ID NO: 17450 - protein, 9 aa, Artificial Sequence
  Description of Artificial Sequence: Synthetic peptide
  Seed: YGLAVASGY
YPLAVASGF

SEQ ID NO: 17451 - protein, 9 aa, Artificial Sequence
  Description of Artificial Sequence: Synthetic peptide
  Seed: YGLAVASGY
YPLAVASGS

SEQ ID NO: 17452 - protein, 9 aa, Artificial Sequence
  Description of Artificial Sequence: Synthetic peptide
  Seed: YGLAVASGY
YPLAVASGT

SEQ ID NO: 17453 - protein, 9 aa, Artificial Sequence
  Description of Artificial Sequence: Synthetic peptide
  Seed: YGLAVASGY
YPLAVASGW

SEQ ID NO: 17454 - protein, 9 aa, Artificial Sequence
  Description of Artificial Sequence: Synthetic peptide
  Seed: YGLAVASGY
YPLAVASGY

SEQ ID NO: 17455 - protein, 9 aa, Artificial Sequence
  Description of Artificial Sequence: Synthetic peptide
  Seed: YGLAVASGY
YPLAVASGV

SEQ ID NO: 17456 - protein, 9 aa, Artificial Sequence
  Description of Artificial Sequence: Synthetic peptide
  Seed: YGLAVASGY
YSLAVASGI

SEQ ID NO: 17457 - protein, 9 aa, Artificial Sequence
  Description of Artificial Sequence: Synthetic peptide
  Seed: YGLAVASGY
YSLAVASGL

SEQ ID NO: 17458 - protein, 9 aa, Artificial Sequence
  Description of Artificial Sequence: Synthetic peptide
  Seed: YGLAVASGY
YSLAVASGM

SEQ ID NO: 17459 - protein, 9 aa, Artificial Sequence
  Description of Artificial Sequence: Synthetic peptide
  Seed: YGLAVASGY
YSLAVASGF

SEQ ID NO: 17460 - protein, 9 aa, Artificial Sequence
  Description of Artificial Sequence: Synthetic peptide
  Seed: YGLAVASGY
YSLAVASGW

SEQ ID NO: 17461 - protein, 9 aa, Artificial Sequence
  Description of Artificial Sequence: Synthetic peptide
  Seed: YGLAVASGY
YSLAVASGY

SEQ ID NO: 17462 - protein, 9 aa, Artificial Sequence
  Description of Artificial Sequence: Synthetic peptide
  Seed: YGLAVASGY
YSLAVASGV

SEQ ID NO: 17463 - protein, 9 aa, Artificial Sequence
  Description of Artificial Sequence: Synthetic peptide
  Seed: YGLAVASGY
YTLAVASGI

SEQ ID NO: 17464 - protein, 9 aa, Artificial Sequence
  Description of Artificial Sequence: Synthetic peptide
  Seed: YGLAVASGY
YTLAVASGL

SEQ ID NO: 17465 - protein, 11 aa, Artificial Sequence
  Description of Artificial Sequence: Synthetic peptide
  Seed: YGLAVASGYDF
YDLAVASGYDY

SEQ ID NO: 17466 - protein, 11 aa, Artificial Sequence
  Description of Artificial Sequence: Synthetic peptide
  Seed: YGLAVASGYDF
YCLAVASGYDY

SEQ ID NO: 17467 - protein, 9 aa, Artificial Sequence
  Description of Artificial Sequence: Synthetic peptide
  Seed: YGLAVASGY
YPLAVASGQ

SEQ ID NO: 17468 - protein, 9 aa, Artificial Sequence
  Description of Artificial Sequence: Synthetic peptide
  Seed: YGPAVASGY
YAPAVASGF

SEQ ID NO: 17469 - protein, 11 aa, Artificial Sequence
  Description of Artificial Sequence: Synthetic peptide
  Seed: YGLAVASGYDF
YWLAVASGYDY

SEQ ID NO: 17470 - protein, 11 aa, Artificial Sequence
  Description of Artificial Sequence: Synthetic peptide
  Seed: YGLAVASGYDF
YYLAVASGYDF

SEQ ID NO: 17471 - protein, 11 aa, Artificial Sequence
  Description of Artificial Sequence: Synthetic peptide
  Seed: YGLAVASGYDF
YYLAVASGYDY

SEQ ID NO: 17472 - protein, 11 aa, Artificial Sequence
  Description of Artificial Sequence: Synthetic peptide
  Seed: YGLAVASGYDF
YVLAVASGYDF

SEQ ID NO: 17473 - protein, 11 aa, Artificial Sequence
  Description of Artificial Sequence: Synthetic peptide
  Seed: YGLAVASGYDF
YVLAVASGYDY

SEQ ID NO: 17474 - protein, 9 aa, Artificial Sequence
  Description of Artificial Sequence: Synthetic peptide
  Seed: YGPAVASGY
YAPAVASGA

SEQ ID NO: 17475 - protein, 9 aa, Artificial Sequence
  Description of Artificial Sequence: Synthetic peptide
  Seed: YGPAVASGY
YAPAVASGI

SEQ ID NO: 17476 - protein, 9 aa, Artificial Sequence
  Description of Artificial Sequence: Synthetic peptide
  Seed: YGPAVASGY
YAPAVASGL

SEQ ID NO: 17477 - protein, 9 aa, Artificial Sequence
  Description of Artificial Sequence: Synthetic peptide
  Seed: YGPAVASGY
YAPAVASGM

SEQ ID NO: 17478 - protein, 9 aa, Artificial Sequence
  Description of Artificial Sequence: Synthetic peptide
  Seed: YGPAVASGY
YAPAVASGW

SEQ ID NO: 17479 - protein, 11 aa, Artificial Sequence
  Description of Artificial Sequence: Synthetic peptide
  Seed: YGLAVASGYDF
YQLAVASGYDF

SEQ ID NO: 17480 - protein, 9 aa, Artificial Sequence
  Description of Artificial Sequence: Synthetic peptide
  Seed: YGPAVASGY
YAPAVASGY

SEQ ID NO: 17481 - protein, 9 aa, Artificial Sequence
  Description of Artificial Sequence: Synthetic peptide
  Seed: YGPAVASGY
YAPAVASGV

SEQ ID NO: 17482 - protein, 9 aa, Artificial Sequence
  Description of Artificial Sequence: Synthetic peptide
  Seed: YGPAVASGY
YRPAVASGL

SEQ ID NO: 17483 - protein, 9 aa, Artificial Sequence
  Description of Artificial Sequence: Synthetic peptide
  Seed: YGPAVASGY
YRPAVASGM

SEQ ID NO: 17484 - protein, 9 aa, Artificial Sequence
  Description of Artificial Sequence: Synthetic peptide
  Seed: YGPAVASGY
YRPAVASGF

SEQ ID NO: 17485 - protein, 9 aa, Artificial Sequence
  Description of Artificial Sequence: Synthetic peptide
  Seed: YGPAVASGY
YRPAVASGY

SEQ ID NO: 17486 - protein, 9 aa, Artificial Sequence
  Description of Artificial Sequence: Synthetic peptide
  Seed: YGPAVASGY
YQPAVASGL

SEQ ID NO: 17487 - protein, 9 aa, Artificial Sequence
  Description of Artificial Sequence: Synthetic peptide
  Seed: YGPAVASGY
YQPAVASGM

SEQ ID NO: 17488 - protein, 9 aa, Artificial Sequence
  Description of Artificial Sequence: Synthetic peptide
  Seed: YGPAVASGY
YQPAVASGF

SEQ ID NO: 17489 - protein, 11 aa, Artificial Sequence
  Description of Artificial Sequence: Synthetic peptide
  Seed: YGLAVASGYDF
YWLAVASGYDF

SEQ ID NO: 17490 - protein, 11 aa, Artificial Sequence
  Description of Artificial Sequence: Synthetic peptide
  Seed: YGLAVASGYDF
YTLAVASGYDY

SEQ ID NO: 17491 - protein, 11 aa, Artificial Sequence
  Description of Artificial Sequence: Synthetic peptide
  Seed: YGLAVASGYDF
YTLAVASGYDF

SEQ ID NO: 17492 - protein, 11 aa, Artificial Sequence
  Description of Artificial Sequence: Synthetic peptide
  Seed: YGLAVASGYDF
YSLAVASGYDY

SEQ ID NO: 17493 - protein, 11 aa, Artificial Sequence
  Description of Artificial Sequence: Synthetic peptide
  Seed: YGLAVASGYDF
YQLAVASGYDY

SEQ ID NO: 17494 - protein, 11 aa, Artificial Sequence
  Description of Artificial Sequence: Synthetic peptide
  Seed: YGLAVASGYDF
YELAVASGYDF

SEQ ID NO: 17495 - protein, 11 aa, Artificial Sequence
  Description of Artificial Sequence: Synthetic peptide
  Seed: YGLAVASGYDF
YELAVASGYDY

SEQ ID NO: 17496 - protein, 11 aa, Artificial Sequence
  Description of Artificial Sequence: Synthetic peptide
  Seed: YGLAVASGYDF
YGLAVASGYDY

SEQ ID NO: 17497 - protein, 11 aa, Artificial Sequence
  Description of Artificial Sequence: Synthetic peptide
  Seed: YGLAVASGYDF
YHLAVASGYDF

SEQ ID NO: 17498 - protein, 11 aa, Artificial Sequence
  Description of Artificial Sequence: Synthetic peptide
  Seed: YGLAVASGYDF
YHLAVASGYDY

SEQ ID NO: 17499 - protein, 11 aa, Artificial Sequence
  Description of Artificial Sequence: Synthetic peptide
  Seed: YGLAVASGYDF
YILAVASGYDF

SEQ ID NO: 17500 - protein, 11 aa, Artificial Sequence
  Description of Artificial Sequence: Synthetic peptide
  Seed: YGLAVASGYDF
YILAVASGYDY

SEQ ID NO: 17501 - protein, 11 aa, Artificial Sequence
  Description of Artificial Sequence: Synthetic peptide
  Seed: YGLAVASGYDF
YLLAVASGYDF

SEQ ID NO: 17502 - protein, 11 aa, Artificial Sequence
  Description of Artificial Sequence: Synthetic peptide
  Seed: YGLAVASGYDF
YLLAVASGYDY

SEQ ID NO: 17503 - protein, 11 aa, Artificial Sequence
  Description of Artificial Sequence: Synthetic peptide
  Seed: YGLAVASGYDF
YKLAVASGYDF

SEQ ID NO: 17504 - protein, 11 aa, Artificial Sequence
  Description of Artificial Sequence: Synthetic peptide
  Seed: YGLAVASGYDF
YKLAVASGYDY

SEQ ID NO: 17505 - protein, 11 aa, Artificial Sequence
  Description of Artificial Sequence: Synthetic peptide
  Seed: YGLAVASGYDF
YMLAVASGYDF

SEQ ID NO: 17506 - protein, 11 aa, Artificial Sequence
  Description of Artificial Sequence: Synthetic peptide
  Seed: YGLAVASGYDF
YMLAVASGYDY

SEQ ID NO: 17507 - protein, 11 aa, Artificial Sequence
  Description of Artificial Sequence: Synthetic peptide
  Seed: YGLAVASGYDF
YFLAVASGYDF

SEQ ID NO: 17508 - protein, 11 aa, Artificial Sequence
  Description of Artificial Sequence: Synthetic peptide
  Seed: YGLAVASGYDF
YFLAVASGYDY

SEQ ID NO: 17509 - protein, 11 aa, Artificial Sequence
  Description of Artificial Sequence: Synthetic peptide
  Seed: YGLAVASGYDF
YPLAVASGYDF

SEQ ID NO: 17510 - protein, 11 aa, Artificial Sequence
  Description of Artificial Sequence: Synthetic peptide
  Seed: YGLAVASGYDF
YPLAVASGYDY

SEQ ID NO: 17511 - protein, 11 aa, Artificial Sequence
  Description of Artificial Sequence: Synthetic peptide
  Seed: YGLAVASGYDF
YSLAVASGYDF

SEQ ID NO: 17512 - protein, 9 aa, Artificial Sequence
  Description of Artificial Sequence: Synthetic peptide
  Seed: YGLAVASGY
YPLAVASGG

SEQ ID NO: 17513 - protein, 9 aa, Artificial Sequence
  Description of Artificial Sequence: Synthetic peptide
  Seed: YGLAVASGY
YPLAVASGC

SEQ ID NO: 17514 - protein, 9 aa, Artificial Sequence
  Description of Artificial Sequence: Synthetic peptide
  Seed: YGPAVSSGY
YWPAVSSGF

SEQ ID NO: 17515 - protein, 9 aa, Artificial Sequence
  Description of Artificial Sequence: Synthetic peptide
  Seed: YGLAVASGY
YDLAVASGY

SEQ ID NO: 17516 - protein, 9 aa, Artificial Sequence
  Description of Artificial Sequence: Synthetic peptide
  Seed: YGLAVASGY
YALAVASGV

SEQ ID NO: 17517 - protein, 9 aa, Artificial Sequence
  Description of Artificial Sequence: Synthetic peptide
  Seed: YGLAVASGY
YRLAVASGL

SEQ ID NO: 17518 - protein, 9 aa, Artificial Sequence
  Description of Artificial Sequence: Synthetic peptide
  Seed: YGLAVASGY
YRLAVASGM

SEQ ID NO: 17519 - protein, 9 aa, Artificial Sequence
  Description of Artificial Sequence: Synthetic peptide
  Seed: YGLAVASGY
YRLAVASGF

SEQ ID NO: 17520 - protein, 9 aa, Artificial Sequence
  Description of Artificial Sequence: Synthetic peptide
  Seed: YGLAVASGY
YRLAVASGY

SEQ ID NO: 17521 - protein, 9 aa, Artificial Sequence
  Description of Artificial Sequence: Synthetic peptide
  Seed: YGLAVASGY
YNLAVASGM

SEQ ID NO: 17522 - protein, 9 aa, Artificial Sequence
  Description of Artificial Sequence: Synthetic peptide
  Seed: YGLAVASGY
YNLAVASGF

SEQ ID NO: 17523 - protein, 9 aa, Artificial Sequence
  Description of Artificial Sequence: Synthetic peptide
  Seed: YGLAVASGY
YNLAVASGW

SEQ ID NO: 17524 - protein, 9 aa, Artificial Sequence
  Description of Artificial Sequence: Synthetic peptide
  Seed: YGLAVASGY
YNLAVASGY

SEQ ID NO: 17525 - protein, 9 aa, Artificial Sequence
  Description of Artificial Sequence: Synthetic peptide
  Seed: YGLAVASGY
YCLAVASGM

SEQ ID NO: 17526 - protein, 9 aa, Artificial Sequence
  Description of Artificial Sequence: Synthetic peptide
  Seed: YGLAVASGY
YQLAVASGW

SEQ ID NO: 17527 - protein, 9 aa, Artificial Sequence
  Description of Artificial Sequence: Synthetic peptide
  Seed: YGLAVASGY
YCLAVASGF

SEQ ID NO: 17528 - protein, 9 aa, Artificial Sequence
  Description of Artificial Sequence: Synthetic peptide
  Seed: YGLAVASGY
YCLAVASGW

SEQ ID NO: 17529 - protein, 9 aa, Artificial Sequence
  Description of Artificial Sequence: Synthetic peptide
  Seed: YGLAVASGY
YCLAVASGY

SEQ ID NO: 17530 - protein, 9 aa, Artificial Sequence
  Description of Artificial Sequence: Synthetic peptide
  Seed: YGLAVASGY
YQLAVASGA

SEQ ID NO: 17531 - protein, 9 aa, Artificial Sequence
  Description of Artificial Sequence: Synthetic peptide
  Seed: YGLAVASGY
YQLAVASGG

SEQ ID NO: 17532 - protein, 9 aa, Artificial Sequence
  Description of Artificial Sequence: Synthetic peptide
  Seed: YGLAVASGY
YQLAVASGH

SEQ ID NO: 17533 - protein, 9 aa, Artificial Sequence
  Description of Artificial Sequence: Synthetic peptide
  Seed: YGLAVASGY
YQLAVASGI

SEQ ID NO: 17534 - protein, 9 aa, Artificial Sequence
  Description of Artificial Sequence: Synthetic peptide
  Seed: YGLAVASGY
YQLAVASGL

SEQ ID NO: 17535 - protein, 9 aa, Artificial Sequence
  Description of Artificial Sequence: Synthetic peptide
  Seed: YGLAVASGY
YQLAVASGM

SEQ ID NO: 17536 - protein, 9 aa, Artificial Sequence
  Description of Artificial Sequence: Synthetic peptide
  Seed: YGLAVASGY
YALAVASGY

SEQ ID NO: 17537 - protein, 9 aa, Artificial Sequence
  Description of Artificial Sequence: Synthetic peptide
  Seed: YGLAVASGY
YALAVASGW

SEQ ID NO: 17538 - protein, 9 aa, Artificial Sequence
  Description of Artificial Sequence: Synthetic peptide
  Seed: YGLAVASGY
YALAVASGF

SEQ ID NO: 17539 - protein, 9 aa, Artificial Sequence
  Description of Artificial Sequence: Synthetic peptide
  Seed: YGLAVASGY
YALAVASGM

SEQ ID NO: 17540 - protein, 11 aa, Artificial Sequence
  Description of Artificial Sequence: Synthetic peptide
  Seed: YGLAVASGHDF
YSLAVASGHDM

SEQ ID NO: 17541 - protein, 11 aa, Artificial Sequence
  Description of Artificial Sequence: Synthetic peptide
  Seed: YGLAVASGHDF
YSLAVASGHDF

SEQ ID NO: 17542 - protein, 11 aa, Artificial Sequence
  Description of Artificial Sequence: Synthetic peptide
  Seed: YGLAVASGHDF
YSLAVASGHDY

SEQ ID NO: 17543 - protein, 11 aa, Artificial Sequence
  Description of Artificial Sequence: Synthetic peptide
  Seed: YGLAVASGHDF
YTLAVASGHDM

SEQ ID NO: 17544 - protein, 11 aa, Artificial Sequence
  Description of Artificial Sequence: Synthetic peptide
  Seed: YGLAVASGHDF
YTLAVASGHDF

SEQ ID NO: 17545 - protein, 11 aa, Artificial Sequence
  Description of Artificial Sequence: Synthetic peptide
  Seed: YGLAVASGHDF
YTLAVASGHDY

SEQ ID NO: 17546 - protein, 11 aa, Artificial Sequence
  Description of Artificial Sequence: Synthetic peptide
  Seed: YGLAVASGHDF
YWLAVASGHDM

SEQ ID NO: 17547 - protein, 11 aa, Artificial Sequence
  Description of Artificial Sequence: Synthetic peptide
  Seed: YGLAVASGHDF
YWLAVASGHDF

SEQ ID NO: 17548 - protein, 11 aa, Artificial Sequence
  Description of Artificial Sequence: Synthetic peptide
  Seed: YGLAVASGHDF
YWLAVASGHDY

SEQ ID NO: 17549 - protein, 11 aa, Artificial Sequence
  Description of Artificial Sequence: Synthetic peptide
  Seed: YGLAVASGHDF
YYLAVASGHDM

SEQ ID NO: 17550 - protein, 11 aa, Artificial Sequence
  Description of Artificial Sequence: Synthetic peptide
  Seed: YGLAVASGHDF
YYLAVASGHDF

SEQ ID NO: 17551 - protein, 11 aa, Artificial Sequence
  Description of Artificial Sequence: Synthetic peptide
  Seed: YGLAVASGHDF
YYLAVASGHDY

SEQ ID NO: 17552 - protein, 11 aa, Artificial Sequence
  Description of Artificial Sequence: Synthetic peptide
  Seed: YGLAVASGHDF
YVLAVASGHDM

SEQ ID NO: 17553 - protein, 11 aa, Artificial Sequence
  Description of Artificial Sequence: Synthetic peptide
  Seed: YGLAVASGHDF
YVLAVASGHDF

SEQ ID NO: 17554 - protein, 11 aa, Artificial Sequence
  Description of Artificial Sequence: Synthetic peptide
  Seed: YGLAVASGHDF
YVLAVASGHDY

SEQ ID NO: 17555 - protein, 9 aa, Artificial Sequence
  Description of Artificial Sequence: Synthetic peptide
  Seed: YGLAVASGY
YALAVASGA

SEQ ID NO: 17556 - protein, 9 aa, Artificial Sequence
  Description of Artificial Sequence: Synthetic peptide
  Seed: YGLAVASGY
YALAVASGH

SEQ ID NO: 17557 - protein, 9 aa, Artificial Sequence
  Description of Artificial Sequence: Synthetic peptide
  Seed: YGLAVASGY
YALAVASGI

SEQ ID NO: 17558 - protein, 9 aa, Artificial Sequence
  Description of Artificial Sequence: Synthetic peptide
  Seed: YGLAVASGY
YALAVASGL

SEQ ID NO: 17559 - protein, 9 aa, Artificial Sequence
  Description of Artificial Sequence: Synthetic peptide
  Seed: YGLAVASGY
YQLAVASGF

SEQ ID NO: 17560 - protein, 9 aa, Artificial Sequence
  Description of Artificial Sequence: Synthetic peptide
  Seed: YGLAVASGY
YQLAVASGY

SEQ ID NO: 17561 - protein, 9 aa, Artificial Sequence
  Description of Artificial Sequence: Synthetic peptide
  Seed: YGLAVASGY
YPLAVASGA

SEQ ID NO: 17562 - protein, 9 aa, Artificial Sequence
  Description of Artificial Sequence: Synthetic peptide
  Seed: YGLAVASGY
YMLAVASGH

SEQ ID NO: 17563 - protein, 9 aa, Artificial Sequence
  Description of Artificial Sequence: Synthetic peptide
  Seed: YGLAVASGY
YKLAVASGH

SEQ ID NO: 17564 - protein, 9 aa, Artificial Sequence
  Description of Artificial Sequence: Synthetic peptide
  Seed: YGLAVASGY
YKLAVASGI

SEQ ID NO: 17565 - protein, 9 aa, Artificial Sequence
  Description of Artificial Sequence: Synthetic peptide
  Seed: YGLAVASGY
YKLAVASGL

SEQ ID NO: 17566 - protein, 9 aa, Artificial Sequence
  Description of Artificial Sequence: Synthetic peptide
  Seed: YGLAVASGY
YKLAVASGM

SEQ ID NO: 17567 - protein, 9 aa, Artificial Sequence
  Description of Artificial Sequence: Synthetic peptide
  Seed: YGLAVASGY
YKLAVASGF

SEQ ID NO: 17568 - protein, 9 aa, Artificial Sequence
  Description of Artificial Sequence: Synthetic peptide
  Seed: YGLAVASGY
YKLAVASGW

SEQ ID NO: 17569 - protein, 9 aa, Artificial Sequence
  Description of Artificial Sequence: Synthetic peptide
  Seed: YGLAVASGY
YKLAVASGY

SEQ ID NO: 17570 - protein, 9 aa, Artificial Sequence
  Description of Artificial Sequence: Synthetic peptide
  Seed: YGLAVASGY
YKLAVASGV

SEQ ID NO: 17571 - protein, 9 aa, Artificial Sequence
  Description of Artificial Sequence: Synthetic peptide
  Seed: YGLAVASGY
YMLAVASGA

SEQ ID NO: 17572 - protein, 9 aa, Artificial Sequence
  Description of Artificial Sequence: Synthetic peptide
  Seed: YGLAVASGY
YMLAVASGI

SEQ ID NO: 17573 - protein, 9 aa, Artificial Sequence
  Description of Artificial Sequence: Synthetic peptide
  Seed: YGLAVASGY
YQLAVASGV

SEQ ID NO: 17574 - protein, 9 aa, Artificial Sequence
  Description of Artificial Sequence: Synthetic peptide
  Seed: YGLAVASGY
YMLAVASGL

SEQ ID NO: 17575 - protein, 9 aa, Artificial Sequence
  Description of Artificial Sequence: Synthetic peptide
  Seed: YGLAVASGY
YMLAVASGM

SEQ ID NO: 17576 - protein, 9 aa, Artificial Sequence
  Description of Artificial Sequence: Synthetic peptide
  Seed: YGLAVASGY
YMLAVASGF

SEQ ID NO: 17577 - protein, 9 aa, Artificial Sequence
  Description of Artificial Sequence: Synthetic peptide
  Seed: YGLAVASGY
YMLAVASGW

SEQ ID NO: 17578 - protein, 9 aa, Artificial Sequence
  Description of Artificial Sequence: Synthetic peptide
  Seed: YGLAVASGY
YMLAVASGY

SEQ ID NO: 17579 - protein, 9 aa, Artificial Sequence
  Description of Artificial Sequence: Synthetic peptide
  Seed: YGLAVASGY
YMLAVASGV

SEQ ID NO: 17580 - protein, 9 aa, Artificial Sequence
  Description of Artificial Sequence: Synthetic peptide
  Seed: YGLAVASGY
YFLAVASGM

SEQ ID NO: 17581 - protein, 9 aa, Artificial Sequence
  Description of Artificial Sequence: Synthetic peptide
  Seed: YGLAVASGY
YFLAVASGF

SEQ ID NO: 17582 - protein, 9 aa, Artificial Sequence
  Description of Artificial Sequence: Synthetic peptide
  Seed: YGLAVASGY
YFLAVASGY

SEQ ID NO: 17583 - protein, 9 aa, Artificial Sequence
  Description of Artificial Sequence: Synthetic peptide
  Seed: YGLAVASGY
YLLAVASGY

SEQ ID NO: 17584 - protein, 9 aa, Artificial Sequence
  Description of Artificial Sequence: Synthetic peptide
  Seed: YGLAVASGY
YLLAVASGW

SEQ ID NO: 17585 - protein, 9 aa, Artificial Sequence
  Description of Artificial Sequence: Synthetic peptide
  Seed: YGLAVASGY
YLLAVASGF

SEQ ID NO: 17586 - protein, 9 aa, Artificial Sequence
  Description of Artificial Sequence: Synthetic peptide
  Seed: YGLAVASGY
YLLAVASGM

SEQ ID NO: 17587 - protein, 9 aa, Artificial Sequence
  Description of Artificial Sequence: Synthetic peptide
  Seed: YGLAVASGY
YELAVASGL

SEQ ID NO: 17588 - protein, 9 aa, Artificial Sequence
  Description of Artificial Sequence: Synthetic peptide
  Seed: YGLAVASGY
YELAVASGM

SEQ ID NO: 17589 - protein, 9 aa, Artificial Sequence
  Description of Artificial Sequence: Synthetic peptide
  Seed: YGLAVASGY
YELAVASGF

SEQ ID NO: 17590 - protein, 9 aa, Artificial Sequence
  Description of Artificial Sequence: Synthetic peptide
  Seed: YGLAVASGY
YELAVASGY

SEQ ID NO: 17591 - protein, 9 aa, Artificial Sequence
  Description of Artificial Sequence: Synthetic peptide
  Seed: YGLAVASGY
YGLAVASGM

SEQ ID NO: 17592 - protein, 9 aa, Artificial Sequence
  Description of Artificial Sequence: Synthetic peptide
  Seed: YGLAVASGY
YGLAVASGF

SEQ ID NO: 17593 - protein, 9 aa, Artificial Sequence
  Description of Artificial Sequence: Synthetic peptide
  Seed: YGLAVASGY
YGLAVASGW

SEQ ID NO: 17594 - protein, 9 aa, Artificial Sequence
  Description of Artificial Sequence: Synthetic peptide
  Seed: YGLAVASGY
YHLAVASGI

SEQ ID NO: 17595 - protein, 9 aa, Artificial Sequence
  Description of Artificial Sequence: Synthetic peptide
  Seed: YGLAVASGY
YHLAVASGL

SEQ ID NO: 17596 - protein, 9 aa, Artificial Sequence
  Description of Artificial Sequence: Synthetic peptide
  Seed: YGLAVASGY
YHLAVASGM

SEQ ID NO: 17597 - protein, 9 aa, Artificial Sequence
  Description of Artificial Sequence: Synthetic peptide
  Seed: YGLAVASGY
YHLAVASGF

SEQ ID NO: 17598 - protein, 9 aa, Artificial Sequence
  Description of Artificial Sequence: Synthetic peptide
  Seed: YGLAVASGY
YHLAVASGW

SEQ ID NO: 17599 - protein, 9 aa, Artificial Sequence
  Description of Artificial Sequence: Synthetic peptide
  Seed: YGLAVASGY
YHLAVASGY

SEQ ID NO: 17600 - protein, 9 aa, Artificial Sequence
  Description of Artificial Sequence: Synthetic peptide
  Seed: YGLAVASGY
YILAVASGL

SEQ ID NO: 17601 - protein, 9 aa, Artificial Sequence
  Description of Artificial Sequence: Synthetic peptide
  Seed: YGLAVASGY
YILAVASGM

SEQ ID NO: 17602 - protein, 9 aa, Artificial Sequence
  Description of Artificial Sequence: Synthetic peptide
  Seed: YGLAVASGY
YILAVASGF

SEQ ID NO: 17603 - protein, 9 aa, Artificial Sequence
  Description of Artificial Sequence: Synthetic peptide
  Seed: YGLAVASGY
YILAVASGW

SEQ ID NO: 17604 - protein, 9 aa, Artificial Sequence
  Description of Artificial Sequence: Synthetic peptide
  Seed: YGLAVASGY
YILAVASGY

SEQ ID NO: 17605 - protein, 9 aa, Artificial Sequence
  Description of Artificial Sequence: Synthetic peptide
  Seed: YGLAVASGY
YLLAVASGL

SEQ ID NO: 17606 - protein, 9 aa, Artificial Sequence
  Description of Artificial Sequence: Synthetic peptide
  Seed: YGPAVASGY
YQPAVASGW

SEQ ID NO: 17607 - protein, 9 aa, Artificial Sequence
  Description of Artificial Sequence: Synthetic peptide
  Seed: YGPAVASGY
YQPAVASGY

SEQ ID NO: 17608 - protein, 9 aa, Artificial Sequence
  Description of Artificial Sequence: Synthetic peptide
  Seed: YGPAVASGY
YEPAVASGY

SEQ ID NO: 17609 - protein, 9 aa, Artificial Sequence
  Description of Artificial Sequence: Synthetic peptide
  Seed: YGPAVSSGY
YQPAVSSGF

SEQ ID NO: 17610 - protein, 9 aa, Artificial Sequence
  Description of Artificial Sequence: Synthetic peptide
  Seed: YGPAVSSGY
YAPAVSSGV

SEQ ID NO: 17611 - protein, 9 aa, Artificial Sequence
  Description of Artificial Sequence: Synthetic peptide
  Seed: YGPAVSSGY
YRPAVSSGL

SEQ ID NO: 17612 - protein, 9 aa, Artificial Sequence
  Description of Artificial Sequence: Synthetic peptide
  Seed: YGPAVSSGY
YRPAVSSGM

SEQ ID NO: 17613 - protein, 9 aa, Artificial Sequence
  Description of Artificial Sequence: Synthetic peptide
  Seed: YGPAVSSGY
YRPAVSSGF

SEQ ID NO: 17614 - protein, 9 aa, Artificial Sequence
  Description of Artificial Sequence: Synthetic peptide
  Seed: YGPAVSSGY
YRPAVSSGY

SEQ ID NO: 17615 - protein, 9 aa, Artificial Sequence
  Description of Artificial Sequence: Synthetic peptide
  Seed: YGPAVSSGY
YCPAVSSGM

SEQ ID NO: 17616 - protein, 9 aa, Artificial Sequence
  Description of Artificial Sequence: Synthetic peptide
  Seed: YGPAVSSGY
YCPAVSSGY

SEQ ID NO: 17617 - protein, 9 aa, Artificial Sequence
  Description of Artificial Sequence: Synthetic peptide
  Seed: YGPAVSSGY
YQPAVSSGL

SEQ ID NO: 17618 - protein, 9 aa, Artificial Sequence
  Description of Artificial Sequence: Synthetic peptide
  Seed: YGPAVSSGY
YQPAVSSGM

SEQ ID NO: 17619 - protein, 9 aa, Artificial Sequence
  Description of Artificial Sequence: Synthetic peptide
  Seed: YGPAVSSGY
YQPAVSSGW

SEQ ID NO: 17620 - protein, 9 aa, Artificial Sequence
  Description of Artificial Sequence: Synthetic peptide
  Seed: YGPAVSSGY
YHPAVSSGY

SEQ ID NO: 17621 - protein, 9 aa, Artificial Sequence
  Description of Artificial Sequence: Synthetic peptide
  Seed: YGPAVSSGY
YQPAVSSGY

SEQ ID NO: 17622 - protein, 9 aa, Artificial Sequence
  Description of Artificial Sequence: Synthetic peptide
  Seed: YGPAVSSGY
YEPAVSSGF

SEQ ID NO: 17623 - protein, 9 aa, Artificial Sequence
  Description of Artificial Sequence: Synthetic peptide
  Seed: YGPAVSSGY
YEPAVSSGY

SEQ ID NO: 17624 - protein, 9 aa, Artificial Sequence
  Description of Artificial Sequence: Synthetic peptide
  Seed: YGPAVSSGY
YGPAVSSGL

SEQ ID NO: 17625 - protein, 9 aa, Artificial Sequence
  Description of Artificial Sequence: Synthetic peptide
  Seed: YGPAVSSGY
YGPAVSSGM

SEQ ID NO: 17626 - protein, 9 aa, Artificial Sequence
  Description of Artificial Sequence: Synthetic peptide
  Seed: YGPAVSSGY
YGPAVSSGF

SEQ ID NO: 17627 - protein, 9 aa, Artificial Sequence
  Description of Artificial Sequence: Synthetic peptide
  Seed: YGPAVSSGY
YHPAVSSGI

SEQ ID NO: 17628 - protein, 9 aa, Artificial Sequence
  Description of Artificial Sequence: Synthetic peptide
  Seed: YGPAVSSGY
YHPAVSSGL

SEQ ID NO: 17629 - protein, 9 aa, Artificial Sequence
  Description of Artificial Sequence: Synthetic peptide
  Seed: YGPAVSSGY
YHPAVSSGM

SEQ ID NO: 17630 - protein, 9 aa, Artificial Sequence
  Description of Artificial Sequence: Synthetic peptide
  Seed: YGPAVSSGY
YAPAVSSGY

SEQ ID NO: 17631 - protein, 9 aa, Artificial Sequence
  Description of Artificial Sequence: Synthetic peptide
  Seed: YGPAVSSGY
YAPAVSSGW

SEQ ID NO: 17632 - protein, 9 aa, Artificial Sequence
  Description of Artificial Sequence: Synthetic peptide
  Seed: YGPAVSSGY
YAPAVSSGF

SEQ ID NO: 17633 - protein, 9 aa, Artificial Sequence
  Description of Artificial Sequence: Synthetic peptide
  Seed: YGPAVSSGY
YAPAVSSGM

SEQ ID NO: 17634 - protein, 11 aa, Artificial Sequence
  Description of Artificial Sequence: Synthetic peptide
  Seed: YGPAVASGYDF
YMPAVASGYDF

SEQ ID NO: 17635 - protein, 11 aa, Artificial Sequence
  Description of Artificial Sequence: Synthetic peptide
  Seed: YGPAVASGYDF
YMPAVASGYDY

SEQ ID NO: 17636 - protein, 11 aa, Artificial Sequence
  Description of Artificial Sequence: Synthetic peptide
  Seed: YGPAVASGYDF
YFPAVASGYDF

SEQ ID NO: 17637 - protein, 11 aa, Artificial Sequence
  Description of Artificial Sequence: Synthetic peptide
  Seed: YGPAVASGYDF
YFPAVASGYDY

SEQ ID NO: 17638 - protein, 11 aa, Artificial Sequence
  Description of Artificial Sequence: Synthetic peptide
  Seed: YGPAVASGYDF
YPPAVASGYDF

SEQ ID NO: 17639 - protein, 11 aa, Artificial Sequence
  Description of Artificial Sequence: Synthetic peptide
  Seed: YGPAVASGYDF
YPPAVASGYDY

SEQ ID NO: 17640 - protein, 11 aa, Artificial Sequence
  Description of Artificial Sequence: Synthetic peptide
  Seed: YGPAVASGYDF
YSPAVASGYDF

SEQ ID NO: 17641 - protein, 11 aa, Artificial Sequence
  Description of Artificial Sequence: Synthetic peptide
  Seed: YGPAVASGYDF
YSPAVASGYDY

SEQ ID NO: 17642 - protein, 11 aa, Artificial Sequence
  Description of Artificial Sequence: Synthetic peptide
  Seed: YGPAVASGYDF
YTPAVASGYDF

SEQ ID NO: 17643 - protein, 11 aa, Artificial Sequence
  Description of Artificial Sequence: Synthetic peptide
  Seed: YGPAVASGYDF
YTPAVASGYDY

SEQ ID NO: 17644 - protein, 11 aa, Artificial Sequence
  Description of Artificial Sequence: Synthetic peptide
  Seed: YGPAVASGYDF
YWPAVASGYDF

SEQ ID NO: 17645 - protein, 11 aa, Artificial Sequence
  Description of Artificial Sequence: Synthetic peptide
  Seed: YGPAVASGYDF
YWPAVASGYDY

SEQ ID NO: 17646 - protein, 11 aa, Artificial Sequence
  Description of Artificial Sequence: Synthetic peptide
  Seed: YGPAVASGYDF
YYPAVASGYDF

SEQ ID NO: 17647 - protein, 11 aa, Artificial Sequence
  Description of Artificial Sequence: Synthetic peptide
  Seed: YGPAVASGYDF
YYPAVASGYDY

SEQ ID NO: 17648 - protein, 11 aa, Artificial Sequence
  Description of Artificial Sequence: Synthetic peptide
  Seed: YGPAVASGYDF
YVPAVASGYDF

SEQ ID NO: 17649 - protein, 11 aa, Artificial Sequence
  Description of Artificial Sequence: Synthetic peptide
  Seed: YGPAVASGYDF
YVPAVASGYDY

SEQ ID NO: 17650 - protein, 9 aa, Artificial Sequence
  Description of Artificial Sequence: Synthetic peptide
  Seed: YGPAVSSGY
YAPAVSSGA

SEQ ID NO: 17651 - protein, 9 aa, Artificial Sequence
  Description of Artificial Sequence: Synthetic peptide
  Seed: YGPAVSSGY
YAPAVSSGI

SEQ ID NO: 17652 - protein, 9 aa, Artificial Sequence
  Description of Artificial Sequence: Synthetic peptide
  Seed: YGPAVSSGY
YAPAVSSGL

SEQ ID NO: 17653 - protein, 9 aa, Artificial Sequence
  Description of Artificial Sequence: Synthetic peptide
  Seed: YGPAVSSGY
YHPAVSSGF

SEQ ID NO: 17654 - protein, 9 aa, Artificial Sequence
  Description of Artificial Sequence: Synthetic peptide
  Seed: YGPAVSSGY
YIPAVSSGL

SEQ ID NO: 17655 - protein, 9 aa, Artificial Sequence
  Description of Artificial Sequence: Synthetic peptide
  Seed: YGPAVASGY
YGPAVASGM

SEQ ID NO: 17656 - protein, 9 aa, Artificial Sequence
  Description of Artificial Sequence: Synthetic peptide
  Seed: YGPAVSSGY
YSPAVSSGF

SEQ ID NO: 17657 - protein, 9 aa, Artificial Sequence
  Description of Artificial Sequence: Synthetic peptide
  Seed: YGPAVSSGY
YFPAVSSGW

SEQ ID NO: 17658 - protein, 9 aa, Artificial Sequence
  Description of Artificial Sequence: Synthetic peptide
  Seed: YGPAVSSGY
YFPAVSSGY

SEQ ID NO: 17659 - protein, 9 aa, Artificial Sequence
  Description of Artificial Sequence: Synthetic peptide
  Seed: YGPAVSSGY
YFPAVSSGV

SEQ ID NO: 17660 - protein, 9 aa, Artificial Sequence
  Description of Artificial Sequence: Synthetic peptide
  Seed: YGPAVSSGY
YPPAVSSGM

SEQ ID NO: 17661 - protein, 9 aa, Artificial Sequence
  Description of Artificial Sequence: Synthetic peptide
  Seed: YGPAVSSGY
YPPAVSSGF

SEQ ID NO: 17662 - protein, 9 aa, Artificial Sequence
  Description of Artificial Sequence: Synthetic peptide
  Seed: YGPAVSSGY
YPPAVSSGY

SEQ ID NO: 17663 - protein, 9 aa, Artificial Sequence
  Description of Artificial Sequence: Synthetic peptide
  Seed: YGPAVSSGY
YSPAVSSGI

SEQ ID NO: 17664 - protein, 9 aa, Artificial Sequence
  Description of Artificial Sequence: Synthetic peptide
  Seed: YGPAVSSGY
YSPAVSSGL

SEQ ID NO: 17665 - protein, 9 aa, Artificial Sequence
  Description of Artificial Sequence: Synthetic peptide
  Seed: YGPAVSSGY
YSPAVSSGM

SEQ ID NO: 17666 - protein, 9 aa, Artificial Sequence
  Description of Artificial Sequence: Synthetic peptide
  Seed: YGPAVSSGY
YSPAVSSGY

SEQ ID NO: 17667 - protein, 9 aa, Artificial Sequence
  Description of Artificial Sequence: Synthetic peptide
  Seed: YGPAVSSGY
YIPAVSSGM

SEQ ID NO: 17668 - protein, 9 aa, Artificial Sequence
  Description of Artificial Sequence: Synthetic peptide
  Seed: YGPAVSSGY
YSPAVSSGV

SEQ ID NO: 17669 - protein, 9 aa, Artificial Sequence
  Description of Artificial Sequence: Synthetic peptide
  Seed: YGPAVSSGY
YTPAVSSGI

SEQ ID NO: 17670 - protein, 9 aa, Artificial Sequence
  Description of Artificial Sequence: Synthetic peptide
  Seed: YGPAVSSGY
YTPAVSSGL

SEQ ID NO: 17671 - protein, 9 aa, Artificial Sequence
  Description of Artificial Sequence: Synthetic peptide
  Seed: YGPAVSSGY
YTPAVSSGM

SEQ ID NO: 17672 - protein, 9 aa, Artificial Sequence
  Description of Artificial Sequence: Synthetic peptide
  Seed: YGPAVSSGY
YTPAVSSGF

SEQ ID NO: 17673 - protein, 9 aa, Artificial Sequence
  Description of Artificial Sequence: Synthetic peptide
  Seed: YGPAVSSGY
YTPAVSSGY

SEQ ID NO: 17674 - protein, 9 aa, Artificial Sequence
  Description of Artificial Sequence: Synthetic peptide
  Seed: YGPAVSSGY
YTPAVSSGV

SEQ ID NO: 17675 - protein, 9 aa, Artificial Sequence
  Description of Artificial Sequence: Synthetic peptide
  Seed: YGPAVSSGY
YWPAVSSGI

SEQ ID NO: 17676 - protein, 9 aa, Artificial Sequence
  Description of Artificial Sequence: Synthetic peptide
  Seed: YGPAVSSGY
YWPAVSSGL

SEQ ID NO: 17677 - protein, 9 aa, Artificial Sequence
  Description of Artificial Sequence: Synthetic peptide
  Seed: YGPAVSSGY
YFPAVSSGT

SEQ ID NO: 17678 - protein, 9 aa, Artificial Sequence
  Description of Artificial Sequence: Synthetic peptide
  Seed: YGPAVSSGY
YFPAVSSGF

SEQ ID NO: 17679 - protein, 9 aa, Artificial Sequence
  Description of Artificial Sequence: Synthetic peptide
  Seed: YGPAVSSGY
YFPAVSSGM

SEQ ID NO: 17680 - protein, 9 aa, Artificial Sequence
  Description of Artificial Sequence: Synthetic peptide
  Seed: YGPAVSSGY
YFPAVSSGL

SEQ ID NO: 17681 - protein, 9 aa, Artificial Sequence
  Description of Artificial Sequence: Synthetic peptide
  Seed: YGPAVSSGY
YIPAVSSGF

SEQ ID NO: 17682 - protein, 9 aa, Artificial Sequence
  Description of Artificial Sequence: Synthetic peptide
  Seed: YGPAVSSGY
YIPAVSSGY

SEQ ID NO: 17683 - protein, 9 aa, Artificial Sequence
  Description of Artificial Sequence: Synthetic peptide
  Seed: YGPAVSSGY
YLPAVSSGL

SEQ ID NO: 17684 - protein, 9 aa, Artificial Sequence
  Description of Artificial Sequence: Synthetic peptide
  Seed: YGPAVSSGY
YLPAVSSGM

SEQ ID NO: 17685 - protein, 9 aa, Artificial Sequence
  Description of Artificial Sequence: Synthetic peptide
  Seed: YGPAVSSGY
YLPAVSSGF

SEQ ID NO: 17686 - protein, 9 aa, Artificial Sequence
  Description of Artificial Sequence: Synthetic peptide
  Seed: YGPAVSSGY
YLPAVSSGY

SEQ ID NO: 17687 - protein, 9 aa, Artificial Sequence
  Description of Artificial Sequence: Synthetic peptide
  Seed: YGPAVSSGY
YKPAVSSGM

SEQ ID NO: 17688 - protein, 9 aa, Artificial Sequence
  Description of Artificial Sequence: Synthetic peptide
  Seed: YGPAVSSGY
YKPAVSSGF

SEQ ID NO: 17689 - protein, 9 aa, Artificial Sequence
  Description of Artificial Sequence: Synthetic peptide
  Seed: YGPAVSSGY
YKPAVSSGY

SEQ ID NO: 17690 - protein, 9 aa, Artificial Sequence
  Description of Artificial Sequence: Synthetic peptide
  Seed: YGPAVSSGY
YMPAVSSGI

SEQ ID NO: 17691 - protein, 9 aa, Artificial Sequence
  Description of Artificial Sequence: Synthetic peptide
  Seed: YGPAVSSGY
YMPAVSSGL

SEQ ID NO: 17692 - protein, 9 aa, Artificial Sequence
  Description of Artificial Sequence: Synthetic peptide
  Seed: YGPAVSSGY
YMPAVSSGM

SEQ ID NO: 17693 - protein, 9 aa, Artificial Sequence
  Description of Artificial Sequence: Synthetic peptide
  Seed: YGPAVSSGY
YMPAVSSGF

SEQ ID NO: 17694 - protein, 9 aa, Artificial Sequence
  Description of Artificial Sequence: Synthetic peptide
  Seed: YGPAVSSGY
YMPAVSSGW

SEQ ID NO: 17695 - protein, 9 aa, Artificial Sequence
  Description of Artificial Sequence: Synthetic peptide
  Seed: YGPAVSSGY
YMPAVSSGY

SEQ ID NO: 17696 - protein, 9 aa, Artificial Sequence
  Description of Artificial Sequence: Synthetic peptide
  Seed: YGPAVSSGY
YMPAVSSGV

SEQ ID NO: 17697 - protein, 9 aa, Artificial Sequence
  Description of Artificial Sequence: Synthetic peptide
  Seed: YGPAVSSGY
YFPAVSSGA

SEQ ID NO: 17698 - protein, 9 aa, Artificial Sequence
  Description of Artificial Sequence: Synthetic peptide
  Seed: YGPAVSSGY
YFPAVSSGH

SEQ ID NO: 17699 - protein, 9 aa, Artificial Sequence
  Description of Artificial Sequence: Synthetic peptide
  Seed: YGPAVSSGY
YFPAVSSGI

SEQ ID NO: 17700 - protein, 11 aa, Artificial Sequence
  Description of Artificial Sequence: Synthetic peptide
  Seed: YGPAVASGYDF
YKPAVASGYDY

SEQ ID NO: 17701 - protein, 11 aa, Artificial Sequence
  Description of Artificial Sequence: Synthetic peptide
  Seed: YGPAVASGYDF
YKPAVASGYDF

SEQ ID NO: 17702 - protein, 11 aa, Artificial Sequence
  Description of Artificial Sequence: Synthetic peptide
  Seed: YGPAVASGYDF
YLPAVASGYDY

SEQ ID NO: 17703 - protein, 9 aa, Artificial Sequence
  Description of Artificial Sequence: Synthetic peptide
  Seed: YGPAVASGY
YPPAVASGM

SEQ ID NO: 17704 - protein, 9 aa, Artificial Sequence
  Description of Artificial Sequence: Synthetic peptide
  Seed: YGPAVASGY
YFPAVASGA

SEQ ID NO: 17705 - protein, 9 aa, Artificial Sequence
  Description of Artificial Sequence: Synthetic peptide
  Seed: YGPAVASGY
YFPAVASGH

SEQ ID NO: 17706 - protein, 9 aa, Artificial Sequence
  Description of Artificial Sequence: Synthetic peptide
  Seed: YGPAVASGY
YFPAVASGI

SEQ ID NO: 17707 - protein, 9 aa, Artificial Sequence
  Description of Artificial Sequence: Synthetic peptide
  Seed: YGPAVASGY
YFPAVASGL

SEQ ID NO: 17708 - protein, 9 aa, Artificial Sequence
  Description of Artificial Sequence: Synthetic peptide
  Seed: YGPAVASGY
YFPAVASGM

SEQ ID NO: 17709 - protein, 9 aa, Artificial Sequence
  Description of Artificial Sequence: Synthetic peptide
  Seed: YGPAVASGY
YFPAVASGF

SEQ ID NO: 17710 - protein, 9 aa, Artificial Sequence
  Description of Artificial Sequence: Synthetic peptide
  Seed: YGPAVASGY
YFPAVASGW

SEQ ID NO: 17711 - protein, 9 aa, Artificial Sequence
  Description of Artificial Sequence: Synthetic peptide
  Seed: YGPAVASGY
YFPAVASGY

SEQ ID NO: 17712 - protein, 9 aa, Artificial Sequence
  Description of Artificial Sequence: Synthetic peptide
  Seed: YGPAVASGY
YFPAVASGV

SEQ ID NO: 17713 - protein, 9 aa, Artificial Sequence
  Description of Artificial Sequence: Synthetic peptide
  Seed: YGPAVASGY
YPPAVASGF

SEQ ID NO: 17714 - protein, 11 aa, Artificial Sequence
  Description of Artificial Sequence: Synthetic peptide
  Seed: YGPAVASGYDF
YLPAVASGYDF

SEQ ID NO: 17715 - protein, 9 aa, Artificial Sequence
  Description of Artificial Sequence: Synthetic peptide
  Seed: YGPAVASGY
YSPAVASGI

SEQ ID NO: 17716 - protein, 9 aa, Artificial Sequence
  Description of Artificial Sequence: Synthetic peptide
  Seed: YGPAVASGY
YSPAVASGL

SEQ ID NO: 17717 - protein, 9 aa, Artificial Sequence
  Description of Artificial Sequence: Synthetic peptide
  Seed: YGPAVASGY
YSPAVASGM

SEQ ID NO: 17718 - protein, 9 aa, Artificial Sequence
  Description of Artificial Sequence: Synthetic peptide
  Seed: YGPAVASGY
YSPAVASGF

SEQ ID NO: 17719 - protein, 9 aa, Artificial Sequence
  Description of Artificial Sequence: Synthetic peptide
  Seed: YGPAVASGY
YSPAVASGY

SEQ ID NO: 17720 - protein, 9 aa, Artificial Sequence
  Description of Artificial Sequence: Synthetic peptide
  Seed: YGPAVASGY
YSPAVASGV

SEQ ID NO: 17721 - protein, 9 aa, Artificial Sequence
  Description of Artificial Sequence: Synthetic peptide
  Seed: YGPAVASGY
YTPAVASGI

SEQ ID NO: 17722 - protein, 9 aa, Artificial Sequence
  Description of Artificial Sequence: Synthetic peptide
  Seed: YGPAVASGY
YTPAVASGL

SEQ ID NO: 17723 - protein, 9 aa, Artificial Sequence
  Description of Artificial Sequence: Synthetic peptide
  Seed: YGPAVASGY
YTPAVASGM

SEQ ID NO: 17724 - protein, 9 aa, Artificial Sequence
  Description of Artificial Sequence: Synthetic peptide
  Seed: YGPAVASGY
YMPAVASGV

SEQ ID NO: 17725 - protein, 9 aa, Artificial Sequence
  Description of Artificial Sequence: Synthetic peptide
  Seed: YGPAVASGY
YMPAVASGY

SEQ ID NO: 17726 - protein, 9 aa, Artificial Sequence
  Description of Artificial Sequence: Synthetic peptide
  Seed: YGPAVASGY
YMPAVASGW

SEQ ID NO: 17727 - protein, 9 aa, Artificial Sequence
  Description of Artificial Sequence: Synthetic peptide
  Seed: YGPAVASGY
YMPAVASGF

SEQ ID NO: 17728 - protein, 9 aa, Artificial Sequence
  Description of Artificial Sequence: Synthetic peptide
  Seed: YGPAVASGY
YGPAVASGF

SEQ ID NO: 17729 - protein, 9 aa, Artificial Sequence
  Description of Artificial Sequence: Synthetic peptide
  Seed: YGPAVASGY
YHPAVASGL

SEQ ID NO: 17730 - protein, 9 aa, Artificial Sequence
  Description of Artificial Sequence: Synthetic peptide
  Seed: YGPAVASGY
YHPAVASGM

SEQ ID NO: 17731 - protein, 9 aa, Artificial Sequence
  Description of Artificial Sequence: Synthetic peptide
  Seed: YGPAVASGY
YHPAVASGF

SEQ ID NO: 17732 - protein, 9 aa, Artificial Sequence
  Description of Artificial Sequence: Synthetic peptide
  Seed: YGPAVASGY
YHPAVASGY

SEQ ID NO: 17733 - protein, 9 aa, Artificial Sequence
  Description of Artificial Sequence: Synthetic peptide
  Seed: YGPAVASGY
YIPAVASGL

SEQ ID NO: 17734 - protein, 9 aa, Artificial Sequence
  Description of Artificial Sequence: Synthetic peptide
  Seed: YGPAVASGY
YIPAVASGM

SEQ ID NO: 17735 - protein, 9 aa, Artificial Sequence
  Description of Artificial Sequence: Synthetic peptide
  Seed: YGPAVASGY
YIPAVASGF

SEQ ID NO: 17736 - protein, 9 aa, Artificial Sequence
  Description of Artificial Sequence: Synthetic peptide
  Seed: YGPAVASGY
YIPAVASGY

SEQ ID NO: 17737 - protein, 9 aa, Artificial Sequence
  Description of Artificial Sequence: Synthetic peptide
  Seed: YGPAVASGY
YLPAVASGL

SEQ ID NO: 17738 - protein, 9 aa, Artificial Sequence
  Description of Artificial Sequence: Synthetic peptide
  Seed: YGPAVASGY
YLPAVASGM

SEQ ID NO: 17739 - protein, 9 aa, Artificial Sequence
  Description of Artificial Sequence: Synthetic peptide
  Seed: YGPAVASGY
YLPAVASGF

SEQ ID NO: 17740 - protein, 9 aa, Artificial Sequence
  Description of Artificial Sequence: Synthetic peptide
  Seed: YGPAVASGY
YLPAVASGY

SEQ ID NO: 17741 - protein, 9 aa, Artificial Sequence
  Description of Artificial Sequence: Synthetic peptide
  Seed: YGPAVASGY
YKPAVASGM

SEQ ID NO: 17742 - protein, 9 aa, Artificial Sequence
  Description of Artificial Sequence: Synthetic peptide
  Seed: YGPAVASGY
YKPAVASGF

SEQ ID NO: 17743 - protein, 9 aa, Artificial Sequence
  Description of Artificial Sequence: Synthetic peptide
  Seed: YGPAVASGY
YKPAVASGY

SEQ ID NO: 17744 - protein, 9 aa, Artificial Sequence
  Description of Artificial Sequence: Synthetic peptide
  Seed: YGPAVASGY
YMPAVASGI

SEQ ID NO: 17745 - protein, 9 aa, Artificial Sequence
  Description of Artificial Sequence: Synthetic peptide
  Seed: YGPAVASGY
YMPAVASGL

SEQ ID NO: 17746 - protein, 9 aa, Artificial Sequence
  Description of Artificial Sequence: Synthetic peptide
  Seed: YGPAVASGY
YMPAVASGM

SEQ ID NO: 17747 - protein, 9 aa, Artificial Sequence
  Description of Artificial Sequence: Synthetic peptide
  Seed: YGPAVASGY
YTPAVASGF

SEQ ID NO: 17748 - protein, 9 aa, Artificial Sequence
  Description of Artificial Sequence: Synthetic peptide
  Seed: YGPAVASGY
YTPAVASGY

SEQ ID NO: 17749 - protein, 9 aa, Artificial Sequence
  Description of Artificial Sequence: Synthetic peptide
  Seed: YGPAVASGY
YTPAVASGV

SEQ ID NO: 17750 - protein, 9 aa, Artificial Sequence
  Description of Artificial Sequence: Synthetic peptide
  Seed: YGPAVASGY
YVPAVASGY

SEQ ID NO: 17751 - protein, 11 aa, Artificial Sequence
  Description of Artificial Sequence: Synthetic peptide
  Seed: YGPAVASGYDF
YAPAVASGYDF

SEQ ID NO: 17752 - protein, 11 aa, Artificial Sequence
  Description of Artificial Sequence: Synthetic peptide
  Seed: YGPAVASGYDF
YAPAVASGYDY

SEQ ID NO: 17753 - protein, 11 aa, Artificial Sequence
  Description of Artificial Sequence: Synthetic peptide
  Seed: YGPAVASGYDF
YRPAVASGYDF

SEQ ID NO: 17754 - protein, 11 aa, Artificial Sequence
  Description of Artificial Sequence: Synthetic peptide
  Seed: YGPAVASGYDF
YRPAVASGYDY

SEQ ID NO: 17755 - protein, 11 aa, Artificial Sequence
  Description of Artificial Sequence: Synthetic peptide
  Seed: YGPAVASGYDF
YNPAVASGYDF

SEQ ID NO: 17756 - protein, 11 aa, Artificial Sequence
  Description of Artificial Sequence: Synthetic peptide
  Seed: YGPAVASGYDF
YNPAVASGYDY

SEQ ID NO: 17757 - protein, 11 aa, Artificial Sequence
  Description of Artificial Sequence: Synthetic peptide
  Seed: YGPAVASGYDF
YDPAVASGYDF

SEQ ID NO: 17758 - protein, 11 aa, Artificial Sequence
  Description of Artificial Sequence: Synthetic peptide
  Seed: YGPAVASGYDF
YDPAVASGYDY

SEQ ID NO: 17759 - protein, 11 aa, Artificial Sequence
  Description of Artificial Sequence: Synthetic peptide
  Seed: YGPAVASGYDF
YCPAVASGYDF

SEQ ID NO: 17760 - protein, 11 aa, Artificial Sequence
  Description of Artificial Sequence: Synthetic peptide
  Seed: YGPAVASGYDF
YCPAVASGYDY

SEQ ID NO: 17761 - protein, 11 aa, Artificial Sequence
  Description of Artificial Sequence: Synthetic peptide
  Seed: YGPAVASGYDF
YQPAVASGYDF

SEQ ID NO: 17762 - protein, 11 aa, Artificial Sequence
  Description of Artificial Sequence: Synthetic peptide
  Seed: YGPAVASGYDF
YQPAVASGYDY

SEQ ID NO: 17763 - protein, 11 aa, Artificial Sequence
  Description of Artificial Sequence: Synthetic peptide
  Seed: YGPAVASGYDF
YEPAVASGYDF

SEQ ID NO: 17764 - protein, 11 aa, Artificial Sequence
  Description of Artificial Sequence: Synthetic peptide
  Seed: YGPAVASGYDF
YEPAVASGYDY

SEQ ID NO: 17765 - protein, 11 aa, Artificial Sequence
  Description of Artificial Sequence: Synthetic peptide
  Seed: YGPAVASGYDF
YGPAVASGYDY

SEQ ID NO: 17766 - protein, 11 aa, Artificial Sequence
  Description of Artificial Sequence: Synthetic peptide
  Seed: YGPAVASGYDF
YHPAVASGYDF

SEQ ID NO: 17767 - protein, 11 aa, Artificial Sequence
  Description of Artificial Sequence: Synthetic peptide
  Seed: YGPAVASGYDF
YHPAVASGYDY

SEQ ID NO: 17768 - protein, 11 aa, Artificial Sequence
  Description of Artificial Sequence: Synthetic peptide
  Seed: YGPAVASGYDF
YIPAVASGYDF

SEQ ID NO: 17769 - protein, 11 aa, Artificial Sequence
  Description of Artificial Sequence: Synthetic peptide
  Seed: YGPAVASGYDF
YIPAVASGYDY

SEQ ID NO: 17770 - protein, 9 aa, Artificial Sequence
  Description of Artificial Sequence: Synthetic peptide
  Seed: YGPAVASGY
YVPAVASGV

SEQ ID NO: 17771 - protein, 9 aa, Artificial Sequence
  Description of Artificial Sequence: Synthetic peptide
  Seed: YGPAVASGY
YVPAVASGF

SEQ ID NO: 17772 - protein, 9 aa, Artificial Sequence
  Description of Artificial Sequence: Synthetic peptide
  Seed: YGPAVASGY
YWPAVASGI

SEQ ID NO: 17773 - protein, 9 aa, Artificial Sequence
  Description of Artificial Sequence: Synthetic peptide
  Seed: YGPAVASGY
YVPAVASGM

SEQ ID NO: 17774 - protein, 9 aa, Artificial Sequence
  Description of Artificial Sequence: Synthetic peptide
  Seed: YGPAVASGY
YWPAVASGL

SEQ ID NO: 17775 - protein, 9 aa, Artificial Sequence
  Description of Artificial Sequence: Synthetic peptide
  Seed: YGPAVASGY
YWPAVASGM

SEQ ID NO: 17776 - protein, 9 aa, Artificial Sequence
  Description of Artificial Sequence: Synthetic peptide
  Seed: YGPAVASGY
YWPAVASGF

SEQ ID NO: 17777 - protein, 9 aa, Artificial Sequence
  Description of Artificial Sequence: Synthetic peptide
  Seed: YGPAVASGY
YWPAVASGW

SEQ ID NO: 17778 - protein, 9 aa, Artificial Sequence
  Description of Artificial Sequence: Synthetic peptide
  Seed: YGPAVASGY
YWPAVASGY

SEQ ID NO: 17779 - protein, 9 aa, Artificial Sequence
  Description of Artificial Sequence: Synthetic peptide
  Seed: YGPAVASGY
YWPAVASGV

SEQ ID NO: 17780 - protein, 9 aa, Artificial Sequence
  Description of Artificial Sequence: Synthetic peptide
  Seed: YGPAVASGY
YYPAVASGA

SEQ ID NO: 17781 - protein, 9 aa, Artificial Sequence
  Description of Artificial Sequence: Synthetic peptide
  Seed: YGPAVASGY
YYPAVASGC

SEQ ID NO: 17782 - protein, 9 aa, Artificial Sequence
  Description of Artificial Sequence: Synthetic peptide
  Seed: YGPAVASGY
YYPAVASGH

SEQ ID NO: 17783 - protein, 9 aa, Artificial Sequence
  Description of Artificial Sequence: Synthetic peptide
  Seed: YGPAVASGY
YYPAVASGI

SEQ ID NO: 17784 - protein, 9 aa, Artificial Sequence
  Description of Artificial Sequence: Synthetic peptide
  Seed: YGPAVASGY
YYPAVASGL

SEQ ID NO: 17785 - protein, 9 aa, Artificial Sequence
  Description of Artificial Sequence: Synthetic peptide
  Seed: YGPAVASGY
YYPAVASGM

SEQ ID NO: 17786 - protein, 9 aa, Artificial Sequence
  Description of Artificial Sequence: Synthetic peptide
  Seed: YGPAVASGY
YYPAVASGF

SEQ ID NO: 17787 - protein, 9 aa, Artificial Sequence
  Description of Artificial Sequence: Synthetic peptide
  Seed: YGPAVASGY
YYPAVASGT

SEQ ID NO: 17788 - protein, 9 aa, Artificial Sequence
  Description of Artificial Sequence: Synthetic peptide
  Seed: YGPAVASGY
YYPAVASGW

SEQ ID NO: 17789 - protein, 9 aa, Artificial Sequence
  Description of Artificial Sequence: Synthetic peptide
  Seed: YGPAVASGY
YYPAVASGY

SEQ ID NO: 17790 - protein, 9 aa, Artificial Sequence
  Description of Artificial Sequence: Synthetic peptide
  Seed: YGPAVASGY
YYPAVASGV

SEQ ID NO: 17791 - protein, 9 aa, Artificial Sequence
  Description of Artificial Sequence: Synthetic peptide
  Seed: YGPAVASGY
YVPAVASGI

SEQ ID NO: 17792 - protein, 9 aa, Artificial Sequence
  Description of Artificial Sequence: Synthetic peptide
  Seed: YGPAVASGY
YVPAVASGL

SEQ ID NO: 17793 - protein, 11 aa, Artificial Sequence
  Description of Artificial Sequence: Synthetic peptide
  Seed: YGLAVASGHDF
YPLAVASGHDY

SEQ ID NO: 17794 - protein, 11 aa, Artificial Sequence
  Description of Artificial Sequence: Synthetic peptide
  Seed: YGLAVASGHDF
YPLAVASGHDF

SEQ ID NO: 17795 - protein, 11 aa, Artificial Sequence
  Description of Artificial Sequence: Synthetic peptide
  Seed: YGLAVASGHDF
YPLAVASGHDM

SEQ ID NO: 17796 - protein, 10 aa, Artificial Sequence
  Description of Artificial Sequence: Synthetic peptide
  Seed: WVRELILYDK
WTRELILYDR

SEQ ID NO: 17797 - protein, 10 aa, Artificial Sequence
  Description of Artificial Sequence: Synthetic peptide
  Seed: WVRELILYDK
WLRELILYDR

SEQ ID NO: 17798 - protein, 10 aa, Artificial Sequence
  Description of Artificial Sequence: Synthetic peptide
  Seed: WVRELILYDK
WLRELILYDK

SEQ ID NO: 17799 - protein, 10 aa, Artificial Sequence
  Description of Artificial Sequence: Synthetic peptide
  Seed: WVRELILYDK
WMRELILYDR

SEQ ID NO: 17800 - protein, 10 aa, Artificial Sequence
  Description of Artificial Sequence: Synthetic peptide
  Seed: WVRELILYDK
WFRELILYDR

SEQ ID NO: 17801 - protein, 10 aa, Artificial Sequence
  Description of Artificial Sequence: Synthetic peptide
  Seed: WVRELILYDK
WFRELILYDK

SEQ ID NO: 17802 - protein, 10 aa, Artificial Sequence
  Description of Artificial Sequence: Synthetic peptide
  Seed: WVRELILYDK
WSRELILYDR

SEQ ID NO: 17803 - protein, 10 aa, Artificial Sequence
  Description of Artificial Sequence: Synthetic peptide
  Seed: WVRELILYDK
WSRELILYDK

SEQ ID NO: 17804 - protein, 10 aa, Artificial Sequence
  Description of Artificial Sequence: Synthetic peptide
  Seed: YDFEKEGYSL
YQFEKEGYSF

SEQ ID NO: 17805 - protein, 10 aa, Artificial Sequence
  Description of Artificial Sequence: Synthetic peptide
  Seed: WVRELILYDK
WWRELILYDR

SEQ ID NO: 17806 - protein, 10 aa, Artificial Sequence
  Description of Artificial Sequence: Synthetic peptide
  Seed: WVRELILYDK
WWRELILYDK

SEQ ID NO: 17807 - protein, 10 aa, Artificial Sequence
  Description of Artificial Sequence: Synthetic peptide
  Seed: WVRELILYDK
WYRELILYDR

SEQ ID NO: 17808 - protein, 10 aa, Artificial Sequence
  Description of Artificial Sequence: Synthetic peptide
  Seed: WVRELILYDK
WYRELILYDK

SEQ ID NO: 17809 - protein, 10 aa, Artificial Sequence
  Description of Artificial Sequence: Synthetic peptide
  Seed: WVRELILYDK
WVRELILYDR

SEQ ID NO: 17810 - protein, 10 aa, Artificial Sequence
  Description of Artificial Sequence: Synthetic peptide
  Seed: YDFEKEGYSL
YDFEKEGYSI

SEQ ID NO: 17811 - protein, 10 aa, Artificial Sequence
  Description of Artificial Sequence: Synthetic peptide
  Seed: YDFEKEGYSL
YQFEKEGYSI

SEQ ID NO: 17812 - protein, 10 aa, Artificial Sequence
  Description of Artificial Sequence: Synthetic peptide
  Seed: YDFEKEGYSL
YQFEKEGYSL

SEQ ID NO: 17813 - protein, 10 aa, Artificial Sequence
  Description of Artificial Sequence: Synthetic peptide
  Seed: WVRELILYDK
WIRELILYDR

SEQ ID NO: 17814 - protein, 10 aa, Artificial Sequence
  Description of Artificial Sequence: Synthetic peptide
  Seed: WVRELILYDK
WGRELILYDR

SEQ ID NO: 17815 - protein, 10 aa, Artificial Sequence
  Description of Artificial Sequence: Synthetic peptide
  Seed: WVRELILYDK
WQRELILYDK

SEQ ID NO: 17816 - protein, 10 aa, Artificial Sequence
  Description of Artificial Sequence: Synthetic peptide
  Seed: WVRELILYDK
WQRELILYDR

SEQ ID NO: 17817 - protein, 8 aa, Artificial Sequence
  Description of Artificial Sequence: Synthetic peptide
  Seed: WMRELVLY
WQRELVLF

SEQ ID NO: 17818 - protein, 8 aa, Artificial Sequence
  Description of Artificial Sequence: Synthetic peptide
  Seed: WMRELVLY
WQRELVLY

SEQ ID NO: 17819 - protein, 8 aa, Artificial Sequence
  Description of Artificial Sequence: Synthetic peptide
  Seed: WMRELVLY
WLRELVLY

SEQ ID NO: 17820 - protein, 8 aa, Artificial Sequence
  Description of Artificial Sequence: Synthetic peptide
  Seed: WMRELVLY
WKRELVLF

SEQ ID NO: 17821 - protein, 8 aa, Artificial Sequence
  Description of Artificial Sequence: Synthetic peptide
  Seed: WMRELVLY
WKRELVLY

SEQ ID NO: 17822 - protein, 8 aa, Artificial Sequence
  Description of Artificial Sequence: Synthetic peptide
  Seed: WMRELVLY
WMRELVLM

SEQ ID NO: 17823 - protein, 8 aa, Artificial Sequence
  Description of Artificial Sequence: Synthetic peptide
  Seed: WMRELVLY
WMRELVLF

SEQ ID NO: 17824 - protein, 10 aa, Artificial Sequence
  Description of Artificial Sequence: Synthetic peptide
  Seed: WMRELVLYDK
WARELVLYDK

SEQ ID NO: 17825 - protein, 10 aa, Artificial Sequence
  Description of Artificial Sequence: Synthetic peptide
  Seed: WMRELVLYDK
WIRELVLYDR

SEQ ID NO: 17826 - protein, 10 aa, Artificial Sequence
  Description of Artificial Sequence: Synthetic peptide
  Seed: WMRELVLYDK
WLRELVLYDK

SEQ ID NO: 17827 - protein, 10 aa, Artificial Sequence
  Description of Artificial Sequence: Synthetic peptide
  Seed: WMRELVLYDK
WSRELVLYDK

SEQ ID NO: 17828 - protein, 10 aa, Artificial Sequence
  Description of Artificial Sequence: Synthetic peptide
  Seed: WMRELVLYDK
WTRELVLYDR

SEQ ID NO: 17829 - protein, 10 aa, Artificial Sequence
  Description of Artificial Sequence: Synthetic peptide
  Seed: WMRELVLYDK
WTRELVLYDK

SEQ ID NO: 17830 - protein, 10 aa, Artificial Sequence
  Description of Artificial Sequence: Synthetic peptide
  Seed: WMRELVLYDK
WVRELVLYDR

SEQ ID NO: 17831 - protein, 10 aa, Artificial Sequence
  Description of Artificial Sequence: Synthetic peptide
  Seed: WVRELILYDK
WARELILYDR

SEQ ID NO: 17832 - protein, 10 aa, Artificial Sequence
  Description of Artificial Sequence: Synthetic peptide
  Seed: WVRELILYDK
WARELILYDK

SEQ ID NO: 17833 - protein, 10 aa, Artificial Sequence
  Description of Artificial Sequence: Synthetic peptide
  Seed: WVRELILYDK
WNRELILYDR

SEQ ID NO: 17834 - protein, 10 aa, Artificial Sequence
  Description of Artificial Sequence: Synthetic peptide
  Seed: YDFEKEGYSL
YQFEKEGYSM

SEQ ID NO: 17835 - protein, 10 aa, Artificial Sequence
  Description of Artificial Sequence: Synthetic peptide
  Seed: YDFEKEGYSL
YQFEKEGYSW

SEQ ID NO: 17836 - protein, 10 aa, Artificial Sequence
  Description of Artificial Sequence: Synthetic peptide
  Seed: YDFEREGYSL
YEFEREGYSG

SEQ ID NO: 17837 - protein, 10 aa, Artificial Sequence
  Description of Artificial Sequence: Synthetic peptide
  Seed: YDFEKEGYSL
YPFEKEGYSF

SEQ ID NO: 17838 - protein, 10 aa, Artificial Sequence
  Description of Artificial Sequence: Synthetic peptide
  Seed: YDFEKEGYSL
YPFEKEGYSY

SEQ ID NO: 17839 - protein, 10 aa, Artificial Sequence
  Description of Artificial Sequence: Synthetic peptide
  Seed: YDFEREGYSL
YDFEREGYSI

SEQ ID NO: 17840 - protein, 10 aa, Artificial Sequence
  Description of Artificial Sequence: Synthetic peptide
  Seed: YDFEREGYSL
YDFEREGYSM

SEQ ID NO: 17841 - protein, 10 aa, Artificial Sequence
  Description of Artificial Sequence: Synthetic peptide
  Seed: YDFEREGYSL
YDFEREGYSF

SEQ ID NO: 17842 - protein, 10 aa, Artificial Sequence
  Description of Artificial Sequence: Synthetic peptide
  Seed: YDFEREGYSL
YQFEREGYSL

SEQ ID NO: 17843 - protein, 10 aa, Artificial Sequence
  Description of Artificial Sequence: Synthetic peptide
  Seed: YDFEREGYSL
YQFEREGYSF

SEQ ID NO: 17844 - protein, 10 aa, Artificial Sequence
  Description of Artificial Sequence: Synthetic peptide
  Seed: YDFEREGYSL
YEFEREGYSA

SEQ ID NO: 17845 - protein, 10 aa, Artificial Sequence
  Description of Artificial Sequence: Synthetic peptide
  Seed: YDFEREGYSL
YEFEREGYSC

SEQ ID NO: 17846 - protein, 10 aa, Artificial Sequence
  Description of Artificial Sequence: Synthetic peptide
  Seed: YDFEREGYSL
YEFEREGYSI

SEQ ID NO: 17847 - protein, 10 aa, Artificial Sequence
  Description of Artificial Sequence: Synthetic peptide
  Seed: YDFEKEGYSL
YQFEKEGYSY

SEQ ID NO: 17848 - protein, 10 aa, Artificial Sequence
  Description of Artificial Sequence: Synthetic peptide
  Seed: YDFEREGYSL
YEFEREGYSM

SEQ ID NO: 17849 - protein, 10 aa, Artificial Sequence
  Description of Artificial Sequence: Synthetic peptide
  Seed: YDFEREGYSL
YEFEREGYSF

SEQ ID NO: 17850 - protein, 10 aa, Artificial Sequence
  Description of Artificial Sequence: Synthetic peptide
  Seed: YDFEREGYSL
YEFEREGYSP

SEQ ID NO: 17851 - protein, 10 aa, Artificial Sequence
  Description of Artificial Sequence: Synthetic peptide
  Seed: YDFEREGYSL
YEFEREGYSS

SEQ ID NO: 17852 - protein, 10 aa, Artificial Sequence
  Description of Artificial Sequence: Synthetic peptide
  Seed: YDFEREGYSL
YEFEREGYST

SEQ ID NO: 17853 - protein, 10 aa, Artificial Sequence
  Description of Artificial Sequence: Synthetic peptide
  Seed: YDFEREGYSL
YEFEREGYSW

SEQ ID NO: 17854 - protein, 10 aa, Artificial Sequence
  Description of Artificial Sequence: Synthetic peptide
  Seed: YDFEREGYSL
YEFEREGYSV

SEQ ID NO: 17855 - protein, 10 aa, Artificial Sequence
  Description of Artificial Sequence: Synthetic peptide
  Seed: YEGRLIQNSI
YEGRLIQNSA

SEQ ID NO: 17856 - protein, 10 aa, Artificial Sequence
  Description of Artificial Sequence: Synthetic peptide
  Seed: YDFEKEGYSL
YMFEKEGYSY

SEQ ID NO: 17857 - protein, 10 aa, Artificial Sequence
  Description of Artificial Sequence: Synthetic peptide
  Seed: YDFEKEGYSL
YMFEKEGYSW

SEQ ID NO: 17858 - protein, 10 aa, Artificial Sequence
  Description of Artificial Sequence: Synthetic peptide
  Seed: YDFEKEGYSL
YMFEKEGYSF

SEQ ID NO: 17859 - protein, 10 aa, Artificial Sequence
  Description of Artificial Sequence: Synthetic peptide
  Seed: YDFEKEGYSL
YMFEKEGYSM

SEQ ID NO: 17860 - protein, 10 aa, Artificial Sequence
  Description of Artificial Sequence: Synthetic peptide
  Seed: YDFEKEGYSL
YQFEKEGYSV

SEQ ID NO: 17861 - protein, 10 aa, Artificial Sequence
  Description of Artificial Sequence: Synthetic peptide
  Seed: YDFEKEGYSL
YEFEKEGYSA

SEQ ID NO: 17862 - protein, 10 aa, Artificial Sequence
  Description of Artificial Sequence: Synthetic peptide
  Seed: YDFEKEGYSL
YEFEKEGYSC

SEQ ID NO: 17863 - protein, 10 aa, Artificial Sequence
  Description of Artificial Sequence: Synthetic peptide
  Seed: YDFEKEGYSL
YEFEKEGYSG

SEQ ID NO: 17864 - protein, 10 aa, Artificial Sequence
  Description of Artificial Sequence: Synthetic peptide
  Seed: YDFEKEGYSL
YEFEKEGYSH

SEQ ID NO: 17865 - protein, 10 aa, Artificial Sequence
  Description of Artificial Sequence: Synthetic peptide
  Seed: YDFEKEGYSL
YEFEKEGYSI

SEQ ID NO: 17866 - protein, 10 aa, Artificial Sequence
  Description of Artificial Sequence: Synthetic peptide
  Seed: YDFEKEGYSL
YEFEKEGYSM

SEQ ID NO: 17867 - protein, 10 aa, Artificial Sequence
  Description of Artificial Sequence: Synthetic peptide
  Seed: YDFEKEGYSL
YEFEKEGYSF

SEQ ID NO: 17868 - protein, 10 aa, Artificial Sequence
  Description of Artificial Sequence: Synthetic peptide
  Seed: YDFEKEGYSL
YEFEKEGYSP

SEQ ID NO: 17869 - protein, 10 aa, Artificial Sequence
  Description of Artificial Sequence: Synthetic peptide
  Seed: YDFEKEGYSL
YEFEKEGYSS

SEQ ID NO: 17870 - protein, 10 aa, Artificial Sequence
  Description of Artificial Sequence: Synthetic peptide
  Seed: YDFEKEGYSL
YEFEKEGYST

SEQ ID NO: 17871 - protein, 10 aa, Artificial Sequence
  Description of Artificial Sequence: Synthetic peptide
  Seed: YDFEKEGYSL
YEFEKEGYSW

SEQ ID NO: 17872 - protein, 10 aa, Artificial Sequence
  Description of Artificial Sequence: Synthetic peptide
  Seed: YDFEKEGYSL
YEFEKEGYSY

SEQ ID NO: 17873 - protein, 10 aa, Artificial Sequence
  Description of Artificial Sequence: Synthetic peptide
  Seed: YDFEKEGYSL
YEFEKEGYSV

SEQ ID NO: 17874 - protein, 10 aa, Artificial Sequence
  Description of Artificial Sequence: Synthetic peptide
  Seed: YDFEKEGYSL
YLFEKEGYSI

SEQ ID NO: 17875 - protein, 10 aa, Artificial Sequence
  Description of Artificial Sequence: Synthetic peptide
  Seed: YDFEKEGYSL
YLFEKEGYSF

SEQ ID NO: 17876 - protein, 10 aa, Artificial Sequence
  Description of Artificial Sequence: Synthetic peptide
  Seed: YDFEKEGYSL
YMFEKEGYSI

SEQ ID NO: 17877 - protein, 10 aa, Artificial Sequence
  Description of Artificial Sequence: Synthetic peptide
  Seed: YDFEKEGYSL
YMFEKEGYSL

SEQ ID NO: 17878 - protein, 8 aa, Artificial Sequence
  Description of Artificial Sequence: Synthetic peptide
  Seed: WMRELVLY
WQRELVLM

SEQ ID NO: 17879 - protein, 8 aa, Artificial Sequence
  Description of Artificial Sequence: Synthetic peptide
  Seed: WMRELVLY
WQRELVLL

SEQ ID NO: 17880 - protein, 10 aa, Artificial Sequence
  Description of Artificial Sequence: Synthetic peptide
  Seed: WMACNSAAFE
WMACNSAAFG

SEQ ID NO: 17881 - protein, 10 aa, Artificial Sequence
  Description of Artificial Sequence: Synthetic peptide
  Seed: WMACNSAAFE
WKACNSAAFW

SEQ ID NO: 17882 - protein, 10 aa, Artificial Sequence
  Description of Artificial Sequence: Synthetic peptide
  Seed: WMACNSAAFE
WKACNSAAFY

SEQ ID NO: 17883 - protein, 10 aa, Artificial Sequence
  Description of Artificial Sequence: Synthetic peptide
  Seed: WMACNSAAFE
WKACNSAAFV

SEQ ID NO: 17884 - protein, 10 aa, Artificial Sequence
  Description of Artificial Sequence: Synthetic peptide
  Seed: WMACNSAAFE
WMACNSAAFA

SEQ ID NO: 17885 - protein, 10 aa, Artificial Sequence
  Description of Artificial Sequence: Synthetic peptide
  Seed: WMACNSAAFE
WMACNSAAFR

SEQ ID NO: 17886 - protein, 10 aa, Artificial Sequence
  Description of Artificial Sequence: Synthetic peptide
  Seed: WMACNSAAFE
WMACNSAAFN

SEQ ID NO: 17887 - protein, 10 aa, Artificial Sequence
  Description of Artificial Sequence: Synthetic peptide
  Seed: WMACNSAAFE
WMACNSAAFD

SEQ ID NO: 17888 - protein, 10 aa, Artificial Sequence
  Description of Artificial Sequence: Synthetic peptide
  Seed: WMACNSAAFE
WMACNSAAFC

SEQ ID NO: 17889 - protein, 10 aa, Artificial Sequence
  Description of Artificial Sequence: Synthetic peptide
  Seed: WMACNSAAFE
WMACNSAAFQ

SEQ ID NO: 17890 - protein, 10 aa, Artificial Sequence
  Description of Artificial Sequence: Synthetic peptide
  Seed: WMACNSAAFE
WMACNSAAFH

SEQ ID NO: 17891 - protein, 10 aa, Artificial Sequence
  Description of Artificial Sequence: Synthetic peptide
  Seed: WMACNSAAFE
WMACNSAAFI

SEQ ID NO: 17892 - protein, 10 aa, Artificial Sequence
  Description of Artificial Sequence: Synthetic peptide
  Seed: WMACNSAAFE
WMACNSAAFL

SEQ ID NO: 17893 - protein, 10 aa, Artificial Sequence
  Description of Artificial Sequence: Synthetic peptide
  Seed: WMACNSAAFE
WMACNSAAFK

SEQ ID NO: 17894 - protein, 10 aa, Artificial Sequence
  Description of Artificial Sequence: Synthetic peptide
  Seed: WMACNSAAFE
WMACNSAAFM

SEQ ID NO: 17895 - protein, 10 aa, Artificial Sequence
  Description of Artificial Sequence: Synthetic peptide
  Seed: WMACNSAAFE
WMACNSAAFF

SEQ ID NO: 17896 - protein, 10 aa, Artificial Sequence
  Description of Artificial Sequence: Synthetic peptide
  Seed: WMACNSAAFE
WMACNSAAFP

SEQ ID NO: 17897 - protein, 10 aa, Artificial Sequence
  Description of Artificial Sequence: Synthetic peptide
  Seed: WMACNSAAFE
WMACNSAAFS

SEQ ID NO: 17898 - protein, 10 aa, Artificial Sequence
  Description of Artificial Sequence: Synthetic peptide
  Seed: WMACNSAAFE
WMACNSAAFT

SEQ ID NO: 17899 - protein, 10 aa, Artificial Sequence
  Description of Artificial Sequence: Synthetic peptide
  Seed: WMACNSAAFE
WMACNSAAFW

SEQ ID NO: 17900 - protein, 10 aa, Artificial Sequence
  Description of Artificial Sequence: Synthetic peptide
  Seed: WMACNSAAFE
WKACNSAAFF

SEQ ID NO: 17901 - protein, 10 aa, Artificial Sequence
  Description of Artificial Sequence: Synthetic peptide
  Seed: WMACNSAAFE
WKACNSAAFM

SEQ ID NO: 17902 - protein, 10 aa, Artificial Sequence
  Description of Artificial Sequence: Synthetic peptide
  Seed: WMACNSAAFE
WKACNSAAFL

SEQ ID NO: 17903 - protein, 10 aa, Artificial Sequence
  Description of Artificial Sequence: Synthetic peptide
  Seed: WMACNSAAFE
WKACNSAAFI

SEQ ID NO: 17904 - protein, 10 aa, Artificial Sequence
  Description of Artificial Sequence: Synthetic peptide
  Seed: WMACNSAAFE
WQACNSAAFW

SEQ ID NO: 17905 - protein, 10 aa, Artificial Sequence
  Description of Artificial Sequence: Synthetic peptide
  Seed: WMACNSAAFE
WQACNSAAFY

SEQ ID NO: 17906 - protein, 10 aa, Artificial Sequence
  Description of Artificial Sequence: Synthetic peptide
  Seed: WMACNSAAFE
WQACNSAAFV

SEQ ID NO: 17907 - protein, 10 aa, Artificial Sequence
  Description of Artificial Sequence: Synthetic peptide
  Seed: WMACNSAAFE
WEACNSAAFM

SEQ ID NO: 17908 - protein, 10 aa, Artificial Sequence
  Description of Artificial Sequence: Synthetic peptide
  Seed: WMACNSAAFE
WEACNSAAFF

SEQ ID NO: 17909 - protein, 10 aa, Artificial Sequence
  Description of Artificial Sequence: Synthetic peptide
  Seed: WMACNSAAFE
WEACNSAAFY

SEQ ID NO: 17910 - protein, 10 aa, Artificial Sequence
  Description of Artificial Sequence: Synthetic peptide
  Seed: WMACNSAAFE
WGACNSAAFF

SEQ ID NO: 17911 - protein, 10 aa, Artificial Sequence
  Description of Artificial Sequence: Synthetic peptide
  Seed: WMACNSAAFE
WGACNSAAFY

SEQ ID NO: 17912 - protein, 10 aa, Artificial Sequence
  Description of Artificial Sequence: Synthetic peptide
  Seed: WMACNSAAFE
WHACNSAAFM

SEQ ID NO: 17913 - protein, 10 aa, Artificial Sequence
  Description of Artificial Sequence: Synthetic peptide
  Seed: WMACNSAAFE
WHACNSAAFF

SEQ ID NO: 17914 - protein, 10 aa, Artificial Sequence
  Description of Artificial Sequence: Synthetic peptide
  Seed: WMACNSAAFE
WHACNSAAFY

SEQ ID NO: 17915 - protein, 10 aa, Artificial Sequence
  Description of Artificial Sequence: Synthetic peptide
  Seed: WMACNSAAFE
WIACNSAAFM

SEQ ID NO: 17916 - protein, 10 aa, Artificial Sequence
  Description of Artificial Sequence: Synthetic peptide
  Seed: WMACNSAAFE
WIACNSAAFF

SEQ ID NO: 17917 - protein, 10 aa, Artificial Sequence
  Description of Artificial Sequence: Synthetic peptide
  Seed: WMACNSAAFE
WIACNSAAFY

SEQ ID NO: 17918 - protein, 10 aa, Artificial Sequence
  Description of Artificial Sequence: Synthetic peptide
  Seed: WMACNSAAFE
WLACNSAAFM

SEQ ID NO: 17919 - protein, 10 aa, Artificial Sequence
  Description of Artificial Sequence: Synthetic peptide
  Seed: WMACNSAAFE
WLACNSAAFF

SEQ ID NO: 17920 - protein, 10 aa, Artificial Sequence
  Description of Artificial Sequence: Synthetic peptide
  Seed: WMACNSAAFE
WLACNSAAFW

SEQ ID NO: 17921 - protein, 10 aa, Artificial Sequence
  Description of Artificial Sequence: Synthetic peptide
  Seed: WMACNSAAFE
WLACNSAAFY

SEQ ID NO: 17922 - protein, 10 aa, Artificial Sequence
  Description of Artificial Sequence: Synthetic peptide
  Seed: WMACNSAAFE
WKACNSAAFH

SEQ ID NO: 17923 - protein, 10 aa, Artificial Sequence
  Description of Artificial Sequence: Synthetic peptide
  Seed: WMACNSAAFE
WMACNSAAFY

SEQ ID NO: 17924 - protein, 10 aa, Artificial Sequence
  Description of Artificial Sequence: Synthetic peptide
  Seed: WMACNSAAFE
WMACNSAAFV

SEQ ID NO: 17925 - protein, 10 aa, Artificial Sequence
  Description of Artificial Sequence: Synthetic peptide
  Seed: WMACNSAAFE
WFACNSAAFF

SEQ ID NO: 17926 - protein, 8 aa, Artificial Sequence
  Description of Artificial Sequence: Synthetic peptide
  Seed: WMRELILY
WMRELILF

SEQ ID NO: 17927 - protein, 10 aa, Artificial Sequence
  Description of Artificial Sequence: Synthetic peptide
  Seed: WMACNSAAFE
WFACNSAAFY

SEQ ID NO: 17928 - protein, 8 aa, Artificial Sequence
  Description of Artificial Sequence: Synthetic peptide
  Seed: WMRELILY
WKRELILF

SEQ ID NO: 17929 - protein, 10 aa, Artificial Sequence
  Description of Artificial Sequence: Synthetic peptide
  Seed: WMACNSAAFE
WPACNSAAFF

SEQ ID NO: 17930 - protein, 10 aa, Artificial Sequence
  Description of Artificial Sequence: Synthetic peptide
  Seed: WMACNSAAFE
WPACNSAAFY

SEQ ID NO: 17931 - protein, 10 aa, Artificial Sequence
  Description of Artificial Sequence: Synthetic peptide
  Seed: WMACNSAAFE
WSACNSAAFM

SEQ ID NO: 17932 - protein, 10 aa, Artificial Sequence
  Description of Artificial Sequence: Synthetic peptide
  Seed: WMACNSAAFE
WSACNSAAFF

SEQ ID NO: 17933 - protein, 10 aa, Artificial Sequence
  Description of Artificial Sequence: Synthetic peptide
  Seed: WMACNSAAFE
WSACNSAAFY

SEQ ID NO: 17934 - protein, 10 aa, Artificial Sequence
  Description of Artificial Sequence: Synthetic peptide
  Seed: WMACNSAAFE
WTACNSAAFF

SEQ ID NO: 17935 - protein, 10 aa, Artificial Sequence
  Description of Artificial Sequence: Synthetic peptide
  Seed: WMACNSAAFE
WTACNSAAFY

SEQ ID NO: 17936 - protein, 10 aa, Artificial Sequence
  Description of Artificial Sequence: Synthetic peptide
  Seed: WMACNSAAFE
WWACNSAAFF

SEQ ID NO: 17937 - protein, 10 aa, Artificial Sequence
  Description of Artificial Sequence: Synthetic peptide
  Seed: WMACNSAAFE
WWACNSAAFY

SEQ ID NO: 17938 - protein, 10 aa, Artificial Sequence
  Description of Artificial Sequence: Synthetic peptide
  Seed: WMACNSAAFE
WYACNSAAFF

SEQ ID NO: 17939 - protein, 10 aa, Artificial Sequence
  Description of Artificial Sequence: Synthetic peptide
  Seed: WMACNSAAFE
WYACNSAAFY

SEQ ID NO: 17940 - protein, 10 aa, Artificial Sequence
  Description of Artificial Sequence: Synthetic peptide
  Seed: WMACNSAAFE
WVACNSAAFM

SEQ ID NO: 17941 - protein, 10 aa, Artificial Sequence
  Description of Artificial Sequence: Synthetic peptide
  Seed: WMACNSAAFE
WVACNSAAFF

SEQ ID NO: 17942 - protein, 10 aa, Artificial Sequence
  Description of Artificial Sequence: Synthetic peptide
  Seed: WMACNSAAFE
WVACNSAAFY

SEQ ID NO: 17943 - protein, 8 aa, Artificial Sequence
  Description of Artificial Sequence: Synthetic peptide
  Seed: WMRELILY
WQRELILL

SEQ ID NO: 17944 - protein, 8 aa, Artificial Sequence
  Description of Artificial Sequence: Synthetic peptide
  Seed: WMRELILY
WQRELILM

SEQ ID NO: 17945 - protein, 8 aa, Artificial Sequence
  Description of Artificial Sequence: Synthetic peptide
  Seed: WMRELILY
WQRELILF

SEQ ID NO: 17946 - protein, 8 aa, Artificial Sequence
  Description of Artificial Sequence: Synthetic peptide
  Seed: WMRELILY
WQRELILY

SEQ ID NO: 17947 - protein, 8 aa, Artificial Sequence
  Description of Artificial Sequence: Synthetic peptide
  Seed: WMRELILY
WLRELILY

SEQ ID NO: 17948 - protein, 10 aa, Artificial Sequence
  Description of Artificial Sequence: Synthetic peptide
  Seed: YEGRLIQNSI
YEGRLIQNSF

SEQ ID NO: 17949 - protein, 11 aa, Artificial Sequence
  Description of Artificial Sequence: Synthetic peptide
  Seed: YGLAVASGHDF
YFLAVASGHDY

SEQ ID NO: 17950 - protein, 11 aa, Artificial Sequence
  Description of Artificial Sequence: Synthetic peptide
  Seed: YFFGDNAEEYD
YFFGDNAEEYL

SEQ ID NO: 17951 - protein, 11 aa, Artificial Sequence
  Description of Artificial Sequence: Synthetic peptide
  Seed: YFFGDNAEEYD
YFFGDNAEEYA

SEQ ID NO: 17952 - protein, 11 aa, Artificial Sequence
  Description of Artificial Sequence: Synthetic peptide
  Seed: YFFGDNAEEYD
YFFGDNAEEYR

SEQ ID NO: 17953 - protein, 11 aa, Artificial Sequence
  Description of Artificial Sequence: Synthetic peptide
  Seed: YFFGDNAEEYD
YFFGDNAEEYC

SEQ ID NO: 17954 - protein, 11 aa, Artificial Sequence
  Description of Artificial Sequence: Synthetic peptide
  Seed: YFFGDNAEEYD
YFFGDNAEEYQ

SEQ ID NO: 17955 - protein, 11 aa, Artificial Sequence
  Description of Artificial Sequence: Synthetic peptide
  Seed: YFFGDNAEEYD
YFFGDNAEEYH

SEQ ID NO: 17956 - protein, 11 aa, Artificial Sequence
  Description of Artificial Sequence: Synthetic peptide
  Seed: YFFGDNAEEYD
YFFGDNAEEYI

SEQ ID NO: 17957 - protein, 11 aa, Artificial Sequence
  Description of Artificial Sequence: Synthetic peptide
  Seed: YFFGDNAEEYD
YFFGDNAEEYK

SEQ ID NO: 17958 - protein, 11 aa, Artificial Sequence
  Description of Artificial Sequence: Synthetic peptide
  Seed: YFFGDNAEEYD
YWFGDNAEEYF

SEQ ID NO: 17959 - protein, 11 aa, Artificial Sequence
  Description of Artificial Sequence: Synthetic peptide
  Seed: YFFGDNAEEYD
YFFGDNAEEYM

SEQ ID NO: 17960 - protein, 11 aa, Artificial Sequence
  Description of Artificial Sequence: Synthetic peptide
  Seed: YFFGDNAEEYD
YFFGDNAEEYF

SEQ ID NO: 17961 - protein, 11 aa, Artificial Sequence
  Description of Artificial Sequence: Synthetic peptide
  Seed: YFFGDNAEEYD
YFFGDNAEEYP

SEQ ID NO: 17962 - protein, 11 aa, Artificial Sequence
  Description of Artificial Sequence: Synthetic peptide
  Seed: YFFGDNAEEYD
YFFGDNAEEYS

SEQ ID NO: 17963 - protein, 11 aa, Artificial Sequence
  Description of Artificial Sequence: Synthetic peptide
  Seed: YFFGDNAEEYD
YFFGDNAEEYT

SEQ ID NO: 17964 - protein, 11 aa, Artificial Sequence
  Description of Artificial Sequence: Synthetic peptide
  Seed: YFFGDNAEEYD
YFFGDNAEEYW

SEQ ID NO: 17965 - protein, 11 aa, Artificial Sequence
  Description of Artificial Sequence: Synthetic peptide
  Seed: YFFGDNAEEYD
YFFGDNAEEYY

SEQ ID NO: 17966 - protein, 11 aa, Artificial Sequence
  Description of Artificial Sequence: Synthetic peptide
  Seed: YFFGDNAEEYD
YFFGDNAEEYV

SEQ ID NO: 17967 - protein, 11 aa, Artificial Sequence
  Description of Artificial Sequence: Synthetic peptide
  Seed: YFFGDNAEEYD
YSFGDNAEEYY

SEQ ID NO: 17968 - protein, 11 aa, Artificial Sequence
  Description of Artificial Sequence: Synthetic peptide
  Seed: YFFGDNAEEYD
YMFGDNAEEYY

SEQ ID NO: 17969 - protein, 11 aa, Artificial Sequence
  Description of Artificial Sequence: Synthetic peptide
  Seed: YFFGDNAEEYD
YMFGDNAEEYF

SEQ ID NO: 17970 - protein, 11 aa, Artificial Sequence
  Description of Artificial Sequence: Synthetic peptide
  Seed: YFFGDNAEEYD
YMFGDNAEEYM

SEQ ID NO: 17971 - protein, 11 aa, Artificial Sequence
  Description of Artificial Sequence: Synthetic peptide
  Seed: YFFGDNAEEYD
YLFGDNAEEYY

SEQ ID NO: 17972 - protein, 10 aa, Artificial Sequence
  Description of Artificial Sequence: Synthetic peptide
  Seed: YFFGDNAEEY
YYFGDNAEEH

SEQ ID NO: 17973 - protein, 10 aa, Artificial Sequence
  Description of Artificial Sequence: Synthetic peptide
  Seed: YFFGDNAEEY
YYFGDNAEEI

SEQ ID NO: 17974 - protein, 10 aa, Artificial Sequence
  Description of Artificial Sequence: Synthetic peptide
  Seed: YFFGDNAEEY
YYFGDNAEEL

SEQ ID NO: 17975 - protein, 10 aa, Artificial Sequence
  Description of Artificial Sequence: Synthetic peptide
  Seed: YFFGDNAEEY
YYFGDNAEEM

SEQ ID NO: 17976 - protein, 10 aa, Artificial Sequence
  Description of Artificial Sequence: Synthetic peptide
  Seed: YFFGDNAEEY
YYFGDNAEEF

SEQ ID NO: 17977 - protein, 10 aa, Artificial Sequence
  Description of Artificial Sequence: Synthetic peptide
  Seed: YFFGDNAEEY
YYFGDNAEEW

SEQ ID NO: 17978 - protein, 10 aa, Artificial Sequence
  Description of Artificial Sequence: Synthetic peptide
  Seed: YFFGDNAEEY
YYFGDNAEEY

SEQ ID NO: 17979 - protein, 10 aa, Artificial Sequence
  Description of Artificial Sequence: Synthetic peptide
  Seed: YFFGDNAEEY
YYFGDNAEEV

SEQ ID NO: 17980 - protein, 10 aa, Artificial Sequence
  Description of Artificial Sequence: Synthetic peptide
  Seed: YFFGDNAEEY
YVFGDNAEEL

SEQ ID NO: 17981 - protein, 10 aa, Artificial Sequence
  Description of Artificial Sequence: Synthetic peptide
  Seed: YFFGDNAEEY
YVFGDNAEEM

SEQ ID NO: 17982 - protein, 10 aa, Artificial Sequence
  Description of Artificial Sequence: Synthetic peptide
  Seed: YFFGDNAEEY
YVFGDNAEEF

SEQ ID NO: 17983 - protein, 10 aa, Artificial Sequence
  Description of Artificial Sequence: Synthetic peptide
  Seed: YFFGDNAEEY
YVFGDNAEEW

SEQ ID NO: 17984 - protein, 10 aa, Artificial Sequence
  Description of Artificial Sequence: Synthetic peptide
  Seed: YFFGDNAEEY
YVFGDNAEEY

SEQ ID NO: 17985 - protein, 11 aa, Artificial Sequence
  Description of Artificial Sequence: Synthetic peptide
  Seed: YFFGDNAEEYD
YAFGDNAEEYY

SEQ ID NO: 17986 - protein, 11 aa, Artificial Sequence
  Description of Artificial Sequence: Synthetic peptide
  Seed: YFFGDNAEEYD
YNFGDNAEEYY

SEQ ID NO: 17987 - protein, 11 aa, Artificial Sequence
  Description of Artificial Sequence: Synthetic peptide
  Seed: YFFGDNAEEYD
YQFGDNAEEYY

SEQ ID NO: 17988 - protein, 11 aa, Artificial Sequence
  Description of Artificial Sequence: Synthetic peptide
  Seed: YFFGDNAEEYD
YGFGDNAEEYY

SEQ ID NO: 17989 - protein, 11 aa, Artificial Sequence
  Description of Artificial Sequence: Synthetic peptide
  Seed: YFFGDNAEEYD
YHFGDNAEEYY

SEQ ID NO: 17990 - protein, 11 aa, Artificial Sequence
  Description of Artificial Sequence: Synthetic peptide
  Seed: YFFGDNAEEYD
YIFGDNAEEYY

SEQ ID NO: 17991 - protein, 11 aa, Artificial Sequence
  Description of Artificial Sequence: Synthetic peptide
  Seed: YFFGDNAEEYD
YTFGDNAEEYY

SEQ ID NO: 17992 - protein, 11 aa, Artificial Sequence
  Description of Artificial Sequence: Synthetic peptide
  Seed: YFFGDNAEEYD
YWFGDNAEEYY

SEQ ID NO: 17993 - protein, 10 aa, Artificial Sequence
  Description of Artificial Sequence: Synthetic peptide
  Seed: YEGRLIQNSI
YEGRLIQNSV

SEQ ID NO: 17994 - protein, 11 aa, Artificial Sequence
  Description of Artificial Sequence: Synthetic peptide
  Seed: YGLAVASGHDF
YLLAVASGHDM

SEQ ID NO: 17995 - protein, 11 aa, Artificial Sequence
  Description of Artificial Sequence: Synthetic peptide
  Seed: YGLAVASGHDF
YELAVASGHDY

SEQ ID NO: 17996 - protein, 11 aa, Artificial Sequence
  Description of Artificial Sequence: Synthetic peptide
  Seed: YGLAVASGHDF
YGLAVASGHDM

SEQ ID NO: 17997 - protein, 11 aa, Artificial Sequence
  Description of Artificial Sequence: Synthetic peptide
  Seed: YGLAVASGHDF
YGLAVASGHDY

SEQ ID NO: 17998 - protein, 11 aa, Artificial Sequence
  Description of Artificial Sequence: Synthetic peptide
  Seed: YGLAVASGHDF
YHLAVASGHDM

SEQ ID NO: 17999 - protein, 11 aa, Artificial Sequence
  Description of Artificial Sequence: Synthetic peptide
  Seed: YGLAVASGHDF
YHLAVASGHDF

SEQ ID NO: 18000 - protein, 11 aa, Artificial Sequence
  Description of Artificial Sequence: Synthetic peptide
  Seed: YGLAVASGHDF
YHLAVASGHDY

SEQ ID NO: 18001 - protein, 11 aa, Artificial Sequence
  Description of Artificial Sequence: Synthetic peptide
  Seed: YGLAVASGHDF
YILAVASGHDM

SEQ ID NO: 18002 - protein, 11 aa, Artificial Sequence
  Description of Artificial Sequence: Synthetic peptide
  Seed: YGLAVASGHDF
YILAVASGHDF

SEQ ID NO: 18003 - protein, 11 aa, Artificial Sequence
  Description of Artificial Sequence: Synthetic peptide
  Seed: YGLAVASGHDF
YILAVASGHDY

SEQ ID NO: 18004 - protein, 11 aa, Artificial Sequence
  Description of Artificial Sequence: Synthetic peptide
  Seed: YGLAVASGHDF
YLLAVASGHDF

SEQ ID NO: 18005 - protein, 11 aa, Artificial Sequence
  Description of Artificial Sequence: Synthetic peptide
  Seed: YFFGDNAEEYD
YYFGDNAEEYM

SEQ ID NO: 18006 - protein, 11 aa, Artificial Sequence
  Description of Artificial Sequence: Synthetic peptide
  Seed: YGLAVASGHDF
YLLAVASGHDY

SEQ ID NO: 18007 - protein, 11 aa, Artificial Sequence
  Description of Artificial Sequence: Synthetic peptide
  Seed: YGLAVASGHDF
YKLAVASGHDM

SEQ ID NO: 18008 - protein, 11 aa, Artificial Sequence
  Description of Artificial Sequence: Synthetic peptide
  Seed: YGLAVASGHDF
YKLAVASGHDF

SEQ ID NO: 18009 - protein, 11 aa, Artificial Sequence
  Description of Artificial Sequence: Synthetic peptide
  Seed: YGLAVASGHDF
YKLAVASGHDY

SEQ ID NO: 18010 - protein, 11 aa, Artificial Sequence
  Description of Artificial Sequence: Synthetic peptide
  Seed: YGLAVASGHDF
YMLAVASGHDM

SEQ ID NO: 18011 - protein, 11 aa, Artificial Sequence
  Description of Artificial Sequence: Synthetic peptide
  Seed: YGLAVASGHDF
YMLAVASGHDF

SEQ ID NO: 18012 - protein, 11 aa, Artificial Sequence
  Description of Artificial Sequence: Synthetic peptide
  Seed: YGLAVASGHDF
YMLAVASGHDY

SEQ ID NO: 18013 - protein, 11 aa, Artificial Sequence
  Description of Artificial Sequence: Synthetic peptide
  Seed: YGLAVASGHDF
YFLAVASGHDM

SEQ ID NO: 18014 - protein, 11 aa, Artificial Sequence
  Description of Artificial Sequence: Synthetic peptide
  Seed: YGLAVASGHDF
YFLAVASGHDF

SEQ ID NO: 18015 - protein, 11 aa, Artificial Sequence
  Description of Artificial Sequence: Synthetic peptide
  Seed: YGLAVASGHDF
YELAVASGHDF

SEQ ID NO: 18016 - protein, 11 aa, Artificial Sequence
  Description of Artificial Sequence: Synthetic peptide
  Seed: YGLAVASGHDF
YELAVASGHDM

SEQ ID NO: 18017 - protein, 11 aa, Artificial Sequence
  Description of Artificial Sequence: Synthetic peptide
  Seed: YGLAVASGHDF
YQLAVASGHDY

SEQ ID NO: 18018 - protein, 11 aa, Artificial Sequence
  Description of Artificial Sequence: Synthetic peptide
  Seed: YGLAVASGHDF
YQLAVASGHDF

SEQ ID NO: 18019 - protein, 11 aa, Artificial Sequence
  Description of Artificial Sequence: Synthetic peptide
  Seed: YFFGDNAEEYD
YYFGDNAEEYF

SEQ ID NO: 18020 - protein, 11 aa, Artificial Sequence
  Description of Artificial Sequence: Synthetic peptide
  Seed: YFFGDNAEEYD
YYFGDNAEEYY

SEQ ID NO: 18021 - protein, 11 aa, Artificial Sequence
  Description of Artificial Sequence: Synthetic peptide
  Seed: YFFGDNAEEYD
YVFGDNAEEYY

SEQ ID NO: 18022 - protein, 11 aa, Artificial Sequence
  Description of Artificial Sequence: Synthetic peptide
  Seed: YGLAVASGHDF
YALAVASGHDM

SEQ ID NO: 18023 - protein, 11 aa, Artificial Sequence
  Description of Artificial Sequence: Synthetic peptide
  Seed: YGLAVASGHDF
YALAVASGHDF

SEQ ID NO: 18024 - protein, 11 aa, Artificial Sequence
  Description of Artificial Sequence: Synthetic peptide
  Seed: YGLAVASGHDF
YALAVASGHDY

SEQ ID NO: 18025 - protein, 11 aa, Artificial Sequence
  Description of Artificial Sequence: Synthetic peptide
  Seed: YGLAVASGHDF
YRLAVASGHDM

SEQ ID NO: 18026 - protein, 11 aa, Artificial Sequence
  Description of Artificial Sequence: Synthetic peptide
  Seed: YGLAVASGHDF
YRLAVASGHDF

SEQ ID NO: 18027 - protein, 11 aa, Artificial Sequence
  Description of Artificial Sequence: Synthetic peptide
  Seed: YGLAVASGHDF
YRLAVASGHDY

SEQ ID NO: 18028 - protein, 11 aa, Artificial Sequence
  Description of Artificial Sequence: Synthetic peptide
  Seed: YGLAVASGHDF
YNLAVASGHDM

SEQ ID NO: 18029 - protein, 11 aa, Artificial Sequence
  Description of Artificial Sequence: Synthetic peptide
  Seed: YGLAVASGHDF
YNLAVASGHDF

SEQ ID NO: 18030 - protein, 11 aa, Artificial Sequence
  Description of Artificial Sequence: Synthetic peptide
  Seed: YGLAVASGHDF
YNLAVASGHDY

SEQ ID NO: 18031 - protein, 11 aa, Artificial Sequence
  Description of Artificial Sequence: Synthetic peptide
  Seed: YGLAVASGHDF
YDLAVASGHDM

SEQ ID NO: 18032 - protein, 11 aa, Artificial Sequence
  Description of Artificial Sequence: Synthetic peptide
  Seed: YGLAVASGHDF
YDLAVASGHDF

SEQ ID NO: 18033 - protein, 11 aa, Artificial Sequence
  Description of Artificial Sequence: Synthetic peptide
  Seed: YGLAVASGHDF
YDLAVASGHDY

SEQ ID NO: 18034 - protein, 11 aa, Artificial Sequence
  Description of Artificial Sequence: Synthetic peptide
  Seed: YGLAVASGHDF
YCLAVASGHDM

SEQ ID NO: 18035 - protein, 11 aa, Artificial Sequence
  Description of Artificial Sequence: Synthetic peptide
  Seed: YGLAVASGHDF
YCLAVASGHDF

SEQ ID NO: 18036 - protein, 11 aa, Artificial Sequence
  Description of Artificial Sequence: Synthetic peptide
  Seed: YGLAVASGHDF
YCLAVASGHDY

SEQ ID NO: 18037 - protein, 11 aa, Artificial Sequence
  Description of Artificial Sequence: Synthetic peptide
  Seed: YGLAVASGHDF
YQLAVASGHDM

SEQ ID NO: 18038 - protein, 10 aa, Artificial Sequence
  Description of Artificial Sequence: Synthetic peptide
  Seed: YFFGDNAEEY
YWFGDNAEEY

SEQ ID NO: 18039 - protein, 10 aa, Artificial Sequence
  Description of Artificial Sequence: Synthetic peptide
  Seed: YFFGDNAEEY
YWFGDNAEEW

SEQ ID NO: 18040 - protein, 10 aa, Artificial Sequence
  Description of Artificial Sequence: Synthetic peptide
  Seed: YFFGDNAEEY
YWFGDNAEEF

SEQ ID NO: 18041 - protein, 10 aa, Artificial Sequence
  Description of Artificial Sequence: Synthetic peptide
  Seed: YFFGDNAEEY
YQFGDNAEEY

SEQ ID NO: 18042 - protein, 10 aa, Artificial Sequence
  Description of Artificial Sequence: Synthetic peptide
  Seed: YFFGDNAEEY
YNFGDNAEEY

SEQ ID NO: 18043 - protein, 10 aa, Artificial Sequence
  Description of Artificial Sequence: Synthetic peptide
  Seed: YFFGDNAEEY
YDFGDNAEEY

SEQ ID NO: 18044 - protein, 10 aa, Artificial Sequence
  Description of Artificial Sequence: Synthetic peptide
  Seed: YFFGDNAEEY
YCFGDNAEEY

SEQ ID NO: 18045 - protein, 10 aa, Artificial Sequence
  Description of Artificial Sequence: Synthetic peptide
  Seed: YFFGDNAEEY
YQFGDNAEEH

SEQ ID NO: 18046 - protein, 10 aa, Artificial Sequence
  Description of Artificial Sequence: Synthetic peptide
  Seed: YFFGDNAEEY
YQFGDNAEEI

SEQ ID NO: 18047 - protein, 10 aa, Artificial Sequence
  Description of Artificial Sequence: Synthetic peptide
  Seed: YFFGDNAEEY
YQFGDNAEEL

SEQ ID NO: 18048 - protein, 10 aa, Artificial Sequence
  Description of Artificial Sequence: Synthetic peptide
  Seed: YFFGDNAEEY
YQFGDNAEEM

SEQ ID NO: 18049 - protein, 10 aa, Artificial Sequence
  Description of Artificial Sequence: Synthetic peptide
  Seed: YFFGDNAEEY
YQFGDNAEEF

SEQ ID NO: 18050 - protein, 10 aa, Artificial Sequence
  Description of Artificial Sequence: Synthetic peptide
  Seed: YFFGDNAEEY
YQFGDNAEEW

SEQ ID NO: 18051 - protein, 10 aa, Artificial Sequence
  Description of Artificial Sequence: Synthetic peptide
  Seed: YFFGDNAEEY
YQFGDNAEEV

SEQ ID NO: 18052 - protein, 10 aa, Artificial Sequence
  Description of Artificial Sequence: Synthetic peptide
  Seed: YFFGDNAEEY
YWFGDNAEEM

SEQ ID NO: 18053 - protein, 10 aa, Artificial Sequence
  Description of Artificial Sequence: Synthetic peptide
  Seed: YFFGDNAEEY
YEFGDNAEEM

SEQ ID NO: 18054 - protein, 10 aa, Artificial Sequence
  Description of Artificial Sequence: Synthetic peptide
  Seed: YFFGDNAEEY
YEFGDNAEEF

SEQ ID NO: 18055 - protein, 10 aa, Artificial Sequence
  Description of Artificial Sequence: Synthetic peptide
  Seed: YFFGDNAEEY
YEFGDNAEEY

SEQ ID NO: 18056 - protein, 10 aa, Artificial Sequence
  Description of Artificial Sequence: Synthetic peptide
  Seed: YFFGDNAEEY
YGFGDNAEEF

SEQ ID NO: 18057 - protein, 10 aa, Artificial Sequence
  Description of Artificial Sequence: Synthetic peptide
  Seed: YFFGDNAEEY
YGFGDNAEEY

SEQ ID NO: 18058 - protein, 10 aa, Artificial Sequence
  Description of Artificial Sequence: Synthetic peptide
  Seed: YFFGDNAEEY
YHFGDNAEEM

SEQ ID NO: 18059 - protein, 10 aa, Artificial Sequence
  Description of Artificial Sequence: Synthetic peptide
  Seed: YFFGDNAEEY
YHFGDNAEEF

SEQ ID NO: 18060 - protein, 10 aa, Artificial Sequence
  Description of Artificial Sequence: Synthetic peptide
  Seed: YFFGDNAEEY
YHFGDNAEEY

SEQ ID NO: 18061 - protein, 10 aa, Artificial Sequence
  Description of Artificial Sequence: Synthetic peptide
  Seed: YFFGDNAEEY
YIFGDNAEEL

SEQ ID NO: 18062 - protein, 10 aa, Artificial Sequence
  Description of Artificial Sequence: Synthetic peptide
  Seed: YFFGDNAEEY
YNFGDNAEEF

SEQ ID NO: 18063 - protein, 10 aa, Artificial Sequence
  Description of Artificial Sequence: Synthetic peptide
  Seed: YFFGDNAEEY
YRFGDNAEEY

SEQ ID NO: 18064 - protein, 10 aa, Artificial Sequence
  Description of Artificial Sequence: Synthetic peptide
  Seed: YFFGDNAEEY
YRFGDNAEEF

SEQ ID NO: 18065 - protein, 10 aa, Artificial Sequence
  Description of Artificial Sequence: Synthetic peptide
  Seed: YFFGDNAEEY
YRFGDNAEEM

SEQ ID NO: 18066 - protein, 8 aa, Artificial Sequence
  Description of Artificial Sequence: Synthetic peptide
  Seed: YERMCNIL
YERMCNIA

SEQ ID NO: 18067 - protein, 8 aa, Artificial Sequence
  Description of Artificial Sequence: Synthetic peptide
  Seed: YERMCNIL
YERMCNII

SEQ ID NO: 18068 - protein, 8 aa, Artificial Sequence
  Description of Artificial Sequence: Synthetic peptide
  Seed: YERMCNIL
YERMCNIM

SEQ ID NO: 18069 - protein, 8 aa, Artificial Sequence
  Description of Artificial Sequence: Synthetic peptide
  Seed: YERMCNIL
YERMCNIF

SEQ ID NO: 18070 - protein, 8 aa, Artificial Sequence
  Description of Artificial Sequence: Synthetic peptide
  Seed: YERMCNIL
YERMCNIY

SEQ ID NO: 18071 - protein, 8 aa, Artificial Sequence
  Description of Artificial Sequence: Synthetic peptide
  Seed: YERMCNIL
YERMCNIV

SEQ ID NO: 18072 - protein, 10 aa, Artificial Sequence
  Description of Artificial Sequence: Synthetic peptide
  Seed: YFFGDNAEEY
YAFGDNAEEH

SEQ ID NO: 18073 - protein, 10 aa, Artificial Sequence
  Description of Artificial Sequence: Synthetic peptide
  Seed: YFFGDNAEEY
YAFGDNAEEI

SEQ ID NO: 18074 - protein, 10 aa, Artificial Sequence
  Description of Artificial Sequence: Synthetic peptide
  Seed: YFFGDNAEEY
YAFGDNAEEL

SEQ ID NO: 18075 - protein, 10 aa, Artificial Sequence
  Description of Artificial Sequence: Synthetic peptide
  Seed: YFFGDNAEEY
YAFGDNAEEM

SEQ ID NO: 18076 - protein, 10 aa, Artificial Sequence
  Description of Artificial Sequence: Synthetic peptide
  Seed: YFFGDNAEEY
YAFGDNAEEF

SEQ ID NO: 18077 - protein, 10 aa, Artificial Sequence
  Description of Artificial Sequence: Synthetic peptide
  Seed: YFFGDNAEEY
YAFGDNAEEW

SEQ ID NO: 18078 - protein, 10 aa, Artificial Sequence
  Description of Artificial Sequence: Synthetic peptide
  Seed: YFFGDNAEEY
YAFGDNAEEY

SEQ ID NO: 18079 - protein, 10 aa, Artificial Sequence
  Description of Artificial Sequence: Synthetic peptide
  Seed: YFFGDNAEEY
YAFGDNAEEV

SEQ ID NO: 18080 - protein, 10 aa, Artificial Sequence
  Description of Artificial Sequence: Synthetic peptide
  Seed: YFFGDNAEEY
YIFGDNAEEM

SEQ ID NO: 18081 - protein, 10 aa, Artificial Sequence
  Description of Artificial Sequence: Synthetic peptide
  Seed: YFFGDNAEEY
YIFGDNAEEF

SEQ ID NO: 18082 - protein, 10 aa, Artificial Sequence
  Description of Artificial Sequence: Synthetic peptide
  Seed: YFFGDNAEEY
YIFGDNAEEY

SEQ ID NO: 18083 - protein, 10 aa, Artificial Sequence
  Description of Artificial Sequence: Synthetic peptide
  Seed: YFFGDNAEEY
YPFGDNAEEH

SEQ ID NO: 18084 - protein, 10 aa, Artificial Sequence
  Description of Artificial Sequence: Synthetic peptide
  Seed: YFFGDNAEEY
YPFGDNAEEL

SEQ ID NO: 18085 - protein, 10 aa, Artificial Sequence
  Description of Artificial Sequence: Synthetic peptide
  Seed: YFFGDNAEEY
YPFGDNAEEM

SEQ ID NO: 18086 - protein, 10 aa, Artificial Sequence
  Description of Artificial Sequence: Synthetic peptide
  Seed: YFFGDNAEEY
YPFGDNAEEF

SEQ ID NO: 18087 - protein, 10 aa, Artificial Sequence
  Description of Artificial Sequence: Synthetic peptide
  Seed: YFFGDNAEEY
YPFGDNAEES

SEQ ID NO: 18088 - protein, 10 aa, Artificial Sequence
  Description of Artificial Sequence: Synthetic peptide
  Seed: YFFGDNAEEY
YPFGDNAEEW

SEQ ID NO: 18089 - protein, 10 aa, Artificial Sequence
  Description of Artificial Sequence: Synthetic peptide
  Seed: YFFGDNAEEY
YPFGDNAEEY

SEQ ID NO: 18090 - protein, 10 aa, Artificial Sequence
  Description of Artificial Sequence: Synthetic peptide
  Seed: YFFGDNAEEY
YPFGDNAEEV

SEQ ID NO: 18091 - protein, 10 aa, Artificial Sequence
  Description of Artificial Sequence: Synthetic peptide
  Seed: YFFGDNAEEY
YSFGDNAEEL

SEQ ID NO: 18092 - protein, 10 aa, Artificial Sequence
  Description of Artificial Sequence: Synthetic peptide
  Seed: YFFGDNAEEY
YSFGDNAEEM

SEQ ID NO: 18093 - protein, 10 aa, Artificial Sequence
  Description of Artificial Sequence: Synthetic peptide
  Seed: YFFGDNAEEY
YSFGDNAEEF

SEQ ID NO: 18094 - protein, 10 aa, Artificial Sequence
  Description of Artificial Sequence: Synthetic peptide
  Seed: YFFGDNAEEY
YSFGDNAEEW

SEQ ID NO: 18095 - protein, 10 aa, Artificial Sequence
  Description of Artificial Sequence: Synthetic peptide
  Seed: YFFGDNAEEY
YSFGDNAEEY

SEQ ID NO: 18096 - protein, 10 aa, Artificial Sequence
  Description of Artificial Sequence: Synthetic peptide
  Seed: YFFGDNAEEY
YTFGDNAEEL

SEQ ID NO: 18097 - protein, 10 aa, Artificial Sequence
  Description of Artificial Sequence: Synthetic peptide
  Seed: YFFGDNAEEY
YTFGDNAEEM

SEQ ID NO: 18098 - protein, 10 aa, Artificial Sequence
  Description of Artificial Sequence: Synthetic peptide
  Seed: YFFGDNAEEY
YTFGDNAEEF

SEQ ID NO: 18099 - protein, 10 aa, Artificial Sequence
  Description of Artificial Sequence: Synthetic peptide
  Seed: YFFGDNAEEY
YTFGDNAEEW

SEQ ID NO: 18100 - protein, 10 aa, Artificial Sequence
  Description of Artificial Sequence: Synthetic peptide
  Seed: YFFGDNAEEY
YTFGDNAEEY

SEQ ID NO: 18101 - protein, 10 aa, Artificial Sequence
  Description of Artificial Sequence: Synthetic peptide
  Seed: YFFGDNAEEY
YWFGDNAEEI

SEQ ID NO: 18102 - protein, 10 aa, Artificial Sequence
  Description of Artificial Sequence: Synthetic peptide
  Seed: YFFGDNAEEY
YWFGDNAEEL

SEQ ID NO: 18103 - protein, 10 aa, Artificial Sequence
  Description of Artificial Sequence: Synthetic peptide
  Seed: YFFGDNAEEY
YPFGDNAEEI

SEQ ID NO: 18104 - protein, 10 aa, Artificial Sequence
  Description of Artificial Sequence: Synthetic peptide
  Seed: YFFGDNAEEY
YPFGDNAEEQ

SEQ ID NO: 18105 - protein, 10 aa, Artificial Sequence
  Description of Artificial Sequence: Synthetic peptide
  Seed: YFFGDNAEEY
YLFGDNAEEM

SEQ ID NO: 18106 - protein, 10 aa, Artificial Sequence
  Description of Artificial Sequence: Synthetic peptide
  Seed: YFFGDNAEEY
YPFGDNAEEA

SEQ ID NO: 18107 - protein, 10 aa, Artificial Sequence
  Description of Artificial Sequence: Synthetic peptide
  Seed: YFFGDNAEEY
YLFGDNAEEF

SEQ ID NO: 18108 - protein, 10 aa, Artificial Sequence
  Description of Artificial Sequence: Synthetic peptide
  Seed: YFFGDNAEEY
YLFGDNAEEY

SEQ ID NO: 18109 - protein, 10 aa, Artificial Sequence
  Description of Artificial Sequence: Synthetic peptide
  Seed: YFFGDNAEEY
YKFGDNAEEL

SEQ ID NO: 18110 - protein, 10 aa, Artificial Sequence
  Description of Artificial Sequence: Synthetic peptide
  Seed: YFFGDNAEEY
YKFGDNAEEM

SEQ ID NO: 18111 - protein, 10 aa, Artificial Sequence
  Description of Artificial Sequence: Synthetic peptide
  Seed: YFFGDNAEEY
YKFGDNAEEF

SEQ ID NO: 18112 - protein, 10 aa, Artificial Sequence
  Description of Artificial Sequence: Synthetic peptide
  Seed: YFFGDNAEEY
YKFGDNAEEY

SEQ ID NO: 18113 - protein, 10 aa, Artificial Sequence
  Description of Artificial Sequence: Synthetic peptide
  Seed: YFFGDNAEEY
YMFGDNAEEH

SEQ ID NO: 18114 - protein, 10 aa, Artificial Sequence
  Description of Artificial Sequence: Synthetic peptide
  Seed: YFFGDNAEEY
YMFGDNAEEI

SEQ ID NO: 18115 - protein, 10 aa, Artificial Sequence
  Description of Artificial Sequence: Synthetic peptide
  Seed: YFFGDNAEEY
YMFGDNAEEL

SEQ ID NO: 18116 - protein, 10 aa, Artificial Sequence
  Description of Artificial Sequence: Synthetic peptide
  Seed: YFFGDNAEEY
YMFGDNAEEM

SEQ ID NO: 18117 - protein, 10 aa, Artificial Sequence
  Description of Artificial Sequence: Synthetic peptide
  Seed: YFFGDNAEEY
YMFGDNAEEF

SEQ ID NO: 18118 - protein, 10 aa, Artificial Sequence
  Description of Artificial Sequence: Synthetic peptide
  Seed: YFFGDNAEEY
YMFGDNAEEW

SEQ ID NO: 18119 - protein, 10 aa, Artificial Sequence
  Description of Artificial Sequence: Synthetic peptide
  Seed: YFFGDNAEEY
YMFGDNAEEY

SEQ ID NO: 18120 - protein, 10 aa, Artificial Sequence
  Description of Artificial Sequence: Synthetic peptide
  Seed: YFFGDNAEEY
YFFGDNAEEI

SEQ ID NO: 18121 - protein, 10 aa, Artificial Sequence
  Description of Artificial Sequence: Synthetic peptide
  Seed: YFFGDNAEEY
YFFGDNAEEL

SEQ ID NO: 18122 - protein, 10 aa, Artificial Sequence
  Description of Artificial Sequence: Synthetic peptide
  Seed: YFFGDNAEEY
YFFGDNAEEM

SEQ ID NO: 18123 - protein, 10 aa, Artificial Sequence
  Description of Artificial Sequence: Synthetic peptide
  Seed: YFFGDNAEEY
YFFGDNAEEW

SEQ ID NO: 18124 - protein, 10 aa, Artificial Sequence
  Description of Artificial Sequence: Synthetic peptide
  Seed: YFFGDNAEEY
YFFGDNAEEV

SEQ ID NO: 18125 - protein, 9 aa, Artificial Sequence
  Description of Artificial Sequence: Synthetic peptide
  Seed: YGPAVSSGY
YWPAVSSGM

SEQ ID NO: 18126 - protein, 9 aa, Artificial Sequence
  Description of Artificial Sequence: Synthetic peptide
  Seed: YGPAVSSGY
YWPAVSSGW

SEQ ID NO: 18127 - protein, 10 aa, Artificial Sequence
  Description of Artificial Sequence: Synthetic peptide
  Seed: WMACNSAAFE
WQACNSAAFS

SEQ ID NO: 18128 - protein, 10 aa, Artificial Sequence
  Description of Artificial Sequence: Synthetic peptide
  Seed: YRRRDGKWMR
YYRRDGKWMM

SEQ ID NO: 18129 - protein, 10 aa, Artificial Sequence
  Description of Artificial Sequence: Synthetic peptide
  Seed: YRRRDGKWMR
YTRRDGKWMK

SEQ ID NO: 18130 - protein, 10 aa, Artificial Sequence
  Description of Artificial Sequence: Synthetic peptide
  Seed: YRRRDGKWMR
YTRRDGKWMM

SEQ ID NO: 18131 - protein, 10 aa, Artificial Sequence
  Description of Artificial Sequence: Synthetic peptide
  Seed: YRRRDGKWMR
YTRRDGKWMF

SEQ ID NO: 18132 - protein, 10 aa, Artificial Sequence
  Description of Artificial Sequence: Synthetic peptide
  Seed: YRRRDGKWMR
YWRRDGKWML

SEQ ID NO: 18133 - protein, 10 aa, Artificial Sequence
  Description of Artificial Sequence: Synthetic peptide
  Seed: YRRRDGKWMR
YWRRDGKWMK

SEQ ID NO: 18134 - protein, 10 aa, Artificial Sequence
  Description of Artificial Sequence: Synthetic peptide
  Seed: YRRRDGKWMR
YWRRDGKWMM

SEQ ID NO: 18135 - protein, 10 aa, Artificial Sequence
  Description of Artificial Sequence: Synthetic peptide
  Seed: YRRRDGKWMR
YWRRDGKWMF

SEQ ID NO: 18136 - protein, 10 aa, Artificial Sequence
  Description of Artificial Sequence: Synthetic peptide
  Seed: YRRRDGKWMR
YYRRDGKWML

SEQ ID NO: 18137 - protein, 10 aa, Artificial Sequence
  Description of Artificial Sequence: Synthetic peptide
  Seed: YRRRDGKWMR
YYRRDGKWMK

SEQ ID NO: 18138 - protein, 10 aa, Artificial Sequence
  Description of Artificial Sequence: Synthetic peptide
  Seed: YRRRDGKWMR
YYRRDGKWMF

SEQ ID NO: 18139 - protein, 10 aa, Artificial Sequence
  Description of Artificial Sequence: Synthetic peptide
  Seed: YRRRDGKWVR
YRRRDGKWVY

SEQ ID NO: 18140 - protein, 10 aa, Artificial Sequence
  Description of Artificial Sequence: Synthetic peptide
  Seed: YRRRDGKWMR
YVRRDGKWML

SEQ ID NO: 18141 - protein, 10 aa, Artificial Sequence
  Description of Artificial Sequence: Synthetic peptide
  Seed: YRRRDGKWMR
YVRRDGKWMK

SEQ ID NO: 18142 - protein, 10 aa, Artificial Sequence
  Description of Artificial Sequence: Synthetic peptide
  Seed: YRRRDGKWMR
YVRRDGKWMM

SEQ ID NO: 18143 - protein, 10 aa, Artificial Sequence
  Description of Artificial Sequence: Synthetic peptide
  Seed: YRRRDGKWMR
YVRRDGKWMF

SEQ ID NO: 18144 - protein, 10 aa, Artificial Sequence
  Description of Artificial Sequence: Synthetic peptide
  Seed: YRRRDGKWVR
YARRDGKWVK

SEQ ID NO: 18145 - protein, 10 aa, Artificial Sequence
  Description of Artificial Sequence: Synthetic peptide
  Seed: YRRRDGKWVR
YRRRDGKWVI

SEQ ID NO: 18146 - protein, 10 aa, Artificial Sequence
  Description of Artificial Sequence: Synthetic peptide
  Seed: YRRRDGKWVR
YRRRDGKWVL

SEQ ID NO: 18147 - protein, 10 aa, Artificial Sequence
  Description of Artificial Sequence: Synthetic peptide
  Seed: YRRRDGKWVR
YRRRDGKWVK

SEQ ID NO: 18148 - protein, 10 aa, Artificial Sequence
  Description of Artificial Sequence: Synthetic peptide
  Seed: YRRRDGKWVR
YRRRDGKWVM

SEQ ID NO: 18149 - protein, 10 aa, Artificial Sequence
  Description of Artificial Sequence: Synthetic peptide
  Seed: YRRRDGKWMR
YTRRDGKWML

SEQ ID NO: 18150 - protein, 10 aa, Artificial Sequence
  Description of Artificial Sequence: Synthetic peptide
  Seed: YRRRDGKWMR
YSRRDGKWMF

SEQ ID NO: 18151 - protein, 10 aa, Artificial Sequence
  Description of Artificial Sequence: Synthetic peptide
  Seed: YRRRDGKWMR
YSRRDGKWMM

SEQ ID NO: 18152 - protein, 10 aa, Artificial Sequence
  Description of Artificial Sequence: Synthetic peptide
  Seed: YRRRDGKWMR
YSRRDGKWMK

SEQ ID NO: 18153 - protein, 10 aa, Artificial Sequence
  Description of Artificial Sequence: Synthetic peptide
  Seed: YRRRDGKWMR
YLRRDGKWMM

SEQ ID NO: 18154 - protein, 10 aa, Artificial Sequence
  Description of Artificial Sequence: Synthetic peptide
  Seed: YRRRDGKWMR
YLRRDGKWMF

SEQ ID NO: 18155 - protein, 10 aa, Artificial Sequence
  Description of Artificial Sequence: Synthetic peptide
  Seed: YRRRDGKWMR
YKRRDGKWML

SEQ ID NO: 18156 - protein, 10 aa, Artificial Sequence
  Description of Artificial Sequence: Synthetic peptide
  Seed: YRRRDGKWMR
YKRRDGKWMK

SEQ ID NO: 18157 - protein, 10 aa, Artificial Sequence
  Description of Artificial Sequence: Synthetic peptide
  Seed: YRRRDGKWMR
YKRRDGKWMM

SEQ ID NO: 18158 - protein, 10 aa, Artificial Sequence
  Description of Artificial Sequence: Synthetic peptide
  Seed: YRRRDGKWMR
YKRRDGKWMF

SEQ ID NO: 18159 - protein, 10 aa, Artificial Sequence
  Description of Artificial Sequence: Synthetic peptide
  Seed: YRRRDGKWMR
YMRRDGKWML

SEQ ID NO: 18160 - protein, 10 aa, Artificial Sequence
  Description of Artificial Sequence: Synthetic peptide
  Seed: YRRRDGKWMR
YMRRDGKWMK

SEQ ID NO: 18161 - protein, 10 aa, Artificial Sequence
  Description of Artificial Sequence: Synthetic peptide
  Seed: YRRRDGKWMR
YMRRDGKWMM

SEQ ID NO: 18162 - protein, 10 aa, Artificial Sequence
  Description of Artificial Sequence: Synthetic peptide
  Seed: YRRRDGKWMR
YMRRDGKWMF

SEQ ID NO: 18163 - protein, 10 aa, Artificial Sequence
  Description of Artificial Sequence: Synthetic peptide
  Seed: YRRRDGKWMR
YFRRDGKWML

SEQ ID NO: 18164 - protein, 10 aa, Artificial Sequence
  Description of Artificial Sequence: Synthetic peptide
  Seed: YRRRDGKWMR
YFRRDGKWMK

SEQ ID NO: 18165 - protein, 10 aa, Artificial Sequence
  Description of Artificial Sequence: Synthetic peptide
  Seed: YRRRDGKWMR
YFRRDGKWMM

SEQ ID NO: 18166 - protein, 10 aa, Artificial Sequence
  Description of Artificial Sequence: Synthetic peptide
  Seed: YRRRDGKWMR
YFRRDGKWMF

SEQ ID NO: 18167 - protein, 10 aa, Artificial Sequence
  Description of Artificial Sequence: Synthetic peptide
  Seed: YRRRDGKWMR
YPRRDGKWML

SEQ ID NO: 18168 - protein, 10 aa, Artificial Sequence
  Description of Artificial Sequence: Synthetic peptide
  Seed: YRRRDGKWMR
YPRRDGKWMK

SEQ ID NO: 18169 - protein, 10 aa, Artificial Sequence
  Description of Artificial Sequence: Synthetic peptide
  Seed: YRRRDGKWMR
YPRRDGKWMM

SEQ ID NO: 18170 - protein, 10 aa, Artificial Sequence
  Description of Artificial Sequence: Synthetic peptide
  Seed: YRRRDGKWMR
YPRRDGKWMF

SEQ ID NO: 18171 - protein, 10 aa, Artificial Sequence
  Description of Artificial Sequence: Synthetic peptide
  Seed: YRRRDGKWMR
YSRRDGKWML

SEQ ID NO: 18172 - protein, 10 aa, Artificial Sequence
  Description of Artificial Sequence: Synthetic peptide
  Seed: YRRRDGKWVR
YRRRDGKWVF

SEQ ID NO: 18173 - protein, 10 aa, Artificial Sequence
  Description of Artificial Sequence: Synthetic peptide
  Seed: YRRRDGKWVR
YRRRDGKWVV

SEQ ID NO: 18174 - protein, 10 aa, Artificial Sequence
  Description of Artificial Sequence: Synthetic peptide
  Seed: YRRRDGKWMR
YLRRDGKWML

SEQ ID NO: 18175 - protein, 9 aa, Artificial Sequence
  Description of Artificial Sequence: Synthetic peptide
  Seed: YSLVGIDPF
YNLVGIDPF

SEQ ID NO: 18176 - protein, 9 aa, Artificial Sequence
  Description of Artificial Sequence: Synthetic peptide
  Seed: YSLVGIDPF
YALVGIDPW

SEQ ID NO: 18177 - protein, 9 aa, Artificial Sequence
  Description of Artificial Sequence: Synthetic peptide
  Seed: YSLVGIDPF
YALVGIDPY

SEQ ID NO: 18178 - protein, 9 aa, Artificial Sequence
  Description of Artificial Sequence: Synthetic peptide
  Seed: YSLVGIDPF
YALVGIDPV

SEQ ID NO: 18179 - protein, 9 aa, Artificial Sequence
  Description of Artificial Sequence: Synthetic peptide
  Seed: YSLVGIDPF
YRLVGIDPI

SEQ ID NO: 18180 - protein, 9 aa, Artificial Sequence
  Description of Artificial Sequence: Synthetic peptide
  Seed: YSLVGIDPF
YRLVGIDPL

SEQ ID NO: 18181 - protein, 9 aa, Artificial Sequence
  Description of Artificial Sequence: Synthetic peptide
  Seed: YSLVGIDPF
YRLVGIDPM

SEQ ID NO: 18182 - protein, 9 aa, Artificial Sequence
  Description of Artificial Sequence: Synthetic peptide
  Seed: YSLVGIDPF
YRLVGIDPF

SEQ ID NO: 18183 - protein, 9 aa, Artificial Sequence
  Description of Artificial Sequence: Synthetic peptide
  Seed: YSLVGIDPF
YRLVGIDPY

SEQ ID NO: 18184 - protein, 9 aa, Artificial Sequence
  Description of Artificial Sequence: Synthetic peptide
  Seed: YSLVGIDPF
YNLVGIDPM

SEQ ID NO: 18185 - protein, 9 aa, Artificial Sequence
  Description of Artificial Sequence: Synthetic peptide
  Seed: YSLVGIDPF
YNLVGIDPW

SEQ ID NO: 18186 - protein, 10 aa, Artificial Sequence
  Description of Artificial Sequence: Synthetic peptide
  Seed: YRRRDGKWVR
YNRRDGKWVK

SEQ ID NO: 18187 - protein, 9 aa, Artificial Sequence
  Description of Artificial Sequence: Synthetic peptide
  Seed: YSLVGIDPF
YNLVGIDPY

SEQ ID NO: 18188 - protein, 9 aa, Artificial Sequence
  Description of Artificial Sequence: Synthetic peptide
  Seed: YSLVGIDPF
YCLVGIDPM

SEQ ID NO: 18189 - protein, 9 aa, Artificial Sequence
  Description of Artificial Sequence: Synthetic peptide
  Seed: YSLVGIDPF
YCLVGIDPF

SEQ ID NO: 18190 - protein, 9 aa, Artificial Sequence
  Description of Artificial Sequence: Synthetic peptide
  Seed: YSLVGIDPF
YCLVGIDPW

SEQ ID NO: 18191 - protein, 9 aa, Artificial Sequence
  Description of Artificial Sequence: Synthetic peptide
  Seed: YSLVGIDPF
YCLVGIDPY

SEQ ID NO: 18192 - protein, 9 aa, Artificial Sequence
  Description of Artificial Sequence: Synthetic peptide
  Seed: YSLVGIDPF
YQLVGIDPA

SEQ ID NO: 18193 - protein, 9 aa, Artificial Sequence
  Description of Artificial Sequence: Synthetic peptide
  Seed: YSLVGIDPF
YQLVGIDPH

SEQ ID NO: 18194 - protein, 9 aa, Artificial Sequence
  Description of Artificial Sequence: Synthetic peptide
  Seed: YSLVGIDPF
YQLVGIDPI

SEQ ID NO: 18195 - protein, 9 aa, Artificial Sequence
  Description of Artificial Sequence: Synthetic peptide
  Seed: YSLVGIDPF
YQLVGIDPL

SEQ ID NO: 18196 - protein, 9 aa, Artificial Sequence
  Description of Artificial Sequence: Synthetic peptide
  Seed: YSLVGIDPF
YALVGIDPF

SEQ ID NO: 18197 - protein, 9 aa, Artificial Sequence
  Description of Artificial Sequence: Synthetic peptide
  Seed: YSLVGIDPF
YALVGIDPM

SEQ ID NO: 18198 - protein, 9 aa, Artificial Sequence
  Description of Artificial Sequence: Synthetic peptide
  Seed: YSLVGIDPF
YALVGIDPL

SEQ ID NO: 18199 - protein, 9 aa, Artificial Sequence
  Description of Artificial Sequence: Synthetic peptide
  Seed: YSLVGIDPF
YALVGIDPI

SEQ ID NO: 18200 - protein, 10 aa, Artificial Sequence
  Description of Artificial Sequence: Synthetic peptide
  Seed: YRRRDGKWVR
YDRRDGKWVK

SEQ ID NO: 18201 - protein, 10 aa, Artificial Sequence
  Description of Artificial Sequence: Synthetic peptide
  Seed: YRRRDGKWVR
YCRRDGKWVK

SEQ ID NO: 18202 - protein, 10 aa, Artificial Sequence
  Description of Artificial Sequence: Synthetic peptide
  Seed: YRRRDGKWVR
YQRRDGKWVK

SEQ ID NO: 18203 - protein, 10 aa, Artificial Sequence
  Description of Artificial Sequence: Synthetic peptide
  Seed: YRRRDGKWVR
YERRDGKWVK

SEQ ID NO: 18204 - protein, 10 aa, Artificial Sequence
  Description of Artificial Sequence: Synthetic peptide
  Seed: YRRRDGKWVR
YGRRDGKWVK

SEQ ID NO: 18205 - protein, 10 aa, Artificial Sequence
  Description of Artificial Sequence: Synthetic peptide
  Seed: YRRRDGKWVR
YHRRDGKWVK

SEQ ID NO: 18206 - protein, 10 aa, Artificial Sequence
  Description of Artificial Sequence: Synthetic peptide
  Seed: YRRRDGKWVR
YIRRDGKWVK

SEQ ID NO: 18207 - protein, 10 aa, Artificial Sequence
  Description of Artificial Sequence: Synthetic peptide
  Seed: YRRRDGKWVR
YLRRDGKWVK

SEQ ID NO: 18208 - protein, 10 aa, Artificial Sequence
  Description of Artificial Sequence: Synthetic peptide
  Seed: YRRRDGKWVR
YKRRDGKWVK

SEQ ID NO: 18209 - protein, 10 aa, Artificial Sequence
  Description of Artificial Sequence: Synthetic peptide
  Seed: YRRRDGKWVR
YMRRDGKWVK

SEQ ID NO: 18210 - protein, 10 aa, Artificial Sequence
  Description of Artificial Sequence: Synthetic peptide
  Seed: YRRRDGKWVR
YFRRDGKWVK

SEQ ID NO: 18211 - protein, 10 aa, Artificial Sequence
  Description of Artificial Sequence: Synthetic peptide
  Seed: YRRRDGKWVR
YPRRDGKWVK

SEQ ID NO: 18212 - protein, 10 aa, Artificial Sequence
  Description of Artificial Sequence: Synthetic peptide
  Seed: YRRRDGKWVR
YSRRDGKWVK

SEQ ID NO: 18213 - protein, 10 aa, Artificial Sequence
  Description of Artificial Sequence: Synthetic peptide
  Seed: YRRRDGKWVR
YTRRDGKWVK

SEQ ID NO: 18214 - protein, 10 aa, Artificial Sequence
  Description of Artificial Sequence: Synthetic peptide
  Seed: YRRRDGKWVR
YWRRDGKWVK

SEQ ID NO: 18215 - protein, 10 aa, Artificial Sequence
  Description of Artificial Sequence: Synthetic peptide
  Seed: YRRRDGKWVR
YYRRDGKWVK

SEQ ID NO: 18216 - protein, 10 aa, Artificial Sequence
  Description of Artificial Sequence: Synthetic peptide
  Seed: YRRRDGKWVR
YVRRDGKWVK

SEQ ID NO: 18217 - protein, 9 aa, Artificial Sequence
  Description of Artificial Sequence: Synthetic peptide
  Seed: YSLVGIDPF
YALVGIDPA

SEQ ID NO: 18218 - protein, 9 aa, Artificial Sequence
  Description of Artificial Sequence: Synthetic peptide
  Seed: YSLVGIDPF
YALVGIDPH

SEQ ID NO: 18219 - protein, 10 aa, Artificial Sequence
  Description of Artificial Sequence: Synthetic peptide
  Seed: YRRRDGKWMR
YLRRDGKWMK

SEQ ID NO: 18220 - protein, 10 aa, Artificial Sequence
  Description of Artificial Sequence: Synthetic peptide
  Seed: YRRRDGKWMR
YIRRDGKWMF

SEQ ID NO: 18221 - protein, 9 aa, Artificial Sequence
  Description of Artificial Sequence: Synthetic peptide
  Seed: YGPAVSSGY
YWPAVSSGY

SEQ ID NO: 18222 - protein, 9 aa, Artificial Sequence
  Description of Artificial Sequence: Synthetic peptide
  Seed: YQRTRALVR
YYRTRALVM

SEQ ID NO: 18223 - protein, 9 aa, Artificial Sequence
  Description of Artificial Sequence: Synthetic peptide
  Seed: YQRTRALVR
YTRTRALVY

SEQ ID NO: 18224 - protein, 9 aa, Artificial Sequence
  Description of Artificial Sequence: Synthetic peptide
  Seed: YQRTRALVR
YTRTRALVV

SEQ ID NO: 18225 - protein, 9 aa, Artificial Sequence
  Description of Artificial Sequence: Synthetic peptide
  Seed: YQRTRALVR
YWRTRALVA

SEQ ID NO: 18226 - protein, 9 aa, Artificial Sequence
  Description of Artificial Sequence: Synthetic peptide
  Seed: YQRTRALVR
YWRTRALVR

SEQ ID NO: 18227 - protein, 9 aa, Artificial Sequence
  Description of Artificial Sequence: Synthetic peptide
  Seed: YQRTRALVR
YWRTRALVK

SEQ ID NO: 18228 - protein, 9 aa, Artificial Sequence
  Description of Artificial Sequence: Synthetic peptide
  Seed: YQRTRALVR
YYRTRALVA

SEQ ID NO: 18229 - protein, 9 aa, Artificial Sequence
  Description of Artificial Sequence: Synthetic peptide
  Seed: YQRTRALVR
YYRTRALVR

SEQ ID NO: 18230 - protein, 9 aa, Artificial Sequence
  Description of Artificial Sequence: Synthetic peptide
  Seed: YQRTRALVR
YYRTRALVI

SEQ ID NO: 18231 - protein, 9 aa, Artificial Sequence
  Description of Artificial Sequence: Synthetic peptide
  Seed: YQRTRALVR
YYRTRALVK

SEQ ID NO: 18232 - protein, 9 aa, Artificial Sequence
  Description of Artificial Sequence: Synthetic peptide
  Seed: YQRTRALVR
YYRTRALVS

SEQ ID NO: 18233 - protein, 9 aa, Artificial Sequence
  Description of Artificial Sequence: Synthetic peptide
  Seed: YQRTRALVR
YVRTRALVV

SEQ ID NO: 18234 - protein, 9 aa, Artificial Sequence
  Description of Artificial Sequence: Synthetic peptide
  Seed: YQRTRALVR
YYRTRALVV

SEQ ID NO: 18235 - protein, 9 aa, Artificial Sequence
  Description of Artificial Sequence: Synthetic peptide
  Seed: YQRTRALVR
YVRTRALVA

SEQ ID NO: 18236 - protein, 9 aa, Artificial Sequence
  Description of Artificial Sequence: Synthetic peptide
  Seed: YQRTRALVR
YVRTRALVR

SEQ ID NO: 18237 - protein, 9 aa, Artificial Sequence
  Description of Artificial Sequence: Synthetic peptide
  Seed: YQRTRALVR
YVRTRALVG

SEQ ID NO: 18238 - protein, 9 aa, Artificial Sequence
  Description of Artificial Sequence: Synthetic peptide
  Seed: YQRTRALVR
YVRTRALVI

SEQ ID NO: 18239 - protein, 9 aa, Artificial Sequence
  Description of Artificial Sequence: Synthetic peptide
  Seed: YQRTRALVR
YVRTRALVL

SEQ ID NO: 18240 - protein, 9 aa, Artificial Sequence
  Description of Artificial Sequence: Synthetic peptide
  Seed: YQRTRALVR
YVRTRALVK

SEQ ID NO: 18241 - protein, 9 aa, Artificial Sequence
  Description of Artificial Sequence: Synthetic peptide
  Seed: YQRTRALVR
YVRTRALVM

SEQ ID NO: 18242 - protein, 9 aa, Artificial Sequence
  Description of Artificial Sequence: Synthetic peptide
  Seed: YQRTRALVR
YVRTRALVS

SEQ ID NO: 18243 - protein, 9 aa, Artificial Sequence
  Description of Artificial Sequence: Synthetic peptide
  Seed: YQRTRALVR
YTRTRALVT

SEQ ID NO: 18244 - protein, 9 aa, Artificial Sequence
  Description of Artificial Sequence: Synthetic peptide
  Seed: YQRTRALVR
YTRTRALVS

SEQ ID NO: 18245 - protein, 9 aa, Artificial Sequence
  Description of Artificial Sequence: Synthetic peptide
  Seed: YQRTRALVR
YTRTRALVP

SEQ ID NO: 18246 - protein, 9 aa, Artificial Sequence
  Description of Artificial Sequence: Synthetic peptide
  Seed: YQRTRALVR
YTRTRALVF

SEQ ID NO: 18247 - protein, 9 aa, Artificial Sequence
  Description of Artificial Sequence: Synthetic peptide
  Seed: YQRTRALVR
YSRTRALVK

SEQ ID NO: 18248 - protein, 9 aa, Artificial Sequence
  Description of Artificial Sequence: Synthetic peptide
  Seed: YQRTRALVR
YSRTRALVM

SEQ ID NO: 18249 - protein, 9 aa, Artificial Sequence
  Description of Artificial Sequence: Synthetic peptide
  Seed: YQRTRALVR
YSRTRALVF

SEQ ID NO: 18250 - protein, 9 aa, Artificial Sequence
  Description of Artificial Sequence: Synthetic peptide
  Seed: YQRTRALVR
YSRTRALVP

SEQ ID NO: 18251 - protein, 9 aa, Artificial Sequence
  Description of Artificial Sequence: Synthetic peptide
  Seed: YQRTRALVR
YSRTRALVS

SEQ ID NO: 18252 - protein, 9 aa, Artificial Sequence
  Description of Artificial Sequence: Synthetic peptide
  Seed: YQRTRALVR
YSRTRALVT

SEQ ID NO: 18253 - protein, 9 aa, Artificial Sequence
  Description of Artificial Sequence: Synthetic peptide
  Seed: YQRTRALVR
YSRTRALVY

SEQ ID NO: 18254 - protein, 9 aa, Artificial Sequence
  Description of Artificial Sequence: Synthetic peptide
  Seed: YQRTRALVR
YSRTRALVV

SEQ ID NO: 18255 - protein, 9 aa, Artificial Sequence
  Description of Artificial Sequence: Synthetic peptide
  Seed: YQRTRALVR
YTRTRALVA

SEQ ID NO: 18256 - protein, 9 aa, Artificial Sequence
  Description of Artificial Sequence: Synthetic peptide
  Seed: YQRTRALVR
YTRTRALVR

SEQ ID NO: 18257 - protein, 9 aa, Artificial Sequence
  Description of Artificial Sequence: Synthetic peptide
  Seed: YQRTRALVR
YTRTRALVN

SEQ ID NO: 18258 - protein, 9 aa, Artificial Sequence
  Description of Artificial Sequence: Synthetic peptide
  Seed: YQRTRALVR
YTRTRALVC

SEQ ID NO: 18259 - protein, 9 aa, Artificial Sequence
  Description of Artificial Sequence: Synthetic peptide
  Seed: YQRTRALVR
YTRTRALVQ

SEQ ID NO: 18260 - protein, 9 aa, Artificial Sequence
  Description of Artificial Sequence: Synthetic peptide
  Seed: YQRTRALVR
YTRTRALVG

SEQ ID NO: 18261 - protein, 9 aa, Artificial Sequence
  Description of Artificial Sequence: Synthetic peptide
  Seed: YQRTRALVR
YTRTRALVH

SEQ ID NO: 18262 - protein, 9 aa, Artificial Sequence
  Description of Artificial Sequence: Synthetic peptide
  Seed: YQRTRALVR
YTRTRALVI

SEQ ID NO: 18263 - protein, 9 aa, Artificial Sequence
  Description of Artificial Sequence: Synthetic peptide
  Seed: YQRTRALVR
YTRTRALVL

SEQ ID NO: 18264 - protein, 9 aa, Artificial Sequence
  Description of Artificial Sequence: Synthetic peptide
  Seed: YQRTRALVR
YTRTRALVK

SEQ ID NO: 18265 - protein, 9 aa, Artificial Sequence
  Description of Artificial Sequence: Synthetic peptide
  Seed: YQRTRALVR
YTRTRALVM

SEQ ID NO: 18266 - protein, 9 aa, Artificial Sequence
  Description of Artificial Sequence: Synthetic peptide
  Seed: YQRTRALVR
YVRTRALVY

SEQ ID NO: 18267 - protein, 9 aa, Artificial Sequence
  Description of Artificial Sequence: Synthetic peptide
  Seed: YRRRDGKWM
YRRRDGKWL

SEQ ID NO: 18268 - protein, 10 aa, Artificial Sequence
  Description of Artificial Sequence: Synthetic peptide
  Seed: YRRRDGKWMR
YIRRDGKWMM

SEQ ID NO: 18269 - protein, 10 aa, Artificial Sequence
  Description of Artificial Sequence: Synthetic peptide
  Seed: YRRRDGKWMR
YERRDGKWMF

SEQ ID NO: 18270 - protein, 10 aa, Artificial Sequence
  Description of Artificial Sequence: Synthetic peptide
  Seed: YRRRDGKWMR
YCRRDGKWMM

SEQ ID NO: 18271 - protein, 10 aa, Artificial Sequence
  Description of Artificial Sequence: Synthetic peptide
  Seed: YRRRDGKWMR
YCRRDGKWMF

SEQ ID NO: 18272 - protein, 10 aa, Artificial Sequence
  Description of Artificial Sequence: Synthetic peptide
  Seed: YRRRDGKWMR
YQRRDGKWML

SEQ ID NO: 18273 - protein, 10 aa, Artificial Sequence
  Description of Artificial Sequence: Synthetic peptide
  Seed: YRRRDGKWMR
YQRRDGKWMK

SEQ ID NO: 18274 - protein, 10 aa, Artificial Sequence
  Description of Artificial Sequence: Synthetic peptide
  Seed: YRRRDGKWMR
YQRRDGKWMM

SEQ ID NO: 18275 - protein, 10 aa, Artificial Sequence
  Description of Artificial Sequence: Synthetic peptide
  Seed: YRRRDGKWMR
YQRRDGKWMF

SEQ ID NO: 18276 - protein, 10 aa, Artificial Sequence
  Description of Artificial Sequence: Synthetic peptide
  Seed: YRRRDGKWMR
YERRDGKWML

SEQ ID NO: 18277 - protein, 10 aa, Artificial Sequence
  Description of Artificial Sequence: Synthetic peptide
  Seed: YRRRDGKWMR
YERRDGKWMK

SEQ ID NO: 18278 - protein, 10 aa, Artificial Sequence
  Description of Artificial Sequence: Synthetic peptide
  Seed: YRRRDGKWMR
YERRDGKWMM

SEQ ID NO: 18279 - protein, 10 aa, Artificial Sequence
  Description of Artificial Sequence: Synthetic peptide
  Seed: YRRRDGKWMR
YGRRDGKWML

SEQ ID NO: 18280 - protein, 9 aa, Artificial Sequence
  Description of Artificial Sequence: Synthetic peptide
  Seed: YRRRDGKWM
YRRRDGKWF

SEQ ID NO: 18281 - protein, 10 aa, Artificial Sequence
  Description of Artificial Sequence: Synthetic peptide
  Seed: YRRRDGKWMR
YGRRDGKWMK

SEQ ID NO: 18282 - protein, 10 aa, Artificial Sequence
  Description of Artificial Sequence: Synthetic peptide
  Seed: YRRRDGKWMR
YGRRDGKWMM

SEQ ID NO: 18283 - protein, 10 aa, Artificial Sequence
  Description of Artificial Sequence: Synthetic peptide
  Seed: YRRRDGKWMR
YGRRDGKWMF

SEQ ID NO: 18284 - protein, 10 aa, Artificial Sequence
  Description of Artificial Sequence: Synthetic peptide
  Seed: YRRRDGKWMR
YHRRDGKWML

SEQ ID NO: 18285 - protein, 10 aa, Artificial Sequence
  Description of Artificial Sequence: Synthetic peptide
  Seed: YRRRDGKWMR
YHRRDGKWMK

SEQ ID NO: 18286 - protein, 10 aa, Artificial Sequence
  Description of Artificial Sequence: Synthetic peptide
  Seed: YRRRDGKWMR
YHRRDGKWMM

SEQ ID NO: 18287 - protein, 10 aa, Artificial Sequence
  Description of Artificial Sequence: Synthetic peptide
  Seed: YRRRDGKWMR
YHRRDGKWMF

SEQ ID NO: 18288 - protein, 10 aa, Artificial Sequence
  Description of Artificial Sequence: Synthetic peptide
  Seed: YRRRDGKWMR
YIRRDGKWML

SEQ ID NO: 18289 - protein, 10 aa, Artificial Sequence
  Description of Artificial Sequence: Synthetic peptide
  Seed: YRRRDGKWMR
YIRRDGKWMK

SEQ ID NO: 18290 - protein, 10 aa, Artificial Sequence
  Description of Artificial Sequence: Synthetic peptide
  Seed: YRRRDGKWMR
YCRRDGKWMK

SEQ ID NO: 18291 - protein, 10 aa, Artificial Sequence
  Description of Artificial Sequence: Synthetic peptide
  Seed: YRRRDGKWMR
YCRRDGKWML

SEQ ID NO: 18292 - protein, 10 aa, Artificial Sequence
  Description of Artificial Sequence: Synthetic peptide
  Seed: YRRRDGKWMR
YDRRDGKWMF

SEQ ID NO: 18293 - protein, 10 aa, Artificial Sequence
  Description of Artificial Sequence: Synthetic peptide
  Seed: YRRRDGKWMR
YDRRDGKWMM

SEQ ID NO: 18294 - protein, 9 aa, Artificial Sequence
  Description of Artificial Sequence: Synthetic peptide
  Seed: YRRRDGKWM
YYRRDGKWM

SEQ ID NO: 18295 - protein, 10 aa, Artificial Sequence
  Description of Artificial Sequence: Synthetic peptide
  Seed: YRRRDGKWMR
YARRDGKWML

SEQ ID NO: 18296 - protein, 10 aa, Artificial Sequence
  Description of Artificial Sequence: Synthetic peptide
  Seed: YRRRDGKWMR
YARRDGKWMK

SEQ ID NO: 18297 - protein, 10 aa, Artificial Sequence
  Description of Artificial Sequence: Synthetic peptide
  Seed: YRRRDGKWMR
YARRDGKWMM

SEQ ID NO: 18298 - protein, 10 aa, Artificial Sequence
  Description of Artificial Sequence: Synthetic peptide
  Seed: YRRRDGKWMR
YARRDGKWMF

SEQ ID NO: 18299 - protein, 10 aa, Artificial Sequence
  Description of Artificial Sequence: Synthetic peptide
  Seed: YRRRDGKWMR
YRRRDGKWMI

SEQ ID NO: 18300 - protein, 10 aa, Artificial Sequence
  Description of Artificial Sequence: Synthetic peptide
  Seed: YRRRDGKWMR
YRRRDGKWML

SEQ ID NO: 18301 - protein, 10 aa, Artificial Sequence
  Description of Artificial Sequence: Synthetic peptide
  Seed: YRRRDGKWMR
YRRRDGKWMK

SEQ ID NO: 18302 - protein, 10 aa, Artificial Sequence
  Description of Artificial Sequence: Synthetic peptide
  Seed: YRRRDGKWMR
YRRRDGKWMM

SEQ ID NO: 18303 - protein, 10 aa, Artificial Sequence
  Description of Artificial Sequence: Synthetic peptide
  Seed: YRRRDGKWMR
YRRRDGKWMF

SEQ ID NO: 18304 - protein, 10 aa, Artificial Sequence
  Description of Artificial Sequence: Synthetic peptide
  Seed: YRRRDGKWMR
YRRRDGKWMY

SEQ ID NO: 18305 - protein, 10 aa, Artificial Sequence
  Description of Artificial Sequence: Synthetic peptide
  Seed: YRRRDGKWMR
YRRRDGKWMV

SEQ ID NO: 18306 - protein, 10 aa, Artificial Sequence
  Description of Artificial Sequence: Synthetic peptide
  Seed: YRRRDGKWMR
YNRRDGKWML

SEQ ID NO: 18307 - protein, 10 aa, Artificial Sequence
  Description of Artificial Sequence: Synthetic peptide
  Seed: YRRRDGKWMR
YNRRDGKWMK

SEQ ID NO: 18308 - protein, 10 aa, Artificial Sequence
  Description of Artificial Sequence: Synthetic peptide
  Seed: YRRRDGKWMR
YNRRDGKWMM

SEQ ID NO: 18309 - protein, 10 aa, Artificial Sequence
  Description of Artificial Sequence: Synthetic peptide
  Seed: YRRRDGKWMR
YNRRDGKWMF

SEQ ID NO: 18310 - protein, 10 aa, Artificial Sequence
  Description of Artificial Sequence: Synthetic peptide
  Seed: YRRRDGKWMR
YDRRDGKWML

SEQ ID NO: 18311 - protein, 10 aa, Artificial Sequence
  Description of Artificial Sequence: Synthetic peptide
  Seed: YRRRDGKWMR
YDRRDGKWMK

SEQ ID NO: 18312 - protein, 9 aa, Artificial Sequence
  Description of Artificial Sequence: Synthetic peptide
  Seed: YSLVGIDPF
YQLVGIDPM

SEQ ID NO: 18313 - protein, 9 aa, Artificial Sequence
  Description of Artificial Sequence: Synthetic peptide
  Seed: YSLVGIDPF
YQLVGIDPF

SEQ ID NO: 18314 - protein, 9 aa, Artificial Sequence
  Description of Artificial Sequence: Synthetic peptide
  Seed: YSLVGIDPF
YQLVGIDPW

SEQ ID NO: 18315 - protein, 10 aa, Artificial Sequence
  Description of Artificial Sequence: Synthetic peptide
  Seed: YSLVGIDPFK
YLLVGIDPFK

SEQ ID NO: 18316 - protein, 10 aa, Artificial Sequence
  Description of Artificial Sequence: Synthetic peptide
  Seed: YSLVGIDPFK
YELVGIDPFR

SEQ ID NO: 18317 - protein, 10 aa, Artificial Sequence
  Description of Artificial Sequence: Synthetic peptide
  Seed: YSLVGIDPFK
YELVGIDPFK

SEQ ID NO: 18318 - protein, 10 aa, Artificial Sequence
  Description of Artificial Sequence: Synthetic peptide
  Seed: YSLVGIDPFK
YGLVGIDPFR

SEQ ID NO: 18319 - protein, 10 aa, Artificial Sequence
  Description of Artificial Sequence: Synthetic peptide
  Seed: YSLVGIDPFK
YGLVGIDPFK

SEQ ID NO: 18320 - protein, 10 aa, Artificial Sequence
  Description of Artificial Sequence: Synthetic peptide
  Seed: YSLVGIDPFK
YHLVGIDPFR

SEQ ID NO: 18321 - protein, 10 aa, Artificial Sequence
  Description of Artificial Sequence: Synthetic peptide
  Seed: YSLVGIDPFK
YHLVGIDPFK

SEQ ID NO: 18322 - protein, 10 aa, Artificial Sequence
  Description of Artificial Sequence: Synthetic peptide
  Seed: YSLVGIDPFK
YILVGIDPFR

SEQ ID NO: 18323 - protein, 10 aa, Artificial Sequence
  Description of Artificial Sequence: Synthetic peptide
  Seed: YSLVGIDPFK
YILVGIDPFK

SEQ ID NO: 18324 - protein, 10 aa, Artificial Sequence
  Description of Artificial Sequence: Synthetic peptide
  Seed: YSLVGIDPFK
YLLVGIDPFR

SEQ ID NO: 18325 - protein, 10 aa, Artificial Sequence
  Description of Artificial Sequence: Synthetic peptide
  Seed: YSLVGIDPFK
YKLVGIDPFR

SEQ ID NO: 18326 - protein, 10 aa, Artificial Sequence
  Description of Artificial Sequence: Synthetic peptide
  Seed: YSLVGIDPFK
YTLVGIDPFY

SEQ ID NO: 18327 - protein, 10 aa, Artificial Sequence
  Description of Artificial Sequence: Synthetic peptide
  Seed: YSLVGIDPFK
YKLVGIDPFK

SEQ ID NO: 18328 - protein, 10 aa, Artificial Sequence
  Description of Artificial Sequence: Synthetic peptide
  Seed: YSLVGIDPFK
YMLVGIDPFR

SEQ ID NO: 18329 - protein, 10 aa, Artificial Sequence
  Description of Artificial Sequence: Synthetic peptide
  Seed: YSLVGIDPFK
YMLVGIDPFK

SEQ ID NO: 18330 - protein, 10 aa, Artificial Sequence
  Description of Artificial Sequence: Synthetic peptide
  Seed: YSLVGIDPFK
YFLVGIDPFR

SEQ ID NO: 18331 - protein, 10 aa, Artificial Sequence
  Description of Artificial Sequence: Synthetic peptide
  Seed: YSLVGIDPFK
YFLVGIDPFK

SEQ ID NO: 18332 - protein, 10 aa, Artificial Sequence
  Description of Artificial Sequence: Synthetic peptide
  Seed: YSLVGIDPFK
YPLVGIDPFR

SEQ ID NO: 18333 - protein, 10 aa, Artificial Sequence
  Description of Artificial Sequence: Synthetic peptide
  Seed: YSLVGIDPFK
YPLVGIDPFK

SEQ ID NO: 18334 - protein, 10 aa, Artificial Sequence
  Description of Artificial Sequence: Synthetic peptide
  Seed: YSLVGIDPFK
YTLVGIDPFR

SEQ ID NO: 18335 - protein, 10 aa, Artificial Sequence
  Description of Artificial Sequence: Synthetic peptide
  Seed: YSLVGIDPFK
YQLVGIDPFK

SEQ ID NO: 18336 - protein, 10 aa, Artificial Sequence
  Description of Artificial Sequence: Synthetic peptide
  Seed: YSLVGIDPFK
YQLVGIDPFR

SEQ ID NO: 18337 - protein, 10 aa, Artificial Sequence
  Description of Artificial Sequence: Synthetic peptide
  Seed: YSLVGIDPFK
YCLVGIDPFK

SEQ ID NO: 18338 - protein, 10 aa, Artificial Sequence
  Description of Artificial Sequence: Synthetic peptide
  Seed: YSLVGIDPFK
YCLVGIDPFR

SEQ ID NO: 18339 - protein, 9 aa, Artificial Sequence
  Description of Artificial Sequence: Synthetic peptide
  Seed: YSLVGIDPF
YYLVGIDPF

SEQ ID NO: 18340 - protein, 9 aa, Artificial Sequence
  Description of Artificial Sequence: Synthetic peptide
  Seed: YSLVGIDPF
YYLVGIDPW

SEQ ID NO: 18341 - protein, 9 aa, Artificial Sequence
  Description of Artificial Sequence: Synthetic peptide
  Seed: YSLVGIDPF
YYLVGIDPY

SEQ ID NO: 18342 - protein, 9 aa, Artificial Sequence
  Description of Artificial Sequence: Synthetic peptide
  Seed: YSLVGIDPF
YYLVGIDPV

SEQ ID NO: 18343 - protein, 9 aa, Artificial Sequence
  Description of Artificial Sequence: Synthetic peptide
  Seed: YSLVGIDPF
YVLVGIDPI

SEQ ID NO: 18344 - protein, 9 aa, Artificial Sequence
  Description of Artificial Sequence: Synthetic peptide
  Seed: YSLVGIDPF
YVLVGIDPL

SEQ ID NO: 18345 - protein, 9 aa, Artificial Sequence
  Description of Artificial Sequence: Synthetic peptide
  Seed: YSLVGIDPF
YVLVGIDPM

SEQ ID NO: 18346 - protein, 9 aa, Artificial Sequence
  Description of Artificial Sequence: Synthetic peptide
  Seed: YSLVGIDPF
YVLVGIDPF

SEQ ID NO: 18347 - protein, 9 aa, Artificial Sequence
  Description of Artificial Sequence: Synthetic peptide
  Seed: YSLVGIDPF
YVLVGIDPW

SEQ ID NO: 18348 - protein, 9 aa, Artificial Sequence
  Description of Artificial Sequence: Synthetic peptide
  Seed: YSLVGIDPF
YVLVGIDPY

SEQ ID NO: 18349 - protein, 9 aa, Artificial Sequence
  Description of Artificial Sequence: Synthetic peptide
  Seed: YSLVGIDPF
YVLVGIDPV

SEQ ID NO: 18350 - protein, 10 aa, Artificial Sequence
  Description of Artificial Sequence: Synthetic peptide
  Seed: YSLVGIDPFK
YALVGIDPFR

SEQ ID NO: 18351 - protein, 10 aa, Artificial Sequence
  Description of Artificial Sequence: Synthetic peptide
  Seed: YSLVGIDPFK
YALVGIDPFK

SEQ ID NO: 18352 - protein, 10 aa, Artificial Sequence
  Description of Artificial Sequence: Synthetic peptide
  Seed: YSLVGIDPFK
YRLVGIDPFR

SEQ ID NO: 18353 - protein, 10 aa, Artificial Sequence
  Description of Artificial Sequence: Synthetic peptide
  Seed: YSLVGIDPFK
YRLVGIDPFK

SEQ ID NO: 18354 - protein, 10 aa, Artificial Sequence
  Description of Artificial Sequence: Synthetic peptide
  Seed: YSLVGIDPFK
YNLVGIDPFR

SEQ ID NO: 18355 - protein, 10 aa, Artificial Sequence
  Description of Artificial Sequence: Synthetic peptide
  Seed: YSLVGIDPFK
YNLVGIDPFK

SEQ ID NO: 18356 - protein, 10 aa, Artificial Sequence
  Description of Artificial Sequence: Synthetic peptide
  Seed: YSLVGIDPFK
YDLVGIDPFR

SEQ ID NO: 18357 - protein, 10 aa, Artificial Sequence
  Description of Artificial Sequence: Synthetic peptide
  Seed: YSLVGIDPFK
YDLVGIDPFK

SEQ ID NO: 18358 - protein, 10 aa, Artificial Sequence
  Description of Artificial Sequence: Synthetic peptide
  Seed: YSLVGIDPFK
YTLVGIDPFK

SEQ ID NO: 18359 - protein, 10 aa, Artificial Sequence
  Description of Artificial Sequence: Synthetic peptide
  Seed: YSLVGIDPFK
YWLVGIDPFR

SEQ ID NO: 18360 - protein, 9 aa, Artificial Sequence
  Description of Artificial Sequence: Synthetic peptide
  Seed: YSLVGIDPF
YQLVGIDPY

SEQ ID NO: 18361 - protein, 10 aa, Artificial Sequence
  Description of Artificial Sequence: Synthetic peptide
  Seed: YSLVGIDPFK
YWLVGIDPFK

SEQ ID NO: 18362 - protein, 10 aa, Artificial Sequence
  Description of Artificial Sequence: Synthetic peptide
  Seed: YSLVGIDPFR
YYLVGIDPFR

SEQ ID NO: 18363 - protein, 10 aa, Artificial Sequence
  Description of Artificial Sequence: Synthetic peptide
  Seed: YSLVGIDPFR
YYLVGIDPFK

SEQ ID NO: 18364 - protein, 10 aa, Artificial Sequence
  Description of Artificial Sequence: Synthetic peptide
  Seed: YSLVGIDPFR
YVLVGIDPFR

SEQ ID NO: 18365 - protein, 10 aa, Artificial Sequence
  Description of Artificial Sequence: Synthetic peptide
  Seed: YSLVGIDPFK
YVLVGIDPFK

SEQ ID NO: 18366 - protein, 9 aa, Artificial Sequence
  Description of Artificial Sequence: Synthetic peptide
  Seed: YSLVGIDPF
YYLVGIDPM

SEQ ID NO: 18367 - protein, 9 aa, Artificial Sequence
  Description of Artificial Sequence: Synthetic peptide
  Seed: YSLVGIDPF
YYLVGIDPL

SEQ ID NO: 18368 - protein, 9 aa, Artificial Sequence
  Description of Artificial Sequence: Synthetic peptide
  Seed: YSLVGIDPF
YYLVGIDPI

SEQ ID NO: 18369 - protein, 9 aa, Artificial Sequence
  Description of Artificial Sequence: Synthetic peptide
  Seed: YSLVGIDPF
YKLVGIDPY

SEQ ID NO: 18370 - protein, 9 aa, Artificial Sequence
  Description of Artificial Sequence: Synthetic peptide
  Seed: YSLVGIDPF
YLLVGIDPF

SEQ ID NO: 18371 - protein, 9 aa, Artificial Sequence
  Description of Artificial Sequence: Synthetic peptide
  Seed: YSLVGIDPF
YLLVGIDPW

SEQ ID NO: 18372 - protein, 9 aa, Artificial Sequence
  Description of Artificial Sequence: Synthetic peptide
  Seed: YSLVGIDPF
YLLVGIDPY

SEQ ID NO: 18373 - protein, 9 aa, Artificial Sequence
  Description of Artificial Sequence: Synthetic peptide
  Seed: YSLVGIDPF
YKLVGIDPH

SEQ ID NO: 18374 - protein, 9 aa, Artificial Sequence
  Description of Artificial Sequence: Synthetic peptide
  Seed: YSLVGIDPF
YKLVGIDPI

SEQ ID NO: 18375 - protein, 9 aa, Artificial Sequence
  Description of Artificial Sequence: Synthetic peptide
  Seed: YSLVGIDPF
YKLVGIDPL

SEQ ID NO: 18376 - protein, 9 aa, Artificial Sequence
  Description of Artificial Sequence: Synthetic peptide
  Seed: YSLVGIDPF
YKLVGIDPM

SEQ ID NO: 18377 - protein, 9 aa, Artificial Sequence
  Description of Artificial Sequence: Synthetic peptide
  Seed: YSLVGIDPF
YKLVGIDPF

SEQ ID NO: 18378 - protein, 9 aa, Artificial Sequence
  Description of Artificial Sequence: Synthetic peptide
  Seed: YSLVGIDPF
YKLVGIDPW

SEQ ID NO: 18379 - protein, 9 aa, Artificial Sequence
  Description of Artificial Sequence: Synthetic peptide
  Seed: YSLVGIDPF
YKLVGIDPV

SEQ ID NO: 18380 - protein, 9 aa, Artificial Sequence
  Description of Artificial Sequence: Synthetic peptide
  Seed: YSLVGIDPF
YYLVGIDPH

SEQ ID NO: 18381 - protein, 9 aa, Artificial Sequence
  Description of Artificial Sequence: Synthetic peptide
  Seed: YSLVGIDPF
YMLVGIDPA

SEQ ID NO: 18382 - protein, 9 aa, Artificial Sequence
  Description of Artificial Sequence: Synthetic peptide
  Seed: YSLVGIDPF
YMLVGIDPH

SEQ ID NO: 18383 - protein, 9 aa, Artificial Sequence
  Description of Artificial Sequence: Synthetic peptide
  Seed: YSLVGIDPF
YMLVGIDPI

SEQ ID NO: 18384 - protein, 9 aa, Artificial Sequence
  Description of Artificial Sequence: Synthetic peptide
  Seed: YSLVGIDPF
YMLVGIDPL

SEQ ID NO: 18385 - protein, 9 aa, Artificial Sequence
  Description of Artificial Sequence: Synthetic peptide
  Seed: YSLVGIDPF
YMLVGIDPM

SEQ ID NO: 18386 - protein, 9 aa, Artificial Sequence
  Description of Artificial Sequence: Synthetic peptide
  Seed: YSLVGIDPF
YMLVGIDPF

SEQ ID NO: 18387 - protein, 9 aa, Artificial Sequence
  Description of Artificial Sequence: Synthetic peptide
  Seed: YSLVGIDPF
YMLVGIDPW

SEQ ID NO: 18388 - protein, 9 aa, Artificial Sequence
  Description of Artificial Sequence: Synthetic peptide
  Seed: YSLVGIDPF
YMLVGIDPY

SEQ ID NO: 18389 - protein, 9 aa, Artificial Sequence
  Description of Artificial Sequence: Synthetic peptide
  Seed: YSLVGIDPF
YMLVGIDPV

SEQ ID NO: 18390 - protein, 9 aa, Artificial Sequence
  Description of Artificial Sequence: Synthetic peptide
  Seed: YSLVGIDPF
YLLVGIDPM

SEQ ID NO: 18391 - protein, 9 aa, Artificial Sequence
  Description of Artificial Sequence: Synthetic peptide
  Seed: YSLVGIDPF
YLLVGIDPL

SEQ ID NO: 18392 - protein, 9 aa, Artificial Sequence
  Description of Artificial Sequence: Synthetic peptide
  Seed: YSLVGIDPF
YLLVGIDPI

SEQ ID NO: 18393 - protein, 9 aa, Artificial Sequence
  Description of Artificial Sequence: Synthetic peptide
  Seed: YSLVGIDPF
YILVGIDPY

SEQ ID NO: 18394 - protein, 9 aa, Artificial Sequence
  Description of Artificial Sequence: Synthetic peptide
  Seed: YSLVGIDPF
YQLVGIDPV

SEQ ID NO: 18395 - protein, 9 aa, Artificial Sequence
  Description of Artificial Sequence: Synthetic peptide
  Seed: YSLVGIDPF
YELVGIDPL

SEQ ID NO: 18396 - protein, 9 aa, Artificial Sequence
  Description of Artificial Sequence: Synthetic peptide
  Seed: YSLVGIDPF
YELVGIDPM

SEQ ID NO: 18397 - protein, 9 aa, Artificial Sequence
  Description of Artificial Sequence: Synthetic peptide
  Seed: YSLVGIDPF
YELVGIDPF

SEQ ID NO: 18398 - protein, 9 aa, Artificial Sequence
  Description of Artificial Sequence: Synthetic peptide
  Seed: YSLVGIDPF
YELVGIDPY

SEQ ID NO: 18399 - protein, 9 aa, Artificial Sequence
  Description of Artificial Sequence: Synthetic peptide
  Seed: YSLVGIDPF
YGLVGIDPL

SEQ ID NO: 18400 - protein, 9 aa, Artificial Sequence
  Description of Artificial Sequence: Synthetic peptide
  Seed: YSLVGIDPF
YGLVGIDPM

SEQ ID NO: 18401 - protein, 9 aa, Artificial Sequence
  Description of Artificial Sequence: Synthetic peptide
  Seed: YSLVGIDPF
YGLVGIDPF

SEQ ID NO: 18402 - protein, 9 aa, Artificial Sequence
  Description of Artificial Sequence: Synthetic peptide
  Seed: YSLVGIDPF
YGLVGIDPW

SEQ ID NO: 18403 - protein, 9 aa, Artificial Sequence
  Description of Artificial Sequence: Synthetic peptide
  Seed: YSLVGIDPF
YGLVGIDPY

SEQ ID NO: 18404 - protein, 9 aa, Artificial Sequence
  Description of Artificial Sequence: Synthetic peptide
  Seed: YSLVGIDPF
YHLVGIDPL

SEQ ID NO: 18405 - protein, 9 aa, Artificial Sequence
  Description of Artificial Sequence: Synthetic peptide
  Seed: YSLVGIDPF
YHLVGIDPM

SEQ ID NO: 18406 - protein, 9 aa, Artificial Sequence
  Description of Artificial Sequence: Synthetic peptide
  Seed: YSLVGIDPF
YHLVGIDPF

SEQ ID NO: 18407 - protein, 9 aa, Artificial Sequence
  Description of Artificial Sequence: Synthetic peptide
  Seed: YSLVGIDPF
YHLVGIDPW

SEQ ID NO: 18408 - protein, 9 aa, Artificial Sequence
  Description of Artificial Sequence: Synthetic peptide
  Seed: YSLVGIDPF
YHLVGIDPY

SEQ ID NO: 18409 - protein, 9 aa, Artificial Sequence
  Description of Artificial Sequence: Synthetic peptide
  Seed: YSLVGIDPF
YILVGIDPL

SEQ ID NO: 18410 - protein, 9 aa, Artificial Sequence
  Description of Artificial Sequence: Synthetic peptide
  Seed: YSLVGIDPF
YILVGIDPM

SEQ ID NO: 18411 - protein, 9 aa, Artificial Sequence
  Description of Artificial Sequence: Synthetic peptide
  Seed: YSLVGIDPF
YILVGIDPF

SEQ ID NO: 18412 - protein, 9 aa, Artificial Sequence
  Description of Artificial Sequence: Synthetic peptide
  Seed: YSLVGIDPF
YILVGIDPW

SEQ ID NO: 18413 - protein, 9 aa, Artificial Sequence
  Description of Artificial Sequence: Synthetic peptide
  Seed: YSLVGIDPF
YFLVGIDPH

SEQ ID NO: 18414 - protein, 9 aa, Artificial Sequence
  Description of Artificial Sequence: Synthetic peptide
  Seed: YSLVGIDPF
YFLVGIDPI

SEQ ID NO: 18415 - protein, 9 aa, Artificial Sequence
  Description of Artificial Sequence: Synthetic peptide
  Seed: YSLVGIDPF
YFLVGIDPL

SEQ ID NO: 18416 - protein, 9 aa, Artificial Sequence
  Description of Artificial Sequence: Synthetic peptide
  Seed: YSLVGIDPF
YSLVGIDPI

SEQ ID NO: 18417 - protein, 9 aa, Artificial Sequence
  Description of Artificial Sequence: Synthetic peptide
  Seed: YSLVGIDPF
YSLVGIDPM

SEQ ID NO: 18418 - protein, 9 aa, Artificial Sequence
  Description of Artificial Sequence: Synthetic peptide
  Seed: YSLVGIDPF
YSLVGIDPW

SEQ ID NO: 18419 - protein, 9 aa, Artificial Sequence
  Description of Artificial Sequence: Synthetic peptide
  Seed: YSLVGIDPF
YSLVGIDPY

SEQ ID NO: 18420 - protein, 9 aa, Artificial Sequence
  Description of Artificial Sequence: Synthetic peptide
  Seed: YSLVGIDPF
YSLVGIDPV

SEQ ID NO: 18421 - protein, 9 aa, Artificial Sequence
  Description of Artificial Sequence: Synthetic peptide
  Seed: YSLVGIDPF
YTLVGIDPI

SEQ ID NO: 18422 - protein, 9 aa, Artificial Sequence
  Description of Artificial Sequence: Synthetic peptide
  Seed: YSLVGIDPF
YTLVGIDPL

SEQ ID NO: 18423 - protein, 9 aa, Artificial Sequence
  Description of Artificial Sequence: Synthetic peptide
  Seed: YSLVGIDPF
YTLVGIDPM

SEQ ID NO: 18424 - protein, 9 aa, Artificial Sequence
  Description of Artificial Sequence: Synthetic peptide
  Seed: YSLVGIDPF
YTLVGIDPF

SEQ ID NO: 18425 - protein, 9 aa, Artificial Sequence
  Description of Artificial Sequence: Synthetic peptide
  Seed: YSLVGIDPF
YTLVGIDPW

SEQ ID NO: 18426 - protein, 9 aa, Artificial Sequence
  Description of Artificial Sequence: Synthetic peptide
  Seed: YSLVGIDPF
YTLVGIDPY

SEQ ID NO: 18427 - protein, 9 aa, Artificial Sequence
  Description of Artificial Sequence: Synthetic peptide
  Seed: YSLVGIDPF
YTLVGIDPV

SEQ ID NO: 18428 - protein, 9 aa, Artificial Sequence
  Description of Artificial Sequence: Synthetic peptide
  Seed: YSLVGIDPF
YWLVGIDPI

SEQ ID NO: 18429 - protein, 9 aa, Artificial Sequence
  Description of Artificial Sequence: Synthetic peptide
  Seed: YSLVGIDPF
YWLVGIDPL

SEQ ID NO: 18430 - protein, 9 aa, Artificial Sequence
  Description of Artificial Sequence: Synthetic peptide
  Seed: YSLVGIDPF
YWLVGIDPM

SEQ ID NO: 18431 - protein, 9 aa, Artificial Sequence
  Description of Artificial Sequence: Synthetic peptide
  Seed: YSLVGIDPF
YWLVGIDPF

SEQ ID NO: 18432 - protein, 9 aa, Artificial Sequence
  Description of Artificial Sequence: Synthetic peptide
  Seed: YSLVGIDPF
YWLVGIDPW

SEQ ID NO: 18433 - protein, 9 aa, Artificial Sequence
  Description of Artificial Sequence: Synthetic peptide
  Seed: YSLVGIDPF
YWLVGIDPY

SEQ ID NO: 18434 - protein, 9 aa, Artificial Sequence
  Description of Artificial Sequence: Synthetic peptide
  Seed: YSLVGIDPF
YWLVGIDPV

SEQ ID NO: 18435 - protein, 9 aa, Artificial Sequence
  Description of Artificial Sequence: Synthetic peptide
  Seed: YSLVGIDPF
YYLVGIDPA

SEQ ID NO: 18436 - protein, 9 aa, Artificial Sequence
  Description of Artificial Sequence: Synthetic peptide
  Seed: YSLVGIDPF
YSLVGIDPL

SEQ ID NO: 18437 - protein, 9 aa, Artificial Sequence
  Description of Artificial Sequence: Synthetic peptide
  Seed: YSLVGIDPF
YPLVGIDPV

SEQ ID NO: 18438 - protein, 9 aa, Artificial Sequence
  Description of Artificial Sequence: Synthetic peptide
  Seed: YSLVGIDPF
YFLVGIDPM

SEQ ID NO: 18439 - protein, 9 aa, Artificial Sequence
  Description of Artificial Sequence: Synthetic peptide
  Seed: YSLVGIDPF
YPLVGIDPY

SEQ ID NO: 18440 - protein, 9 aa, Artificial Sequence
  Description of Artificial Sequence: Synthetic peptide
  Seed: YSLVGIDPF
YFLVGIDPF

SEQ ID NO: 18441 - protein, 9 aa, Artificial Sequence
  Description of Artificial Sequence: Synthetic peptide
  Seed: YSLVGIDPF
YFLVGIDPW

SEQ ID NO: 18442 - protein, 9 aa, Artificial Sequence
  Description of Artificial Sequence: Synthetic peptide
  Seed: YSLVGIDPF
YFLVGIDPY

SEQ ID NO: 18443 - protein, 9 aa, Artificial Sequence
  Description of Artificial Sequence: Synthetic peptide
  Seed: YSLVGIDPF
YFLVGIDPV

SEQ ID NO: 18444 - protein, 9 aa, Artificial Sequence
  Description of Artificial Sequence: Synthetic peptide
  Seed: YSLVGIDPF
YPLVGIDPA

SEQ ID NO: 18445 - protein, 9 aa, Artificial Sequence
  Description of Artificial Sequence: Synthetic peptide
  Seed: YSLVGIDPF
YPLVGIDPN

SEQ ID NO: 18446 - protein, 9 aa, Artificial Sequence
  Description of Artificial Sequence: Synthetic peptide
  Seed: YSLVGIDPF
YPLVGIDPC

SEQ ID NO: 18447 - protein, 9 aa, Artificial Sequence
  Description of Artificial Sequence: Synthetic peptide
  Seed: YSLVGIDPF
YPLVGIDPQ

SEQ ID NO: 18448 - protein, 9 aa, Artificial Sequence
  Description of Artificial Sequence: Synthetic peptide
  Seed: YSLVGIDPF
YPLVGIDPE

SEQ ID NO: 18449 - protein, 9 aa, Artificial Sequence
  Description of Artificial Sequence: Synthetic peptide
  Seed: YSLVGIDPF
YPLVGIDPG

SEQ ID NO: 18450 - protein, 9 aa, Artificial Sequence
  Description of Artificial Sequence: Synthetic peptide
  Seed: YSLVGIDPF
YPLVGIDPH

SEQ ID NO: 18451 - protein, 9 aa, Artificial Sequence
  Description of Artificial Sequence: Synthetic peptide
  Seed: YSLVGIDPF
YPLVGIDPI

SEQ ID NO: 18452 - protein, 9 aa, Artificial Sequence
  Description of Artificial Sequence: Synthetic peptide
  Seed: YSLVGIDPF
YPLVGIDPL

SEQ ID NO: 18453 - protein, 9 aa, Artificial Sequence
  Description of Artificial Sequence: Synthetic peptide
  Seed: YSLVGIDPF
YPLVGIDPM

SEQ ID NO: 18454 - protein, 9 aa, Artificial Sequence
  Description of Artificial Sequence: Synthetic peptide
  Seed: YSLVGIDPF
YPLVGIDPF

SEQ ID NO: 18455 - protein, 9 aa, Artificial Sequence
  Description of Artificial Sequence: Synthetic peptide
  Seed: YSLVGIDPF
YPLVGIDPP

SEQ ID NO: 18456 - protein, 9 aa, Artificial Sequence
  Description of Artificial Sequence: Synthetic peptide
  Seed: YSLVGIDPF
YPLVGIDPS

SEQ ID NO: 18457 - protein, 9 aa, Artificial Sequence
  Description of Artificial Sequence: Synthetic peptide
  Seed: YSLVGIDPF
YPLVGIDPT

SEQ ID NO: 18458 - protein, 9 aa, Artificial Sequence
  Description of Artificial Sequence: Synthetic peptide
  Seed: YSLVGIDPF
YPLVGIDPW

SEQ ID NO: 18459 - protein, 9 aa, Artificial Sequence
  Description of Artificial Sequence: Synthetic peptide
  Seed: YQRTRALVR
YSRTRALVL

SEQ ID NO: 18460 - protein, 9 aa, Artificial Sequence
  Description of Artificial Sequence: Synthetic peptide
  Seed: YQRTRALVR
YSRTRALVI

SEQ ID NO: 18461 - protein, 9 aa, Artificial Sequence
  Description of Artificial Sequence: Synthetic peptide
  Seed: YQRTRALVR
YSRTRALVH

SEQ ID NO: 18462 - protein, 10 aa, Artificial Sequence
  Description of Artificial Sequence: Synthetic peptide
  Seed: YIQMCTELKL
YCQMCTELKV

SEQ ID NO: 18463 - protein, 10 aa, Artificial Sequence
  Description of Artificial Sequence: Synthetic peptide
  Seed: YIQMCTELKL
YDQMCTELKY

SEQ ID NO: 18464 - protein, 10 aa, Artificial Sequence
  Description of Artificial Sequence: Synthetic peptide
  Seed: YIQMCTELKL
YDQMCTELKV

SEQ ID NO: 18465 - protein, 10 aa, Artificial Sequence
  Description of Artificial Sequence: Synthetic peptide
  Seed: YIQMCTELKL
YCQMCTELKA

SEQ ID NO: 18466 - protein, 10 aa, Artificial Sequence
  Description of Artificial Sequence: Synthetic peptide
  Seed: YIQMCTELKL
YCQMCTELKI

SEQ ID NO: 18467 - protein, 10 aa, Artificial Sequence
  Description of Artificial Sequence: Synthetic peptide
  Seed: YIQMCTELKL
YCQMCTELKL

SEQ ID NO: 18468 - protein, 10 aa, Artificial Sequence
  Description of Artificial Sequence: Synthetic peptide
  Seed: YIQMCTELKL
YCQMCTELKM

SEQ ID NO: 18469 - protein, 10 aa, Artificial Sequence
  Description of Artificial Sequence: Synthetic peptide
  Seed: YIQMCTELKL
YCQMCTELKF

SEQ ID NO: 18470 - protein, 10 aa, Artificial Sequence
  Description of Artificial Sequence: Synthetic peptide
  Seed: YIQMCTELKL
YCQMCTELKW

SEQ ID NO: 18471 - protein, 10 aa, Artificial Sequence
  Description of Artificial Sequence: Synthetic peptide
  Seed: YIQMCTELKL
YCQMCTELKY

SEQ ID NO: 18472 - protein, 10 aa, Artificial Sequence
  Description of Artificial Sequence: Synthetic peptide
  Seed: YIQMCTELKL
YQQMCTELKA

SEQ ID NO: 18473 - protein, 10 aa, Artificial Sequence
  Description of Artificial Sequence: Synthetic peptide
  Seed: YIQMCTELKL
YEQMCTELKL

SEQ ID NO: 18474 - protein, 10 aa, Artificial Sequence
  Description of Artificial Sequence: Synthetic peptide
  Seed: YIQMCTELKL
YQQMCTELKH

SEQ ID NO: 18475 - protein, 10 aa, Artificial Sequence
  Description of Artificial Sequence: Synthetic peptide
  Seed: YIQMCTELKL
YQQMCTELKI

SEQ ID NO: 18476 - protein, 10 aa, Artificial Sequence
  Description of Artificial Sequence: Synthetic peptide
  Seed: YIQMCTELKL
YQQMCTELKL

SEQ ID NO: 18477 - protein, 10 aa, Artificial Sequence
  Description of Artificial Sequence: Synthetic peptide
  Seed: YIQMCTELKL
YQQMCTELKM

SEQ ID NO: 18478 - protein, 10 aa, Artificial Sequence
  Description of Artificial Sequence: Synthetic peptide
  Seed: YIQMCTELKL
YQQMCTELKF

SEQ ID NO: 18479 - protein, 10 aa, Artificial Sequence
  Description of Artificial Sequence: Synthetic peptide
  Seed: YIQMCTELKL
YQQMCTELKW

SEQ ID NO: 18480 - protein, 10 aa, Artificial Sequence
  Description of Artificial Sequence: Synthetic peptide
  Seed: YIQMCTELKL
YQQMCTELKY

SEQ ID NO: 18481 - protein, 10 aa, Artificial Sequence
  Description of Artificial Sequence: Synthetic peptide
  Seed: YIQMCTELKL
YQQMCTELKV

SEQ ID NO: 18482 - protein, 10 aa, Artificial Sequence
  Description of Artificial Sequence: Synthetic peptide
  Seed: YIQMCTELKL
YEQMCTELKA

SEQ ID NO: 18483 - protein, 10 aa, Artificial Sequence
  Description of Artificial Sequence: Synthetic peptide
  Seed: YIQMCTELKL
YDQMCTELKW

SEQ ID NO: 18484 - protein, 10 aa, Artificial Sequence
  Description of Artificial Sequence: Synthetic peptide
  Seed: YIQMCTELKL
YDQMCTELKF

SEQ ID NO: 18485 - protein, 10 aa, Artificial Sequence
  Description of Artificial Sequence: Synthetic peptide
  Seed: YIQMCTELKL
YDQMCTELKM

SEQ ID NO: 18486 - protein, 10 aa, Artificial Sequence
  Description of Artificial Sequence: Synthetic peptide
  Seed: YIQMCTELKL
YDQMCTELKL

SEQ ID NO: 18487 - protein, 10 aa, Artificial Sequence
  Description of Artificial Sequence: Synthetic peptide
  Seed: YIQMCTELKL
YAQMCTELKV

SEQ ID NO: 18488 - protein, 10 aa, Artificial Sequence
  Description of Artificial Sequence: Synthetic peptide
  Seed: YIQMCTELKL
YRQMCTELKA

SEQ ID NO: 18489 - protein, 10 aa, Artificial Sequence
  Description of Artificial Sequence: Synthetic peptide
  Seed: YIQMCTELKL
YRQMCTELKI

SEQ ID NO: 18490 - protein, 10 aa, Artificial Sequence
  Description of Artificial Sequence: Synthetic peptide
  Seed: YIQMCTELKL
YRQMCTELKL

SEQ ID NO: 18491 - protein, 10 aa, Artificial Sequence
  Description of Artificial Sequence: Synthetic peptide
  Seed: YIQMCTELKL
YRQMCTELKM

SEQ ID NO: 18492 - protein, 10 aa, Artificial Sequence
  Description of Artificial Sequence: Synthetic peptide
  Seed: YIQMCTELKL
YRQMCTELKF

SEQ ID NO: 18493 - protein, 10 aa, Artificial Sequence
  Description of Artificial Sequence: Synthetic peptide
  Seed: YIQMCTELKL
YRQMCTELKW

SEQ ID NO: 18494 - protein, 10 aa, Artificial Sequence
  Description of Artificial Sequence: Synthetic peptide
  Seed: YIQMCTELKL
YRQMCTELKY

SEQ ID NO: 18495 - protein, 10 aa, Artificial Sequence
  Description of Artificial Sequence: Synthetic peptide
  Seed: YIQMCTELKL
YRQMCTELKV

SEQ ID NO: 18496 - protein, 10 aa, Artificial Sequence
  Description of Artificial Sequence: Synthetic peptide
  Seed: YIQMCTELKL
YNQMCTELKA

SEQ ID NO: 18497 - protein, 10 aa, Artificial Sequence
  Description of Artificial Sequence: Synthetic peptide
  Seed: YIQMCTELKL
YNQMCTELKI

SEQ ID NO: 18498 - protein, 10 aa, Artificial Sequence
  Description of Artificial Sequence: Synthetic peptide
  Seed: YIQMCTELKL
YNQMCTELKL

SEQ ID NO: 18499 - protein, 10 aa, Artificial Sequence
  Description of Artificial Sequence: Synthetic peptide
  Seed: YIQMCTELKL
YNQMCTELKM

SEQ ID NO: 18500 - protein, 10 aa, Artificial Sequence
  Description of Artificial Sequence: Synthetic peptide
  Seed: YIQMCTELKL
YNQMCTELKF

SEQ ID NO: 18501 - protein, 10 aa, Artificial Sequence
  Description of Artificial Sequence: Synthetic peptide
  Seed: YIQMCTELKL
YNQMCTELKW

SEQ ID NO: 18502 - protein, 10 aa, Artificial Sequence
  Description of Artificial Sequence: Synthetic peptide
  Seed: YIQMCTELKL
YNQMCTELKY

SEQ ID NO: 18503 - protein, 10 aa, Artificial Sequence
  Description of Artificial Sequence: Synthetic peptide
  Seed: YIQMCTELKL
YNQMCTELKV

SEQ ID NO: 18504 - protein, 10 aa, Artificial Sequence
  Description of Artificial Sequence: Synthetic peptide
  Seed: YIQMCTELKL
YDQMCTELKA

SEQ ID NO: 18505 - protein, 10 aa, Artificial Sequence
  Description of Artificial Sequence: Synthetic peptide
  Seed: YIQMCTELKL
YDQMCTELKI

SEQ ID NO: 18506 - protein, 10 aa, Artificial Sequence
  Description of Artificial Sequence: Synthetic peptide
  Seed: YIQMCTELKL
YEQMCTELKI

SEQ ID NO: 18507 - protein, 10 aa, Artificial Sequence
  Description of Artificial Sequence: Synthetic peptide
  Seed: YIQMCTELKL
YEQMCTELKM

SEQ ID NO: 18508 - protein, 10 aa, Artificial Sequence
  Description of Artificial Sequence: Synthetic peptide
  Seed: YIQMCTELKL
YMQMCTELKA

SEQ ID NO: 18509 - protein, 10 aa, Artificial Sequence
  Description of Artificial Sequence: Synthetic peptide
  Seed: YIQMCTELKL
YLQMCTELKT

SEQ ID NO: 18510 - protein, 10 aa, Artificial Sequence
  Description of Artificial Sequence: Synthetic peptide
  Seed: YIQMCTELKL
YIQMCTELKW

SEQ ID NO: 18511 - protein, 10 aa, Artificial Sequence
  Description of Artificial Sequence: Synthetic peptide
  Seed: YIQMCTELKL
YIQMCTELKY

SEQ ID NO: 18512 - protein, 10 aa, Artificial Sequence
  Description of Artificial Sequence: Synthetic peptide
  Seed: YIQMCTELKL
YIQMCTELKV

SEQ ID NO: 18513 - protein, 10 aa, Artificial Sequence
  Description of Artificial Sequence: Synthetic peptide
  Seed: YIQMCTELKL
YLQMCTELKA

SEQ ID NO: 18514 - protein, 10 aa, Artificial Sequence
  Description of Artificial Sequence: Synthetic peptide
  Seed: YIQMCTELKL
YLQMCTELKC

SEQ ID NO: 18515 - protein, 10 aa, Artificial Sequence
  Description of Artificial Sequence: Synthetic peptide
  Seed: YIQMCTELKL
YLQMCTELKI

SEQ ID NO: 18516 - protein, 10 aa, Artificial Sequence
  Description of Artificial Sequence: Synthetic peptide
  Seed: YIQMCTELKL
YLQMCTELKL

SEQ ID NO: 18517 - protein, 10 aa, Artificial Sequence
  Description of Artificial Sequence: Synthetic peptide
  Seed: YIQMCTELKL
YLQMCTELKM

SEQ ID NO: 18518 - protein, 10 aa, Artificial Sequence
  Description of Artificial Sequence: Synthetic peptide
  Seed: YIQMCTELKL
YLQMCTELKF

SEQ ID NO: 18519 - protein, 10 aa, Artificial Sequence
  Description of Artificial Sequence: Synthetic peptide
  Seed: YIQMCTELKL
YLQMCTELKW

SEQ ID NO: 18520 - protein, 10 aa, Artificial Sequence
  Description of Artificial Sequence: Synthetic peptide
  Seed: YIQMCTELKL
YEQMCTELKF

SEQ ID NO: 18521 - protein, 10 aa, Artificial Sequence
  Description of Artificial Sequence: Synthetic peptide
  Seed: YIQMCTELKL
YLQMCTELKY

SEQ ID NO: 18522 - protein, 10 aa, Artificial Sequence
  Description of Artificial Sequence: Synthetic peptide
  Seed: YIQMCTELKL
YLQMCTELKV

SEQ ID NO: 18523 - protein, 10 aa, Artificial Sequence
  Description of Artificial Sequence: Synthetic peptide
  Seed: YIQMCTELKL
YKQMCTELKA

SEQ ID NO: 18524 - protein, 10 aa, Artificial Sequence
  Description of Artificial Sequence: Synthetic peptide
  Seed: YIQMCTELKL
YKQMCTELKI

SEQ ID NO: 18525 - protein, 10 aa, Artificial Sequence
  Description of Artificial Sequence: Synthetic peptide
  Seed: YIQMCTELKL
YKQMCTELKL

SEQ ID NO: 18526 - protein, 10 aa, Artificial Sequence
  Description of Artificial Sequence: Synthetic peptide
  Seed: YIQMCTELKL
YKQMCTELKM

SEQ ID NO: 18527 - protein, 10 aa, Artificial Sequence
  Description of Artificial Sequence: Synthetic peptide
  Seed: YIQMCTELKL
YKQMCTELKF

SEQ ID NO: 18528 - protein, 10 aa, Artificial Sequence
  Description of Artificial Sequence: Synthetic peptide
  Seed: YIQMCTELKL
YKQMCTELKW

SEQ ID NO: 18529 - protein, 10 aa, Artificial Sequence
  Description of Artificial Sequence: Synthetic peptide
  Seed: YIQMCTELKL
YKQMCTELKY

SEQ ID NO: 18530 - protein, 10 aa, Artificial Sequence
  Description of Artificial Sequence: Synthetic peptide
  Seed: YIQMCTELKL
YIQMCTELKF

SEQ ID NO: 18531 - protein, 10 aa, Artificial Sequence
  Description of Artificial Sequence: Synthetic peptide
  Seed: YIQMCTELKL
YIQMCTELKM

SEQ ID NO: 18532 - protein, 10 aa, Artificial Sequence
  Description of Artificial Sequence: Synthetic peptide
  Seed: YIQMCTELKL
YIQMCTELKI

SEQ ID NO: 18533 - protein, 10 aa, Artificial Sequence
  Description of Artificial Sequence: Synthetic peptide
  Seed: YIQMCTELKL
YIQMCTELKA

SEQ ID NO: 18534 - protein, 10 aa, Artificial Sequence
  Description of Artificial Sequence: Synthetic peptide
  Seed: YIQMCTELKL
YEQMCTELKW

SEQ ID NO: 18535 - protein, 10 aa, Artificial Sequence
  Description of Artificial Sequence: Synthetic peptide
  Seed: YIQMCTELKL
YEQMCTELKY

SEQ ID NO: 18536 - protein, 10 aa, Artificial Sequence
  Description of Artificial Sequence: Synthetic peptide
  Seed: YIQMCTELKL
YEQMCTELKV

SEQ ID NO: 18537 - protein, 10 aa, Artificial Sequence
  Description of Artificial Sequence: Synthetic peptide
  Seed: YIQMCTELKL
YGQMCTELKA

SEQ ID NO: 18538 - protein, 10 aa, Artificial Sequence
  Description of Artificial Sequence: Synthetic peptide
  Seed: YIQMCTELKL
YGQMCTELKI

SEQ ID NO: 18539 - protein, 10 aa, Artificial Sequence
  Description of Artificial Sequence: Synthetic peptide
  Seed: YIQMCTELKL
YGQMCTELKL

SEQ ID NO: 18540 - protein, 10 aa, Artificial Sequence
  Description of Artificial Sequence: Synthetic peptide
  Seed: YIQMCTELKL
YGQMCTELKM

SEQ ID NO: 18541 - protein, 10 aa, Artificial Sequence
  Description of Artificial Sequence: Synthetic peptide
  Seed: YIQMCTELKL
YGQMCTELKF

SEQ ID NO: 18542 - protein, 10 aa, Artificial Sequence
  Description of Artificial Sequence: Synthetic peptide
  Seed: YIQMCTELKL
YGQMCTELKW

SEQ ID NO: 18543 - protein, 10 aa, Artificial Sequence
  Description of Artificial Sequence: Synthetic peptide
  Seed: YIQMCTELKL
YGQMCTELKY

SEQ ID NO: 18544 - protein, 10 aa, Artificial Sequence
  Description of Artificial Sequence: Synthetic peptide
  Seed: YIQMCTELKL
YGQMCTELKV

SEQ ID NO: 18545 - protein, 10 aa, Artificial Sequence
  Description of Artificial Sequence: Synthetic peptide
  Seed: YIQMCTELKL
YHQMCTELKA

SEQ ID NO: 18546 - protein, 10 aa, Artificial Sequence
  Description of Artificial Sequence: Synthetic peptide
  Seed: YIQMCTELKL
YHQMCTELKI

SEQ ID NO: 18547 - protein, 10 aa, Artificial Sequence
  Description of Artificial Sequence: Synthetic peptide
  Seed: YIQMCTELKL
YHQMCTELKL

SEQ ID NO: 18548 - protein, 10 aa, Artificial Sequence
  Description of Artificial Sequence: Synthetic peptide
  Seed: YIQMCTELKL
YHQMCTELKM

SEQ ID NO: 18549 - protein, 10 aa, Artificial Sequence
  Description of Artificial Sequence: Synthetic peptide
  Seed: YIQMCTELKL
YHQMCTELKF

SEQ ID NO: 18550 - protein, 10 aa, Artificial Sequence
  Description of Artificial Sequence: Synthetic peptide
  Seed: YIQMCTELKL
YHQMCTELKW

SEQ ID NO: 18551 - protein, 10 aa, Artificial Sequence
  Description of Artificial Sequence: Synthetic peptide
  Seed: YIQMCTELKL
YHQMCTELKY

SEQ ID NO: 18552 - protein, 10 aa, Artificial Sequence
  Description of Artificial Sequence: Synthetic peptide
  Seed: YIQMCTELKL
YHQMCTELKV

SEQ ID NO: 18553 - protein, 10 aa, Artificial Sequence
  Description of Artificial Sequence: Synthetic peptide
  Seed: YIQMCTELKL
YAQMCTELKY

SEQ ID NO: 18554 - protein, 10 aa, Artificial Sequence
  Description of Artificial Sequence: Synthetic peptide
  Seed: YIQMCTELKL
YAQMCTELKW

SEQ ID NO: 18555 - protein, 10 aa, Artificial Sequence
  Description of Artificial Sequence: Synthetic peptide
  Seed: YIQMCTELKL
YAQMCTELKF

SEQ ID NO: 18556 - protein, 11 aa, Artificial Sequence
  Description of Artificial Sequence: Synthetic peptide
  Seed: YGPAVSSGYDF
YEPAVSSGYDF

SEQ ID NO: 18557 - protein, 11 aa, Artificial Sequence
  Description of Artificial Sequence: Synthetic peptide
  Seed: YGPAVSSGYDF
YRPAVSSGYDY

SEQ ID NO: 18558 - protein, 11 aa, Artificial Sequence
  Description of Artificial Sequence: Synthetic peptide
  Seed: YGPAVSSGYDF
YNPAVSSGYDF

SEQ ID NO: 18559 - protein, 11 aa, Artificial Sequence
  Description of Artificial Sequence: Synthetic peptide
  Seed: YGPAVSSGYDF
YNPAVSSGYDY

SEQ ID NO: 18560 - protein, 11 aa, Artificial Sequence
  Description of Artificial Sequence: Synthetic peptide
  Seed: YGPAVSSGYDF
YDPAVSSGYDF

SEQ ID NO: 18561 - protein, 11 aa, Artificial Sequence
  Description of Artificial Sequence: Synthetic peptide
  Seed: YGPAVSSGYDF
YDPAVSSGYDY

SEQ ID NO: 18562 - protein, 11 aa, Artificial Sequence
  Description of Artificial Sequence: Synthetic peptide
  Seed: YGPAVSSGYDF
YCPAVSSGYDF

SEQ ID NO: 18563 - protein, 11 aa, Artificial Sequence
  Description of Artificial Sequence: Synthetic peptide
  Seed: YGPAVSSGYDF
YCPAVSSGYDY

SEQ ID NO: 18564 - protein, 11 aa, Artificial Sequence
  Description of Artificial Sequence: Synthetic peptide
  Seed: YGPAVSSGYDF
YQPAVSSGYDF

SEQ ID NO: 18565 - protein, 11 aa, Artificial Sequence
  Description of Artificial Sequence: Synthetic peptide
  Seed: YGPAVSSGYDF
YQPAVSSGYDY

SEQ ID NO: 18566 - protein, 11 aa, Artificial Sequence
  Description of Artificial Sequence: Synthetic peptide
  Seed: YGPAVSSGYDF
YEPAVSSGYDY

SEQ ID NO: 18567 - protein, 10 aa, Artificial Sequence
  Description of Artificial Sequence: Synthetic peptide
  Seed: YIQMCTELKL
YAQMCTELKM

SEQ ID NO: 18568 - protein, 11 aa, Artificial Sequence
  Description of Artificial Sequence: Synthetic peptide
  Seed: YGPAVSSGYDF
YGPAVSSGYDY

SEQ ID NO: 18569 - protein, 11 aa, Artificial Sequence
  Description of Artificial Sequence: Synthetic peptide
  Seed: YGPAVSSGYDF
YHPAVSSGYDF

SEQ ID NO: 18570 - protein, 11 aa, Artificial Sequence
  Description of Artificial Sequence: Synthetic peptide
  Seed: YGPAVSSGYDF
YHPAVSSGYDY

SEQ ID NO: 18571 - protein, 11 aa, Artificial Sequence
  Description of Artificial Sequence: Synthetic peptide
  Seed: YGPAVSSGYDF
YIPAVSSGYDF

SEQ ID NO: 18572 - protein, 11 aa, Artificial Sequence
  Description of Artificial Sequence: Synthetic peptide
  Seed: YGPAVSSGYDF
YIPAVSSGYDY

SEQ ID NO: 18573 - protein, 11 aa, Artificial Sequence
  Description of Artificial Sequence: Synthetic peptide
  Seed: YGPAVSSGYDF
YLPAVSSGYDF

SEQ ID NO: 18574 - protein, 11 aa, Artificial Sequence
  Description of Artificial Sequence: Synthetic peptide
  Seed: YGPAVSSGYDF
YLPAVSSGYDY

SEQ ID NO: 18575 - protein, 11 aa, Artificial Sequence
  Description of Artificial Sequence: Synthetic peptide
  Seed: YGPAVSSGYDF
YKPAVSSGYDF

SEQ ID NO: 18576 - protein, 11 aa, Artificial Sequence
  Description of Artificial Sequence: Synthetic peptide
  Seed: YGPAVSSGYDF
YKPAVSSGYDY

SEQ ID NO: 18577 - protein, 11 aa, Artificial Sequence
  Description of Artificial Sequence: Synthetic peptide
  Seed: YGPAVSSGYDF
YRPAVSSGYDF

SEQ ID NO: 18578 - protein, 11 aa, Artificial Sequence
  Description of Artificial Sequence: Synthetic peptide
  Seed: YGPAVSSGYDF
YAPAVSSGYDY

SEQ ID NO: 18579 - protein, 11 aa, Artificial Sequence
  Description of Artificial Sequence: Synthetic peptide
  Seed: YGPAVSSGYDF
YAPAVSSGYDF

SEQ ID NO: 18580 - protein, 11 aa, Artificial Sequence
  Description of Artificial Sequence: Synthetic peptide
  Seed: YGPAVSSGYDF
YAPAVSSGYDM

SEQ ID NO: 18581 - protein, 9 aa, Artificial Sequence
  Description of Artificial Sequence: Synthetic peptide
  Seed: YGPAVSSGY
YWPAVSSGV

SEQ ID NO: 18582 - protein, 9 aa, Artificial Sequence
  Description of Artificial Sequence: Synthetic peptide
  Seed: YGPAVSSGY
YYPAVSSGA

SEQ ID NO: 18583 - protein, 9 aa, Artificial Sequence
  Description of Artificial Sequence: Synthetic peptide
  Seed: YGPAVSSGY
YYPAVSSGC

SEQ ID NO: 18584 - protein, 9 aa, Artificial Sequence
  Description of Artificial Sequence: Synthetic peptide
  Seed: YGPAVSSGY
YYPAVSSGQ

SEQ ID NO: 18585 - protein, 9 aa, Artificial Sequence
  Description of Artificial Sequence: Synthetic peptide
  Seed: YGPAVSSGY
YYPAVSSGH

SEQ ID NO: 18586 - protein, 9 aa, Artificial Sequence
  Description of Artificial Sequence: Synthetic peptide
  Seed: YGPAVSSGY
YYPAVSSGI

SEQ ID NO: 18587 - protein, 9 aa, Artificial Sequence
  Description of Artificial Sequence: Synthetic peptide
  Seed: YGPAVSSGY
YYPAVSSGL

SEQ ID NO: 18588 - protein, 9 aa, Artificial Sequence
  Description of Artificial Sequence: Synthetic peptide
  Seed: YGPAVSSGY
YYPAVSSGM

SEQ ID NO: 18589 - protein, 9 aa, Artificial Sequence
  Description of Artificial Sequence: Synthetic peptide
  Seed: YGPAVSSGY
YYPAVSSGF

SEQ ID NO: 18590 - protein, 9 aa, Artificial Sequence
  Description of Artificial Sequence: Synthetic peptide
  Seed: YGPAVSSGY
YYPAVSSGT

SEQ ID NO: 18591 - protein, 9 aa, Artificial Sequence
  Description of Artificial Sequence: Synthetic peptide
  Seed: YGPAVSSGY
YYPAVSSGW

SEQ ID NO: 18592 - protein, 9 aa, Artificial Sequence
  Description of Artificial Sequence: Synthetic peptide
  Seed: YGPAVSSGY
YYPAVSSGY

SEQ ID NO: 18593 - protein, 9 aa, Artificial Sequence
  Description of Artificial Sequence: Synthetic peptide
  Seed: YGPAVSSGY
YYPAVSSGV

SEQ ID NO: 18594 - protein, 9 aa, Artificial Sequence
  Description of Artificial Sequence: Synthetic peptide
  Seed: YGPAVSSGY
YVPAVSSGI

SEQ ID NO: 18595 - protein, 9 aa, Artificial Sequence
  Description of Artificial Sequence: Synthetic peptide
  Seed: YGPAVSSGY
YVPAVSSGL

SEQ ID NO: 18596 - protein, 9 aa, Artificial Sequence
  Description of Artificial Sequence: Synthetic peptide
  Seed: YGPAVSSGY
YVPAVSSGM

SEQ ID NO: 18597 - protein, 9 aa, Artificial Sequence
  Description of Artificial Sequence: Synthetic peptide
  Seed: YGPAVSSGY
YVPAVSSGF

SEQ ID NO: 18598 - protein, 9 aa, Artificial Sequence
  Description of Artificial Sequence: Synthetic peptide
  Seed: YGPAVSSGY
YVPAVSSGY

SEQ ID NO: 18599 - protein, 9 aa, Artificial Sequence
  Description of Artificial Sequence: Synthetic peptide
  Seed: YGPAVSSGY
YVPAVSSGV

SEQ ID NO: 18600 - protein, 11 aa, Artificial Sequence
  Description of Artificial Sequence: Synthetic peptide
  Seed: YGPAVSSGYDF
YMPAVSSGYDF

SEQ ID NO: 18601 - protein, 11 aa, Artificial Sequence
  Description of Artificial Sequence: Synthetic peptide
  Seed: YGPAVSSGYDF
YMPAVSSGYDY

SEQ ID NO: 18602 - protein, 11 aa, Artificial Sequence
  Description of Artificial Sequence: Synthetic peptide
  Seed: YGPAVSSGYDF
YFPAVSSGYDF

SEQ ID NO: 18603 - protein, 9 aa, Artificial Sequence
  Description of Artificial Sequence: Synthetic peptide
  Seed: YIQMCTELK
YLQMCTELR

SEQ ID NO: 18604 - protein, 9 aa, Artificial Sequence
  Description of Artificial Sequence: Synthetic peptide
  Seed: YIQMCTELK
YMQMCTELR

SEQ ID NO: 18605 - protein, 9 aa, Artificial Sequence
  Description of Artificial Sequence: Synthetic peptide
  Seed: YIQMCTELK
YMQMCTELK

SEQ ID NO: 18606 - protein, 9 aa, Artificial Sequence
  Description of Artificial Sequence: Synthetic peptide
  Seed: YIQMCTELK
YFQMCTELR

SEQ ID NO: 18607 - protein, 9 aa, Artificial Sequence
  Description of Artificial Sequence: Synthetic peptide
  Seed: YIQMCTELK
YFQMCTELK

SEQ ID NO: 18608 - protein, 9 aa, Artificial Sequence
  Description of Artificial Sequence: Synthetic peptide
  Seed: YIQMCTELK
YPQMCTELR

SEQ ID NO: 18609 - protein, 9 aa, Artificial Sequence
  Description of Artificial Sequence: Synthetic peptide
  Seed: YIQMCTELK
YSQMCTELR

SEQ ID NO: 18610 - protein, 9 aa, Artificial Sequence
  Description of Artificial Sequence: Synthetic peptide
  Seed: YIQMCTELK
YSQMCTELK

SEQ ID NO: 18611 - protein, 9 aa, Artificial Sequence
  Description of Artificial Sequence: Synthetic peptide
  Seed: YIQMCTELK
YTQMCTELR

SEQ ID NO: 18612 - protein, 9 aa, Artificial Sequence
  Description of Artificial Sequence: Synthetic peptide
  Seed: YIQMCTELK
YTQMCTELK

SEQ ID NO: 18613 - protein, 9 aa, Artificial Sequence
  Description of Artificial Sequence: Synthetic peptide
  Seed: YIQMCTELK
YTQMCTELY

SEQ ID NO: 18614 - protein, 9 aa, Artificial Sequence
  Description of Artificial Sequence: Synthetic peptide
  Seed: YIQMCTELK
YWQMCTELR

SEQ ID NO: 18615 - protein, 9 aa, Artificial Sequence
  Description of Artificial Sequence: Synthetic peptide
  Seed: YIQMCTELK
YWQMCTELK

SEQ ID NO: 18616 - protein, 9 aa, Artificial Sequence
  Description of Artificial Sequence: Synthetic peptide
  Seed: YIQMCTELK
YYQMCTELR

SEQ ID NO: 18617 - protein, 9 aa, Artificial Sequence
  Description of Artificial Sequence: Synthetic peptide
  Seed: YIQMCTELK
YYQMCTELK

SEQ ID NO: 18618 - protein, 9 aa, Artificial Sequence
  Description of Artificial Sequence: Synthetic peptide
  Seed: YIQMCTELK
YVQMCTELR

SEQ ID NO: 18619 - protein, 10 aa, Artificial Sequence
  Description of Artificial Sequence: Synthetic peptide
  Seed: YIQMCTELKL
YAQMCTELKA

SEQ ID NO: 18620 - protein, 10 aa, Artificial Sequence
  Description of Artificial Sequence: Synthetic peptide
  Seed: YIQMCTELKL
YAQMCTELKI

SEQ ID NO: 18621 - protein, 10 aa, Artificial Sequence
  Description of Artificial Sequence: Synthetic peptide
  Seed: YIQMCTELKL
YAQMCTELKL

SEQ ID NO: 18622 - protein, 9 aa, Artificial Sequence
  Description of Artificial Sequence: Synthetic peptide
  Seed: YIQMCTELK
YLQMCTELK

SEQ ID NO: 18623 - protein, 9 aa, Artificial Sequence
  Description of Artificial Sequence: Synthetic peptide
  Seed: YIQMCTELK
YIQMCTELR

SEQ ID NO: 18624 - protein, 11 aa, Artificial Sequence
  Description of Artificial Sequence: Synthetic peptide
  Seed: YGPAVSSGYDF
YFPAVSSGYDY

SEQ ID NO: 18625 - protein, 9 aa, Artificial Sequence
  Description of Artificial Sequence: Synthetic peptide
  Seed: YIQMCTELK
YHQMCTELR

SEQ ID NO: 18626 - protein, 11 aa, Artificial Sequence
  Description of Artificial Sequence: Synthetic peptide
  Seed: YGPAVSSGYDF
YPPAVSSGYDF

SEQ ID NO: 18627 - protein, 11 aa, Artificial Sequence
  Description of Artificial Sequence: Synthetic peptide
  Seed: YGPAVSSGYDF
YPPAVSSGYDY

SEQ ID NO: 18628 - protein, 11 aa, Artificial Sequence
  Description of Artificial Sequence: Synthetic peptide
  Seed: YGPAVSSGYDF
YSPAVSSGYDF

SEQ ID NO: 18629 - protein, 11 aa, Artificial Sequence
  Description of Artificial Sequence: Synthetic peptide
  Seed: YGPAVSSGYDF
YSPAVSSGYDY

SEQ ID NO: 18630 - protein, 11 aa, Artificial Sequence
  Description of Artificial Sequence: Synthetic peptide
  Seed: YGPAVSSGYDF
YTPAVSSGYDF

SEQ ID NO: 18631 - protein, 11 aa, Artificial Sequence
  Description of Artificial Sequence: Synthetic peptide
  Seed: YGPAVSSGYDF
YTPAVSSGYDY

SEQ ID NO: 18632 - protein, 11 aa, Artificial Sequence
  Description of Artificial Sequence: Synthetic peptide
  Seed: YGPAVSSGYDF
YWPAVSSGYDF

SEQ ID NO: 18633 - protein, 11 aa, Artificial Sequence
  Description of Artificial Sequence: Synthetic peptide
  Seed: YGPAVSSGYDF
YWPAVSSGYDY

SEQ ID NO: 18634 - protein, 11 aa, Artificial Sequence
  Description of Artificial Sequence: Synthetic peptide
  Seed: YGPAVSSGYDF
YYPAVSSGYDF

SEQ ID NO: 18635 - protein, 11 aa, Artificial Sequence
  Description of Artificial Sequence: Synthetic peptide
  Seed: YGPAVSSGYDF
YYPAVSSGYDY

SEQ ID NO: 18636 - protein, 11 aa, Artificial Sequence
  Description of Artificial Sequence: Synthetic peptide
  Seed: YGPAVSSGYDF
YVPAVSSGYDF

SEQ ID NO: 18637 - protein, 11 aa, Artificial Sequence
  Description of Artificial Sequence: Synthetic peptide
  Seed: YGPAVSSGYDF
YVPAVSSGYDY

SEQ ID NO: 18638 - protein, 9 aa, Artificial Sequence
  Description of Artificial Sequence: Synthetic peptide
  Seed: YIQMCTELK
YAQMCTELR

SEQ ID NO: 18639 - protein, 9 aa, Artificial Sequence
  Description of Artificial Sequence: Synthetic peptide
  Seed: YIQMCTELK
YAQMCTELK

SEQ ID NO: 18640 - protein, 9 aa, Artificial Sequence
  Description of Artificial Sequence: Synthetic peptide
  Seed: YIQMCTELK
YNQMCTELR

SEQ ID NO: 18641 - protein, 9 aa, Artificial Sequence
  Description of Artificial Sequence: Synthetic peptide
  Seed: YIQMCTELK
YQQMCTELR

SEQ ID NO: 18642 - protein, 9 aa, Artificial Sequence
  Description of Artificial Sequence: Synthetic peptide
  Seed: YIQMCTELK
YQQMCTELK

SEQ ID NO: 18643 - protein, 9 aa, Artificial Sequence
  Description of Artificial Sequence: Synthetic peptide
  Seed: YIQMCTELK
YGQMCTELR

SEQ ID NO: 18644 - protein, 9 aa, Artificial Sequence
  Description of Artificial Sequence: Synthetic peptide
  Seed: YIQMCTELK
YGQMCTELK

SEQ ID NO: 18645 - protein, 10 aa, Artificial Sequence
  Description of Artificial Sequence: Synthetic peptide
  Seed: YIQMCTELKL
YKQMCTELKV

SEQ ID NO: 18646 - protein, 10 aa, Artificial Sequence
  Description of Artificial Sequence: Synthetic peptide
  Seed: YIQMCTELKL
YMQMCTELKC

SEQ ID NO: 18647 - protein, 9 aa, Artificial Sequence
  Description of Artificial Sequence: Synthetic peptide
  Seed: YQRTRALVR
YSRTRALVG

SEQ ID NO: 18648 - protein, 8 aa, Artificial Sequence
  Description of Artificial Sequence: Synthetic peptide
  Seed: YQRTRALV
YSRTRALL

SEQ ID NO: 18649 - protein, 8 aa, Artificial Sequence
  Description of Artificial Sequence: Synthetic peptide
  Seed: YQRTRALV
YFRTRALM

SEQ ID NO: 18650 - protein, 8 aa, Artificial Sequence
  Description of Artificial Sequence: Synthetic peptide
  Seed: YQRTRALV
YFRTRALV

SEQ ID NO: 18651 - protein, 8 aa, Artificial Sequence
  Description of Artificial Sequence: Synthetic peptide
  Seed: YQRTRALV
YPRTRALA

SEQ ID NO: 18652 - protein, 8 aa, Artificial Sequence
  Description of Artificial Sequence: Synthetic peptide
  Seed: YQRTRALV
YPRTRALI

SEQ ID NO: 18653 - protein, 8 aa, Artificial Sequence
  Description of Artificial Sequence: Synthetic peptide
  Seed: YQRTRALV
YPRTRALL

SEQ ID NO: 18654 - protein, 8 aa, Artificial Sequence
  Description of Artificial Sequence: Synthetic peptide
  Seed: YQRTRALV
YPRTRALM

SEQ ID NO: 18655 - protein, 8 aa, Artificial Sequence
  Description of Artificial Sequence: Synthetic peptide
  Seed: YQRTRALV
YPRTRALF

SEQ ID NO: 18656 - protein, 8 aa, Artificial Sequence
  Description of Artificial Sequence: Synthetic peptide
  Seed: YQRTRALV
YPRTRALV

SEQ ID NO: 18657 - protein, 8 aa, Artificial Sequence
  Description of Artificial Sequence: Synthetic peptide
  Seed: YQRTRALV
YSRTRALI

SEQ ID NO: 18658 - protein, 8 aa, Artificial Sequence
  Description of Artificial Sequence: Synthetic peptide
  Seed: YQRTRALV
YSRTRALM

SEQ ID NO: 18659 - protein, 9 aa, Artificial Sequence
  Description of Artificial Sequence: Synthetic peptide
  Seed: YQRTRALVR
YARTRALVA

SEQ ID NO: 18660 - protein, 8 aa, Artificial Sequence
  Description of Artificial Sequence: Synthetic peptide
  Seed: YQRTRALV
YTRTRALL

SEQ ID NO: 18661 - protein, 8 aa, Artificial Sequence
  Description of Artificial Sequence: Synthetic peptide
  Seed: YQRTRALV
YTRTRALM

SEQ ID NO: 18662 - protein, 8 aa, Artificial Sequence
  Description of Artificial Sequence: Synthetic peptide
  Seed: YQRTRALV
YWRTRALL

SEQ ID NO: 18663 - protein, 8 aa, Artificial Sequence
  Description of Artificial Sequence: Synthetic peptide
  Seed: YQRTRALV
YWRTRALM

SEQ ID NO: 18664 - protein, 8 aa, Artificial Sequence
  Description of Artificial Sequence: Synthetic peptide
  Seed: YQRTRALV
YYRTRALL

SEQ ID NO: 18665 - protein, 8 aa, Artificial Sequence
  Description of Artificial Sequence: Synthetic peptide
  Seed: YQRTRALV
YVRTRALI

SEQ ID NO: 18666 - protein, 8 aa, Artificial Sequence
  Description of Artificial Sequence: Synthetic peptide
  Seed: YQRTRALV
YVRTRALL

SEQ ID NO: 18667 - protein, 8 aa, Artificial Sequence
  Description of Artificial Sequence: Synthetic peptide
  Seed: YQRTRALV
YVRTRALM

SEQ ID NO: 18668 - protein, 8 aa, Artificial Sequence
  Description of Artificial Sequence: Synthetic peptide
  Seed: YQRTRALV
YVRTRALF

SEQ ID NO: 18669 - protein, 8 aa, Artificial Sequence
  Description of Artificial Sequence: Synthetic peptide
  Seed: YQRTRALV
YFRTRALL

SEQ ID NO: 18670 - protein, 8 aa, Artificial Sequence
  Description of Artificial Sequence: Synthetic peptide
  Seed: YQRTRALV
YFRTRALI

SEQ ID NO: 18671 - protein, 8 aa, Artificial Sequence
  Description of Artificial Sequence: Synthetic peptide
  Seed: YQRTRALV
YMRTRALV

SEQ ID NO: 18672 - protein, 8 aa, Artificial Sequence
  Description of Artificial Sequence: Synthetic peptide
  Seed: YQRTRALV
YMRTRALT

SEQ ID NO: 18673 - protein, 8 aa, Artificial Sequence
  Description of Artificial Sequence: Synthetic peptide
  Seed: YQRTRALV
YIRTRALF

SEQ ID NO: 18674 - protein, 8 aa, Artificial Sequence
  Description of Artificial Sequence: Synthetic peptide
  Seed: YQRTRALV
YIRTRALV

SEQ ID NO: 18675 - protein, 8 aa, Artificial Sequence
  Description of Artificial Sequence: Synthetic peptide
  Seed: YQRTRALV
YLRTRALA

SEQ ID NO: 18676 - protein, 8 aa, Artificial Sequence
  Description of Artificial Sequence: Synthetic peptide
  Seed: YQRTRALV
YLRTRALC

SEQ ID NO: 18677 - protein, 8 aa, Artificial Sequence
  Description of Artificial Sequence: Synthetic peptide
  Seed: YQRTRALV
YLRTRALI

SEQ ID NO: 18678 - protein, 8 aa, Artificial Sequence
  Description of Artificial Sequence: Synthetic peptide
  Seed: YQRTRALV
YLRTRALL

SEQ ID NO: 18679 - protein, 8 aa, Artificial Sequence
  Description of Artificial Sequence: Synthetic peptide
  Seed: YQRTRALV
YLRTRALM

SEQ ID NO: 18680 - protein, 8 aa, Artificial Sequence
  Description of Artificial Sequence: Synthetic peptide
  Seed: YQRTRALV
YLRTRALF

SEQ ID NO: 18681 - protein, 8 aa, Artificial Sequence
  Description of Artificial Sequence: Synthetic peptide
  Seed: YQRTRALV
YLRTRALV

SEQ ID NO: 18682 - protein, 8 aa, Artificial Sequence
  Description of Artificial Sequence: Synthetic peptide
  Seed: YQRTRALV
YKRTRALL

SEQ ID NO: 18683 - protein, 8 aa, Artificial Sequence
  Description of Artificial Sequence: Synthetic peptide
  Seed: YQRTRALV
YKRTRALM

SEQ ID NO: 18684 - protein, 8 aa, Artificial Sequence
  Description of Artificial Sequence: Synthetic peptide
  Seed: YQRTRALV
YMRTRALA

SEQ ID NO: 18685 - protein, 8 aa, Artificial Sequence
  Description of Artificial Sequence: Synthetic peptide
  Seed: YQRTRALV
YMRTRALC

SEQ ID NO: 18686 - protein, 8 aa, Artificial Sequence
  Description of Artificial Sequence: Synthetic peptide
  Seed: YQRTRALV
YMRTRALI

SEQ ID NO: 18687 - protein, 8 aa, Artificial Sequence
  Description of Artificial Sequence: Synthetic peptide
  Seed: YQRTRALV
YMRTRALL

SEQ ID NO: 18688 - protein, 8 aa, Artificial Sequence
  Description of Artificial Sequence: Synthetic peptide
  Seed: YQRTRALV
YMRTRALM

SEQ ID NO: 18689 - protein, 8 aa, Artificial Sequence
  Description of Artificial Sequence: Synthetic peptide
  Seed: YQRTRALV
YMRTRALF

SEQ ID NO: 18690 - protein, 8 aa, Artificial Sequence
  Description of Artificial Sequence: Synthetic peptide
  Seed: YQRTRALV
YMRTRALP

SEQ ID NO: 18691 - protein, 8 aa, Artificial Sequence
  Description of Artificial Sequence: Synthetic peptide
  Seed: YQRTRALV
YMRTRALS

SEQ ID NO: 18692 - protein, 8 aa, Artificial Sequence
  Description of Artificial Sequence: Synthetic peptide
  Seed: YQRTRALV
YVRTRALV

SEQ ID NO: 18693 - protein, 9 aa, Artificial Sequence
  Description of Artificial Sequence: Synthetic peptide
  Seed: YQRTRALVR
YARTRALVR

SEQ ID NO: 18694 - protein, 10 aa, Artificial Sequence
  Description of Artificial Sequence: Synthetic peptide
  Seed: YIQMCTELKL
YMQMCTELKH

SEQ ID NO: 18695 - protein, 9 aa, Artificial Sequence
  Description of Artificial Sequence: Synthetic peptide
  Seed: YQRTRALVR
YMRTRALVM

SEQ ID NO: 18696 - protein, 9 aa, Artificial Sequence
  Description of Artificial Sequence: Synthetic peptide
  Seed: YQRTRALVR
YLRTRALVA

SEQ ID NO: 18697 - protein, 9 aa, Artificial Sequence
  Description of Artificial Sequence: Synthetic peptide
  Seed: YQRTRALVR
YLRTRALVR

SEQ ID NO: 18698 - protein, 9 aa, Artificial Sequence
  Description of Artificial Sequence: Synthetic peptide
  Seed: YQRTRALVR
YLRTRALVK

SEQ ID NO: 18699 - protein, 9 aa, Artificial Sequence
  Description of Artificial Sequence: Synthetic peptide
  Seed: YQRTRALVR
YKRTRALVK

SEQ ID NO: 18700 - protein, 9 aa, Artificial Sequence
  Description of Artificial Sequence: Synthetic peptide
  Seed: YQRTRALVR
YMRTRALVA

SEQ ID NO: 18701 - protein, 9 aa, Artificial Sequence
  Description of Artificial Sequence: Synthetic peptide
  Seed: YQRTRALVR
YMRTRALVR

SEQ ID NO: 18702 - protein, 9 aa, Artificial Sequence
  Description of Artificial Sequence: Synthetic peptide
  Seed: YQRTRALVR
YMRTRALVG

SEQ ID NO: 18703 - protein, 9 aa, Artificial Sequence
  Description of Artificial Sequence: Synthetic peptide
  Seed: YQRTRALVR
YMRTRALVI

SEQ ID NO: 18704 - protein, 9 aa, Artificial Sequence
  Description of Artificial Sequence: Synthetic peptide
  Seed: YQRTRALVR
YMRTRALVK

SEQ ID NO: 18705 - protein, 9 aa, Artificial Sequence
  Description of Artificial Sequence: Synthetic peptide
  Seed: YQRTRALVR
YMRTRALVS

SEQ ID NO: 18706 - protein, 9 aa, Artificial Sequence
  Description of Artificial Sequence: Synthetic peptide
  Seed: YQRTRALVR
YARTRALVI

SEQ ID NO: 18707 - protein, 9 aa, Artificial Sequence
  Description of Artificial Sequence: Synthetic peptide
  Seed: YQRTRALVR
YMRTRALVY

SEQ ID NO: 18708 - protein, 9 aa, Artificial Sequence
  Description of Artificial Sequence: Synthetic peptide
  Seed: YQRTRALVR
YMRTRALVV

SEQ ID NO: 18709 - protein, 9 aa, Artificial Sequence
  Description of Artificial Sequence: Synthetic peptide
  Seed: YQRTRALVR
YFRTRALVA

SEQ ID NO: 18710 - protein, 9 aa, Artificial Sequence
  Description of Artificial Sequence: Synthetic peptide
  Seed: YQRTRALVR
YFRTRALVR

SEQ ID NO: 18711 - protein, 9 aa, Artificial Sequence
  Description of Artificial Sequence: Synthetic peptide
  Seed: YQRTRALVR
YFRTRALVK

SEQ ID NO: 18712 - protein, 9 aa, Artificial Sequence
  Description of Artificial Sequence: Synthetic peptide
  Seed: YQRTRALVR
YFRTRALVV

SEQ ID NO: 18713 - protein, 9 aa, Artificial Sequence
  Description of Artificial Sequence: Synthetic peptide
  Seed: YQRTRALVR
YSRTRALVA

SEQ ID NO: 18714 - protein, 9 aa, Artificial Sequence
  Description of Artificial Sequence: Synthetic peptide
  Seed: YQRTRALVR
YSRTRALVR

SEQ ID NO: 18715 - protein, 9 aa, Artificial Sequence
  Description of Artificial Sequence: Synthetic peptide
  Seed: YQRTRALVR
YSRTRALVQ

SEQ ID NO: 18716 - protein, 9 aa, Artificial Sequence
  Description of Artificial Sequence: Synthetic peptide
  Seed: YQRTRALVR
YIRTRALVV

SEQ ID NO: 18717 - protein, 9 aa, Artificial Sequence
  Description of Artificial Sequence: Synthetic peptide
  Seed: YQRTRALVR
YIRTRALVY

SEQ ID NO: 18718 - protein, 9 aa, Artificial Sequence
  Description of Artificial Sequence: Synthetic peptide
  Seed: YQRTRALVR
YIRTRALVK

SEQ ID NO: 18719 - protein, 9 aa, Artificial Sequence
  Description of Artificial Sequence: Synthetic peptide
  Seed: YQRTRALVR
YIRTRALVI

SEQ ID NO: 18720 - protein, 9 aa, Artificial Sequence
  Description of Artificial Sequence: Synthetic peptide
  Seed: YQRTRALVR
YARTRALVK

SEQ ID NO: 18721 - protein, 9 aa, Artificial Sequence
  Description of Artificial Sequence: Synthetic peptide
  Seed: YQRTRALVR
YARTRALVY

SEQ ID NO: 18722 - protein, 9 aa, Artificial Sequence
  Description of Artificial Sequence: Synthetic peptide
  Seed: YQRTRALVR
YARTRALVV

SEQ ID NO: 18723 - protein, 9 aa, Artificial Sequence
  Description of Artificial Sequence: Synthetic peptide
  Seed: YQRTRALVR
YNRTRALVA

SEQ ID NO: 18724 - protein, 9 aa, Artificial Sequence
  Description of Artificial Sequence: Synthetic peptide
  Seed: YQRTRALVR
YNRTRALVR

SEQ ID NO: 18725 - protein, 9 aa, Artificial Sequence
  Description of Artificial Sequence: Synthetic peptide
  Seed: YQRTRALVR
YNRTRALVK

SEQ ID NO: 18726 - protein, 9 aa, Artificial Sequence
  Description of Artificial Sequence: Synthetic peptide
  Seed: YQRTRALVR
YCRTRALVK

SEQ ID NO: 18727 - protein, 9 aa, Artificial Sequence
  Description of Artificial Sequence: Synthetic peptide
  Seed: YQRTRALVR
YQRTRALVA

SEQ ID NO: 18728 - protein, 9 aa, Artificial Sequence
  Description of Artificial Sequence: Synthetic peptide
  Seed: YQRTRALVR
YQRTRALVI

SEQ ID NO: 18729 - protein, 9 aa, Artificial Sequence
  Description of Artificial Sequence: Synthetic peptide
  Seed: YQRTRALVR
YQRTRALVY

SEQ ID NO: 18730 - protein, 9 aa, Artificial Sequence
  Description of Artificial Sequence: Synthetic peptide
  Seed: YQRTRALVR
YQRTRALVV

SEQ ID NO: 18731 - protein, 9 aa, Artificial Sequence
  Description of Artificial Sequence: Synthetic peptide
  Seed: YQRTRALVR
YGRTRALVA

SEQ ID NO: 18732 - protein, 9 aa, Artificial Sequence
  Description of Artificial Sequence: Synthetic peptide
  Seed: YQRTRALVR
YGRTRALVR

SEQ ID NO: 18733 - protein, 9 aa, Artificial Sequence
  Description of Artificial Sequence: Synthetic peptide
  Seed: YQRTRALVR
YGRTRALVK

SEQ ID NO: 18734 - protein, 9 aa, Artificial Sequence
  Description of Artificial Sequence: Synthetic peptide
  Seed: YQRTRALVR
YGRTRALVV

SEQ ID NO: 18735 - protein, 9 aa, Artificial Sequence
  Description of Artificial Sequence: Synthetic peptide
  Seed: YQRTRALVR
YHRTRALVK

SEQ ID NO: 18736 - protein, 9 aa, Artificial Sequence
  Description of Artificial Sequence: Synthetic peptide
  Seed: YQRTRALVR
YIRTRALVA

SEQ ID NO: 18737 - protein, 9 aa, Artificial Sequence
  Description of Artificial Sequence: Synthetic peptide
  Seed: YQRTRALVR
YIRTRALVR

SEQ ID NO: 18738 - protein, 8 aa, Artificial Sequence
  Description of Artificial Sequence: Synthetic peptide
  Seed: YQRTRALV
YIRTRALM

SEQ ID NO: 18739 - protein, 8 aa, Artificial Sequence
  Description of Artificial Sequence: Synthetic peptide
  Seed: YQRTRALV
YIRTRALL

SEQ ID NO: 18740 - protein, 8 aa, Artificial Sequence
  Description of Artificial Sequence: Synthetic peptide
  Seed: YQRTRALV
YIRTRALI

SEQ ID NO: 18741 - protein, 10 aa, Artificial Sequence
  Description of Artificial Sequence: Synthetic peptide
  Seed: YIQMCTELKL
YTQMCTELKA

SEQ ID NO: 18742 - protein, 10 aa, Artificial Sequence
  Description of Artificial Sequence: Synthetic peptide
  Seed: YIQMCTELKL
YPQMCTELKV

SEQ ID NO: 18743 - protein, 10 aa, Artificial Sequence
  Description of Artificial Sequence: Synthetic peptide
  Seed: YIQMCTELKL
YSQMCTELKA

SEQ ID NO: 18744 - protein, 10 aa, Artificial Sequence
  Description of Artificial Sequence: Synthetic peptide
  Seed: YIQMCTELKL
YSQMCTELKI

SEQ ID NO: 18745 - protein, 10 aa, Artificial Sequence
  Description of Artificial Sequence: Synthetic peptide
  Seed: YIQMCTELKL
YSQMCTELKL

SEQ ID NO: 18746 - protein, 10 aa, Artificial Sequence
  Description of Artificial Sequence: Synthetic peptide
  Seed: YIQMCTELKL
YSQMCTELKM

SEQ ID NO: 18747 - protein, 10 aa, Artificial Sequence
  Description of Artificial Sequence: Synthetic peptide
  Seed: YIQMCTELKL
YSQMCTELKF

SEQ ID NO: 18748 - protein, 10 aa, Artificial Sequence
  Description of Artificial Sequence: Synthetic peptide
  Seed: YIQMCTELKL
YSQMCTELKW

SEQ ID NO: 18749 - protein, 10 aa, Artificial Sequence
  Description of Artificial Sequence: Synthetic peptide
  Seed: YIQMCTELKL
YSQMCTELKY

SEQ ID NO: 18750 - protein, 10 aa, Artificial Sequence
  Description of Artificial Sequence: Synthetic peptide
  Seed: YIQMCTELKL
YSQMCTELKV

SEQ ID NO: 18751 - protein, 10 aa, Artificial Sequence
  Description of Artificial Sequence: Synthetic peptide
  Seed: YIQMCTELKL
YTQMCTELKI

SEQ ID NO: 18752 - protein, 8 aa, Artificial Sequence
  Description of Artificial Sequence: Synthetic peptide
  Seed: YQRTRALV
YIRTRALA

SEQ ID NO: 18753 - protein, 10 aa, Artificial Sequence
  Description of Artificial Sequence: Synthetic peptide
  Seed: YIQMCTELKL
YTQMCTELKL

SEQ ID NO: 18754 - protein, 10 aa, Artificial Sequence
  Description of Artificial Sequence: Synthetic peptide
  Seed: YIQMCTELKL
YTQMCTELKM

SEQ ID NO: 18755 - protein, 10 aa, Artificial Sequence
  Description of Artificial Sequence: Synthetic peptide
  Seed: YIQMCTELKL
YTQMCTELKF

SEQ ID NO: 18756 - protein, 10 aa, Artificial Sequence
  Description of Artificial Sequence: Synthetic peptide
  Seed: YIQMCTELKL
YTQMCTELKW

SEQ ID NO: 18757 - protein, 10 aa, Artificial Sequence
  Description of Artificial Sequence: Synthetic peptide
  Seed: YIQMCTELKL
YTQMCTELKY

SEQ ID NO: 18758 - protein, 10 aa, Artificial Sequence
  Description of Artificial Sequence: Synthetic peptide
  Seed: YIQMCTELKL
YTQMCTELKV

SEQ ID NO: 18759 - protein, 10 aa, Artificial Sequence
  Description of Artificial Sequence: Synthetic peptide
  Seed: YIQMCTELKL
YWQMCTELKA

SEQ ID NO: 18760 - protein, 10 aa, Artificial Sequence
  Description of Artificial Sequence: Synthetic peptide
  Seed: YIQMCTELKL
YWQMCTELKI

SEQ ID NO: 18761 - protein, 10 aa, Artificial Sequence
  Description of Artificial Sequence: Synthetic peptide
  Seed: YIQMCTELKL
YWQMCTELKL

SEQ ID NO: 18762 - protein, 10 aa, Artificial Sequence
  Description of Artificial Sequence: Synthetic peptide
  Seed: YIQMCTELKL
YPQMCTELKY

SEQ ID NO: 18763 - protein, 10 aa, Artificial Sequence
  Description of Artificial Sequence: Synthetic peptide
  Seed: YIQMCTELKL
YPQMCTELKW

SEQ ID NO: 18764 - protein, 10 aa, Artificial Sequence
  Description of Artificial Sequence: Synthetic peptide
  Seed: YIQMCTELKL
YPQMCTELKF

SEQ ID NO: 18765 - protein, 10 aa, Artificial Sequence
  Description of Artificial Sequence: Synthetic peptide
  Seed: YIQMCTELKL
YPQMCTELKM

SEQ ID NO: 18766 - protein, 10 aa, Artificial Sequence
  Description of Artificial Sequence: Synthetic peptide
  Seed: YIQMCTELKL
YMQMCTELKI

SEQ ID NO: 18767 - protein, 10 aa, Artificial Sequence
  Description of Artificial Sequence: Synthetic peptide
  Seed: YIQMCTELKL
YMQMCTELKL

SEQ ID NO: 18768 - protein, 10 aa, Artificial Sequence
  Description of Artificial Sequence: Synthetic peptide
  Seed: YIQMCTELKL
YMQMCTELKM

SEQ ID NO: 18769 - protein, 10 aa, Artificial Sequence
  Description of Artificial Sequence: Synthetic peptide
  Seed: YIQMCTELKL
YMQMCTELKF

SEQ ID NO: 18770 - protein, 10 aa, Artificial Sequence
  Description of Artificial Sequence: Synthetic peptide
  Seed: YIQMCTELKL
YMQMCTELKT

SEQ ID NO: 18771 - protein, 10 aa, Artificial Sequence
  Description of Artificial Sequence: Synthetic peptide
  Seed: YIQMCTELKL
YMQMCTELKW

SEQ ID NO: 18772 - protein, 10 aa, Artificial Sequence
  Description of Artificial Sequence: Synthetic peptide
  Seed: YIQMCTELKL
YMQMCTELKY

SEQ ID NO: 18773 - protein, 10 aa, Artificial Sequence
  Description of Artificial Sequence: Synthetic peptide
  Seed: YIQMCTELKL
YMQMCTELKV

SEQ ID NO: 18774 - protein, 10 aa, Artificial Sequence
  Description of Artificial Sequence: Synthetic peptide
  Seed: YIQMCTELKL
YFQMCTELKA

SEQ ID NO: 18775 - protein, 10 aa, Artificial Sequence
  Description of Artificial Sequence: Synthetic peptide
  Seed: YIQMCTELKL
YFQMCTELKI

SEQ ID NO: 18776 - protein, 10 aa, Artificial Sequence
  Description of Artificial Sequence: Synthetic peptide
  Seed: YIQMCTELKL
YFQMCTELKL

SEQ ID NO: 18777 - protein, 10 aa, Artificial Sequence
  Description of Artificial Sequence: Synthetic peptide
  Seed: YIQMCTELKL
YFQMCTELKM

SEQ ID NO: 18778 - protein, 10 aa, Artificial Sequence
  Description of Artificial Sequence: Synthetic peptide
  Seed: YIQMCTELKL
YFQMCTELKF

SEQ ID NO: 18779 - protein, 10 aa, Artificial Sequence
  Description of Artificial Sequence: Synthetic peptide
  Seed: YIQMCTELKL
YFQMCTELKW

SEQ ID NO: 18780 - protein, 10 aa, Artificial Sequence
  Description of Artificial Sequence: Synthetic peptide
  Seed: YIQMCTELKL
YFQMCTELKY

SEQ ID NO: 18781 - protein, 10 aa, Artificial Sequence
  Description of Artificial Sequence: Synthetic peptide
  Seed: YIQMCTELKL
YFQMCTELKV

SEQ ID NO: 18782 - protein, 10 aa, Artificial Sequence
  Description of Artificial Sequence: Synthetic peptide
  Seed: YIQMCTELKL
YPQMCTELKA

SEQ ID NO: 18783 - protein, 10 aa, Artificial Sequence
  Description of Artificial Sequence: Synthetic peptide
  Seed: YIQMCTELKL
YPQMCTELKI

SEQ ID NO: 18784 - protein, 10 aa, Artificial Sequence
  Description of Artificial Sequence: Synthetic peptide
  Seed: YIQMCTELKL
YPQMCTELKL

SEQ ID NO: 18785 - protein, 10 aa, Artificial Sequence
  Description of Artificial Sequence: Synthetic peptide
  Seed: YIQMCTELKL
YWQMCTELKM

SEQ ID NO: 18786 - protein, 10 aa, Artificial Sequence
  Description of Artificial Sequence: Synthetic peptide
  Seed: YIQMCTELKL
YWQMCTELKF

SEQ ID NO: 18787 - protein, 10 aa, Artificial Sequence
  Description of Artificial Sequence: Synthetic peptide
  Seed: YIQMCTELKL
YWQMCTELKW

SEQ ID NO: 18788 - protein, 9 aa, Artificial Sequence
  Description of Artificial Sequence: Synthetic peptide
  Seed: YKRVDGKWM
YYRVDGKWM

SEQ ID NO: 18789 - protein, 8 aa, Artificial Sequence
  Description of Artificial Sequence: Synthetic peptide
  Seed: YQRTRALV
YARTRALI

SEQ ID NO: 18790 - protein, 8 aa, Artificial Sequence
  Description of Artificial Sequence: Synthetic peptide
  Seed: YQRTRALV
YARTRALL

SEQ ID NO: 18791 - protein, 8 aa, Artificial Sequence
  Description of Artificial Sequence: Synthetic peptide
  Seed: YQRTRALV
YARTRALM

SEQ ID NO: 18792 - protein, 8 aa, Artificial Sequence
  Description of Artificial Sequence: Synthetic peptide
  Seed: YQRTRALV
YARTRALF

SEQ ID NO: 18793 - protein, 8 aa, Artificial Sequence
  Description of Artificial Sequence: Synthetic peptide
  Seed: YQRTRALV
YARTRALV

SEQ ID NO: 18794 - protein, 8 aa, Artificial Sequence
  Description of Artificial Sequence: Synthetic peptide
  Seed: YQRTRALV
YRRTRALL

SEQ ID NO: 18795 - protein, 8 aa, Artificial Sequence
  Description of Artificial Sequence: Synthetic peptide
  Seed: YQRTRALV
YRRTRALM

SEQ ID NO: 18796 - protein, 8 aa, Artificial Sequence
  Description of Artificial Sequence: Synthetic peptide
  Seed: YQRTRALV
YNRTRALI

SEQ ID NO: 18797 - protein, 8 aa, Artificial Sequence
  Description of Artificial Sequence: Synthetic peptide
  Seed: YQRTRALV
YNRTRALL

SEQ ID NO: 18798 - protein, 8 aa, Artificial Sequence
  Description of Artificial Sequence: Synthetic peptide
  Seed: YQRTRALV
YNRTRALM

SEQ ID NO: 18799 - protein, 8 aa, Artificial Sequence
  Description of Artificial Sequence: Synthetic peptide
  Seed: YQRTRALV
YNRTRALV

SEQ ID NO: 18800 - protein, 8 aa, Artificial Sequence
  Description of Artificial Sequence: Synthetic peptide
  Seed: YQRTRALV
YCRTRALL

SEQ ID NO: 18801 - protein, 8 aa, Artificial Sequence
  Description of Artificial Sequence: Synthetic peptide
  Seed: YQRTRALV
YQRTRALI

SEQ ID NO: 18802 - protein, 8 aa, Artificial Sequence
  Description of Artificial Sequence: Synthetic peptide
  Seed: YQRTRALV
YQRTRALL

SEQ ID NO: 18803 - protein, 8 aa, Artificial Sequence
  Description of Artificial Sequence: Synthetic peptide
  Seed: YQRTRALV
YQRTRALM

SEQ ID NO: 18804 - protein, 8 aa, Artificial Sequence
  Description of Artificial Sequence: Synthetic peptide
  Seed: YQRTRALV
YQRTRALF

SEQ ID NO: 18805 - protein, 8 aa, Artificial Sequence
  Description of Artificial Sequence: Synthetic peptide
  Seed: YQRTRALV
YGRTRALI

SEQ ID NO: 18806 - protein, 8 aa, Artificial Sequence
  Description of Artificial Sequence: Synthetic peptide
  Seed: YQRTRALV
YGRTRALL

SEQ ID NO: 18807 - protein, 8 aa, Artificial Sequence
  Description of Artificial Sequence: Synthetic peptide
  Seed: YQRTRALV
YGRTRALM

SEQ ID NO: 18808 - protein, 8 aa, Artificial Sequence
  Description of Artificial Sequence: Synthetic peptide
  Seed: YQRTRALV
YARTRALA

SEQ ID NO: 18809 - protein, 9 aa, Artificial Sequence
  Description of Artificial Sequence: Synthetic peptide
  Seed: YKRVDGKWM
YYRVDGKWL

SEQ ID NO: 18810 - protein, 10 aa, Artificial Sequence
  Description of Artificial Sequence: Synthetic peptide
  Seed: YIQMCTELKL
YWQMCTELKY

SEQ ID NO: 18811 - protein, 9 aa, Artificial Sequence
  Description of Artificial Sequence: Synthetic peptide
  Seed: YKRVDGKWM
YRRVDGKWF

SEQ ID NO: 18812 - protein, 10 aa, Artificial Sequence
  Description of Artificial Sequence: Synthetic peptide
  Seed: YIQMCTELKL
YWQMCTELKV

SEQ ID NO: 18813 - protein, 10 aa, Artificial Sequence
  Description of Artificial Sequence: Synthetic peptide
  Seed: YIQMCTELKL
YYQMCTELKA

SEQ ID NO: 18814 - protein, 10 aa, Artificial Sequence
  Description of Artificial Sequence: Synthetic peptide
  Seed: YIQMCTELKL
YYQMCTELKI

SEQ ID NO: 18815 - protein, 10 aa, Artificial Sequence
  Description of Artificial Sequence: Synthetic peptide
  Seed: YIQMCTELKL
YYQMCTELKL

SEQ ID NO: 18816 - protein, 10 aa, Artificial Sequence
  Description of Artificial Sequence: Synthetic peptide
  Seed: YIQMCTELKL
YYQMCTELKM

SEQ ID NO: 18817 - protein, 10 aa, Artificial Sequence
  Description of Artificial Sequence: Synthetic peptide
  Seed: YIQMCTELKL
YYQMCTELKF

SEQ ID NO: 18818 - protein, 10 aa, Artificial Sequence
  Description of Artificial Sequence: Synthetic peptide
  Seed: YIQMCTELKL
YYQMCTELKW

SEQ ID NO: 18819 - protein, 10 aa, Artificial Sequence
  Description of Artificial Sequence: Synthetic peptide
  Seed: YIQMCTELKL
YYQMCTELKY

SEQ ID NO: 18820 - protein, 10 aa, Artificial Sequence
  Description of Artificial Sequence: Synthetic peptide
  Seed: YIQMCTELKL
YYQMCTELKV

SEQ ID NO: 18821 - protein, 10 aa, Artificial Sequence
  Description of Artificial Sequence: Synthetic peptide
  Seed: YIQMCTELKL
YVQMCTELKA

SEQ ID NO: 18822 - protein, 10 aa, Artificial Sequence
  Description of Artificial Sequence: Synthetic peptide
  Seed: YIQMCTELKL
YVQMCTELKI

SEQ ID NO: 18823 - protein, 10 aa, Artificial Sequence
  Description of Artificial Sequence: Synthetic peptide
  Seed: YIQMCTELKL
YVQMCTELKM

SEQ ID NO: 18824 - protein, 10 aa, Artificial Sequence
  Description of Artificial Sequence: Synthetic peptide
  Seed: YIQMCTELKL
YVQMCTELKF

SEQ ID NO: 18825 - protein, 10 aa, Artificial Sequence
  Description of Artificial Sequence: Synthetic peptide
  Seed: YIQMCTELKL
YVQMCTELKW

SEQ ID NO: 18826 - protein, 10 aa, Artificial Sequence
  Description of Artificial Sequence: Synthetic peptide
  Seed: YIQMCTELKL
YVQMCTELKY

SEQ ID NO: 18827 - protein, 10 aa, Artificial Sequence
  Description of Artificial Sequence: Synthetic peptide
  Seed: YIQMCTELKL
YVQMCTELKV

SEQ ID NO: 18828 - protein, 9 aa, Artificial Sequence
  Description of Artificial Sequence: Synthetic peptide
  Seed: YKRVDGKWM
YRRVDGKWL

SEQ ID NO: 18829 - protein, 10 aa, Artificial Sequence
  Description of Artificial Sequence: Synthetic peptide
  Seed: WMACNSAAFE
WQACNSAAFT

SEQ ID NO: 18830 - protein, 10 aa, Artificial Sequence
  Description of Artificial Sequence: Synthetic peptide
  Seed: WMACNSAAFE
WQACNSAAFP

SEQ ID NO: 18831 - protein, 9 aa, Artificial Sequence
  Description of Artificial Sequence: Synthetic peptide
  Seed: VSFRGRGVF
VMFRGRGVW

SEQ ID NO: 18832 - protein, 9 aa, Artificial Sequence
  Description of Artificial Sequence: Synthetic peptide
  Seed: VWMACNSAA
VFMACNSAA

SEQ ID NO: 18833 - protein, 9 aa, Artificial Sequence
  Description of Artificial Sequence: Synthetic peptide
  Seed: VWMACNSAA
VKMACNSAM

SEQ ID NO: 18834 - protein, 9 aa, Artificial Sequence
  Description of Artificial Sequence: Synthetic peptide
  Seed: VWMACNSAA
VKMACNSAF

SEQ ID NO: 18835 - protein, 9 aa, Artificial Sequence
  Description of Artificial Sequence: Synthetic peptide
  Seed: VWMACNSAA
VMMACNSAI

SEQ ID NO: 18836 - protein, 9 aa, Artificial Sequence
  Description of Artificial Sequence: Synthetic peptide
  Seed: VWMACNSAA
VMMACNSAL

SEQ ID NO: 18837 - protein, 9 aa, Artificial Sequence
  Description of Artificial Sequence: Synthetic peptide
  Seed: VWMACNSAA
VMMACNSAM

SEQ ID NO: 18838 - protein, 9 aa, Artificial Sequence
  Description of Artificial Sequence: Synthetic peptide
  Seed: VWMACNSAA
VMMACNSAF

SEQ ID NO: 18839 - protein, 9 aa, Artificial Sequence
  Description of Artificial Sequence: Synthetic peptide
  Seed: VWMACNSAA
VMMACNSAW

SEQ ID NO: 18840 - protein, 9 aa, Artificial Sequence
  Description of Artificial Sequence: Synthetic peptide
  Seed: VWMACNSAA
VMMACNSAY

SEQ ID NO: 18841 - protein, 9 aa, Artificial Sequence
  Description of Artificial Sequence: Synthetic peptide
  Seed: VWMACNSAA
VMMACNSAV

SEQ ID NO: 18842 - protein, 9 aa, Artificial Sequence
  Description of Artificial Sequence: Synthetic peptide
  Seed: VWMACNSAA
VFMACNSAC

SEQ ID NO: 18843 - protein, 9 aa, Artificial Sequence
  Description of Artificial Sequence: Synthetic peptide
  Seed: VWMACNSAA
VPMACNSAM

SEQ ID NO: 18844 - protein, 9 aa, Artificial Sequence
  Description of Artificial Sequence: Synthetic peptide
  Seed: VWMACNSAA
VFMACNSAH

SEQ ID NO: 18845 - protein, 9 aa, Artificial Sequence
  Description of Artificial Sequence: Synthetic peptide
  Seed: VWMACNSAA
VFMACNSAI

SEQ ID NO: 18846 - protein, 9 aa, Artificial Sequence
  Description of Artificial Sequence: Synthetic peptide
  Seed: VWMACNSAA
VFMACNSAL

SEQ ID NO: 18847 - protein, 9 aa, Artificial Sequence
  Description of Artificial Sequence: Synthetic peptide
  Seed: VWMACNSAA
VFMACNSAM

SEQ ID NO: 18848 - protein, 9 aa, Artificial Sequence
  Description of Artificial Sequence: Synthetic peptide
  Seed: VWMACNSAA
VFMACNSAF

SEQ ID NO: 18849 - protein, 9 aa, Artificial Sequence
  Description of Artificial Sequence: Synthetic peptide
  Seed: VWMACNSAA
VFMACNSAT

SEQ ID NO: 18850 - protein, 9 aa, Artificial Sequence
  Description of Artificial Sequence: Synthetic peptide
  Seed: VWMACNSAA
VFMACNSAW

SEQ ID NO: 18851 - protein, 9 aa, Artificial Sequence
  Description of Artificial Sequence: Synthetic peptide
  Seed: VWMACNSAA
VFMACNSAY

SEQ ID NO: 18852 - protein, 9 aa, Artificial Sequence
  Description of Artificial Sequence: Synthetic peptide
  Seed: VWMACNSAA
VFMACNSAV

SEQ ID NO: 18853 - protein, 9 aa, Artificial Sequence
  Description of Artificial Sequence: Synthetic peptide
  Seed: VWMACNSAA
VLMACNSAY

SEQ ID NO: 18854 - protein, 9 aa, Artificial Sequence
  Description of Artificial Sequence: Synthetic peptide
  Seed: VWMACNSAA
VLMACNSAF

SEQ ID NO: 18855 - protein, 9 aa, Artificial Sequence
  Description of Artificial Sequence: Synthetic peptide
  Seed: VWMACNSAA
VLMACNSAM

SEQ ID NO: 18856 - protein, 9 aa, Artificial Sequence
  Description of Artificial Sequence: Synthetic peptide
  Seed: VWMACNSAA
VLMACNSAL

SEQ ID NO: 18857 - protein, 9 aa, Artificial Sequence
  Description of Artificial Sequence: Synthetic peptide
  Seed: VWMACNSAA
VNMACNSAM

SEQ ID NO: 18858 - protein, 9 aa, Artificial Sequence
  Description of Artificial Sequence: Synthetic peptide
  Seed: VWMACNSAA
VQMACNSAL

SEQ ID NO: 18859 - protein, 9 aa, Artificial Sequence
  Description of Artificial Sequence: Synthetic peptide
  Seed: VWMACNSAA
VQMACNSAM

SEQ ID NO: 18860 - protein, 9 aa, Artificial Sequence
  Description of Artificial Sequence: Synthetic peptide
  Seed: VWMACNSAA
VQMACNSAF

SEQ ID NO: 18861 - protein, 9 aa, Artificial Sequence
  Description of Artificial Sequence: Synthetic peptide
  Seed: VWMACNSAA
VQMACNSAY

SEQ ID NO: 18862 - protein, 9 aa, Artificial Sequence
  Description of Artificial Sequence: Synthetic peptide
  Seed: VWMACNSAA
VGMACNSAL

SEQ ID NO: 18863 - protein, 9 aa, Artificial Sequence
  Description of Artificial Sequence: Synthetic peptide
  Seed: VWMACNSAA
VGMACNSAM

SEQ ID NO: 18864 - protein, 9 aa, Artificial Sequence
  Description of Artificial Sequence: Synthetic peptide
  Seed: VWMACNSAA
VGMACNSAF

SEQ ID NO: 18865 - protein, 9 aa, Artificial Sequence
  Description of Artificial Sequence: Synthetic peptide
  Seed: VWMACNSAA
VGMACNSAY

SEQ ID NO: 18866 - protein, 9 aa, Artificial Sequence
  Description of Artificial Sequence: Synthetic peptide
  Seed: VWMACNSAA
VHMACNSAI

SEQ ID NO: 18867 - protein, 9 aa, Artificial Sequence
  Description of Artificial Sequence: Synthetic peptide
  Seed: VWMACNSAA
VHMACNSAL

SEQ ID NO: 18868 - protein, 9 aa, Artificial Sequence
  Description of Artificial Sequence: Synthetic peptide
  Seed: VWMACNSAA
VHMACNSAM

SEQ ID NO: 18869 - protein, 9 aa, Artificial Sequence
  Description of Artificial Sequence: Synthetic peptide
  Seed: VWMACNSAA
VHMACNSAF

SEQ ID NO: 18870 - protein, 9 aa, Artificial Sequence
  Description of Artificial Sequence: Synthetic peptide
  Seed: VWMACNSAA
VHMACNSAY

SEQ ID NO: 18871 - protein, 9 aa, Artificial Sequence
  Description of Artificial Sequence: Synthetic peptide
  Seed: VWMACNSAA
VHMACNSAV

SEQ ID NO: 18872 - protein, 9 aa, Artificial Sequence
  Description of Artificial Sequence: Synthetic peptide
  Seed: VWMACNSAA
VIMACNSAL

SEQ ID NO: 18873 - protein, 9 aa, Artificial Sequence
  Description of Artificial Sequence: Synthetic peptide
  Seed: VWMACNSAA
VIMACNSAM

SEQ ID NO: 18874 - protein, 9 aa, Artificial Sequence
  Description of Artificial Sequence: Synthetic peptide
  Seed: VWMACNSAA
VIMACNSAF

SEQ ID NO: 18875 - protein, 9 aa, Artificial Sequence
  Description of Artificial Sequence: Synthetic peptide
  Seed: VWMACNSAA
VIMACNSAY

SEQ ID NO: 18876 - protein, 9 aa, Artificial Sequence
  Description of Artificial Sequence: Synthetic peptide
  Seed: VWMACNSAA
VPMACNSAL

SEQ ID NO: 18877 - protein, 9 aa, Artificial Sequence
  Description of Artificial Sequence: Synthetic peptide
  Seed: VWMACNSAA
VPMACNSAF

SEQ ID NO: 18878 - protein, 9 aa, Artificial Sequence
  Description of Artificial Sequence: Synthetic peptide
  Seed: VWMACNSAA
VRMACNSAF

SEQ ID NO: 18879 - protein, 9 aa, Artificial Sequence
  Description of Artificial Sequence: Synthetic peptide
  Seed: VWMACNSAA
VVMACNSAM

SEQ ID NO: 18880 - protein, 9 aa, Artificial Sequence
  Description of Artificial Sequence: Synthetic peptide
  Seed: VWMACNSAA
VYMACNSAM

SEQ ID NO: 18881 - protein, 9 aa, Artificial Sequence
  Description of Artificial Sequence: Synthetic peptide
  Seed: VWMACNSAA
VYMACNSAF

SEQ ID NO: 18882 - protein, 9 aa, Artificial Sequence
  Description of Artificial Sequence: Synthetic peptide
  Seed: VWMACNSAA
VYMACNSAS

SEQ ID NO: 18883 - protein, 9 aa, Artificial Sequence
  Description of Artificial Sequence: Synthetic peptide
  Seed: VWMACNSAA
VYMACNSAT

SEQ ID NO: 18884 - protein, 9 aa, Artificial Sequence
  Description of Artificial Sequence: Synthetic peptide
  Seed: VWMACNSAA
VYMACNSAW

SEQ ID NO: 18885 - protein, 9 aa, Artificial Sequence
  Description of Artificial Sequence: Synthetic peptide
  Seed: VWMACNSAA
VYMACNSAY

SEQ ID NO: 18886 - protein, 9 aa, Artificial Sequence
  Description of Artificial Sequence: Synthetic peptide
  Seed: VWMACNSAA
VYMACNSAV

SEQ ID NO: 18887 - protein, 9 aa, Artificial Sequence
  Description of Artificial Sequence: Synthetic peptide
  Seed: VWMACNSAA
VVMACNSAI

SEQ ID NO: 18888 - protein, 9 aa, Artificial Sequence
  Description of Artificial Sequence: Synthetic peptide
  Seed: VWMACNSAA
VVMACNSAL

SEQ ID NO: 18889 - protein, 9 aa, Artificial Sequence
  Description of Artificial Sequence: Synthetic peptide
  Seed: VWMACNSAA
VVMACNSAF

SEQ ID NO: 18890 - protein, 9 aa, Artificial Sequence
  Description of Artificial Sequence: Synthetic peptide
  Seed: VWMACNSAA
VPMACNSAY

SEQ ID NO: 18891 - protein, 9 aa, Artificial Sequence
  Description of Artificial Sequence: Synthetic peptide
  Seed: VWMACNSAA
VVMACNSAY

SEQ ID NO: 18892 - protein, 10 aa, Artificial Sequence
  Description of Artificial Sequence: Synthetic peptide
  Seed: VWMACNSAAF
VAMACNSAAH

SEQ ID NO: 18893 - protein, 10 aa, Artificial Sequence
  Description of Artificial Sequence: Synthetic peptide
  Seed: VWMACNSAAF
VAMACNSAAL

SEQ ID NO: 18894 - protein, 10 aa, Artificial Sequence
  Description of Artificial Sequence: Synthetic peptide
  Seed: VWMACNSAAF
VAMACNSAAM

SEQ ID NO: 18895 - protein, 10 aa, Artificial Sequence
  Description of Artificial Sequence: Synthetic peptide
  Seed: VWMACNSAAF
VAMACNSAAF

SEQ ID NO: 18896 - protein, 10 aa, Artificial Sequence
  Description of Artificial Sequence: Synthetic peptide
  Seed: VWMACNSAAF
VAMACNSAAW

SEQ ID NO: 18897 - protein, 10 aa, Artificial Sequence
  Description of Artificial Sequence: Synthetic peptide
  Seed: VWMACNSAAF
VAMACNSAAY

SEQ ID NO: 18898 - protein, 10 aa, Artificial Sequence
  Description of Artificial Sequence: Synthetic peptide
  Seed: VWMACNSAAF
VRMACNSAAH

SEQ ID NO: 18899 - protein, 10 aa, Artificial Sequence
  Description of Artificial Sequence: Synthetic peptide
  Seed: VWMACNSAAF
VRMACNSAAI

SEQ ID NO: 18900 - protein, 9 aa, Artificial Sequence
  Description of Artificial Sequence: Synthetic peptide
  Seed: VWMACNSAA
VYMACNSAK

SEQ ID NO: 18901 - protein, 9 aa, Artificial Sequence
  Description of Artificial Sequence: Synthetic peptide
  Seed: VWMACNSAA
VYMACNSAL

SEQ ID NO: 18902 - protein, 9 aa, Artificial Sequence
  Description of Artificial Sequence: Synthetic peptide
  Seed: VWMACNSAA
VYMACNSAI

SEQ ID NO: 18903 - protein, 9 aa, Artificial Sequence
  Description of Artificial Sequence: Synthetic peptide
  Seed: VWMACNSAA
VYMACNSAH

SEQ ID NO: 18904 - protein, 9 aa, Artificial Sequence
  Description of Artificial Sequence: Synthetic peptide
  Seed: VWMACNSAA
VSMACNSAL

SEQ ID NO: 18905 - protein, 9 aa, Artificial Sequence
  Description of Artificial Sequence: Synthetic peptide
  Seed: VWMACNSAA
VSMACNSAM

SEQ ID NO: 18906 - protein, 9 aa, Artificial Sequence
  Description of Artificial Sequence: Synthetic peptide
  Seed: VWMACNSAA
VSMACNSAF

SEQ ID NO: 18907 - protein, 9 aa, Artificial Sequence
  Description of Artificial Sequence: Synthetic peptide
  Seed: VWMACNSAA
VSMACNSAY

SEQ ID NO: 18908 - protein, 9 aa, Artificial Sequence
  Description of Artificial Sequence: Synthetic peptide
  Seed: VWMACNSAA
VTMACNSAL

SEQ ID NO: 18909 - protein, 9 aa, Artificial Sequence
  Description of Artificial Sequence: Synthetic peptide
  Seed: VWMACNSAA
VTMACNSAM

SEQ ID NO: 18910 - protein, 9 aa, Artificial Sequence
  Description of Artificial Sequence: Synthetic peptide
  Seed: VWMACNSAA
VTMACNSAF

SEQ ID NO: 18911 - protein, 9 aa, Artificial Sequence
  Description of Artificial Sequence: Synthetic peptide
  Seed: VWMACNSAA
VTMACNSAY

SEQ ID NO: 18912 - protein, 9 aa, Artificial Sequence
  Description of Artificial Sequence: Synthetic peptide
  Seed: VWMACNSAA
VWMACNSAI

SEQ ID NO: 18913 - protein, 9 aa, Artificial Sequence
  Description of Artificial Sequence: Synthetic peptide
  Seed: VWMACNSAA
VWMACNSAL

SEQ ID NO: 18914 - protein, 9 aa, Artificial Sequence
  Description of Artificial Sequence: Synthetic peptide
  Seed: VWMACNSAA
VWMACNSAM

SEQ ID NO: 18915 - protein, 9 aa, Artificial Sequence
  Description of Artificial Sequence: Synthetic peptide
  Seed: VWMACNSAA
VWMACNSAF

SEQ ID NO: 18916 - protein, 9 aa, Artificial Sequence
  Description of Artificial Sequence: Synthetic peptide
  Seed: VWMACNSAA
VWMACNSAW

SEQ ID NO: 18917 - protein, 9 aa, Artificial Sequence
  Description of Artificial Sequence: Synthetic peptide
  Seed: VWMACNSAA
VWMACNSAY

SEQ ID NO: 18918 - protein, 9 aa, Artificial Sequence
  Description of Artificial Sequence: Synthetic peptide
  Seed: VWMACNSAA
VWMACNSAV

SEQ ID NO: 18919 - protein, 9 aa, Artificial Sequence
  Description of Artificial Sequence: Synthetic peptide
  Seed: VWMACNSAA
VYMACNSAA

SEQ ID NO: 18920 - protein, 9 aa, Artificial Sequence
  Description of Artificial Sequence: Synthetic peptide
  Seed: VWMACNSAA
VYMACNSAC

SEQ ID NO: 18921 - protein, 9 aa, Artificial Sequence
  Description of Artificial Sequence: Synthetic peptide
  Seed: VWMACNSAA
VYMACNSAQ

SEQ ID NO: 18922 - protein, 9 aa, Artificial Sequence
  Description of Artificial Sequence: Synthetic peptide
  Seed: VWMACNSAA
VYMACNSAG

SEQ ID NO: 18923 - protein, 9 aa, Artificial Sequence
  Description of Artificial Sequence: Synthetic peptide
  Seed: VWMACNSAA
VRMACNSAY

SEQ ID NO: 18924 - protein, 9 aa, Artificial Sequence
  Description of Artificial Sequence: Synthetic peptide
  Seed: VWMACNSAA
VRMACNSAM

SEQ ID NO: 18925 - protein, 10 aa, Artificial Sequence
  Description of Artificial Sequence: Synthetic peptide
  Seed: VYGPAVSSGY
VFGPAVSSGY

SEQ ID NO: 18926 - protein, 10 aa, Artificial Sequence
  Description of Artificial Sequence: Synthetic peptide
  Seed: VWMACHSAAF
VMMACHSAAW

SEQ ID NO: 18927 - protein, 10 aa, Artificial Sequence
  Description of Artificial Sequence: Synthetic peptide
  Seed: VWMACHSAAF
VKMACHSAAW

SEQ ID NO: 18928 - protein, 10 aa, Artificial Sequence
  Description of Artificial Sequence: Synthetic peptide
  Seed: VWMACHSAAF
VKMACHSAAY

SEQ ID NO: 18929 - protein, 10 aa, Artificial Sequence
  Description of Artificial Sequence: Synthetic peptide
  Seed: VWMACHSAAF
VKMACHSAAV

SEQ ID NO: 18930 - protein, 10 aa, Artificial Sequence
  Description of Artificial Sequence: Synthetic peptide
  Seed: VWMACHSAAF
VMMACHSAAA

SEQ ID NO: 18931 - protein, 10 aa, Artificial Sequence
  Description of Artificial Sequence: Synthetic peptide
  Seed: VWMACHSAAF
VMMACHSAAH

SEQ ID NO: 18932 - protein, 10 aa, Artificial Sequence
  Description of Artificial Sequence: Synthetic peptide
  Seed: VWMACHSAAF
VMMACHSAAI

SEQ ID NO: 18933 - protein, 10 aa, Artificial Sequence
  Description of Artificial Sequence: Synthetic peptide
  Seed: VWMACHSAAF
VMMACHSAAL

SEQ ID NO: 18934 - protein, 10 aa, Artificial Sequence
  Description of Artificial Sequence: Synthetic peptide
  Seed: VWMACHSAAF
VMMACHSAAM

SEQ ID NO: 18935 - protein, 10 aa, Artificial Sequence
  Description of Artificial Sequence: Synthetic peptide
  Seed: VWMACHSAAF
VMMACHSAAF

SEQ ID NO: 18936 - protein, 10 aa, Artificial Sequence
  Description of Artificial Sequence: Synthetic peptide
  Seed: VWMACHSAAF
VMMACHSAAY

SEQ ID NO: 18937 - protein, 10 aa, Artificial Sequence
  Description of Artificial Sequence: Synthetic peptide
  Seed: VWMACHSAAF
VPMACHSAAF

SEQ ID NO: 18938 - protein, 10 aa, Artificial Sequence
  Description of Artificial Sequence: Synthetic peptide
  Seed: VWMACHSAAF
VMMACHSAAV

SEQ ID NO: 18939 - protein, 10 aa, Artificial Sequence
  Description of Artificial Sequence: Synthetic peptide
  Seed: VWMACHSAAF
VFMACHSAAI

SEQ ID NO: 18940 - protein, 10 aa, Artificial Sequence
  Description of Artificial Sequence: Synthetic peptide
  Seed: VWMACHSAAF
VFMACHSAAL

SEQ ID NO: 18941 - protein, 10 aa, Artificial Sequence
  Description of Artificial Sequence: Synthetic peptide
  Seed: VWMACHSAAF
VFMACHSAAM

SEQ ID NO: 18942 - protein, 10 aa, Artificial Sequence
  Description of Artificial Sequence: Synthetic peptide
  Seed: VWMACHSAAF
VFMACHSAAF

SEQ ID NO: 18943 - protein, 10 aa, Artificial Sequence
  Description of Artificial Sequence: Synthetic peptide
  Seed: VWMACHSAAF
VFMACHSAAW

SEQ ID NO: 18944 - protein, 10 aa, Artificial Sequence
  Description of Artificial Sequence: Synthetic peptide
  Seed: VWMACHSAAF
VFMACHSAAY

SEQ ID NO: 18945 - protein, 10 aa, Artificial Sequence
  Description of Artificial Sequence: Synthetic peptide
  Seed: VWMACHSAAF
VFMACHSAAV

SEQ ID NO: 18946 - protein, 10 aa, Artificial Sequence
  Description of Artificial Sequence: Synthetic peptide
  Seed: VWMACHSAAF
VPMACHSAAL

SEQ ID NO: 18947 - protein, 10 aa, Artificial Sequence
  Description of Artificial Sequence: Synthetic peptide
  Seed: VWMACHSAAF
VKMACHSAAF

SEQ ID NO: 18948 - protein, 10 aa, Artificial Sequence
  Description of Artificial Sequence: Synthetic peptide
  Seed: VWMACHSAAF
VKMACHSAAM

SEQ ID NO: 18949 - protein, 10 aa, Artificial Sequence
  Description of Artificial Sequence: Synthetic peptide
  Seed: VWMACHSAAF
VKMACHSAAL

SEQ ID NO: 18950 - protein, 10 aa, Artificial Sequence
  Description of Artificial Sequence: Synthetic peptide
  Seed: VWMACHSAAF
VKMACHSAAI

SEQ ID NO: 18951 - protein, 10 aa, Artificial Sequence
  Description of Artificial Sequence: Synthetic peptide
  Seed: VWMACHSAAF
VHMACHSAAW

SEQ ID NO: 18952 - protein, 10 aa, Artificial Sequence
  Description of Artificial Sequence: Synthetic peptide
  Seed: VWMACHSAAF
VHMACHSAAY

SEQ ID NO: 18953 - protein, 10 aa, Artificial Sequence
  Description of Artificial Sequence: Synthetic peptide
  Seed: VWMACHSAAF
VHMACHSAAV

SEQ ID NO: 18954 - protein, 10 aa, Artificial Sequence
  Description of Artificial Sequence: Synthetic peptide
  Seed: VWMACHSAAF
VIMACHSAAH

SEQ ID NO: 18955 - protein, 10 aa, Artificial Sequence
  Description of Artificial Sequence: Synthetic peptide
  Seed: VWMACHSAAF
VIMACHSAAI

SEQ ID NO: 18956 - protein, 10 aa, Artificial Sequence
  Description of Artificial Sequence: Synthetic peptide
  Seed: VWMACHSAAF
VIMACHSAAL

SEQ ID NO: 18957 - protein, 10 aa, Artificial Sequence
  Description of Artificial Sequence: Synthetic peptide
  Seed: VWMACHSAAF
VIMACHSAAM

SEQ ID NO: 18958 - protein, 10 aa, Artificial Sequence
  Description of Artificial Sequence: Synthetic peptide
  Seed: VWMACHSAAF
VIMACHSAAF

SEQ ID NO: 18959 - protein, 10 aa, Artificial Sequence
  Description of Artificial Sequence: Synthetic peptide
  Seed: VWMACHSAAF
VIMACHSAAW

SEQ ID NO: 18960 - protein, 10 aa, Artificial Sequence
  Description of Artificial Sequence: Synthetic peptide
  Seed: VWMACHSAAF
VIMACHSAAY

SEQ ID NO: 18961 - protein, 10 aa, Artificial Sequence
  Description of Artificial Sequence: Synthetic peptide
  Seed: VWMACHSAAF
VLMACHSAAH

SEQ ID NO: 18962 - protein, 10 aa, Artificial Sequence
  Description of Artificial Sequence: Synthetic peptide
  Seed: VWMACHSAAF
VLMACHSAAI

SEQ ID NO: 18963 - protein, 10 aa, Artificial Sequence
  Description of Artificial Sequence: Synthetic peptide
  Seed: VWMACHSAAF
VLMACHSAAL

SEQ ID NO: 18964 - protein, 10 aa, Artificial Sequence
  Description of Artificial Sequence: Synthetic peptide
  Seed: VWMACHSAAF
VLMACHSAAM

SEQ ID NO: 18965 - protein, 10 aa, Artificial Sequence
  Description of Artificial Sequence: Synthetic peptide
  Seed: VWMACHSAAF
VLMACHSAAF

SEQ ID NO: 18966 - protein, 10 aa, Artificial Sequence
  Description of Artificial Sequence: Synthetic peptide
  Seed: VWMACHSAAF
VLMACHSAAW

SEQ ID NO: 18967 - protein, 10 aa, Artificial Sequence
  Description of Artificial Sequence: Synthetic peptide
  Seed: VWMACHSAAF
VLMACHSAAY

SEQ ID NO: 18968 - protein, 10 aa, Artificial Sequence
  Description of Artificial Sequence: Synthetic peptide
  Seed: VWMACHSAAF
VKMACHSAAA

SEQ ID NO: 18969 - protein, 10 aa, Artificial Sequence
  Description of Artificial Sequence: Synthetic peptide
  Seed: VWMACHSAAF
VKMACHSAAH

SEQ ID NO: 18970 - protein, 10 aa, Artificial Sequence
  Description of Artificial Sequence: Synthetic peptide
  Seed: VWMACHSAAF
VPMACHSAAM

SEQ ID NO: 18971 - protein, 10 aa, Artificial Sequence
  Description of Artificial Sequence: Synthetic peptide
  Seed: VWMACHSAAF
VPMACHSAAW

SEQ ID NO: 18972 - protein, 9 aa, Artificial Sequence
  Description of Artificial Sequence: Synthetic peptide
  Seed: VWMACNSAA
VRMACNSAL

SEQ ID NO: 18973 - protein, 10 aa, Artificial Sequence
  Description of Artificial Sequence: Synthetic peptide
  Seed: VWMACHSAAF
VVMACHSAAF

SEQ ID NO: 18974 - protein, 10 aa, Artificial Sequence
  Description of Artificial Sequence: Synthetic peptide
  Seed: VWMACHSAAF
VYMACHSAAM

SEQ ID NO: 18975 - protein, 10 aa, Artificial Sequence
  Description of Artificial Sequence: Synthetic peptide
  Seed: VWMACHSAAF
VYMACHSAAF

SEQ ID NO: 18976 - protein, 10 aa, Artificial Sequence
  Description of Artificial Sequence: Synthetic peptide
  Seed: VWMACHSAAF
VYMACHSAAW

SEQ ID NO: 18977 - protein, 10 aa, Artificial Sequence
  Description of Artificial Sequence: Synthetic peptide
  Seed: VWMACHSAAF
VYMACHSAAY

SEQ ID NO: 18978 - protein, 10 aa, Artificial Sequence
  Description of Artificial Sequence: Synthetic peptide
  Seed: VWMACHSAAF
VYMACHSAAV

SEQ ID NO: 18979 - protein, 10 aa, Artificial Sequence
  Description of Artificial Sequence: Synthetic peptide
  Seed: VWMACHSAAF
VVMACHSAAH

SEQ ID NO: 18980 - protein, 10 aa, Artificial Sequence
  Description of Artificial Sequence: Synthetic peptide
  Seed: VWMACHSAAF
VVMACHSAAI

SEQ ID NO: 18981 - protein, 10 aa, Artificial Sequence
  Description of Artificial Sequence: Synthetic peptide
  Seed: VWMACHSAAF
VVMACHSAAL

SEQ ID NO: 18982 - protein, 10 aa, Artificial Sequence
  Description of Artificial Sequence: Synthetic peptide
  Seed: VWMACHSAAF
VVMACHSAAM

SEQ ID NO: 18983 - protein, 10 aa, Artificial Sequence
  Description of Artificial Sequence: Synthetic peptide
  Seed: VWMACHSAAF
VVMACHSAAW

SEQ ID NO: 18984 - protein, 10 aa, Artificial Sequence
  Description of Artificial Sequence: Synthetic peptide
  Seed: VWMACHSAAF
VPMACHSAAY

SEQ ID NO: 18985 - protein, 10 aa, Artificial Sequence
  Description of Artificial Sequence: Synthetic peptide
  Seed: VWMACHSAAF
VVMACHSAAY

SEQ ID NO: 18986 - protein, 9 aa, Artificial Sequence
  Description of Artificial Sequence: Synthetic peptide
  Seed: VWMACNSAA
VAMACNSAI

SEQ ID NO: 18987 - protein, 9 aa, Artificial Sequence
  Description of Artificial Sequence: Synthetic peptide
  Seed: VWMACNSAA
VAMACNSAL

SEQ ID NO: 18988 - protein, 9 aa, Artificial Sequence
  Description of Artificial Sequence: Synthetic peptide
  Seed: VWMACNSAA
VAMACNSAM

SEQ ID NO: 18989 - protein, 9 aa, Artificial Sequence
  Description of Artificial Sequence: Synthetic peptide
  Seed: VWMACNSAA
VAMACNSAF

SEQ ID NO: 18990 - protein, 9 aa, Artificial Sequence
  Description of Artificial Sequence: Synthetic peptide
  Seed: VWMACNSAA
VAMACNSAW

SEQ ID NO: 18991 - protein, 9 aa, Artificial Sequence
  Description of Artificial Sequence: Synthetic peptide
  Seed: VWMACNSAA
VAMACNSAY

SEQ ID NO: 18992 - protein, 9 aa, Artificial Sequence
  Description of Artificial Sequence: Synthetic peptide
  Seed: VWMACNSAA
VAMACNSAV

SEQ ID NO: 18993 - protein, 9 aa, Artificial Sequence
  Description of Artificial Sequence: Synthetic peptide
  Seed: VWMACNSAA
VRMACNSAI

SEQ ID NO: 18994 - protein, 10 aa, Artificial Sequence
  Description of Artificial Sequence: Synthetic peptide
  Seed: VWMACHSAAF
VYMACHSAAL

SEQ ID NO: 18995 - protein, 10 aa, Artificial Sequence
  Description of Artificial Sequence: Synthetic peptide
  Seed: VWMACHSAAF
VYMACHSAAI

SEQ ID NO: 18996 - protein, 10 aa, Artificial Sequence
  Description of Artificial Sequence: Synthetic peptide
  Seed: VWMACHSAAF
VYMACHSAAH

SEQ ID NO: 18997 - protein, 10 aa, Artificial Sequence
  Description of Artificial Sequence: Synthetic peptide
  Seed: VWMACHSAAF
VYMACHSAAA

SEQ ID NO: 18998 - protein, 10 aa, Artificial Sequence
  Description of Artificial Sequence: Synthetic peptide
  Seed: VWMACHSAAF
VSMACHSAAH

SEQ ID NO: 18999 - protein, 10 aa, Artificial Sequence
  Description of Artificial Sequence: Synthetic peptide
  Seed: VWMACHSAAF
VSMACHSAAI

SEQ ID NO: 19000 - protein, 10 aa, Artificial Sequence
  Description of Artificial Sequence: Synthetic peptide
  Seed: VWMACHSAAF
VSMACHSAAL

SEQ ID NO: 19001 - protein, 10 aa, Artificial Sequence
  Description of Artificial Sequence: Synthetic peptide
  Seed: VWMACHSAAF
VSMACHSAAM

SEQ ID NO: 19002 - protein, 10 aa, Artificial Sequence
  Description of Artificial Sequence: Synthetic peptide
  Seed: VWMACHSAAF
VSMACHSAAF

SEQ ID NO: 19003 - protein, 10 aa, Artificial Sequence
  Description of Artificial Sequence: Synthetic peptide
  Seed: VWMACHSAAF
VSMACHSAAW

SEQ ID NO: 19004 - protein, 10 aa, Artificial Sequence
  Description of Artificial Sequence: Synthetic peptide
  Seed: VWMACHSAAF
VSMACHSAAY

SEQ ID NO: 19005 - protein, 10 aa, Artificial Sequence
  Description of Artificial Sequence: Synthetic peptide
  Seed: VWMACHSAAF
VTMACHSAAH

SEQ ID NO: 19006 - protein, 10 aa, Artificial Sequence
  Description of Artificial Sequence: Synthetic peptide
  Seed: VWMACHSAAF
VTMACHSAAI

SEQ ID NO: 19007 - protein, 10 aa, Artificial Sequence
  Description of Artificial Sequence: Synthetic peptide
  Seed: VWMACHSAAF
VTMACHSAAL

SEQ ID NO: 19008 - protein, 10 aa, Artificial Sequence
  Description of Artificial Sequence: Synthetic peptide
  Seed: VWMACHSAAF
VTMACHSAAM

SEQ ID NO: 19009 - protein, 10 aa, Artificial Sequence
  Description of Artificial Sequence: Synthetic peptide
  Seed: VWMACHSAAF
VTMACHSAAF

SEQ ID NO: 19010 - protein, 10 aa, Artificial Sequence
  Description of Artificial Sequence: Synthetic peptide
  Seed: VWMACHSAAF
VTMACHSAAW

SEQ ID NO: 19011 - protein, 10 aa, Artificial Sequence
  Description of Artificial Sequence: Synthetic peptide
  Seed: VWMACHSAAF
VTMACHSAAY

SEQ ID NO: 19012 - protein, 10 aa, Artificial Sequence
  Description of Artificial Sequence: Synthetic peptide
  Seed: VWMACHSAAF
VWMACHSAAI

SEQ ID NO: 19013 - protein, 10 aa, Artificial Sequence
  Description of Artificial Sequence: Synthetic peptide
  Seed: VWMACHSAAF
VWMACHSAAL

SEQ ID NO: 19014 - protein, 10 aa, Artificial Sequence
  Description of Artificial Sequence: Synthetic peptide
  Seed: VWMACHSAAF
VWMACHSAAM

SEQ ID NO: 19015 - protein, 10 aa, Artificial Sequence
  Description of Artificial Sequence: Synthetic peptide
  Seed: VWMACHSAAF
VWMACHSAAW

SEQ ID NO: 19016 - protein, 10 aa, Artificial Sequence
  Description of Artificial Sequence: Synthetic peptide
  Seed: VWMACHSAAF
VWMACHSAAY

SEQ ID NO: 19017 - protein, 10 aa, Artificial Sequence
  Description of Artificial Sequence: Synthetic peptide
  Seed: VWMACNSAAF
VRMACNSAAL

SEQ ID NO: 19018 - protein, 10 aa, Artificial Sequence
  Description of Artificial Sequence: Synthetic peptide
  Seed: VWMACNSAAF
VRMACNSAAM

SEQ ID NO: 19019 - protein, 10 aa, Artificial Sequence
  Description of Artificial Sequence: Synthetic peptide
  Seed: VWMACNSAAF
VRMACNSAAF

SEQ ID NO: 19020 - protein, 10 aa, Artificial Sequence
  Description of Artificial Sequence: Synthetic peptide
  Seed: VYGLAVASGY
VEGLAVASGY

SEQ ID NO: 19021 - protein, 10 aa, Artificial Sequence
  Description of Artificial Sequence: Synthetic peptide
  Seed: VYGLAVASGY
VAGLAVASGY

SEQ ID NO: 19022 - protein, 10 aa, Artificial Sequence
  Description of Artificial Sequence: Synthetic peptide
  Seed: VYGLAVASGY
VRGLAVASGF

SEQ ID NO: 19023 - protein, 10 aa, Artificial Sequence
  Description of Artificial Sequence: Synthetic peptide
  Seed: VYGLAVASGY
VRGLAVASGY

SEQ ID NO: 19024 - protein, 10 aa, Artificial Sequence
  Description of Artificial Sequence: Synthetic peptide
  Seed: VYGLAVASGY
VDGLAVASGY

SEQ ID NO: 19025 - protein, 10 aa, Artificial Sequence
  Description of Artificial Sequence: Synthetic peptide
  Seed: VYGLAVASGY
VCGLAVASGY

SEQ ID NO: 19026 - protein, 10 aa, Artificial Sequence
  Description of Artificial Sequence: Synthetic peptide
  Seed: VYGLAVASGY
VQGLAVASGM

SEQ ID NO: 19027 - protein, 10 aa, Artificial Sequence
  Description of Artificial Sequence: Synthetic peptide
  Seed: VYGLAVASGY
VQGLAVASGF

SEQ ID NO: 19028 - protein, 10 aa, Artificial Sequence
  Description of Artificial Sequence: Synthetic peptide
  Seed: VYGLAVASGY
VQGLAVASGY

SEQ ID NO: 19029 - protein, 10 aa, Artificial Sequence
  Description of Artificial Sequence: Synthetic peptide
  Seed: VYGLAVASGY
VGGLAVASGY

SEQ ID NO: 19030 - protein, 10 aa, Artificial Sequence
  Description of Artificial Sequence: Synthetic peptide
  Seed: VYGLAVASGY
VFGLAVASGY

SEQ ID NO: 19031 - protein, 10 aa, Artificial Sequence
  Description of Artificial Sequence: Synthetic peptide
  Seed: VYGLAVASGY
VHGLAVASGF

SEQ ID NO: 19032 - protein, 10 aa, Artificial Sequence
  Description of Artificial Sequence: Synthetic peptide
  Seed: VYGLAVASGY
VIGLAVASGY

SEQ ID NO: 19033 - protein, 10 aa, Artificial Sequence
  Description of Artificial Sequence: Synthetic peptide
  Seed: VYGLAVASGY
VLGLAVASGY

SEQ ID NO: 19034 - protein, 10 aa, Artificial Sequence
  Description of Artificial Sequence: Synthetic peptide
  Seed: VYGLAVASGY
VKGLAVASGM

SEQ ID NO: 19035 - protein, 10 aa, Artificial Sequence
  Description of Artificial Sequence: Synthetic peptide
  Seed: VYGLAVASGY
VKGLAVASGF

SEQ ID NO: 19036 - protein, 10 aa, Artificial Sequence
  Description of Artificial Sequence: Synthetic peptide
  Seed: VYGLAVASGY
VKGLAVASGY

SEQ ID NO: 19037 - protein, 10 aa, Artificial Sequence
  Description of Artificial Sequence: Synthetic peptide
  Seed: VYGLAVASGY
VMGLAVASGM

SEQ ID NO: 19038 - protein, 10 aa, Artificial Sequence
  Description of Artificial Sequence: Synthetic peptide
  Seed: VYGLAVASGY
VMGLAVASGF

SEQ ID NO: 19039 - protein, 10 aa, Artificial Sequence
  Description of Artificial Sequence: Synthetic peptide
  Seed: VWMACNSAAF
VVMACNSAAY

SEQ ID NO: 19040 - protein, 10 aa, Artificial Sequence
  Description of Artificial Sequence: Synthetic peptide
  Seed: VWMACNSAAF
VVMACNSAAW

SEQ ID NO: 19041 - protein, 10 aa, Artificial Sequence
  Description of Artificial Sequence: Synthetic peptide
  Seed: VWMACNSAAF
VVMACNSAAF

SEQ ID NO: 19042 - protein, 10 aa, Artificial Sequence
  Description of Artificial Sequence: Synthetic peptide
  Seed: VWMACNSAAF
VVMACNSAAM

SEQ ID NO: 19043 - protein, 10 aa, Artificial Sequence
  Description of Artificial Sequence: Synthetic peptide
  Seed: VWMACNSAAF
VTMACNSAAM

SEQ ID NO: 19044 - protein, 10 aa, Artificial Sequence
  Description of Artificial Sequence: Synthetic peptide
  Seed: VWMACNSAAF
VTMACNSAAF

SEQ ID NO: 19045 - protein, 10 aa, Artificial Sequence
  Description of Artificial Sequence: Synthetic peptide
  Seed: VWMACNSAAF
VTMACNSAAW

SEQ ID NO: 19046 - protein, 10 aa, Artificial Sequence
  Description of Artificial Sequence: Synthetic peptide
  Seed: VWMACNSAAF
VTMACNSAAY

SEQ ID NO: 19047 - protein, 10 aa, Artificial Sequence
  Description of Artificial Sequence: Synthetic peptide
  Seed: VWMACNSAAF
VWMACNSAAI

SEQ ID NO: 19048 - protein, 10 aa, Artificial Sequence
  Description of Artificial Sequence: Synthetic peptide
  Seed: VWMACNSAAF
VWMACNSAAL

SEQ ID NO: 19049 - protein, 10 aa, Artificial Sequence
  Description of Artificial Sequence: Synthetic peptide
  Seed: VWMACNSAAF
VWMACNSAAM

SEQ ID NO: 19050 - protein, 10 aa, Artificial Sequence
  Description of Artificial Sequence: Synthetic peptide
  Seed: VWMACNSAAF
VWMACNSAAW

SEQ ID NO: 19051 - protein, 10 aa, Artificial Sequence
  Description of Artificial Sequence: Synthetic peptide
  Seed: VWMACNSAAF
VWMACNSAAY

SEQ ID NO: 19052 - protein, 10 aa, Artificial Sequence
  Description of Artificial Sequence: Synthetic peptide
  Seed: VWMACNSAAF
VYMACNSAAA

SEQ ID NO: 19053 - protein, 10 aa, Artificial Sequence
  Description of Artificial Sequence: Synthetic peptide
  Seed: VWMACNSAAF
VYMACNSAAH

SEQ ID NO: 19054 - protein, 10 aa, Artificial Sequence
  Description of Artificial Sequence: Synthetic peptide
  Seed: VWMACNSAAF
VYMACNSAAI

SEQ ID NO: 19055 - protein, 10 aa, Artificial Sequence
  Description of Artificial Sequence: Synthetic peptide
  Seed: VWMACNSAAF
VYMACNSAAL

SEQ ID NO: 19056 - protein, 10 aa, Artificial Sequence
  Description of Artificial Sequence: Synthetic peptide
  Seed: VWMACNSAAF
VYMACNSAAM

SEQ ID NO: 19057 - protein, 10 aa, Artificial Sequence
  Description of Artificial Sequence: Synthetic peptide
  Seed: VWMACNSAAF
VYMACNSAAF

SEQ ID NO: 19058 - protein, 10 aa, Artificial Sequence
  Description of Artificial Sequence: Synthetic peptide
  Seed: VWMACNSAAF
VYMACNSAAW

SEQ ID NO: 19059 - protein, 10 aa, Artificial Sequence
  Description of Artificial Sequence: Synthetic peptide
  Seed: VWMACNSAAF
VYMACNSAAY

SEQ ID NO: 19060 - protein, 10 aa, Artificial Sequence
  Description of Artificial Sequence: Synthetic peptide
  Seed: VWMACNSAAF
VYMACNSAAV

SEQ ID NO: 19061 - protein, 10 aa, Artificial Sequence
  Description of Artificial Sequence: Synthetic peptide
  Seed: VWMACNSAAF
VVMACNSAAL

SEQ ID NO: 19062 - protein, 10 aa, Artificial Sequence
  Description of Artificial Sequence: Synthetic peptide
  Seed: VYGLAVASGY
VMGLAVASGY

SEQ ID NO: 19063 - protein, 10 aa, Artificial Sequence
  Description of Artificial Sequence: Synthetic peptide
  Seed: VYGLAVASGY
VPGLAVASGY

SEQ ID NO: 19064 - protein, 10 aa, Artificial Sequence
  Description of Artificial Sequence: Synthetic peptide
  Seed: VWMACNSAAF
VRMACNSAAW

SEQ ID NO: 19065 - protein, 10 aa, Artificial Sequence
  Description of Artificial Sequence: Synthetic peptide
  Seed: VYGPAVASGY
VVGPAVASGY

SEQ ID NO: 19066 - protein, 10 aa, Artificial Sequence
  Description of Artificial Sequence: Synthetic peptide
  Seed: VYGPAVASGY
VWGPAVASGF

SEQ ID NO: 19067 - protein, 10 aa, Artificial Sequence
  Description of Artificial Sequence: Synthetic peptide
  Seed: VYGPAVASGY
VWGPAVASGW

SEQ ID NO: 19068 - protein, 10 aa, Artificial Sequence
  Description of Artificial Sequence: Synthetic peptide
  Seed: VYGPAVASGY
VWGPAVASGY

SEQ ID NO: 19069 - protein, 10 aa, Artificial Sequence
  Description of Artificial Sequence: Synthetic peptide
  Seed: VYGPAVASGY
VYGPAVASGI

SEQ ID NO: 19070 - protein, 10 aa, Artificial Sequence
  Description of Artificial Sequence: Synthetic peptide
  Seed: VYGPAVASGY
VYGPAVASGL

SEQ ID NO: 19071 - protein, 10 aa, Artificial Sequence
  Description of Artificial Sequence: Synthetic peptide
  Seed: VYGPAVASGY
VYGPAVASGM

SEQ ID NO: 19072 - protein, 10 aa, Artificial Sequence
  Description of Artificial Sequence: Synthetic peptide
  Seed: VYGPAVASGY
VYGPAVASGF

SEQ ID NO: 19073 - protein, 10 aa, Artificial Sequence
  Description of Artificial Sequence: Synthetic peptide
  Seed: VYGPAVASGY
VYGPAVASGW

SEQ ID NO: 19074 - protein, 10 aa, Artificial Sequence
  Description of Artificial Sequence: Synthetic peptide
  Seed: VYGPAVASGY
VYGPAVASGV

SEQ ID NO: 19075 - protein, 10 aa, Artificial Sequence
  Description of Artificial Sequence: Synthetic peptide
  Seed: VYGPAVSSGY
VAGPAVSSGY

SEQ ID NO: 19076 - protein, 10 aa, Artificial Sequence
  Description of Artificial Sequence: Synthetic peptide
  Seed: VYGLAVASGY
VSGLAVASGY

SEQ ID NO: 19077 - protein, 10 aa, Artificial Sequence
  Description of Artificial Sequence: Synthetic peptide
  Seed: VYGPAVSSGY
VNGPAVSSGY

SEQ ID NO: 19078 - protein, 10 aa, Artificial Sequence
  Description of Artificial Sequence: Synthetic peptide
  Seed: VYGPAVSSGY
VQGPAVSSGY

SEQ ID NO: 19079 - protein, 10 aa, Artificial Sequence
  Description of Artificial Sequence: Synthetic peptide
  Seed: VYGPAVSSGY
VGGPAVSSGY

SEQ ID NO: 19080 - protein, 10 aa, Artificial Sequence
  Description of Artificial Sequence: Synthetic peptide
  Seed: VYGPAVSSGY
VHGPAVSSGY

SEQ ID NO: 19081 - protein, 10 aa, Artificial Sequence
  Description of Artificial Sequence: Synthetic peptide
  Seed: VYGPAVSSGY
VIGPAVSSGY

SEQ ID NO: 19082 - protein, 10 aa, Artificial Sequence
  Description of Artificial Sequence: Synthetic peptide
  Seed: VYGPAVSSGY
VLGPAVSSGY

SEQ ID NO: 19083 - protein, 10 aa, Artificial Sequence
  Description of Artificial Sequence: Synthetic peptide
  Seed: VYGPAVSSGY
VMGPAVSSGY

SEQ ID NO: 19084 - protein, 10 aa, Artificial Sequence
  Description of Artificial Sequence: Synthetic peptide
  Seed: VYGPAVSSGY
VFGPAVSSGL

SEQ ID NO: 19085 - protein, 10 aa, Artificial Sequence
  Description of Artificial Sequence: Synthetic peptide
  Seed: VYGPAVSSGY
VFGPAVSSGM

SEQ ID NO: 19086 - protein, 10 aa, Artificial Sequence
  Description of Artificial Sequence: Synthetic peptide
  Seed: VYGPAVASGY
VWGPAVASGM

SEQ ID NO: 19087 - protein, 10 aa, Artificial Sequence
  Description of Artificial Sequence: Synthetic peptide
  Seed: VYGPAVASGY
VWGPAVASGL

SEQ ID NO: 19088 - protein, 10 aa, Artificial Sequence
  Description of Artificial Sequence: Synthetic peptide
  Seed: VYGPAVASGY
VWGPAVASGI

SEQ ID NO: 19089 - protein, 10 aa, Artificial Sequence
  Description of Artificial Sequence: Synthetic peptide
  Seed: VYGPAVASGY
VTGPAVASGY

SEQ ID NO: 19090 - protein, 10 aa, Artificial Sequence
  Description of Artificial Sequence: Synthetic peptide
  Seed: VYGLAVASGY
VTGLAVASGY

SEQ ID NO: 19091 - protein, 10 aa, Artificial Sequence
  Description of Artificial Sequence: Synthetic peptide
  Seed: VYGLAVASGY
VWGLAVASGY

SEQ ID NO: 19092 - protein, 10 aa, Artificial Sequence
  Description of Artificial Sequence: Synthetic peptide
  Seed: VYGLAVASGY
VVGLAVASGY

SEQ ID NO: 19093 - protein, 10 aa, Artificial Sequence
  Description of Artificial Sequence: Synthetic peptide
  Seed: VYGPAVASGY
VAGPAVASGY

SEQ ID NO: 19094 - protein, 10 aa, Artificial Sequence
  Description of Artificial Sequence: Synthetic peptide
  Seed: VYGPAVASGY
VNGPAVASGY

SEQ ID NO: 19095 - protein, 10 aa, Artificial Sequence
  Description of Artificial Sequence: Synthetic peptide
  Seed: VYGPAVASGY
VQGPAVASGY

SEQ ID NO: 19096 - protein, 10 aa, Artificial Sequence
  Description of Artificial Sequence: Synthetic peptide
  Seed: VYGPAVASGY
VGGPAVASGY

SEQ ID NO: 19097 - protein, 10 aa, Artificial Sequence
  Description of Artificial Sequence: Synthetic peptide
  Seed: VYGPAVASGY
VHGPAVASGY

SEQ ID NO: 19098 - protein, 10 aa, Artificial Sequence
  Description of Artificial Sequence: Synthetic peptide
  Seed: VYGPAVASGY
VIGPAVASGY

SEQ ID NO: 19099 - protein, 10 aa, Artificial Sequence
  Description of Artificial Sequence: Synthetic peptide
  Seed: VYGPAVASGY
VLGPAVASGY

SEQ ID NO: 19100 - protein, 10 aa, Artificial Sequence
  Description of Artificial Sequence: Synthetic peptide
  Seed: VYGPAVASGY
VMGPAVASGF

SEQ ID NO: 19101 - protein, 10 aa, Artificial Sequence
  Description of Artificial Sequence: Synthetic peptide
  Seed: VYGPAVASGY
VMGPAVASGY

SEQ ID NO: 19102 - protein, 10 aa, Artificial Sequence
  Description of Artificial Sequence: Synthetic peptide
  Seed: VYGPAVASGY
VFGPAVASGI

SEQ ID NO: 19103 - protein, 10 aa, Artificial Sequence
  Description of Artificial Sequence: Synthetic peptide
  Seed: VYGPAVASGY
VFGPAVASGL

SEQ ID NO: 19104 - protein, 10 aa, Artificial Sequence
  Description of Artificial Sequence: Synthetic peptide
  Seed: VYGPAVASGY
VFGPAVASGM

SEQ ID NO: 19105 - protein, 10 aa, Artificial Sequence
  Description of Artificial Sequence: Synthetic peptide
  Seed: VYGPAVASGY
VFGPAVASGF

SEQ ID NO: 19106 - protein, 10 aa, Artificial Sequence
  Description of Artificial Sequence: Synthetic peptide
  Seed: VYGPAVASGY
VFGPAVASGW

SEQ ID NO: 19107 - protein, 10 aa, Artificial Sequence
  Description of Artificial Sequence: Synthetic peptide
  Seed: VYGPAVASGY
VFGPAVASGY

SEQ ID NO: 19108 - protein, 10 aa, Artificial Sequence
  Description of Artificial Sequence: Synthetic peptide
  Seed: VYGPAVASGY
VSGPAVASGY

SEQ ID NO: 19109 - protein, 10 aa, Artificial Sequence
  Description of Artificial Sequence: Synthetic peptide
  Seed: VWMACNSAAF
VTMACNSAAL

SEQ ID NO: 19110 - protein, 10 aa, Artificial Sequence
  Description of Artificial Sequence: Synthetic peptide
  Seed: VWMACNSAAF
VSMACNSAAY

SEQ ID NO: 19111 - protein, 10 aa, Artificial Sequence
  Description of Artificial Sequence: Synthetic peptide
  Seed: VWMACNSAAF
VSMACNSAAW

SEQ ID NO: 19112 - protein, 10 aa, Artificial Sequence
  Description of Artificial Sequence: Synthetic peptide
  Seed: VWMACNSAAF
VGMACNSAAL

SEQ ID NO: 19113 - protein, 10 aa, Artificial Sequence
  Description of Artificial Sequence: Synthetic peptide
  Seed: VWMACNSAAF
VQMACNSAAW

SEQ ID NO: 19114 - protein, 10 aa, Artificial Sequence
  Description of Artificial Sequence: Synthetic peptide
  Seed: VWMACNSAAF
VQMACNSAAY

SEQ ID NO: 19115 - protein, 10 aa, Artificial Sequence
  Description of Artificial Sequence: Synthetic peptide
  Seed: VWMACNSAAF
VQMACNSAAV

SEQ ID NO: 19116 - protein, 10 aa, Artificial Sequence
  Description of Artificial Sequence: Synthetic peptide
  Seed: VWMACNSAAF
VEMACNSAAI

SEQ ID NO: 19117 - protein, 10 aa, Artificial Sequence
  Description of Artificial Sequence: Synthetic peptide
  Seed: VWMACNSAAF
VEMACNSAAL

SEQ ID NO: 19118 - protein, 10 aa, Artificial Sequence
  Description of Artificial Sequence: Synthetic peptide
  Seed: VWMACNSAAF
VEMACNSAAM

SEQ ID NO: 19119 - protein, 10 aa, Artificial Sequence
  Description of Artificial Sequence: Synthetic peptide
  Seed: VWMACNSAAF
VEMACNSAAF

SEQ ID NO: 19120 - protein, 10 aa, Artificial Sequence
  Description of Artificial Sequence: Synthetic peptide
  Seed: VWMACNSAAF
VEMACNSAAW

SEQ ID NO: 19121 - protein, 10 aa, Artificial Sequence
  Description of Artificial Sequence: Synthetic peptide
  Seed: VWMACNSAAF
VEMACNSAAY

SEQ ID NO: 19122 - protein, 10 aa, Artificial Sequence
  Description of Artificial Sequence: Synthetic peptide
  Seed: VWMACNSAAF
VGMACNSAAM

SEQ ID NO: 19123 - protein, 10 aa, Artificial Sequence
  Description of Artificial Sequence: Synthetic peptide
  Seed: VWMACNSAAF
VSMACNSAAF

SEQ ID NO: 19124 - protein, 10 aa, Artificial Sequence
  Description of Artificial Sequence: Synthetic peptide
  Seed: VWMACNSAAF
VGMACNSAAF

SEQ ID NO: 19125 - protein, 10 aa, Artificial Sequence
  Description of Artificial Sequence: Synthetic peptide
  Seed: VWMACNSAAF
VGMACNSAAW

SEQ ID NO: 19126 - protein, 10 aa, Artificial Sequence
  Description of Artificial Sequence: Synthetic peptide
  Seed: VWMACNSAAF
VGMACNSAAY

SEQ ID NO: 19127 - protein, 10 aa, Artificial Sequence
  Description of Artificial Sequence: Synthetic peptide
  Seed: VWMACNSAAF
VHMACNSAAH

SEQ ID NO: 19128 - protein, 10 aa, Artificial Sequence
  Description of Artificial Sequence: Synthetic peptide
  Seed: VWMACNSAAF
VHMACNSAAI

SEQ ID NO: 19129 - protein, 10 aa, Artificial Sequence
  Description of Artificial Sequence: Synthetic peptide
  Seed: VWMACNSAAF
VHMACNSAAL

SEQ ID NO: 19130 - protein, 10 aa, Artificial Sequence
  Description of Artificial Sequence: Synthetic peptide
  Seed: VWMACNSAAF
VHMACNSAAM

SEQ ID NO: 19131 - protein, 10 aa, Artificial Sequence
  Description of Artificial Sequence: Synthetic peptide
  Seed: VWMACNSAAF
VHMACNSAAF

SEQ ID NO: 19132 - protein, 10 aa, Artificial Sequence
  Description of Artificial Sequence: Synthetic peptide
  Seed: VWMACNSAAF
VHMACNSAAW

SEQ ID NO: 19133 - protein, 10 aa, Artificial Sequence
  Description of Artificial Sequence: Synthetic peptide
  Seed: VWMACNSAAF
VQMACNSAAF

SEQ ID NO: 19134 - protein, 10 aa, Artificial Sequence
  Description of Artificial Sequence: Synthetic peptide
  Seed: VWMACNSAAF
VQMACNSAAM

SEQ ID NO: 19135 - protein, 10 aa, Artificial Sequence
  Description of Artificial Sequence: Synthetic peptide
  Seed: VWMACNSAAF
VQMACNSAAL

SEQ ID NO: 19136 - protein, 10 aa, Artificial Sequence
  Description of Artificial Sequence: Synthetic peptide
  Seed: VWMACNSAAF
VQMACNSAAI

SEQ ID NO: 19137 - protein, 10 aa, Artificial Sequence
  Description of Artificial Sequence: Synthetic peptide
  Seed: VWMACNSAAF
VRMACNSAAY

SEQ ID NO: 19138 - protein, 10 aa, Artificial Sequence
  Description of Artificial Sequence: Synthetic peptide
  Seed: VWMACNSAAF
VNMACNSAAL

SEQ ID NO: 19139 - protein, 10 aa, Artificial Sequence
  Description of Artificial Sequence: Synthetic peptide
  Seed: VWMACNSAAF
VNMACNSAAM

SEQ ID NO: 19140 - protein, 10 aa, Artificial Sequence
  Description of Artificial Sequence: Synthetic peptide
  Seed: VWMACNSAAF
VNMACNSAAF

SEQ ID NO: 19141 - protein, 10 aa, Artificial Sequence
  Description of Artificial Sequence: Synthetic peptide
  Seed: VWMACNSAAF
VNMACNSAAW

SEQ ID NO: 19142 - protein, 10 aa, Artificial Sequence
  Description of Artificial Sequence: Synthetic peptide
  Seed: VWMACNSAAF
VNMACNSAAY

SEQ ID NO: 19143 - protein, 10 aa, Artificial Sequence
  Description of Artificial Sequence: Synthetic peptide
  Seed: VWMACNSAAF
VDMACNSAAL

SEQ ID NO: 19144 - protein, 10 aa, Artificial Sequence
  Description of Artificial Sequence: Synthetic peptide
  Seed: VWMACNSAAF
VDMACNSAAM

SEQ ID NO: 19145 - protein, 10 aa, Artificial Sequence
  Description of Artificial Sequence: Synthetic peptide
  Seed: VWMACNSAAF
VDMACNSAAF

SEQ ID NO: 19146 - protein, 10 aa, Artificial Sequence
  Description of Artificial Sequence: Synthetic peptide
  Seed: VWMACNSAAF
VDMACNSAAW

SEQ ID NO: 19147 - protein, 10 aa, Artificial Sequence
  Description of Artificial Sequence: Synthetic peptide
  Seed: VWMACNSAAF
VDMACNSAAY

SEQ ID NO: 19148 - protein, 10 aa, Artificial Sequence
  Description of Artificial Sequence: Synthetic peptide
  Seed: VWMACNSAAF
VCMACNSAAL

SEQ ID NO: 19149 - protein, 10 aa, Artificial Sequence
  Description of Artificial Sequence: Synthetic peptide
  Seed: VWMACNSAAF
VCMACNSAAM

SEQ ID NO: 19150 - protein, 10 aa, Artificial Sequence
  Description of Artificial Sequence: Synthetic peptide
  Seed: VWMACNSAAF
VCMACNSAAF

SEQ ID NO: 19151 - protein, 10 aa, Artificial Sequence
  Description of Artificial Sequence: Synthetic peptide
  Seed: VWMACNSAAF
VCMACNSAAW

SEQ ID NO: 19152 - protein, 10 aa, Artificial Sequence
  Description of Artificial Sequence: Synthetic peptide
  Seed: VWMACNSAAF
VCMACNSAAY

SEQ ID NO: 19153 - protein, 10 aa, Artificial Sequence
  Description of Artificial Sequence: Synthetic peptide
  Seed: VWMACNSAAF
VQMACNSAAA

SEQ ID NO: 19154 - protein, 10 aa, Artificial Sequence
  Description of Artificial Sequence: Synthetic peptide
  Seed: VWMACNSAAF
VQMACNSAAG

SEQ ID NO: 19155 - protein, 10 aa, Artificial Sequence
  Description of Artificial Sequence: Synthetic peptide
  Seed: VWMACNSAAF
VQMACNSAAH

SEQ ID NO: 19156 - protein, 10 aa, Artificial Sequence
  Description of Artificial Sequence: Synthetic peptide
  Seed: VWMACNSAAF
VHMACNSAAY

SEQ ID NO: 19157 - protein, 10 aa, Artificial Sequence
  Description of Artificial Sequence: Synthetic peptide
  Seed: VWMACNSAAF
VIMACNSAAL

SEQ ID NO: 19158 - protein, 10 aa, Artificial Sequence
  Description of Artificial Sequence: Synthetic peptide
  Seed: VWMACNSAAF
VIMACNSAAM

SEQ ID NO: 19159 - protein, 10 aa, Artificial Sequence
  Description of Artificial Sequence: Synthetic peptide
  Seed: VWMACNSAAF
VMMACNSAAM

SEQ ID NO: 19160 - protein, 10 aa, Artificial Sequence
  Description of Artificial Sequence: Synthetic peptide
  Seed: VWMACNSAAF
VMMACNSAAW

SEQ ID NO: 19161 - protein, 10 aa, Artificial Sequence
  Description of Artificial Sequence: Synthetic peptide
  Seed: VWMACNSAAF
VMMACNSAAY

SEQ ID NO: 19162 - protein, 10 aa, Artificial Sequence
  Description of Artificial Sequence: Synthetic peptide
  Seed: VWMACNSAAF
VMMACNSAAV

SEQ ID NO: 19163 - protein, 10 aa, Artificial Sequence
  Description of Artificial Sequence: Synthetic peptide
  Seed: VWMACNSAAF
VFMACNSAAI

SEQ ID NO: 19164 - protein, 10 aa, Artificial Sequence
  Description of Artificial Sequence: Synthetic peptide
  Seed: VWMACNSAAF
VFMACNSAAL

SEQ ID NO: 19165 - protein, 10 aa, Artificial Sequence
  Description of Artificial Sequence: Synthetic peptide
  Seed: VWMACNSAAF
VFMACNSAAM

SEQ ID NO: 19166 - protein, 10 aa, Artificial Sequence
  Description of Artificial Sequence: Synthetic peptide
  Seed: VWMACNSAAF
VFMACNSAAF

SEQ ID NO: 19167 - protein, 10 aa, Artificial Sequence
  Description of Artificial Sequence: Synthetic peptide
  Seed: VWMACNSAAF
VFMACNSAAW

SEQ ID NO: 19168 - protein, 10 aa, Artificial Sequence
  Description of Artificial Sequence: Synthetic peptide
  Seed: VWMACNSAAF
VFMACNSAAY

SEQ ID NO: 19169 - protein, 10 aa, Artificial Sequence
  Description of Artificial Sequence: Synthetic peptide
  Seed: VWMACNSAAF
VFMACNSAAV

SEQ ID NO: 19170 - protein, 10 aa, Artificial Sequence
  Description of Artificial Sequence: Synthetic peptide
  Seed: VWMACNSAAF
VPMACNSAAA

SEQ ID NO: 19171 - protein, 10 aa, Artificial Sequence
  Description of Artificial Sequence: Synthetic peptide
  Seed: VWMACNSAAF
VPMACNSAAH

SEQ ID NO: 19172 - protein, 10 aa, Artificial Sequence
  Description of Artificial Sequence: Synthetic peptide
  Seed: VWMACNSAAF
VPMACNSAAL

SEQ ID NO: 19173 - protein, 10 aa, Artificial Sequence
  Description of Artificial Sequence: Synthetic peptide
  Seed: VWMACNSAAF
VPMACNSAAM

SEQ ID NO: 19174 - protein, 10 aa, Artificial Sequence
  Description of Artificial Sequence: Synthetic peptide
  Seed: VWMACNSAAF
VPMACNSAAF

SEQ ID NO: 19175 - protein, 10 aa, Artificial Sequence
  Description of Artificial Sequence: Synthetic peptide
  Seed: VWMACNSAAF
VPMACNSAAW

SEQ ID NO: 19176 - protein, 10 aa, Artificial Sequence
  Description of Artificial Sequence: Synthetic peptide
  Seed: VWMACNSAAF
VPMACNSAAY

SEQ ID NO: 19177 - protein, 10 aa, Artificial Sequence
  Description of Artificial Sequence: Synthetic peptide
  Seed: VWMACNSAAF
VSMACNSAAL

SEQ ID NO: 19178 - protein, 10 aa, Artificial Sequence
  Description of Artificial Sequence: Synthetic peptide
  Seed: VWMACNSAAF
VSMACNSAAM

SEQ ID NO: 19179 - protein, 10 aa, Artificial Sequence
  Description of Artificial Sequence: Synthetic peptide
  Seed: VWMACNSAAF
VMMACNSAAF

SEQ ID NO: 19180 - protein, 10 aa, Artificial Sequence
  Description of Artificial Sequence: Synthetic peptide
  Seed: VWMACNSAAF
VMMACNSAAL

SEQ ID NO: 19181 - protein, 10 aa, Artificial Sequence
  Description of Artificial Sequence: Synthetic peptide
  Seed: VWMACNSAAF
VIMACNSAAF

SEQ ID NO: 19182 - protein, 10 aa, Artificial Sequence
  Description of Artificial Sequence: Synthetic peptide
  Seed: VWMACNSAAF
VMMACNSAAI

SEQ ID NO: 19183 - protein, 10 aa, Artificial Sequence
  Description of Artificial Sequence: Synthetic peptide
  Seed: VWMACNSAAF
VIMACNSAAW

SEQ ID NO: 19184 - protein, 10 aa, Artificial Sequence
  Description of Artificial Sequence: Synthetic peptide
  Seed: VWMACNSAAF
VIMACNSAAY

SEQ ID NO: 19185 - protein, 10 aa, Artificial Sequence
  Description of Artificial Sequence: Synthetic peptide
  Seed: VWMACNSAAF
VLMACNSAAH

SEQ ID NO: 19186 - protein, 10 aa, Artificial Sequence
  Description of Artificial Sequence: Synthetic peptide
  Seed: VWMACNSAAF
VLMACNSAAI

SEQ ID NO: 19187 - protein, 10 aa, Artificial Sequence
  Description of Artificial Sequence: Synthetic peptide
  Seed: VWMACNSAAF
VLMACNSAAL

SEQ ID NO: 19188 - protein, 10 aa, Artificial Sequence
  Description of Artificial Sequence: Synthetic peptide
  Seed: VWMACNSAAF
VLMACNSAAM

SEQ ID NO: 19189 - protein, 10 aa, Artificial Sequence
  Description of Artificial Sequence: Synthetic peptide
  Seed: VWMACNSAAF
VLMACNSAAF

SEQ ID NO: 19190 - protein, 10 aa, Artificial Sequence
  Description of Artificial Sequence: Synthetic peptide
  Seed: VWMACNSAAF
VLMACNSAAW

SEQ ID NO: 19191 - protein, 10 aa, Artificial Sequence
  Description of Artificial Sequence: Synthetic peptide
  Seed: VWMACNSAAF
VLMACNSAAY

SEQ ID NO: 19192 - protein, 10 aa, Artificial Sequence
  Description of Artificial Sequence: Synthetic peptide
  Seed: VWMACNSAAF
VKMACNSAAH

SEQ ID NO: 19193 - protein, 10 aa, Artificial Sequence
  Description of Artificial Sequence: Synthetic peptide
  Seed: VWMACNSAAF
VKMACNSAAI

SEQ ID NO: 19194 - protein, 10 aa, Artificial Sequence
  Description of Artificial Sequence: Synthetic peptide
  Seed: VWMACNSAAF
VKMACNSAAL

SEQ ID NO: 19195 - protein, 10 aa, Artificial Sequence
  Description of Artificial Sequence: Synthetic peptide
  Seed: VWMACNSAAF
VKMACNSAAM

SEQ ID NO: 19196 - protein, 10 aa, Artificial Sequence
  Description of Artificial Sequence: Synthetic peptide
  Seed: VWMACNSAAF
VKMACNSAAF

SEQ ID NO: 19197 - protein, 10 aa, Artificial Sequence
  Description of Artificial Sequence: Synthetic peptide
  Seed: VWMACNSAAF
VKMACNSAAW

SEQ ID NO: 19198 - protein, 10 aa, Artificial Sequence
  Description of Artificial Sequence: Synthetic peptide
  Seed: VWMACNSAAF
VKMACNSAAY

SEQ ID NO: 19199 - protein, 10 aa, Artificial Sequence
  Description of Artificial Sequence: Synthetic peptide
  Seed: VWMACNSAAF
VKMACNSAAV

SEQ ID NO: 19200 - protein, 10 aa, Artificial Sequence
  Description of Artificial Sequence: Synthetic peptide
  Seed: VWMACNSAAF
VMMACNSAAA

SEQ ID NO: 19201 - protein, 10 aa, Artificial Sequence
  Description of Artificial Sequence: Synthetic peptide
  Seed: VWMACNSAAF
VMMACNSAAH

SEQ ID NO: 19202 - protein, 10 aa, Artificial Sequence
  Description of Artificial Sequence: Synthetic peptide
  Seed: VWMACHSAAF
VHMACHSAAF

SEQ ID NO: 19203 - protein, 10 aa, Artificial Sequence
  Description of Artificial Sequence: Synthetic peptide
  Seed: VWMACHSAAF
VHMACHSAAM

SEQ ID NO: 19204 - protein, 10 aa, Artificial Sequence
  Description of Artificial Sequence: Synthetic peptide
  Seed: VWMACHSAAF
VHMACHSAAL

SEQ ID NO: 19205 - protein, 9 aa, Artificial Sequence
  Description of Artificial Sequence: Synthetic peptide
  Seed: VSSFIRGTR
VCSFIRGTR

SEQ ID NO: 19206 - protein, 9 aa, Artificial Sequence
  Description of Artificial Sequence: Synthetic peptide
  Seed: VSSFIRGTR
VQSFIRGTR

SEQ ID NO: 19207 - protein, 9 aa, Artificial Sequence
  Description of Artificial Sequence: Synthetic peptide
  Seed: VSSFIRGTR
VQSFIRGTK

SEQ ID NO: 19208 - protein, 9 aa, Artificial Sequence
  Description of Artificial Sequence: Synthetic peptide
  Seed: VSSFIRGTR
VGSFIRGTR

SEQ ID NO: 19209 - protein, 9 aa, Artificial Sequence
  Description of Artificial Sequence: Synthetic peptide
  Seed: VSSFIRGTR
VGSFIRGTK

SEQ ID NO: 19210 - protein, 9 aa, Artificial Sequence
  Description of Artificial Sequence: Synthetic peptide
  Seed: VSSFIRGTR
VHSFIRGTR

SEQ ID NO: 19211 - protein, 9 aa, Artificial Sequence
  Description of Artificial Sequence: Synthetic peptide
  Seed: VSSFIRGTR
VISFIRGTR

SEQ ID NO: 19212 - protein, 9 aa, Artificial Sequence
  Description of Artificial Sequence: Synthetic peptide
  Seed: VSSFIRGTR
VISFIRGTK

SEQ ID NO: 19213 - protein, 9 aa, Artificial Sequence
  Description of Artificial Sequence: Synthetic peptide
  Seed: VSSFIRGTR
VISFIRGTY

SEQ ID NO: 19214 - protein, 9 aa, Artificial Sequence
  Description of Artificial Sequence: Synthetic peptide
  Seed: VSSFIRGTR
VWSFIRGTR

SEQ ID NO: 19215 - protein, 9 aa, Artificial Sequence
  Description of Artificial Sequence: Synthetic peptide
  Seed: VSSFIRGTR
VMSFIRGTR

SEQ ID NO: 19216 - protein, 9 aa, Artificial Sequence
  Description of Artificial Sequence: Synthetic peptide
  Seed: VSSFIRGTR
VMSFIRGTK

SEQ ID NO: 19217 - protein, 9 aa, Artificial Sequence
  Description of Artificial Sequence: Synthetic peptide
  Seed: VSSFIRGTR
VFSFIRGTR

SEQ ID NO: 19218 - protein, 9 aa, Artificial Sequence
  Description of Artificial Sequence: Synthetic peptide
  Seed: VSSFIRGTR
VFSFIRGTK

SEQ ID NO: 19219 - protein, 9 aa, Artificial Sequence
  Description of Artificial Sequence: Synthetic peptide
  Seed: VSSFIRGTR
VPSFIRGTR

SEQ ID NO: 19220 - protein, 9 aa, Artificial Sequence
  Description of Artificial Sequence: Synthetic peptide
  Seed: VSSFIRGTR
VPSFIRGTK

SEQ ID NO: 19221 - protein, 9 aa, Artificial Sequence
  Description of Artificial Sequence: Synthetic peptide
  Seed: VSSFIRGTR
VTSFIRGTR

SEQ ID NO: 19222 - protein, 9 aa, Artificial Sequence
  Description of Artificial Sequence: Synthetic peptide
  Seed: VSSFIRGTR
VTSFIRGTK

SEQ ID NO: 19223 - protein, 9 aa, Artificial Sequence
  Description of Artificial Sequence: Synthetic peptide
  Seed: VSSFIRGTR
VNSFIRGTK

SEQ ID NO: 19224 - protein, 9 aa, Artificial Sequence
  Description of Artificial Sequence: Synthetic peptide
  Seed: VSSFIRGTR
VNSFIRGTR

SEQ ID NO: 19225 - protein, 9 aa, Artificial Sequence
  Description of Artificial Sequence: Synthetic peptide
  Seed: VSSFIRGTR
VASFIRGTK

SEQ ID NO: 19226 - protein, 9 aa, Artificial Sequence
  Description of Artificial Sequence: Synthetic peptide
  Seed: VSSFIRGTR
VASFIRGTR

SEQ ID NO: 19227 - protein, 9 aa, Artificial Sequence
  Description of Artificial Sequence: Synthetic peptide
  Seed: VSSFIRGTK
VTSFIRGTY

SEQ ID NO: 19228 - protein, 9 aa, Artificial Sequence
  Description of Artificial Sequence: Synthetic peptide
  Seed: VSSFIRGTK
VWSFIRGTK

SEQ ID NO: 19229 - protein, 9 aa, Artificial Sequence
  Description of Artificial Sequence: Synthetic peptide
  Seed: VSSFIRGTK
VYSFIRGTR

SEQ ID NO: 19230 - protein, 9 aa, Artificial Sequence
  Description of Artificial Sequence: Synthetic peptide
  Seed: VSSFIRGTK
VYSFIRGTK

SEQ ID NO: 19231 - protein, 9 aa, Artificial Sequence
  Description of Artificial Sequence: Synthetic peptide
  Seed: VSSFIRGTK
VVSFIRGTR

SEQ ID NO: 19232 - protein, 9 aa, Artificial Sequence
  Description of Artificial Sequence: Synthetic peptide
  Seed: VSSFIRGTK
VVSFIRGTK

SEQ ID NO: 19233 - protein, 9 aa, Artificial Sequence
  Description of Artificial Sequence: Synthetic peptide
  Seed: VSSFIRGTK
VVSFIRGTY

SEQ ID NO: 19234 - protein, 10 aa, Artificial Sequence
  Description of Artificial Sequence: Synthetic peptide
  Seed: VVPRGQLSTR
VSPRGQLSTR

SEQ ID NO: 19235 - protein, 10 aa, Artificial Sequence
  Description of Artificial Sequence: Synthetic peptide
  Seed: VVPRGKLSTR
VAPRGKLSTR

SEQ ID NO: 19236 - protein, 10 aa, Artificial Sequence
  Description of Artificial Sequence: Synthetic peptide
  Seed: VVPRGKLSTR
VQPRGKLSTR

SEQ ID NO: 19237 - protein, 10 aa, Artificial Sequence
  Description of Artificial Sequence: Synthetic peptide
  Seed: VVPRGKLSTR
VMPRGKLSTR

SEQ ID NO: 19238 - protein, 10 aa, Artificial Sequence
  Description of Artificial Sequence: Synthetic peptide
  Seed: VVPRGKLSTR
VFPRGKLSTK

SEQ ID NO: 19239 - protein, 10 aa, Artificial Sequence
  Description of Artificial Sequence: Synthetic peptide
  Seed: VVPRGKLSTR
VTPRGKLSTR

SEQ ID NO: 19240 - protein, 10 aa, Artificial Sequence
  Description of Artificial Sequence: Synthetic peptide
  Seed: VVPRGKLSTR
VWPRGKLSTR

SEQ ID NO: 19241 - protein, 10 aa, Artificial Sequence
  Description of Artificial Sequence: Synthetic peptide
  Seed: VVPRGKLSTR
VYPRGKLSTR

SEQ ID NO: 19242 - protein, 10 aa, Artificial Sequence
  Description of Artificial Sequence: Synthetic peptide
  Seed: VVPRGQLSTR
VQPRGQLSTR

SEQ ID NO: 19243 - protein, 10 aa, Artificial Sequence
  Description of Artificial Sequence: Synthetic peptide
  Seed: VVPRGQLSTR
VMPRGQLSTR

SEQ ID NO: 19244 - protein, 10 aa, Artificial Sequence
  Description of Artificial Sequence: Synthetic peptide
  Seed: VVPRGQLSTR
VFPRGQLSTR

SEQ ID NO: 19245 - protein, 9 aa, Artificial Sequence
  Description of Artificial Sequence: Synthetic peptide
  Seed: VSFRGRGVF
VWFRGRGVY

SEQ ID NO: 19246 - protein, 9 aa, Artificial Sequence
  Description of Artificial Sequence: Synthetic peptide
  Seed: VSFRGRGVF
VTFRGRGVF

SEQ ID NO: 19247 - protein, 9 aa, Artificial Sequence
  Description of Artificial Sequence: Synthetic peptide
  Seed: VSFRGRGVF
VTFRGRGVW

SEQ ID NO: 19248 - protein, 9 aa, Artificial Sequence
  Description of Artificial Sequence: Synthetic peptide
  Seed: VSFRGRGVF
VTFRGRGVY

SEQ ID NO: 19249 - protein, 9 aa, Artificial Sequence
  Description of Artificial Sequence: Synthetic peptide
  Seed: VSFRGRGVF
VTFRGRGVV

SEQ ID NO: 19250 - protein, 9 aa, Artificial Sequence
  Description of Artificial Sequence: Synthetic peptide
  Seed: VSFRGRGVF
VWFRGRGVI

SEQ ID NO: 19251 - protein, 9 aa, Artificial Sequence
  Description of Artificial Sequence: Synthetic peptide
  Seed: VSFRGRGVF
VWFRGRGVL

SEQ ID NO: 19252 - protein, 9 aa, Artificial Sequence
  Description of Artificial Sequence: Synthetic peptide
  Seed: VSFRGRGVF
VWFRGRGVM

SEQ ID NO: 19253 - protein, 9 aa, Artificial Sequence
  Description of Artificial Sequence: Synthetic peptide
  Seed: VSFRGRGVF
VWFRGRGVF

SEQ ID NO: 19254 - protein, 9 aa, Artificial Sequence
  Description of Artificial Sequence: Synthetic peptide
  Seed: VSFRGRGVF
VWFRGRGVW

SEQ ID NO: 19255 - protein, 9 aa, Artificial Sequence
  Description of Artificial Sequence: Synthetic peptide
  Seed: VSFRGRGVF
VWFRGRGVV

SEQ ID NO: 19256 - protein, 9 aa, Artificial Sequence
  Description of Artificial Sequence: Synthetic peptide
  Seed: VSFRGRGVF
VYFRGRGVA

SEQ ID NO: 19257 - protein, 9 aa, Artificial Sequence
  Description of Artificial Sequence: Synthetic peptide
  Seed: VSFRGRGVF
VYFRGRGVC

SEQ ID NO: 19258 - protein, 9 aa, Artificial Sequence
  Description of Artificial Sequence: Synthetic peptide
  Seed: VSFRGRGVF
VYFRGRGVH

SEQ ID NO: 19259 - protein, 9 aa, Artificial Sequence
  Description of Artificial Sequence: Synthetic peptide
  Seed: VSFRGRGVF
VYFRGRGVI

SEQ ID NO: 19260 - protein, 9 aa, Artificial Sequence
  Description of Artificial Sequence: Synthetic peptide
  Seed: VSFRGRGVF
VYFRGRGVL

SEQ ID NO: 19261 - protein, 9 aa, Artificial Sequence
  Description of Artificial Sequence: Synthetic peptide
  Seed: VSFRGRGVF
VYFRGRGVM

SEQ ID NO: 19262 - protein, 9 aa, Artificial Sequence
  Description of Artificial Sequence: Synthetic peptide
  Seed: VSFRGRGVF
VYFRGRGVF

SEQ ID NO: 19263 - protein, 9 aa, Artificial Sequence
  Description of Artificial Sequence: Synthetic peptide
  Seed: VSFRGRGVF
VYFRGRGVW

SEQ ID NO: 19264 - protein, 9 aa, Artificial Sequence
  Description of Artificial Sequence: Synthetic peptide
  Seed: VSFRGRGVF
VYFRGRGVY

SEQ ID NO: 19265 - protein, 9 aa, Artificial Sequence
  Description of Artificial Sequence: Synthetic peptide
  Seed: VSFRGRGVF
VTFRGRGVM

SEQ ID NO: 19266 - protein, 9 aa, Artificial Sequence
  Description of Artificial Sequence: Synthetic peptide
  Seed: VSFRGRGVF
VTFRGRGVL

SEQ ID NO: 19267 - protein, 9 aa, Artificial Sequence
  Description of Artificial Sequence: Synthetic peptide
  Seed: VSFRGRGVF
VTFRGRGVI

SEQ ID NO: 19268 - protein, 9 aa, Artificial Sequence
  Description of Artificial Sequence: Synthetic peptide
  Seed: VSFRGRGVF
VSFRGRGVV

SEQ ID NO: 19269 - protein, 9 aa, Artificial Sequence
  Description of Artificial Sequence: Synthetic peptide
  Seed: VSFRGRGVF
VMFRGRGVY

SEQ ID NO: 19270 - protein, 9 aa, Artificial Sequence
  Description of Artificial Sequence: Synthetic peptide
  Seed: VSFRGRGVF
VMFRGRGVV

SEQ ID NO: 19271 - protein, 9 aa, Artificial Sequence
  Description of Artificial Sequence: Synthetic peptide
  Seed: VSFRGRGVF
VFFRGRGVA

SEQ ID NO: 19272 - protein, 9 aa, Artificial Sequence
  Description of Artificial Sequence: Synthetic peptide
  Seed: VSFRGRGVF
VFFRGRGVH

SEQ ID NO: 19273 - protein, 9 aa, Artificial Sequence
  Description of Artificial Sequence: Synthetic peptide
  Seed: VSFRGRGVF
VFFRGRGVI

SEQ ID NO: 19274 - protein, 9 aa, Artificial Sequence
  Description of Artificial Sequence: Synthetic peptide
  Seed: VSFRGRGVF
VFFRGRGVL

SEQ ID NO: 19275 - protein, 9 aa, Artificial Sequence
  Description of Artificial Sequence: Synthetic peptide
  Seed: VSFRGRGVF
VFFRGRGVM

SEQ ID NO: 19276 - protein, 9 aa, Artificial Sequence
  Description of Artificial Sequence: Synthetic peptide
  Seed: VSFRGRGVF
VFFRGRGVF

SEQ ID NO: 19277 - protein, 9 aa, Artificial Sequence
  Description of Artificial Sequence: Synthetic peptide
  Seed: VSFRGRGVF
VFFRGRGVW

SEQ ID NO: 19278 - protein, 9 aa, Artificial Sequence
  Description of Artificial Sequence: Synthetic peptide
  Seed: VSFRGRGVF
VFFRGRGVY

SEQ ID NO: 19279 - protein, 9 aa, Artificial Sequence
  Description of Artificial Sequence: Synthetic peptide
  Seed: VSFRGRGVF
VFFRGRGVV

SEQ ID NO: 19280 - protein, 9 aa, Artificial Sequence
  Description of Artificial Sequence: Synthetic peptide
  Seed: VSFRGRGVF
VPFRGRGVF

SEQ ID NO: 19281 - protein, 9 aa, Artificial Sequence
  Description of Artificial Sequence: Synthetic peptide
  Seed: VSFRGRGVF
VPFRGRGVY

SEQ ID NO: 19282 - protein, 9 aa, Artificial Sequence
  Description of Artificial Sequence: Synthetic peptide
  Seed: VSFRGRGVF
VSFRGRGVH

SEQ ID NO: 19283 - protein, 9 aa, Artificial Sequence
  Description of Artificial Sequence: Synthetic peptide
  Seed: VSFRGRGVF
VSFRGRGVI

SEQ ID NO: 19284 - protein, 9 aa, Artificial Sequence
  Description of Artificial Sequence: Synthetic peptide
  Seed: VSFRGRGVF
VSFRGRGVL

SEQ ID NO: 19285 - protein, 9 aa, Artificial Sequence
  Description of Artificial Sequence: Synthetic peptide
  Seed: VSFRGRGVF
VSFRGRGVM

SEQ ID NO: 19286 - protein, 9 aa, Artificial Sequence
  Description of Artificial Sequence: Synthetic peptide
  Seed: VSFRGRGVF
VSFRGRGVW

SEQ ID NO: 19287 - protein, 9 aa, Artificial Sequence
  Description of Artificial Sequence: Synthetic peptide
  Seed: VSFRGRGVF
VSFRGRGVY

SEQ ID NO: 19288 - protein, 9 aa, Artificial Sequence
  Description of Artificial Sequence: Synthetic peptide
  Seed: VSFRGRGVF
VYFRGRGVV

SEQ ID NO: 19289 - protein, 9 aa, Artificial Sequence
  Description of Artificial Sequence: Synthetic peptide
  Seed: VSFRGRGVF
VVFRGRGVI

SEQ ID NO: 19290 - protein, 9 aa, Artificial Sequence
  Description of Artificial Sequence: Synthetic peptide
  Seed: VSFRGRGVF
VVFRGRGVL

SEQ ID NO: 19291 - protein, 11 aa, Artificial Sequence
  Description of Artificial Sequence: Synthetic peptide
  Seed: VSFRGRGVFEL
VVFRGRGVFEY

SEQ ID NO: 19292 - protein, 11 aa, Artificial Sequence
  Description of Artificial Sequence: Synthetic peptide
  Seed: VSFRGRGVFEL
VVFRGRGVFEW

SEQ ID NO: 19293 - protein, 9 aa, Artificial Sequence
  Description of Artificial Sequence: Synthetic peptide
  Seed: VSFRGRGVF
VVFRGRGVM

SEQ ID NO: 19294 - protein, 11 aa, Artificial Sequence
  Description of Artificial Sequence: Synthetic peptide
  Seed: VSFRGRGVFEL
VVFRGRGVFEF

SEQ ID NO: 19295 - protein, 9 aa, Artificial Sequence
  Description of Artificial Sequence: Synthetic peptide
  Seed: VSFRGRGVF
VVFRGRGVF

SEQ ID NO: 19296 - protein, 9 aa, Artificial Sequence
  Description of Artificial Sequence: Synthetic peptide
  Seed: VSFRGRGVF
VVFRGRGVW

SEQ ID NO: 19297 - protein, 9 aa, Artificial Sequence
  Description of Artificial Sequence: Synthetic peptide
  Seed: VSFRGRGVF
VVFRGRGVY

SEQ ID NO: 19298 - protein, 9 aa, Artificial Sequence
  Description of Artificial Sequence: Synthetic peptide
  Seed: VSFRGRGVF
VVFRGRGVV

SEQ ID NO: 19299 - protein, 11 aa, Artificial Sequence
  Description of Artificial Sequence: Synthetic peptide
  Seed: VSFRGRGVFEL
VAFRGRGVFEF

SEQ ID NO: 19300 - protein, 11 aa, Artificial Sequence
  Description of Artificial Sequence: Synthetic peptide
  Seed: VSFRGRGVFEL
VAFRGRGVFEW

SEQ ID NO: 19301 - protein, 11 aa, Artificial Sequence
  Description of Artificial Sequence: Synthetic peptide
  Seed: VSFRGRGVFEL
VAFRGRGVFEY

SEQ ID NO: 19302 - protein, 11 aa, Artificial Sequence
  Description of Artificial Sequence: Synthetic peptide
  Seed: VSFRGRGVFEL
VIFRGRGVFEW

SEQ ID NO: 19303 - protein, 11 aa, Artificial Sequence
  Description of Artificial Sequence: Synthetic peptide
  Seed: VSFRGRGVFEL
VMFRGRGVFEW

SEQ ID NO: 19304 - protein, 11 aa, Artificial Sequence
  Description of Artificial Sequence: Synthetic peptide
  Seed: VSFRGRGVFEL
VSFRGRGVFEI

SEQ ID NO: 19305 - protein, 11 aa, Artificial Sequence
  Description of Artificial Sequence: Synthetic peptide
  Seed: VSFRGRGVFEL
VSFRGRGVFEM

SEQ ID NO: 19306 - protein, 11 aa, Artificial Sequence
  Description of Artificial Sequence: Synthetic peptide
  Seed: VSFRGRGVFEL
VSFRGRGVFEF

SEQ ID NO: 19307 - protein, 11 aa, Artificial Sequence
  Description of Artificial Sequence: Synthetic peptide
  Seed: VSFRGRGVFEL
VSFRGRGVFEW

SEQ ID NO: 19308 - protein, 11 aa, Artificial Sequence
  Description of Artificial Sequence: Synthetic peptide
  Seed: VSFRGRGVFEL
VSFRGRGVFEY

SEQ ID NO: 19309 - protein, 11 aa, Artificial Sequence
  Description of Artificial Sequence: Synthetic peptide
  Seed: VSFRGRGVFEL
VTFRGRGVFEL

SEQ ID NO: 19310 - protein, 11 aa, Artificial Sequence
  Description of Artificial Sequence: Synthetic peptide
  Seed: VSFRGRGVFEL
VTFRGRGVFEM

SEQ ID NO: 19311 - protein, 11 aa, Artificial Sequence
  Description of Artificial Sequence: Synthetic peptide
  Seed: VSFRGRGVFEL
VTFRGRGVFEF

SEQ ID NO: 19312 - protein, 11 aa, Artificial Sequence
  Description of Artificial Sequence: Synthetic peptide
  Seed: VSFRGRGVFEL
VTFRGRGVFEW

SEQ ID NO: 19313 - protein, 11 aa, Artificial Sequence
  Description of Artificial Sequence: Synthetic peptide
  Seed: VSFRGRGVFEL
VTFRGRGVFEY

SEQ ID NO: 19314 - protein, 10 aa, Artificial Sequence
  Description of Artificial Sequence: Synthetic peptide
  Seed: VVPRGQLSTR
VFPRGQLSTK

SEQ ID NO: 19315 - protein, 10 aa, Artificial Sequence
  Description of Artificial Sequence: Synthetic peptide
  Seed: VVPRGQLSTR
VTPRGQLSTR

SEQ ID NO: 19316 - protein, 10 aa, Artificial Sequence
  Description of Artificial Sequence: Synthetic peptide
  Seed: VWMACHSAAF
VHMACHSAAI

SEQ ID NO: 19317 - protein, 9 aa, Artificial Sequence
  Description of Artificial Sequence: Synthetic peptide
  Seed: VWMACHSAA
VVMACHSAW

SEQ ID NO: 19318 - protein, 9 aa, Artificial Sequence
  Description of Artificial Sequence: Synthetic peptide
  Seed: VWMACHSAA
VYMACHSAS

SEQ ID NO: 19319 - protein, 9 aa, Artificial Sequence
  Description of Artificial Sequence: Synthetic peptide
  Seed: VWMACHSAA
VYMACHSAT

SEQ ID NO: 19320 - protein, 9 aa, Artificial Sequence
  Description of Artificial Sequence: Synthetic peptide
  Seed: VWMACHSAA
VYMACHSAW

SEQ ID NO: 19321 - protein, 9 aa, Artificial Sequence
  Description of Artificial Sequence: Synthetic peptide
  Seed: VWMACHSAA
VYMACHSAY

SEQ ID NO: 19322 - protein, 9 aa, Artificial Sequence
  Description of Artificial Sequence: Synthetic peptide
  Seed: VWMACHSAA
VYMACHSAV

SEQ ID NO: 19323 - protein, 9 aa, Artificial Sequence
  Description of Artificial Sequence: Synthetic peptide
  Seed: VWMACHSAA
VVMACHSAI

SEQ ID NO: 19324 - protein, 9 aa, Artificial Sequence
  Description of Artificial Sequence: Synthetic peptide
  Seed: VWMACHSAA
VVMACHSAL

SEQ ID NO: 19325 - protein, 9 aa, Artificial Sequence
  Description of Artificial Sequence: Synthetic peptide
  Seed: VWMACHSAA
VVMACHSAM

SEQ ID NO: 19326 - protein, 9 aa, Artificial Sequence
  Description of Artificial Sequence: Synthetic peptide
  Seed: VWMACHSAA
VVMACHSAF

SEQ ID NO: 19327 - protein, 9 aa, Artificial Sequence
  Description of Artificial Sequence: Synthetic peptide
  Seed: VWMACHSAA
VVMACHSAY

SEQ ID NO: 19328 - protein, 10 aa, Artificial Sequence
  Description of Artificial Sequence: Synthetic peptide
  Seed: VWMACHSAAF
VRMACHSAAL

SEQ ID NO: 19329 - protein, 9 aa, Artificial Sequence
  Description of Artificial Sequence: Synthetic peptide
  Seed: VWMACHSAA
VVMACHSAV

SEQ ID NO: 19330 - protein, 10 aa, Artificial Sequence
  Description of Artificial Sequence: Synthetic peptide
  Seed: VWMACHSAAF
VAMACHSAAH

SEQ ID NO: 19331 - protein, 10 aa, Artificial Sequence
  Description of Artificial Sequence: Synthetic peptide
  Seed: VWMACHSAAF
VAMACHSAAI

SEQ ID NO: 19332 - protein, 10 aa, Artificial Sequence
  Description of Artificial Sequence: Synthetic peptide
  Seed: VWMACHSAAF
VAMACHSAAL

SEQ ID NO: 19333 - protein, 10 aa, Artificial Sequence
  Description of Artificial Sequence: Synthetic peptide
  Seed: VWMACHSAAF
VAMACHSAAM

SEQ ID NO: 19334 - protein, 10 aa, Artificial Sequence
  Description of Artificial Sequence: Synthetic peptide
  Seed: VWMACHSAAF
VAMACHSAAF

SEQ ID NO: 19335 - protein, 10 aa, Artificial Sequence
  Description of Artificial Sequence: Synthetic peptide
  Seed: VWMACHSAAF
VAMACHSAAW

SEQ ID NO: 19336 - protein, 10 aa, Artificial Sequence
  Description of Artificial Sequence: Synthetic peptide
  Seed: VWMACHSAAF
VAMACHSAAY

SEQ ID NO: 19337 - protein, 10 aa, Artificial Sequence
  Description of Artificial Sequence: Synthetic peptide
  Seed: VWMACHSAAF
VRMACHSAAH

SEQ ID NO: 19338 - protein, 9 aa, Artificial Sequence
  Description of Artificial Sequence: Synthetic peptide
  Seed: VWMACHSAA
VYMACHSAF

SEQ ID NO: 19339 - protein, 9 aa, Artificial Sequence
  Description of Artificial Sequence: Synthetic peptide
  Seed: VWMACHSAA
VYMACHSAM

SEQ ID NO: 19340 - protein, 9 aa, Artificial Sequence
  Description of Artificial Sequence: Synthetic peptide
  Seed: VWMACHSAA
VYMACHSAK

SEQ ID NO: 19341 - protein, 9 aa, Artificial Sequence
  Description of Artificial Sequence: Synthetic peptide
  Seed: VWMACHSAA
VYMACHSAL

SEQ ID NO: 19342 - protein, 9 aa, Artificial Sequence
  Description of Artificial Sequence: Synthetic peptide
  Seed: VWMACHSAA
VTMACHSAY

SEQ ID NO: 19343 - protein, 9 aa, Artificial Sequence
  Description of Artificial Sequence: Synthetic peptide
  Seed: VWMACHSAA
VTMACHSAV

SEQ ID NO: 19344 - protein, 9 aa, Artificial Sequence
  Description of Artificial Sequence: Synthetic peptide
  Seed: VWMACHSAA
VWMACHSAH

SEQ ID NO: 19345 - protein, 9 aa, Artificial Sequence
  Description of Artificial Sequence: Synthetic peptide
  Seed: VWMACHSAA
VWMACHSAI

SEQ ID NO: 19346 - protein, 9 aa, Artificial Sequence
  Description of Artificial Sequence: Synthetic peptide
  Seed: VWMACHSAA
VWMACHSAL

SEQ ID NO: 19347 - protein, 9 aa, Artificial Sequence
  Description of Artificial Sequence: Synthetic peptide
  Seed: VWMACHSAA
VWMACHSAM

SEQ ID NO: 19348 - protein, 9 aa, Artificial Sequence
  Description of Artificial Sequence: Synthetic peptide
  Seed: VWMACHSAA
VWMACHSAF

SEQ ID NO: 19349 - protein, 9 aa, Artificial Sequence
  Description of Artificial Sequence: Synthetic peptide
  Seed: VWMACHSAA
VWMACHSAW

SEQ ID NO: 19350 - protein, 9 aa, Artificial Sequence
  Description of Artificial Sequence: Synthetic peptide
  Seed: VWMACHSAA
VWMACHSAY

SEQ ID NO: 19351 - protein, 9 aa, Artificial Sequence
  Description of Artificial Sequence: Synthetic peptide
  Seed: VWMACHSAA
VWMACHSAV

SEQ ID NO: 19352 - protein, 9 aa, Artificial Sequence
  Description of Artificial Sequence: Synthetic peptide
  Seed: VWMACHSAA
VYMACHSAA

SEQ ID NO: 19353 - protein, 9 aa, Artificial Sequence
  Description of Artificial Sequence: Synthetic peptide
  Seed: VWMACHSAA
VYMACHSAR

SEQ ID NO: 19354 - protein, 9 aa, Artificial Sequence
  Description of Artificial Sequence: Synthetic peptide
  Seed: VWMACHSAA
VYMACHSAN

SEQ ID NO: 19355 - protein, 9 aa, Artificial Sequence
  Description of Artificial Sequence: Synthetic peptide
  Seed: VWMACHSAA
VYMACHSAC

SEQ ID NO: 19356 - protein, 9 aa, Artificial Sequence
  Description of Artificial Sequence: Synthetic peptide
  Seed: VWMACHSAA
VYMACHSAQ

SEQ ID NO: 19357 - protein, 9 aa, Artificial Sequence
  Description of Artificial Sequence: Synthetic peptide
  Seed: VWMACHSAA
VYMACHSAE

SEQ ID NO: 19358 - protein, 9 aa, Artificial Sequence
  Description of Artificial Sequence: Synthetic peptide
  Seed: VWMACHSAA
VYMACHSAG

SEQ ID NO: 19359 - protein, 9 aa, Artificial Sequence
  Description of Artificial Sequence: Synthetic peptide
  Seed: VWMACHSAA
VYMACHSAH

SEQ ID NO: 19360 - protein, 9 aa, Artificial Sequence
  Description of Artificial Sequence: Synthetic peptide
  Seed: VWMACHSAA
VYMACHSAI

SEQ ID NO: 19361 - protein, 10 aa, Artificial Sequence
  Description of Artificial Sequence: Synthetic peptide
  Seed: VWMACHSAAF
VRMACHSAAI

SEQ ID NO: 19362 - protein, 10 aa, Artificial Sequence
  Description of Artificial Sequence: Synthetic peptide
  Seed: VWMACHSAAF
VRMACHSAAM

SEQ ID NO: 19363 - protein, 10 aa, Artificial Sequence
  Description of Artificial Sequence: Synthetic peptide
  Seed: VVPRGQLSTR
VWPRGQLSTR

SEQ ID NO: 19364 - protein, 10 aa, Artificial Sequence
  Description of Artificial Sequence: Synthetic peptide
  Seed: VWMACHSAAF
VEMACHSAAL

SEQ ID NO: 19365 - protein, 10 aa, Artificial Sequence
  Description of Artificial Sequence: Synthetic peptide
  Seed: VWMACHSAAF
VQMACHSAAM

SEQ ID NO: 19366 - protein, 10 aa, Artificial Sequence
  Description of Artificial Sequence: Synthetic peptide
  Seed: VWMACHSAAF
VQMACHSAAF

SEQ ID NO: 19367 - protein, 10 aa, Artificial Sequence
  Description of Artificial Sequence: Synthetic peptide
  Seed: VWMACHSAAF
VQMACHSAAS

SEQ ID NO: 19368 - protein, 10 aa, Artificial Sequence
  Description of Artificial Sequence: Synthetic peptide
  Seed: VWMACHSAAF
VQMACHSAAT

SEQ ID NO: 19369 - protein, 10 aa, Artificial Sequence
  Description of Artificial Sequence: Synthetic peptide
  Seed: VWMACHSAAF
VQMACHSAAW

SEQ ID NO: 19370 - protein, 10 aa, Artificial Sequence
  Description of Artificial Sequence: Synthetic peptide
  Seed: VWMACHSAAF
VQMACHSAAY

SEQ ID NO: 19371 - protein, 10 aa, Artificial Sequence
  Description of Artificial Sequence: Synthetic peptide
  Seed: VWMACHSAAF
VQMACHSAAV

SEQ ID NO: 19372 - protein, 10 aa, Artificial Sequence
  Description of Artificial Sequence: Synthetic peptide
  Seed: VWMACHSAAF
VEMACHSAAH

SEQ ID NO: 19373 - protein, 10 aa, Artificial Sequence
  Description of Artificial Sequence: Synthetic peptide
  Seed: VWMACHSAAF
VEMACHSAAI

SEQ ID NO: 19374 - protein, 10 aa, Artificial Sequence
  Description of Artificial Sequence: Synthetic peptide
  Seed: VWMACHSAAF
VEMACHSAAM

SEQ ID NO: 19375 - protein, 10 aa, Artificial Sequence
  Description of Artificial Sequence: Synthetic peptide
  Seed: VWMACHSAAF
VRMACHSAAF

SEQ ID NO: 19376 - protein, 10 aa, Artificial Sequence
  Description of Artificial Sequence: Synthetic peptide
  Seed: VWMACHSAAF
VEMACHSAAF

SEQ ID NO: 19377 - protein, 10 aa, Artificial Sequence
  Description of Artificial Sequence: Synthetic peptide
  Seed: VWMACHSAAF
VEMACHSAAW

SEQ ID NO: 19378 - protein, 10 aa, Artificial Sequence
  Description of Artificial Sequence: Synthetic peptide
  Seed: VWMACHSAAF
VEMACHSAAY

SEQ ID NO: 19379 - protein, 10 aa, Artificial Sequence
  Description of Artificial Sequence: Synthetic peptide
  Seed: VWMACHSAAF
VGMACHSAAL

SEQ ID NO: 19380 - protein, 10 aa, Artificial Sequence
  Description of Artificial Sequence: Synthetic peptide
  Seed: VWMACHSAAF
VGMACHSAAM

SEQ ID NO: 19381 - protein, 10 aa, Artificial Sequence
  Description of Artificial Sequence: Synthetic peptide
  Seed: VWMACHSAAF
VGMACHSAAF

SEQ ID NO: 19382 - protein, 10 aa, Artificial Sequence
  Description of Artificial Sequence: Synthetic peptide
  Seed: VWMACHSAAF
VGMACHSAAW

SEQ ID NO: 19383 - protein, 10 aa, Artificial Sequence
  Description of Artificial Sequence: Synthetic peptide
  Seed: VWMACHSAAF
VGMACHSAAY

SEQ ID NO: 19384 - protein, 10 aa, Artificial Sequence
  Description of Artificial Sequence: Synthetic peptide
  Seed: VWMACHSAAF
VHMACHSAAH

SEQ ID NO: 19385 - protein, 10 aa, Artificial Sequence
  Description of Artificial Sequence: Synthetic peptide
  Seed: VWMACHSAAF
VQMACHSAAL

SEQ ID NO: 19386 - protein, 10 aa, Artificial Sequence
  Description of Artificial Sequence: Synthetic peptide
  Seed: VWMACHSAAF
VQMACHSAAI

SEQ ID NO: 19387 - protein, 10 aa, Artificial Sequence
  Description of Artificial Sequence: Synthetic peptide
  Seed: VWMACHSAAF
VQMACHSAAH

SEQ ID NO: 19388 - protein, 10 aa, Artificial Sequence
  Description of Artificial Sequence: Synthetic peptide
  Seed: VWMACHSAAF
VQMACHSAAG

SEQ ID NO: 19389 - protein, 10 aa, Artificial Sequence
  Description of Artificial Sequence: Synthetic peptide
  Seed: VWMACHSAAF
VRMACHSAAW

SEQ ID NO: 19390 - protein, 10 aa, Artificial Sequence
  Description of Artificial Sequence: Synthetic peptide
  Seed: VWMACHSAAF
VRMACHSAAY

SEQ ID NO: 19391 - protein, 10 aa, Artificial Sequence
  Description of Artificial Sequence: Synthetic peptide
  Seed: VWMACHSAAF
VNMACHSAAL

SEQ ID NO: 19392 - protein, 10 aa, Artificial Sequence
  Description of Artificial Sequence: Synthetic peptide
  Seed: VWMACHSAAF
VNMACHSAAM

SEQ ID NO: 19393 - protein, 10 aa, Artificial Sequence
  Description of Artificial Sequence: Synthetic peptide
  Seed: VWMACHSAAF
VNMACHSAAF

SEQ ID NO: 19394 - protein, 10 aa, Artificial Sequence
  Description of Artificial Sequence: Synthetic peptide
  Seed: VWMACHSAAF
VNMACHSAAW

SEQ ID NO: 19395 - protein, 10 aa, Artificial Sequence
  Description of Artificial Sequence: Synthetic peptide
  Seed: VWMACHSAAF
VNMACHSAAY

SEQ ID NO: 19396 - protein, 10 aa, Artificial Sequence
  Description of Artificial Sequence: Synthetic peptide
  Seed: VWMACHSAAF
VDMACHSAAL

SEQ ID NO: 19397 - protein, 10 aa, Artificial Sequence
  Description of Artificial Sequence: Synthetic peptide
  Seed: VWMACHSAAF
VDMACHSAAM

SEQ ID NO: 19398 - protein, 10 aa, Artificial Sequence
  Description of Artificial Sequence: Synthetic peptide
  Seed: VWMACHSAAF
VDMACHSAAF

SEQ ID NO: 19399 - protein, 10 aa, Artificial Sequence
  Description of Artificial Sequence: Synthetic peptide
  Seed: VWMACHSAAF
VDMACHSAAW

SEQ ID NO: 19400 - protein, 10 aa, Artificial Sequence
  Description of Artificial Sequence: Synthetic peptide
  Seed: VWMACHSAAF
VDMACHSAAY

SEQ ID NO: 19401 - protein, 10 aa, Artificial Sequence
  Description of Artificial Sequence: Synthetic peptide
  Seed: VWMACHSAAF
VCMACHSAAL

SEQ ID NO: 19402 - protein, 10 aa, Artificial Sequence
  Description of Artificial Sequence: Synthetic peptide
  Seed: VWMACHSAAF
VCMACHSAAM

SEQ ID NO: 19403 - protein, 10 aa, Artificial Sequence
  Description of Artificial Sequence: Synthetic peptide
  Seed: VWMACHSAAF
VCMACHSAAF

SEQ ID NO: 19404 - protein, 10 aa, Artificial Sequence
  Description of Artificial Sequence: Synthetic peptide
  Seed: VWMACHSAAF
VCMACHSAAW

SEQ ID NO: 19405 - protein, 10 aa, Artificial Sequence
  Description of Artificial Sequence: Synthetic peptide
  Seed: VWMACHSAAF
VCMACHSAAY

SEQ ID NO: 19406 - protein, 10 aa, Artificial Sequence
  Description of Artificial Sequence: Synthetic peptide
  Seed: VWMACHSAAF
VQMACHSAAA

SEQ ID NO: 19407 - protein, 10 aa, Artificial Sequence
  Description of Artificial Sequence: Synthetic peptide
  Seed: VWMACHSAAF
VQMACHSAAC

SEQ ID NO: 19408 - protein, 9 aa, Artificial Sequence
  Description of Artificial Sequence: Synthetic peptide
  Seed: VWMACHSAA
VTMACHSAW

SEQ ID NO: 19409 - protein, 9 aa, Artificial Sequence
  Description of Artificial Sequence: Synthetic peptide
  Seed: VWMACHSAA
VTMACHSAF

SEQ ID NO: 19410 - protein, 9 aa, Artificial Sequence
  Description of Artificial Sequence: Synthetic peptide
  Seed: VWMACHSAA
VTMACHSAM

SEQ ID NO: 19411 - protein, 9 aa, Artificial Sequence
  Description of Artificial Sequence: Synthetic peptide
  Seed: VWMACHSAA
VHMACHSAL

SEQ ID NO: 19412 - protein, 9 aa, Artificial Sequence
  Description of Artificial Sequence: Synthetic peptide
  Seed: VWMACHSAA
VQMACHSAM

SEQ ID NO: 19413 - protein, 9 aa, Artificial Sequence
  Description of Artificial Sequence: Synthetic peptide
  Seed: VWMACHSAA
VQMACHSAF

SEQ ID NO: 19414 - protein, 9 aa, Artificial Sequence
  Description of Artificial Sequence: Synthetic peptide
  Seed: VWMACHSAA
VQMACHSAY

SEQ ID NO: 19415 - protein, 9 aa, Artificial Sequence
  Description of Artificial Sequence: Synthetic peptide
  Seed: VWMACHSAA
VQMACHSAV

SEQ ID NO: 19416 - protein, 9 aa, Artificial Sequence
  Description of Artificial Sequence: Synthetic peptide
  Seed: VWMACHSAA
VGMACHSAL

SEQ ID NO: 19417 - protein, 9 aa, Artificial Sequence
  Description of Artificial Sequence: Synthetic peptide
  Seed: VWMACHSAA
VGMACHSAM

SEQ ID NO: 19418 - protein, 9 aa, Artificial Sequence
  Description of Artificial Sequence: Synthetic peptide
  Seed: VWMACHSAA
VGMACHSAF

SEQ ID NO: 19419 - protein, 9 aa, Artificial Sequence
  Description of Artificial Sequence: Synthetic peptide
  Seed: VWMACHSAA
VGMACHSAY

SEQ ID NO: 19420 - protein, 9 aa, Artificial Sequence
  Description of Artificial Sequence: Synthetic peptide
  Seed: VWMACHSAA
VHMACHSAI

SEQ ID NO: 19421 - protein, 9 aa, Artificial Sequence
  Description of Artificial Sequence: Synthetic peptide
  Seed: VWMACHSAA
VHMACHSAM

SEQ ID NO: 19422 - protein, 9 aa, Artificial Sequence
  Description of Artificial Sequence: Synthetic peptide
  Seed: VWMACHSAA
VTMACHSAL

SEQ ID NO: 19423 - protein, 9 aa, Artificial Sequence
  Description of Artificial Sequence: Synthetic peptide
  Seed: VWMACHSAA
VHMACHSAF

SEQ ID NO: 19424 - protein, 9 aa, Artificial Sequence
  Description of Artificial Sequence: Synthetic peptide
  Seed: VWMACHSAA
VHMACHSAW

SEQ ID NO: 19425 - protein, 9 aa, Artificial Sequence
  Description of Artificial Sequence: Synthetic peptide
  Seed: VWMACHSAA
VHMACHSAY

SEQ ID NO: 19426 - protein, 9 aa, Artificial Sequence
  Description of Artificial Sequence: Synthetic peptide
  Seed: VWMACHSAA
VHMACHSAV

SEQ ID NO: 19427 - protein, 9 aa, Artificial Sequence
  Description of Artificial Sequence: Synthetic peptide
  Seed: VWMACHSAA
VIMACHSAI

SEQ ID NO: 19428 - protein, 9 aa, Artificial Sequence
  Description of Artificial Sequence: Synthetic peptide
  Seed: VWMACHSAA
VIMACHSAL

SEQ ID NO: 19429 - protein, 9 aa, Artificial Sequence
  Description of Artificial Sequence: Synthetic peptide
  Seed: VWMACHSAA
VIMACHSAM

SEQ ID NO: 19430 - protein, 9 aa, Artificial Sequence
  Description of Artificial Sequence: Synthetic peptide
  Seed: VWMACHSAA
VIMACHSAF

SEQ ID NO: 19431 - protein, 9 aa, Artificial Sequence
  Description of Artificial Sequence: Synthetic peptide
  Seed: VWMACHSAA
VIMACHSAY

SEQ ID NO: 19432 - protein, 9 aa, Artificial Sequence
  Description of Artificial Sequence: Synthetic peptide
  Seed: VWMACHSAA
VQMACHSAL

SEQ ID NO: 19433 - protein, 9 aa, Artificial Sequence
  Description of Artificial Sequence: Synthetic peptide
  Seed: VWMACHSAA
VQMACHSAI

SEQ ID NO: 19434 - protein, 9 aa, Artificial Sequence
  Description of Artificial Sequence: Synthetic peptide
  Seed: VWMACHSAA
VCMACHSAY

SEQ ID NO: 19435 - protein, 9 aa, Artificial Sequence
  Description of Artificial Sequence: Synthetic peptide
  Seed: VWMACHSAA
VCMACHSAM

SEQ ID NO: 19436 - protein, 10 aa, Artificial Sequence
  Description of Artificial Sequence: Synthetic peptide
  Seed: VVPRGQLSTR
VYPRGQLSTR

SEQ ID NO: 19437 - protein, 10 aa, Artificial Sequence
  Description of Artificial Sequence: Synthetic peptide
  Seed: VVPRGQLSTR
VYPRGQLSTK

SEQ ID NO: 19438 - protein, 9 aa, Artificial Sequence
  Description of Artificial Sequence: Synthetic peptide
  Seed: VWMACHSAA
VAMACHSAI

SEQ ID NO: 19439 - protein, 9 aa, Artificial Sequence
  Description of Artificial Sequence: Synthetic peptide
  Seed: VWMACHSAA
VAMACHSAL

SEQ ID NO: 19440 - protein, 9 aa, Artificial Sequence
  Description of Artificial Sequence: Synthetic peptide
  Seed: VWMACHSAA
VAMACHSAM

SEQ ID NO: 19441 - protein, 9 aa, Artificial Sequence
  Description of Artificial Sequence: Synthetic peptide
  Seed: VWMACHSAA
VAMACHSAF

SEQ ID NO: 19442 - protein, 9 aa, Artificial Sequence
  Description of Artificial Sequence: Synthetic peptide
  Seed: VWMACHSAA
VAMACHSAW

SEQ ID NO: 19443 - protein, 9 aa, Artificial Sequence
  Description of Artificial Sequence: Synthetic peptide
  Seed: VWMACHSAA
VAMACHSAY

SEQ ID NO: 19444 - protein, 9 aa, Artificial Sequence
  Description of Artificial Sequence: Synthetic peptide
  Seed: VWMACHSAA
VAMACHSAV

SEQ ID NO: 19445 - protein, 9 aa, Artificial Sequence
  Description of Artificial Sequence: Synthetic peptide
  Seed: VWMACHSAA
VRMACHSAI

SEQ ID NO: 19446 - protein, 9 aa, Artificial Sequence
  Description of Artificial Sequence: Synthetic peptide
  Seed: VWMACHSAA
VRMACHSAL

SEQ ID NO: 19447 - protein, 9 aa, Artificial Sequence
  Description of Artificial Sequence: Synthetic peptide
  Seed: VWMACHSAA
VRMACHSAM

SEQ ID NO: 19448 - protein, 9 aa, Artificial Sequence
  Description of Artificial Sequence: Synthetic peptide
  Seed: VWMACHSAA
VRMACHSAF

SEQ ID NO: 19449 - protein, 9 aa, Artificial Sequence
  Description of Artificial Sequence: Synthetic peptide
  Seed: VWMACHSAA
VRMACHSAY

SEQ ID NO: 19450 - protein, 9 aa, Artificial Sequence
  Description of Artificial Sequence: Synthetic peptide
  Seed: VWMACHSAA
VRMACHSAV

SEQ ID NO: 19451 - protein, 9 aa, Artificial Sequence
  Description of Artificial Sequence: Synthetic peptide
  Seed: VWMACHSAA
VNMACHSAL

SEQ ID NO: 19452 - protein, 9 aa, Artificial Sequence
  Description of Artificial Sequence: Synthetic peptide
  Seed: VWMACHSAA
VNMACHSAM

SEQ ID NO: 19453 - protein, 9 aa, Artificial Sequence
  Description of Artificial Sequence: Synthetic peptide
  Seed: VWMACHSAA
VNMACHSAF

SEQ ID NO: 19454 - protein, 9 aa, Artificial Sequence
  Description of Artificial Sequence: Synthetic peptide
  Seed: VWMACHSAA
VNMACHSAY

SEQ ID NO: 19455 - protein, 9 aa, Artificial Sequence
  Description of Artificial Sequence: Synthetic peptide
  Seed: VWMACHSAA
VIMACHSAV

SEQ ID NO: 19456 - protein, 9 aa, Artificial Sequence
  Description of Artificial Sequence: Synthetic peptide
  Seed: VWMACHSAA
VLMACHSAI

SEQ ID NO: 19457 - protein, 9 aa, Artificial Sequence
  Description of Artificial Sequence: Synthetic peptide
  Seed: VWMACHSAA
VLMACHSAL

SEQ ID NO: 19458 - protein, 9 aa, Artificial Sequence
  Description of Artificial Sequence: Synthetic peptide
  Seed: VWMACHSAA
VFMACHSAL

SEQ ID NO: 19459 - protein, 9 aa, Artificial Sequence
  Description of Artificial Sequence: Synthetic peptide
  Seed: VWMACHSAA
VFMACHSAF

SEQ ID NO: 19460 - protein, 9 aa, Artificial Sequence
  Description of Artificial Sequence: Synthetic peptide
  Seed: VWMACHSAA
VFMACHSAS

SEQ ID NO: 19461 - protein, 9 aa, Artificial Sequence
  Description of Artificial Sequence: Synthetic peptide
  Seed: VWMACHSAA
VFMACHSAT

SEQ ID NO: 19462 - protein, 9 aa, Artificial Sequence
  Description of Artificial Sequence: Synthetic peptide
  Seed: VWMACHSAA
VFMACHSAW

SEQ ID NO: 19463 - protein, 9 aa, Artificial Sequence
  Description of Artificial Sequence: Synthetic peptide
  Seed: VWMACHSAA
VFMACHSAY

SEQ ID NO: 19464 - protein, 9 aa, Artificial Sequence
  Description of Artificial Sequence: Synthetic peptide
  Seed: VWMACHSAA
VFMACHSAV

SEQ ID NO: 19465 - protein, 9 aa, Artificial Sequence
  Description of Artificial Sequence: Synthetic peptide
  Seed: VWMACHSAA
VPMACHSAI

SEQ ID NO: 19466 - protein, 9 aa, Artificial Sequence
  Description of Artificial Sequence: Synthetic peptide
  Seed: VWMACHSAA
VPMACHSAL

SEQ ID NO: 19467 - protein, 9 aa, Artificial Sequence
  Description of Artificial Sequence: Synthetic peptide
  Seed: VWMACHSAA
VPMACHSAM

SEQ ID NO: 19468 - protein, 9 aa, Artificial Sequence
  Description of Artificial Sequence: Synthetic peptide
  Seed: VWMACHSAA
VPMACHSAF

SEQ ID NO: 19469 - protein, 9 aa, Artificial Sequence
  Description of Artificial Sequence: Synthetic peptide
  Seed: VWMACHSAA
VPMACHSAY

SEQ ID NO: 19470 - protein, 9 aa, Artificial Sequence
  Description of Artificial Sequence: Synthetic peptide
  Seed: VWMACHSAA
VSMACHSAI

SEQ ID NO: 19471 - protein, 9 aa, Artificial Sequence
  Description of Artificial Sequence: Synthetic peptide
  Seed: VWMACHSAA
VSMACHSAL

SEQ ID NO: 19472 - protein, 9 aa, Artificial Sequence
  Description of Artificial Sequence: Synthetic peptide
  Seed: VWMACHSAA
VSMACHSAM

SEQ ID NO: 19473 - protein, 9 aa, Artificial Sequence
  Description of Artificial Sequence: Synthetic peptide
  Seed: VWMACHSAA
VSMACHSAF

SEQ ID NO: 19474 - protein, 9 aa, Artificial Sequence
  Description of Artificial Sequence: Synthetic peptide
  Seed: VWMACHSAA
VSMACHSAW

SEQ ID NO: 19475 - protein, 9 aa, Artificial Sequence
  Description of Artificial Sequence: Synthetic peptide
  Seed: VWMACHSAA
VSMACHSAY

SEQ ID NO: 19476 - protein, 9 aa, Artificial Sequence
  Description of Artificial Sequence: Synthetic peptide
  Seed: VWMACHSAA
VSMACHSAV

SEQ ID NO: 19477 - protein, 9 aa, Artificial Sequence
  Description of Artificial Sequence: Synthetic peptide
  Seed: VWMACHSAA
VTMACHSAI

SEQ ID NO: 19478 - protein, 9 aa, Artificial Sequence
  Description of Artificial Sequence: Synthetic peptide
  Seed: VWMACHSAA
VFMACHSAM

SEQ ID NO: 19479 - protein, 9 aa, Artificial Sequence
  Description of Artificial Sequence: Synthetic peptide
  Seed: VWMACHSAA
VFMACHSAI

SEQ ID NO: 19480 - protein, 9 aa, Artificial Sequence
  Description of Artificial Sequence: Synthetic peptide
  Seed: VWMACHSAA
VLMACHSAM

SEQ ID NO: 19481 - protein, 9 aa, Artificial Sequence
  Description of Artificial Sequence: Synthetic peptide
  Seed: VWMACHSAA
VFMACHSAH

SEQ ID NO: 19482 - protein, 9 aa, Artificial Sequence
  Description of Artificial Sequence: Synthetic peptide
  Seed: VWMACHSAA
VLMACHSAF

SEQ ID NO: 19483 - protein, 9 aa, Artificial Sequence
  Description of Artificial Sequence: Synthetic peptide
  Seed: VWMACHSAA
VLMACHSAY

SEQ ID NO: 19484 - protein, 9 aa, Artificial Sequence
  Description of Artificial Sequence: Synthetic peptide
  Seed: VWMACHSAA
VLMACHSAV

SEQ ID NO: 19485 - protein, 9 aa, Artificial Sequence
  Description of Artificial Sequence: Synthetic peptide
  Seed: VWMACHSAA
VKMACHSAL

SEQ ID NO: 19486 - protein, 9 aa, Artificial Sequence
  Description of Artificial Sequence: Synthetic peptide
  Seed: VWMACHSAA
VKMACHSAM

SEQ ID NO: 19487 - protein, 9 aa, Artificial Sequence
  Description of Artificial Sequence: Synthetic peptide
  Seed: VWMACHSAA
VKMACHSAF

SEQ ID NO: 19488 - protein, 9 aa, Artificial Sequence
  Description of Artificial Sequence: Synthetic peptide
  Seed: VWMACHSAA
VKMACHSAY

SEQ ID NO: 19489 - protein, 9 aa, Artificial Sequence
  Description of Artificial Sequence: Synthetic peptide
  Seed: VWMACHSAA
VMMACHSAH

SEQ ID NO: 19490 - protein, 9 aa, Artificial Sequence
  Description of Artificial Sequence: Synthetic peptide
  Seed: VWMACHSAA
VMMACHSAI

SEQ ID NO: 19491 - protein, 9 aa, Artificial Sequence
  Description of Artificial Sequence: Synthetic peptide
  Seed: VWMACHSAA
VMMACHSAL

SEQ ID NO: 19492 - protein, 9 aa, Artificial Sequence
  Description of Artificial Sequence: Synthetic peptide
  Seed: VWMACHSAA
VMMACHSAM

SEQ ID NO: 19493 - protein, 9 aa, Artificial Sequence
  Description of Artificial Sequence: Synthetic peptide
  Seed: VWMACHSAA
VMMACHSAF

SEQ ID NO: 19494 - protein, 9 aa, Artificial Sequence
  Description of Artificial Sequence: Synthetic peptide
  Seed: VWMACHSAA
VMMACHSAW

SEQ ID NO: 19495 - protein, 9 aa, Artificial Sequence
  Description of Artificial Sequence: Synthetic peptide
  Seed: VWMACHSAA
VMMACHSAY

SEQ ID NO: 19496 - protein, 9 aa, Artificial Sequence
  Description of Artificial Sequence: Synthetic peptide
  Seed: VWMACHSAA
VMMACHSAV

SEQ ID NO: 19497 - protein, 9 aa, Artificial Sequence
  Description of Artificial Sequence: Synthetic peptide
  Seed: VWMACHSAA
VFMACHSAA

SEQ ID NO: 19498 - protein, 9 aa, Artificial Sequence
  Description of Artificial Sequence: Synthetic peptide
  Seed: VWMACHSAA
VFMACHSAC

SEQ ID NO: 19499 - protein, 9 aa, Artificial Sequence
  Description of Artificial Sequence: Synthetic peptide
  Seed: VWMACHSAA
VFMACHSAQ

SEQ ID NO: 19500 - protein, 9 aa, Artificial Sequence
  Description of Artificial Sequence: Synthetic peptide
  Seed: VWMACHSAA
VFMACHSAG

SEQ ID NO: 19501 - protein, 10 aa, Artificial Sequence
  Description of Artificial Sequence: Synthetic peptide
  Seed: VYGPAVSSGY
VFGPAVSSGF

SEQ ID NO: 19502 - protein, 10 aa, Artificial Sequence
  Description of Artificial Sequence: Synthetic peptide
  Seed: VYGPAVSSGY
VSGPAVSSGY

SEQ ID NO: 19503 - protein, 10 aa, Artificial Sequence
  Description of Artificial Sequence: Synthetic peptide
  Seed: WMACNSAAFE
WQACNSAAFF

SEQ ID NO: 19504 - protein, 10 aa, Artificial Sequence
  Description of Artificial Sequence: Synthetic peptide
  Seed: WMACHSAAFE
WMACHSAAFS

SEQ ID NO: 19505 - protein, 10 aa, Artificial Sequence
  Description of Artificial Sequence: Synthetic peptide
  Seed: WMACHSAAFE
WMACHSAAFQ

SEQ ID NO: 19506 - protein, 10 aa, Artificial Sequence
  Description of Artificial Sequence: Synthetic peptide
  Seed: WMACHSAAFE
WMACHSAAFG

SEQ ID NO: 19507 - protein, 10 aa, Artificial Sequence
  Description of Artificial Sequence: Synthetic peptide
  Seed: WMACHSAAFE
WMACHSAAFH

SEQ ID NO: 19508 - protein, 10 aa, Artificial Sequence
  Description of Artificial Sequence: Synthetic peptide
  Seed: WMACHSAAFE
WMACHSAAFI

SEQ ID NO: 19509 - protein, 10 aa, Artificial Sequence
  Description of Artificial Sequence: Synthetic peptide
  Seed: WMACHSAAFE
WMACHSAAFL

SEQ ID NO: 19510 - protein, 10 aa, Artificial Sequence
  Description of Artificial Sequence: Synthetic peptide
  Seed: WMACHSAAFE
WMACHSAAFK

SEQ ID NO: 19511 - protein, 10 aa, Artificial Sequence
  Description of Artificial Sequence: Synthetic peptide
  Seed: WMACHSAAFE
WMACHSAAFM

SEQ ID NO: 19512 - protein, 10 aa, Artificial Sequence
  Description of Artificial Sequence: Synthetic peptide
  Seed: WMACHSAAFE
WMACHSAAFF

SEQ ID NO: 19513 - protein, 10 aa, Artificial Sequence
  Description of Artificial Sequence: Synthetic peptide
  Seed: WMACHSAAFE
WMACHSAAFP

SEQ ID NO: 19514 - protein, 10 aa, Artificial Sequence
  Description of Artificial Sequence: Synthetic peptide
  Seed: WMACHSAAFE
WMACHSAAFT

SEQ ID NO: 19515 - protein, 10 aa, Artificial Sequence
  Description of Artificial Sequence: Synthetic peptide
  Seed: WMACHSAAFE
WSACHSAAFY

SEQ ID NO: 19516 - protein, 10 aa, Artificial Sequence
  Description of Artificial Sequence: Synthetic peptide
  Seed: WMACHSAAFE
WMACHSAAFW

SEQ ID NO: 19517 - protein, 10 aa, Artificial Sequence
  Description of Artificial Sequence: Synthetic peptide
  Seed: WMACHSAAFE
WMACHSAAFY

SEQ ID NO: 19518 - protein, 10 aa, Artificial Sequence
  Description of Artificial Sequence: Synthetic peptide
  Seed: WMACHSAAFE
WMACHSAAFV

SEQ ID NO: 19519 - protein, 10 aa, Artificial Sequence
  Description of Artificial Sequence: Synthetic peptide
  Seed: WMACHSAAFE
WFACHSAAFF

SEQ ID NO: 19520 - protein, 10 aa, Artificial Sequence
  Description of Artificial Sequence: Synthetic peptide
  Seed: WMACHSAAFE
WFACHSAAFY

SEQ ID NO: 19521 - protein, 10 aa, Artificial Sequence
  Description of Artificial Sequence: Synthetic peptide
  Seed: WMACHSAAFE
WPACHSAAFM

SEQ ID NO: 19522 - protein, 10 aa, Artificial Sequence
  Description of Artificial Sequence: Synthetic peptide
  Seed: WMACHSAAFE
WPACHSAAFF

SEQ ID NO: 19523 - protein, 10 aa, Artificial Sequence
  Description of Artificial Sequence: Synthetic peptide
  Seed: WMACHSAAFE
WPACHSAAFY

SEQ ID NO: 19524 - protein, 10 aa, Artificial Sequence
  Description of Artificial Sequence: Synthetic peptide
  Seed: WMACHSAAFE
WSACHSAAFM

SEQ ID NO: 19525 - protein, 10 aa, Artificial Sequence
  Description of Artificial Sequence: Synthetic peptide
  Seed: WMACHSAAFE
WMACHSAAFC

SEQ ID NO: 19526 - protein, 10 aa, Artificial Sequence
  Description of Artificial Sequence: Synthetic peptide
  Seed: WMACHSAAFE
WMACHSAAFD

SEQ ID NO: 19527 - protein, 10 aa, Artificial Sequence
  Description of Artificial Sequence: Synthetic peptide
  Seed: WMACHSAAFE
WMACHSAAFN

SEQ ID NO: 19528 - protein, 10 aa, Artificial Sequence
  Description of Artificial Sequence: Synthetic peptide
  Seed: WMACHSAAFE
WMACHSAAFR

SEQ ID NO: 19529 - protein, 10 aa, Artificial Sequence
  Description of Artificial Sequence: Synthetic peptide
  Seed: WMACHSAAFE
WKACHSAAFN

SEQ ID NO: 19530 - protein, 10 aa, Artificial Sequence
  Description of Artificial Sequence: Synthetic peptide
  Seed: WMACHSAAFE
WKACHSAAFD

SEQ ID NO: 19531 - protein, 10 aa, Artificial Sequence
  Description of Artificial Sequence: Synthetic peptide
  Seed: WMACHSAAFE
WKACHSAAFC

SEQ ID NO: 19532 - protein, 10 aa, Artificial Sequence
  Description of Artificial Sequence: Synthetic peptide
  Seed: WMACHSAAFE
WKACHSAAFQ

SEQ ID NO: 19533 - protein, 10 aa, Artificial Sequence
  Description of Artificial Sequence: Synthetic peptide
  Seed: WMACHSAAFE
WKACHSAAFE

SEQ ID NO: 19534 - protein, 10 aa, Artificial Sequence
  Description of Artificial Sequence: Synthetic peptide
  Seed: WMACHSAAFE
WKACHSAAFG

SEQ ID NO: 19535 - protein, 10 aa, Artificial Sequence
  Description of Artificial Sequence: Synthetic peptide
  Seed: WMACHSAAFE
WKACHSAAFH

SEQ ID NO: 19536 - protein, 10 aa, Artificial Sequence
  Description of Artificial Sequence: Synthetic peptide
  Seed: WMACHSAAFE
WKACHSAAFI

SEQ ID NO: 19537 - protein, 10 aa, Artificial Sequence
  Description of Artificial Sequence: Synthetic peptide
  Seed: WMACHSAAFE
WKACHSAAFL

SEQ ID NO: 19538 - protein, 10 aa, Artificial Sequence
  Description of Artificial Sequence: Synthetic peptide
  Seed: WMACHSAAFE
WKACHSAAFK

SEQ ID NO: 19539 - protein, 10 aa, Artificial Sequence
  Description of Artificial Sequence: Synthetic peptide
  Seed: WMACHSAAFE
WKACHSAAFM

SEQ ID NO: 19540 - protein, 10 aa, Artificial Sequence
  Description of Artificial Sequence: Synthetic peptide
  Seed: WMACHSAAFE
WKACHSAAFF

SEQ ID NO: 19541 - protein, 10 aa, Artificial Sequence
  Description of Artificial Sequence: Synthetic peptide
  Seed: WMACHSAAFE
WKACHSAAFP

SEQ ID NO: 19542 - protein, 10 aa, Artificial Sequence
  Description of Artificial Sequence: Synthetic peptide
  Seed: WMACHSAAFE
WKACHSAAFS

SEQ ID NO: 19543 - protein, 10 aa, Artificial Sequence
  Description of Artificial Sequence: Synthetic peptide
  Seed: WMACHSAAFE
WKACHSAAFT

SEQ ID NO: 19544 - protein, 10 aa, Artificial Sequence
  Description of Artificial Sequence: Synthetic peptide
  Seed: WMACHSAAFE
WKACHSAAFW

SEQ ID NO: 19545 - protein, 10 aa, Artificial Sequence
  Description of Artificial Sequence: Synthetic peptide
  Seed: WMACHSAAFE
WKACHSAAFY

SEQ ID NO: 19546 - protein, 10 aa, Artificial Sequence
  Description of Artificial Sequence: Synthetic peptide
  Seed: WMACHSAAFE
WKACHSAAFV

SEQ ID NO: 19547 - protein, 10 aa, Artificial Sequence
  Description of Artificial Sequence: Synthetic peptide
  Seed: WMACHSAAFE
WMACHSAAFA

SEQ ID NO: 19548 - protein, 10 aa, Artificial Sequence
  Description of Artificial Sequence: Synthetic peptide
  Seed: WMACHSAAFE
WSACHSAAFF

SEQ ID NO: 19549 - protein, 10 aa, Artificial Sequence
  Description of Artificial Sequence: Synthetic peptide
  Seed: WMACHSAAFE
WTACHSAAFM

SEQ ID NO: 19550 - protein, 10 aa, Artificial Sequence
  Description of Artificial Sequence: Synthetic peptide
  Seed: WMACHSAAFE
WKACHSAAFA

SEQ ID NO: 19551 - protein, 9 aa, Artificial Sequence
  Description of Artificial Sequence: Synthetic peptide
  Seed: WMACNSAAF
WNACNSAAL

SEQ ID NO: 19552 - protein, 9 aa, Artificial Sequence
  Description of Artificial Sequence: Synthetic peptide
  Seed: WMACNSAAF
WRACNSAAC

SEQ ID NO: 19553 - protein, 9 aa, Artificial Sequence
  Description of Artificial Sequence: Synthetic peptide
  Seed: WMACNSAAF
WRACNSAAH

SEQ ID NO: 19554 - protein, 9 aa, Artificial Sequence
  Description of Artificial Sequence: Synthetic peptide
  Seed: WMACNSAAF
WRACNSAAI

SEQ ID NO: 19555 - protein, 9 aa, Artificial Sequence
  Description of Artificial Sequence: Synthetic peptide
  Seed: WMACNSAAF
WRACNSAAL

SEQ ID NO: 19556 - protein, 9 aa, Artificial Sequence
  Description of Artificial Sequence: Synthetic peptide
  Seed: WMACNSAAF
WRACNSAAM

SEQ ID NO: 19557 - protein, 9 aa, Artificial Sequence
  Description of Artificial Sequence: Synthetic peptide
  Seed: WMACNSAAF
WRACNSAAF

SEQ ID NO: 19558 - protein, 9 aa, Artificial Sequence
  Description of Artificial Sequence: Synthetic peptide
  Seed: WMACNSAAF
WRACNSAAW

SEQ ID NO: 19559 - protein, 9 aa, Artificial Sequence
  Description of Artificial Sequence: Synthetic peptide
  Seed: WMACNSAAF
WRACNSAAY

SEQ ID NO: 19560 - protein, 9 aa, Artificial Sequence
  Description of Artificial Sequence: Synthetic peptide
  Seed: WMACNSAAF
WRACNSAAV

SEQ ID NO: 19561 - protein, 9 aa, Artificial Sequence
  Description of Artificial Sequence: Synthetic peptide
  Seed: WMACNSAAF
WNACNSAAM

SEQ ID NO: 19562 - protein, 10 aa, Artificial Sequence
  Description of Artificial Sequence: Synthetic peptide
  Seed: WMACHSAAFE
WTACHSAAFF

SEQ ID NO: 19563 - protein, 9 aa, Artificial Sequence
  Description of Artificial Sequence: Synthetic peptide
  Seed: WMACNSAAF
WNACNSAAF

SEQ ID NO: 19564 - protein, 9 aa, Artificial Sequence
  Description of Artificial Sequence: Synthetic peptide
  Seed: WMACNSAAF
WNACNSAAY

SEQ ID NO: 19565 - protein, 9 aa, Artificial Sequence
  Description of Artificial Sequence: Synthetic peptide
  Seed: WMACNSAAF
WNACNSAAV

SEQ ID NO: 19566 - protein, 9 aa, Artificial Sequence
  Description of Artificial Sequence: Synthetic peptide
  Seed: WMACNSAAF
WCACNSAAL

SEQ ID NO: 19567 - protein, 9 aa, Artificial Sequence
  Description of Artificial Sequence: Synthetic peptide
  Seed: WMACNSAAF
WCACNSAAM

SEQ ID NO: 19568 - protein, 9 aa, Artificial Sequence
  Description of Artificial Sequence: Synthetic peptide
  Seed: WMACNSAAF
WCACNSAAF

SEQ ID NO: 19569 - protein, 9 aa, Artificial Sequence
  Description of Artificial Sequence: Synthetic peptide
  Seed: WMACNSAAF
WCACNSAAW

SEQ ID NO: 19570 - protein, 9 aa, Artificial Sequence
  Description of Artificial Sequence: Synthetic peptide
  Seed: WMACNSAAF
WCACNSAAY

SEQ ID NO: 19571 - protein, 9 aa, Artificial Sequence
  Description of Artificial Sequence: Synthetic peptide
  Seed: WMACNSAAF
WQACNSAAA

SEQ ID NO: 19572 - protein, 9 aa, Artificial Sequence
  Description of Artificial Sequence: Synthetic peptide
  Seed: WMACNSAAF
WRACNSAAA

SEQ ID NO: 19573 - protein, 9 aa, Artificial Sequence
  Description of Artificial Sequence: Synthetic peptide
  Seed: WMACNSAAF
WAACNSAAV

SEQ ID NO: 19574 - protein, 9 aa, Artificial Sequence
  Description of Artificial Sequence: Synthetic peptide
  Seed: WMACNSAAF
WAACNSAAY

SEQ ID NO: 19575 - protein, 9 aa, Artificial Sequence
  Description of Artificial Sequence: Synthetic peptide
  Seed: WMACNSAAF
WAACNSAAW

SEQ ID NO: 19576 - protein, 10 aa, Artificial Sequence
  Description of Artificial Sequence: Synthetic peptide
  Seed: WMACHSAAFE
WTACHSAAFY

SEQ ID NO: 19577 - protein, 10 aa, Artificial Sequence
  Description of Artificial Sequence: Synthetic peptide
  Seed: WMACHSAAFE
WWACHSAAFF

SEQ ID NO: 19578 - protein, 10 aa, Artificial Sequence
  Description of Artificial Sequence: Synthetic peptide
  Seed: WMACHSAAFE
WWACHSAAFY

SEQ ID NO: 19579 - protein, 10 aa, Artificial Sequence
  Description of Artificial Sequence: Synthetic peptide
  Seed: WMACHSAAFE
WYACHSAAFF

SEQ ID NO: 19580 - protein, 10 aa, Artificial Sequence
  Description of Artificial Sequence: Synthetic peptide
  Seed: WMACHSAAFE
WYACHSAAFY

SEQ ID NO: 19581 - protein, 10 aa, Artificial Sequence
  Description of Artificial Sequence: Synthetic peptide
  Seed: WMACHSAAFE
WVACHSAAFM

SEQ ID NO: 19582 - protein, 10 aa, Artificial Sequence
  Description of Artificial Sequence: Synthetic peptide
  Seed: WMACHSAAFE
WVACHSAAFF

SEQ ID NO: 19583 - protein, 10 aa, Artificial Sequence
  Description of Artificial Sequence: Synthetic peptide
  Seed: WMACHSAAFE
WVACHSAAFY

SEQ ID NO: 19584 - protein, 9 aa, Artificial Sequence
  Description of Artificial Sequence: Synthetic peptide
  Seed: WMACNSAAF
WAACNSAAA

SEQ ID NO: 19585 - protein, 9 aa, Artificial Sequence
  Description of Artificial Sequence: Synthetic peptide
  Seed: WMACNSAAF
WAACNSAAR

SEQ ID NO: 19586 - protein, 9 aa, Artificial Sequence
  Description of Artificial Sequence: Synthetic peptide
  Seed: WMACNSAAF
WAACNSAAQ

SEQ ID NO: 19587 - protein, 9 aa, Artificial Sequence
  Description of Artificial Sequence: Synthetic peptide
  Seed: WMACNSAAF
WAACNSAAH

SEQ ID NO: 19588 - protein, 9 aa, Artificial Sequence
  Description of Artificial Sequence: Synthetic peptide
  Seed: WMACNSAAF
WAACNSAAI

SEQ ID NO: 19589 - protein, 9 aa, Artificial Sequence
  Description of Artificial Sequence: Synthetic peptide
  Seed: WMACNSAAF
WAACNSAAL

SEQ ID NO: 19590 - protein, 9 aa, Artificial Sequence
  Description of Artificial Sequence: Synthetic peptide
  Seed: WMACNSAAF
WAACNSAAK

SEQ ID NO: 19591 - protein, 9 aa, Artificial Sequence
  Description of Artificial Sequence: Synthetic peptide
  Seed: WMACNSAAF
WAACNSAAM

SEQ ID NO: 19592 - protein, 9 aa, Artificial Sequence
  Description of Artificial Sequence: Synthetic peptide
  Seed: WMACNSAAF
WAACNSAAF

SEQ ID NO: 19593 - protein, 9 aa, Artificial Sequence
  Description of Artificial Sequence: Synthetic peptide
  Seed: WMACNSAAF
WAACNSAAS

SEQ ID NO: 19594 - protein, 9 aa, Artificial Sequence
  Description of Artificial Sequence: Synthetic peptide
  Seed: WMACNSAAF
WAACNSAAT

SEQ ID NO: 19595 - protein, 10 aa, Artificial Sequence
  Description of Artificial Sequence: Synthetic peptide
  Seed: WMACHSAAFE
WKACHSAAFR

SEQ ID NO: 19596 - protein, 10 aa, Artificial Sequence
  Description of Artificial Sequence: Synthetic peptide
  Seed: WMACHSAAFE
WLACHSAAFY

SEQ ID NO: 19597 - protein, 10 aa, Artificial Sequence
  Description of Artificial Sequence: Synthetic peptide
  Seed: VYGPAVSSGY
VTGPAVSSGY

SEQ ID NO: 19598 - protein, 9 aa, Artificial Sequence
  Description of Artificial Sequence: Synthetic peptide
  Seed: WMACHSAAF
WVACHSAAQ

SEQ ID NO: 19599 - protein, 9 aa, Artificial Sequence
  Description of Artificial Sequence: Synthetic peptide
  Seed: WMACHSAAF
WYACHSAAL

SEQ ID NO: 19600 - protein, 9 aa, Artificial Sequence
  Description of Artificial Sequence: Synthetic peptide
  Seed: WMACHSAAF
WYACHSAAM

SEQ ID NO: 19601 - protein, 9 aa, Artificial Sequence
  Description of Artificial Sequence: Synthetic peptide
  Seed: WMACHSAAF
WYACHSAAF

SEQ ID NO: 19602 - protein, 9 aa, Artificial Sequence
  Description of Artificial Sequence: Synthetic peptide
  Seed: WMACHSAAF
WYACHSAAT

SEQ ID NO: 19603 - protein, 9 aa, Artificial Sequence
  Description of Artificial Sequence: Synthetic peptide
  Seed: WMACHSAAF
WYACHSAAW

SEQ ID NO: 19604 - protein, 9 aa, Artificial Sequence
  Description of Artificial Sequence: Synthetic peptide
  Seed: WMACHSAAF
WYACHSAAY

SEQ ID NO: 19605 - protein, 9 aa, Artificial Sequence
  Description of Artificial Sequence: Synthetic peptide
  Seed: WMACHSAAF
WYACHSAAV

SEQ ID NO: 19606 - protein, 9 aa, Artificial Sequence
  Description of Artificial Sequence: Synthetic peptide
  Seed: WMACHSAAF
WVACHSAAA

SEQ ID NO: 19607 - protein, 9 aa, Artificial Sequence
  Description of Artificial Sequence: Synthetic peptide
  Seed: WMACHSAAF
WVACHSAAR

SEQ ID NO: 19608 - protein, 9 aa, Artificial Sequence
  Description of Artificial Sequence: Synthetic peptide
  Seed: WMACHSAAF
WVACHSAAH

SEQ ID NO: 19609 - protein, 10 aa, Artificial Sequence
  Description of Artificial Sequence: Synthetic peptide
  Seed: WMACHSAAFE
WAACHSAAFF

SEQ ID NO: 19610 - protein, 9 aa, Artificial Sequence
  Description of Artificial Sequence: Synthetic peptide
  Seed: WMACHSAAF
WVACHSAAI

SEQ ID NO: 19611 - protein, 9 aa, Artificial Sequence
  Description of Artificial Sequence: Synthetic peptide
  Seed: WMACHSAAF
WVACHSAAL

SEQ ID NO: 19612 - protein, 9 aa, Artificial Sequence
  Description of Artificial Sequence: Synthetic peptide
  Seed: WMACHSAAF
WVACHSAAK

SEQ ID NO: 19613 - protein, 9 aa, Artificial Sequence
  Description of Artificial Sequence: Synthetic peptide
  Seed: WMACHSAAF
WVACHSAAM

SEQ ID NO: 19614 - protein, 9 aa, Artificial Sequence
  Description of Artificial Sequence: Synthetic peptide
  Seed: WMACHSAAF
WVACHSAAF

SEQ ID NO: 19615 - protein, 9 aa, Artificial Sequence
  Description of Artificial Sequence: Synthetic peptide
  Seed: WMACHSAAF
WVACHSAAT

SEQ ID NO: 19616 - protein, 9 aa, Artificial Sequence
  Description of Artificial Sequence: Synthetic peptide
  Seed: WMACHSAAF
WVACHSAAW

SEQ ID NO: 19617 - protein, 9 aa, Artificial Sequence
  Description of Artificial Sequence: Synthetic peptide
  Seed: WMACHSAAF
WVACHSAAY

SEQ ID NO: 19618 - protein, 9 aa, Artificial Sequence
  Description of Artificial Sequence: Synthetic peptide
  Seed: WMACHSAAF
WVACHSAAV

SEQ ID NO: 19619 - protein, 9 aa, Artificial Sequence
  Description of Artificial Sequence: Synthetic peptide
  Seed: WMACHSAAF
WYACHSAAI

SEQ ID NO: 19620 - protein, 9 aa, Artificial Sequence
  Description of Artificial Sequence: Synthetic peptide
  Seed: WMACHSAAF
WYACHSAAH

SEQ ID NO: 19621 - protein, 9 aa, Artificial Sequence
  Description of Artificial Sequence: Synthetic peptide
  Seed: WMACHSAAF
WYACHSAAC

SEQ ID NO: 19622 - protein, 9 aa, Artificial Sequence
  Description of Artificial Sequence: Synthetic peptide
  Seed: WMACHSAAF
WYACHSAAA

SEQ ID NO: 19623 - protein, 9 aa, Artificial Sequence
  Description of Artificial Sequence: Synthetic peptide
  Seed: WMACHSAAF
WTACHSAAR

SEQ ID NO: 19624 - protein, 9 aa, Artificial Sequence
  Description of Artificial Sequence: Synthetic peptide
  Seed: WMACHSAAF
WTACHSAAQ

SEQ ID NO: 19625 - protein, 9 aa, Artificial Sequence
  Description of Artificial Sequence: Synthetic peptide
  Seed: WMACHSAAF
WTACHSAAH

SEQ ID NO: 19626 - protein, 9 aa, Artificial Sequence
  Description of Artificial Sequence: Synthetic peptide
  Seed: WMACHSAAF
WTACHSAAI

SEQ ID NO: 19627 - protein, 9 aa, Artificial Sequence
  Description of Artificial Sequence: Synthetic peptide
  Seed: WMACHSAAF
WTACHSAAL

SEQ ID NO: 19628 - protein, 9 aa, Artificial Sequence
  Description of Artificial Sequence: Synthetic peptide
  Seed: WMACHSAAF
WTACHSAAK

SEQ ID NO: 19629 - protein, 9 aa, Artificial Sequence
  Description of Artificial Sequence: Synthetic peptide
  Seed: WMACHSAAF
WTACHSAAM

SEQ ID NO: 19630 - protein, 9 aa, Artificial Sequence
  Description of Artificial Sequence: Synthetic peptide
  Seed: WMACHSAAF
WTACHSAAF

SEQ ID NO: 19631 - protein, 9 aa, Artificial Sequence
  Description of Artificial Sequence: Synthetic peptide
  Seed: WMACHSAAF
WTACHSAAT

SEQ ID NO: 19632 - protein, 9 aa, Artificial Sequence
  Description of Artificial Sequence: Synthetic peptide
  Seed: WMACHSAAF
WTACHSAAW

SEQ ID NO: 19633 - protein, 9 aa, Artificial Sequence
  Description of Artificial Sequence: Synthetic peptide
  Seed: WMACHSAAF
WTACHSAAY

SEQ ID NO: 19634 - protein, 9 aa, Artificial Sequence
  Description of Artificial Sequence: Synthetic peptide
  Seed: WMACHSAAF
WTACHSAAV

SEQ ID NO: 19635 - protein, 9 aa, Artificial Sequence
  Description of Artificial Sequence: Synthetic peptide
  Seed: WMACHSAAF
WWACHSAAI

SEQ ID NO: 19636 - protein, 9 aa, Artificial Sequence
  Description of Artificial Sequence: Synthetic peptide
  Seed: WMACHSAAF
WWACHSAAL

SEQ ID NO: 19637 - protein, 9 aa, Artificial Sequence
  Description of Artificial Sequence: Synthetic peptide
  Seed: WMACHSAAF
WWACHSAAM

SEQ ID NO: 19638 - protein, 9 aa, Artificial Sequence
  Description of Artificial Sequence: Synthetic peptide
  Seed: WMACHSAAF
WWACHSAAF

SEQ ID NO: 19639 - protein, 9 aa, Artificial Sequence
  Description of Artificial Sequence: Synthetic peptide
  Seed: WMACHSAAF
WWACHSAAW

SEQ ID NO: 19640 - protein, 9 aa, Artificial Sequence
  Description of Artificial Sequence: Synthetic peptide
  Seed: WMACHSAAF
WWACHSAAY

SEQ ID NO: 19641 - protein, 9 aa, Artificial Sequence
  Description of Artificial Sequence: Synthetic peptide
  Seed: WMACHSAAF
WWACHSAAV

SEQ ID NO: 19642 - protein, 10 aa, Artificial Sequence
  Description of Artificial Sequence: Synthetic peptide
  Seed: WMACHSAAFE
WAACHSAAFM

SEQ ID NO: 19643 - protein, 10 aa, Artificial Sequence
  Description of Artificial Sequence: Synthetic peptide
  Seed: WMACHSAAFE
WAACHSAAFY

SEQ ID NO: 19644 - protein, 10 aa, Artificial Sequence
  Description of Artificial Sequence: Synthetic peptide
  Seed: WMACHSAAFE
WLACHSAAFW

SEQ ID NO: 19645 - protein, 10 aa, Artificial Sequence
  Description of Artificial Sequence: Synthetic peptide
  Seed: WMACHSAAFE
WHACHSAAFM

SEQ ID NO: 19646 - protein, 10 aa, Artificial Sequence
  Description of Artificial Sequence: Synthetic peptide
  Seed: WMACHSAAFE
WQACHSAAFW

SEQ ID NO: 19647 - protein, 10 aa, Artificial Sequence
  Description of Artificial Sequence: Synthetic peptide
  Seed: WMACHSAAFE
WQACHSAAFY

SEQ ID NO: 19648 - protein, 10 aa, Artificial Sequence
  Description of Artificial Sequence: Synthetic peptide
  Seed: WMACHSAAFE
WQACHSAAFV

SEQ ID NO: 19649 - protein, 10 aa, Artificial Sequence
  Description of Artificial Sequence: Synthetic peptide
  Seed: WMACHSAAFE
WEACHSAAFM

SEQ ID NO: 19650 - protein, 10 aa, Artificial Sequence
  Description of Artificial Sequence: Synthetic peptide
  Seed: WMACHSAAFE
WEACHSAAFF

SEQ ID NO: 19651 - protein, 10 aa, Artificial Sequence
  Description of Artificial Sequence: Synthetic peptide
  Seed: WMACHSAAFE
WEACHSAAFY

SEQ ID NO: 19652 - protein, 10 aa, Artificial Sequence
  Description of Artificial Sequence: Synthetic peptide
  Seed: WMACHSAAFE
WGACHSAAFF

SEQ ID NO: 19653 - protein, 10 aa, Artificial Sequence
  Description of Artificial Sequence: Synthetic peptide
  Seed: WMACHSAAFE
WGACHSAAFY

SEQ ID NO: 19654 - protein, 10 aa, Artificial Sequence
  Description of Artificial Sequence: Synthetic peptide
  Seed: WMACHSAAFE
WHACHSAAFL

SEQ ID NO: 19655 - protein, 10 aa, Artificial Sequence
  Description of Artificial Sequence: Synthetic peptide
  Seed: WMACHSAAFE
WHACHSAAFF

SEQ ID NO: 19656 - protein, 10 aa, Artificial Sequence
  Description of Artificial Sequence: Synthetic peptide
  Seed: WMACHSAAFE
WRACHSAAFM

SEQ ID NO: 19657 - protein, 10 aa, Artificial Sequence
  Description of Artificial Sequence: Synthetic peptide
  Seed: WMACHSAAFE
WHACHSAAFW

SEQ ID NO: 19658 - protein, 10 aa, Artificial Sequence
  Description of Artificial Sequence: Synthetic peptide
  Seed: WMACHSAAFE
WHACHSAAFY

SEQ ID NO: 19659 - protein, 10 aa, Artificial Sequence
  Description of Artificial Sequence: Synthetic peptide
  Seed: WMACHSAAFE
WIACHSAAFM

SEQ ID NO: 19660 - protein, 10 aa, Artificial Sequence
  Description of Artificial Sequence: Synthetic peptide
  Seed: WMACHSAAFE
WIACHSAAFF

SEQ ID NO: 19661 - protein, 10 aa, Artificial Sequence
  Description of Artificial Sequence: Synthetic peptide
  Seed: WMACHSAAFE
WIACHSAAFY

SEQ ID NO: 19662 - protein, 10 aa, Artificial Sequence
  Description of Artificial Sequence: Synthetic peptide
  Seed: WMACHSAAFE
WLACHSAAFH

SEQ ID NO: 19663 - protein, 10 aa, Artificial Sequence
  Description of Artificial Sequence: Synthetic peptide
  Seed: WMACHSAAFE
WLACHSAAFL

SEQ ID NO: 19664 - protein, 10 aa, Artificial Sequence
  Description of Artificial Sequence: Synthetic peptide
  Seed: WMACHSAAFE
WLACHSAAFM

SEQ ID NO: 19665 - protein, 10 aa, Artificial Sequence
  Description of Artificial Sequence: Synthetic peptide
  Seed: WMACHSAAFE
WLACHSAAFF

SEQ ID NO: 19666 - protein, 10 aa, Artificial Sequence
  Description of Artificial Sequence: Synthetic peptide
  Seed: WMACHSAAFE
WQACHSAAFT

SEQ ID NO: 19667 - protein, 10 aa, Artificial Sequence
  Description of Artificial Sequence: Synthetic peptide
  Seed: WMACHSAAFE
WQACHSAAFS

SEQ ID NO: 19668 - protein, 10 aa, Artificial Sequence
  Description of Artificial Sequence: Synthetic peptide
  Seed: WMACHSAAFE
WQACHSAAFP

SEQ ID NO: 19669 - protein, 10 aa, Artificial Sequence
  Description of Artificial Sequence: Synthetic peptide
  Seed: WMACHSAAFE
WQACHSAAFF

SEQ ID NO: 19670 - protein, 10 aa, Artificial Sequence
  Description of Artificial Sequence: Synthetic peptide
  Seed: WMACHSAAFE
WRACHSAAFF

SEQ ID NO: 19671 - protein, 10 aa, Artificial Sequence
  Description of Artificial Sequence: Synthetic peptide
  Seed: WMACHSAAFE
WRACHSAAFY

SEQ ID NO: 19672 - protein, 10 aa, Artificial Sequence
  Description of Artificial Sequence: Synthetic peptide
  Seed: WMACHSAAFE
WNACHSAAFF

SEQ ID NO: 19673 - protein, 10 aa, Artificial Sequence
  Description of Artificial Sequence: Synthetic peptide
  Seed: WMACHSAAFE
WNACHSAAFY

SEQ ID NO: 19674 - protein, 10 aa, Artificial Sequence
  Description of Artificial Sequence: Synthetic peptide
  Seed: WMACHSAAFE
WDACHSAAFY

SEQ ID NO: 19675 - protein, 10 aa, Artificial Sequence
  Description of Artificial Sequence: Synthetic peptide
  Seed: WMACHSAAFE
WCACHSAAFY

SEQ ID NO: 19676 - protein, 10 aa, Artificial Sequence
  Description of Artificial Sequence: Synthetic peptide
  Seed: WMACHSAAFE
WQACHSAAFA

SEQ ID NO: 19677 - protein, 10 aa, Artificial Sequence
  Description of Artificial Sequence: Synthetic peptide
  Seed: WMACHSAAFE
WQACHSAAFR

SEQ ID NO: 19678 - protein, 10 aa, Artificial Sequence
  Description of Artificial Sequence: Synthetic peptide
  Seed: WMACHSAAFE
WQACHSAAFN

SEQ ID NO: 19679 - protein, 10 aa, Artificial Sequence
  Description of Artificial Sequence: Synthetic peptide
  Seed: WMACHSAAFE
WQACHSAAFD

SEQ ID NO: 19680 - protein, 10 aa, Artificial Sequence
  Description of Artificial Sequence: Synthetic peptide
  Seed: WMACHSAAFE
WQACHSAAFC

SEQ ID NO: 19681 - protein, 10 aa, Artificial Sequence
  Description of Artificial Sequence: Synthetic peptide
  Seed: WMACHSAAFE
WQACHSAAFQ

SEQ ID NO: 19682 - protein, 10 aa, Artificial Sequence
  Description of Artificial Sequence: Synthetic peptide
  Seed: WMACHSAAFE
WQACHSAAFE

SEQ ID NO: 19683 - protein, 10 aa, Artificial Sequence
  Description of Artificial Sequence: Synthetic peptide
  Seed: WMACHSAAFE
WQACHSAAFG

SEQ ID NO: 19684 - protein, 10 aa, Artificial Sequence
  Description of Artificial Sequence: Synthetic peptide
  Seed: WMACHSAAFE
WQACHSAAFH

SEQ ID NO: 19685 - protein, 10 aa, Artificial Sequence
  Description of Artificial Sequence: Synthetic peptide
  Seed: WMACHSAAFE
WQACHSAAFI

SEQ ID NO: 19686 - protein, 10 aa, Artificial Sequence
  Description of Artificial Sequence: Synthetic peptide
  Seed: WMACHSAAFE
WQACHSAAFL

SEQ ID NO: 19687 - protein, 10 aa, Artificial Sequence
  Description of Artificial Sequence: Synthetic peptide
  Seed: WMACHSAAFE
WQACHSAAFK

SEQ ID NO: 19688 - protein, 10 aa, Artificial Sequence
  Description of Artificial Sequence: Synthetic peptide
  Seed: WMACHSAAFE
WQACHSAAFM

SEQ ID NO: 19689 - protein, 9 aa, Artificial Sequence
  Description of Artificial Sequence: Synthetic peptide
  Seed: WMACNSAAF
WQACNSAAC

SEQ ID NO: 19690 - protein, 9 aa, Artificial Sequence
  Description of Artificial Sequence: Synthetic peptide
  Seed: WMACNSAAF
WQACNSAAG

SEQ ID NO: 19691 - protein, 9 aa, Artificial Sequence
  Description of Artificial Sequence: Synthetic peptide
  Seed: WMACNSAAF
WQACNSAAH

SEQ ID NO: 19692 - protein, 9 aa, Artificial Sequence
  Description of Artificial Sequence: Synthetic peptide
  Seed: WMACNSAAF
WTACNSAAK

SEQ ID NO: 19693 - protein, 9 aa, Artificial Sequence
  Description of Artificial Sequence: Synthetic peptide
  Seed: WMACNSAAF
WSACNSAAF

SEQ ID NO: 19694 - protein, 9 aa, Artificial Sequence
  Description of Artificial Sequence: Synthetic peptide
  Seed: WMACNSAAF
WSACNSAAW

SEQ ID NO: 19695 - protein, 9 aa, Artificial Sequence
  Description of Artificial Sequence: Synthetic peptide
  Seed: WMACNSAAF
WSACNSAAY

SEQ ID NO: 19696 - protein, 9 aa, Artificial Sequence
  Description of Artificial Sequence: Synthetic peptide
  Seed: WMACNSAAF
WSACNSAAV

SEQ ID NO: 19697 - protein, 9 aa, Artificial Sequence
  Description of Artificial Sequence: Synthetic peptide
  Seed: WMACNSAAF
WTACNSAAA

SEQ ID NO: 19698 - protein, 9 aa, Artificial Sequence
  Description of Artificial Sequence: Synthetic peptide
  Seed: WMACNSAAF
WTACNSAAR

SEQ ID NO: 19699 - protein, 9 aa, Artificial Sequence
  Description of Artificial Sequence: Synthetic peptide
  Seed: WMACNSAAF
WTACNSAAH

SEQ ID NO: 19700 - protein, 9 aa, Artificial Sequence
  Description of Artificial Sequence: Synthetic peptide
  Seed: WMACNSAAF
WTACNSAAI

SEQ ID NO: 19701 - protein, 9 aa, Artificial Sequence
  Description of Artificial Sequence: Synthetic peptide
  Seed: WMACNSAAF
WTACNSAAL

SEQ ID NO: 19702 - protein, 9 aa, Artificial Sequence
  Description of Artificial Sequence: Synthetic peptide
  Seed: WMACNSAAF
WTACNSAAM

SEQ ID NO: 19703 - protein, 9 aa, Artificial Sequence
  Description of Artificial Sequence: Synthetic peptide
  Seed: WMACNSAAF
WWACNSAAV

SEQ ID NO: 19704 - protein, 9 aa, Artificial Sequence
  Description of Artificial Sequence: Synthetic peptide
  Seed: WMACNSAAF
WTACNSAAF

SEQ ID NO: 19705 - protein, 9 aa, Artificial Sequence
  Description of Artificial Sequence: Synthetic peptide
  Seed: WMACNSAAF
WTACNSAAW

SEQ ID NO: 19706 - protein, 9 aa, Artificial Sequence
  Description of Artificial Sequence: Synthetic peptide
  Seed: WMACNSAAF
WTACNSAAY

SEQ ID NO: 19707 - protein, 9 aa, Artificial Sequence
  Description of Artificial Sequence: Synthetic peptide
  Seed: WMACNSAAF
WTACNSAAV

SEQ ID NO: 19708 - protein, 9 aa, Artificial Sequence
  Description of Artificial Sequence: Synthetic peptide
  Seed: WMACNSAAF
WWACNSAAI

SEQ ID NO: 19709 - protein, 9 aa, Artificial Sequence
  Description of Artificial Sequence: Synthetic peptide
  Seed: WMACNSAAF
WWACNSAAL

SEQ ID NO: 19710 - protein, 9 aa, Artificial Sequence
  Description of Artificial Sequence: Synthetic peptide
  Seed: WMACNSAAF
WWACNSAAM

SEQ ID NO: 19711 - protein, 9 aa, Artificial Sequence
  Description of Artificial Sequence: Synthetic peptide
  Seed: WMACNSAAF
WWACNSAAF

SEQ ID NO: 19712 - protein, 9 aa, Artificial Sequence
  Description of Artificial Sequence: Synthetic peptide
  Seed: WMACNSAAF
WWACNSAAW

SEQ ID NO: 19713 - protein, 9 aa, Artificial Sequence
  Description of Artificial Sequence: Synthetic peptide
  Seed: WMACNSAAF
WSACNSAAM

SEQ ID NO: 19714 - protein, 9 aa, Artificial Sequence
  Description of Artificial Sequence: Synthetic peptide
  Seed: WMACNSAAF
WSACNSAAK

SEQ ID NO: 19715 - protein, 9 aa, Artificial Sequence
  Description of Artificial Sequence: Synthetic peptide
  Seed: WMACNSAAF
WSACNSAAL

SEQ ID NO: 19716 - protein, 9 aa, Artificial Sequence
  Description of Artificial Sequence: Synthetic peptide
  Seed: WMACNSAAF
WSACNSAAI

SEQ ID NO: 19717 - protein, 9 aa, Artificial Sequence
  Description of Artificial Sequence: Synthetic peptide
  Seed: WMACNSAAF
WPACNSAAC

SEQ ID NO: 19718 - protein, 9 aa, Artificial Sequence
  Description of Artificial Sequence: Synthetic peptide
  Seed: WMACNSAAF
WPACNSAAQ

SEQ ID NO: 19719 - protein, 9 aa, Artificial Sequence
  Description of Artificial Sequence: Synthetic peptide
  Seed: WMACNSAAF
WPACNSAAE

SEQ ID NO: 19720 - protein, 9 aa, Artificial Sequence
  Description of Artificial Sequence: Synthetic peptide
  Seed: WMACNSAAF
WPACNSAAG

SEQ ID NO: 19721 - protein, 9 aa, Artificial Sequence
  Description of Artificial Sequence: Synthetic peptide
  Seed: WMACNSAAF
WPACNSAAH

SEQ ID NO: 19722 - protein, 9 aa, Artificial Sequence
  Description of Artificial Sequence: Synthetic peptide
  Seed: WMACNSAAF
WPACNSAAI

SEQ ID NO: 19723 - protein, 9 aa, Artificial Sequence
  Description of Artificial Sequence: Synthetic peptide
  Seed: WMACNSAAF
WPACNSAAL

SEQ ID NO: 19724 - protein, 9 aa, Artificial Sequence
  Description of Artificial Sequence: Synthetic peptide
  Seed: WMACNSAAF
WPACNSAAK

SEQ ID NO: 19725 - protein, 9 aa, Artificial Sequence
  Description of Artificial Sequence: Synthetic peptide
  Seed: WMACNSAAF
WPACNSAAM

SEQ ID NO: 19726 - protein, 9 aa, Artificial Sequence
  Description of Artificial Sequence: Synthetic peptide
  Seed: WMACNSAAF
WPACNSAAF

SEQ ID NO: 19727 - protein, 9 aa, Artificial Sequence
  Description of Artificial Sequence: Synthetic peptide
  Seed: WMACNSAAF
WPACNSAAP

SEQ ID NO: 19728 - protein, 9 aa, Artificial Sequence
  Description of Artificial Sequence: Synthetic peptide
  Seed: WMACNSAAF
WPACNSAAS

SEQ ID NO: 19729 - protein, 9 aa, Artificial Sequence
  Description of Artificial Sequence: Synthetic peptide
  Seed: WMACNSAAF
WPACNSAAT

SEQ ID NO: 19730 - protein, 9 aa, Artificial Sequence
  Description of Artificial Sequence: Synthetic peptide
  Seed: WMACNSAAF
WPACNSAAW

SEQ ID NO: 19731 - protein, 9 aa, Artificial Sequence
  Description of Artificial Sequence: Synthetic peptide
  Seed: WMACNSAAF
WPACNSAAY

SEQ ID NO: 19732 - protein, 9 aa, Artificial Sequence
  Description of Artificial Sequence: Synthetic peptide
  Seed: WMACNSAAF
WPACNSAAV

SEQ ID NO: 19733 - protein, 9 aa, Artificial Sequence
  Description of Artificial Sequence: Synthetic peptide
  Seed: WMACNSAAF
WSACNSAAA

SEQ ID NO: 19734 - protein, 9 aa, Artificial Sequence
  Description of Artificial Sequence: Synthetic peptide
  Seed: WMACNSAAF
WSACNSAAR

SEQ ID NO: 19735 - protein, 9 aa, Artificial Sequence
  Description of Artificial Sequence: Synthetic peptide
  Seed: WMACNSAAF
WSACNSAAH

SEQ ID NO: 19736 - protein, 9 aa, Artificial Sequence
  Description of Artificial Sequence: Synthetic peptide
  Seed: WMACNSAAF
WWACNSAAY

SEQ ID NO: 19737 - protein, 9 aa, Artificial Sequence
  Description of Artificial Sequence: Synthetic peptide
  Seed: WMACNSAAF
WYACNSAAA

SEQ ID NO: 19738 - protein, 9 aa, Artificial Sequence
  Description of Artificial Sequence: Synthetic peptide
  Seed: WMACNSAAF
WQACNSAAI

SEQ ID NO: 19739 - protein, 10 aa, Artificial Sequence
  Description of Artificial Sequence: Synthetic peptide
  Seed: WMACNSAAFE
WQACNSAAFN

SEQ ID NO: 19740 - protein, 10 aa, Artificial Sequence
  Description of Artificial Sequence: Synthetic peptide
  Seed: WMACNSAAFE
WRACNSAAFM

SEQ ID NO: 19741 - protein, 10 aa, Artificial Sequence
  Description of Artificial Sequence: Synthetic peptide
  Seed: WMACNSAAFE
WRACNSAAFF

SEQ ID NO: 19742 - protein, 10 aa, Artificial Sequence
  Description of Artificial Sequence: Synthetic peptide
  Seed: WMACNSAAFE
WRACNSAAFY

SEQ ID NO: 19743 - protein, 10 aa, Artificial Sequence
  Description of Artificial Sequence: Synthetic peptide
  Seed: WMACNSAAFE
WNACNSAAFF

SEQ ID NO: 19744 - protein, 10 aa, Artificial Sequence
  Description of Artificial Sequence: Synthetic peptide
  Seed: WMACNSAAFE
WNACNSAAFY

SEQ ID NO: 19745 - protein, 10 aa, Artificial Sequence
  Description of Artificial Sequence: Synthetic peptide
  Seed: WMACNSAAFE
WDACNSAAFY

SEQ ID NO: 19746 - protein, 10 aa, Artificial Sequence
  Description of Artificial Sequence: Synthetic peptide
  Seed: WMACNSAAFE
WCACNSAAFY

SEQ ID NO: 19747 - protein, 10 aa, Artificial Sequence
  Description of Artificial Sequence: Synthetic peptide
  Seed: WMACNSAAFE
WQACNSAAFA

SEQ ID NO: 19748 - protein, 10 aa, Artificial Sequence
  Description of Artificial Sequence: Synthetic peptide
  Seed: WMACNSAAFE
WQACNSAAFR

SEQ ID NO: 19749 - protein, 10 aa, Artificial Sequence
  Description of Artificial Sequence: Synthetic peptide
  Seed: WMACNSAAFE
WQACNSAAFD

SEQ ID NO: 19750 - protein, 9 aa, Artificial Sequence
  Description of Artificial Sequence: Synthetic peptide
  Seed: WMACNSAAF
WYACNSAAC

SEQ ID NO: 19751 - protein, 10 aa, Artificial Sequence
  Description of Artificial Sequence: Synthetic peptide
  Seed: WMACNSAAFE
WQACNSAAFC

SEQ ID NO: 19752 - protein, 10 aa, Artificial Sequence
  Description of Artificial Sequence: Synthetic peptide
  Seed: WMACNSAAFE
WQACNSAAFQ

SEQ ID NO: 19753 - protein, 10 aa, Artificial Sequence
  Description of Artificial Sequence: Synthetic peptide
  Seed: WMACNSAAFE
WQACNSAAFE

SEQ ID NO: 19754 - protein, 10 aa, Artificial Sequence
  Description of Artificial Sequence: Synthetic peptide
  Seed: WMACNSAAFE
WQACNSAAFG

SEQ ID NO: 19755 - protein, 10 aa, Artificial Sequence
  Description of Artificial Sequence: Synthetic peptide
  Seed: WMACNSAAFE
WQACNSAAFH

SEQ ID NO: 19756 - protein, 10 aa, Artificial Sequence
  Description of Artificial Sequence: Synthetic peptide
  Seed: WMACNSAAFE
WQACNSAAFI

SEQ ID NO: 19757 - protein, 10 aa, Artificial Sequence
  Description of Artificial Sequence: Synthetic peptide
  Seed: WMACNSAAFE
WQACNSAAFL

SEQ ID NO: 19758 - protein, 10 aa, Artificial Sequence
  Description of Artificial Sequence: Synthetic peptide
  Seed: WMACNSAAFE
WQACNSAAFK

SEQ ID NO: 19759 - protein, 10 aa, Artificial Sequence
  Description of Artificial Sequence: Synthetic peptide
  Seed: WMACNSAAFE
WQACNSAAFM

SEQ ID NO: 19760 - protein, 10 aa, Artificial Sequence
  Description of Artificial Sequence: Synthetic peptide
  Seed: WMACNSAAFE
WAACNSAAFY

SEQ ID NO: 19761 - protein, 10 aa, Artificial Sequence
  Description of Artificial Sequence: Synthetic peptide
  Seed: WMACNSAAFE
WAACNSAAFF

SEQ ID NO: 19762 - protein, 10 aa, Artificial Sequence
  Description of Artificial Sequence: Synthetic peptide
  Seed: WMACNSAAFE
WAACNSAAFM

SEQ ID NO: 19763 - protein, 9 aa, Artificial Sequence
  Description of Artificial Sequence: Synthetic peptide
  Seed: WMACNSAAF
WVACNSAAV

SEQ ID NO: 19764 - protein, 9 aa, Artificial Sequence
  Description of Artificial Sequence: Synthetic peptide
  Seed: WMACNSAAF
WYACNSAAH

SEQ ID NO: 19765 - protein, 9 aa, Artificial Sequence
  Description of Artificial Sequence: Synthetic peptide
  Seed: WMACNSAAF
WYACNSAAI

SEQ ID NO: 19766 - protein, 9 aa, Artificial Sequence
  Description of Artificial Sequence: Synthetic peptide
  Seed: WMACNSAAF
WYACNSAAL

SEQ ID NO: 19767 - protein, 9 aa, Artificial Sequence
  Description of Artificial Sequence: Synthetic peptide
  Seed: WMACNSAAF
WYACNSAAM

SEQ ID NO: 19768 - protein, 9 aa, Artificial Sequence
  Description of Artificial Sequence: Synthetic peptide
  Seed: WMACNSAAF
WYACNSAAF

SEQ ID NO: 19769 - protein, 9 aa, Artificial Sequence
  Description of Artificial Sequence: Synthetic peptide
  Seed: WMACNSAAF
WYACNSAAT

SEQ ID NO: 19770 - protein, 9 aa, Artificial Sequence
  Description of Artificial Sequence: Synthetic peptide
  Seed: WMACNSAAF
WYACNSAAW

SEQ ID NO: 19771 - protein, 9 aa, Artificial Sequence
  Description of Artificial Sequence: Synthetic peptide
  Seed: WMACNSAAF
WYACNSAAY

SEQ ID NO: 19772 - protein, 9 aa, Artificial Sequence
  Description of Artificial Sequence: Synthetic peptide
  Seed: WMACNSAAF
WYACNSAAV

SEQ ID NO: 19773 - protein, 9 aa, Artificial Sequence
  Description of Artificial Sequence: Synthetic peptide
  Seed: WMACNSAAF
WVACNSAAA

SEQ ID NO: 19774 - protein, 9 aa, Artificial Sequence
  Description of Artificial Sequence: Synthetic peptide
  Seed: WMACNSAAF
WVACNSAAR

SEQ ID NO: 19775 - protein, 9 aa, Artificial Sequence
  Description of Artificial Sequence: Synthetic peptide
  Seed: WMACNSAAF
WVACNSAAH

SEQ ID NO: 19776 - protein, 9 aa, Artificial Sequence
  Description of Artificial Sequence: Synthetic peptide
  Seed: WMACNSAAF
WVACNSAAI

SEQ ID NO: 19777 - protein, 9 aa, Artificial Sequence
  Description of Artificial Sequence: Synthetic peptide
  Seed: WMACNSAAF
WVACNSAAL

SEQ ID NO: 19778 - protein, 9 aa, Artificial Sequence
  Description of Artificial Sequence: Synthetic peptide
  Seed: WMACNSAAF
WVACNSAAK

SEQ ID NO: 19779 - protein, 9 aa, Artificial Sequence
  Description of Artificial Sequence: Synthetic peptide
  Seed: WMACNSAAF
WVACNSAAM

SEQ ID NO: 19780 - protein, 9 aa, Artificial Sequence
  Description of Artificial Sequence: Synthetic peptide
  Seed: WMACNSAAF
WVACNSAAF

SEQ ID NO: 19781 - protein, 9 aa, Artificial Sequence
  Description of Artificial Sequence: Synthetic peptide
  Seed: WMACNSAAF
WVACNSAAW

SEQ ID NO: 19782 - protein, 9 aa, Artificial Sequence
  Description of Artificial Sequence: Synthetic peptide
  Seed: WMACNSAAF
WVACNSAAY

SEQ ID NO: 19783 - protein, 9 aa, Artificial Sequence
  Description of Artificial Sequence: Synthetic peptide
  Seed: WMACNSAAF
WPACNSAAN

SEQ ID NO: 19784 - protein, 9 aa, Artificial Sequence
  Description of Artificial Sequence: Synthetic peptide
  Seed: WMACNSAAF
WPACNSAAR

SEQ ID NO: 19785 - protein, 9 aa, Artificial Sequence
  Description of Artificial Sequence: Synthetic peptide
  Seed: WMACNSAAF
WPACNSAAA

SEQ ID NO: 19786 - protein, 9 aa, Artificial Sequence
  Description of Artificial Sequence: Synthetic peptide
  Seed: WMACNSAAF
WHACNSAAV

SEQ ID NO: 19787 - protein, 9 aa, Artificial Sequence
  Description of Artificial Sequence: Synthetic peptide
  Seed: WMACNSAAF
WHACNSAAH

SEQ ID NO: 19788 - protein, 9 aa, Artificial Sequence
  Description of Artificial Sequence: Synthetic peptide
  Seed: WMACNSAAF
WHACNSAAI

SEQ ID NO: 19789 - protein, 9 aa, Artificial Sequence
  Description of Artificial Sequence: Synthetic peptide
  Seed: WMACNSAAF
WHACNSAAL

SEQ ID NO: 19790 - protein, 9 aa, Artificial Sequence
  Description of Artificial Sequence: Synthetic peptide
  Seed: WMACNSAAF
WHACNSAAM

SEQ ID NO: 19791 - protein, 9 aa, Artificial Sequence
  Description of Artificial Sequence: Synthetic peptide
  Seed: WMACNSAAF
WHACNSAAF

SEQ ID NO: 19792 - protein, 9 aa, Artificial Sequence
  Description of Artificial Sequence: Synthetic peptide
  Seed: WMACNSAAF
WHACNSAAS

SEQ ID NO: 19793 - protein, 9 aa, Artificial Sequence
  Description of Artificial Sequence: Synthetic peptide
  Seed: WMACNSAAF
WHACNSAAT

SEQ ID NO: 19794 - protein, 9 aa, Artificial Sequence
  Description of Artificial Sequence: Synthetic peptide
  Seed: WMACNSAAF
WHACNSAAW

SEQ ID NO: 19795 - protein, 9 aa, Artificial Sequence
  Description of Artificial Sequence: Synthetic peptide
  Seed: WMACNSAAF
WHACNSAAY

SEQ ID NO: 19796 - protein, 9 aa, Artificial Sequence
  Description of Artificial Sequence: Synthetic peptide
  Seed: WMACNSAAF
WIACNSAAA

SEQ ID NO: 19797 - protein, 9 aa, Artificial Sequence
  Description of Artificial Sequence: Synthetic peptide
  Seed: WMACNSAAF
WFACNSAAV

SEQ ID NO: 19798 - protein, 9 aa, Artificial Sequence
  Description of Artificial Sequence: Synthetic peptide
  Seed: WMACNSAAF
WIACNSAAR

SEQ ID NO: 19799 - protein, 9 aa, Artificial Sequence
  Description of Artificial Sequence: Synthetic peptide
  Seed: WMACNSAAF
WIACNSAAH

SEQ ID NO: 19800 - protein, 9 aa, Artificial Sequence
  Description of Artificial Sequence: Synthetic peptide
  Seed: WMACNSAAF
WIACNSAAI

SEQ ID NO: 19801 - protein, 9 aa, Artificial Sequence
  Description of Artificial Sequence: Synthetic peptide
  Seed: WMACNSAAF
WIACNSAAL

SEQ ID NO: 19802 - protein, 9 aa, Artificial Sequence
  Description of Artificial Sequence: Synthetic peptide
  Seed: WMACNSAAF
WIACNSAAK

SEQ ID NO: 19803 - protein, 9 aa, Artificial Sequence
  Description of Artificial Sequence: Synthetic peptide
  Seed: WMACNSAAF
WIACNSAAM

SEQ ID NO: 19804 - protein, 9 aa, Artificial Sequence
  Description of Artificial Sequence: Synthetic peptide
  Seed: WMACNSAAF
WIACNSAAF

SEQ ID NO: 19805 - protein, 9 aa, Artificial Sequence
  Description of Artificial Sequence: Synthetic peptide
  Seed: WMACNSAAF
WIACNSAAW

SEQ ID NO: 19806 - protein, 9 aa, Artificial Sequence
  Description of Artificial Sequence: Synthetic peptide
  Seed: WMACNSAAF
WIACNSAAY

SEQ ID NO: 19807 - protein, 9 aa, Artificial Sequence
  Description of Artificial Sequence: Synthetic peptide
  Seed: WMACNSAAF
WHACNSAAG

SEQ ID NO: 19808 - protein, 9 aa, Artificial Sequence
  Description of Artificial Sequence: Synthetic peptide
  Seed: WMACNSAAF
WHACNSAAC

SEQ ID NO: 19809 - protein, 9 aa, Artificial Sequence
  Description of Artificial Sequence: Synthetic peptide
  Seed: WMACNSAAF
WHACNSAAA

SEQ ID NO: 19810 - protein, 9 aa, Artificial Sequence
  Description of Artificial Sequence: Synthetic peptide
  Seed: WMACNSAAF
WGACNSAAV

SEQ ID NO: 19811 - protein, 9 aa, Artificial Sequence
  Description of Artificial Sequence: Synthetic peptide
  Seed: WMACNSAAF
WQACNSAAL

SEQ ID NO: 19812 - protein, 9 aa, Artificial Sequence
  Description of Artificial Sequence: Synthetic peptide
  Seed: WMACNSAAF
WQACNSAAM

SEQ ID NO: 19813 - protein, 9 aa, Artificial Sequence
  Description of Artificial Sequence: Synthetic peptide
  Seed: WMACNSAAF
WQACNSAAF

SEQ ID NO: 19814 - protein, 9 aa, Artificial Sequence
  Description of Artificial Sequence: Synthetic peptide
  Seed: WMACNSAAF
WQACNSAAT

SEQ ID NO: 19815 - protein, 9 aa, Artificial Sequence
  Description of Artificial Sequence: Synthetic peptide
  Seed: WMACNSAAF
WQACNSAAW

SEQ ID NO: 19816 - protein, 9 aa, Artificial Sequence
  Description of Artificial Sequence: Synthetic peptide
  Seed: WMACNSAAF
WQACNSAAY

SEQ ID NO: 19817 - protein, 9 aa, Artificial Sequence
  Description of Artificial Sequence: Synthetic peptide
  Seed: WMACNSAAF
WQACNSAAV

SEQ ID NO: 19818 - protein, 9 aa, Artificial Sequence
  Description of Artificial Sequence: Synthetic peptide
  Seed: WMACNSAAF
WEACNSAAH

SEQ ID NO: 19819 - protein, 9 aa, Artificial Sequence
  Description of Artificial Sequence: Synthetic peptide
  Seed: WMACNSAAF
WEACNSAAI

SEQ ID NO: 19820 - protein, 9 aa, Artificial Sequence
  Description of Artificial Sequence: Synthetic peptide
  Seed: WMACNSAAF
WEACNSAAL

SEQ ID NO: 19821 - protein, 9 aa, Artificial Sequence
  Description of Artificial Sequence: Synthetic peptide
  Seed: WMACNSAAF
WEACNSAAM

SEQ ID NO: 19822 - protein, 9 aa, Artificial Sequence
  Description of Artificial Sequence: Synthetic peptide
  Seed: WMACNSAAF
WEACNSAAF

SEQ ID NO: 19823 - protein, 9 aa, Artificial Sequence
  Description of Artificial Sequence: Synthetic peptide
  Seed: WMACNSAAF
WEACNSAAW

SEQ ID NO: 19824 - protein, 9 aa, Artificial Sequence
  Description of Artificial Sequence: Synthetic peptide
  Seed: WMACNSAAF
WEACNSAAY

SEQ ID NO: 19825 - protein, 9 aa, Artificial Sequence
  Description of Artificial Sequence: Synthetic peptide
  Seed: WMACNSAAF
WEACNSAAV

SEQ ID NO: 19826 - protein, 9 aa, Artificial Sequence
  Description of Artificial Sequence: Synthetic peptide
  Seed: WMACNSAAF
WGACNSAAL

SEQ ID NO: 19827 - protein, 9 aa, Artificial Sequence
  Description of Artificial Sequence: Synthetic peptide
  Seed: WMACNSAAF
WGACNSAAM

SEQ ID NO: 19828 - protein, 9 aa, Artificial Sequence
  Description of Artificial Sequence: Synthetic peptide
  Seed: WMACNSAAF
WGACNSAAF

SEQ ID NO: 19829 - protein, 9 aa, Artificial Sequence
  Description of Artificial Sequence: Synthetic peptide
  Seed: WMACNSAAF
WGACNSAAY

SEQ ID NO: 19830 - protein, 9 aa, Artificial Sequence
  Description of Artificial Sequence: Synthetic peptide
  Seed: WMACNSAAF
WIACNSAAV

SEQ ID NO: 19831 - protein, 9 aa, Artificial Sequence
  Description of Artificial Sequence: Synthetic peptide
  Seed: WMACNSAAF
WLACNSAAA

SEQ ID NO: 19832 - protein, 9 aa, Artificial Sequence
  Description of Artificial Sequence: Synthetic peptide
  Seed: WMACNSAAF
WLACNSAAR

SEQ ID NO: 19833 - protein, 9 aa, Artificial Sequence
  Description of Artificial Sequence: Synthetic peptide
  Seed: WMACNSAAF
WMACNSAAA

SEQ ID NO: 19834 - protein, 9 aa, Artificial Sequence
  Description of Artificial Sequence: Synthetic peptide
  Seed: WMACNSAAF
WMACNSAAC

SEQ ID NO: 19835 - protein, 9 aa, Artificial Sequence
  Description of Artificial Sequence: Synthetic peptide
  Seed: WMACNSAAF
WMACNSAAH

SEQ ID NO: 19836 - protein, 9 aa, Artificial Sequence
  Description of Artificial Sequence: Synthetic peptide
  Seed: WMACNSAAF
WMACNSAAI

SEQ ID NO: 19837 - protein, 9 aa, Artificial Sequence
  Description of Artificial Sequence: Synthetic peptide
  Seed: WMACNSAAF
WMACNSAAL

SEQ ID NO: 19838 - protein, 9 aa, Artificial Sequence
  Description of Artificial Sequence: Synthetic peptide
  Seed: WMACNSAAF
WMACNSAAK

SEQ ID NO: 19839 - protein, 9 aa, Artificial Sequence
  Description of Artificial Sequence: Synthetic peptide
  Seed: WMACNSAAF
WMACNSAAM

SEQ ID NO: 19840 - protein, 9 aa, Artificial Sequence
  Description of Artificial Sequence: Synthetic peptide
  Seed: WMACNSAAF
WMACNSAAS

SEQ ID NO: 19841 - protein, 9 aa, Artificial Sequence
  Description of Artificial Sequence: Synthetic peptide
  Seed: WMACNSAAF
WMACNSAAT

SEQ ID NO: 19842 - protein, 9 aa, Artificial Sequence
  Description of Artificial Sequence: Synthetic peptide
  Seed: WMACNSAAF
WMACNSAAW

SEQ ID NO: 19843 - protein, 9 aa, Artificial Sequence
  Description of Artificial Sequence: Synthetic peptide
  Seed: WMACNSAAF
WMACNSAAY

SEQ ID NO: 19844 - protein, 9 aa, Artificial Sequence
  Description of Artificial Sequence: Synthetic peptide
  Seed: WMACNSAAF
WMACNSAAV

SEQ ID NO: 19845 - protein, 9 aa, Artificial Sequence
  Description of Artificial Sequence: Synthetic peptide
  Seed: WMACNSAAF
WFACNSAAA

SEQ ID NO: 19846 - protein, 9 aa, Artificial Sequence
  Description of Artificial Sequence: Synthetic peptide
  Seed: WMACNSAAF
WFACNSAAH

SEQ ID NO: 19847 - protein, 9 aa, Artificial Sequence
  Description of Artificial Sequence: Synthetic peptide
  Seed: WMACNSAAF
WFACNSAAI

SEQ ID NO: 19848 - protein, 9 aa, Artificial Sequence
  Description of Artificial Sequence: Synthetic peptide
  Seed: WMACNSAAF
WFACNSAAL

SEQ ID NO: 19849 - protein, 9 aa, Artificial Sequence
  Description of Artificial Sequence: Synthetic peptide
  Seed: WMACNSAAF
WFACNSAAM

SEQ ID NO: 19850 - protein, 9 aa, Artificial Sequence
  Description of Artificial Sequence: Synthetic peptide
  Seed: WMACNSAAF
WFACNSAAF

SEQ ID NO: 19851 - protein, 9 aa, Artificial Sequence
  Description of Artificial Sequence: Synthetic peptide
  Seed: WMACNSAAF
WFACNSAAW

SEQ ID NO: 19852 - protein, 9 aa, Artificial Sequence
  Description of Artificial Sequence: Synthetic peptide
  Seed: WMACNSAAF
WFACNSAAY

SEQ ID NO: 19853 - protein, 9 aa, Artificial Sequence
  Description of Artificial Sequence: Synthetic peptide
  Seed: WMACNSAAF
WMACNSAAR

SEQ ID NO: 19854 - protein, 9 aa, Artificial Sequence
  Description of Artificial Sequence: Synthetic peptide
  Seed: WMACNSAAF
WKACNSAAV

SEQ ID NO: 19855 - protein, 9 aa, Artificial Sequence
  Description of Artificial Sequence: Synthetic peptide
  Seed: WMACNSAAF
WLACNSAAC

SEQ ID NO: 19856 - protein, 9 aa, Artificial Sequence
  Description of Artificial Sequence: Synthetic peptide
  Seed: WMACNSAAF
WKACNSAAY

SEQ ID NO: 19857 - protein, 9 aa, Artificial Sequence
  Description of Artificial Sequence: Synthetic peptide
  Seed: WMACNSAAF
WLACNSAAG

SEQ ID NO: 19858 - protein, 9 aa, Artificial Sequence
  Description of Artificial Sequence: Synthetic peptide
  Seed: WMACNSAAF
WLACNSAAH

SEQ ID NO: 19859 - protein, 9 aa, Artificial Sequence
  Description of Artificial Sequence: Synthetic peptide
  Seed: WMACNSAAF
WLACNSAAI

SEQ ID NO: 19860 - protein, 9 aa, Artificial Sequence
  Description of Artificial Sequence: Synthetic peptide
  Seed: WMACNSAAF
WLACNSAAL

SEQ ID NO: 19861 - protein, 9 aa, Artificial Sequence
  Description of Artificial Sequence: Synthetic peptide
  Seed: WMACNSAAF
WLACNSAAK

SEQ ID NO: 19862 - protein, 9 aa, Artificial Sequence
  Description of Artificial Sequence: Synthetic peptide
  Seed: WMACNSAAF
WLACNSAAM

SEQ ID NO: 19863 - protein, 9 aa, Artificial Sequence
  Description of Artificial Sequence: Synthetic peptide
  Seed: WMACNSAAF
WLACNSAAF

SEQ ID NO: 19864 - protein, 9 aa, Artificial Sequence
  Description of Artificial Sequence: Synthetic peptide
  Seed: WMACNSAAF
WLACNSAAS

SEQ ID NO: 19865 - protein, 9 aa, Artificial Sequence
  Description of Artificial Sequence: Synthetic peptide
  Seed: WMACNSAAF
WLACNSAAT

SEQ ID NO: 19866 - protein, 9 aa, Artificial Sequence
  Description of Artificial Sequence: Synthetic peptide
  Seed: WMACNSAAF
WLACNSAAW

SEQ ID NO: 19867 - protein, 9 aa, Artificial Sequence
  Description of Artificial Sequence: Synthetic peptide
  Seed: WMACNSAAF
WLACNSAAY

SEQ ID NO: 19868 - protein, 9 aa, Artificial Sequence
  Description of Artificial Sequence: Synthetic peptide
  Seed: WMACNSAAF
WLACNSAAV

SEQ ID NO: 19869 - protein, 9 aa, Artificial Sequence
  Description of Artificial Sequence: Synthetic peptide
  Seed: WMACNSAAF
WKACNSAAA

SEQ ID NO: 19870 - protein, 9 aa, Artificial Sequence
  Description of Artificial Sequence: Synthetic peptide
  Seed: WMACNSAAF
WKACNSAAH

SEQ ID NO: 19871 - protein, 9 aa, Artificial Sequence
  Description of Artificial Sequence: Synthetic peptide
  Seed: WMACNSAAF
WKACNSAAI

SEQ ID NO: 19872 - protein, 9 aa, Artificial Sequence
  Description of Artificial Sequence: Synthetic peptide
  Seed: WMACNSAAF
WKACNSAAL

SEQ ID NO: 19873 - protein, 9 aa, Artificial Sequence
  Description of Artificial Sequence: Synthetic peptide
  Seed: WMACNSAAF
WKACNSAAM

SEQ ID NO: 19874 - protein, 9 aa, Artificial Sequence
  Description of Artificial Sequence: Synthetic peptide
  Seed: WMACNSAAF
WKACNSAAF

SEQ ID NO: 19875 - protein, 9 aa, Artificial Sequence
  Description of Artificial Sequence: Synthetic peptide
  Seed: WMACNSAAF
WKACNSAAW

SEQ ID NO: 19876 - protein, 9 aa, Artificial Sequence
  Description of Artificial Sequence: Synthetic peptide
  Seed: WMACHSAAF
WTACHSAAA

SEQ ID NO: 19877 - protein, 9 aa, Artificial Sequence
  Description of Artificial Sequence: Synthetic peptide
  Seed: WMACHSAAF
WSACHSAAV

SEQ ID NO: 19878 - protein, 9 aa, Artificial Sequence
  Description of Artificial Sequence: Synthetic peptide
  Seed: WMACHSAAF
WSACHSAAY

SEQ ID NO: 19879 - protein, 10 aa, Artificial Sequence
  Description of Artificial Sequence: Synthetic peptide
  Seed: WHSNLNDTTY
WASNLNDTTF

SEQ ID NO: 19880 - protein, 10 aa, Artificial Sequence
  Description of Artificial Sequence: Synthetic peptide
  Seed: WHSNLNDATY
WWSNLNDATY

SEQ ID NO: 19881 - protein, 10 aa, Artificial Sequence
  Description of Artificial Sequence: Synthetic peptide
  Seed: WHSNLNDATY
WYSNLNDATF

SEQ ID NO: 19882 - protein, 10 aa, Artificial Sequence
  Description of Artificial Sequence: Synthetic peptide
  Seed: WHSNLNDATY
WYSNLNDATW

SEQ ID NO: 19883 - protein, 10 aa, Artificial Sequence
  Description of Artificial Sequence: Synthetic peptide
  Seed: WHSNLNDATY
WYSNLNDATY

SEQ ID NO: 19884 - protein, 10 aa, Artificial Sequence
  Description of Artificial Sequence: Synthetic peptide
  Seed: WHSNLNDATY
WVSNLNDATM

SEQ ID NO: 19885 - protein, 10 aa, Artificial Sequence
  Description of Artificial Sequence: Synthetic peptide
  Seed: WHSNLNDATY
WVSNLNDATF

SEQ ID NO: 19886 - protein, 10 aa, Artificial Sequence
  Description of Artificial Sequence: Synthetic peptide
  Seed: WHSNLNDATY
WVSNLNDATW

SEQ ID NO: 19887 - protein, 10 aa, Artificial Sequence
  Description of Artificial Sequence: Synthetic peptide
  Seed: WHSNLNDATY
WVSNLNDATY

SEQ ID NO: 19888 - protein, 10 aa, Artificial Sequence
  Description of Artificial Sequence: Synthetic peptide
  Seed: WHSNLNDTTY
WASNLNDTTM

SEQ ID NO: 19889 - protein, 10 aa, Artificial Sequence
  Description of Artificial Sequence: Synthetic peptide
  Seed: WHSNLNDTTY
WASNLNDTTW

SEQ ID NO: 19890 - protein, 10 aa, Artificial Sequence
  Description of Artificial Sequence: Synthetic peptide
  Seed: WHSNLNDTTY
WDSNLNDTTY

SEQ ID NO: 19891 - protein, 10 aa, Artificial Sequence
  Description of Artificial Sequence: Synthetic peptide
  Seed: WHSNLNDTTY
WASNLNDTTY

SEQ ID NO: 19892 - protein, 10 aa, Artificial Sequence
  Description of Artificial Sequence: Synthetic peptide
  Seed: WHSNLNDTTY
WRSNLNDTTM

SEQ ID NO: 19893 - protein, 10 aa, Artificial Sequence
  Description of Artificial Sequence: Synthetic peptide
  Seed: WHSNLNDTTY
WRSNLNDTTF

SEQ ID NO: 19894 - protein, 10 aa, Artificial Sequence
  Description of Artificial Sequence: Synthetic peptide
  Seed: WHSNLNDTTY
WRSNLNDTTW

SEQ ID NO: 19895 - protein, 10 aa, Artificial Sequence
  Description of Artificial Sequence: Synthetic peptide
  Seed: WHSNLNDTTY
WRSNLNDTTY

SEQ ID NO: 19896 - protein, 10 aa, Artificial Sequence
  Description of Artificial Sequence: Synthetic peptide
  Seed: WHSNLNDTTY
WNSNLNDTTF

SEQ ID NO: 19897 - protein, 10 aa, Artificial Sequence
  Description of Artificial Sequence: Synthetic peptide
  Seed: WHSNLNDTTY
WNSNLNDTTW

SEQ ID NO: 19898 - protein, 10 aa, Artificial Sequence
  Description of Artificial Sequence: Synthetic peptide
  Seed: WHSNLNDTTY
WNSNLNDTTY

SEQ ID NO: 19899 - protein, 10 aa, Artificial Sequence
  Description of Artificial Sequence: Synthetic peptide
  Seed: WHSNLNDTTY
WDSNLNDTTF

SEQ ID NO: 19900 - protein, 10 aa, Artificial Sequence
  Description of Artificial Sequence: Synthetic peptide
  Seed: WHSNLNDATY
WWSNLNDATW

SEQ ID NO: 19901 - protein, 10 aa, Artificial Sequence
  Description of Artificial Sequence: Synthetic peptide
  Seed: WHSNLNDATY
WWSNLNDATF

SEQ ID NO: 19902 - protein, 10 aa, Artificial Sequence
  Description of Artificial Sequence: Synthetic peptide
  Seed: WHSNLNDATY
WTSNLNDATY

SEQ ID NO: 19903 - protein, 10 aa, Artificial Sequence
  Description of Artificial Sequence: Synthetic peptide
  Seed: WHSNLNDATY
WTSNLNDATW

SEQ ID NO: 19904 - protein, 10 aa, Artificial Sequence
  Description of Artificial Sequence: Synthetic peptide
  Seed: WHSNLNDATY
WMSNLNDATY

SEQ ID NO: 19905 - protein, 10 aa, Artificial Sequence
  Description of Artificial Sequence: Synthetic peptide
  Seed: WHSNLNDATY
WFSNLNDATF

SEQ ID NO: 19906 - protein, 10 aa, Artificial Sequence
  Description of Artificial Sequence: Synthetic peptide
  Seed: WHSNLNDATY
WFSNLNDATW

SEQ ID NO: 19907 - protein, 10 aa, Artificial Sequence
  Description of Artificial Sequence: Synthetic peptide
  Seed: WHSNLNDATY
WFSNLNDATY

SEQ ID NO: 19908 - protein, 10 aa, Artificial Sequence
  Description of Artificial Sequence: Synthetic peptide
  Seed: WHSNLNDATY
WPSNLNDATA

SEQ ID NO: 19909 - protein, 10 aa, Artificial Sequence
  Description of Artificial Sequence: Synthetic peptide
  Seed: WHSNLNDATY
WPSNLNDATH

SEQ ID NO: 19910 - protein, 10 aa, Artificial Sequence
  Description of Artificial Sequence: Synthetic peptide
  Seed: WHSNLNDATY
WPSNLNDATL

SEQ ID NO: 19911 - protein, 10 aa, Artificial Sequence
  Description of Artificial Sequence: Synthetic peptide
  Seed: WHSNLNDATY
WPSNLNDATM

SEQ ID NO: 19912 - protein, 10 aa, Artificial Sequence
  Description of Artificial Sequence: Synthetic peptide
  Seed: WHSNLNDATY
WPSNLNDATF

SEQ ID NO: 19913 - protein, 10 aa, Artificial Sequence
  Description of Artificial Sequence: Synthetic peptide
  Seed: WHSNLNDATY
WPSNLNDATW

SEQ ID NO: 19914 - protein, 10 aa, Artificial Sequence
  Description of Artificial Sequence: Synthetic peptide
  Seed: WHSNLNDATY
WPSNLNDATY

SEQ ID NO: 19915 - protein, 10 aa, Artificial Sequence
  Description of Artificial Sequence: Synthetic peptide
  Seed: WHSNLNDATY
WSSNLNDATL

SEQ ID NO: 19916 - protein, 10 aa, Artificial Sequence
  Description of Artificial Sequence: Synthetic peptide
  Seed: WHSNLNDATY
WSSNLNDATM

SEQ ID NO: 19917 - protein, 10 aa, Artificial Sequence
  Description of Artificial Sequence: Synthetic peptide
  Seed: WHSNLNDATY
WSSNLNDATF

SEQ ID NO: 19918 - protein, 10 aa, Artificial Sequence
  Description of Artificial Sequence: Synthetic peptide
  Seed: WHSNLNDATY
WSSNLNDATW

SEQ ID NO: 19919 - protein, 10 aa, Artificial Sequence
  Description of Artificial Sequence: Synthetic peptide
  Seed: WHSNLNDATY
WSSNLNDATY

SEQ ID NO: 19920 - protein, 10 aa, Artificial Sequence
  Description of Artificial Sequence: Synthetic peptide
  Seed: WHSNLNDATY
WTSNLNDATL

SEQ ID NO: 19921 - protein, 10 aa, Artificial Sequence
  Description of Artificial Sequence: Synthetic peptide
  Seed: WHSNLNDATY
WTSNLNDATM

SEQ ID NO: 19922 - protein, 10 aa, Artificial Sequence
  Description of Artificial Sequence: Synthetic peptide
  Seed: WHSNLNDATY
WTSNLNDATF

SEQ ID NO: 19923 - protein, 10 aa, Artificial Sequence
  Description of Artificial Sequence: Synthetic peptide
  Seed: WHSNLNDTTY
WDSNLNDTTW

SEQ ID NO: 19924 - protein, 10 aa, Artificial Sequence
  Description of Artificial Sequence: Synthetic peptide
  Seed: WHSNLNDTTY
WCSNLNDTTF

SEQ ID NO: 19925 - protein, 10 aa, Artificial Sequence
  Description of Artificial Sequence: Synthetic peptide
  Seed: WHSNLNDTTY
WSSNLNDTTL

SEQ ID NO: 19926 - protein, 10 aa, Artificial Sequence
  Description of Artificial Sequence: Synthetic peptide
  Seed: WHSNLNDTTY
WMSNLNDTTF

SEQ ID NO: 19927 - protein, 10 aa, Artificial Sequence
  Description of Artificial Sequence: Synthetic peptide
  Seed: WHSNLNDTTY
WLSNLNDTTW

SEQ ID NO: 19928 - protein, 10 aa, Artificial Sequence
  Description of Artificial Sequence: Synthetic peptide
  Seed: WHSNLNDTTY
WLSNLNDTTY

SEQ ID NO: 19929 - protein, 10 aa, Artificial Sequence
  Description of Artificial Sequence: Synthetic peptide
  Seed: WHSNLNDTTY
WKSNLNDTTL

SEQ ID NO: 19930 - protein, 10 aa, Artificial Sequence
  Description of Artificial Sequence: Synthetic peptide
  Seed: WHSNLNDTTY
WKSNLNDTTM

SEQ ID NO: 19931 - protein, 10 aa, Artificial Sequence
  Description of Artificial Sequence: Synthetic peptide
  Seed: WHSNLNDTTY
WKSNLNDTTF

SEQ ID NO: 19932 - protein, 10 aa, Artificial Sequence
  Description of Artificial Sequence: Synthetic peptide
  Seed: WHSNLNDTTY
WKSNLNDTTW

SEQ ID NO: 19933 - protein, 10 aa, Artificial Sequence
  Description of Artificial Sequence: Synthetic peptide
  Seed: WHSNLNDTTY
WKSNLNDTTY

SEQ ID NO: 19934 - protein, 10 aa, Artificial Sequence
  Description of Artificial Sequence: Synthetic peptide
  Seed: WHSNLNDTTY
WMSNLNDTTL

SEQ ID NO: 19935 - protein, 10 aa, Artificial Sequence
  Description of Artificial Sequence: Synthetic peptide
  Seed: WHSNLNDTTY
WMSNLNDTTM

SEQ ID NO: 19936 - protein, 10 aa, Artificial Sequence
  Description of Artificial Sequence: Synthetic peptide
  Seed: WHSNLNDTTY
WMSNLNDTTW

SEQ ID NO: 19937 - protein, 10 aa, Artificial Sequence
  Description of Artificial Sequence: Synthetic peptide
  Seed: WHSNLNDTTY
WCSNLNDTTW

SEQ ID NO: 19938 - protein, 10 aa, Artificial Sequence
  Description of Artificial Sequence: Synthetic peptide
  Seed: WHSNLNDTTY
WMSNLNDTTY

SEQ ID NO: 19939 - protein, 10 aa, Artificial Sequence
  Description of Artificial Sequence: Synthetic peptide
  Seed: WHSNLNDTTY
WFSNLNDTTF

SEQ ID NO: 19940 - protein, 10 aa, Artificial Sequence
  Description of Artificial Sequence: Synthetic peptide
  Seed: WHSNLNDTTY
WFSNLNDTTW

SEQ ID NO: 19941 - protein, 10 aa, Artificial Sequence
  Description of Artificial Sequence: Synthetic peptide
  Seed: WHSNLNDTTY
WFSNLNDTTY

SEQ ID NO: 19942 - protein, 10 aa, Artificial Sequence
  Description of Artificial Sequence: Synthetic peptide
  Seed: WHSNLNDTTY
WPSNLNDTTH

SEQ ID NO: 19943 - protein, 10 aa, Artificial Sequence
  Description of Artificial Sequence: Synthetic peptide
  Seed: WHSNLNDTTY
WPSNLNDTTL

SEQ ID NO: 19944 - protein, 10 aa, Artificial Sequence
  Description of Artificial Sequence: Synthetic peptide
  Seed: WHSNLNDTTY
WPSNLNDTTM

SEQ ID NO: 19945 - protein, 10 aa, Artificial Sequence
  Description of Artificial Sequence: Synthetic peptide
  Seed: WHSNLNDTTY
WPSNLNDTTF

SEQ ID NO: 19946 - protein, 10 aa, Artificial Sequence
  Description of Artificial Sequence: Synthetic peptide
  Seed: WHSNLNDTTY
WPSNLNDTTW

SEQ ID NO: 19947 - protein, 10 aa, Artificial Sequence
  Description of Artificial Sequence: Synthetic peptide
  Seed: WHSNLNDTTY
WLSNLNDTTF

SEQ ID NO: 19948 - protein, 10 aa, Artificial Sequence
  Description of Artificial Sequence: Synthetic peptide
  Seed: WHSNLNDTTY
WLSNLNDTTM

SEQ ID NO: 19949 - protein, 10 aa, Artificial Sequence
  Description of Artificial Sequence: Synthetic peptide
  Seed: WHSNLNDTTY
WISNLNDTTY

SEQ ID NO: 19950 - protein, 10 aa, Artificial Sequence
  Description of Artificial Sequence: Synthetic peptide
  Seed: WHSNLNDTTY
WISNLNDTTW

SEQ ID NO: 19951 - protein, 10 aa, Artificial Sequence
  Description of Artificial Sequence: Synthetic peptide
  Seed: WHSNLNDTTY
WCSNLNDTTY

SEQ ID NO: 19952 - protein, 10 aa, Artificial Sequence
  Description of Artificial Sequence: Synthetic peptide
  Seed: WHSNLNDTTY
WQSNLNDTTH

SEQ ID NO: 19953 - protein, 10 aa, Artificial Sequence
  Description of Artificial Sequence: Synthetic peptide
  Seed: WHSNLNDTTY
WQSNLNDTTI

SEQ ID NO: 19954 - protein, 10 aa, Artificial Sequence
  Description of Artificial Sequence: Synthetic peptide
  Seed: WHSNLNDTTY
WQSNLNDTTL

SEQ ID NO: 19955 - protein, 10 aa, Artificial Sequence
  Description of Artificial Sequence: Synthetic peptide
  Seed: WHSNLNDTTY
WQSNLNDTTM

SEQ ID NO: 19956 - protein, 10 aa, Artificial Sequence
  Description of Artificial Sequence: Synthetic peptide
  Seed: WHSNLNDTTY
WQSNLNDTTF

SEQ ID NO: 19957 - protein, 10 aa, Artificial Sequence
  Description of Artificial Sequence: Synthetic peptide
  Seed: WHSNLNDTTY
WQSNLNDTTW

SEQ ID NO: 19958 - protein, 10 aa, Artificial Sequence
  Description of Artificial Sequence: Synthetic peptide
  Seed: WHSNLNDTTY
WQSNLNDTTY

SEQ ID NO: 19959 - protein, 10 aa, Artificial Sequence
  Description of Artificial Sequence: Synthetic peptide
  Seed: WHSNLNDTTY
WESNLNDTTM

SEQ ID NO: 19960 - protein, 10 aa, Artificial Sequence
  Description of Artificial Sequence: Synthetic peptide
  Seed: WHSNLNDTTY
WESNLNDTTF

SEQ ID NO: 19961 - protein, 10 aa, Artificial Sequence
  Description of Artificial Sequence: Synthetic peptide
  Seed: WHSNLNDTTY
WESNLNDTTW

SEQ ID NO: 19962 - protein, 10 aa, Artificial Sequence
  Description of Artificial Sequence: Synthetic peptide
  Seed: WHSNLNDTTY
WESNLNDTTY

SEQ ID NO: 19963 - protein, 10 aa, Artificial Sequence
  Description of Artificial Sequence: Synthetic peptide
  Seed: WHSNLNDTTY
WGSNLNDTTF

SEQ ID NO: 19964 - protein, 10 aa, Artificial Sequence
  Description of Artificial Sequence: Synthetic peptide
  Seed: WHSNLNDTTY
WGSNLNDTTW

SEQ ID NO: 19965 - protein, 10 aa, Artificial Sequence
  Description of Artificial Sequence: Synthetic peptide
  Seed: WHSNLNDTTY
WGSNLNDTTY

SEQ ID NO: 19966 - protein, 10 aa, Artificial Sequence
  Description of Artificial Sequence: Synthetic peptide
  Seed: WHSNLNDTTY
WHSNLNDTTM

SEQ ID NO: 19967 - protein, 10 aa, Artificial Sequence
  Description of Artificial Sequence: Synthetic peptide
  Seed: WHSNLNDTTY
WHSNLNDTTF

SEQ ID NO: 19968 - protein, 10 aa, Artificial Sequence
  Description of Artificial Sequence: Synthetic peptide
  Seed: WHSNLNDTTY
WHSNLNDTTW

SEQ ID NO: 19969 - protein, 10 aa, Artificial Sequence
  Description of Artificial Sequence: Synthetic peptide
  Seed: WHSNLNDTTY
WISNLNDTTF

SEQ ID NO: 19970 - protein, 10 aa, Artificial Sequence
  Description of Artificial Sequence: Synthetic peptide
  Seed: WHSNLNDATY
WMSNLNDATW

SEQ ID NO: 19971 - protein, 10 aa, Artificial Sequence
  Description of Artificial Sequence: Synthetic peptide
  Seed: WHSNLNDATY
WMSNLNDATF

SEQ ID NO: 19972 - protein, 10 aa, Artificial Sequence
  Description of Artificial Sequence: Synthetic peptide
  Seed: WHSNLNDATY
WMSNLNDATM

SEQ ID NO: 19973 - protein, 9 aa, Artificial Sequence
  Description of Artificial Sequence: Synthetic peptide
  Seed: WHSNLNDAT
WKSNLNDAV

SEQ ID NO: 19974 - protein, 9 aa, Artificial Sequence
  Description of Artificial Sequence: Synthetic peptide
  Seed: WHSNLNDAT
WHSNLNDAI

SEQ ID NO: 19975 - protein, 9 aa, Artificial Sequence
  Description of Artificial Sequence: Synthetic peptide
  Seed: WHSNLNDAT
WHSNLNDAL

SEQ ID NO: 19976 - protein, 9 aa, Artificial Sequence
  Description of Artificial Sequence: Synthetic peptide
  Seed: WHSNLNDAT
WHSNLNDAM

SEQ ID NO: 19977 - protein, 9 aa, Artificial Sequence
  Description of Artificial Sequence: Synthetic peptide
  Seed: WHSNLNDAT
WHSNLNDAF

SEQ ID NO: 19978 - protein, 9 aa, Artificial Sequence
  Description of Artificial Sequence: Synthetic peptide
  Seed: WHSNLNDAT
WHSNLNDAV

SEQ ID NO: 19979 - protein, 9 aa, Artificial Sequence
  Description of Artificial Sequence: Synthetic peptide
  Seed: WHSNLNDAT
WLSNLNDAL

SEQ ID NO: 19980 - protein, 9 aa, Artificial Sequence
  Description of Artificial Sequence: Synthetic peptide
  Seed: WHSNLNDAT
WKSNLNDAI

SEQ ID NO: 19981 - protein, 9 aa, Artificial Sequence
  Description of Artificial Sequence: Synthetic peptide
  Seed: WHSNLNDAT
WKSNLNDAL

SEQ ID NO: 19982 - protein, 9 aa, Artificial Sequence
  Description of Artificial Sequence: Synthetic peptide
  Seed: WHSNLNDAT
WKSNLNDAM

SEQ ID NO: 19983 - protein, 9 aa, Artificial Sequence
  Description of Artificial Sequence: Synthetic peptide
  Seed: WHSNLNDAT
WMSNLNDAI

SEQ ID NO: 19984 - protein, 10 aa, Artificial Sequence
  Description of Artificial Sequence: Synthetic peptide
  Seed: WHSNLNDATY
WMSNLNDATL

SEQ ID NO: 19985 - protein, 9 aa, Artificial Sequence
  Description of Artificial Sequence: Synthetic peptide
  Seed: WHSNLNDAT
WMSNLNDAL

SEQ ID NO: 19986 - protein, 9 aa, Artificial Sequence
  Description of Artificial Sequence: Synthetic peptide
  Seed: WHSNLNDAT
WMSNLNDAM

SEQ ID NO: 19987 - protein, 9 aa, Artificial Sequence
  Description of Artificial Sequence: Synthetic peptide
  Seed: WHSNLNDAT
WPSNLNDAI

SEQ ID NO: 19988 - protein, 9 aa, Artificial Sequence
  Description of Artificial Sequence: Synthetic peptide
  Seed: WHSNLNDAT
WPSNLNDAL

SEQ ID NO: 19989 - protein, 9 aa, Artificial Sequence
  Description of Artificial Sequence: Synthetic peptide
  Seed: WHSNLNDAT
WPSNLNDAM

SEQ ID NO: 19990 - protein, 9 aa, Artificial Sequence
  Description of Artificial Sequence: Synthetic peptide
  Seed: WHSNLNDAT
WPSNLNDAV

SEQ ID NO: 19991 - protein, 9 aa, Artificial Sequence
  Description of Artificial Sequence: Synthetic peptide
  Seed: WHSNLNDAT
WYSNLNDAL

SEQ ID NO: 19992 - protein, 9 aa, Artificial Sequence
  Description of Artificial Sequence: Synthetic peptide
  Seed: WHSNLNDAT
WVSNLNDAL

SEQ ID NO: 19993 - protein, 10 aa, Artificial Sequence
  Description of Artificial Sequence: Synthetic peptide
  Seed: WHSNLNDATY
WASNLNDATM

SEQ ID NO: 19994 - protein, 9 aa, Artificial Sequence
  Description of Artificial Sequence: Synthetic peptide
  Seed: WHSNLNDAT
WHSNLNDAC

SEQ ID NO: 19995 - protein, 9 aa, Artificial Sequence
  Description of Artificial Sequence: Synthetic peptide
  Seed: WHSNLNDAT
WHSNLNDAA

SEQ ID NO: 19996 - protein, 9 aa, Artificial Sequence
  Description of Artificial Sequence: Synthetic peptide
  Seed: WHSNLNDAT
WESNLNDAL

SEQ ID NO: 19997 - protein, 9 aa, Artificial Sequence
  Description of Artificial Sequence: Synthetic peptide
  Seed: WHSNLNDAT
WQSNLNDAV

SEQ ID NO: 19998 - protein, 10 aa, Artificial Sequence
  Description of Artificial Sequence: Synthetic peptide
  Seed: VYGPAVSSGY
VWGPAVSSGM

SEQ ID NO: 19999 - protein, 10 aa, Artificial Sequence
  Description of Artificial Sequence: Synthetic peptide
  Seed: VYGPAVSSGY
VWGPAVSSGF

SEQ ID NO: 20000 - protein, 10 aa, Artificial Sequence
  Description of Artificial Sequence: Synthetic peptide
  Seed: VYGPAVSSGY
VWGPAVSSGY

SEQ ID NO: 20001 - protein, 10 aa, Artificial Sequence
  Description of Artificial Sequence: Synthetic peptide
  Seed: VYGPAVSSGY
VYGPAVSSGL

SEQ ID NO: 20002 - protein, 10 aa, Artificial Sequence
  Description of Artificial Sequence: Synthetic peptide
  Seed: VYGPAVSSGY
VYGPAVSSGM

SEQ ID NO: 20003 - protein, 10 aa, Artificial Sequence
  Description of Artificial Sequence: Synthetic peptide
  Seed: VYGPAVSSGY
VYGPAVSSGF

SEQ ID NO: 20004 - protein, 10 aa, Artificial Sequence
  Description of Artificial Sequence: Synthetic peptide
  Seed: VYGPAVSSGY
VVGPAVSSGY

SEQ ID NO: 20005 - protein, 9 aa, Artificial Sequence
  Description of Artificial Sequence: Synthetic peptide
  Seed: WHSNLNDAT
WASNLNDAL

SEQ ID NO: 20006 - protein, 9 aa, Artificial Sequence
  Description of Artificial Sequence: Synthetic peptide
  Seed: WHSNLNDAT
WRSNLNDAA

SEQ ID NO: 20007 - protein, 9 aa, Artificial Sequence
  Description of Artificial Sequence: Synthetic peptide
  Seed: WHSNLNDAT
WRSNLNDAI

SEQ ID NO: 20008 - protein, 9 aa, Artificial Sequence
  Description of Artificial Sequence: Synthetic peptide
  Seed: WHSNLNDAT
WRSNLNDAL

SEQ ID NO: 20009 - protein, 9 aa, Artificial Sequence
  Description of Artificial Sequence: Synthetic peptide
  Seed: WHSNLNDAT
WRSNLNDAM

SEQ ID NO: 20010 - protein, 9 aa, Artificial Sequence
  Description of Artificial Sequence: Synthetic peptide
  Seed: WHSNLNDAT
WRSNLNDAF

SEQ ID NO: 20011 - protein, 9 aa, Artificial Sequence
  Description of Artificial Sequence: Synthetic peptide
  Seed: WHSNLNDAT
WRSNLNDAV

SEQ ID NO: 20012 - protein, 9 aa, Artificial Sequence
  Description of Artificial Sequence: Synthetic peptide
  Seed: WHSNLNDAT
WNSNLNDAL

SEQ ID NO: 20013 - protein, 9 aa, Artificial Sequence
  Description of Artificial Sequence: Synthetic peptide
  Seed: WHSNLNDAT
WQSNLNDAI

SEQ ID NO: 20014 - protein, 9 aa, Artificial Sequence
  Description of Artificial Sequence: Synthetic peptide
  Seed: WHSNLNDAT
WQSNLNDAL

SEQ ID NO: 20015 - protein, 9 aa, Artificial Sequence
  Description of Artificial Sequence: Synthetic peptide
  Seed: WHSNLNDAT
WQSNLNDAM

SEQ ID NO: 20016 - protein, 9 aa, Artificial Sequence
  Description of Artificial Sequence: Synthetic peptide
  Seed: WHSNLNDAT
WQSNLNDAF

SEQ ID NO: 20017 - protein, 10 aa, Artificial Sequence
  Description of Artificial Sequence: Synthetic peptide
  Seed: WHSNLNDATY
WASNLNDATF

SEQ ID NO: 20018 - protein, 10 aa, Artificial Sequence
  Description of Artificial Sequence: Synthetic peptide
  Seed: WHSNLNDATY
WASNLNDATW

SEQ ID NO: 20019 - protein, 10 aa, Artificial Sequence
  Description of Artificial Sequence: Synthetic peptide
  Seed: WHSNLNDATY
WASNLNDATY

SEQ ID NO: 20020 - protein, 10 aa, Artificial Sequence
  Description of Artificial Sequence: Synthetic peptide
  Seed: WHSNLNDATY
WESNLNDATW

SEQ ID NO: 20021 - protein, 10 aa, Artificial Sequence
  Description of Artificial Sequence: Synthetic peptide
  Seed: WHSNLNDATY
WGSNLNDATF

SEQ ID NO: 20022 - protein, 10 aa, Artificial Sequence
  Description of Artificial Sequence: Synthetic peptide
  Seed: WHSNLNDATY
WGSNLNDATW

SEQ ID NO: 20023 - protein, 10 aa, Artificial Sequence
  Description of Artificial Sequence: Synthetic peptide
  Seed: WHSNLNDATY
WGSNLNDATY

SEQ ID NO: 20024 - protein, 10 aa, Artificial Sequence
  Description of Artificial Sequence: Synthetic peptide
  Seed: WHSNLNDATY
WHSNLNDATM

SEQ ID NO: 20025 - protein, 10 aa, Artificial Sequence
  Description of Artificial Sequence: Synthetic peptide
  Seed: WHSNLNDATY
WHSNLNDATF

SEQ ID NO: 20026 - protein, 10 aa, Artificial Sequence
  Description of Artificial Sequence: Synthetic peptide
  Seed: WHSNLNDATY
WHSNLNDATW

SEQ ID NO: 20027 - protein, 10 aa, Artificial Sequence
  Description of Artificial Sequence: Synthetic peptide
  Seed: WHSNLNDATY
WISNLNDATF

SEQ ID NO: 20028 - protein, 10 aa, Artificial Sequence
  Description of Artificial Sequence: Synthetic peptide
  Seed: WHSNLNDATY
WISNLNDATW

SEQ ID NO: 20029 - protein, 10 aa, Artificial Sequence
  Description of Artificial Sequence: Synthetic peptide
  Seed: WHSNLNDATY
WISNLNDATY

SEQ ID NO: 20030 - protein, 10 aa, Artificial Sequence
  Description of Artificial Sequence: Synthetic peptide
  Seed: WHSNLNDATY
WLSNLNDATM

SEQ ID NO: 20031 - protein, 10 aa, Artificial Sequence
  Description of Artificial Sequence: Synthetic peptide
  Seed: WHSNLNDATY
WLSNLNDATF

SEQ ID NO: 20032 - protein, 10 aa, Artificial Sequence
  Description of Artificial Sequence: Synthetic peptide
  Seed: WHSNLNDATY
WLSNLNDATW

SEQ ID NO: 20033 - protein, 10 aa, Artificial Sequence
  Description of Artificial Sequence: Synthetic peptide
  Seed: WHSNLNDATY
WLSNLNDATY

SEQ ID NO: 20034 - protein, 10 aa, Artificial Sequence
  Description of Artificial Sequence: Synthetic peptide
  Seed: WHSNLNDATY
WKSNLNDATL

SEQ ID NO: 20035 - protein, 10 aa, Artificial Sequence
  Description of Artificial Sequence: Synthetic peptide
  Seed: WHSNLNDATY
WKSNLNDATM

SEQ ID NO: 20036 - protein, 10 aa, Artificial Sequence
  Description of Artificial Sequence: Synthetic peptide
  Seed: WHSNLNDATY
WKSNLNDATF

SEQ ID NO: 20037 - protein, 10 aa, Artificial Sequence
  Description of Artificial Sequence: Synthetic peptide
  Seed: WHSNLNDATY
WKSNLNDATW

SEQ ID NO: 20038 - protein, 10 aa, Artificial Sequence
  Description of Artificial Sequence: Synthetic peptide
  Seed: WHSNLNDATY
WKSNLNDATY

SEQ ID NO: 20039 - protein, 10 aa, Artificial Sequence
  Description of Artificial Sequence: Synthetic peptide
  Seed: WHSNLNDATY
WMSNLNDATH

SEQ ID NO: 20040 - protein, 10 aa, Artificial Sequence
  Description of Artificial Sequence: Synthetic peptide
  Seed: WHSNLNDATY
WESNLNDATY

SEQ ID NO: 20041 - protein, 10 aa, Artificial Sequence
  Description of Artificial Sequence: Synthetic peptide
  Seed: WHSNLNDATY
WESNLNDATF

SEQ ID NO: 20042 - protein, 10 aa, Artificial Sequence
  Description of Artificial Sequence: Synthetic peptide
  Seed: WHSNLNDATY
WRSNLNDATM

SEQ ID NO: 20043 - protein, 10 aa, Artificial Sequence
  Description of Artificial Sequence: Synthetic peptide
  Seed: WHSNLNDATY
WESNLNDATM

SEQ ID NO: 20044 - protein, 10 aa, Artificial Sequence
  Description of Artificial Sequence: Synthetic peptide
  Seed: WHSNLNDATY
WRSNLNDATF

SEQ ID NO: 20045 - protein, 10 aa, Artificial Sequence
  Description of Artificial Sequence: Synthetic peptide
  Seed: WHSNLNDATY
WRSNLNDATW

SEQ ID NO: 20046 - protein, 10 aa, Artificial Sequence
  Description of Artificial Sequence: Synthetic peptide
  Seed: WHSNLNDATY
WRSNLNDATY

SEQ ID NO: 20047 - protein, 10 aa, Artificial Sequence
  Description of Artificial Sequence: Synthetic peptide
  Seed: WHSNLNDATY
WNSNLNDATF

SEQ ID NO: 20048 - protein, 10 aa, Artificial Sequence
  Description of Artificial Sequence: Synthetic peptide
  Seed: WHSNLNDATY
WNSNLNDATW

SEQ ID NO: 20049 - protein, 10 aa, Artificial Sequence
  Description of Artificial Sequence: Synthetic peptide
  Seed: WHSNLNDATY
WNSNLNDATY

SEQ ID NO: 20050 - protein, 10 aa, Artificial Sequence
  Description of Artificial Sequence: Synthetic peptide
  Seed: WHSNLNDATY
WDSNLNDATF

SEQ ID NO: 20051 - protein, 10 aa, Artificial Sequence
  Description of Artificial Sequence: Synthetic peptide
  Seed: WHSNLNDATY
WDSNLNDATW

SEQ ID NO: 20052 - protein, 10 aa, Artificial Sequence
  Description of Artificial Sequence: Synthetic peptide
  Seed: WHSNLNDATY
WDSNLNDATY

SEQ ID NO: 20053 - protein, 10 aa, Artificial Sequence
  Description of Artificial Sequence: Synthetic peptide
  Seed: WHSNLNDATY
WCSNLNDATF

SEQ ID NO: 20054 - protein, 10 aa, Artificial Sequence
  Description of Artificial Sequence: Synthetic peptide
  Seed: WHSNLNDATY
WCSNLNDATW

SEQ ID NO: 20055 - protein, 10 aa, Artificial Sequence
  Description of Artificial Sequence: Synthetic peptide
  Seed: WHSNLNDATY
WCSNLNDATY

SEQ ID NO: 20056 - protein, 10 aa, Artificial Sequence
  Description of Artificial Sequence: Synthetic peptide
  Seed: WHSNLNDATY
WQSNLNDATH

SEQ ID NO: 20057 - protein, 10 aa, Artificial Sequence
  Description of Artificial Sequence: Synthetic peptide
  Seed: WHSNLNDATY
WQSNLNDATI

SEQ ID NO: 20058 - protein, 10 aa, Artificial Sequence
  Description of Artificial Sequence: Synthetic peptide
  Seed: WHSNLNDATY
WQSNLNDATL

SEQ ID NO: 20059 - protein, 10 aa, Artificial Sequence
  Description of Artificial Sequence: Synthetic peptide
  Seed: WHSNLNDATY
WQSNLNDATM

SEQ ID NO: 20060 - protein, 10 aa, Artificial Sequence
  Description of Artificial Sequence: Synthetic peptide
  Seed: WHSNLNDATY
WQSNLNDATF

SEQ ID NO: 20061 - protein, 10 aa, Artificial Sequence
  Description of Artificial Sequence: Synthetic peptide
  Seed: WHSNLNDATY
WQSNLNDATW

SEQ ID NO: 20062 - protein, 10 aa, Artificial Sequence
  Description of Artificial Sequence: Synthetic peptide
  Seed: WHSNLNDATY
WQSNLNDATY

SEQ ID NO: 20063 - protein, 10 aa, Artificial Sequence
  Description of Artificial Sequence: Synthetic peptide
  Seed: WHSNLNDTTY
WPSNLNDTTY

SEQ ID NO: 20064 - protein, 10 aa, Artificial Sequence
  Description of Artificial Sequence: Synthetic peptide
  Seed: WHSNLNDTTY
WSSNLNDTTM

SEQ ID NO: 20065 - protein, 9 aa, Artificial Sequence
  Description of Artificial Sequence: Synthetic peptide
  Seed: WMACHSAAF
WSACHSAAW

SEQ ID NO: 20066 - protein, 9 aa, Artificial Sequence
  Description of Artificial Sequence: Synthetic peptide
  Seed: WMACHSAAF
WKACHSAAI

SEQ ID NO: 20067 - protein, 9 aa, Artificial Sequence
  Description of Artificial Sequence: Synthetic peptide
  Seed: WMACHSAAF
WLACHSAAF

SEQ ID NO: 20068 - protein, 9 aa, Artificial Sequence
  Description of Artificial Sequence: Synthetic peptide
  Seed: WMACHSAAF
WLACHSAAP

SEQ ID NO: 20069 - protein, 9 aa, Artificial Sequence
  Description of Artificial Sequence: Synthetic peptide
  Seed: WMACHSAAF
WLACHSAAS

SEQ ID NO: 20070 - protein, 9 aa, Artificial Sequence
  Description of Artificial Sequence: Synthetic peptide
  Seed: WMACHSAAF
WLACHSAAT

SEQ ID NO: 20071 - protein, 9 aa, Artificial Sequence
  Description of Artificial Sequence: Synthetic peptide
  Seed: WMACHSAAF
WLACHSAAW

SEQ ID NO: 20072 - protein, 9 aa, Artificial Sequence
  Description of Artificial Sequence: Synthetic peptide
  Seed: WMACHSAAF
WLACHSAAY

SEQ ID NO: 20073 - protein, 9 aa, Artificial Sequence
  Description of Artificial Sequence: Synthetic peptide
  Seed: WMACHSAAF
WLACHSAAV

SEQ ID NO: 20074 - protein, 9 aa, Artificial Sequence
  Description of Artificial Sequence: Synthetic peptide
  Seed: WMACHSAAF
WKACHSAAA

SEQ ID NO: 20075 - protein, 9 aa, Artificial Sequence
  Description of Artificial Sequence: Synthetic peptide
  Seed: WMACHSAAF
WKACHSAAH

SEQ ID NO: 20076 - protein, 9 aa, Artificial Sequence
  Description of Artificial Sequence: Synthetic peptide
  Seed: WMACHSAAF
WKACHSAAL

SEQ ID NO: 20077 - protein, 9 aa, Artificial Sequence
  Description of Artificial Sequence: Synthetic peptide
  Seed: WMACHSAAF
WMACHSAAI

SEQ ID NO: 20078 - protein, 9 aa, Artificial Sequence
  Description of Artificial Sequence: Synthetic peptide
  Seed: WMACHSAAF
WKACHSAAM

SEQ ID NO: 20079 - protein, 9 aa, Artificial Sequence
  Description of Artificial Sequence: Synthetic peptide
  Seed: WMACHSAAF
WKACHSAAF

SEQ ID NO: 20080 - protein, 9 aa, Artificial Sequence
  Description of Artificial Sequence: Synthetic peptide
  Seed: WMACHSAAF
WKACHSAAW

SEQ ID NO: 20081 - protein, 9 aa, Artificial Sequence
  Description of Artificial Sequence: Synthetic peptide
  Seed: WMACHSAAF
WKACHSAAY

SEQ ID NO: 20082 - protein, 9 aa, Artificial Sequence
  Description of Artificial Sequence: Synthetic peptide
  Seed: WMACHSAAF
WKACHSAAV

SEQ ID NO: 20083 - protein, 9 aa, Artificial Sequence
  Description of Artificial Sequence: Synthetic peptide
  Seed: WMACHSAAF
WMACHSAAA

SEQ ID NO: 20084 - protein, 9 aa, Artificial Sequence
  Description of Artificial Sequence: Synthetic peptide
  Seed: WMACHSAAF
WMACHSAAR

SEQ ID NO: 20085 - protein, 9 aa, Artificial Sequence
  Description of Artificial Sequence: Synthetic peptide
  Seed: WMACHSAAF
WMACHSAAC

SEQ ID NO: 20086 - protein, 9 aa, Artificial Sequence
  Description of Artificial Sequence: Synthetic peptide
  Seed: WMACHSAAF
WMACHSAAG

SEQ ID NO: 20087 - protein, 9 aa, Artificial Sequence
  Description of Artificial Sequence: Synthetic peptide
  Seed: WMACHSAAF
WLACHSAAM

SEQ ID NO: 20088 - protein, 9 aa, Artificial Sequence
  Description of Artificial Sequence: Synthetic peptide
  Seed: WMACHSAAF
WLACHSAAK

SEQ ID NO: 20089 - protein, 9 aa, Artificial Sequence
  Description of Artificial Sequence: Synthetic peptide
  Seed: WMACHSAAF
WLACHSAAL

SEQ ID NO: 20090 - protein, 9 aa, Artificial Sequence
  Description of Artificial Sequence: Synthetic peptide
  Seed: WMACHSAAF
WLACHSAAI

SEQ ID NO: 20091 - protein, 9 aa, Artificial Sequence
  Description of Artificial Sequence: Synthetic peptide
  Seed: WMACHSAAF
WHACHSAAY

SEQ ID NO: 20092 - protein, 9 aa, Artificial Sequence
  Description of Artificial Sequence: Synthetic peptide
  Seed: WMACHSAAF
WHACHSAAV

SEQ ID NO: 20093 - protein, 9 aa, Artificial Sequence
  Description of Artificial Sequence: Synthetic peptide
  Seed: WMACHSAAF
WIACHSAAA

SEQ ID NO: 20094 - protein, 9 aa, Artificial Sequence
  Description of Artificial Sequence: Synthetic peptide
  Seed: WMACHSAAF
WIACHSAAR

SEQ ID NO: 20095 - protein, 9 aa, Artificial Sequence
  Description of Artificial Sequence: Synthetic peptide
  Seed: WMACHSAAF
WIACHSAAH

SEQ ID NO: 20096 - protein, 9 aa, Artificial Sequence
  Description of Artificial Sequence: Synthetic peptide
  Seed: WMACHSAAF
WIACHSAAI

SEQ ID NO: 20097 - protein, 9 aa, Artificial Sequence
  Description of Artificial Sequence: Synthetic peptide
  Seed: WMACHSAAF
WIACHSAAL

SEQ ID NO: 20098 - protein, 9 aa, Artificial Sequence
  Description of Artificial Sequence: Synthetic peptide
  Seed: WMACHSAAF
WIACHSAAK

SEQ ID NO: 20099 - protein, 9 aa, Artificial Sequence
  Description of Artificial Sequence: Synthetic peptide
  Seed: WMACHSAAF
WIACHSAAM

SEQ ID NO: 20100 - protein, 9 aa, Artificial Sequence
  Description of Artificial Sequence: Synthetic peptide
  Seed: WMACHSAAF
WIACHSAAF

SEQ ID NO: 20101 - protein, 9 aa, Artificial Sequence
  Description of Artificial Sequence: Synthetic peptide
  Seed: WMACHSAAF
WIACHSAAT

SEQ ID NO: 20102 - protein, 9 aa, Artificial Sequence
  Description of Artificial Sequence: Synthetic peptide
  Seed: WMACHSAAF
WIACHSAAW

SEQ ID NO: 20103 - protein, 9 aa, Artificial Sequence
  Description of Artificial Sequence: Synthetic peptide
  Seed: WMACHSAAF
WIACHSAAY

SEQ ID NO: 20104 - protein, 9 aa, Artificial Sequence
  Description of Artificial Sequence: Synthetic peptide
  Seed: WMACHSAAF
WIACHSAAV

SEQ ID NO: 20105 - protein, 9 aa, Artificial Sequence
  Description of Artificial Sequence: Synthetic peptide
  Seed: WMACHSAAF
WLACHSAAA

SEQ ID NO: 20106 - protein, 9 aa, Artificial Sequence
  Description of Artificial Sequence: Synthetic peptide
  Seed: WMACHSAAF
WLACHSAAR

SEQ ID NO: 20107 - protein, 9 aa, Artificial Sequence
  Description of Artificial Sequence: Synthetic peptide
  Seed: WMACHSAAF
WLACHSAAC

SEQ ID NO: 20108 - protein, 9 aa, Artificial Sequence
  Description of Artificial Sequence: Synthetic peptide
  Seed: WMACHSAAF
WLACHSAAG

SEQ ID NO: 20109 - protein, 9 aa, Artificial Sequence
  Description of Artificial Sequence: Synthetic peptide
  Seed: WMACHSAAF
WLACHSAAH

SEQ ID NO: 20110 - protein, 9 aa, Artificial Sequence
  Description of Artificial Sequence: Synthetic peptide
  Seed: WMACHSAAF
WMACHSAAH

SEQ ID NO: 20111 - protein, 9 aa, Artificial Sequence
  Description of Artificial Sequence: Synthetic peptide
  Seed: WMACHSAAF
WMACHSAAL

SEQ ID NO: 20112 - protein, 10 aa, Artificial Sequence
  Description of Artificial Sequence: Synthetic peptide
  Seed: WHSNLNDTTY
WSSNLNDTTF

SEQ ID NO: 20113 - protein, 9 aa, Artificial Sequence
  Description of Artificial Sequence: Synthetic peptide
  Seed: WMACHSAAF
WPACHSAAW

SEQ ID NO: 20114 - protein, 9 aa, Artificial Sequence
  Description of Artificial Sequence: Synthetic peptide
  Seed: WMACHSAAF
WPACHSAAH

SEQ ID NO: 20115 - protein, 9 aa, Artificial Sequence
  Description of Artificial Sequence: Synthetic peptide
  Seed: WMACHSAAF
WPACHSAAI

SEQ ID NO: 20116 - protein, 9 aa, Artificial Sequence
  Description of Artificial Sequence: Synthetic peptide
  Seed: WMACHSAAF
WPACHSAAL

SEQ ID NO: 20117 - protein, 9 aa, Artificial Sequence
  Description of Artificial Sequence: Synthetic peptide
  Seed: WMACHSAAF
WPACHSAAK

SEQ ID NO: 20118 - protein, 9 aa, Artificial Sequence
  Description of Artificial Sequence: Synthetic peptide
  Seed: WMACHSAAF
WPACHSAAM

SEQ ID NO: 20119 - protein, 9 aa, Artificial Sequence
  Description of Artificial Sequence: Synthetic peptide
  Seed: WMACHSAAF
WPACHSAAF

SEQ ID NO: 20120 - protein, 9 aa, Artificial Sequence
  Description of Artificial Sequence: Synthetic peptide
  Seed: WMACHSAAF
WPACHSAAP

SEQ ID NO: 20121 - protein, 9 aa, Artificial Sequence
  Description of Artificial Sequence: Synthetic peptide
  Seed: WMACHSAAF
WPACHSAAS

SEQ ID NO: 20122 - protein, 9 aa, Artificial Sequence
  Description of Artificial Sequence: Synthetic peptide
  Seed: WMACHSAAF
WPACHSAAT

SEQ ID NO: 20123 - protein, 9 aa, Artificial Sequence
  Description of Artificial Sequence: Synthetic peptide
  Seed: WMACHSAAF
WPACHSAAY

SEQ ID NO: 20124 - protein, 9 aa, Artificial Sequence
  Description of Artificial Sequence: Synthetic peptide
  Seed: WMACHSAAF
WMACHSAAK

SEQ ID NO: 20125 - protein, 9 aa, Artificial Sequence
  Description of Artificial Sequence: Synthetic peptide
  Seed: WMACHSAAF
WPACHSAAV

SEQ ID NO: 20126 - protein, 9 aa, Artificial Sequence
  Description of Artificial Sequence: Synthetic peptide
  Seed: WMACHSAAF
WSACHSAAA

SEQ ID NO: 20127 - protein, 9 aa, Artificial Sequence
  Description of Artificial Sequence: Synthetic peptide
  Seed: WMACHSAAF
WSACHSAAR

SEQ ID NO: 20128 - protein, 9 aa, Artificial Sequence
  Description of Artificial Sequence: Synthetic peptide
  Seed: WMACHSAAF
WSACHSAAH

SEQ ID NO: 20129 - protein, 9 aa, Artificial Sequence
  Description of Artificial Sequence: Synthetic peptide
  Seed: WMACHSAAF
WSACHSAAI

SEQ ID NO: 20130 - protein, 9 aa, Artificial Sequence
  Description of Artificial Sequence: Synthetic peptide
  Seed: WMACHSAAF
WSACHSAAL

SEQ ID NO: 20131 - protein, 9 aa, Artificial Sequence
  Description of Artificial Sequence: Synthetic peptide
  Seed: WMACHSAAF
WSACHSAAK

SEQ ID NO: 20132 - protein, 9 aa, Artificial Sequence
  Description of Artificial Sequence: Synthetic peptide
  Seed: WMACHSAAF
WSACHSAAM

SEQ ID NO: 20133 - protein, 9 aa, Artificial Sequence
  Description of Artificial Sequence: Synthetic peptide
  Seed: WMACHSAAF
WSACHSAAF

SEQ ID NO: 20134 - protein, 9 aa, Artificial Sequence
  Description of Artificial Sequence: Synthetic peptide
  Seed: WMACHSAAF
WPACHSAAG

SEQ ID NO: 20135 - protein, 9 aa, Artificial Sequence
  Description of Artificial Sequence: Synthetic peptide
  Seed: WMACHSAAF
WPACHSAAE

SEQ ID NO: 20136 - protein, 9 aa, Artificial Sequence
  Description of Artificial Sequence: Synthetic peptide
  Seed: WMACHSAAF
WPACHSAAQ

SEQ ID NO: 20137 - protein, 9 aa, Artificial Sequence
  Description of Artificial Sequence: Synthetic peptide
  Seed: WMACHSAAF
WPACHSAAC

SEQ ID NO: 20138 - protein, 9 aa, Artificial Sequence
  Description of Artificial Sequence: Synthetic peptide
  Seed: WMACHSAAF
WMACHSAAM

SEQ ID NO: 20139 - protein, 9 aa, Artificial Sequence
  Description of Artificial Sequence: Synthetic peptide
  Seed: WMACHSAAF
WMACHSAAP

SEQ ID NO: 20140 - protein, 9 aa, Artificial Sequence
  Description of Artificial Sequence: Synthetic peptide
  Seed: WMACHSAAF
WMACHSAAS

SEQ ID NO: 20141 - protein, 9 aa, Artificial Sequence
  Description of Artificial Sequence: Synthetic peptide
  Seed: WMACHSAAF
WMACHSAAT

SEQ ID NO: 20142 - protein, 9 aa, Artificial Sequence
  Description of Artificial Sequence: Synthetic peptide
  Seed: WMACHSAAF
WMACHSAAW

SEQ ID NO: 20143 - protein, 9 aa, Artificial Sequence
  Description of Artificial Sequence: Synthetic peptide
  Seed: WMACHSAAF
WMACHSAAY

SEQ ID NO: 20144 - protein, 9 aa, Artificial Sequence
  Description of Artificial Sequence: Synthetic peptide
  Seed: WMACHSAAF
WMACHSAAV

SEQ ID NO: 20145 - protein, 9 aa, Artificial Sequence
  Description of Artificial Sequence: Synthetic peptide
  Seed: WMACHSAAF
WFACHSAAA

SEQ ID NO: 20146 - protein, 9 aa, Artificial Sequence
  Description of Artificial Sequence: Synthetic peptide
  Seed: WMACHSAAF
WFACHSAAH

SEQ ID NO: 20147 - protein, 9 aa, Artificial Sequence
  Description of Artificial Sequence: Synthetic peptide
  Seed: WMACHSAAF
WFACHSAAI

SEQ ID NO: 20148 - protein, 9 aa, Artificial Sequence
  Description of Artificial Sequence: Synthetic peptide
  Seed: WMACHSAAF
WFACHSAAL

SEQ ID NO: 20149 - protein, 9 aa, Artificial Sequence
  Description of Artificial Sequence: Synthetic peptide
  Seed: WMACHSAAF
WFACHSAAM

SEQ ID NO: 20150 - protein, 9 aa, Artificial Sequence
  Description of Artificial Sequence: Synthetic peptide
  Seed: WMACHSAAF
WFACHSAAF

SEQ ID NO: 20151 - protein, 9 aa, Artificial Sequence
  Description of Artificial Sequence: Synthetic peptide
  Seed: WMACHSAAF
WFACHSAAW

SEQ ID NO: 20152 - protein, 9 aa, Artificial Sequence
  Description of Artificial Sequence: Synthetic peptide
  Seed: WMACHSAAF
WFACHSAAY

SEQ ID NO: 20153 - protein, 9 aa, Artificial Sequence
  Description of Artificial Sequence: Synthetic peptide
  Seed: WMACHSAAF
WFACHSAAV

SEQ ID NO: 20154 - protein, 9 aa, Artificial Sequence
  Description of Artificial Sequence: Synthetic peptide
  Seed: WMACHSAAF
WPACHSAAA

SEQ ID NO: 20155 - protein, 9 aa, Artificial Sequence
  Description of Artificial Sequence: Synthetic peptide
  Seed: WMACHSAAF
WPACHSAAN

SEQ ID NO: 20156 - protein, 9 aa, Artificial Sequence
  Description of Artificial Sequence: Synthetic peptide
  Seed: WMACHSAAF
WPACHSAAD

SEQ ID NO: 20157 - protein, 9 aa, Artificial Sequence
  Description of Artificial Sequence: Synthetic peptide
  Seed: WMACHSAAF
WHACHSAAW

SEQ ID NO: 20158 - protein, 9 aa, Artificial Sequence
  Description of Artificial Sequence: Synthetic peptide
  Seed: WMACHSAAF
WHACHSAAT

SEQ ID NO: 20159 - protein, 9 aa, Artificial Sequence
  Description of Artificial Sequence: Synthetic peptide
  Seed: WMACHSAAF
WHACHSAAS

SEQ ID NO: 20160 - protein, 9 aa, Artificial Sequence
  Description of Artificial Sequence: Synthetic peptide
  Seed: WMACHSAAF
WRACHSAAF

SEQ ID NO: 20161 - protein, 9 aa, Artificial Sequence
  Description of Artificial Sequence: Synthetic peptide
  Seed: WMACHSAAF
WAACHSAAW

SEQ ID NO: 20162 - protein, 9 aa, Artificial Sequence
  Description of Artificial Sequence: Synthetic peptide
  Seed: WMACHSAAF
WAACHSAAY

SEQ ID NO: 20163 - protein, 9 aa, Artificial Sequence
  Description of Artificial Sequence: Synthetic peptide
  Seed: WMACHSAAF
WAACHSAAV

SEQ ID NO: 20164 - protein, 9 aa, Artificial Sequence
  Description of Artificial Sequence: Synthetic peptide
  Seed: WMACHSAAF
WRACHSAAA

SEQ ID NO: 20165 - protein, 9 aa, Artificial Sequence
  Description of Artificial Sequence: Synthetic peptide
  Seed: WMACHSAAF
WRACHSAAC

SEQ ID NO: 20166 - protein, 9 aa, Artificial Sequence
  Description of Artificial Sequence: Synthetic peptide
  Seed: WMACHSAAF
WRACHSAAH

SEQ ID NO: 20167 - protein, 9 aa, Artificial Sequence
  Description of Artificial Sequence: Synthetic peptide
  Seed: WMACHSAAF
WRACHSAAI

SEQ ID NO: 20168 - protein, 9 aa, Artificial Sequence
  Description of Artificial Sequence: Synthetic peptide
  Seed: WMACHSAAF
WRACHSAAL

SEQ ID NO: 20169 - protein, 9 aa, Artificial Sequence
  Description of Artificial Sequence: Synthetic peptide
  Seed: WMACHSAAF
WRACHSAAM

SEQ ID NO: 20170 - protein, 9 aa, Artificial Sequence
  Description of Artificial Sequence: Synthetic peptide
  Seed: WMACHSAAF
WRACHSAAT

SEQ ID NO: 20171 - protein, 9 aa, Artificial Sequence
  Description of Artificial Sequence: Synthetic peptide
  Seed: WMACHSAAF
WHACHSAAP

SEQ ID NO: 20172 - protein, 9 aa, Artificial Sequence
  Description of Artificial Sequence: Synthetic peptide
  Seed: WMACHSAAF
WRACHSAAW

SEQ ID NO: 20173 - protein, 9 aa, Artificial Sequence
  Description of Artificial Sequence: Synthetic peptide
  Seed: WMACHSAAF
WRACHSAAY

SEQ ID NO: 20174 - protein, 9 aa, Artificial Sequence
  Description of Artificial Sequence: Synthetic peptide
  Seed: WMACHSAAF
WRACHSAAV

SEQ ID NO: 20175 - protein, 9 aa, Artificial Sequence
  Description of Artificial Sequence: Synthetic peptide
  Seed: WMACHSAAF
WNACHSAAL

SEQ ID NO: 20176 - protein, 9 aa, Artificial Sequence
  Description of Artificial Sequence: Synthetic peptide
  Seed: WMACHSAAF
WNACHSAAM

SEQ ID NO: 20177 - protein, 9 aa, Artificial Sequence
  Description of Artificial Sequence: Synthetic peptide
  Seed: WMACHSAAF
WNACHSAAF

SEQ ID NO: 20178 - protein, 9 aa, Artificial Sequence
  Description of Artificial Sequence: Synthetic peptide
  Seed: WMACHSAAF
WNACHSAAW

SEQ ID NO: 20179 - protein, 9 aa, Artificial Sequence
  Description of Artificial Sequence: Synthetic peptide
  Seed: WMACHSAAF
WNACHSAAY

SEQ ID NO: 20180 - protein, 9 aa, Artificial Sequence
  Description of Artificial Sequence: Synthetic peptide
  Seed: WMACHSAAF
WNACHSAAV

SEQ ID NO: 20181 - protein, 9 aa, Artificial Sequence
  Description of Artificial Sequence: Synthetic peptide
  Seed: WMACHSAAF
WAACHSAAF

SEQ ID NO: 20182 - protein, 9 aa, Artificial Sequence
  Description of Artificial Sequence: Synthetic peptide
  Seed: WMACHSAAF
WAACHSAAM

SEQ ID NO: 20183 - protein, 9 aa, Artificial Sequence
  Description of Artificial Sequence: Synthetic peptide
  Seed: WMACHSAAF
WAACHSAAK

SEQ ID NO: 20184 - protein, 9 aa, Artificial Sequence
  Description of Artificial Sequence: Synthetic peptide
  Seed: WMACHSAAF
WAACHSAAL

SEQ ID NO: 20185 - protein, 10 aa, Artificial Sequence
  Description of Artificial Sequence: Synthetic peptide
  Seed: WHSNLNDTTY
WSSNLNDTTW

SEQ ID NO: 20186 - protein, 10 aa, Artificial Sequence
  Description of Artificial Sequence: Synthetic peptide
  Seed: WHSNLNDTTY
WSSNLNDTTY

SEQ ID NO: 20187 - protein, 10 aa, Artificial Sequence
  Description of Artificial Sequence: Synthetic peptide
  Seed: WHSNLNDTTY
WTSNLNDTTM

SEQ ID NO: 20188 - protein, 10 aa, Artificial Sequence
  Description of Artificial Sequence: Synthetic peptide
  Seed: WHSNLNDTTY
WTSNLNDTTF

SEQ ID NO: 20189 - protein, 10 aa, Artificial Sequence
  Description of Artificial Sequence: Synthetic peptide
  Seed: WHSNLNDTTY
WTSNLNDTTW

SEQ ID NO: 20190 - protein, 10 aa, Artificial Sequence
  Description of Artificial Sequence: Synthetic peptide
  Seed: WHSNLNDTTY
WTSNLNDTTY

SEQ ID NO: 20191 - protein, 10 aa, Artificial Sequence
  Description of Artificial Sequence: Synthetic peptide
  Seed: WHSNLNDTTY
WWSNLNDTTF

SEQ ID NO: 20192 - protein, 10 aa, Artificial Sequence
  Description of Artificial Sequence: Synthetic peptide
  Seed: WHSNLNDTTY
WWSNLNDTTW

SEQ ID NO: 20193 - protein, 10 aa, Artificial Sequence
  Description of Artificial Sequence: Synthetic peptide
  Seed: WHSNLNDTTY
WWSNLNDTTY

SEQ ID NO: 20194 - protein, 10 aa, Artificial Sequence
  Description of Artificial Sequence: Synthetic peptide
  Seed: WHSNLNDTTY
WYSNLNDTTF

SEQ ID NO: 20195 - protein, 10 aa, Artificial Sequence
  Description of Artificial Sequence: Synthetic peptide
  Seed: WHSNLNDTTY
WYSNLNDTTW

SEQ ID NO: 20196 - protein, 10 aa, Artificial Sequence
  Description of Artificial Sequence: Synthetic peptide
  Seed: WHSNLNDTTY
WYSNLNDTTY

SEQ ID NO: 20197 - protein, 10 aa, Artificial Sequence
  Description of Artificial Sequence: Synthetic peptide
  Seed: WHSNLNDTTY
WVSNLNDTTF

SEQ ID NO: 20198 - protein, 10 aa, Artificial Sequence
  Description of Artificial Sequence: Synthetic peptide
  Seed: WHSNLNDTTY
WVSNLNDTTW

SEQ ID NO: 20199 - protein, 10 aa, Artificial Sequence
  Description of Artificial Sequence: Synthetic peptide
  Seed: WHSNLNDTTY
WVSNLNDTTY

SEQ ID NO: 20200 - protein, 9 aa, Artificial Sequence
  Description of Artificial Sequence: Synthetic peptide
  Seed: WMACHSAAF
WAACHSAAA

SEQ ID NO: 20201 - protein, 9 aa, Artificial Sequence
  Description of Artificial Sequence: Synthetic peptide
  Seed: WMACHSAAF
WAACHSAAR

SEQ ID NO: 20202 - protein, 9 aa, Artificial Sequence
  Description of Artificial Sequence: Synthetic peptide
  Seed: WMACHSAAF
WAACHSAAH

SEQ ID NO: 20203 - protein, 9 aa, Artificial Sequence
  Description of Artificial Sequence: Synthetic peptide
  Seed: WMACHSAAF
WAACHSAAI

SEQ ID NO: 20204 - protein, 9 aa, Artificial Sequence
  Description of Artificial Sequence: Synthetic peptide
  Seed: WMACHSAAF
WDACHSAAF

SEQ ID NO: 20205 - protein, 9 aa, Artificial Sequence
  Description of Artificial Sequence: Synthetic peptide
  Seed: WMACHSAAF
WDACHSAAY

SEQ ID NO: 20206 - protein, 9 aa, Artificial Sequence
  Description of Artificial Sequence: Synthetic peptide
  Seed: WMACHSAAF
WCACHSAAL

SEQ ID NO: 20207 - protein, 9 aa, Artificial Sequence
  Description of Artificial Sequence: Synthetic peptide
  Seed: WMACHSAAF
WEACHSAAI

SEQ ID NO: 20208 - protein, 9 aa, Artificial Sequence
  Description of Artificial Sequence: Synthetic peptide
  Seed: WMACHSAAF
WEACHSAAM

SEQ ID NO: 20209 - protein, 9 aa, Artificial Sequence
  Description of Artificial Sequence: Synthetic peptide
  Seed: WMACHSAAF
WEACHSAAF

SEQ ID NO: 20210 - protein, 9 aa, Artificial Sequence
  Description of Artificial Sequence: Synthetic peptide
  Seed: WMACHSAAF
WEACHSAAW

SEQ ID NO: 20211 - protein, 9 aa, Artificial Sequence
  Description of Artificial Sequence: Synthetic peptide
  Seed: WMACHSAAF
WEACHSAAY

SEQ ID NO: 20212 - protein, 9 aa, Artificial Sequence
  Description of Artificial Sequence: Synthetic peptide
  Seed: WMACHSAAF
WEACHSAAV

SEQ ID NO: 20213 - protein, 9 aa, Artificial Sequence
  Description of Artificial Sequence: Synthetic peptide
  Seed: WMACHSAAF
WGACHSAAL

SEQ ID NO: 20214 - protein, 9 aa, Artificial Sequence
  Description of Artificial Sequence: Synthetic peptide
  Seed: WMACHSAAF
WGACHSAAM

SEQ ID NO: 20215 - protein, 9 aa, Artificial Sequence
  Description of Artificial Sequence: Synthetic peptide
  Seed: WMACHSAAF
WGACHSAAF

SEQ ID NO: 20216 - protein, 9 aa, Artificial Sequence
  Description of Artificial Sequence: Synthetic peptide
  Seed: WMACHSAAF
WGACHSAAW

SEQ ID NO: 20217 - protein, 9 aa, Artificial Sequence
  Description of Artificial Sequence: Synthetic peptide
  Seed: WMACHSAAF
WGACHSAAY

SEQ ID NO: 20218 - protein, 9 aa, Artificial Sequence
  Description of Artificial Sequence: Synthetic peptide
  Seed: WMACHSAAF
WGACHSAAV

SEQ ID NO: 20219 - protein, 9 aa, Artificial Sequence
  Description of Artificial Sequence: Synthetic peptide
  Seed: WMACHSAAF
WHACHSAAA

SEQ ID NO: 20220 - protein, 9 aa, Artificial Sequence
  Description of Artificial Sequence: Synthetic peptide
  Seed: WMACHSAAF
WHACHSAAC

SEQ ID NO: 20221 - protein, 9 aa, Artificial Sequence
  Description of Artificial Sequence: Synthetic peptide
  Seed: WMACHSAAF
WHACHSAAG

SEQ ID NO: 20222 - protein, 9 aa, Artificial Sequence
  Description of Artificial Sequence: Synthetic peptide
  Seed: WMACHSAAF
WHACHSAAH

SEQ ID NO: 20223 - protein, 9 aa, Artificial Sequence
  Description of Artificial Sequence: Synthetic peptide
  Seed: WMACHSAAF
WHACHSAAI

SEQ ID NO: 20224 - protein, 9 aa, Artificial Sequence
  Description of Artificial Sequence: Synthetic peptide
  Seed: WMACHSAAF
WHACHSAAL

SEQ ID NO: 20225 - protein, 9 aa, Artificial Sequence
  Description of Artificial Sequence: Synthetic peptide
  Seed: WMACHSAAF
WHACHSAAM

SEQ ID NO: 20226 - protein, 9 aa, Artificial Sequence
  Description of Artificial Sequence: Synthetic peptide
  Seed: WMACHSAAF
WHACHSAAF

SEQ ID NO: 20227 - protein, 9 aa, Artificial Sequence
  Description of Artificial Sequence: Synthetic peptide
  Seed: WMACHSAAF
WEACHSAAL

SEQ ID NO: 20228 - protein, 9 aa, Artificial Sequence
  Description of Artificial Sequence: Synthetic peptide
  Seed: WMACHSAAF
WEACHSAAH

SEQ ID NO: 20229 - protein, 9 aa, Artificial Sequence
  Description of Artificial Sequence: Synthetic peptide
  Seed: WMACHSAAF
WCACHSAAM

SEQ ID NO: 20230 - protein, 9 aa, Artificial Sequence
  Description of Artificial Sequence: Synthetic peptide
  Seed: WMACHSAAF
WQACHSAAV

SEQ ID NO: 20231 - protein, 9 aa, Artificial Sequence
  Description of Artificial Sequence: Synthetic peptide
  Seed: WMACHSAAF
WCACHSAAF

SEQ ID NO: 20232 - protein, 9 aa, Artificial Sequence
  Description of Artificial Sequence: Synthetic peptide
  Seed: WMACHSAAF
WCACHSAAY

SEQ ID NO: 20233 - protein, 9 aa, Artificial Sequence
  Description of Artificial Sequence: Synthetic peptide
  Seed: WMACHSAAF
WCACHSAAV

SEQ ID NO: 20234 - protein, 9 aa, Artificial Sequence
  Description of Artificial Sequence: Synthetic peptide
  Seed: WMACHSAAF
WQACHSAAA

SEQ ID NO: 20235 - protein, 9 aa, Artificial Sequence
  Description of Artificial Sequence: Synthetic peptide
  Seed: WMACHSAAF
WQACHSAAR

SEQ ID NO: 20236 - protein, 9 aa, Artificial Sequence
  Description of Artificial Sequence: Synthetic peptide
  Seed: WMACHSAAF
WQACHSAAN

SEQ ID NO: 20237 - protein, 9 aa, Artificial Sequence
  Description of Artificial Sequence: Synthetic peptide
  Seed: WMACHSAAF
WQACHSAAC

SEQ ID NO: 20238 - protein, 9 aa, Artificial Sequence
  Description of Artificial Sequence: Synthetic peptide
  Seed: WMACHSAAF
WQACHSAAQ

SEQ ID NO: 20239 - protein, 9 aa, Artificial Sequence
  Description of Artificial Sequence: Synthetic peptide
  Seed: WMACHSAAF
WQACHSAAG

SEQ ID NO: 20240 - protein, 9 aa, Artificial Sequence
  Description of Artificial Sequence: Synthetic peptide
  Seed: WMACHSAAF
WQACHSAAH

SEQ ID NO: 20241 - protein, 9 aa, Artificial Sequence
  Description of Artificial Sequence: Synthetic peptide
  Seed: WMACHSAAF
WQACHSAAI

SEQ ID NO: 20242 - protein, 9 aa, Artificial Sequence
  Description of Artificial Sequence: Synthetic peptide
  Seed: WMACHSAAF
WQACHSAAL

SEQ ID NO: 20243 - protein, 9 aa, Artificial Sequence
  Description of Artificial Sequence: Synthetic peptide
  Seed: WMACHSAAF
WQACHSAAM

SEQ ID NO: 20244 - protein, 9 aa, Artificial Sequence
  Description of Artificial Sequence: Synthetic peptide
  Seed: WMACHSAAF
WQACHSAAF

SEQ ID NO: 20245 - protein, 9 aa, Artificial Sequence
  Description of Artificial Sequence: Synthetic peptide
  Seed: WMACHSAAF
WQACHSAAP

SEQ ID NO: 20246 - protein, 9 aa, Artificial Sequence
  Description of Artificial Sequence: Synthetic peptide
  Seed: WMACHSAAF
WQACHSAAS

SEQ ID NO: 20247 - protein, 9 aa, Artificial Sequence
  Description of Artificial Sequence: Synthetic peptide
  Seed: WMACHSAAF
WQACHSAAT

SEQ ID NO: 20248 - protein, 9 aa, Artificial Sequence
  Description of Artificial Sequence: Synthetic peptide
  Seed: WMACHSAAF
WQACHSAAW

SEQ ID NO: 20249 - protein, 9 aa, Artificial Sequence
  Description of Artificial Sequence: Synthetic peptide
  Seed: WMACHSAAF
WQACHSAAY

SEQ ID NO: 20250 - protein, 10 aa, Artificial Sequence
  Description of Artificial Sequence: Synthetic peptide
  Seed: TIERMVLSAF
TFERMVLSAA

SEQ ID NO: 20251 - protein, 10 aa, Artificial Sequence
  Description of Artificial Sequence: Synthetic peptide
  Seed: TIERMVLSAF
TMERMVLSAY

SEQ ID NO: 20252 - protein, 9 aa, Artificial Sequence
  Description of Artificial Sequence: Synthetic peptide
  Seed: RTSDMRAEI
RVSDMRAEM

SEQ ID NO: 20253 - protein, 9 aa, Artificial Sequence
  Description of Artificial Sequence: Synthetic peptide
  Seed: SARSALILR
SVRSALILF

SEQ ID NO: 20254 - protein, 9 aa, Artificial Sequence
  Description of Artificial Sequence: Synthetic peptide
  Seed: SARSALILR
SVRSALILC

SEQ ID NO: 20255 - protein, 9 aa, Artificial Sequence
  Description of Artificial Sequence: Synthetic peptide
  Seed: SARSALILR
SVRSALILQ

SEQ ID NO: 20256 - protein, 9 aa, Artificial Sequence
  Description of Artificial Sequence: Synthetic peptide
  Seed: SARSALILR
SVRSALILE

SEQ ID NO: 20257 - protein, 9 aa, Artificial Sequence
  Description of Artificial Sequence: Synthetic peptide
  Seed: SARSALILR
SVRSALILG

SEQ ID NO: 20258 - protein, 9 aa, Artificial Sequence
  Description of Artificial Sequence: Synthetic peptide
  Seed: SARSALILR
SVRSALILH

SEQ ID NO: 20259 - protein, 9 aa, Artificial Sequence
  Description of Artificial Sequence: Synthetic peptide
  Seed: SARSALILR
SVRSALILI

SEQ ID NO: 20260 - protein, 9 aa, Artificial Sequence
  Description of Artificial Sequence: Synthetic peptide
  Seed: SARSALILR
SVRSALILL

SEQ ID NO: 20261 - protein, 9 aa, Artificial Sequence
  Description of Artificial Sequence: Synthetic peptide
  Seed: SARSALILR
SVRSALILK

SEQ ID NO: 20262 - protein, 9 aa, Artificial Sequence
  Description of Artificial Sequence: Synthetic peptide
  Seed: SARSALILR
SVRSALILM

SEQ ID NO: 20263 - protein, 9 aa, Artificial Sequence
  Description of Artificial Sequence: Synthetic peptide
  Seed: SARSALILR
SVRSALILP

SEQ ID NO: 20264 - protein, 10 aa, Artificial Sequence
  Description of Artificial Sequence: Synthetic peptide
  Seed: SARSALILRG
SARSALILRM

SEQ ID NO: 20265 - protein, 9 aa, Artificial Sequence
  Description of Artificial Sequence: Synthetic peptide
  Seed: SARSALILR
SVRSALILS

SEQ ID NO: 20266 - protein, 9 aa, Artificial Sequence
  Description of Artificial Sequence: Synthetic peptide
  Seed: SARSALILR
SVRSALILT

SEQ ID NO: 20267 - protein, 9 aa, Artificial Sequence
  Description of Artificial Sequence: Synthetic peptide
  Seed: SARSALILR
SVRSALILW

SEQ ID NO: 20268 - protein, 9 aa, Artificial Sequence
  Description of Artificial Sequence: Synthetic peptide
  Seed: SARSALILR
SVRSALILY

SEQ ID NO: 20269 - protein, 9 aa, Artificial Sequence
  Description of Artificial Sequence: Synthetic peptide
  Seed: SARSALILR
SVRSALILV

SEQ ID NO: 20270 - protein, 10 aa, Artificial Sequence
  Description of Artificial Sequence: Synthetic peptide
  Seed: SARSALILRG
SARSALILRA

SEQ ID NO: 20271 - protein, 10 aa, Artificial Sequence
  Description of Artificial Sequence: Synthetic peptide
  Seed: SARSALILRG
SARSALILRR

SEQ ID NO: 20272 - protein, 10 aa, Artificial Sequence
  Description of Artificial Sequence: Synthetic peptide
  Seed: SARSALILRG
SARSALILRI

SEQ ID NO: 20273 - protein, 10 aa, Artificial Sequence
  Description of Artificial Sequence: Synthetic peptide
  Seed: SARSALILRG
SARSALILRL

SEQ ID NO: 20274 - protein, 9 aa, Artificial Sequence
  Description of Artificial Sequence: Synthetic peptide
  Seed: SARSALILR
SVRSALILD

SEQ ID NO: 20275 - protein, 9 aa, Artificial Sequence
  Description of Artificial Sequence: Synthetic peptide
  Seed: SARSALILR
SVRSALILN

SEQ ID NO: 20276 - protein, 9 aa, Artificial Sequence
  Description of Artificial Sequence: Synthetic peptide
  Seed: SARSALILR
SVRSALILR

SEQ ID NO: 20277 - protein, 9 aa, Artificial Sequence
  Description of Artificial Sequence: Synthetic peptide
  Seed: SARSALILR
SVRSALILA

SEQ ID NO: 20278 - protein, 9 aa, Artificial Sequence
  Description of Artificial Sequence: Synthetic peptide
  Seed: SARSALILR
SWRSALILV

SEQ ID NO: 20279 - protein, 9 aa, Artificial Sequence
  Description of Artificial Sequence: Synthetic peptide
  Seed: SARSALILR
SYRSALILA

SEQ ID NO: 20280 - protein, 9 aa, Artificial Sequence
  Description of Artificial Sequence: Synthetic peptide
  Seed: SARSALILR
SYRSALILR

SEQ ID NO: 20281 - protein, 9 aa, Artificial Sequence
  Description of Artificial Sequence: Synthetic peptide
  Seed: SARSALILR
SYRSALILN

SEQ ID NO: 20282 - protein, 9 aa, Artificial Sequence
  Description of Artificial Sequence: Synthetic peptide
  Seed: SARSALILR
SYRSALILC

SEQ ID NO: 20283 - protein, 9 aa, Artificial Sequence
  Description of Artificial Sequence: Synthetic peptide
  Seed: SARSALILR
SYRSALILQ

SEQ ID NO: 20284 - protein, 9 aa, Artificial Sequence
  Description of Artificial Sequence: Synthetic peptide
  Seed: SARSALILR
SYRSALILE

SEQ ID NO: 20285 - protein, 9 aa, Artificial Sequence
  Description of Artificial Sequence: Synthetic peptide
  Seed: SARSALILR
SYRSALILG

SEQ ID NO: 20286 - protein, 9 aa, Artificial Sequence
  Description of Artificial Sequence: Synthetic peptide
  Seed: SARSALILR
SYRSALILH

SEQ ID NO: 20287 - protein, 9 aa, Artificial Sequence
  Description of Artificial Sequence: Synthetic peptide
  Seed: SARSALILR
SYRSALILI

SEQ ID NO: 20288 - protein, 9 aa, Artificial Sequence
  Description of Artificial Sequence: Synthetic peptide
  Seed: SARSALILR
SYRSALILL

SEQ ID NO: 20289 - protein, 9 aa, Artificial Sequence
  Description of Artificial Sequence: Synthetic peptide
  Seed: SARSALILR
SYRSALILK

SEQ ID NO: 20290 - protein, 9 aa, Artificial Sequence
  Description of Artificial Sequence: Synthetic peptide
  Seed: SARSALILR
SYRSALILM

SEQ ID NO: 20291 - protein, 9 aa, Artificial Sequence
  Description of Artificial Sequence: Synthetic peptide
  Seed: SARSALILR
SYRSALILF

SEQ ID NO: 20292 - protein, 9 aa, Artificial Sequence
  Description of Artificial Sequence: Synthetic peptide
  Seed: SARSALILR
SYRSALILP

SEQ ID NO: 20293 - protein, 9 aa, Artificial Sequence
  Description of Artificial Sequence: Synthetic peptide
  Seed: SARSALILR
SYRSALILS

SEQ ID NO: 20294 - protein, 9 aa, Artificial Sequence
  Description of Artificial Sequence: Synthetic peptide
  Seed: SARSALILR
SYRSALILT

SEQ ID NO: 20295 - protein, 9 aa, Artificial Sequence
  Description of Artificial Sequence: Synthetic peptide
  Seed: SARSALILR
SYRSALILY

SEQ ID NO: 20296 - protein, 9 aa, Artificial Sequence
  Description of Artificial Sequence: Synthetic peptide
  Seed: SARSALILR
SYRSALILV

SEQ ID NO: 20297 - protein, 10 aa, Artificial Sequence
  Description of Artificial Sequence: Synthetic peptide
  Seed: SARSALILRG
SARSALILRK

SEQ ID NO: 20298 - protein, 10 aa, Artificial Sequence
  Description of Artificial Sequence: Synthetic peptide
  Seed: SARSALILRG
SARSALILRS

SEQ ID NO: 20299 - protein, 9 aa, Artificial Sequence
  Description of Artificial Sequence: Synthetic peptide
  Seed: SARSALILR
SWRSALILT

SEQ ID NO: 20300 - protein, 10 aa, Artificial Sequence
  Description of Artificial Sequence: Synthetic peptide
  Seed: SARSALILRG
SLRSALILRA

SEQ ID NO: 20301 - protein, 10 aa, Artificial Sequence
  Description of Artificial Sequence: Synthetic peptide
  Seed: SARSALILRG
SIRSALILRG

SEQ ID NO: 20302 - protein, 10 aa, Artificial Sequence
  Description of Artificial Sequence: Synthetic peptide
  Seed: SARSALILRG
SIRSALILRI

SEQ ID NO: 20303 - protein, 10 aa, Artificial Sequence
  Description of Artificial Sequence: Synthetic peptide
  Seed: SARSALILRG
SIRSALILRL

SEQ ID NO: 20304 - protein, 10 aa, Artificial Sequence
  Description of Artificial Sequence: Synthetic peptide
  Seed: SARSALILRG
SIRSALILRK

SEQ ID NO: 20305 - protein, 10 aa, Artificial Sequence
  Description of Artificial Sequence: Synthetic peptide
  Seed: SARSALILRG
SIRSALILRM

SEQ ID NO: 20306 - protein, 10 aa, Artificial Sequence
  Description of Artificial Sequence: Synthetic peptide
  Seed: SARSALILRG
SIRSALILRS

SEQ ID NO: 20307 - protein, 10 aa, Artificial Sequence
  Description of Artificial Sequence: Synthetic peptide
  Seed: SARSALILRG
SIRSALILRT

SEQ ID NO: 20308 - protein, 10 aa, Artificial Sequence
  Description of Artificial Sequence: Synthetic peptide
  Seed: SARSALILRG
SIRSALILRY

SEQ ID NO: 20309 - protein, 10 aa, Artificial Sequence
  Description of Artificial Sequence: Synthetic peptide
  Seed: SARSALILRG
SIRSALILRV

SEQ ID NO: 20310 - protein, 10 aa, Artificial Sequence
  Description of Artificial Sequence: Synthetic peptide
  Seed: SARSALILRG
SLRSALILRG

SEQ ID NO: 20311 - protein, 10 aa, Artificial Sequence
  Description of Artificial Sequence: Synthetic peptide
  Seed: SARSALILRG
SARSALILRT

SEQ ID NO: 20312 - protein, 10 aa, Artificial Sequence
  Description of Artificial Sequence: Synthetic peptide
  Seed: SARSALILRG
SLRSALILRI

SEQ ID NO: 20313 - protein, 10 aa, Artificial Sequence
  Description of Artificial Sequence: Synthetic peptide
  Seed: SARSALILRG
SLRSALILRL

SEQ ID NO: 20314 - protein, 10 aa, Artificial Sequence
  Description of Artificial Sequence: Synthetic peptide
  Seed: SARSALILRG
SLRSALILRK

SEQ ID NO: 20315 - protein, 10 aa, Artificial Sequence
  Description of Artificial Sequence: Synthetic peptide
  Seed: SARSALILRG
SLRSALILRM

SEQ ID NO: 20316 - protein, 10 aa, Artificial Sequence
  Description of Artificial Sequence: Synthetic peptide
  Seed: SARSALILRG
SLRSALILRS

SEQ ID NO: 20317 - protein, 10 aa, Artificial Sequence
  Description of Artificial Sequence: Synthetic peptide
  Seed: SARSALILRG
SLRSALILRV

SEQ ID NO: 20318 - protein, 10 aa, Artificial Sequence
  Description of Artificial Sequence: Synthetic peptide
  Seed: SARSALILRG
SKRSALILRK

SEQ ID NO: 20319 - protein, 10 aa, Artificial Sequence
  Description of Artificial Sequence: Synthetic peptide
  Seed: SARSALILRG
SMRSALILRA

SEQ ID NO: 20320 - protein, 10 aa, Artificial Sequence
  Description of Artificial Sequence: Synthetic peptide
  Seed: SARSALILRG
SMRSALILRR

SEQ ID NO: 20321 - protein, 10 aa, Artificial Sequence
  Description of Artificial Sequence: Synthetic peptide
  Seed: SARSALILRG
SIRSALILRA

SEQ ID NO: 20322 - protein, 10 aa, Artificial Sequence
  Description of Artificial Sequence: Synthetic peptide
  Seed: SARSALILRG
SHRSALILRK

SEQ ID NO: 20323 - protein, 10 aa, Artificial Sequence
  Description of Artificial Sequence: Synthetic peptide
  Seed: SARSALILRG
SGRSALILRV

SEQ ID NO: 20324 - protein, 10 aa, Artificial Sequence
  Description of Artificial Sequence: Synthetic peptide
  Seed: SARSALILRG
SGRSALILRK

SEQ ID NO: 20325 - protein, 10 aa, Artificial Sequence
  Description of Artificial Sequence: Synthetic peptide
  Seed: SARSALILRG
SARSALILRY

SEQ ID NO: 20326 - protein, 10 aa, Artificial Sequence
  Description of Artificial Sequence: Synthetic peptide
  Seed: SARSALILRG
SARSALILRV

SEQ ID NO: 20327 - protein, 10 aa, Artificial Sequence
  Description of Artificial Sequence: Synthetic peptide
  Seed: SARSALILRG
SRRSALILRK

SEQ ID NO: 20328 - protein, 10 aa, Artificial Sequence
  Description of Artificial Sequence: Synthetic peptide
  Seed: SARSALILRG
SNRSALILRA

SEQ ID NO: 20329 - protein, 10 aa, Artificial Sequence
  Description of Artificial Sequence: Synthetic peptide
  Seed: SARSALILRG
SNRSALILRK

SEQ ID NO: 20330 - protein, 10 aa, Artificial Sequence
  Description of Artificial Sequence: Synthetic peptide
  Seed: SARSALILRG
SNRSALILRV

SEQ ID NO: 20331 - protein, 10 aa, Artificial Sequence
  Description of Artificial Sequence: Synthetic peptide
  Seed: SARSALILRG
SCRSALILRK

SEQ ID NO: 20332 - protein, 10 aa, Artificial Sequence
  Description of Artificial Sequence: Synthetic peptide
  Seed: SARSALILRG
SQRSALILRA

SEQ ID NO: 20333 - protein, 10 aa, Artificial Sequence
  Description of Artificial Sequence: Synthetic peptide
  Seed: SARSALILRG
SQRSALILRR

SEQ ID NO: 20334 - protein, 10 aa, Artificial Sequence
  Description of Artificial Sequence: Synthetic peptide
  Seed: SARSALILRG
SQRSALILRG

SEQ ID NO: 20335 - protein, 10 aa, Artificial Sequence
  Description of Artificial Sequence: Synthetic peptide
  Seed: SARSALILRG
SQRSALILRI

SEQ ID NO: 20336 - protein, 10 aa, Artificial Sequence
  Description of Artificial Sequence: Synthetic peptide
  Seed: SARSALILRG
SQRSALILRL

SEQ ID NO: 20337 - protein, 10 aa, Artificial Sequence
  Description of Artificial Sequence: Synthetic peptide
  Seed: SARSALILRG
SQRSALILRK

SEQ ID NO: 20338 - protein, 10 aa, Artificial Sequence
  Description of Artificial Sequence: Synthetic peptide
  Seed: SARSALILRG
SQRSALILRM

SEQ ID NO: 20339 - protein, 10 aa, Artificial Sequence
  Description of Artificial Sequence: Synthetic peptide
  Seed: SARSALILRG
SQRSALILRS

SEQ ID NO: 20340 - protein, 10 aa, Artificial Sequence
  Description of Artificial Sequence: Synthetic peptide
  Seed: SARSALILRG
SQRSALILRY

SEQ ID NO: 20341 - protein, 10 aa, Artificial Sequence
  Description of Artificial Sequence: Synthetic peptide
  Seed: SARSALILRG
SQRSALILRV

SEQ ID NO: 20342 - protein, 10 aa, Artificial Sequence
  Description of Artificial Sequence: Synthetic peptide
  Seed: SARSALILRG
SGRSALILRA

SEQ ID NO: 20343 - protein, 10 aa, Artificial Sequence
  Description of Artificial Sequence: Synthetic peptide
  Seed: SARSALILRG
SGRSALILRI

SEQ ID NO: 20344 - protein, 9 aa, Artificial Sequence
  Description of Artificial Sequence: Synthetic peptide
  Seed: SARSALILR
SWRSALILY

SEQ ID NO: 20345 - protein, 9 aa, Artificial Sequence
  Description of Artificial Sequence: Synthetic peptide
  Seed: SARSALILR
SWRSALILS

SEQ ID NO: 20346 - protein, 9 aa, Artificial Sequence
  Description of Artificial Sequence: Synthetic peptide
  Seed: SAYERMCNI
SSYERMCNV

SEQ ID NO: 20347 - protein, 9 aa, Artificial Sequence
  Description of Artificial Sequence: Synthetic peptide
  Seed: SARSALILR
SFRSALILS

SEQ ID NO: 20348 - protein, 9 aa, Artificial Sequence
  Description of Artificial Sequence: Synthetic peptide
  Seed: SARSALILR
SFRSALILE

SEQ ID NO: 20349 - protein, 9 aa, Artificial Sequence
  Description of Artificial Sequence: Synthetic peptide
  Seed: SARSALILR
SFRSALILG

SEQ ID NO: 20350 - protein, 9 aa, Artificial Sequence
  Description of Artificial Sequence: Synthetic peptide
  Seed: SARSALILR
SFRSALILH

SEQ ID NO: 20351 - protein, 9 aa, Artificial Sequence
  Description of Artificial Sequence: Synthetic peptide
  Seed: SARSALILR
SFRSALILI

SEQ ID NO: 20352 - protein, 9 aa, Artificial Sequence
  Description of Artificial Sequence: Synthetic peptide
  Seed: SARSALILR
SFRSALILL

SEQ ID NO: 20353 - protein, 9 aa, Artificial Sequence
  Description of Artificial Sequence: Synthetic peptide
  Seed: SARSALILR
SFRSALILK

SEQ ID NO: 20354 - protein, 9 aa, Artificial Sequence
  Description of Artificial Sequence: Synthetic peptide
  Seed: SARSALILR
SFRSALILM

SEQ ID NO: 20355 - protein, 9 aa, Artificial Sequence
  Description of Artificial Sequence: Synthetic peptide
  Seed: SARSALILR
SFRSALILF

SEQ ID NO: 20356 - protein, 9 aa, Artificial Sequence
  Description of Artificial Sequence: Synthetic peptide
  Seed: SARSALILR
SFRSALILP

SEQ ID NO: 20357 - protein, 9 aa, Artificial Sequence
  Description of Artificial Sequence: Synthetic peptide
  Seed: SARSALILR
SFRSALILT

SEQ ID NO: 20358 - protein, 9 aa, Artificial Sequence
  Description of Artificial Sequence: Synthetic peptide
  Seed: SARSALILR
SSRSALILE

SEQ ID NO: 20359 - protein, 9 aa, Artificial Sequence
  Description of Artificial Sequence: Synthetic peptide
  Seed: SARSALILR
SFRSALILY

SEQ ID NO: 20360 - protein, 9 aa, Artificial Sequence
  Description of Artificial Sequence: Synthetic peptide
  Seed: SARSALILR
SFRSALILV

SEQ ID NO: 20361 - protein, 9 aa, Artificial Sequence
  Description of Artificial Sequence: Synthetic peptide
  Seed: SARSALILR
SPRSALILR

SEQ ID NO: 20362 - protein, 9 aa, Artificial Sequence
  Description of Artificial Sequence: Synthetic peptide
  Seed: SARSALILR
SPRSALILK

SEQ ID NO: 20363 - protein, 9 aa, Artificial Sequence
  Description of Artificial Sequence: Synthetic peptide
  Seed: SARSALILR
SSRSALILA

SEQ ID NO: 20364 - protein, 9 aa, Artificial Sequence
  Description of Artificial Sequence: Synthetic peptide
  Seed: SARSALILR
SSRSALILR

SEQ ID NO: 20365 - protein, 9 aa, Artificial Sequence
  Description of Artificial Sequence: Synthetic peptide
  Seed: SARSALILR
SSRSALILN

SEQ ID NO: 20366 - protein, 9 aa, Artificial Sequence
  Description of Artificial Sequence: Synthetic peptide
  Seed: SARSALILR
SSRSALILD

SEQ ID NO: 20367 - protein, 9 aa, Artificial Sequence
  Description of Artificial Sequence: Synthetic peptide
  Seed: SARSALILR
SSRSALILC

SEQ ID NO: 20368 - protein, 9 aa, Artificial Sequence
  Description of Artificial Sequence: Synthetic peptide
  Seed: SARSALILR
SFRSALILQ

SEQ ID NO: 20369 - protein, 9 aa, Artificial Sequence
  Description of Artificial Sequence: Synthetic peptide
  Seed: SARSALILR
SFRSALILC

SEQ ID NO: 20370 - protein, 9 aa, Artificial Sequence
  Description of Artificial Sequence: Synthetic peptide
  Seed: SARSALILR
SFRSALILN

SEQ ID NO: 20371 - protein, 9 aa, Artificial Sequence
  Description of Artificial Sequence: Synthetic peptide
  Seed: SARSALILR
SFRSALILR

SEQ ID NO: 20372 - protein, 9 aa, Artificial Sequence
  Description of Artificial Sequence: Synthetic peptide
  Seed: SARSALILR
SMRSALILN

SEQ ID NO: 20373 - protein, 9 aa, Artificial Sequence
  Description of Artificial Sequence: Synthetic peptide
  Seed: SARSALILR
SMRSALILD

SEQ ID NO: 20374 - protein, 9 aa, Artificial Sequence
  Description of Artificial Sequence: Synthetic peptide
  Seed: SARSALILR
SMRSALILC

SEQ ID NO: 20375 - protein, 9 aa, Artificial Sequence
  Description of Artificial Sequence: Synthetic peptide
  Seed: SARSALILR
SMRSALILQ

SEQ ID NO: 20376 - protein, 9 aa, Artificial Sequence
  Description of Artificial Sequence: Synthetic peptide
  Seed: SARSALILR
SMRSALILE

SEQ ID NO: 20377 - protein, 9 aa, Artificial Sequence
  Description of Artificial Sequence: Synthetic peptide
  Seed: SARSALILR
SMRSALILG

SEQ ID NO: 20378 - protein, 9 aa, Artificial Sequence
  Description of Artificial Sequence: Synthetic peptide
  Seed: SARSALILR
SMRSALILH

SEQ ID NO: 20379 - protein, 9 aa, Artificial Sequence
  Description of Artificial Sequence: Synthetic peptide
  Seed: SARSALILR
SMRSALILI

SEQ ID NO: 20380 - protein, 9 aa, Artificial Sequence
  Description of Artificial Sequence: Synthetic peptide
  Seed: SARSALILR
SMRSALILL

SEQ ID NO: 20381 - protein, 9 aa, Artificial Sequence
  Description of Artificial Sequence: Synthetic peptide
  Seed: SARSALILR
SMRSALILK

SEQ ID NO: 20382 - protein, 9 aa, Artificial Sequence
  Description of Artificial Sequence: Synthetic peptide
  Seed: SARSALILR
SMRSALILM

SEQ ID NO: 20383 - protein, 9 aa, Artificial Sequence
  Description of Artificial Sequence: Synthetic peptide
  Seed: SARSALILR
SMRSALILF

SEQ ID NO: 20384 - protein, 9 aa, Artificial Sequence
  Description of Artificial Sequence: Synthetic peptide
  Seed: SARSALILR
SMRSALILP

SEQ ID NO: 20385 - protein, 9 aa, Artificial Sequence
  Description of Artificial Sequence: Synthetic peptide
  Seed: SARSALILR
SMRSALILS

SEQ ID NO: 20386 - protein, 9 aa, Artificial Sequence
  Description of Artificial Sequence: Synthetic peptide
  Seed: SARSALILR
SMRSALILT

SEQ ID NO: 20387 - protein, 9 aa, Artificial Sequence
  Description of Artificial Sequence: Synthetic peptide
  Seed: SARSALILR
SMRSALILW

SEQ ID NO: 20388 - protein, 9 aa, Artificial Sequence
  Description of Artificial Sequence: Synthetic peptide
  Seed: SARSALILR
SMRSALILY

SEQ ID NO: 20389 - protein, 9 aa, Artificial Sequence
  Description of Artificial Sequence: Synthetic peptide
  Seed: SARSALILR
SMRSALILV

SEQ ID NO: 20390 - protein, 9 aa, Artificial Sequence
  Description of Artificial Sequence: Synthetic peptide
  Seed: SARSALILR
SFRSALILA

SEQ ID NO: 20391 - protein, 9 aa, Artificial Sequence
  Description of Artificial Sequence: Synthetic peptide
  Seed: SARSALILR
SSRSALILQ

SEQ ID NO: 20392 - protein, 9 aa, Artificial Sequence
  Description of Artificial Sequence: Synthetic peptide
  Seed: SARSALILR
SSRSALILG

SEQ ID NO: 20393 - protein, 9 aa, Artificial Sequence
  Description of Artificial Sequence: Synthetic peptide
  Seed: SARSALILR
SWRSALILP

SEQ ID NO: 20394 - protein, 9 aa, Artificial Sequence
  Description of Artificial Sequence: Synthetic peptide
  Seed: SARSALILR
SWRSALILR

SEQ ID NO: 20395 - protein, 9 aa, Artificial Sequence
  Description of Artificial Sequence: Synthetic peptide
  Seed: SARSALILR
STRSALILM

SEQ ID NO: 20396 - protein, 9 aa, Artificial Sequence
  Description of Artificial Sequence: Synthetic peptide
  Seed: SARSALILR
STRSALILF

SEQ ID NO: 20397 - protein, 9 aa, Artificial Sequence
  Description of Artificial Sequence: Synthetic peptide
  Seed: SARSALILR
STRSALILP

SEQ ID NO: 20398 - protein, 9 aa, Artificial Sequence
  Description of Artificial Sequence: Synthetic peptide
  Seed: SARSALILR
STRSALILS

SEQ ID NO: 20399 - protein, 9 aa, Artificial Sequence
  Description of Artificial Sequence: Synthetic peptide
  Seed: SARSALILR
STRSALILT

SEQ ID NO: 20400 - protein, 9 aa, Artificial Sequence
  Description of Artificial Sequence: Synthetic peptide
  Seed: SARSALILR
STRSALILW

SEQ ID NO: 20401 - protein, 9 aa, Artificial Sequence
  Description of Artificial Sequence: Synthetic peptide
  Seed: SARSALILR
STRSALILY

SEQ ID NO: 20402 - protein, 9 aa, Artificial Sequence
  Description of Artificial Sequence: Synthetic peptide
  Seed: SARSALILR
STRSALILV

SEQ ID NO: 20403 - protein, 9 aa, Artificial Sequence
  Description of Artificial Sequence: Synthetic peptide
  Seed: SARSALILR
SWRSALILA

SEQ ID NO: 20404 - protein, 9 aa, Artificial Sequence
  Description of Artificial Sequence: Synthetic peptide
  Seed: SARSALILR
SWRSALILN

SEQ ID NO: 20405 - protein, 9 aa, Artificial Sequence
  Description of Artificial Sequence: Synthetic peptide
  Seed: SARSALILR
SSRSALILH

SEQ ID NO: 20406 - protein, 9 aa, Artificial Sequence
  Description of Artificial Sequence: Synthetic peptide
  Seed: SARSALILR
SWRSALILC

SEQ ID NO: 20407 - protein, 9 aa, Artificial Sequence
  Description of Artificial Sequence: Synthetic peptide
  Seed: SARSALILR
SWRSALILQ

SEQ ID NO: 20408 - protein, 9 aa, Artificial Sequence
  Description of Artificial Sequence: Synthetic peptide
  Seed: SARSALILR
SWRSALILG

SEQ ID NO: 20409 - protein, 9 aa, Artificial Sequence
  Description of Artificial Sequence: Synthetic peptide
  Seed: SARSALILR
SWRSALILH

SEQ ID NO: 20410 - protein, 9 aa, Artificial Sequence
  Description of Artificial Sequence: Synthetic peptide
  Seed: SARSALILR
SWRSALILI

SEQ ID NO: 20411 - protein, 9 aa, Artificial Sequence
  Description of Artificial Sequence: Synthetic peptide
  Seed: SARSALILR
SWRSALILL

SEQ ID NO: 20412 - protein, 9 aa, Artificial Sequence
  Description of Artificial Sequence: Synthetic peptide
  Seed: SARSALILR
SWRSALILK

SEQ ID NO: 20413 - protein, 9 aa, Artificial Sequence
  Description of Artificial Sequence: Synthetic peptide
  Seed: SARSALILR
SWRSALILM

SEQ ID NO: 20414 - protein, 9 aa, Artificial Sequence
  Description of Artificial Sequence: Synthetic peptide
  Seed: SARSALILR
SWRSALILF

SEQ ID NO: 20415 - protein, 9 aa, Artificial Sequence
  Description of Artificial Sequence: Synthetic peptide
  Seed: SARSALILR
STRSALILK

SEQ ID NO: 20416 - protein, 9 aa, Artificial Sequence
  Description of Artificial Sequence: Synthetic peptide
  Seed: SARSALILR
STRSALILL

SEQ ID NO: 20417 - protein, 9 aa, Artificial Sequence
  Description of Artificial Sequence: Synthetic peptide
  Seed: SARSALILR
STRSALILI

SEQ ID NO: 20418 - protein, 9 aa, Artificial Sequence
  Description of Artificial Sequence: Synthetic peptide
  Seed: SARSALILR
STRSALILH

SEQ ID NO: 20419 - protein, 9 aa, Artificial Sequence
  Description of Artificial Sequence: Synthetic peptide
  Seed: SARSALILR
SSRSALILI

SEQ ID NO: 20420 - protein, 9 aa, Artificial Sequence
  Description of Artificial Sequence: Synthetic peptide
  Seed: SARSALILR
SSRSALILL

SEQ ID NO: 20421 - protein, 9 aa, Artificial Sequence
  Description of Artificial Sequence: Synthetic peptide
  Seed: SARSALILR
SSRSALILK

SEQ ID NO: 20422 - protein, 9 aa, Artificial Sequence
  Description of Artificial Sequence: Synthetic peptide
  Seed: SARSALILR
SSRSALILM

SEQ ID NO: 20423 - protein, 9 aa, Artificial Sequence
  Description of Artificial Sequence: Synthetic peptide
  Seed: SARSALILR
SSRSALILF

SEQ ID NO: 20424 - protein, 9 aa, Artificial Sequence
  Description of Artificial Sequence: Synthetic peptide
  Seed: SARSALILR
SSRSALILP

SEQ ID NO: 20425 - protein, 9 aa, Artificial Sequence
  Description of Artificial Sequence: Synthetic peptide
  Seed: SARSALILR
SSRSALILS

SEQ ID NO: 20426 - protein, 9 aa, Artificial Sequence
  Description of Artificial Sequence: Synthetic peptide
  Seed: SARSALILR
SSRSALILT

SEQ ID NO: 20427 - protein, 9 aa, Artificial Sequence
  Description of Artificial Sequence: Synthetic peptide
  Seed: SARSALILR
SSRSALILW

SEQ ID NO: 20428 - protein, 9 aa, Artificial Sequence
  Description of Artificial Sequence: Synthetic peptide
  Seed: SARSALILR
SSRSALILY

SEQ ID NO: 20429 - protein, 9 aa, Artificial Sequence
  Description of Artificial Sequence: Synthetic peptide
  Seed: SARSALILR
SSRSALILV

SEQ ID NO: 20430 - protein, 9 aa, Artificial Sequence
  Description of Artificial Sequence: Synthetic peptide
  Seed: SARSALILR
STRSALILA

SEQ ID NO: 20431 - protein, 9 aa, Artificial Sequence
  Description of Artificial Sequence: Synthetic peptide
  Seed: SARSALILR
STRSALILR

SEQ ID NO: 20432 - protein, 9 aa, Artificial Sequence
  Description of Artificial Sequence: Synthetic peptide
  Seed: SARSALILR
STRSALILN

SEQ ID NO: 20433 - protein, 9 aa, Artificial Sequence
  Description of Artificial Sequence: Synthetic peptide
  Seed: SARSALILR
STRSALILD

SEQ ID NO: 20434 - protein, 9 aa, Artificial Sequence
  Description of Artificial Sequence: Synthetic peptide
  Seed: SARSALILR
STRSALILC

SEQ ID NO: 20435 - protein, 9 aa, Artificial Sequence
  Description of Artificial Sequence: Synthetic peptide
  Seed: SARSALILR
STRSALILQ

SEQ ID NO: 20436 - protein, 9 aa, Artificial Sequence
  Description of Artificial Sequence: Synthetic peptide
  Seed: SARSALILR
STRSALILE

SEQ ID NO: 20437 - protein, 9 aa, Artificial Sequence
  Description of Artificial Sequence: Synthetic peptide
  Seed: SARSALILR
STRSALILG

SEQ ID NO: 20438 - protein, 10 aa, Artificial Sequence
  Description of Artificial Sequence: Synthetic peptide
  Seed: SARSALILRG
SMRSALILRG

SEQ ID NO: 20439 - protein, 10 aa, Artificial Sequence
  Description of Artificial Sequence: Synthetic peptide
  Seed: SARSALILRG
SMRSALILRI

SEQ ID NO: 20440 - protein, 10 aa, Artificial Sequence
  Description of Artificial Sequence: Synthetic peptide
  Seed: SARSALILRG
SMRSALILRL

SEQ ID NO: 20441 - protein, 9 aa, Artificial Sequence
  Description of Artificial Sequence: Synthetic peptide
  Seed: SAYERMCNI
SGYERMCNW

SEQ ID NO: 20442 - protein, 9 aa, Artificial Sequence
  Description of Artificial Sequence: Synthetic peptide
  Seed: SAYERMCNI
SQYERMCNT

SEQ ID NO: 20443 - protein, 9 aa, Artificial Sequence
  Description of Artificial Sequence: Synthetic peptide
  Seed: SAYERMCNI
SQYERMCNW

SEQ ID NO: 20444 - protein, 9 aa, Artificial Sequence
  Description of Artificial Sequence: Synthetic peptide
  Seed: SAYERMCNI
SQYERMCNY

SEQ ID NO: 20445 - protein, 9 aa, Artificial Sequence
  Description of Artificial Sequence: Synthetic peptide
  Seed: SAYERMCNI
SQYERMCNV

SEQ ID NO: 20446 - protein, 9 aa, Artificial Sequence
  Description of Artificial Sequence: Synthetic peptide
  Seed: SAYERMCNI
SEYERMCNV

SEQ ID NO: 20447 - protein, 9 aa, Artificial Sequence
  Description of Artificial Sequence: Synthetic peptide
  Seed: SAYERMCNI
SGYERMCNI

SEQ ID NO: 20448 - protein, 9 aa, Artificial Sequence
  Description of Artificial Sequence: Synthetic peptide
  Seed: SAYERMCNI
SGYERMCNL

SEQ ID NO: 20449 - protein, 9 aa, Artificial Sequence
  Description of Artificial Sequence: Synthetic peptide
  Seed: SAYERMCNI
SGYERMCNM

SEQ ID NO: 20450 - protein, 9 aa, Artificial Sequence
  Description of Artificial Sequence: Synthetic peptide
  Seed: SAYERMCNI
SGYERMCNF

SEQ ID NO: 20451 - protein, 9 aa, Artificial Sequence
  Description of Artificial Sequence: Synthetic peptide
  Seed: SAYERMCNI
SGYERMCNY

SEQ ID NO: 20452 - protein, 9 aa, Artificial Sequence
  Description of Artificial Sequence: Synthetic peptide
  Seed: SAYERMCNI
SIYERMCNW

SEQ ID NO: 20453 - protein, 9 aa, Artificial Sequence
  Description of Artificial Sequence: Synthetic peptide
  Seed: SAYERMCNI
SGYERMCNV

SEQ ID NO: 20454 - protein, 9 aa, Artificial Sequence
  Description of Artificial Sequence: Synthetic peptide
  Seed: SAYERMCNI
SHYERMCNV

SEQ ID NO: 20455 - protein, 9 aa, Artificial Sequence
  Description of Artificial Sequence: Synthetic peptide
  Seed: SAYERMCNI
SIYERMCNA

SEQ ID NO: 20456 - protein, 9 aa, Artificial Sequence
  Description of Artificial Sequence: Synthetic peptide
  Seed: SAYERMCNI
SIYERMCNC

SEQ ID NO: 20457 - protein, 9 aa, Artificial Sequence
  Description of Artificial Sequence: Synthetic peptide
  Seed: SAYERMCNI
SIYERMCNI

SEQ ID NO: 20458 - protein, 9 aa, Artificial Sequence
  Description of Artificial Sequence: Synthetic peptide
  Seed: SAYERMCNI
SIYERMCNL

SEQ ID NO: 20459 - protein, 9 aa, Artificial Sequence
  Description of Artificial Sequence: Synthetic peptide
  Seed: SAYERMCNI
SIYERMCNM

SEQ ID NO: 20460 - protein, 9 aa, Artificial Sequence
  Description of Artificial Sequence: Synthetic peptide
  Seed: SAYERMCNI
SIYERMCNF

SEQ ID NO: 20461 - protein, 9 aa, Artificial Sequence
  Description of Artificial Sequence: Synthetic peptide
  Seed: SAYERMCNI
SIYERMCNS

SEQ ID NO: 20462 - protein, 9 aa, Artificial Sequence
  Description of Artificial Sequence: Synthetic peptide
  Seed: SAYERMCNI
SQYERMCNS

SEQ ID NO: 20463 - protein, 9 aa, Artificial Sequence
  Description of Artificial Sequence: Synthetic peptide
  Seed: SAYERMCNI
SQYERMCNF

SEQ ID NO: 20464 - protein, 9 aa, Artificial Sequence
  Description of Artificial Sequence: Synthetic peptide
  Seed: SAYERMCNI
SQYERMCNM

SEQ ID NO: 20465 - protein, 9 aa, Artificial Sequence
  Description of Artificial Sequence: Synthetic peptide
  Seed: SAYERMCNI
SQYERMCNL

SEQ ID NO: 20466 - protein, 9 aa, Artificial Sequence
  Description of Artificial Sequence: Synthetic peptide
  Seed: SAYERMCNI
SAYERMCNV

SEQ ID NO: 20467 - protein, 9 aa, Artificial Sequence
  Description of Artificial Sequence: Synthetic peptide
  Seed: SAYERMCNI
SRYERMCNI

SEQ ID NO: 20468 - protein, 9 aa, Artificial Sequence
  Description of Artificial Sequence: Synthetic peptide
  Seed: SAYERMCNI
SRYERMCNL

SEQ ID NO: 20469 - protein, 9 aa, Artificial Sequence
  Description of Artificial Sequence: Synthetic peptide
  Seed: SAYERMCNI
SRYERMCNM

SEQ ID NO: 20470 - protein, 9 aa, Artificial Sequence
  Description of Artificial Sequence: Synthetic peptide
  Seed: SAYERMCNI
SRYERMCNF

SEQ ID NO: 20471 - protein, 9 aa, Artificial Sequence
  Description of Artificial Sequence: Synthetic peptide
  Seed: SAYERMCNI
SRYERMCNY

SEQ ID NO: 20472 - protein, 9 aa, Artificial Sequence
  Description of Artificial Sequence: Synthetic peptide
  Seed: SAYERMCNI
SRYERMCNV

SEQ ID NO: 20473 - protein, 9 aa, Artificial Sequence
  Description of Artificial Sequence: Synthetic peptide
  Seed: SAYERMCNI
SNYERMCNL

SEQ ID NO: 20474 - protein, 9 aa, Artificial Sequence
  Description of Artificial Sequence: Synthetic peptide
  Seed: SAYERMCNI
SNYERMCNW

SEQ ID NO: 20475 - protein, 9 aa, Artificial Sequence
  Description of Artificial Sequence: Synthetic peptide
  Seed: SAYERMCNI
SNYERMCNY

SEQ ID NO: 20476 - protein, 9 aa, Artificial Sequence
  Description of Artificial Sequence: Synthetic peptide
  Seed: SAYERMCNI
SNYERMCNV

SEQ ID NO: 20477 - protein, 9 aa, Artificial Sequence
  Description of Artificial Sequence: Synthetic peptide
  Seed: SAYERMCNI
SCYERMCNM

SEQ ID NO: 20478 - protein, 9 aa, Artificial Sequence
  Description of Artificial Sequence: Synthetic peptide
  Seed: SAYERMCNI
SCYERMCNF

SEQ ID NO: 20479 - protein, 9 aa, Artificial Sequence
  Description of Artificial Sequence: Synthetic peptide
  Seed: SAYERMCNI
SCYERMCNW

SEQ ID NO: 20480 - protein, 9 aa, Artificial Sequence
  Description of Artificial Sequence: Synthetic peptide
  Seed: SAYERMCNI
SCYERMCNY

SEQ ID NO: 20481 - protein, 9 aa, Artificial Sequence
  Description of Artificial Sequence: Synthetic peptide
  Seed: SAYERMCNI
SCYERMCNV

SEQ ID NO: 20482 - protein, 9 aa, Artificial Sequence
  Description of Artificial Sequence: Synthetic peptide
  Seed: SAYERMCNI
SQYERMCNA

SEQ ID NO: 20483 - protein, 9 aa, Artificial Sequence
  Description of Artificial Sequence: Synthetic peptide
  Seed: SAYERMCNI
SQYERMCNC

SEQ ID NO: 20484 - protein, 9 aa, Artificial Sequence
  Description of Artificial Sequence: Synthetic peptide
  Seed: SAYERMCNI
SQYERMCNI

SEQ ID NO: 20485 - protein, 9 aa, Artificial Sequence
  Description of Artificial Sequence: Synthetic peptide
  Seed: SAYERMCNI
SIYERMCNT

SEQ ID NO: 20486 - protein, 9 aa, Artificial Sequence
  Description of Artificial Sequence: Synthetic peptide
  Seed: SAYERMCNI
SIYERMCNY

SEQ ID NO: 20487 - protein, 10 aa, Artificial Sequence
  Description of Artificial Sequence: Synthetic peptide
  Seed: SARSALILRG
SMRSALILRK

SEQ ID NO: 20488 - protein, 9 aa, Artificial Sequence
  Description of Artificial Sequence: Synthetic peptide
  Seed: SAYERMCNI
SPYERMCNI

SEQ ID NO: 20489 - protein, 9 aa, Artificial Sequence
  Description of Artificial Sequence: Synthetic peptide
  Seed: SAYERMCNI
SMYERMCNS

SEQ ID NO: 20490 - protein, 9 aa, Artificial Sequence
  Description of Artificial Sequence: Synthetic peptide
  Seed: SAYERMCNI
SMYERMCNT

SEQ ID NO: 20491 - protein, 9 aa, Artificial Sequence
  Description of Artificial Sequence: Synthetic peptide
  Seed: SAYERMCNI
SMYERMCNW

SEQ ID NO: 20492 - protein, 9 aa, Artificial Sequence
  Description of Artificial Sequence: Synthetic peptide
  Seed: SAYERMCNI
SMYERMCNY

SEQ ID NO: 20493 - protein, 9 aa, Artificial Sequence
  Description of Artificial Sequence: Synthetic peptide
  Seed: SAYERMCNI
SMYERMCNV

SEQ ID NO: 20494 - protein, 9 aa, Artificial Sequence
  Description of Artificial Sequence: Synthetic peptide
  Seed: SAYERMCNI
SFYERMCNA

SEQ ID NO: 20495 - protein, 9 aa, Artificial Sequence
  Description of Artificial Sequence: Synthetic peptide
  Seed: SAYERMCNI
SFYERMCNI

SEQ ID NO: 20496 - protein, 9 aa, Artificial Sequence
  Description of Artificial Sequence: Synthetic peptide
  Seed: SAYERMCNI
SFYERMCNM

SEQ ID NO: 20497 - protein, 9 aa, Artificial Sequence
  Description of Artificial Sequence: Synthetic peptide
  Seed: SAYERMCNI
SFYERMCNV

SEQ ID NO: 20498 - protein, 9 aa, Artificial Sequence
  Description of Artificial Sequence: Synthetic peptide
  Seed: SAYERMCNI
SPYERMCNL

SEQ ID NO: 20499 - protein, 9 aa, Artificial Sequence
  Description of Artificial Sequence: Synthetic peptide
  Seed: SAYERMCNI
SIYERMCNV

SEQ ID NO: 20500 - protein, 9 aa, Artificial Sequence
  Description of Artificial Sequence: Synthetic peptide
  Seed: SAYERMCNI
SPYERMCNM

SEQ ID NO: 20501 - protein, 9 aa, Artificial Sequence
  Description of Artificial Sequence: Synthetic peptide
  Seed: SAYERMCNI
SPYERMCNF

SEQ ID NO: 20502 - protein, 9 aa, Artificial Sequence
  Description of Artificial Sequence: Synthetic peptide
  Seed: SAYERMCNI
SPYERMCNV

SEQ ID NO: 20503 - protein, 9 aa, Artificial Sequence
  Description of Artificial Sequence: Synthetic peptide
  Seed: SAYERMCNI
SSYERMCNA

SEQ ID NO: 20504 - protein, 9 aa, Artificial Sequence
  Description of Artificial Sequence: Synthetic peptide
  Seed: SAYERMCNI
SSYERMCNI

SEQ ID NO: 20505 - protein, 9 aa, Artificial Sequence
  Description of Artificial Sequence: Synthetic peptide
  Seed: SAYERMCNI
SSYERMCNL

SEQ ID NO: 20506 - protein, 9 aa, Artificial Sequence
  Description of Artificial Sequence: Synthetic peptide
  Seed: SAYERMCNI
SSYERMCNM

SEQ ID NO: 20507 - protein, 9 aa, Artificial Sequence
  Description of Artificial Sequence: Synthetic peptide
  Seed: SAYERMCNI
SSYERMCNF

SEQ ID NO: 20508 - protein, 9 aa, Artificial Sequence
  Description of Artificial Sequence: Synthetic peptide
  Seed: SAYERMCNI
SSYERMCNW

SEQ ID NO: 20509 - protein, 9 aa, Artificial Sequence
  Description of Artificial Sequence: Synthetic peptide
  Seed: SAYERMCNI
SMYERMCNP

SEQ ID NO: 20510 - protein, 9 aa, Artificial Sequence
  Description of Artificial Sequence: Synthetic peptide
  Seed: SAYERMCNI
SMYERMCNF

SEQ ID NO: 20511 - protein, 9 aa, Artificial Sequence
  Description of Artificial Sequence: Synthetic peptide
  Seed: SAYERMCNI
SMYERMCNM

SEQ ID NO: 20512 - protein, 9 aa, Artificial Sequence
  Description of Artificial Sequence: Synthetic peptide
  Seed: SAYERMCNI
SMYERMCNL

SEQ ID NO: 20513 - protein, 9 aa, Artificial Sequence
  Description of Artificial Sequence: Synthetic peptide
  Seed: SAYERMCNI
SLYERMCNA

SEQ ID NO: 20514 - protein, 9 aa, Artificial Sequence
  Description of Artificial Sequence: Synthetic peptide
  Seed: SAYERMCNI
SLYERMCNC

SEQ ID NO: 20515 - protein, 9 aa, Artificial Sequence
  Description of Artificial Sequence: Synthetic peptide
  Seed: SAYERMCNI
SLYERMCNG

SEQ ID NO: 20516 - protein, 9 aa, Artificial Sequence
  Description of Artificial Sequence: Synthetic peptide
  Seed: SAYERMCNI
SLYERMCNI

SEQ ID NO: 20517 - protein, 9 aa, Artificial Sequence
  Description of Artificial Sequence: Synthetic peptide
  Seed: SAYERMCNI
SLYERMCNL

SEQ ID NO: 20518 - protein, 9 aa, Artificial Sequence
  Description of Artificial Sequence: Synthetic peptide
  Seed: SAYERMCNI
SLYERMCNM

SEQ ID NO: 20519 - protein, 9 aa, Artificial Sequence
  Description of Artificial Sequence: Synthetic peptide
  Seed: SAYERMCNI
SLYERMCNF

SEQ ID NO: 20520 - protein, 9 aa, Artificial Sequence
  Description of Artificial Sequence: Synthetic peptide
  Seed: SAYERMCNI
SLYERMCNP

SEQ ID NO: 20521 - protein, 9 aa, Artificial Sequence
  Description of Artificial Sequence: Synthetic peptide
  Seed: SAYERMCNI
SLYERMCNS

SEQ ID NO: 20522 - protein, 9 aa, Artificial Sequence
  Description of Artificial Sequence: Synthetic peptide
  Seed: SAYERMCNI
SLYERMCNT

SEQ ID NO: 20523 - protein, 9 aa, Artificial Sequence
  Description of Artificial Sequence: Synthetic peptide
  Seed: SAYERMCNI
SLYERMCNW

SEQ ID NO: 20524 - protein, 9 aa, Artificial Sequence
  Description of Artificial Sequence: Synthetic peptide
  Seed: SAYERMCNI
SLYERMCNY

SEQ ID NO: 20525 - protein, 9 aa, Artificial Sequence
  Description of Artificial Sequence: Synthetic peptide
  Seed: SAYERMCNI
SLYERMCNV

SEQ ID NO: 20526 - protein, 9 aa, Artificial Sequence
  Description of Artificial Sequence: Synthetic peptide
  Seed: SAYERMCNI
SKYERMCNI

SEQ ID NO: 20527 - protein, 9 aa, Artificial Sequence
  Description of Artificial Sequence: Synthetic peptide
  Seed: SAYERMCNI
SKYERMCNV

SEQ ID NO: 20528 - protein, 9 aa, Artificial Sequence
  Description of Artificial Sequence: Synthetic peptide
  Seed: SAYERMCNI
SMYERMCNA

SEQ ID NO: 20529 - protein, 9 aa, Artificial Sequence
  Description of Artificial Sequence: Synthetic peptide
  Seed: SAYERMCNI
SMYERMCNC

SEQ ID NO: 20530 - protein, 9 aa, Artificial Sequence
  Description of Artificial Sequence: Synthetic peptide
  Seed: SAYERMCNI
SMYERMCNG

SEQ ID NO: 20531 - protein, 9 aa, Artificial Sequence
  Description of Artificial Sequence: Synthetic peptide
  Seed: SAYERMCNI
SMYERMCNI

SEQ ID NO: 20532 - protein, 9 aa, Artificial Sequence
  Description of Artificial Sequence: Synthetic peptide
  Seed: SAYERMCNI
SAYERMCNY

SEQ ID NO: 20533 - protein, 9 aa, Artificial Sequence
  Description of Artificial Sequence: Synthetic peptide
  Seed: SAYERMCNI
SAYERMCNW

SEQ ID NO: 20534 - protein, 9 aa, Artificial Sequence
  Description of Artificial Sequence: Synthetic peptide
  Seed: SAYERMCNI
SAYERMCNT

SEQ ID NO: 20535 - protein, 10 aa, Artificial Sequence
  Description of Artificial Sequence: Synthetic peptide
  Seed: SARSALILRG
SSRSALILRY

SEQ ID NO: 20536 - protein, 10 aa, Artificial Sequence
  Description of Artificial Sequence: Synthetic peptide
  Seed: SARSALILRG
SSRSALILRH

SEQ ID NO: 20537 - protein, 10 aa, Artificial Sequence
  Description of Artificial Sequence: Synthetic peptide
  Seed: SARSALILRG
SSRSALILRI

SEQ ID NO: 20538 - protein, 10 aa, Artificial Sequence
  Description of Artificial Sequence: Synthetic peptide
  Seed: SARSALILRG
SSRSALILRL

SEQ ID NO: 20539 - protein, 10 aa, Artificial Sequence
  Description of Artificial Sequence: Synthetic peptide
  Seed: SARSALILRG
SSRSALILRK

SEQ ID NO: 20540 - protein, 10 aa, Artificial Sequence
  Description of Artificial Sequence: Synthetic peptide
  Seed: SARSALILRG
SSRSALILRM

SEQ ID NO: 20541 - protein, 10 aa, Artificial Sequence
  Description of Artificial Sequence: Synthetic peptide
  Seed: SARSALILRG
SSRSALILRF

SEQ ID NO: 20542 - protein, 10 aa, Artificial Sequence
  Description of Artificial Sequence: Synthetic peptide
  Seed: SARSALILRG
SSRSALILRP

SEQ ID NO: 20543 - protein, 10 aa, Artificial Sequence
  Description of Artificial Sequence: Synthetic peptide
  Seed: SARSALILRG
SSRSALILRS

SEQ ID NO: 20544 - protein, 10 aa, Artificial Sequence
  Description of Artificial Sequence: Synthetic peptide
  Seed: SARSALILRG
SSRSALILRT

SEQ ID NO: 20545 - protein, 10 aa, Artificial Sequence
  Description of Artificial Sequence: Synthetic peptide
  Seed: SARSALILRG
SSRSALILRV

SEQ ID NO: 20546 - protein, 9 aa, Artificial Sequence
  Description of Artificial Sequence: Synthetic peptide
  Seed: SAYERMCNI
SAYERMCNF

SEQ ID NO: 20547 - protein, 10 aa, Artificial Sequence
  Description of Artificial Sequence: Synthetic peptide
  Seed: SARSALILRG
STRSALILRA

SEQ ID NO: 20548 - protein, 10 aa, Artificial Sequence
  Description of Artificial Sequence: Synthetic peptide
  Seed: SARSALILRG
STRSALILRR

SEQ ID NO: 20549 - protein, 10 aa, Artificial Sequence
  Description of Artificial Sequence: Synthetic peptide
  Seed: SARSALILRG
STRSALILRN

SEQ ID NO: 20550 - protein, 10 aa, Artificial Sequence
  Description of Artificial Sequence: Synthetic peptide
  Seed: SARSALILRG
STRSALILRC

SEQ ID NO: 20551 - protein, 10 aa, Artificial Sequence
  Description of Artificial Sequence: Synthetic peptide
  Seed: SARSALILRG
STRSALILRQ

SEQ ID NO: 20552 - protein, 10 aa, Artificial Sequence
  Description of Artificial Sequence: Synthetic peptide
  Seed: SARSALILRG
STRSALILRE

SEQ ID NO: 20553 - protein, 10 aa, Artificial Sequence
  Description of Artificial Sequence: Synthetic peptide
  Seed: SARSALILRG
STRSALILRG

SEQ ID NO: 20554 - protein, 10 aa, Artificial Sequence
  Description of Artificial Sequence: Synthetic peptide
  Seed: SARSALILRG
STRSALILRH

SEQ ID NO: 20555 - protein, 10 aa, Artificial Sequence
  Description of Artificial Sequence: Synthetic peptide
  Seed: SARSALILRG
STRSALILRI

SEQ ID NO: 20556 - protein, 10 aa, Artificial Sequence
  Description of Artificial Sequence: Synthetic peptide
  Seed: SARSALILRG
SSRSALILRG

SEQ ID NO: 20557 - protein, 10 aa, Artificial Sequence
  Description of Artificial Sequence: Synthetic peptide
  Seed: SARSALILRG
SSRSALILRE

SEQ ID NO: 20558 - protein, 10 aa, Artificial Sequence
  Description of Artificial Sequence: Synthetic peptide
  Seed: SARSALILRG
SSRSALILRQ

SEQ ID NO: 20559 - protein, 10 aa, Artificial Sequence
  Description of Artificial Sequence: Synthetic peptide
  Seed: SARSALILRG
SSRSALILRC

SEQ ID NO: 20560 - protein, 10 aa, Artificial Sequence
  Description of Artificial Sequence: Synthetic peptide
  Seed: SARSALILRG
SMRSALILRM

SEQ ID NO: 20561 - protein, 10 aa, Artificial Sequence
  Description of Artificial Sequence: Synthetic peptide
  Seed: SARSALILRG
SMRSALILRF

SEQ ID NO: 20562 - protein, 10 aa, Artificial Sequence
  Description of Artificial Sequence: Synthetic peptide
  Seed: SARSALILRG
SMRSALILRP

SEQ ID NO: 20563 - protein, 10 aa, Artificial Sequence
  Description of Artificial Sequence: Synthetic peptide
  Seed: SARSALILRG
SMRSALILRS

SEQ ID NO: 20564 - protein, 10 aa, Artificial Sequence
  Description of Artificial Sequence: Synthetic peptide
  Seed: SARSALILRG
SMRSALILRT

SEQ ID NO: 20565 - protein, 10 aa, Artificial Sequence
  Description of Artificial Sequence: Synthetic peptide
  Seed: SARSALILRG
SMRSALILRY

SEQ ID NO: 20566 - protein, 10 aa, Artificial Sequence
  Description of Artificial Sequence: Synthetic peptide
  Seed: SARSALILRG
SMRSALILRV

SEQ ID NO: 20567 - protein, 10 aa, Artificial Sequence
  Description of Artificial Sequence: Synthetic peptide
  Seed: SARSALILRG
SFRSALILRA

SEQ ID NO: 20568 - protein, 10 aa, Artificial Sequence
  Description of Artificial Sequence: Synthetic peptide
  Seed: SARSALILRG
SFRSALILRG

SEQ ID NO: 20569 - protein, 10 aa, Artificial Sequence
  Description of Artificial Sequence: Synthetic peptide
  Seed: SARSALILRG
SFRSALILRI

SEQ ID NO: 20570 - protein, 10 aa, Artificial Sequence
  Description of Artificial Sequence: Synthetic peptide
  Seed: SARSALILRG
SFRSALILRL

SEQ ID NO: 20571 - protein, 10 aa, Artificial Sequence
  Description of Artificial Sequence: Synthetic peptide
  Seed: SARSALILRG
SFRSALILRK

SEQ ID NO: 20572 - protein, 10 aa, Artificial Sequence
  Description of Artificial Sequence: Synthetic peptide
  Seed: SARSALILRG
SFRSALILRM

SEQ ID NO: 20573 - protein, 10 aa, Artificial Sequence
  Description of Artificial Sequence: Synthetic peptide
  Seed: SARSALILRG
SFRSALILRS

SEQ ID NO: 20574 - protein, 10 aa, Artificial Sequence
  Description of Artificial Sequence: Synthetic peptide
  Seed: SARSALILRG
SFRSALILRT

SEQ ID NO: 20575 - protein, 10 aa, Artificial Sequence
  Description of Artificial Sequence: Synthetic peptide
  Seed: SARSALILRG
SFRSALILRV

SEQ ID NO: 20576 - protein, 10 aa, Artificial Sequence
  Description of Artificial Sequence: Synthetic peptide
  Seed: SARSALILRG
SSRSALILRA

SEQ ID NO: 20577 - protein, 10 aa, Artificial Sequence
  Description of Artificial Sequence: Synthetic peptide
  Seed: SARSALILRG
SSRSALILRR

SEQ ID NO: 20578 - protein, 10 aa, Artificial Sequence
  Description of Artificial Sequence: Synthetic peptide
  Seed: SARSALILRG
SSRSALILRN

SEQ ID NO: 20579 - protein, 10 aa, Artificial Sequence
  Description of Artificial Sequence: Synthetic peptide
  Seed: SARSALILRG
STRSALILRL

SEQ ID NO: 20580 - protein, 10 aa, Artificial Sequence
  Description of Artificial Sequence: Synthetic peptide
  Seed: SARSALILRG
STRSALILRK

SEQ ID NO: 20581 - protein, 10 aa, Artificial Sequence
  Description of Artificial Sequence: Synthetic peptide
  Seed: SARSALILRG
STRSALILRM

SEQ ID NO: 20582 - protein, 10 aa, Artificial Sequence
  Description of Artificial Sequence: Synthetic peptide
  Seed: SARSALILRG
SYRSALILRV

SEQ ID NO: 20583 - protein, 10 aa, Artificial Sequence
  Description of Artificial Sequence: Synthetic peptide
  Seed: SARSALILRG
SVRSALILRR

SEQ ID NO: 20584 - protein, 10 aa, Artificial Sequence
  Description of Artificial Sequence: Synthetic peptide
  Seed: SARSALILRG
SVRSALILRN

SEQ ID NO: 20585 - protein, 10 aa, Artificial Sequence
  Description of Artificial Sequence: Synthetic peptide
  Seed: SARSALILRG
SVRSALILRC

SEQ ID NO: 20586 - protein, 10 aa, Artificial Sequence
  Description of Artificial Sequence: Synthetic peptide
  Seed: SARSALILRG
SVRSALILRG

SEQ ID NO: 20587 - protein, 10 aa, Artificial Sequence
  Description of Artificial Sequence: Synthetic peptide
  Seed: SARSALILRG
SVRSALILRI

SEQ ID NO: 20588 - protein, 10 aa, Artificial Sequence
  Description of Artificial Sequence: Synthetic peptide
  Seed: SARSALILRG
SVRSALILRL

SEQ ID NO: 20589 - protein, 10 aa, Artificial Sequence
  Description of Artificial Sequence: Synthetic peptide
  Seed: SARSALILRG
SVRSALILRK

SEQ ID NO: 20590 - protein, 10 aa, Artificial Sequence
  Description of Artificial Sequence: Synthetic peptide
  Seed: SARSALILRG
SVRSALILRM

SEQ ID NO: 20591 - protein, 10 aa, Artificial Sequence
  Description of Artificial Sequence: Synthetic peptide
  Seed: SARSALILRG
SVRSALILRF

SEQ ID NO: 20592 - protein, 10 aa, Artificial Sequence
  Description of Artificial Sequence: Synthetic peptide
  Seed: SARSALILRG
SVRSALILRP

SEQ ID NO: 20593 - protein, 10 aa, Artificial Sequence
  Description of Artificial Sequence: Synthetic peptide
  Seed: SARSALILRG
SVRSALILRS

SEQ ID NO: 20594 - protein, 10 aa, Artificial Sequence
  Description of Artificial Sequence: Synthetic peptide
  Seed: SARSALILRG
SVRSALILRT

SEQ ID NO: 20595 - protein, 10 aa, Artificial Sequence
  Description of Artificial Sequence: Synthetic peptide
  Seed: SARSALILRG
SVRSALILRY

SEQ ID NO: 20596 - protein, 10 aa, Artificial Sequence
  Description of Artificial Sequence: Synthetic peptide
  Seed: SARSALILRG
SVRSALILRV

SEQ ID NO: 20597 - protein, 9 aa, Artificial Sequence
  Description of Artificial Sequence: Synthetic peptide
  Seed: SAYERMCNI
SAYERMCNA

SEQ ID NO: 20598 - protein, 9 aa, Artificial Sequence
  Description of Artificial Sequence: Synthetic peptide
  Seed: SAYERMCNI
SAYERMCNC

SEQ ID NO: 20599 - protein, 9 aa, Artificial Sequence
  Description of Artificial Sequence: Synthetic peptide
  Seed: SAYERMCNI
SAYERMCNH

SEQ ID NO: 20600 - protein, 9 aa, Artificial Sequence
  Description of Artificial Sequence: Synthetic peptide
  Seed: SAYERMCNI
SAYERMCNL

SEQ ID NO: 20601 - protein, 9 aa, Artificial Sequence
  Description of Artificial Sequence: Synthetic peptide
  Seed: SAYERMCNI
SAYERMCNM

SEQ ID NO: 20602 - protein, 10 aa, Artificial Sequence
  Description of Artificial Sequence: Synthetic peptide
  Seed: SARSALILRG
SVRSALILRA

SEQ ID NO: 20603 - protein, 10 aa, Artificial Sequence
  Description of Artificial Sequence: Synthetic peptide
  Seed: SARSALILRG
SYRSALILRY

SEQ ID NO: 20604 - protein, 10 aa, Artificial Sequence
  Description of Artificial Sequence: Synthetic peptide
  Seed: SARSALILRG
STRSALILRF

SEQ ID NO: 20605 - protein, 10 aa, Artificial Sequence
  Description of Artificial Sequence: Synthetic peptide
  Seed: SARSALILRG
SYRSALILRT

SEQ ID NO: 20606 - protein, 10 aa, Artificial Sequence
  Description of Artificial Sequence: Synthetic peptide
  Seed: SARSALILRG
STRSALILRP

SEQ ID NO: 20607 - protein, 10 aa, Artificial Sequence
  Description of Artificial Sequence: Synthetic peptide
  Seed: SARSALILRG
STRSALILRS

SEQ ID NO: 20608 - protein, 10 aa, Artificial Sequence
  Description of Artificial Sequence: Synthetic peptide
  Seed: SARSALILRG
STRSALILRT

SEQ ID NO: 20609 - protein, 10 aa, Artificial Sequence
  Description of Artificial Sequence: Synthetic peptide
  Seed: SARSALILRG
STRSALILRY

SEQ ID NO: 20610 - protein, 10 aa, Artificial Sequence
  Description of Artificial Sequence: Synthetic peptide
  Seed: SARSALILRG
STRSALILRV

SEQ ID NO: 20611 - protein, 10 aa, Artificial Sequence
  Description of Artificial Sequence: Synthetic peptide
  Seed: SARSALILRG
SWRSALILRA

SEQ ID NO: 20612 - protein, 10 aa, Artificial Sequence
  Description of Artificial Sequence: Synthetic peptide
  Seed: SARSALILRG
SWRSALILRI

SEQ ID NO: 20613 - protein, 10 aa, Artificial Sequence
  Description of Artificial Sequence: Synthetic peptide
  Seed: SARSALILRG
SWRSALILRL

SEQ ID NO: 20614 - protein, 10 aa, Artificial Sequence
  Description of Artificial Sequence: Synthetic peptide
  Seed: SARSALILRG
SWRSALILRK

SEQ ID NO: 20615 - protein, 10 aa, Artificial Sequence
  Description of Artificial Sequence: Synthetic peptide
  Seed: SARSALILRG
SWRSALILRM

SEQ ID NO: 20616 - protein, 10 aa, Artificial Sequence
  Description of Artificial Sequence: Synthetic peptide
  Seed: SARSALILRG
SWRSALILRV

SEQ ID NO: 20617 - protein, 10 aa, Artificial Sequence
  Description of Artificial Sequence: Synthetic peptide
  Seed: SARSALILRG
SYRSALILRA

SEQ ID NO: 20618 - protein, 10 aa, Artificial Sequence
  Description of Artificial Sequence: Synthetic peptide
  Seed: SARSALILRG
SYRSALILRR

SEQ ID NO: 20619 - protein, 10 aa, Artificial Sequence
  Description of Artificial Sequence: Synthetic peptide
  Seed: SARSALILRG
SYRSALILRG

SEQ ID NO: 20620 - protein, 10 aa, Artificial Sequence
  Description of Artificial Sequence: Synthetic peptide
  Seed: SARSALILRG
SYRSALILRI

SEQ ID NO: 20621 - protein, 10 aa, Artificial Sequence
  Description of Artificial Sequence: Synthetic peptide
  Seed: SARSALILRG
SYRSALILRL

SEQ ID NO: 20622 - protein, 10 aa, Artificial Sequence
  Description of Artificial Sequence: Synthetic peptide
  Seed: SARSALILRG
SYRSALILRK

SEQ ID NO: 20623 - protein, 10 aa, Artificial Sequence
  Description of Artificial Sequence: Synthetic peptide
  Seed: SARSALILRG
SYRSALILRM

SEQ ID NO: 20624 - protein, 10 aa, Artificial Sequence
  Description of Artificial Sequence: Synthetic peptide
  Seed: SARSALILRG
SYRSALILRS

SEQ ID NO: 20625 - protein, 9 aa, Artificial Sequence
  Description of Artificial Sequence: Synthetic peptide
  Seed: SARSALILR
SMRSALILR

SEQ ID NO: 20626 - protein, 9 aa, Artificial Sequence
  Description of Artificial Sequence: Synthetic peptide
  Seed: SARSALILR
SMRSALILA

SEQ ID NO: 20627 - protein, 9 aa, Artificial Sequence
  Description of Artificial Sequence: Synthetic peptide
  Seed: SARSALILR
SKRSALILV

SEQ ID NO: 20628 - protein, 10 aa, Artificial Sequence
  Description of Artificial Sequence: Synthetic peptide
  Seed: SALILRGSVA
SKLILRGSVV

SEQ ID NO: 20629 - protein, 10 aa, Artificial Sequence
  Description of Artificial Sequence: Synthetic peptide
  Seed: SALILRGSVA
SILILRGSVL

SEQ ID NO: 20630 - protein, 10 aa, Artificial Sequence
  Description of Artificial Sequence: Synthetic peptide
  Seed: SALILRGSVA
SILILRGSVV

SEQ ID NO: 20631 - protein, 10 aa, Artificial Sequence
  Description of Artificial Sequence: Synthetic peptide
  Seed: SALILRGSVA
SLLILRGSVA

SEQ ID NO: 20632 - protein, 10 aa, Artificial Sequence
  Description of Artificial Sequence: Synthetic peptide
  Seed: SALILRGSVA
SLLILRGSVI

SEQ ID NO: 20633 - protein, 10 aa, Artificial Sequence
  Description of Artificial Sequence: Synthetic peptide
  Seed: SALILRGSVA
SLLILRGSVL

SEQ ID NO: 20634 - protein, 10 aa, Artificial Sequence
  Description of Artificial Sequence: Synthetic peptide
  Seed: SALILRGSVA
SLLILRGSVV

SEQ ID NO: 20635 - protein, 10 aa, Artificial Sequence
  Description of Artificial Sequence: Synthetic peptide
  Seed: SALILRGSVA
SKLILRGSVA

SEQ ID NO: 20636 - protein, 10 aa, Artificial Sequence
  Description of Artificial Sequence: Synthetic peptide
  Seed: SALILRGSVA
SKLILRGSVI

SEQ ID NO: 20637 - protein, 10 aa, Artificial Sequence
  Description of Artificial Sequence: Synthetic peptide
  Seed: SALILRGSVA
SKLILRGSVL

SEQ ID NO: 20638 - protein, 10 aa, Artificial Sequence
  Description of Artificial Sequence: Synthetic peptide
  Seed: SALILRGSVA
SMLILRGSVA

SEQ ID NO: 20639 - protein, 10 aa, Artificial Sequence
  Description of Artificial Sequence: Synthetic peptide
  Seed: SALILRGSVA
SPLILRGSVV

SEQ ID NO: 20640 - protein, 10 aa, Artificial Sequence
  Description of Artificial Sequence: Synthetic peptide
  Seed: SALILRGSVA
SMLILRGSVI

SEQ ID NO: 20641 - protein, 10 aa, Artificial Sequence
  Description of Artificial Sequence: Synthetic peptide
  Seed: SALILRGSVA
SMLILRGSVL

SEQ ID NO: 20642 - protein, 10 aa, Artificial Sequence
  Description of Artificial Sequence: Synthetic peptide
  Seed: SALILRGSVA
SMLILRGSVV

SEQ ID NO: 20643 - protein, 10 aa, Artificial Sequence
  Description of Artificial Sequence: Synthetic peptide
  Seed: SALILRGSVA
SFLILRGSVA

SEQ ID NO: 20644 - protein, 10 aa, Artificial Sequence
  Description of Artificial Sequence: Synthetic peptide
  Seed: SALILRGSVA
SFLILRGSVI

SEQ ID NO: 20645 - protein, 10 aa, Artificial Sequence
  Description of Artificial Sequence: Synthetic peptide
  Seed: SALILRGSVA
SFLILRGSVL

SEQ ID NO: 20646 - protein, 10 aa, Artificial Sequence
  Description of Artificial Sequence: Synthetic peptide
  Seed: SALILRGSVA
SFLILRGSVV

SEQ ID NO: 20647 - protein, 10 aa, Artificial Sequence
  Description of Artificial Sequence: Synthetic peptide
  Seed: SALILRGSVA
SPLILRGSVA

SEQ ID NO: 20648 - protein, 10 aa, Artificial Sequence
  Description of Artificial Sequence: Synthetic peptide
  Seed: SALILRGSVA
SPLILRGSVI

SEQ ID NO: 20649 - protein, 10 aa, Artificial Sequence
  Description of Artificial Sequence: Synthetic peptide
  Seed: SALILRGSVA
SILILRGSVI

SEQ ID NO: 20650 - protein, 10 aa, Artificial Sequence
  Description of Artificial Sequence: Synthetic peptide
  Seed: SALILRGSVA
SILILRGSVA

SEQ ID NO: 20651 - protein, 10 aa, Artificial Sequence
  Description of Artificial Sequence: Synthetic peptide
  Seed: SALILRGSVA
SHLILRGSVV

SEQ ID NO: 20652 - protein, 10 aa, Artificial Sequence
  Description of Artificial Sequence: Synthetic peptide
  Seed: SALILRGSVA
SHLILRGSVL

SEQ ID NO: 20653 - protein, 10 aa, Artificial Sequence
  Description of Artificial Sequence: Synthetic peptide
  Seed: SALILRGSVA
SDLILRGSVV

SEQ ID NO: 20654 - protein, 10 aa, Artificial Sequence
  Description of Artificial Sequence: Synthetic peptide
  Seed: SALILRGSVA
SCLILRGSVA

SEQ ID NO: 20655 - protein, 10 aa, Artificial Sequence
  Description of Artificial Sequence: Synthetic peptide
  Seed: SALILRGSVA
SCLILRGSVI

SEQ ID NO: 20656 - protein, 10 aa, Artificial Sequence
  Description of Artificial Sequence: Synthetic peptide
  Seed: SALILRGSVA
SCLILRGSVL

SEQ ID NO: 20657 - protein, 10 aa, Artificial Sequence
  Description of Artificial Sequence: Synthetic peptide
  Seed: SALILRGSVA
SCLILRGSVV

SEQ ID NO: 20658 - protein, 10 aa, Artificial Sequence
  Description of Artificial Sequence: Synthetic peptide
  Seed: SALILRGSVA
SQLILRGSVA

SEQ ID NO: 20659 - protein, 10 aa, Artificial Sequence
  Description of Artificial Sequence: Synthetic peptide
  Seed: SALILRGSVA
SQLILRGSVI

SEQ ID NO: 20660 - protein, 10 aa, Artificial Sequence
  Description of Artificial Sequence: Synthetic peptide
  Seed: SALILRGSVA
SQLILRGSVL

SEQ ID NO: 20661 - protein, 10 aa, Artificial Sequence
  Description of Artificial Sequence: Synthetic peptide
  Seed: SALILRGSVA
SQLILRGSVV

SEQ ID NO: 20662 - protein, 10 aa, Artificial Sequence
  Description of Artificial Sequence: Synthetic peptide
  Seed: SALILRGSVA
SELILRGSVA

SEQ ID NO: 20663 - protein, 10 aa, Artificial Sequence
  Description of Artificial Sequence: Synthetic peptide
  Seed: SALILRGSVA
SELILRGSVI

SEQ ID NO: 20664 - protein, 10 aa, Artificial Sequence
  Description of Artificial Sequence: Synthetic peptide
  Seed: SALILRGSVA
SELILRGSVL

SEQ ID NO: 20665 - protein, 10 aa, Artificial Sequence
  Description of Artificial Sequence: Synthetic peptide
  Seed: SALILRGSVA
SELILRGSVV

SEQ ID NO: 20666 - protein, 10 aa, Artificial Sequence
  Description of Artificial Sequence: Synthetic peptide
  Seed: SALILRGSVA
SGLILRGSVA

SEQ ID NO: 20667 - protein, 10 aa, Artificial Sequence
  Description of Artificial Sequence: Synthetic peptide
  Seed: SALILRGSVA
SGLILRGSVI

SEQ ID NO: 20668 - protein, 10 aa, Artificial Sequence
  Description of Artificial Sequence: Synthetic peptide
  Seed: SALILRGSVA
SGLILRGSVL

SEQ ID NO: 20669 - protein, 10 aa, Artificial Sequence
  Description of Artificial Sequence: Synthetic peptide
  Seed: SALILRGSVA
SGLILRGSVV

SEQ ID NO: 20670 - protein, 10 aa, Artificial Sequence
  Description of Artificial Sequence: Synthetic peptide
  Seed: SALILRGSVA
SHLILRGSVA

SEQ ID NO: 20671 - protein, 10 aa, Artificial Sequence
  Description of Artificial Sequence: Synthetic peptide
  Seed: SALILRGSVA
SHLILRGSVI

SEQ ID NO: 20672 - protein, 10 aa, Artificial Sequence
  Description of Artificial Sequence: Synthetic peptide
  Seed: SALILRGSVA
SPLILRGSVL

SEQ ID NO: 20673 - protein, 10 aa, Artificial Sequence
  Description of Artificial Sequence: Synthetic peptide
  Seed: SALILRGSVA
SSLILRGSVA

SEQ ID NO: 20674 - protein, 9 aa, Artificial Sequence
  Description of Artificial Sequence: Synthetic peptide
  Seed: SARPEDVSF
SGRPEDVSF

SEQ ID NO: 20675 - protein, 9 aa, Artificial Sequence
  Description of Artificial Sequence: Synthetic peptide
  Seed: SARPEDVSF
SQRPEDVSA

SEQ ID NO: 20676 - protein, 9 aa, Artificial Sequence
  Description of Artificial Sequence: Synthetic peptide
  Seed: SARPEDVSF
SARPEDVSV

SEQ ID NO: 20677 - protein, 9 aa, Artificial Sequence
  Description of Artificial Sequence: Synthetic peptide
  Seed: SARPEDVSF
SRRPEDVSL

SEQ ID NO: 20678 - protein, 9 aa, Artificial Sequence
  Description of Artificial Sequence: Synthetic peptide
  Seed: SARPEDVSF
SRRPEDVSM

SEQ ID NO: 20679 - protein, 9 aa, Artificial Sequence
  Description of Artificial Sequence: Synthetic peptide
  Seed: SARPEDVSF
SRRPEDVSF

SEQ ID NO: 20680 - protein, 9 aa, Artificial Sequence
  Description of Artificial Sequence: Synthetic peptide
  Seed: SARPEDVSF
SRRPEDVSY

SEQ ID NO: 20681 - protein, 9 aa, Artificial Sequence
  Description of Artificial Sequence: Synthetic peptide
  Seed: SARPEDVSF
SNRPEDVSF

SEQ ID NO: 20682 - protein, 9 aa, Artificial Sequence
  Description of Artificial Sequence: Synthetic peptide
  Seed: SARPEDVSF
SNRPEDVSY

SEQ ID NO: 20683 - protein, 9 aa, Artificial Sequence
  Description of Artificial Sequence: Synthetic peptide
  Seed: SARPEDVSF
SCRPEDVSW

SEQ ID NO: 20684 - protein, 9 aa, Artificial Sequence
  Description of Artificial Sequence: Synthetic peptide
  Seed: SARPEDVSF
SCRPEDVSY

SEQ ID NO: 20685 - protein, 9 aa, Artificial Sequence
  Description of Artificial Sequence: Synthetic peptide
  Seed: SARPEDVSF
SQRPEDVSH

SEQ ID NO: 20686 - protein, 10 aa, Artificial Sequence
  Description of Artificial Sequence: Synthetic peptide
  Seed: SALILRGSVA
SSLILRGSVI

SEQ ID NO: 20687 - protein, 9 aa, Artificial Sequence
  Description of Artificial Sequence: Synthetic peptide
  Seed: SARPEDVSF
SQRPEDVSI

SEQ ID NO: 20688 - protein, 9 aa, Artificial Sequence
  Description of Artificial Sequence: Synthetic peptide
  Seed: SARPEDVSF
SQRPEDVSL

SEQ ID NO: 20689 - protein, 9 aa, Artificial Sequence
  Description of Artificial Sequence: Synthetic peptide
  Seed: SARPEDVSF
SQRPEDVSM

SEQ ID NO: 20690 - protein, 9 aa, Artificial Sequence
  Description of Artificial Sequence: Synthetic peptide
  Seed: SARPEDVSF
SQRPEDVSF

SEQ ID NO: 20691 - protein, 9 aa, Artificial Sequence
  Description of Artificial Sequence: Synthetic peptide
  Seed: SARPEDVSF
SQRPEDVSW

SEQ ID NO: 20692 - protein, 9 aa, Artificial Sequence
  Description of Artificial Sequence: Synthetic peptide
  Seed: SARPEDVSF
SQRPEDVSY

SEQ ID NO: 20693 - protein, 9 aa, Artificial Sequence
  Description of Artificial Sequence: Synthetic peptide
  Seed: SARPEDVSF
SQRPEDVSV

SEQ ID NO: 20694 - protein, 9 aa, Artificial Sequence
  Description of Artificial Sequence: Synthetic peptide
  Seed: SARPEDVSF
SERPEDVSM

SEQ ID NO: 20695 - protein, 9 aa, Artificial Sequence
  Description of Artificial Sequence: Synthetic peptide
  Seed: SARPEDVSF
SERPEDVSF

SEQ ID NO: 20696 - protein, 9 aa, Artificial Sequence
  Description of Artificial Sequence: Synthetic peptide
  Seed: SARPEDVSF
SARPEDVSY

SEQ ID NO: 20697 - protein, 9 aa, Artificial Sequence
  Description of Artificial Sequence: Synthetic peptide
  Seed: SARPEDVSF
SARPEDVSW

SEQ ID NO: 20698 - protein, 9 aa, Artificial Sequence
  Description of Artificial Sequence: Synthetic peptide
  Seed: SARPEDVSF
SARPEDVSM

SEQ ID NO: 20699 - protein, 9 aa, Artificial Sequence
  Description of Artificial Sequence: Synthetic peptide
  Seed: SARPEDVSF
SARPEDVSL

SEQ ID NO: 20700 - protein, 10 aa, Artificial Sequence
  Description of Artificial Sequence: Synthetic peptide
  Seed: SALILRGSVA
SSLILRGSVL

SEQ ID NO: 20701 - protein, 10 aa, Artificial Sequence
  Description of Artificial Sequence: Synthetic peptide
  Seed: SALILRGSVA
SSLILRGSVV

SEQ ID NO: 20702 - protein, 10 aa, Artificial Sequence
  Description of Artificial Sequence: Synthetic peptide
  Seed: SALILRGSVA
STLILRGSVA

SEQ ID NO: 20703 - protein, 10 aa, Artificial Sequence
  Description of Artificial Sequence: Synthetic peptide
  Seed: SALILRGSVA
STLILRGSVI

SEQ ID NO: 20704 - protein, 10 aa, Artificial Sequence
  Description of Artificial Sequence: Synthetic peptide
  Seed: SALILRGSVA
STLILRGSVL

SEQ ID NO: 20705 - protein, 10 aa, Artificial Sequence
  Description of Artificial Sequence: Synthetic peptide
  Seed: SALILRGSVA
STLILRGSVV

SEQ ID NO: 20706 - protein, 10 aa, Artificial Sequence
  Description of Artificial Sequence: Synthetic peptide
  Seed: SALILRGSVA
SWLILRGSVA

SEQ ID NO: 20707 - protein, 10 aa, Artificial Sequence
  Description of Artificial Sequence: Synthetic peptide
  Seed: SALILRGSVA
SWLILRGSVI

SEQ ID NO: 20708 - protein, 10 aa, Artificial Sequence
  Description of Artificial Sequence: Synthetic peptide
  Seed: SALILRGSVA
SWLILRGSVL

SEQ ID NO: 20709 - protein, 10 aa, Artificial Sequence
  Description of Artificial Sequence: Synthetic peptide
  Seed: SALILRGSVA
SWLILRGSVV

SEQ ID NO: 20710 - protein, 10 aa, Artificial Sequence
  Description of Artificial Sequence: Synthetic peptide
  Seed: SALILRGSVA
SYLILRGSVA

SEQ ID NO: 20711 - protein, 10 aa, Artificial Sequence
  Description of Artificial Sequence: Synthetic peptide
  Seed: SALILRGSVA
SYLILRGSVI

SEQ ID NO: 20712 - protein, 10 aa, Artificial Sequence
  Description of Artificial Sequence: Synthetic peptide
  Seed: SALILRGSVA
SYLILRGSVL

SEQ ID NO: 20713 - protein, 10 aa, Artificial Sequence
  Description of Artificial Sequence: Synthetic peptide
  Seed: SALILRGSVA
SYLILRGSVV

SEQ ID NO: 20714 - protein, 10 aa, Artificial Sequence
  Description of Artificial Sequence: Synthetic peptide
  Seed: SALILRGSVA
SVLILRGSVA

SEQ ID NO: 20715 - protein, 10 aa, Artificial Sequence
  Description of Artificial Sequence: Synthetic peptide
  Seed: SALILRGSVA
SVLILRGSVI

SEQ ID NO: 20716 - protein, 10 aa, Artificial Sequence
  Description of Artificial Sequence: Synthetic peptide
  Seed: SALILRGSVA
SVLILRGSVL

SEQ ID NO: 20717 - protein, 10 aa, Artificial Sequence
  Description of Artificial Sequence: Synthetic peptide
  Seed: SALILRGSVA
SVLILRGSVV

SEQ ID NO: 20718 - protein, 9 aa, Artificial Sequence
  Description of Artificial Sequence: Synthetic peptide
  Seed: SARPEDVSF
SARPEDVSI

SEQ ID NO: 20719 - protein, 10 aa, Artificial Sequence
  Description of Artificial Sequence: Synthetic peptide
  Seed: SALILRGSVA
SDLILRGSVL

SEQ ID NO: 20720 - protein, 10 aa, Artificial Sequence
  Description of Artificial Sequence: Synthetic peptide
  Seed: SALILRGSVA
SDLILRGSVI

SEQ ID NO: 20721 - protein, 10 aa, Artificial Sequence
  Description of Artificial Sequence: Synthetic peptide
  Seed: SALILRGSVA
SDLILRGSVA

SEQ ID NO: 20722 - protein, 11 aa, Artificial Sequence
  Description of Artificial Sequence: Synthetic peptide
  Seed: SAGQISVQPTF
SSGQISVQPTY

SEQ ID NO: 20723 - protein, 11 aa, Artificial Sequence
  Description of Artificial Sequence: Synthetic peptide
  Seed: SAGQISVQPTF
SFGQISVQPTF

SEQ ID NO: 20724 - protein, 11 aa, Artificial Sequence
  Description of Artificial Sequence: Synthetic peptide
  Seed: SAGQISVQPTF
SFGQISVQPTY

SEQ ID NO: 20725 - protein, 11 aa, Artificial Sequence
  Description of Artificial Sequence: Synthetic peptide
  Seed: SAGQISVQPTF
SPGQISVQPTM

SEQ ID NO: 20726 - protein, 11 aa, Artificial Sequence
  Description of Artificial Sequence: Synthetic peptide
  Seed: SAGQISVQPTF
SPGQISVQPTF

SEQ ID NO: 20727 - protein, 11 aa, Artificial Sequence
  Description of Artificial Sequence: Synthetic peptide
  Seed: SAGQISVQPTF
SPGQISVQPTY

SEQ ID NO: 20728 - protein, 11 aa, Artificial Sequence
  Description of Artificial Sequence: Synthetic peptide
  Seed: SAGQISVQPTF
SSGQISVQPTL

SEQ ID NO: 20729 - protein, 11 aa, Artificial Sequence
  Description of Artificial Sequence: Synthetic peptide
  Seed: SAGQISVQPTF
SSGQISVQPTM

SEQ ID NO: 20730 - protein, 11 aa, Artificial Sequence
  Description of Artificial Sequence: Synthetic peptide
  Seed: SAGQISVQPTF
SSGQISVQPTF

SEQ ID NO: 20731 - protein, 11 aa, Artificial Sequence
  Description of Artificial Sequence: Synthetic peptide
  Seed: SAGQISVQPTF
SSGQISVQPTW

SEQ ID NO: 20732 - protein, 11 aa, Artificial Sequence
  Description of Artificial Sequence: Synthetic peptide
  Seed: SAGQISVQPTF
STGQISVQPTL

SEQ ID NO: 20733 - protein, 10 aa, Artificial Sequence
  Description of Artificial Sequence: Synthetic peptide
  Seed: SALILRGSVA
SNLILRGSVV

SEQ ID NO: 20734 - protein, 11 aa, Artificial Sequence
  Description of Artificial Sequence: Synthetic peptide
  Seed: SAGQISVQPTF
STGQISVQPTM

SEQ ID NO: 20735 - protein, 11 aa, Artificial Sequence
  Description of Artificial Sequence: Synthetic peptide
  Seed: SAGQISVQPTF
STGQISVQPTF

SEQ ID NO: 20736 - protein, 11 aa, Artificial Sequence
  Description of Artificial Sequence: Synthetic peptide
  Seed: SAGQISVQPTF
STGQISVQPTW

SEQ ID NO: 20737 - protein, 11 aa, Artificial Sequence
  Description of Artificial Sequence: Synthetic peptide
  Seed: SAGQISVQPTF
STGQISVQPTY

SEQ ID NO: 20738 - protein, 11 aa, Artificial Sequence
  Description of Artificial Sequence: Synthetic peptide
  Seed: SAGQISVQPTF
SWGQISVQPTM

SEQ ID NO: 20739 - protein, 11 aa, Artificial Sequence
  Description of Artificial Sequence: Synthetic peptide
  Seed: SAGQISVQPTF
SWGQISVQPTF

SEQ ID NO: 20740 - protein, 11 aa, Artificial Sequence
  Description of Artificial Sequence: Synthetic peptide
  Seed: SAGQISVQPTF
SWGQISVQPTY

SEQ ID NO: 20741 - protein, 11 aa, Artificial Sequence
  Description of Artificial Sequence: Synthetic peptide
  Seed: SAGQISVQPTF
SYGQISVQPTM

SEQ ID NO: 20742 - protein, 11 aa, Artificial Sequence
  Description of Artificial Sequence: Synthetic peptide
  Seed: SAGQISVQPTF
SYGQISVQPTF

SEQ ID NO: 20743 - protein, 11 aa, Artificial Sequence
  Description of Artificial Sequence: Synthetic peptide
  Seed: SAGQISVQPTF
SFGQISVQPTM

SEQ ID NO: 20744 - protein, 11 aa, Artificial Sequence
  Description of Artificial Sequence: Synthetic peptide
  Seed: SAGQISVQPTF
SMGQISVQPTY

SEQ ID NO: 20745 - protein, 11 aa, Artificial Sequence
  Description of Artificial Sequence: Synthetic peptide
  Seed: SAGQISVQPTF
SMGQISVQPTF

SEQ ID NO: 20746 - protein, 11 aa, Artificial Sequence
  Description of Artificial Sequence: Synthetic peptide
  Seed: SAGQISVQPTF
SMGQISVQPTM

SEQ ID NO: 20747 - protein, 11 aa, Artificial Sequence
  Description of Artificial Sequence: Synthetic peptide
  Seed: SAGQISVQPTF
SQGQISVQPTY

SEQ ID NO: 20748 - protein, 11 aa, Artificial Sequence
  Description of Artificial Sequence: Synthetic peptide
  Seed: SAGQISVQPTF
SEGQISVQPTM

SEQ ID NO: 20749 - protein, 11 aa, Artificial Sequence
  Description of Artificial Sequence: Synthetic peptide
  Seed: SAGQISVQPTF
SEGQISVQPTF

SEQ ID NO: 20750 - protein, 11 aa, Artificial Sequence
  Description of Artificial Sequence: Synthetic peptide
  Seed: SAGQISVQPTF
SEGQISVQPTY

SEQ ID NO: 20751 - protein, 11 aa, Artificial Sequence
  Description of Artificial Sequence: Synthetic peptide
  Seed: SAGQISVQPTF
SGGQISVQPTM

SEQ ID NO: 20752 - protein, 11 aa, Artificial Sequence
  Description of Artificial Sequence: Synthetic peptide
  Seed: SAGQISVQPTF
SGGQISVQPTF

SEQ ID NO: 20753 - protein, 11 aa, Artificial Sequence
  Description of Artificial Sequence: Synthetic peptide
  Seed: SAGQISVQPTF
SGGQISVQPTY

SEQ ID NO: 20754 - protein, 11 aa, Artificial Sequence
  Description of Artificial Sequence: Synthetic peptide
  Seed: SAGQISVQPTF
SHGQISVQPTM

SEQ ID NO: 20755 - protein, 11 aa, Artificial Sequence
  Description of Artificial Sequence: Synthetic peptide
  Seed: SAGQISVQPTF
SHGQISVQPTF

SEQ ID NO: 20756 - protein, 11 aa, Artificial Sequence
  Description of Artificial Sequence: Synthetic peptide
  Seed: SAGQISVQPTF
SHGQISVQPTY

SEQ ID NO: 20757 - protein, 11 aa, Artificial Sequence
  Description of Artificial Sequence: Synthetic peptide
  Seed: SAGQISVQPTF
SIGQISVQPTM

SEQ ID NO: 20758 - protein, 11 aa, Artificial Sequence
  Description of Artificial Sequence: Synthetic peptide
  Seed: SAGQISVQPTF
SIGQISVQPTF

SEQ ID NO: 20759 - protein, 11 aa, Artificial Sequence
  Description of Artificial Sequence: Synthetic peptide
  Seed: SAGQISVQPTF
SIGQISVQPTY

SEQ ID NO: 20760 - protein, 11 aa, Artificial Sequence
  Description of Artificial Sequence: Synthetic peptide
  Seed: SAGQISVQPTF
SLGQISVQPTM

SEQ ID NO: 20761 - protein, 11 aa, Artificial Sequence
  Description of Artificial Sequence: Synthetic peptide
  Seed: SAGQISVQPTF
SLGQISVQPTF

SEQ ID NO: 20762 - protein, 11 aa, Artificial Sequence
  Description of Artificial Sequence: Synthetic peptide
  Seed: SAGQISVQPTF
SLGQISVQPTY

SEQ ID NO: 20763 - protein, 11 aa, Artificial Sequence
  Description of Artificial Sequence: Synthetic peptide
  Seed: SAGQISVQPTF
SKGQISVQPTM

SEQ ID NO: 20764 - protein, 11 aa, Artificial Sequence
  Description of Artificial Sequence: Synthetic peptide
  Seed: SAGQISVQPTF
SKGQISVQPTF

SEQ ID NO: 20765 - protein, 11 aa, Artificial Sequence
  Description of Artificial Sequence: Synthetic peptide
  Seed: SAGQISVQPTF
SKGQISVQPTY

SEQ ID NO: 20766 - protein, 11 aa, Artificial Sequence
  Description of Artificial Sequence: Synthetic peptide
  Seed: SAGQISVQPTF
SYGQISVQPTY

SEQ ID NO: 20767 - protein, 11 aa, Artificial Sequence
  Description of Artificial Sequence: Synthetic peptide
  Seed: SAGQISVQPTF
SVGQISVQPTM

SEQ ID NO: 20768 - protein, 11 aa, Artificial Sequence
  Description of Artificial Sequence: Synthetic peptide
  Seed: SAGQISVQPTF
SVGQISVQPTF

SEQ ID NO: 20769 - protein, 9 aa, Artificial Sequence
  Description of Artificial Sequence: Synthetic peptide
  Seed: SALILRGSV
SPLILRGSV

SEQ ID NO: 20770 - protein, 9 aa, Artificial Sequence
  Description of Artificial Sequence: Synthetic peptide
  Seed: SALILRGSV
SSLILRGSM

SEQ ID NO: 20771 - protein, 9 aa, Artificial Sequence
  Description of Artificial Sequence: Synthetic peptide
  Seed: SALILRGSV
SSLILRGSF

SEQ ID NO: 20772 - protein, 9 aa, Artificial Sequence
  Description of Artificial Sequence: Synthetic peptide
  Seed: SALILRGSV
SSLILRGSY

SEQ ID NO: 20773 - protein, 9 aa, Artificial Sequence
  Description of Artificial Sequence: Synthetic peptide
  Seed: SALILRGSV
STLILRGSL

SEQ ID NO: 20774 - protein, 9 aa, Artificial Sequence
  Description of Artificial Sequence: Synthetic peptide
  Seed: SALILRGSV
STLILRGSM

SEQ ID NO: 20775 - protein, 9 aa, Artificial Sequence
  Description of Artificial Sequence: Synthetic peptide
  Seed: SALILRGSV
STLILRGSF

SEQ ID NO: 20776 - protein, 9 aa, Artificial Sequence
  Description of Artificial Sequence: Synthetic peptide
  Seed: SALILRGSV
STLILRGSY

SEQ ID NO: 20777 - protein, 9 aa, Artificial Sequence
  Description of Artificial Sequence: Synthetic peptide
  Seed: SALILRGSV
SVLILRGSL

SEQ ID NO: 20778 - protein, 9 aa, Artificial Sequence
  Description of Artificial Sequence: Synthetic peptide
  Seed: SALILRGSV
SVLILRGSM

SEQ ID NO: 20779 - protein, 10 aa, Artificial Sequence
  Description of Artificial Sequence: Synthetic peptide
  Seed: SALILRGSVA
SALILRGSVI

SEQ ID NO: 20780 - protein, 10 aa, Artificial Sequence
  Description of Artificial Sequence: Synthetic peptide
  Seed: SALILRGSVA
SALILRGSVL

SEQ ID NO: 20781 - protein, 10 aa, Artificial Sequence
  Description of Artificial Sequence: Synthetic peptide
  Seed: SALILRGSVA
SALILRGSVV

SEQ ID NO: 20782 - protein, 10 aa, Artificial Sequence
  Description of Artificial Sequence: Synthetic peptide
  Seed: SALILRGSVA
SRLILRGSVA

SEQ ID NO: 20783 - protein, 10 aa, Artificial Sequence
  Description of Artificial Sequence: Synthetic peptide
  Seed: SALILRGSVA
SRLILRGSVI

SEQ ID NO: 20784 - protein, 10 aa, Artificial Sequence
  Description of Artificial Sequence: Synthetic peptide
  Seed: SALILRGSVA
SRLILRGSVL

SEQ ID NO: 20785 - protein, 10 aa, Artificial Sequence
  Description of Artificial Sequence: Synthetic peptide
  Seed: SALILRGSVA
SRLILRGSVV

SEQ ID NO: 20786 - protein, 10 aa, Artificial Sequence
  Description of Artificial Sequence: Synthetic peptide
  Seed: SALILRGSVA
SNLILRGSVA

SEQ ID NO: 20787 - protein, 10 aa, Artificial Sequence
  Description of Artificial Sequence: Synthetic peptide
  Seed: SALILRGSVA
SNLILRGSVI

SEQ ID NO: 20788 - protein, 10 aa, Artificial Sequence
  Description of Artificial Sequence: Synthetic peptide
  Seed: SALILRGSVA
SNLILRGSVL

SEQ ID NO: 20789 - protein, 9 aa, Artificial Sequence
  Description of Artificial Sequence: Synthetic peptide
  Seed: SALILRGSV
SSLILRGSL

SEQ ID NO: 20790 - protein, 9 aa, Artificial Sequence
  Description of Artificial Sequence: Synthetic peptide
  Seed: SALILRGSV
SPLILRGSY

SEQ ID NO: 20791 - protein, 11 aa, Artificial Sequence
  Description of Artificial Sequence: Synthetic peptide
  Seed: SAGQISVQPTF
SVGQISVQPTW

SEQ ID NO: 20792 - protein, 9 aa, Artificial Sequence
  Description of Artificial Sequence: Synthetic peptide
  Seed: SALILRGSV
SPLILRGSW

SEQ ID NO: 20793 - protein, 11 aa, Artificial Sequence
  Description of Artificial Sequence: Synthetic peptide
  Seed: SAGQISVQPTF
SVGQISVQPTY

SEQ ID NO: 20794 - protein, 9 aa, Artificial Sequence
  Description of Artificial Sequence: Synthetic peptide
  Seed: SALILRGSV
SALILRGSI

SEQ ID NO: 20795 - protein, 9 aa, Artificial Sequence
  Description of Artificial Sequence: Synthetic peptide
  Seed: SALILRGSV
SALILRGSL

SEQ ID NO: 20796 - protein, 9 aa, Artificial Sequence
  Description of Artificial Sequence: Synthetic peptide
  Seed: SALILRGSV
SALILRGSM

SEQ ID NO: 20797 - protein, 9 aa, Artificial Sequence
  Description of Artificial Sequence: Synthetic peptide
  Seed: SALILRGSV
SALILRGSF

SEQ ID NO: 20798 - protein, 9 aa, Artificial Sequence
  Description of Artificial Sequence: Synthetic peptide
  Seed: SALILRGSV
SALILRGSY

SEQ ID NO: 20799 - protein, 9 aa, Artificial Sequence
  Description of Artificial Sequence: Synthetic peptide
  Seed: SALILRGSV
SILILRGSL

SEQ ID NO: 20800 - protein, 9 aa, Artificial Sequence
  Description of Artificial Sequence: Synthetic peptide
  Seed: SALILRGSV
SILILRGSM

SEQ ID NO: 20801 - protein, 9 aa, Artificial Sequence
  Description of Artificial Sequence: Synthetic peptide
  Seed: SALILRGSV
SLLILRGSL

SEQ ID NO: 20802 - protein, 9 aa, Artificial Sequence
  Description of Artificial Sequence: Synthetic peptide
  Seed: SALILRGSV
SMLILRGSL

SEQ ID NO: 20803 - protein, 9 aa, Artificial Sequence
  Description of Artificial Sequence: Synthetic peptide
  Seed: SALILRGSV
SPLILRGSA

SEQ ID NO: 20804 - protein, 9 aa, Artificial Sequence
  Description of Artificial Sequence: Synthetic peptide
  Seed: SALILRGSV
SPLILRGSC

SEQ ID NO: 20805 - protein, 9 aa, Artificial Sequence
  Description of Artificial Sequence: Synthetic peptide
  Seed: SALILRGSV
SPLILRGSG

SEQ ID NO: 20806 - protein, 9 aa, Artificial Sequence
  Description of Artificial Sequence: Synthetic peptide
  Seed: SALILRGSV
SPLILRGSI

SEQ ID NO: 20807 - protein, 9 aa, Artificial Sequence
  Description of Artificial Sequence: Synthetic peptide
  Seed: SALILRGSV
SPLILRGSL

SEQ ID NO: 20808 - protein, 9 aa, Artificial Sequence
  Description of Artificial Sequence: Synthetic peptide
  Seed: SALILRGSV
SPLILRGSM

SEQ ID NO: 20809 - protein, 9 aa, Artificial Sequence
  Description of Artificial Sequence: Synthetic peptide
  Seed: SALILRGSV
SPLILRGSF

SEQ ID NO: 20810 - protein, 9 aa, Artificial Sequence
  Description of Artificial Sequence: Synthetic peptide
  Seed: SALILRGSV
SPLILRGSS

SEQ ID NO: 20811 - protein, 9 aa, Artificial Sequence
  Description of Artificial Sequence: Synthetic peptide
  Seed: SALILRGSV
SPLILRGST

SEQ ID NO: 20812 - protein, 9 aa, Artificial Sequence
  Description of Artificial Sequence: Synthetic peptide
  Seed: SARPEDVSF
SERPEDVSY

SEQ ID NO: 20813 - protein, 9 aa, Artificial Sequence
  Description of Artificial Sequence: Synthetic peptide
  Seed: SARPEDVSF
SGRPEDVSW

SEQ ID NO: 20814 - protein, 9 aa, Artificial Sequence
  Description of Artificial Sequence: Synthetic peptide
  Seed: SARSALILR
SKRSALILK

SEQ ID NO: 20815 - protein, 9 aa, Artificial Sequence
  Description of Artificial Sequence: Synthetic peptide
  Seed: SARSALILR
SGRSALILR

SEQ ID NO: 20816 - protein, 9 aa, Artificial Sequence
  Description of Artificial Sequence: Synthetic peptide
  Seed: SARSALILR
SQRSALILM

SEQ ID NO: 20817 - protein, 9 aa, Artificial Sequence
  Description of Artificial Sequence: Synthetic peptide
  Seed: SARSALILR
SQRSALILF

SEQ ID NO: 20818 - protein, 9 aa, Artificial Sequence
  Description of Artificial Sequence: Synthetic peptide
  Seed: SARSALILR
SQRSALILP

SEQ ID NO: 20819 - protein, 9 aa, Artificial Sequence
  Description of Artificial Sequence: Synthetic peptide
  Seed: SARSALILR
SQRSALILS

SEQ ID NO: 20820 - protein, 9 aa, Artificial Sequence
  Description of Artificial Sequence: Synthetic peptide
  Seed: SARSALILR
SQRSALILT

SEQ ID NO: 20821 - protein, 9 aa, Artificial Sequence
  Description of Artificial Sequence: Synthetic peptide
  Seed: SARSALILR
SQRSALILY

SEQ ID NO: 20822 - protein, 9 aa, Artificial Sequence
  Description of Artificial Sequence: Synthetic peptide
  Seed: SARSALILR
SQRSALILV

SEQ ID NO: 20823 - protein, 9 aa, Artificial Sequence
  Description of Artificial Sequence: Synthetic peptide
  Seed: SARSALILR
SERSALILK

SEQ ID NO: 20824 - protein, 9 aa, Artificial Sequence
  Description of Artificial Sequence: Synthetic peptide
  Seed: SARSALILR
SGRSALILA

SEQ ID NO: 20825 - protein, 9 aa, Artificial Sequence
  Description of Artificial Sequence: Synthetic peptide
  Seed: SARSALILR
SGRSALILN

SEQ ID NO: 20826 - protein, 9 aa, Artificial Sequence
  Description of Artificial Sequence: Synthetic peptide
  Seed: SARSALILR
SGRSALILS

SEQ ID NO: 20827 - protein, 9 aa, Artificial Sequence
  Description of Artificial Sequence: Synthetic peptide
  Seed: SARSALILR
SGRSALILC

SEQ ID NO: 20828 - protein, 9 aa, Artificial Sequence
  Description of Artificial Sequence: Synthetic peptide
  Seed: SARSALILR
SGRSALILQ

SEQ ID NO: 20829 - protein, 9 aa, Artificial Sequence
  Description of Artificial Sequence: Synthetic peptide
  Seed: SARSALILR
SGRSALILG

SEQ ID NO: 20830 - protein, 9 aa, Artificial Sequence
  Description of Artificial Sequence: Synthetic peptide
  Seed: SARSALILR
SGRSALILH

SEQ ID NO: 20831 - protein, 9 aa, Artificial Sequence
  Description of Artificial Sequence: Synthetic peptide
  Seed: SARSALILR
SGRSALILI

SEQ ID NO: 20832 - protein, 9 aa, Artificial Sequence
  Description of Artificial Sequence: Synthetic peptide
  Seed: SARSALILR
SGRSALILL

SEQ ID NO: 20833 - protein, 9 aa, Artificial Sequence
  Description of Artificial Sequence: Synthetic peptide
  Seed: SARSALILR
SGRSALILK

SEQ ID NO: 20834 - protein, 9 aa, Artificial Sequence
  Description of Artificial Sequence: Synthetic peptide
  Seed: SARSALILR
SGRSALILM

SEQ ID NO: 20835 - protein, 9 aa, Artificial Sequence
  Description of Artificial Sequence: Synthetic peptide
  Seed: SARSALILR
SGRSALILF

SEQ ID NO: 20836 - protein, 9 aa, Artificial Sequence
  Description of Artificial Sequence: Synthetic peptide
  Seed: SARSALILR
SQRSALILK

SEQ ID NO: 20837 - protein, 9 aa, Artificial Sequence
  Description of Artificial Sequence: Synthetic peptide
  Seed: SARSALILR
SQRSALILL

SEQ ID NO: 20838 - protein, 9 aa, Artificial Sequence
  Description of Artificial Sequence: Synthetic peptide
  Seed: SARSALILR
SQRSALILI

SEQ ID NO: 20839 - protein, 9 aa, Artificial Sequence
  Description of Artificial Sequence: Synthetic peptide
  Seed: SARSALILR
SQRSALILH

SEQ ID NO: 20840 - protein, 9 aa, Artificial Sequence
  Description of Artificial Sequence: Synthetic peptide
  Seed: SARSALILR
SNRSALILT

SEQ ID NO: 20841 - protein, 9 aa, Artificial Sequence
  Description of Artificial Sequence: Synthetic peptide
  Seed: SARSALILR
SNRSALILY

SEQ ID NO: 20842 - protein, 9 aa, Artificial Sequence
  Description of Artificial Sequence: Synthetic peptide
  Seed: SARSALILR
SNRSALILV

SEQ ID NO: 20843 - protein, 9 aa, Artificial Sequence
  Description of Artificial Sequence: Synthetic peptide
  Seed: SARSALILR
SCRSALILA

SEQ ID NO: 20844 - protein, 9 aa, Artificial Sequence
  Description of Artificial Sequence: Synthetic peptide
  Seed: SARSALILR
SCRSALILR

SEQ ID NO: 20845 - protein, 9 aa, Artificial Sequence
  Description of Artificial Sequence: Synthetic peptide
  Seed: SARSALILR
SCRSALILI

SEQ ID NO: 20846 - protein, 9 aa, Artificial Sequence
  Description of Artificial Sequence: Synthetic peptide
  Seed: SARSALILR
SCRSALILL

SEQ ID NO: 20847 - protein, 9 aa, Artificial Sequence
  Description of Artificial Sequence: Synthetic peptide
  Seed: SARSALILR
SCRSALILK

SEQ ID NO: 20848 - protein, 9 aa, Artificial Sequence
  Description of Artificial Sequence: Synthetic peptide
  Seed: SARSALILR
SCRSALILM

SEQ ID NO: 20849 - protein, 9 aa, Artificial Sequence
  Description of Artificial Sequence: Synthetic peptide
  Seed: SARSALILR
SCRSALILS

SEQ ID NO: 20850 - protein, 9 aa, Artificial Sequence
  Description of Artificial Sequence: Synthetic peptide
  Seed: SARSALILR
SCRSALILY

SEQ ID NO: 20851 - protein, 9 aa, Artificial Sequence
  Description of Artificial Sequence: Synthetic peptide
  Seed: SARSALILR
SCRSALILV

SEQ ID NO: 20852 - protein, 9 aa, Artificial Sequence
  Description of Artificial Sequence: Synthetic peptide
  Seed: SARSALILR
SQRSALILA

SEQ ID NO: 20853 - protein, 9 aa, Artificial Sequence
  Description of Artificial Sequence: Synthetic peptide
  Seed: SARSALILR
SQRSALILR

SEQ ID NO: 20854 - protein, 9 aa, Artificial Sequence
  Description of Artificial Sequence: Synthetic peptide
  Seed: SARSALILR
SQRSALILN

SEQ ID NO: 20855 - protein, 9 aa, Artificial Sequence
  Description of Artificial Sequence: Synthetic peptide
  Seed: SARSALILR
SQRSALILC

SEQ ID NO: 20856 - protein, 9 aa, Artificial Sequence
  Description of Artificial Sequence: Synthetic peptide
  Seed: SARSALILR
SQRSALILQ

SEQ ID NO: 20857 - protein, 9 aa, Artificial Sequence
  Description of Artificial Sequence: Synthetic peptide
  Seed: SARSALILR
SQRSALILE

SEQ ID NO: 20858 - protein, 9 aa, Artificial Sequence
  Description of Artificial Sequence: Synthetic peptide
  Seed: SARSALILR
SQRSALILG

SEQ ID NO: 20859 - protein, 9 aa, Artificial Sequence
  Description of Artificial Sequence: Synthetic peptide
  Seed: SARSALILR
SGRSALILP

SEQ ID NO: 20860 - protein, 9 aa, Artificial Sequence
  Description of Artificial Sequence: Synthetic peptide
  Seed: SARSALILR
SGRSALILT

SEQ ID NO: 20861 - protein, 9 aa, Artificial Sequence
  Description of Artificial Sequence: Synthetic peptide
  Seed: SARPEDVSF
SGRPEDVSY

SEQ ID NO: 20862 - protein, 9 aa, Artificial Sequence
  Description of Artificial Sequence: Synthetic peptide
  Seed: SARSALILR
SLRSALILK

SEQ ID NO: 20863 - protein, 9 aa, Artificial Sequence
  Description of Artificial Sequence: Synthetic peptide
  Seed: SARSALILR
SLRSALILA

SEQ ID NO: 20864 - protein, 9 aa, Artificial Sequence
  Description of Artificial Sequence: Synthetic peptide
  Seed: SARSALILR
SLRSALILR

SEQ ID NO: 20865 - protein, 9 aa, Artificial Sequence
  Description of Artificial Sequence: Synthetic peptide
  Seed: SARSALILR
SLRSALILN

SEQ ID NO: 20866 - protein, 9 aa, Artificial Sequence
  Description of Artificial Sequence: Synthetic peptide
  Seed: SARSALILR
SLRSALILC

SEQ ID NO: 20867 - protein, 9 aa, Artificial Sequence
  Description of Artificial Sequence: Synthetic peptide
  Seed: SARSALILR
SLRSALILQ

SEQ ID NO: 20868 - protein, 9 aa, Artificial Sequence
  Description of Artificial Sequence: Synthetic peptide
  Seed: SARSALILR
SLRSALILG

SEQ ID NO: 20869 - protein, 9 aa, Artificial Sequence
  Description of Artificial Sequence: Synthetic peptide
  Seed: SARSALILR
SLRSALILH

SEQ ID NO: 20870 - protein, 9 aa, Artificial Sequence
  Description of Artificial Sequence: Synthetic peptide
  Seed: SARSALILR
SLRSALILI

SEQ ID NO: 20871 - protein, 9 aa, Artificial Sequence
  Description of Artificial Sequence: Synthetic peptide
  Seed: SARSALILR
SLRSALILL

SEQ ID NO: 20872 - protein, 9 aa, Artificial Sequence
  Description of Artificial Sequence: Synthetic peptide
  Seed: SARSALILR
SLRSALILM

SEQ ID NO: 20873 - protein, 9 aa, Artificial Sequence
  Description of Artificial Sequence: Synthetic peptide
  Seed: SARSALILR
SGRSALILY

SEQ ID NO: 20874 - protein, 9 aa, Artificial Sequence
  Description of Artificial Sequence: Synthetic peptide
  Seed: SARSALILR
SLRSALILF

SEQ ID NO: 20875 - protein, 9 aa, Artificial Sequence
  Description of Artificial Sequence: Synthetic peptide
  Seed: SARSALILR
SLRSALILP

SEQ ID NO: 20876 - protein, 9 aa, Artificial Sequence
  Description of Artificial Sequence: Synthetic peptide
  Seed: SARSALILR
SLRSALILS

SEQ ID NO: 20877 - protein, 9 aa, Artificial Sequence
  Description of Artificial Sequence: Synthetic peptide
  Seed: SARSALILR
SLRSALILT

SEQ ID NO: 20878 - protein, 9 aa, Artificial Sequence
  Description of Artificial Sequence: Synthetic peptide
  Seed: SARSALILR
SLRSALILY

SEQ ID NO: 20879 - protein, 9 aa, Artificial Sequence
  Description of Artificial Sequence: Synthetic peptide
  Seed: SARSALILR
SLRSALILV

SEQ ID NO: 20880 - protein, 9 aa, Artificial Sequence
  Description of Artificial Sequence: Synthetic peptide
  Seed: SARSALILR
SKRSALILA

SEQ ID NO: 20881 - protein, 9 aa, Artificial Sequence
  Description of Artificial Sequence: Synthetic peptide
  Seed: SARSALILR
SKRSALILR

SEQ ID NO: 20882 - protein, 9 aa, Artificial Sequence
  Description of Artificial Sequence: Synthetic peptide
  Seed: SARSALILR
SKRSALILI

SEQ ID NO: 20883 - protein, 9 aa, Artificial Sequence
  Description of Artificial Sequence: Synthetic peptide
  Seed: SARSALILR
SIRSALILV

SEQ ID NO: 20884 - protein, 9 aa, Artificial Sequence
  Description of Artificial Sequence: Synthetic peptide
  Seed: SARSALILR
SIRSALILY

SEQ ID NO: 20885 - protein, 9 aa, Artificial Sequence
  Description of Artificial Sequence: Synthetic peptide
  Seed: SARSALILR
SIRSALILT

SEQ ID NO: 20886 - protein, 9 aa, Artificial Sequence
  Description of Artificial Sequence: Synthetic peptide
  Seed: SARSALILR
SIRSALILS

SEQ ID NO: 20887 - protein, 9 aa, Artificial Sequence
  Description of Artificial Sequence: Synthetic peptide
  Seed: SARSALILR
SGRSALILV

SEQ ID NO: 20888 - protein, 9 aa, Artificial Sequence
  Description of Artificial Sequence: Synthetic peptide
  Seed: SARSALILR
SHRSALILA

SEQ ID NO: 20889 - protein, 9 aa, Artificial Sequence
  Description of Artificial Sequence: Synthetic peptide
  Seed: SARSALILR
SHRSALILR

SEQ ID NO: 20890 - protein, 9 aa, Artificial Sequence
  Description of Artificial Sequence: Synthetic peptide
  Seed: SARSALILR
SHRSALILK

SEQ ID NO: 20891 - protein, 9 aa, Artificial Sequence
  Description of Artificial Sequence: Synthetic peptide
  Seed: SARSALILR
SHRSALILV

SEQ ID NO: 20892 - protein, 9 aa, Artificial Sequence
  Description of Artificial Sequence: Synthetic peptide
  Seed: SARSALILR
SIRSALILA

SEQ ID NO: 20893 - protein, 9 aa, Artificial Sequence
  Description of Artificial Sequence: Synthetic peptide
  Seed: SARSALILR
SIRSALILR

SEQ ID NO: 20894 - protein, 9 aa, Artificial Sequence
  Description of Artificial Sequence: Synthetic peptide
  Seed: SARSALILR
SIRSALILN

SEQ ID NO: 20895 - protein, 9 aa, Artificial Sequence
  Description of Artificial Sequence: Synthetic peptide
  Seed: SARSALILR
SIRSALILC

SEQ ID NO: 20896 - protein, 9 aa, Artificial Sequence
  Description of Artificial Sequence: Synthetic peptide
  Seed: SARSALILR
SIRSALILQ

SEQ ID NO: 20897 - protein, 9 aa, Artificial Sequence
  Description of Artificial Sequence: Synthetic peptide
  Seed: SARSALILR
SIRSALILE

SEQ ID NO: 20898 - protein, 9 aa, Artificial Sequence
  Description of Artificial Sequence: Synthetic peptide
  Seed: SARSALILR
SIRSALILG

SEQ ID NO: 20899 - protein, 9 aa, Artificial Sequence
  Description of Artificial Sequence: Synthetic peptide
  Seed: SARSALILR
SIRSALILH

SEQ ID NO: 20900 - protein, 9 aa, Artificial Sequence
  Description of Artificial Sequence: Synthetic peptide
  Seed: SARSALILR
SIRSALILI

SEQ ID NO: 20901 - protein, 9 aa, Artificial Sequence
  Description of Artificial Sequence: Synthetic peptide
  Seed: SARSALILR
SIRSALILL

SEQ ID NO: 20902 - protein, 9 aa, Artificial Sequence
  Description of Artificial Sequence: Synthetic peptide
  Seed: SARSALILR
SIRSALILK

SEQ ID NO: 20903 - protein, 9 aa, Artificial Sequence
  Description of Artificial Sequence: Synthetic peptide
  Seed: SARSALILR
SIRSALILM

SEQ ID NO: 20904 - protein, 9 aa, Artificial Sequence
  Description of Artificial Sequence: Synthetic peptide
  Seed: SARSALILR
SIRSALILF

SEQ ID NO: 20905 - protein, 9 aa, Artificial Sequence
  Description of Artificial Sequence: Synthetic peptide
  Seed: SARSALILR
SIRSALILP

SEQ ID NO: 20906 - protein, 9 aa, Artificial Sequence
  Description of Artificial Sequence: Synthetic peptide
  Seed: SARSALILR
SNRSALILS

SEQ ID NO: 20907 - protein, 9 aa, Artificial Sequence
  Description of Artificial Sequence: Synthetic peptide
  Seed: SARSALILR
SNRSALILM

SEQ ID NO: 20908 - protein, 9 aa, Artificial Sequence
  Description of Artificial Sequence: Synthetic peptide
  Seed: SARSALILR
SNRSALILK

SEQ ID NO: 20909 - protein, 9 aa, Artificial Sequence
  Description of Artificial Sequence: Synthetic peptide
  Seed: SARPEDVSF
SPRPEDVSM

SEQ ID NO: 20910 - protein, 9 aa, Artificial Sequence
  Description of Artificial Sequence: Synthetic peptide
  Seed: SARPEDVSF
SMRPEDVSM

SEQ ID NO: 20911 - protein, 9 aa, Artificial Sequence
  Description of Artificial Sequence: Synthetic peptide
  Seed: SARPEDVSF
SMRPEDVSF

SEQ ID NO: 20912 - protein, 9 aa, Artificial Sequence
  Description of Artificial Sequence: Synthetic peptide
  Seed: SARPEDVSF
SMRPEDVSW

SEQ ID NO: 20913 - protein, 9 aa, Artificial Sequence
  Description of Artificial Sequence: Synthetic peptide
  Seed: SARPEDVSF
SMRPEDVSY

SEQ ID NO: 20914 - protein, 9 aa, Artificial Sequence
  Description of Artificial Sequence: Synthetic peptide
  Seed: SARPEDVSF
SMRPEDVSV

SEQ ID NO: 20915 - protein, 9 aa, Artificial Sequence
  Description of Artificial Sequence: Synthetic peptide
  Seed: SARPEDVSF
SFRPEDVSM

SEQ ID NO: 20916 - protein, 9 aa, Artificial Sequence
  Description of Artificial Sequence: Synthetic peptide
  Seed: SARPEDVSF
SFRPEDVSF

SEQ ID NO: 20917 - protein, 9 aa, Artificial Sequence
  Description of Artificial Sequence: Synthetic peptide
  Seed: SARPEDVSF
SFRPEDVSY

SEQ ID NO: 20918 - protein, 9 aa, Artificial Sequence
  Description of Artificial Sequence: Synthetic peptide
  Seed: SARPEDVSF
SPRPEDVSL

SEQ ID NO: 20919 - protein, 9 aa, Artificial Sequence
  Description of Artificial Sequence: Synthetic peptide
  Seed: SARPEDVSF
SPRPEDVSF

SEQ ID NO: 20920 - protein, 9 aa, Artificial Sequence
  Description of Artificial Sequence: Synthetic peptide
  Seed: SARSALILR
SNRSALILL

SEQ ID NO: 20921 - protein, 9 aa, Artificial Sequence
  Description of Artificial Sequence: Synthetic peptide
  Seed: SARPEDVSF
SPRPEDVSW

SEQ ID NO: 20922 - protein, 9 aa, Artificial Sequence
  Description of Artificial Sequence: Synthetic peptide
  Seed: SARPEDVSF
SPRPEDVSY

SEQ ID NO: 20923 - protein, 9 aa, Artificial Sequence
  Description of Artificial Sequence: Synthetic peptide
  Seed: SARPEDVSF
SSRPEDVSI

SEQ ID NO: 20924 - protein, 9 aa, Artificial Sequence
  Description of Artificial Sequence: Synthetic peptide
  Seed: SARPEDVSF
SSRPEDVSL

SEQ ID NO: 20925 - protein, 9 aa, Artificial Sequence
  Description of Artificial Sequence: Synthetic peptide
  Seed: SARPEDVSF
SSRPEDVSM

SEQ ID NO: 20926 - protein, 9 aa, Artificial Sequence
  Description of Artificial Sequence: Synthetic peptide
  Seed: SARPEDVSF
SSRPEDVSW

SEQ ID NO: 20927 - protein, 9 aa, Artificial Sequence
  Description of Artificial Sequence: Synthetic peptide
  Seed: SARPEDVSF
SSRPEDVSY

SEQ ID NO: 20928 - protein, 9 aa, Artificial Sequence
  Description of Artificial Sequence: Synthetic peptide
  Seed: SARPEDVSF
SSRPEDVSV

SEQ ID NO: 20929 - protein, 9 aa, Artificial Sequence
  Description of Artificial Sequence: Synthetic peptide
  Seed: SARPEDVSF
SMRPEDVSL

SEQ ID NO: 20930 - protein, 9 aa, Artificial Sequence
  Description of Artificial Sequence: Synthetic peptide
  Seed: SARPEDVSF
SMRPEDVSI

SEQ ID NO: 20931 - protein, 9 aa, Artificial Sequence
  Description of Artificial Sequence: Synthetic peptide
  Seed: SARPEDVSF
SMRPEDVSH

SEQ ID NO: 20932 - protein, 9 aa, Artificial Sequence
  Description of Artificial Sequence: Synthetic peptide
  Seed: SARPEDVSF
SKRPEDVSY

SEQ ID NO: 20933 - protein, 9 aa, Artificial Sequence
  Description of Artificial Sequence: Synthetic peptide
  Seed: SARPEDVSF
SHRPEDVSL

SEQ ID NO: 20934 - protein, 9 aa, Artificial Sequence
  Description of Artificial Sequence: Synthetic peptide
  Seed: SARPEDVSF
SHRPEDVSM

SEQ ID NO: 20935 - protein, 9 aa, Artificial Sequence
  Description of Artificial Sequence: Synthetic peptide
  Seed: SARPEDVSF
SHRPEDVSF

SEQ ID NO: 20936 - protein, 9 aa, Artificial Sequence
  Description of Artificial Sequence: Synthetic peptide
  Seed: SARPEDVSF
SHRPEDVSY

SEQ ID NO: 20937 - protein, 9 aa, Artificial Sequence
  Description of Artificial Sequence: Synthetic peptide
  Seed: SARPEDVSF
SIRPEDVSM

SEQ ID NO: 20938 - protein, 9 aa, Artificial Sequence
  Description of Artificial Sequence: Synthetic peptide
  Seed: SARPEDVSF
SIRPEDVSF

SEQ ID NO: 20939 - protein, 9 aa, Artificial Sequence
  Description of Artificial Sequence: Synthetic peptide
  Seed: SARPEDVSF
SIRPEDVSW

SEQ ID NO: 20940 - protein, 9 aa, Artificial Sequence
  Description of Artificial Sequence: Synthetic peptide
  Seed: SARPEDVSF
SIRPEDVSY

SEQ ID NO: 20941 - protein, 9 aa, Artificial Sequence
  Description of Artificial Sequence: Synthetic peptide
  Seed: SARPEDVSF
SLRPEDVSH

SEQ ID NO: 20942 - protein, 9 aa, Artificial Sequence
  Description of Artificial Sequence: Synthetic peptide
  Seed: SARPEDVSF
SLRPEDVSL

SEQ ID NO: 20943 - protein, 9 aa, Artificial Sequence
  Description of Artificial Sequence: Synthetic peptide
  Seed: SARPEDVSF
SLRPEDVSM

SEQ ID NO: 20944 - protein, 9 aa, Artificial Sequence
  Description of Artificial Sequence: Synthetic peptide
  Seed: SARPEDVSF
SLRPEDVSF

SEQ ID NO: 20945 - protein, 9 aa, Artificial Sequence
  Description of Artificial Sequence: Synthetic peptide
  Seed: SARPEDVSF
SLRPEDVSW

SEQ ID NO: 20946 - protein, 9 aa, Artificial Sequence
  Description of Artificial Sequence: Synthetic peptide
  Seed: SARPEDVSF
SLRPEDVSY

SEQ ID NO: 20947 - protein, 9 aa, Artificial Sequence
  Description of Artificial Sequence: Synthetic peptide
  Seed: SARPEDVSF
SKRPEDVSI

SEQ ID NO: 20948 - protein, 9 aa, Artificial Sequence
  Description of Artificial Sequence: Synthetic peptide
  Seed: SARPEDVSF
SKRPEDVSL

SEQ ID NO: 20949 - protein, 9 aa, Artificial Sequence
  Description of Artificial Sequence: Synthetic peptide
  Seed: SARPEDVSF
SKRPEDVSM

SEQ ID NO: 20950 - protein, 9 aa, Artificial Sequence
  Description of Artificial Sequence: Synthetic peptide
  Seed: SARPEDVSF
SKRPEDVSF

SEQ ID NO: 20951 - protein, 9 aa, Artificial Sequence
  Description of Artificial Sequence: Synthetic peptide
  Seed: SARPEDVSF
SKRPEDVSW

SEQ ID NO: 20952 - protein, 9 aa, Artificial Sequence
  Description of Artificial Sequence: Synthetic peptide
  Seed: SARPEDVSF
STRPEDVSI

SEQ ID NO: 20953 - protein, 9 aa, Artificial Sequence
  Description of Artificial Sequence: Synthetic peptide
  Seed: SARPEDVSF
STRPEDVSL

SEQ ID NO: 20954 - protein, 9 aa, Artificial Sequence
  Description of Artificial Sequence: Synthetic peptide
  Seed: SARPEDVSF
STRPEDVSM

SEQ ID NO: 20955 - protein, 9 aa, Artificial Sequence
  Description of Artificial Sequence: Synthetic peptide
  Seed: SARSALILR
SARSALILQ

SEQ ID NO: 20956 - protein, 9 aa, Artificial Sequence
  Description of Artificial Sequence: Synthetic peptide
  Seed: SARSALILR
SARSALILG

SEQ ID NO: 20957 - protein, 9 aa, Artificial Sequence
  Description of Artificial Sequence: Synthetic peptide
  Seed: SARSALILR
SARSALILH

SEQ ID NO: 20958 - protein, 9 aa, Artificial Sequence
  Description of Artificial Sequence: Synthetic peptide
  Seed: SARSALILR
SARSALILI

SEQ ID NO: 20959 - protein, 9 aa, Artificial Sequence
  Description of Artificial Sequence: Synthetic peptide
  Seed: SARSALILR
SARSALILL

SEQ ID NO: 20960 - protein, 9 aa, Artificial Sequence
  Description of Artificial Sequence: Synthetic peptide
  Seed: SARSALILR
SARSALILK

SEQ ID NO: 20961 - protein, 9 aa, Artificial Sequence
  Description of Artificial Sequence: Synthetic peptide
  Seed: SARSALILR
SARSALILM

SEQ ID NO: 20962 - protein, 9 aa, Artificial Sequence
  Description of Artificial Sequence: Synthetic peptide
  Seed: SARSALILR
SARSALILF

SEQ ID NO: 20963 - protein, 9 aa, Artificial Sequence
  Description of Artificial Sequence: Synthetic peptide
  Seed: SARSALILR
SARSALILP

SEQ ID NO: 20964 - protein, 9 aa, Artificial Sequence
  Description of Artificial Sequence: Synthetic peptide
  Seed: SARSALILR
SARSALILS

SEQ ID NO: 20965 - protein, 9 aa, Artificial Sequence
  Description of Artificial Sequence: Synthetic peptide
  Seed: SARSALILR
SARSALILT

SEQ ID NO: 20966 - protein, 9 aa, Artificial Sequence
  Description of Artificial Sequence: Synthetic peptide
  Seed: SARSALILR
SARSALILY

SEQ ID NO: 20967 - protein, 9 aa, Artificial Sequence
  Description of Artificial Sequence: Synthetic peptide
  Seed: SARSALILR
SARSALILV

SEQ ID NO: 20968 - protein, 9 aa, Artificial Sequence
  Description of Artificial Sequence: Synthetic peptide
  Seed: SARSALILR
SRRSALILA

SEQ ID NO: 20969 - protein, 9 aa, Artificial Sequence
  Description of Artificial Sequence: Synthetic peptide
  Seed: SARSALILR
SRRSALILK

SEQ ID NO: 20970 - protein, 9 aa, Artificial Sequence
  Description of Artificial Sequence: Synthetic peptide
  Seed: SARSALILR
SRRSALILV

SEQ ID NO: 20971 - protein, 9 aa, Artificial Sequence
  Description of Artificial Sequence: Synthetic peptide
  Seed: SARSALILR
SNRSALILA

SEQ ID NO: 20972 - protein, 9 aa, Artificial Sequence
  Description of Artificial Sequence: Synthetic peptide
  Seed: SARSALILR
SNRSALILR

SEQ ID NO: 20973 - protein, 9 aa, Artificial Sequence
  Description of Artificial Sequence: Synthetic peptide
  Seed: SARSALILR
SNRSALILG

SEQ ID NO: 20974 - protein, 9 aa, Artificial Sequence
  Description of Artificial Sequence: Synthetic peptide
  Seed: SARSALILR
SNRSALILI

SEQ ID NO: 20975 - protein, 9 aa, Artificial Sequence
  Description of Artificial Sequence: Synthetic peptide
  Seed: SARSALILR
SARSALILE

SEQ ID NO: 20976 - protein, 9 aa, Artificial Sequence
  Description of Artificial Sequence: Synthetic peptide
  Seed: SARSALILR
SARSALILC

SEQ ID NO: 20977 - protein, 9 aa, Artificial Sequence
  Description of Artificial Sequence: Synthetic peptide
  Seed: SARPEDVSF
STRPEDVSF

SEQ ID NO: 20978 - protein, 9 aa, Artificial Sequence
  Description of Artificial Sequence: Synthetic peptide
  Seed: SARSALILR
SARSALILN

SEQ ID NO: 20979 - protein, 9 aa, Artificial Sequence
  Description of Artificial Sequence: Synthetic peptide
  Seed: SARPEDVSF
STRPEDVSW

SEQ ID NO: 20980 - protein, 9 aa, Artificial Sequence
  Description of Artificial Sequence: Synthetic peptide
  Seed: SARPEDVSF
STRPEDVSY

SEQ ID NO: 20981 - protein, 9 aa, Artificial Sequence
  Description of Artificial Sequence: Synthetic peptide
  Seed: SARPEDVSF
SWRPEDVSF

SEQ ID NO: 20982 - protein, 9 aa, Artificial Sequence
  Description of Artificial Sequence: Synthetic peptide
  Seed: SARPEDVSF
SYRPEDVSM

SEQ ID NO: 20983 - protein, 9 aa, Artificial Sequence
  Description of Artificial Sequence: Synthetic peptide
  Seed: SARPEDVSF
SYRPEDVSF

SEQ ID NO: 20984 - protein, 9 aa, Artificial Sequence
  Description of Artificial Sequence: Synthetic peptide
  Seed: SARPEDVSF
SYRPEDVSY

SEQ ID NO: 20985 - protein, 9 aa, Artificial Sequence
  Description of Artificial Sequence: Synthetic peptide
  Seed: SARPEDVSF
SVRPEDVSL

SEQ ID NO: 20986 - protein, 9 aa, Artificial Sequence
  Description of Artificial Sequence: Synthetic peptide
  Seed: SARPEDVSF
SVRPEDVSM

SEQ ID NO: 20987 - protein, 9 aa, Artificial Sequence
  Description of Artificial Sequence: Synthetic peptide
  Seed: SARPEDVSF
SVRPEDVSF

SEQ ID NO: 20988 - protein, 9 aa, Artificial Sequence
  Description of Artificial Sequence: Synthetic peptide
  Seed: SARPEDVSF
SVRPEDVSW

SEQ ID NO: 20989 - protein, 9 aa, Artificial Sequence
  Description of Artificial Sequence: Synthetic peptide
  Seed: SARPEDVSF
SVRPEDVSY

SEQ ID NO: 20990 - protein, 8 aa, Artificial Sequence
  Description of Artificial Sequence: Synthetic peptide
  Seed: SARSALIL
SARSALIM

SEQ ID NO: 20991 - protein, 8 aa, Artificial Sequence
  Description of Artificial Sequence: Synthetic peptide
  Seed: SARSALIL
SARSALIF

SEQ ID NO: 20992 - protein, 8 aa, Artificial Sequence
  Description of Artificial Sequence: Synthetic peptide
  Seed: SARSALIL
SARSALIY

SEQ ID NO: 20993 - protein, 8 aa, Artificial Sequence
  Description of Artificial Sequence: Synthetic peptide
  Seed: SARSALIL
SSRSALIL

SEQ ID NO: 20994 - protein, 8 aa, Artificial Sequence
  Description of Artificial Sequence: Synthetic peptide
  Seed: SARSALIL
SSRSALIM

SEQ ID NO: 20995 - protein, 8 aa, Artificial Sequence
  Description of Artificial Sequence: Synthetic peptide
  Seed: SARSALIL
SSRSALIF

SEQ ID NO: 20996 - protein, 8 aa, Artificial Sequence
  Description of Artificial Sequence: Synthetic peptide
  Seed: SARSALIL
SSRSALIY

SEQ ID NO: 20997 - protein, 9 aa, Artificial Sequence
  Description of Artificial Sequence: Synthetic peptide
  Seed: SARSALILR
SARSALILA

SEQ ID NO: 20998 - protein, 9 aa, Artificial Sequence
  Description of Artificial Sequence: Synthetic peptide
  Seed: SAYERMCNI
SSYERMCNY

SEQ ID NO: 20999 - protein, 9 aa, Artificial Sequence
  Description of Artificial Sequence: Synthetic peptide
  Seed: SAYERMCNI
STYERMCNA

SEQ ID NO: 21000 - protein, 11 aa, Artificial Sequence
  Description of Artificial Sequence: Synthetic peptide
  Seed: SAGQISVQPTF
SQGQISVQPTM

SEQ ID NO: 21001 - protein, 11 aa, Artificial Sequence
  Description of Artificial Sequence: Synthetic peptide
  Seed: SFIRGTKVSPR
SAIRGTKVSPR

SEQ ID NO: 21002 - protein, 11 aa, Artificial Sequence
  Description of Artificial Sequence: Synthetic peptide
  Seed: SFDMSNEGSYF
SSDMSNEGSYY

SEQ ID NO: 21003 - protein, 11 aa, Artificial Sequence
  Description of Artificial Sequence: Synthetic peptide
  Seed: SFDMSNEGSYF
STDMSNEGSYF

SEQ ID NO: 21004 - protein, 11 aa, Artificial Sequence
  Description of Artificial Sequence: Synthetic peptide
  Seed: SFDMSNEGSYF
STDMSNEGSYY

SEQ ID NO: 21005 - protein, 11 aa, Artificial Sequence
  Description of Artificial Sequence: Synthetic peptide
  Seed: SFDMSNEGSYF
SWDMSNEGSYF

SEQ ID NO: 21006 - protein, 11 aa, Artificial Sequence
  Description of Artificial Sequence: Synthetic peptide
  Seed: SFDMSNEGSYF
SWDMSNEGSYY

SEQ ID NO: 21007 - protein, 11 aa, Artificial Sequence
  Description of Artificial Sequence: Synthetic peptide
  Seed: SFDMSNEGSYF
SYDMSNEGSYF

SEQ ID NO: 21008 - protein, 11 aa, Artificial Sequence
  Description of Artificial Sequence: Synthetic peptide
  Seed: SFDMSNEGSYF
SYDMSNEGSYY

SEQ ID NO: 21009 - protein, 11 aa, Artificial Sequence
  Description of Artificial Sequence: Synthetic peptide
  Seed: SFDMSNEGSYF
SVDMSNEGSYF

SEQ ID NO: 21010 - protein, 11 aa, Artificial Sequence
  Description of Artificial Sequence: Synthetic peptide
  Seed: SFDMSNEGSYF
SVDMSNEGSYY

SEQ ID NO: 21011 - protein, 11 aa, Artificial Sequence
  Description of Artificial Sequence: Synthetic peptide
  Seed: SFIRGTKVSPR
SRIRGTKVSPR

SEQ ID NO: 21012 - protein, 11 aa, Artificial Sequence
  Description of Artificial Sequence: Synthetic peptide
  Seed: SFIRGTKVSPR
STIRGTKVSPK

SEQ ID NO: 21013 - protein, 11 aa, Artificial Sequence
  Description of Artificial Sequence: Synthetic peptide
  Seed: SFIRGTKVSPR
SNIRGTKVSPR

SEQ ID NO: 21014 - protein, 11 aa, Artificial Sequence
  Description of Artificial Sequence: Synthetic peptide
  Seed: SFIRGTKVSPR
SQIRGTKVSPR

SEQ ID NO: 21015 - protein, 11 aa, Artificial Sequence
  Description of Artificial Sequence: Synthetic peptide
  Seed: SFIRGTKVSPR
SGIRGTKVSPR

SEQ ID NO: 21016 - protein, 11 aa, Artificial Sequence
  Description of Artificial Sequence: Synthetic peptide
  Seed: SFIRGTKVSPR
SIIRGTKVSPR

SEQ ID NO: 21017 - protein, 11 aa, Artificial Sequence
  Description of Artificial Sequence: Synthetic peptide
  Seed: SFIRGTKVSPR
SLIRGTKVSPR

SEQ ID NO: 21018 - protein, 11 aa, Artificial Sequence
  Description of Artificial Sequence: Synthetic peptide
  Seed: SFIRGTKVSPR
SMIRGTKVSPR

SEQ ID NO: 21019 - protein, 11 aa, Artificial Sequence
  Description of Artificial Sequence: Synthetic peptide
  Seed: SFIRGTKVSPR
SMIRGTKVSPK

SEQ ID NO: 21020 - protein, 11 aa, Artificial Sequence
  Description of Artificial Sequence: Synthetic peptide
  Seed: SFIRGTKVSPR
SFIRGTKVSPK

SEQ ID NO: 21021 - protein, 11 aa, Artificial Sequence
  Description of Artificial Sequence: Synthetic peptide
  Seed: SFIRGTKVSPR
SSIRGTKVSPR

SEQ ID NO: 21022 - protein, 11 aa, Artificial Sequence
  Description of Artificial Sequence: Synthetic peptide
  Seed: SFDMSNEGSYF
SSDMSNEGSYF

SEQ ID NO: 21023 - protein, 11 aa, Artificial Sequence
  Description of Artificial Sequence: Synthetic peptide
  Seed: SFDMSNEGSYF
SPDMSNEGSYY

SEQ ID NO: 21024 - protein, 11 aa, Artificial Sequence
  Description of Artificial Sequence: Synthetic peptide
  Seed: SFDMSNEGSYF
SPDMSNEGSYF

SEQ ID NO: 21025 - protein, 11 aa, Artificial Sequence
  Description of Artificial Sequence: Synthetic peptide
  Seed: SFDMSNEGSYF
SFDMSNEGSYY

SEQ ID NO: 21026 - protein, 11 aa, Artificial Sequence
  Description of Artificial Sequence: Synthetic peptide
  Seed: SFDMSNEGSYF
SCDMSNEGSYF

SEQ ID NO: 21027 - protein, 11 aa, Artificial Sequence
  Description of Artificial Sequence: Synthetic peptide
  Seed: SFDMSNEGSYF
SCDMSNEGSYY

SEQ ID NO: 21028 - protein, 11 aa, Artificial Sequence
  Description of Artificial Sequence: Synthetic peptide
  Seed: SFDMSNEGSYF
SQDMSNEGSYM

SEQ ID NO: 21029 - protein, 11 aa, Artificial Sequence
  Description of Artificial Sequence: Synthetic peptide
  Seed: SFDMSNEGSYF
SQDMSNEGSYF

SEQ ID NO: 21030 - protein, 11 aa, Artificial Sequence
  Description of Artificial Sequence: Synthetic peptide
  Seed: SFDMSNEGSYF
SQDMSNEGSYY

SEQ ID NO: 21031 - protein, 11 aa, Artificial Sequence
  Description of Artificial Sequence: Synthetic peptide
  Seed: SFDMSNEGSYF
SEDMSNEGSYF

SEQ ID NO: 21032 - protein, 11 aa, Artificial Sequence
  Description of Artificial Sequence: Synthetic peptide
  Seed: SFDMSNEGSYF
SEDMSNEGSYY

SEQ ID NO: 21033 - protein, 11 aa, Artificial Sequence
  Description of Artificial Sequence: Synthetic peptide
  Seed: SFDMSNEGSYF
SGDMSNEGSYF

SEQ ID NO: 21034 - protein, 11 aa, Artificial Sequence
  Description of Artificial Sequence: Synthetic peptide
  Seed: SFDMSNEGSYF
SGDMSNEGSYY

SEQ ID NO: 21035 - protein, 11 aa, Artificial Sequence
  Description of Artificial Sequence: Synthetic peptide
  Seed: SFDMSNEGSYF
SHDMSNEGSYF

SEQ ID NO: 21036 - protein, 11 aa, Artificial Sequence
  Description of Artificial Sequence: Synthetic peptide
  Seed: SFDMSNEGSYF
SHDMSNEGSYY

SEQ ID NO: 21037 - protein, 11 aa, Artificial Sequence
  Description of Artificial Sequence: Synthetic peptide
  Seed: SFDMSNEGSYF
SIDMSNEGSYF

SEQ ID NO: 21038 - protein, 11 aa, Artificial Sequence
  Description of Artificial Sequence: Synthetic peptide
  Seed: SFDMSNEGSYF
SIDMSNEGSYY

SEQ ID NO: 21039 - protein, 11 aa, Artificial Sequence
  Description of Artificial Sequence: Synthetic peptide
  Seed: SFDMSNEGSYF
SLDMSNEGSYY

SEQ ID NO: 21040 - protein, 11 aa, Artificial Sequence
  Description of Artificial Sequence: Synthetic peptide
  Seed: SFDMSNEGSYF
SKDMSNEGSYF

SEQ ID NO: 21041 - protein, 11 aa, Artificial Sequence
  Description of Artificial Sequence: Synthetic peptide
  Seed: SFDMSNEGSYF
SKDMSNEGSYY

SEQ ID NO: 21042 - protein, 11 aa, Artificial Sequence
  Description of Artificial Sequence: Synthetic peptide
  Seed: SFDMSNEGSYF
SMDMSNEGSYF

SEQ ID NO: 21043 - protein, 11 aa, Artificial Sequence
  Description of Artificial Sequence: Synthetic peptide
  Seed: SFDMSNEGSYF
SMDMSNEGSYY

SEQ ID NO: 21044 - protein, 11 aa, Artificial Sequence
  Description of Artificial Sequence: Synthetic peptide
  Seed: SFIRGTKVSPR
STIRGTKVSPR

SEQ ID NO: 21045 - protein, 11 aa, Artificial Sequence
  Description of Artificial Sequence: Synthetic peptide
  Seed: SFIRGTKVSPR
SWIRGTKVSPR

SEQ ID NO: 21046 - protein, 11 aa, Artificial Sequence
  Description of Artificial Sequence: Synthetic peptide
  Seed: SFDMSNEGSYF
SDDMSNEGSYF

SEQ ID NO: 21047 - protein, 9 aa, Artificial Sequence
  Description of Artificial Sequence: Synthetic peptide
  Seed: SFIRGTRVV
SMIRGTRVV

SEQ ID NO: 21048 - protein, 9 aa, Artificial Sequence
  Description of Artificial Sequence: Synthetic peptide
  Seed: SFIRGTRVV
SLIRGTRVL

SEQ ID NO: 21049 - protein, 9 aa, Artificial Sequence
  Description of Artificial Sequence: Synthetic peptide
  Seed: SFIRGTRVV
SLIRGTRVM

SEQ ID NO: 21050 - protein, 9 aa, Artificial Sequence
  Description of Artificial Sequence: Synthetic peptide
  Seed: SFIRGTRVV
SLIRGTRVF

SEQ ID NO: 21051 - protein, 9 aa, Artificial Sequence
  Description of Artificial Sequence: Synthetic peptide
  Seed: SFIRGTRVV
SLIRGTRVY

SEQ ID NO: 21052 - protein, 9 aa, Artificial Sequence
  Description of Artificial Sequence: Synthetic peptide
  Seed: SFIRGTRVV
SMIRGTRVI

SEQ ID NO: 21053 - protein, 9 aa, Artificial Sequence
  Description of Artificial Sequence: Synthetic peptide
  Seed: SFIRGTRVV
SMIRGTRVL

SEQ ID NO: 21054 - protein, 9 aa, Artificial Sequence
  Description of Artificial Sequence: Synthetic peptide
  Seed: SFIRGTRVV
SMIRGTRVM

SEQ ID NO: 21055 - protein, 9 aa, Artificial Sequence
  Description of Artificial Sequence: Synthetic peptide
  Seed: SFIRGTRVV
SMIRGTRVF

SEQ ID NO: 21056 - protein, 9 aa, Artificial Sequence
  Description of Artificial Sequence: Synthetic peptide
  Seed: SFIRGTRVV
SMIRGTRVY

SEQ ID NO: 21057 - protein, 11 aa, Artificial Sequence
  Description of Artificial Sequence: Synthetic peptide
  Seed: SFIRGTKVSPR
SWIRGTKVSPK

SEQ ID NO: 21058 - protein, 9 aa, Artificial Sequence
  Description of Artificial Sequence: Synthetic peptide
  Seed: SFIRGTRVV
SFIRGTRVC

SEQ ID NO: 21059 - protein, 9 aa, Artificial Sequence
  Description of Artificial Sequence: Synthetic peptide
  Seed: SFIRGTRVV
SFIRGTRVH

SEQ ID NO: 21060 - protein, 9 aa, Artificial Sequence
  Description of Artificial Sequence: Synthetic peptide
  Seed: SFIRGTRVV
SFIRGTRVM

SEQ ID NO: 21061 - protein, 9 aa, Artificial Sequence
  Description of Artificial Sequence: Synthetic peptide
  Seed: SFIRGTRVV
SFIRGTRVF

SEQ ID NO: 21062 - protein, 9 aa, Artificial Sequence
  Description of Artificial Sequence: Synthetic peptide
  Seed: SFIRGTRVV
SFIRGTRVT

SEQ ID NO: 21063 - protein, 9 aa, Artificial Sequence
  Description of Artificial Sequence: Synthetic peptide
  Seed: SFIRGTRVV
SFIRGTRVW

SEQ ID NO: 21064 - protein, 9 aa, Artificial Sequence
  Description of Artificial Sequence: Synthetic peptide
  Seed: SFIRGTRVV
SFIRGTRVY

SEQ ID NO: 21065 - protein, 9 aa, Artificial Sequence
  Description of Artificial Sequence: Synthetic peptide
  Seed: SFIRGTRVV
SIIRGTRVY

SEQ ID NO: 21066 - protein, 9 aa, Artificial Sequence
  Description of Artificial Sequence: Synthetic peptide
  Seed: SFIRGTRVV
SIIRGTRVF

SEQ ID NO: 21067 - protein, 9 aa, Artificial Sequence
  Description of Artificial Sequence: Synthetic peptide
  Seed: SFIRGTRVV
SIIRGTRVM

SEQ ID NO: 21068 - protein, 9 aa, Artificial Sequence
  Description of Artificial Sequence: Synthetic peptide
  Seed: SFIRGTRVV
SIIRGTRVL

SEQ ID NO: 21069 - protein, 11 aa, Artificial Sequence
  Description of Artificial Sequence: Synthetic peptide
  Seed: SFIRGTKVSPR
SYIRGTKVSPR

SEQ ID NO: 21070 - protein, 11 aa, Artificial Sequence
  Description of Artificial Sequence: Synthetic peptide
  Seed: SFIRGTKVSPR
SYIRGTKVSPK

SEQ ID NO: 21071 - protein, 11 aa, Artificial Sequence
  Description of Artificial Sequence: Synthetic peptide
  Seed: SFIRGTKVSPR
SVIRGTKVSPR

SEQ ID NO: 21072 - protein, 9 aa, Artificial Sequence
  Description of Artificial Sequence: Synthetic peptide
  Seed: SFIRGTRVV
SAIRGTRVL

SEQ ID NO: 21073 - protein, 9 aa, Artificial Sequence
  Description of Artificial Sequence: Synthetic peptide
  Seed: SFIRGTRVV
SAIRGTRVM

SEQ ID NO: 21074 - protein, 9 aa, Artificial Sequence
  Description of Artificial Sequence: Synthetic peptide
  Seed: SFIRGTRVV
SAIRGTRVF

SEQ ID NO: 21075 - protein, 9 aa, Artificial Sequence
  Description of Artificial Sequence: Synthetic peptide
  Seed: SFIRGTRVV
SAIRGTRVY

SEQ ID NO: 21076 - protein, 9 aa, Artificial Sequence
  Description of Artificial Sequence: Synthetic peptide
  Seed: SFIRGTRVV
SRIRGTRVL

SEQ ID NO: 21077 - protein, 9 aa, Artificial Sequence
  Description of Artificial Sequence: Synthetic peptide
  Seed: SFIRGTRVV
SRIRGTRVM

SEQ ID NO: 21078 - protein, 9 aa, Artificial Sequence
  Description of Artificial Sequence: Synthetic peptide
  Seed: SFIRGTRVV
SRIRGTRVF

SEQ ID NO: 21079 - protein, 9 aa, Artificial Sequence
  Description of Artificial Sequence: Synthetic peptide
  Seed: SFIRGTRVV
SRIRGTRVY

SEQ ID NO: 21080 - protein, 9 aa, Artificial Sequence
  Description of Artificial Sequence: Synthetic peptide
  Seed: SFIRGTRVV
SQIRGTRVL

SEQ ID NO: 21081 - protein, 9 aa, Artificial Sequence
  Description of Artificial Sequence: Synthetic peptide
  Seed: SFIRGTRVV
SQIRGTRVM

SEQ ID NO: 21082 - protein, 9 aa, Artificial Sequence
  Description of Artificial Sequence: Synthetic peptide
  Seed: SFIRGTRVV
SQIRGTRVF

SEQ ID NO: 21083 - protein, 9 aa, Artificial Sequence
  Description of Artificial Sequence: Synthetic peptide
  Seed: SFIRGTRVV
SQIRGTRVY

SEQ ID NO: 21084 - protein, 9 aa, Artificial Sequence
  Description of Artificial Sequence: Synthetic peptide
  Seed: SFIRGTRVV
SHIRGTRVL

SEQ ID NO: 21085 - protein, 9 aa, Artificial Sequence
  Description of Artificial Sequence: Synthetic peptide
  Seed: SFIRGTRVV
SHIRGTRVM

SEQ ID NO: 21086 - protein, 9 aa, Artificial Sequence
  Description of Artificial Sequence: Synthetic peptide
  Seed: SFIRGTRVV
SHIRGTRVF

SEQ ID NO: 21087 - protein, 9 aa, Artificial Sequence
  Description of Artificial Sequence: Synthetic peptide
  Seed: SFIRGTRVV
SHIRGTRVY

SEQ ID NO: 21088 - protein, 11 aa, Artificial Sequence
  Description of Artificial Sequence: Synthetic peptide
  Seed: SFDMSNEGSYF
SDDMSNEGSYY

SEQ ID NO: 21089 - protein, 11 aa, Artificial Sequence
  Description of Artificial Sequence: Synthetic peptide
  Seed: SFDMSNEGSYF
SNDMSNEGSYY

SEQ ID NO: 21090 - protein, 9 aa, Artificial Sequence
  Description of Artificial Sequence: Synthetic peptide
  Seed: SAYERMCNI
STYERMCNC

SEQ ID NO: 21091 - protein, 11 aa, Artificial Sequence
  Description of Artificial Sequence: Synthetic peptide
  Seed: SFDMNNEGSYF
SDDMNNEGSYY

SEQ ID NO: 21092 - protein, 10 aa, Artificial Sequence
  Description of Artificial Sequence: Synthetic peptide
  Seed: SFDMNNEGSY
SYDMNNEGSY

SEQ ID NO: 21093 - protein, 10 aa, Artificial Sequence
  Description of Artificial Sequence: Synthetic peptide
  Seed: SFDMNNEGSY
SVDMNNEGSY

SEQ ID NO: 21094 - protein, 11 aa, Artificial Sequence
  Description of Artificial Sequence: Synthetic peptide
  Seed: SFDMNNEGSYF
SADMNNEGSYF

SEQ ID NO: 21095 - protein, 11 aa, Artificial Sequence
  Description of Artificial Sequence: Synthetic peptide
  Seed: SFDMNNEGSYF
SADMNNEGSYY

SEQ ID NO: 21096 - protein, 11 aa, Artificial Sequence
  Description of Artificial Sequence: Synthetic peptide
  Seed: SFDMNNEGSYF
SRDMNNEGSYF

SEQ ID NO: 21097 - protein, 11 aa, Artificial Sequence
  Description of Artificial Sequence: Synthetic peptide
  Seed: SFDMNNEGSYF
SRDMNNEGSYY

SEQ ID NO: 21098 - protein, 11 aa, Artificial Sequence
  Description of Artificial Sequence: Synthetic peptide
  Seed: SFDMNNEGSYF
SNDMNNEGSYF

SEQ ID NO: 21099 - protein, 11 aa, Artificial Sequence
  Description of Artificial Sequence: Synthetic peptide
  Seed: SFDMNNEGSYF
SNDMNNEGSYY

SEQ ID NO: 21100 - protein, 11 aa, Artificial Sequence
  Description of Artificial Sequence: Synthetic peptide
  Seed: SFDMNNEGSYF
SDDMNNEGSYF

SEQ ID NO: 21101 - protein, 11 aa, Artificial Sequence
  Description of Artificial Sequence: Synthetic peptide
  Seed: SFDMNNEGSYF
SCDMNNEGSYF

SEQ ID NO: 21102 - protein, 11 aa, Artificial Sequence
  Description of Artificial Sequence: Synthetic peptide
  Seed: SFDMNNEGSYF
SIDMNNEGSYF

SEQ ID NO: 21103 - protein, 11 aa, Artificial Sequence
  Description of Artificial Sequence: Synthetic peptide
  Seed: SFDMNNEGSYF
SCDMNNEGSYY

SEQ ID NO: 21104 - protein, 11 aa, Artificial Sequence
  Description of Artificial Sequence: Synthetic peptide
  Seed: SFDMNNEGSYF
SQDMNNEGSYM

SEQ ID NO: 21105 - protein, 11 aa, Artificial Sequence
  Description of Artificial Sequence: Synthetic peptide
  Seed: SFDMNNEGSYF
SQDMNNEGSYF

SEQ ID NO: 21106 - protein, 11 aa, Artificial Sequence
  Description of Artificial Sequence: Synthetic peptide
  Seed: SFDMNNEGSYF
SQDMNNEGSYY

SEQ ID NO: 21107 - protein, 11 aa, Artificial Sequence
  Description of Artificial Sequence: Synthetic peptide
  Seed: SFDMNNEGSYF
SEDMNNEGSYF

SEQ ID NO: 21108 - protein, 11 aa, Artificial Sequence
  Description of Artificial Sequence: Synthetic peptide
  Seed: SFDMNNEGSYF
SEDMNNEGSYY

SEQ ID NO: 21109 - protein, 11 aa, Artificial Sequence
  Description of Artificial Sequence: Synthetic peptide
  Seed: SFDMNNEGSYF
SGDMNNEGSYF

SEQ ID NO: 21110 - protein, 11 aa, Artificial Sequence
  Description of Artificial Sequence: Synthetic peptide
  Seed: SFDMNNEGSYF
SGDMNNEGSYY

SEQ ID NO: 21111 - protein, 11 aa, Artificial Sequence
  Description of Artificial Sequence: Synthetic peptide
  Seed: SFDMNNEGSYF
SHDMNNEGSYF

SEQ ID NO: 21112 - protein, 10 aa, Artificial Sequence
  Description of Artificial Sequence: Synthetic peptide
  Seed: SFDMNNEGSY
SYDMNNEGSF

SEQ ID NO: 21113 - protein, 10 aa, Artificial Sequence
  Description of Artificial Sequence: Synthetic peptide
  Seed: SFDMNNEGSY
SYDMNNEGSM

SEQ ID NO: 21114 - protein, 10 aa, Artificial Sequence
  Description of Artificial Sequence: Synthetic peptide
  Seed: SFDMNNEGSY
SYDMNNEGSL

SEQ ID NO: 21115 - protein, 10 aa, Artificial Sequence
  Description of Artificial Sequence: Synthetic peptide
  Seed: SFDMNNEGSY
SWDMNNEGSY

SEQ ID NO: 21116 - protein, 10 aa, Artificial Sequence
  Description of Artificial Sequence: Synthetic peptide
  Seed: SDMRAEIIRM
SYMRAEIIRI

SEQ ID NO: 21117 - protein, 10 aa, Artificial Sequence
  Description of Artificial Sequence: Synthetic peptide
  Seed: SDMRAEIIRM
SYMRAEIIRL

SEQ ID NO: 21118 - protein, 10 aa, Artificial Sequence
  Description of Artificial Sequence: Synthetic peptide
  Seed: SDMRAEIIRM
SYMRAEIIRV

SEQ ID NO: 21119 - protein, 10 aa, Artificial Sequence
  Description of Artificial Sequence: Synthetic peptide
  Seed: SDMRAEIIRM
SVMRAEIIRA

SEQ ID NO: 21120 - protein, 10 aa, Artificial Sequence
  Description of Artificial Sequence: Synthetic peptide
  Seed: SDMRAEIIRM
SVMRAEIIRI

SEQ ID NO: 21121 - protein, 10 aa, Artificial Sequence
  Description of Artificial Sequence: Synthetic peptide
  Seed: SDMRAEIIRM
SVMRAEIIRL

SEQ ID NO: 21122 - protein, 10 aa, Artificial Sequence
  Description of Artificial Sequence: Synthetic peptide
  Seed: SDMRAEIIRM
SVMRAEIIRV

SEQ ID NO: 21123 - protein, 10 aa, Artificial Sequence
  Description of Artificial Sequence: Synthetic peptide
  Seed: SFDMNNEGSY
SADMNNEGSY

SEQ ID NO: 21124 - protein, 10 aa, Artificial Sequence
  Description of Artificial Sequence: Synthetic peptide
  Seed: SFDMNNEGSY
SNDMNNEGSY

SEQ ID NO: 21125 - protein, 10 aa, Artificial Sequence
  Description of Artificial Sequence: Synthetic peptide
  Seed: SFDMNNEGSY
SQDMNNEGSY

SEQ ID NO: 21126 - protein, 10 aa, Artificial Sequence
  Description of Artificial Sequence: Synthetic peptide
  Seed: SFDMNNEGSY
SGDMNNEGSY

SEQ ID NO: 21127 - protein, 10 aa, Artificial Sequence
  Description of Artificial Sequence: Synthetic peptide
  Seed: SFDMNNEGSY
SIDMNNEGSY

SEQ ID NO: 21128 - protein, 10 aa, Artificial Sequence
  Description of Artificial Sequence: Synthetic peptide
  Seed: SFDMNNEGSY
SLDMNNEGSY

SEQ ID NO: 21129 - protein, 10 aa, Artificial Sequence
  Description of Artificial Sequence: Synthetic peptide
  Seed: SFDMNNEGSY
SMDMNNEGSY

SEQ ID NO: 21130 - protein, 10 aa, Artificial Sequence
  Description of Artificial Sequence: Synthetic peptide
  Seed: SFDMNNEGSY
SFDMNNEGSL

SEQ ID NO: 21131 - protein, 10 aa, Artificial Sequence
  Description of Artificial Sequence: Synthetic peptide
  Seed: SFDMNNEGSY
SFDMNNEGSM

SEQ ID NO: 21132 - protein, 10 aa, Artificial Sequence
  Description of Artificial Sequence: Synthetic peptide
  Seed: SFDMNNEGSY
SFDMNNEGSF

SEQ ID NO: 21133 - protein, 10 aa, Artificial Sequence
  Description of Artificial Sequence: Synthetic peptide
  Seed: SFDMNNEGSY
SSDMNNEGSY

SEQ ID NO: 21134 - protein, 10 aa, Artificial Sequence
  Description of Artificial Sequence: Synthetic peptide
  Seed: SFDMNNEGSY
STDMNNEGSY

SEQ ID NO: 21135 - protein, 11 aa, Artificial Sequence
  Description of Artificial Sequence: Synthetic peptide
  Seed: SFDMNNEGSYF
SHDMNNEGSYY

SEQ ID NO: 21136 - protein, 11 aa, Artificial Sequence
  Description of Artificial Sequence: Synthetic peptide
  Seed: SFDMNNEGSYF
SIDMNNEGSYY

SEQ ID NO: 21137 - protein, 11 aa, Artificial Sequence
  Description of Artificial Sequence: Synthetic peptide
  Seed: SFDMSNEGSYF
SNDMSNEGSYF

SEQ ID NO: 21138 - protein, 10 aa, Artificial Sequence
  Description of Artificial Sequence: Synthetic peptide
  Seed: SFDMSNEGSY
SWDMSNEGSF

SEQ ID NO: 21139 - protein, 10 aa, Artificial Sequence
  Description of Artificial Sequence: Synthetic peptide
  Seed: SFDMSNEGSY
SHDMSNEGSY

SEQ ID NO: 21140 - protein, 10 aa, Artificial Sequence
  Description of Artificial Sequence: Synthetic peptide
  Seed: SFDMSNEGSY
SIDMSNEGSY

SEQ ID NO: 21141 - protein, 10 aa, Artificial Sequence
  Description of Artificial Sequence: Synthetic peptide
  Seed: SFDMSNEGSY
SMDMSNEGSY

SEQ ID NO: 21142 - protein, 10 aa, Artificial Sequence
  Description of Artificial Sequence: Synthetic peptide
  Seed: SFDMSNEGSY
SFDMSNEGSL

SEQ ID NO: 21143 - protein, 10 aa, Artificial Sequence
  Description of Artificial Sequence: Synthetic peptide
  Seed: SFDMSNEGSY
SFDMSNEGSM

SEQ ID NO: 21144 - protein, 10 aa, Artificial Sequence
  Description of Artificial Sequence: Synthetic peptide
  Seed: SFDMSNEGSY
SFDMSNEGSF

SEQ ID NO: 21145 - protein, 10 aa, Artificial Sequence
  Description of Artificial Sequence: Synthetic peptide
  Seed: SFDMSNEGSY
SSDMSNEGSY

SEQ ID NO: 21146 - protein, 10 aa, Artificial Sequence
  Description of Artificial Sequence: Synthetic peptide
  Seed: SFDMSNEGSY
STDMSNEGSY

SEQ ID NO: 21147 - protein, 10 aa, Artificial Sequence
  Description of Artificial Sequence: Synthetic peptide
  Seed: SFDMSNEGSY
SWDMSNEGSY

SEQ ID NO: 21148 - protein, 11 aa, Artificial Sequence
  Description of Artificial Sequence: Synthetic peptide
  Seed: SFDMNNEGSYF
SLDMNNEGSYF

SEQ ID NO: 21149 - protein, 10 aa, Artificial Sequence
  Description of Artificial Sequence: Synthetic peptide
  Seed: SFDMSNEGSY
SYDMSNEGSL

SEQ ID NO: 21150 - protein, 10 aa, Artificial Sequence
  Description of Artificial Sequence: Synthetic peptide
  Seed: SFDMSNEGSY
SYDMSNEGSM

SEQ ID NO: 21151 - protein, 10 aa, Artificial Sequence
  Description of Artificial Sequence: Synthetic peptide
  Seed: SFDMSNEGSY
SYDMSNEGSF

SEQ ID NO: 21152 - protein, 10 aa, Artificial Sequence
  Description of Artificial Sequence: Synthetic peptide
  Seed: SFDMSNEGSY
SYDMSNEGSY

SEQ ID NO: 21153 - protein, 10 aa, Artificial Sequence
  Description of Artificial Sequence: Synthetic peptide
  Seed: SFDMSNEGSY
SVDMSNEGSY

SEQ ID NO: 21154 - protein, 11 aa, Artificial Sequence
  Description of Artificial Sequence: Synthetic peptide
  Seed: SFDMSNEGSYF
SADMSNEGSYF

SEQ ID NO: 21155 - protein, 11 aa, Artificial Sequence
  Description of Artificial Sequence: Synthetic peptide
  Seed: SFDMSNEGSYF
SADMSNEGSYY

SEQ ID NO: 21156 - protein, 11 aa, Artificial Sequence
  Description of Artificial Sequence: Synthetic peptide
  Seed: SFDMSNEGSYF
SRDMSNEGSYF

SEQ ID NO: 21157 - protein, 11 aa, Artificial Sequence
  Description of Artificial Sequence: Synthetic peptide
  Seed: SFDMSNEGSYF
SRDMSNEGSYY

SEQ ID NO: 21158 - protein, 10 aa, Artificial Sequence
  Description of Artificial Sequence: Synthetic peptide
  Seed: SFDMSNEGSY
SGDMSNEGSY

SEQ ID NO: 21159 - protein, 10 aa, Artificial Sequence
  Description of Artificial Sequence: Synthetic peptide
  Seed: SFDMSNEGSY
SQDMSNEGSY

SEQ ID NO: 21160 - protein, 10 aa, Artificial Sequence
  Description of Artificial Sequence: Synthetic peptide
  Seed: SFDMSNEGSY
SNDMSNEGSY

SEQ ID NO: 21161 - protein, 10 aa, Artificial Sequence
  Description of Artificial Sequence: Synthetic peptide
  Seed: SFDMSNEGSY
SADMSNEGSY

SEQ ID NO: 21162 - protein, 11 aa, Artificial Sequence
  Description of Artificial Sequence: Synthetic peptide
  Seed: SFDMNNEGSYF
SLDMNNEGSYY

SEQ ID NO: 21163 - protein, 11 aa, Artificial Sequence
  Description of Artificial Sequence: Synthetic peptide
  Seed: SFDMNNEGSYF
SKDMNNEGSYF

SEQ ID NO: 21164 - protein, 11 aa, Artificial Sequence
  Description of Artificial Sequence: Synthetic peptide
  Seed: SFDMNNEGSYF
SKDMNNEGSYY

SEQ ID NO: 21165 - protein, 11 aa, Artificial Sequence
  Description of Artificial Sequence: Synthetic peptide
  Seed: SFDMNNEGSYF
SMDMNNEGSYF

SEQ ID NO: 21166 - protein, 11 aa, Artificial Sequence
  Description of Artificial Sequence: Synthetic peptide
  Seed: SFDMNNEGSYF
SMDMNNEGSYY

SEQ ID NO: 21167 - protein, 11 aa, Artificial Sequence
  Description of Artificial Sequence: Synthetic peptide
  Seed: SFDMNNEGSYF
SFDMNNEGSYY

SEQ ID NO: 21168 - protein, 11 aa, Artificial Sequence
  Description of Artificial Sequence: Synthetic peptide
  Seed: SFDMNNEGSYF
SPDMNNEGSYF

SEQ ID NO: 21169 - protein, 11 aa, Artificial Sequence
  Description of Artificial Sequence: Synthetic peptide
  Seed: SFDMNNEGSYF
SPDMNNEGSYY

SEQ ID NO: 21170 - protein, 11 aa, Artificial Sequence
  Description of Artificial Sequence: Synthetic peptide
  Seed: SFDMNNEGSYF
SSDMNNEGSYF

SEQ ID NO: 21171 - protein, 11 aa, Artificial Sequence
  Description of Artificial Sequence: Synthetic peptide
  Seed: SFDMNNEGSYF
SSDMNNEGSYY

SEQ ID NO: 21172 - protein, 11 aa, Artificial Sequence
  Description of Artificial Sequence: Synthetic peptide
  Seed: SFDMNNEGSYF
STDMNNEGSYF

SEQ ID NO: 21173 - protein, 11 aa, Artificial Sequence
  Description of Artificial Sequence: Synthetic peptide
  Seed: SFDMNNEGSYF
STDMNNEGSYY

SEQ ID NO: 21174 - protein, 11 aa, Artificial Sequence
  Description of Artificial Sequence: Synthetic peptide
  Seed: SFDMNNEGSYF
SWDMNNEGSYF

SEQ ID NO: 21175 - protein, 11 aa, Artificial Sequence
  Description of Artificial Sequence: Synthetic peptide
  Seed: SFDMNNEGSYF
SWDMNNEGSYY

SEQ ID NO: 21176 - protein, 11 aa, Artificial Sequence
  Description of Artificial Sequence: Synthetic peptide
  Seed: SFDMNNEGSYF
SYDMNNEGSYF

SEQ ID NO: 21177 - protein, 11 aa, Artificial Sequence
  Description of Artificial Sequence: Synthetic peptide
  Seed: SFDMNNEGSYF
SYDMNNEGSYW

SEQ ID NO: 21178 - protein, 11 aa, Artificial Sequence
  Description of Artificial Sequence: Synthetic peptide
  Seed: SFDMNNEGSYF
SYDMNNEGSYY

SEQ ID NO: 21179 - protein, 11 aa, Artificial Sequence
  Description of Artificial Sequence: Synthetic peptide
  Seed: SFDMNNEGSYF
SVDMNNEGSYF

SEQ ID NO: 21180 - protein, 11 aa, Artificial Sequence
  Description of Artificial Sequence: Synthetic peptide
  Seed: SFDMNNEGSYF
SVDMNNEGSYY

SEQ ID NO: 21181 - protein, 9 aa, Artificial Sequence
  Description of Artificial Sequence: Synthetic peptide
  Seed: SFIRGTRVV
SPIRGTRVM

SEQ ID NO: 21182 - protein, 9 aa, Artificial Sequence
  Description of Artificial Sequence: Synthetic peptide
  Seed: SFIRGTRVV
SPIRGTRVF

SEQ ID NO: 21183 - protein, 9 aa, Artificial Sequence
  Description of Artificial Sequence: Synthetic peptide
  Seed: SFIRGTRVV
SPIRGTRVY

SEQ ID NO: 21184 - protein, 9 aa, Artificial Sequence
  Description of Artificial Sequence: Synthetic peptide
  Seed: SFRGRGVFE
SRRGRGVFK

SEQ ID NO: 21185 - protein, 9 aa, Artificial Sequence
  Description of Artificial Sequence: Synthetic peptide
  Seed: SFRGRGVFE
SARGRGVFL

SEQ ID NO: 21186 - protein, 9 aa, Artificial Sequence
  Description of Artificial Sequence: Synthetic peptide
  Seed: SFRGRGVFE
SARGRGVFK

SEQ ID NO: 21187 - protein, 9 aa, Artificial Sequence
  Description of Artificial Sequence: Synthetic peptide
  Seed: SFRGRGVFE
SARGRGVFM

SEQ ID NO: 21188 - protein, 9 aa, Artificial Sequence
  Description of Artificial Sequence: Synthetic peptide
  Seed: SFRGRGVFE
SARGRGVFF

SEQ ID NO: 21189 - protein, 9 aa, Artificial Sequence
  Description of Artificial Sequence: Synthetic peptide
  Seed: SFRGRGVFE
SARGRGVFP

SEQ ID NO: 21190 - protein, 9 aa, Artificial Sequence
  Description of Artificial Sequence: Synthetic peptide
  Seed: SFRGRGVFE
SARGRGVFS

SEQ ID NO: 21191 - protein, 9 aa, Artificial Sequence
  Description of Artificial Sequence: Synthetic peptide
  Seed: SFRGRGVFE
SARGRGVFT

SEQ ID NO: 21192 - protein, 9 aa, Artificial Sequence
  Description of Artificial Sequence: Synthetic peptide
  Seed: SFRGRGVFE
SARGRGVFY

SEQ ID NO: 21193 - protein, 9 aa, Artificial Sequence
  Description of Artificial Sequence: Synthetic peptide
  Seed: SFRGRGVFE
SARGRGVFV

SEQ ID NO: 21194 - protein, 9 aa, Artificial Sequence
  Description of Artificial Sequence: Synthetic peptide
  Seed: SFRGRGVFE
SNRGRGVFA

SEQ ID NO: 21195 - protein, 9 aa, Artificial Sequence
  Description of Artificial Sequence: Synthetic peptide
  Seed: SFRGRGVFE
SCRGRGVFK

SEQ ID NO: 21196 - protein, 9 aa, Artificial Sequence
  Description of Artificial Sequence: Synthetic peptide
  Seed: SFRGRGVFE
SNRGRGVFR

SEQ ID NO: 21197 - protein, 9 aa, Artificial Sequence
  Description of Artificial Sequence: Synthetic peptide
  Seed: SFRGRGVFE
SNRGRGVFG

SEQ ID NO: 21198 - protein, 9 aa, Artificial Sequence
  Description of Artificial Sequence: Synthetic peptide
  Seed: SFRGRGVFE
SNRGRGVFI

SEQ ID NO: 21199 - protein, 9 aa, Artificial Sequence
  Description of Artificial Sequence: Synthetic peptide
  Seed: SFRGRGVFE
SNRGRGVFL

SEQ ID NO: 21200 - protein, 9 aa, Artificial Sequence
  Description of Artificial Sequence: Synthetic peptide
  Seed: SFRGRGVFE
SNRGRGVFK

SEQ ID NO: 21201 - protein, 9 aa, Artificial Sequence
  Description of Artificial Sequence: Synthetic peptide
  Seed: SFRGRGVFE
SNRGRGVFM

SEQ ID NO: 21202 - protein, 9 aa, Artificial Sequence
  Description of Artificial Sequence: Synthetic peptide
  Seed: SFRGRGVFE
SNRGRGVFS

SEQ ID NO: 21203 - protein, 9 aa, Artificial Sequence
  Description of Artificial Sequence: Synthetic peptide
  Seed: SFRGRGVFE
SNRGRGVFY

SEQ ID NO: 21204 - protein, 9 aa, Artificial Sequence
  Description of Artificial Sequence: Synthetic peptide
  Seed: SFRGRGVFE
SNRGRGVFV

SEQ ID NO: 21205 - protein, 9 aa, Artificial Sequence
  Description of Artificial Sequence: Synthetic peptide
  Seed: SFRGRGVFE
SARGRGVFI

SEQ ID NO: 21206 - protein, 9 aa, Artificial Sequence
  Description of Artificial Sequence: Synthetic peptide
  Seed: SFRGRGVFE
SARGRGVFH

SEQ ID NO: 21207 - protein, 9 aa, Artificial Sequence
  Description of Artificial Sequence: Synthetic peptide
  Seed: SFRGRGVFE
SARGRGVFG

SEQ ID NO: 21208 - protein, 9 aa, Artificial Sequence
  Description of Artificial Sequence: Synthetic peptide
  Seed: SFRGRGVFE
SARGRGVFE

SEQ ID NO: 21209 - protein, 10 aa, Artificial Sequence
  Description of Artificial Sequence: Synthetic peptide
  Seed: SFQGRGVFEL
SYQGRGVFEW

SEQ ID NO: 21210 - protein, 10 aa, Artificial Sequence
  Description of Artificial Sequence: Synthetic peptide
  Seed: SFQGRGVFEL
SYQGRGVFEY

SEQ ID NO: 21211 - protein, 10 aa, Artificial Sequence
  Description of Artificial Sequence: Synthetic peptide
  Seed: SFQGRGVFEL
SYQGRGVFEV

SEQ ID NO: 21212 - protein, 10 aa, Artificial Sequence
  Description of Artificial Sequence: Synthetic peptide
  Seed: SFQGRGVFEL
SVQGRGVFEF

SEQ ID NO: 21213 - protein, 10 aa, Artificial Sequence
  Description of Artificial Sequence: Synthetic peptide
  Seed: SFQGRGVFEL
SVQGRGVFEY

SEQ ID NO: 21214 - protein, 8 aa, Artificial Sequence
  Description of Artificial Sequence: Synthetic peptide
  Seed: SFRGRGVF
SFRGRGVL

SEQ ID NO: 21215 - protein, 8 aa, Artificial Sequence
  Description of Artificial Sequence: Synthetic peptide
  Seed: SFRGRGVF
SFRGRGVM

SEQ ID NO: 21216 - protein, 8 aa, Artificial Sequence
  Description of Artificial Sequence: Synthetic peptide
  Seed: SFRGRGVF
SFRGRGVY

SEQ ID NO: 21217 - protein, 8 aa, Artificial Sequence
  Description of Artificial Sequence: Synthetic peptide
  Seed: SFRGRGVF
SWRGRGVM

SEQ ID NO: 21218 - protein, 8 aa, Artificial Sequence
  Description of Artificial Sequence: Synthetic peptide
  Seed: SFRGRGVF
SWRGRGVF

SEQ ID NO: 21219 - protein, 8 aa, Artificial Sequence
  Description of Artificial Sequence: Synthetic peptide
  Seed: SFRGRGVF
SYRGRGVL

SEQ ID NO: 21220 - protein, 8 aa, Artificial Sequence
  Description of Artificial Sequence: Synthetic peptide
  Seed: SFRGRGVF
SYRGRGVM

SEQ ID NO: 21221 - protein, 8 aa, Artificial Sequence
  Description of Artificial Sequence: Synthetic peptide
  Seed: SFRGRGVF
SYRGRGVF

SEQ ID NO: 21222 - protein, 8 aa, Artificial Sequence
  Description of Artificial Sequence: Synthetic peptide
  Seed: SFRGRGVF
SYRGRGVY

SEQ ID NO: 21223 - protein, 9 aa, Artificial Sequence
  Description of Artificial Sequence: Synthetic peptide
  Seed: SFRGRGVFE
SARGRGVFA

SEQ ID NO: 21224 - protein, 9 aa, Artificial Sequence
  Description of Artificial Sequence: Synthetic peptide
  Seed: SFRGRGVFE
SARGRGVFR

SEQ ID NO: 21225 - protein, 9 aa, Artificial Sequence
  Description of Artificial Sequence: Synthetic peptide
  Seed: SFRGRGVFE
SARGRGVFN

SEQ ID NO: 21226 - protein, 9 aa, Artificial Sequence
  Description of Artificial Sequence: Synthetic peptide
  Seed: SFRGRGVFE
SARGRGVFC

SEQ ID NO: 21227 - protein, 9 aa, Artificial Sequence
  Description of Artificial Sequence: Synthetic peptide
  Seed: SFRGRGVFE
SARGRGVFQ

SEQ ID NO: 21228 - protein, 9 aa, Artificial Sequence
  Description of Artificial Sequence: Synthetic peptide
  Seed: SFRGRGVFE
SCRGRGVFA

SEQ ID NO: 21229 - protein, 9 aa, Artificial Sequence
  Description of Artificial Sequence: Synthetic peptide
  Seed: SFRGRGVFE
SCRGRGVFV

SEQ ID NO: 21230 - protein, 9 aa, Artificial Sequence
  Description of Artificial Sequence: Synthetic peptide
  Seed: SFIRGTRVV
SSIRGTRVL

SEQ ID NO: 21231 - protein, 9 aa, Artificial Sequence
  Description of Artificial Sequence: Synthetic peptide
  Seed: SFRGRGVFE
SHRGRGVFK

SEQ ID NO: 21232 - protein, 9 aa, Artificial Sequence
  Description of Artificial Sequence: Synthetic peptide
  Seed: SFRGRGVFE
SGRGRGVFL

SEQ ID NO: 21233 - protein, 9 aa, Artificial Sequence
  Description of Artificial Sequence: Synthetic peptide
  Seed: SFRGRGVFE
SGRGRGVFK

SEQ ID NO: 21234 - protein, 9 aa, Artificial Sequence
  Description of Artificial Sequence: Synthetic peptide
  Seed: SFRGRGVFE
SGRGRGVFM

SEQ ID NO: 21235 - protein, 9 aa, Artificial Sequence
  Description of Artificial Sequence: Synthetic peptide
  Seed: SFRGRGVFE
SGRGRGVFF

SEQ ID NO: 21236 - protein, 9 aa, Artificial Sequence
  Description of Artificial Sequence: Synthetic peptide
  Seed: SFRGRGVFE
SGRGRGVFP

SEQ ID NO: 21237 - protein, 9 aa, Artificial Sequence
  Description of Artificial Sequence: Synthetic peptide
  Seed: SFRGRGVFE
SGRGRGVFS

SEQ ID NO: 21238 - protein, 9 aa, Artificial Sequence
  Description of Artificial Sequence: Synthetic peptide
  Seed: SFRGRGVFE
SGRGRGVFT

SEQ ID NO: 21239 - protein, 9 aa, Artificial Sequence
  Description of Artificial Sequence: Synthetic peptide
  Seed: SFRGRGVFE
SGRGRGVFY

SEQ ID NO: 21240 - protein, 9 aa, Artificial Sequence
  Description of Artificial Sequence: Synthetic peptide
  Seed: SFRGRGVFE
SGRGRGVFV

SEQ ID NO: 21241 - protein, 9 aa, Artificial Sequence
  Description of Artificial Sequence: Synthetic peptide
  Seed: SFRGRGVFE
SIRGRGVFA

SEQ ID NO: 21242 - protein, 9 aa, Artificial Sequence
  Description of Artificial Sequence: Synthetic peptide
  Seed: SFRGRGVFE
SQRGRGVFA

SEQ ID NO: 21243 - protein, 9 aa, Artificial Sequence
  Description of Artificial Sequence: Synthetic peptide
  Seed: SFRGRGVFE
SIRGRGVFR

SEQ ID NO: 21244 - protein, 9 aa, Artificial Sequence
  Description of Artificial Sequence: Synthetic peptide
  Seed: SFRGRGVFE
SIRGRGVFN

SEQ ID NO: 21245 - protein, 9 aa, Artificial Sequence
  Description of Artificial Sequence: Synthetic peptide
  Seed: SFRGRGVFE
SIRGRGVFC

SEQ ID NO: 21246 - protein, 9 aa, Artificial Sequence
  Description of Artificial Sequence: Synthetic peptide
  Seed: SFRGRGVFE
SIRGRGVFQ

SEQ ID NO: 21247 - protein, 9 aa, Artificial Sequence
  Description of Artificial Sequence: Synthetic peptide
  Seed: SFRGRGVFE
SIRGRGVFG

SEQ ID NO: 21248 - protein, 9 aa, Artificial Sequence
  Description of Artificial Sequence: Synthetic peptide
  Seed: SFRGRGVFE
SIRGRGVFH

SEQ ID NO: 21249 - protein, 9 aa, Artificial Sequence
  Description of Artificial Sequence: Synthetic peptide
  Seed: SFRGRGVFE
SIRGRGVFI

SEQ ID NO: 21250 - protein, 9 aa, Artificial Sequence
  Description of Artificial Sequence: Synthetic peptide
  Seed: SFRGRGVFE
SIRGRGVFL

SEQ ID NO: 21251 - protein, 9 aa, Artificial Sequence
  Description of Artificial Sequence: Synthetic peptide
  Seed: SFRGRGVFE
SIRGRGVFK

SEQ ID NO: 21252 - protein, 9 aa, Artificial Sequence
  Description of Artificial Sequence: Synthetic peptide
  Seed: SFRGRGVFE
SGRGRGVFI

SEQ ID NO: 21253 - protein, 9 aa, Artificial Sequence
  Description of Artificial Sequence: Synthetic peptide
  Seed: SFRGRGVFE
SGRGRGVFH

SEQ ID NO: 21254 - protein, 9 aa, Artificial Sequence
  Description of Artificial Sequence: Synthetic peptide
  Seed: SFRGRGVFE
SGRGRGVFG

SEQ ID NO: 21255 - protein, 9 aa, Artificial Sequence
  Description of Artificial Sequence: Synthetic peptide
  Seed: SFRGRGVFE
SGRGRGVFR

SEQ ID NO: 21256 - protein, 9 aa, Artificial Sequence
  Description of Artificial Sequence: Synthetic peptide
  Seed: SFRGRGVFE
SQRGRGVFR

SEQ ID NO: 21257 - protein, 9 aa, Artificial Sequence
  Description of Artificial Sequence: Synthetic peptide
  Seed: SFRGRGVFE
SQRGRGVFN

SEQ ID NO: 21258 - protein, 9 aa, Artificial Sequence
  Description of Artificial Sequence: Synthetic peptide
  Seed: SFRGRGVFE
SQRGRGVFC

SEQ ID NO: 21259 - protein, 9 aa, Artificial Sequence
  Description of Artificial Sequence: Synthetic peptide
  Seed: SFRGRGVFE
SQRGRGVFQ

SEQ ID NO: 21260 - protein, 9 aa, Artificial Sequence
  Description of Artificial Sequence: Synthetic peptide
  Seed: SFRGRGVFE
SQRGRGVFE

SEQ ID NO: 21261 - protein, 9 aa, Artificial Sequence
  Description of Artificial Sequence: Synthetic peptide
  Seed: SFRGRGVFE
SQRGRGVFG

SEQ ID NO: 21262 - protein, 9 aa, Artificial Sequence
  Description of Artificial Sequence: Synthetic peptide
  Seed: SFRGRGVFE
SQRGRGVFH

SEQ ID NO: 21263 - protein, 9 aa, Artificial Sequence
  Description of Artificial Sequence: Synthetic peptide
  Seed: SFRGRGVFE
SQRGRGVFI

SEQ ID NO: 21264 - protein, 9 aa, Artificial Sequence
  Description of Artificial Sequence: Synthetic peptide
  Seed: SFRGRGVFE
SQRGRGVFL

SEQ ID NO: 21265 - protein, 9 aa, Artificial Sequence
  Description of Artificial Sequence: Synthetic peptide
  Seed: SFRGRGVFE
SQRGRGVFK

SEQ ID NO: 21266 - protein, 9 aa, Artificial Sequence
  Description of Artificial Sequence: Synthetic peptide
  Seed: SFRGRGVFE
SQRGRGVFM

SEQ ID NO: 21267 - protein, 9 aa, Artificial Sequence
  Description of Artificial Sequence: Synthetic peptide
  Seed: SFRGRGVFE
SQRGRGVFF

SEQ ID NO: 21268 - protein, 9 aa, Artificial Sequence
  Description of Artificial Sequence: Synthetic peptide
  Seed: SFRGRGVFE
SQRGRGVFP

SEQ ID NO: 21269 - protein, 9 aa, Artificial Sequence
  Description of Artificial Sequence: Synthetic peptide
  Seed: SFRGRGVFE
SQRGRGVFS

SEQ ID NO: 21270 - protein, 9 aa, Artificial Sequence
  Description of Artificial Sequence: Synthetic peptide
  Seed: SFRGRGVFE
SQRGRGVFT

SEQ ID NO: 21271 - protein, 9 aa, Artificial Sequence
  Description of Artificial Sequence: Synthetic peptide
  Seed: SFRGRGVFE
SQRGRGVFY

SEQ ID NO: 21272 - protein, 9 aa, Artificial Sequence
  Description of Artificial Sequence: Synthetic peptide
  Seed: SFRGRGVFE
SQRGRGVFV

SEQ ID NO: 21273 - protein, 9 aa, Artificial Sequence
  Description of Artificial Sequence: Synthetic peptide
  Seed: SFRGRGVFE
SERGRGVFK

SEQ ID NO: 21274 - protein, 9 aa, Artificial Sequence
  Description of Artificial Sequence: Synthetic peptide
  Seed: SFRGRGVFE
SGRGRGVFA

SEQ ID NO: 21275 - protein, 10 aa, Artificial Sequence
  Description of Artificial Sequence: Synthetic peptide
  Seed: SFQGRGVFEL
SYQGRGVFEF

SEQ ID NO: 21276 - protein, 10 aa, Artificial Sequence
  Description of Artificial Sequence: Synthetic peptide
  Seed: SFQGRGVFEL
SYQGRGVFEM

SEQ ID NO: 21277 - protein, 10 aa, Artificial Sequence
  Description of Artificial Sequence: Synthetic peptide
  Seed: SFQGRGVFEL
SYQGRGVFEL

SEQ ID NO: 21278 - protein, 11 aa, Artificial Sequence
  Description of Artificial Sequence: Synthetic peptide
  Seed: SFIRGTRVVPR
SRIRGTRVVPR

SEQ ID NO: 21279 - protein, 9 aa, Artificial Sequence
  Description of Artificial Sequence: Synthetic peptide
  Seed: SFIRGTRVV
SYIRGTRVT

SEQ ID NO: 21280 - protein, 9 aa, Artificial Sequence
  Description of Artificial Sequence: Synthetic peptide
  Seed: SFIRGTRVV
SYIRGTRVW

SEQ ID NO: 21281 - protein, 9 aa, Artificial Sequence
  Description of Artificial Sequence: Synthetic peptide
  Seed: SFIRGTRVV
SYIRGTRVY

SEQ ID NO: 21282 - protein, 9 aa, Artificial Sequence
  Description of Artificial Sequence: Synthetic peptide
  Seed: SFIRGTRVV
SYIRGTRVV

SEQ ID NO: 21283 - protein, 9 aa, Artificial Sequence
  Description of Artificial Sequence: Synthetic peptide
  Seed: SFIRGTRVV
SVIRGTRVL

SEQ ID NO: 21284 - protein, 9 aa, Artificial Sequence
  Description of Artificial Sequence: Synthetic peptide
  Seed: SFIRGTRVV
SVIRGTRVM

SEQ ID NO: 21285 - protein, 9 aa, Artificial Sequence
  Description of Artificial Sequence: Synthetic peptide
  Seed: SFIRGTRVV
SVIRGTRVF

SEQ ID NO: 21286 - protein, 9 aa, Artificial Sequence
  Description of Artificial Sequence: Synthetic peptide
  Seed: SFIRGTRVV
SVIRGTRVY

SEQ ID NO: 21287 - protein, 11 aa, Artificial Sequence
  Description of Artificial Sequence: Synthetic peptide
  Seed: SFIRGTRVVPR
SAIRGTRVVPR

SEQ ID NO: 21288 - protein, 11 aa, Artificial Sequence
  Description of Artificial Sequence: Synthetic peptide
  Seed: SFIRGTRVVPR
SNIRGTRVVPR

SEQ ID NO: 21289 - protein, 10 aa, Artificial Sequence
  Description of Artificial Sequence: Synthetic peptide
  Seed: SFQGRGVFEL
SYQGRGVFEI

SEQ ID NO: 21290 - protein, 11 aa, Artificial Sequence
  Description of Artificial Sequence: Synthetic peptide
  Seed: SFIRGTRVVPR
SCIRGTRVVPR

SEQ ID NO: 21291 - protein, 11 aa, Artificial Sequence
  Description of Artificial Sequence: Synthetic peptide
  Seed: SFIRGTRVVPR
SQIRGTRVVPR

SEQ ID NO: 21292 - protein, 11 aa, Artificial Sequence
  Description of Artificial Sequence: Synthetic peptide
  Seed: SFIRGTRVVPR
SQIRGTRVVPK

SEQ ID NO: 21293 - protein, 11 aa, Artificial Sequence
  Description of Artificial Sequence: Synthetic peptide
  Seed: SFIRGTRVVPR
SGIRGTRVVPR

SEQ ID NO: 21294 - protein, 11 aa, Artificial Sequence
  Description of Artificial Sequence: Synthetic peptide
  Seed: SFIRGTRVVPR
SHIRGTRVVPR

SEQ ID NO: 21295 - protein, 11 aa, Artificial Sequence
  Description of Artificial Sequence: Synthetic peptide
  Seed: SFIRGTRVVPR
SIIRGTRVVPR

SEQ ID NO: 21296 - protein, 11 aa, Artificial Sequence
  Description of Artificial Sequence: Synthetic peptide
  Seed: SFIRGTRVVPR
SLIRGTRVVPR

SEQ ID NO: 21297 - protein, 11 aa, Artificial Sequence
  Description of Artificial Sequence: Synthetic peptide
  Seed: SFIRGTRVVPR
SKIRGTRVVPR

SEQ ID NO: 21298 - protein, 11 aa, Artificial Sequence
  Description of Artificial Sequence: Synthetic peptide
  Seed: SFIRGTRVVPR
SMIRGTRVVPR

SEQ ID NO: 21299 - protein, 9 aa, Artificial Sequence
  Description of Artificial Sequence: Synthetic peptide
  Seed: SFIRGTRVV
SYIRGTRVS

SEQ ID NO: 21300 - protein, 9 aa, Artificial Sequence
  Description of Artificial Sequence: Synthetic peptide
  Seed: SFIRGTRVV
SYIRGTRVF

SEQ ID NO: 21301 - protein, 9 aa, Artificial Sequence
  Description of Artificial Sequence: Synthetic peptide
  Seed: SFIRGTRVV
SYIRGTRVM

SEQ ID NO: 21302 - protein, 9 aa, Artificial Sequence
  Description of Artificial Sequence: Synthetic peptide
  Seed: SFIRGTRVV
SYIRGTRVL

SEQ ID NO: 21303 - protein, 9 aa, Artificial Sequence
  Description of Artificial Sequence: Synthetic peptide
  Seed: SFIRGTRVV
SSIRGTRVM

SEQ ID NO: 21304 - protein, 9 aa, Artificial Sequence
  Description of Artificial Sequence: Synthetic peptide
  Seed: SFIRGTRVV
SSIRGTRVF

SEQ ID NO: 21305 - protein, 9 aa, Artificial Sequence
  Description of Artificial Sequence: Synthetic peptide
  Seed: SFIRGTRVV
SSIRGTRVY

SEQ ID NO: 21306 - protein, 9 aa, Artificial Sequence
  Description of Artificial Sequence: Synthetic peptide
  Seed: SFIRGTRVV
STIRGTRVL

SEQ ID NO: 21307 - protein, 9 aa, Artificial Sequence
  Description of Artificial Sequence: Synthetic peptide
  Seed: SFIRGTRVV
STIRGTRVM

SEQ ID NO: 21308 - protein, 9 aa, Artificial Sequence
  Description of Artificial Sequence: Synthetic peptide
  Seed: SFIRGTRVV
STIRGTRVF

SEQ ID NO: 21309 - protein, 9 aa, Artificial Sequence
  Description of Artificial Sequence: Synthetic peptide
  Seed: SFIRGTRVV
STIRGTRVY

SEQ ID NO: 21310 - protein, 9 aa, Artificial Sequence
  Description of Artificial Sequence: Synthetic peptide
  Seed: SFIRGTRVV
SWIRGTRVI

SEQ ID NO: 21311 - protein, 9 aa, Artificial Sequence
  Description of Artificial Sequence: Synthetic peptide
  Seed: SFIRGTRVV
SWIRGTRVL

SEQ ID NO: 21312 - protein, 9 aa, Artificial Sequence
  Description of Artificial Sequence: Synthetic peptide
  Seed: SFIRGTRVV
SWIRGTRVM

SEQ ID NO: 21313 - protein, 9 aa, Artificial Sequence
  Description of Artificial Sequence: Synthetic peptide
  Seed: SFIRGTRVV
SWIRGTRVF

SEQ ID NO: 21314 - protein, 9 aa, Artificial Sequence
  Description of Artificial Sequence: Synthetic peptide
  Seed: SFIRGTRVV
SWIRGTRVW

SEQ ID NO: 21315 - protein, 9 aa, Artificial Sequence
  Description of Artificial Sequence: Synthetic peptide
  Seed: SFIRGTRVV
SWIRGTRVY

SEQ ID NO: 21316 - protein, 9 aa, Artificial Sequence
  Description of Artificial Sequence: Synthetic peptide
  Seed: SFIRGTRVV
SWIRGTRVV

SEQ ID NO: 21317 - protein, 9 aa, Artificial Sequence
  Description of Artificial Sequence: Synthetic peptide
  Seed: SFIRGTRVV
SYIRGTRVA

SEQ ID NO: 21318 - protein, 9 aa, Artificial Sequence
  Description of Artificial Sequence: Synthetic peptide
  Seed: SFIRGTRVV
SYIRGTRVC

SEQ ID NO: 21319 - protein, 9 aa, Artificial Sequence
  Description of Artificial Sequence: Synthetic peptide
  Seed: SFIRGTRVV
SYIRGTRVQ

SEQ ID NO: 21320 - protein, 9 aa, Artificial Sequence
  Description of Artificial Sequence: Synthetic peptide
  Seed: SFIRGTRVV
SYIRGTRVH

SEQ ID NO: 21321 - protein, 9 aa, Artificial Sequence
  Description of Artificial Sequence: Synthetic peptide
  Seed: SFIRGTRVV
SYIRGTRVI

SEQ ID NO: 21322 - protein, 11 aa, Artificial Sequence
  Description of Artificial Sequence: Synthetic peptide
  Seed: SFIRGTRVVPR
SMIRGTRVVPK

SEQ ID NO: 21323 - protein, 11 aa, Artificial Sequence
  Description of Artificial Sequence: Synthetic peptide
  Seed: SFIRGTRVVPR
SFIRGTRVVPK

SEQ ID NO: 21324 - protein, 11 aa, Artificial Sequence
  Description of Artificial Sequence: Synthetic peptide
  Seed: SFIRGTRVVPR
SSIRGTRVVPR

SEQ ID NO: 21325 - protein, 10 aa, Artificial Sequence
  Description of Artificial Sequence: Synthetic peptide
  Seed: SFQGRGVFEL
SMQGRGVFEM

SEQ ID NO: 21326 - protein, 10 aa, Artificial Sequence
  Description of Artificial Sequence: Synthetic peptide
  Seed: SFQGRGVFEL
SMQGRGVFEW

SEQ ID NO: 21327 - protein, 10 aa, Artificial Sequence
  Description of Artificial Sequence: Synthetic peptide
  Seed: SFQGRGVFEL
SMQGRGVFEY

SEQ ID NO: 21328 - protein, 10 aa, Artificial Sequence
  Description of Artificial Sequence: Synthetic peptide
  Seed: SFQGRGVFEL
SFQGRGVFEI

SEQ ID NO: 21329 - protein, 10 aa, Artificial Sequence
  Description of Artificial Sequence: Synthetic peptide
  Seed: SFQGRGVFEL
SFQGRGVFEM

SEQ ID NO: 21330 - protein, 10 aa, Artificial Sequence
  Description of Artificial Sequence: Synthetic peptide
  Seed: SFQGRGVFEL
SFQGRGVFEW

SEQ ID NO: 21331 - protein, 10 aa, Artificial Sequence
  Description of Artificial Sequence: Synthetic peptide
  Seed: SFQGRGVFEL
SFQGRGVFEY

SEQ ID NO: 21332 - protein, 10 aa, Artificial Sequence
  Description of Artificial Sequence: Synthetic peptide
  Seed: SFQGRGVFEL
SPQGRGVFEF

SEQ ID NO: 21333 - protein, 10 aa, Artificial Sequence
  Description of Artificial Sequence: Synthetic peptide
  Seed: SFQGRGVFEL
SPQGRGVFEY

SEQ ID NO: 21334 - protein, 10 aa, Artificial Sequence
  Description of Artificial Sequence: Synthetic peptide
  Seed: SFQGRGVFEL
SSQGRGVFEF

SEQ ID NO: 21335 - protein, 10 aa, Artificial Sequence
  Description of Artificial Sequence: Synthetic peptide
  Seed: SFQGRGVFEL
SSQGRGVFEY

SEQ ID NO: 21336 - protein, 10 aa, Artificial Sequence
  Description of Artificial Sequence: Synthetic peptide
  Seed: SFQGRGVFEL
STQGRGVFEF

SEQ ID NO: 21337 - protein, 10 aa, Artificial Sequence
  Description of Artificial Sequence: Synthetic peptide
  Seed: SFQGRGVFEL
STQGRGVFEY

SEQ ID NO: 21338 - protein, 10 aa, Artificial Sequence
  Description of Artificial Sequence: Synthetic peptide
  Seed: SFQGRGVFEL
SWQGRGVFEI

SEQ ID NO: 21339 - protein, 10 aa, Artificial Sequence
  Description of Artificial Sequence: Synthetic peptide
  Seed: SFQGRGVFEL
SWQGRGVFEL

SEQ ID NO: 21340 - protein, 10 aa, Artificial Sequence
  Description of Artificial Sequence: Synthetic peptide
  Seed: SFQGRGVFEL
SWQGRGVFEM

SEQ ID NO: 21341 - protein, 10 aa, Artificial Sequence
  Description of Artificial Sequence: Synthetic peptide
  Seed: SFQGRGVFEL
SWQGRGVFEF

SEQ ID NO: 21342 - protein, 10 aa, Artificial Sequence
  Description of Artificial Sequence: Synthetic peptide
  Seed: SFQGRGVFEL
SWQGRGVFEW

SEQ ID NO: 21343 - protein, 10 aa, Artificial Sequence
  Description of Artificial Sequence: Synthetic peptide
  Seed: SFQGRGVFEL
SWQGRGVFEY

SEQ ID NO: 21344 - protein, 10 aa, Artificial Sequence
  Description of Artificial Sequence: Synthetic peptide
  Seed: SFQGRGVFEL
SMQGRGVFEF

SEQ ID NO: 21345 - protein, 10 aa, Artificial Sequence
  Description of Artificial Sequence: Synthetic peptide
  Seed: SFQGRGVFEL
SKQGRGVFEY

SEQ ID NO: 21346 - protein, 11 aa, Artificial Sequence
  Description of Artificial Sequence: Synthetic peptide
  Seed: SFIRGTRVVPR
SSIRGTRVVPK

SEQ ID NO: 21347 - protein, 10 aa, Artificial Sequence
  Description of Artificial Sequence: Synthetic peptide
  Seed: SFQGRGVFEL
SHQGRGVFEF

SEQ ID NO: 21348 - protein, 11 aa, Artificial Sequence
  Description of Artificial Sequence: Synthetic peptide
  Seed: SFIRGTRVVPR
STIRGTRVVPR

SEQ ID NO: 21349 - protein, 11 aa, Artificial Sequence
  Description of Artificial Sequence: Synthetic peptide
  Seed: SFIRGTRVVPR
STIRGTRVVPK

SEQ ID NO: 21350 - protein, 11 aa, Artificial Sequence
  Description of Artificial Sequence: Synthetic peptide
  Seed: SFIRGTRVVPR
SWIRGTRVVPR

SEQ ID NO: 21351 - protein, 11 aa, Artificial Sequence
  Description of Artificial Sequence: Synthetic peptide
  Seed: SFIRGTRVVPR
SWIRGTRVVPK

SEQ ID NO: 21352 - protein, 11 aa, Artificial Sequence
  Description of Artificial Sequence: Synthetic peptide
  Seed: SFIRGTRVVPR
SYIRGTRVVPR

SEQ ID NO: 21353 - protein, 11 aa, Artificial Sequence
  Description of Artificial Sequence: Synthetic peptide
  Seed: SFIRGTRVVPR
SYIRGTRVVPK

SEQ ID NO: 21354 - protein, 11 aa, Artificial Sequence
  Description of Artificial Sequence: Synthetic peptide
  Seed: SFIRGTRVVPR
SVIRGTRVVPR

SEQ ID NO: 21355 - protein, 11 aa, Artificial Sequence
  Description of Artificial Sequence: Synthetic peptide
  Seed: SFIRGTRVVPR
SVIRGTRVVPK

SEQ ID NO: 21356 - protein, 8 aa, Artificial Sequence
  Description of Artificial Sequence: Synthetic peptide
  Seed: SFQGRGVF
SFQGRGVL

SEQ ID NO: 21357 - protein, 8 aa, Artificial Sequence
  Description of Artificial Sequence: Synthetic peptide
  Seed: SFQGRGVF
SFQGRGVM

SEQ ID NO: 21358 - protein, 8 aa, Artificial Sequence
  Description of Artificial Sequence: Synthetic peptide
  Seed: SFQGRGVF
SFQGRGVY

SEQ ID NO: 21359 - protein, 8 aa, Artificial Sequence
  Description of Artificial Sequence: Synthetic peptide
  Seed: SFQGRGVF
SWQGRGVM

SEQ ID NO: 21360 - protein, 8 aa, Artificial Sequence
  Description of Artificial Sequence: Synthetic peptide
  Seed: SFQGRGVF
SWQGRGVF

SEQ ID NO: 21361 - protein, 8 aa, Artificial Sequence
  Description of Artificial Sequence: Synthetic peptide
  Seed: SFQGRGVF
SYQGRGVI

SEQ ID NO: 21362 - protein, 8 aa, Artificial Sequence
  Description of Artificial Sequence: Synthetic peptide
  Seed: SFQGRGVF
SYQGRGVL

SEQ ID NO: 21363 - protein, 8 aa, Artificial Sequence
  Description of Artificial Sequence: Synthetic peptide
  Seed: SFQGRGVF
SYQGRGVM

SEQ ID NO: 21364 - protein, 8 aa, Artificial Sequence
  Description of Artificial Sequence: Synthetic peptide
  Seed: SFQGRGVF
SYQGRGVF

SEQ ID NO: 21365 - protein, 8 aa, Artificial Sequence
  Description of Artificial Sequence: Synthetic peptide
  Seed: SFQGRGVF
SYQGRGVY

SEQ ID NO: 21366 - protein, 8 aa, Artificial Sequence
  Description of Artificial Sequence: Synthetic peptide
  Seed: SFQGRGVF
SYQGRGVV

SEQ ID NO: 21367 - protein, 10 aa, Artificial Sequence
  Description of Artificial Sequence: Synthetic peptide
  Seed: SDMRAEIIRM
SYMRAEIIRA

SEQ ID NO: 21368 - protein, 10 aa, Artificial Sequence
  Description of Artificial Sequence: Synthetic peptide
  Seed: SDMRAEIIRM
SWMRAEIIRV

SEQ ID NO: 21369 - protein, 10 aa, Artificial Sequence
  Description of Artificial Sequence: Synthetic peptide
  Seed: SDMRAEIIRM
SWMRAEIIRL

SEQ ID NO: 21370 - protein, 11 aa, Artificial Sequence
  Description of Artificial Sequence: Synthetic peptide
  Seed: SAYERMCNILK
SHYERMCNILR

SEQ ID NO: 21371 - protein, 11 aa, Artificial Sequence
  Description of Artificial Sequence: Synthetic peptide
  Seed: SAYERMCNILK
SAYERMCNILY

SEQ ID NO: 21372 - protein, 11 aa, Artificial Sequence
  Description of Artificial Sequence: Synthetic peptide
  Seed: SAYERMCNILK
SRYERMCNILR

SEQ ID NO: 21373 - protein, 11 aa, Artificial Sequence
  Description of Artificial Sequence: Synthetic peptide
  Seed: SAYERMCNILK
SRYERMCNILK

SEQ ID NO: 21374 - protein, 11 aa, Artificial Sequence
  Description of Artificial Sequence: Synthetic peptide
  Seed: SAYERMCNILK
SNYERMCNILR

SEQ ID NO: 21375 - protein, 11 aa, Artificial Sequence
  Description of Artificial Sequence: Synthetic peptide
  Seed: SAYERMCNILK
SCYERMCNILR

SEQ ID NO: 21376 - protein, 11 aa, Artificial Sequence
  Description of Artificial Sequence: Synthetic peptide
  Seed: SAYERMCNILK
SQYERMCNILR

SEQ ID NO: 21377 - protein, 11 aa, Artificial Sequence
  Description of Artificial Sequence: Synthetic peptide
  Seed: SAYERMCNILK
SQYERMCNILK

SEQ ID NO: 21378 - protein, 11 aa, Artificial Sequence
  Description of Artificial Sequence: Synthetic peptide
  Seed: SAYERMCNILK
SGYERMCNILR

SEQ ID NO: 21379 - protein, 11 aa, Artificial Sequence
  Description of Artificial Sequence: Synthetic peptide
  Seed: SAYERMCNILK
SGYERMCNILK

SEQ ID NO: 21380 - protein, 11 aa, Artificial Sequence
  Description of Artificial Sequence: Synthetic peptide
  Seed: SAYERMCNILK
SIYERMCNILR

SEQ ID NO: 21381 - protein, 11 aa, Artificial Sequence
  Description of Artificial Sequence: Synthetic peptide
  Seed: SAYERMCNILK
SFYERMCNILK

SEQ ID NO: 21382 - protein, 11 aa, Artificial Sequence
  Description of Artificial Sequence: Synthetic peptide
  Seed: SAYERMCNILK
SIYERMCNILK

SEQ ID NO: 21383 - protein, 11 aa, Artificial Sequence
  Description of Artificial Sequence: Synthetic peptide
  Seed: SAYERMCNILK
SIYERMCNILY

SEQ ID NO: 21384 - protein, 11 aa, Artificial Sequence
  Description of Artificial Sequence: Synthetic peptide
  Seed: SAYERMCNILK
SLYERMCNILR

SEQ ID NO: 21385 - protein, 11 aa, Artificial Sequence
  Description of Artificial Sequence: Synthetic peptide
  Seed: SAYERMCNILK
SLYERMCNILK

SEQ ID NO: 21386 - protein, 11 aa, Artificial Sequence
  Description of Artificial Sequence: Synthetic peptide
  Seed: SAYERMCNILK
SLYERMCNILY

SEQ ID NO: 21387 - protein, 11 aa, Artificial Sequence
  Description of Artificial Sequence: Synthetic peptide
  Seed: SAYERMCNILK
SKYERMCNILR

SEQ ID NO: 21388 - protein, 11 aa, Artificial Sequence
  Description of Artificial Sequence: Synthetic peptide
  Seed: SAYERMCNILK
SMYERMCNILR

SEQ ID NO: 21389 - protein, 11 aa, Artificial Sequence
  Description of Artificial Sequence: Synthetic peptide
  Seed: SAYERMCNILK
SMYERMCNILK

SEQ ID NO: 21390 - protein, 11 aa, Artificial Sequence
  Description of Artificial Sequence: Synthetic peptide
  Seed: SAYERMCNILK
SMYERMCNILY

SEQ ID NO: 21391 - protein, 11 aa, Artificial Sequence
  Description of Artificial Sequence: Synthetic peptide
  Seed: SAYERMCNILK
SAYERMCNILR

SEQ ID NO: 21392 - protein, 11 aa, Artificial Sequence
  Description of Artificial Sequence: Synthetic peptide
  Seed: SAYERMCNILK
SAYERMCNILA

SEQ ID NO: 21393 - protein, 10 aa, Artificial Sequence
  Description of Artificial Sequence: Synthetic peptide
  Seed: SAYERMCNIL
SVYERMCNIW

SEQ ID NO: 21394 - protein, 10 aa, Artificial Sequence
  Description of Artificial Sequence: Synthetic peptide
  Seed: SAYERMCNIL
SVYERMCNIF

SEQ ID NO: 21395 - protein, 10 aa, Artificial Sequence
  Description of Artificial Sequence: Synthetic peptide
  Seed: SAYERMCNIL
STYERMCNIL

SEQ ID NO: 21396 - protein, 10 aa, Artificial Sequence
  Description of Artificial Sequence: Synthetic peptide
  Seed: SAYERMCNIL
STYERMCNIM

SEQ ID NO: 21397 - protein, 10 aa, Artificial Sequence
  Description of Artificial Sequence: Synthetic peptide
  Seed: SAYERMCNIL
STYERMCNIF

SEQ ID NO: 21398 - protein, 10 aa, Artificial Sequence
  Description of Artificial Sequence: Synthetic peptide
  Seed: SAYERMCNIL
STYERMCNIW

SEQ ID NO: 21399 - protein, 10 aa, Artificial Sequence
  Description of Artificial Sequence: Synthetic peptide
  Seed: SAYERMCNIL
STYERMCNIY

SEQ ID NO: 21400 - protein, 10 aa, Artificial Sequence
  Description of Artificial Sequence: Synthetic peptide
  Seed: SAYERMCNIL
SWYERMCNII

SEQ ID NO: 21401 - protein, 10 aa, Artificial Sequence
  Description of Artificial Sequence: Synthetic peptide
  Seed: SAYERMCNIL
SWYERMCNIL

SEQ ID NO: 21402 - protein, 10 aa, Artificial Sequence
  Description of Artificial Sequence: Synthetic peptide
  Seed: SAYERMCNIL
SWYERMCNIM

SEQ ID NO: 21403 - protein, 10 aa, Artificial Sequence
  Description of Artificial Sequence: Synthetic peptide
  Seed: SAYERMCNIL
SWYERMCNIF

SEQ ID NO: 21404 - protein, 10 aa, Artificial Sequence
  Description of Artificial Sequence: Synthetic peptide
  Seed: SAYERMCNIL
SWYERMCNIW

SEQ ID NO: 21405 - protein, 10 aa, Artificial Sequence
  Description of Artificial Sequence: Synthetic peptide
  Seed: SAYERMCNIL
SYYERMCNII

SEQ ID NO: 21406 - protein, 10 aa, Artificial Sequence
  Description of Artificial Sequence: Synthetic peptide
  Seed: SAYERMCNIL
SYYERMCNIL

SEQ ID NO: 21407 - protein, 10 aa, Artificial Sequence
  Description of Artificial Sequence: Synthetic peptide
  Seed: SAYERMCNIL
SYYERMCNIM

SEQ ID NO: 21408 - protein, 10 aa, Artificial Sequence
  Description of Artificial Sequence: Synthetic peptide
  Seed: SAYERMCNIL
SYYERMCNIF

SEQ ID NO: 21409 - protein, 10 aa, Artificial Sequence
  Description of Artificial Sequence: Synthetic peptide
  Seed: SAYERMCNIL
SYYERMCNIW

SEQ ID NO: 21410 - protein, 10 aa, Artificial Sequence
  Description of Artificial Sequence: Synthetic peptide
  Seed: SAYERMCNIL
SYYERMCNIY

SEQ ID NO: 21411 - protein, 10 aa, Artificial Sequence
  Description of Artificial Sequence: Synthetic peptide
  Seed: SAYERMCNIL
SYYERMCNIV

SEQ ID NO: 21412 - protein, 10 aa, Artificial Sequence
  Description of Artificial Sequence: Synthetic peptide
  Seed: SAYERMCNIL
SVYERMCNII

SEQ ID NO: 21413 - protein, 10 aa, Artificial Sequence
  Description of Artificial Sequence: Synthetic peptide
  Seed: SAYERMCNIL
SVYERMCNIL

SEQ ID NO: 21414 - protein, 11 aa, Artificial Sequence
  Description of Artificial Sequence: Synthetic peptide
  Seed: SAYERMCNILK
SFYERMCNILR

SEQ ID NO: 21415 - protein, 11 aa, Artificial Sequence
  Description of Artificial Sequence: Synthetic peptide
  Seed: SAYERMCNILK
SSYERMCNILA

SEQ ID NO: 21416 - protein, 10 aa, Artificial Sequence
  Description of Artificial Sequence: Synthetic peptide
  Seed: SCLPACVYGL
SQLPACVYGI

SEQ ID NO: 21417 - protein, 10 aa, Artificial Sequence
  Description of Artificial Sequence: Synthetic peptide
  Seed: SCLPACVYGL
SNLPACVYGM

SEQ ID NO: 21418 - protein, 10 aa, Artificial Sequence
  Description of Artificial Sequence: Synthetic peptide
  Seed: SCLPACVYGL
SALPACVYGV

SEQ ID NO: 21419 - protein, 10 aa, Artificial Sequence
  Description of Artificial Sequence: Synthetic peptide
  Seed: SCLPACVYGL
SRLPACVYGA

SEQ ID NO: 21420 - protein, 10 aa, Artificial Sequence
  Description of Artificial Sequence: Synthetic peptide
  Seed: SCLPACVYGL
SRLPACVYGI

SEQ ID NO: 21421 - protein, 10 aa, Artificial Sequence
  Description of Artificial Sequence: Synthetic peptide
  Seed: SCLPACVYGL
SRLPACVYGL

SEQ ID NO: 21422 - protein, 10 aa, Artificial Sequence
  Description of Artificial Sequence: Synthetic peptide
  Seed: SCLPACVYGL
SRLPACVYGM

SEQ ID NO: 21423 - protein, 10 aa, Artificial Sequence
  Description of Artificial Sequence: Synthetic peptide
  Seed: SCLPACVYGL
SRLPACVYGV

SEQ ID NO: 21424 - protein, 10 aa, Artificial Sequence
  Description of Artificial Sequence: Synthetic peptide
  Seed: SCLPACVYGL
SNLPACVYGA

SEQ ID NO: 21425 - protein, 10 aa, Artificial Sequence
  Description of Artificial Sequence: Synthetic peptide
  Seed: SCLPACVYGL
SNLPACVYGI

SEQ ID NO: 21426 - protein, 10 aa, Artificial Sequence
  Description of Artificial Sequence: Synthetic peptide
  Seed: SCLPACVYGL
SNLPACVYGL

SEQ ID NO: 21427 - protein, 10 aa, Artificial Sequence
  Description of Artificial Sequence: Synthetic peptide
  Seed: SCLPACVYGL
SNLPACVYGV

SEQ ID NO: 21428 - protein, 11 aa, Artificial Sequence
  Description of Artificial Sequence: Synthetic peptide
  Seed: SAYERMCNILK
SSYERMCNILR

SEQ ID NO: 21429 - protein, 10 aa, Artificial Sequence
  Description of Artificial Sequence: Synthetic peptide
  Seed: SCLPACVYGL
SDLPACVYGA

SEQ ID NO: 21430 - protein, 10 aa, Artificial Sequence
  Description of Artificial Sequence: Synthetic peptide
  Seed: SCLPACVYGL
SDLPACVYGI

SEQ ID NO: 21431 - protein, 10 aa, Artificial Sequence
  Description of Artificial Sequence: Synthetic peptide
  Seed: SCLPACVYGL
SDLPACVYGL

SEQ ID NO: 21432 - protein, 10 aa, Artificial Sequence
  Description of Artificial Sequence: Synthetic peptide
  Seed: SCLPACVYGL
SDLPACVYGM

SEQ ID NO: 21433 - protein, 10 aa, Artificial Sequence
  Description of Artificial Sequence: Synthetic peptide
  Seed: SCLPACVYGL
SDLPACVYGV

SEQ ID NO: 21434 - protein, 10 aa, Artificial Sequence
  Description of Artificial Sequence: Synthetic peptide
  Seed: SCLPACVYGL
SCLPACVYGA

SEQ ID NO: 21435 - protein, 10 aa, Artificial Sequence
  Description of Artificial Sequence: Synthetic peptide
  Seed: SCLPACVYGL
SCLPACVYGI

SEQ ID NO: 21436 - protein, 10 aa, Artificial Sequence
  Description of Artificial Sequence: Synthetic peptide
  Seed: SCLPACVYGL
SCLPACVYGM

SEQ ID NO: 21437 - protein, 10 aa, Artificial Sequence
  Description of Artificial Sequence: Synthetic peptide
  Seed: SCLPACVYGL
SCLPACVYGV

SEQ ID NO: 21438 - protein, 10 aa, Artificial Sequence
  Description of Artificial Sequence: Synthetic peptide
  Seed: SCLPACVYGL
SALPACVYGM

SEQ ID NO: 21439 - protein, 10 aa, Artificial Sequence
  Description of Artificial Sequence: Synthetic peptide
  Seed: SCLPACVYGL
SALPACVYGL

SEQ ID NO: 21440 - protein, 10 aa, Artificial Sequence
  Description of Artificial Sequence: Synthetic peptide
  Seed: SCLPACVYGL
SALPACVYGI

SEQ ID NO: 21441 - protein, 10 aa, Artificial Sequence
  Description of Artificial Sequence: Synthetic peptide
  Seed: SCLPACVYGL
SALPACVYGA

SEQ ID NO: 21442 - protein, 11 aa, Artificial Sequence
  Description of Artificial Sequence: Synthetic peptide
  Seed: SAYERMCNILK
SSYERMCNILK

SEQ ID NO: 21443 - protein, 11 aa, Artificial Sequence
  Description of Artificial Sequence: Synthetic peptide
  Seed: SAYERMCNILK
SSYERMCNILY

SEQ ID NO: 21444 - protein, 11 aa, Artificial Sequence
  Description of Artificial Sequence: Synthetic peptide
  Seed: SAYERMCNILK
SSYERMCNILV

SEQ ID NO: 21445 - protein, 11 aa, Artificial Sequence
  Description of Artificial Sequence: Synthetic peptide
  Seed: SAYERMCNILK
STYERMCNILA

SEQ ID NO: 21446 - protein, 11 aa, Artificial Sequence
  Description of Artificial Sequence: Synthetic peptide
  Seed: SAYERMCNILK
STYERMCNILR

SEQ ID NO: 21447 - protein, 11 aa, Artificial Sequence
  Description of Artificial Sequence: Synthetic peptide
  Seed: SAYERMCNILK
STYERMCNILI

SEQ ID NO: 21448 - protein, 11 aa, Artificial Sequence
  Description of Artificial Sequence: Synthetic peptide
  Seed: SAYERMCNILK
STYERMCNILL

SEQ ID NO: 21449 - protein, 11 aa, Artificial Sequence
  Description of Artificial Sequence: Synthetic peptide
  Seed: SAYERMCNILK
STYERMCNILK

SEQ ID NO: 21450 - protein, 11 aa, Artificial Sequence
  Description of Artificial Sequence: Synthetic peptide
  Seed: SAYERMCNILK
STYERMCNILY

SEQ ID NO: 21451 - protein, 11 aa, Artificial Sequence
  Description of Artificial Sequence: Synthetic peptide
  Seed: SAYERMCNILK
STYERMCNILV

SEQ ID NO: 21452 - protein, 11 aa, Artificial Sequence
  Description of Artificial Sequence: Synthetic peptide
  Seed: SAYERMCNILK
SWYERMCNILR

SEQ ID NO: 21453 - protein, 11 aa, Artificial Sequence
  Description of Artificial Sequence: Synthetic peptide
  Seed: SAYERMCNILK
SWYERMCNILK

SEQ ID NO: 21454 - protein, 11 aa, Artificial Sequence
  Description of Artificial Sequence: Synthetic peptide
  Seed: SAYERMCNILK
SYYERMCNILA

SEQ ID NO: 21455 - protein, 11 aa, Artificial Sequence
  Description of Artificial Sequence: Synthetic peptide
  Seed: SAYERMCNILK
SYYERMCNILR

SEQ ID NO: 21456 - protein, 11 aa, Artificial Sequence
  Description of Artificial Sequence: Synthetic peptide
  Seed: SAYERMCNILK
SYYERMCNILK

SEQ ID NO: 21457 - protein, 11 aa, Artificial Sequence
  Description of Artificial Sequence: Synthetic peptide
  Seed: SAYERMCNILK
SVYERMCNILA

SEQ ID NO: 21458 - protein, 11 aa, Artificial Sequence
  Description of Artificial Sequence: Synthetic peptide
  Seed: SAYERMCNILK
SVYERMCNILR

SEQ ID NO: 21459 - protein, 11 aa, Artificial Sequence
  Description of Artificial Sequence: Synthetic peptide
  Seed: SAYERMCNILK
SVYERMCNILK

SEQ ID NO: 21460 - protein, 11 aa, Artificial Sequence
  Description of Artificial Sequence: Synthetic peptide
  Seed: SAYERMCNILK
SVYERMCNILY

SEQ ID NO: 21461 - protein, 10 aa, Artificial Sequence
  Description of Artificial Sequence: Synthetic peptide
  Seed: SAYERMCNIL
STYERMCNII

SEQ ID NO: 21462 - protein, 10 aa, Artificial Sequence
  Description of Artificial Sequence: Synthetic peptide
  Seed: SAYERMCNIL
SSYERMCNIY

SEQ ID NO: 21463 - protein, 10 aa, Artificial Sequence
  Description of Artificial Sequence: Synthetic peptide
  Seed: SAYERMCNIL
SSYERMCNIW

SEQ ID NO: 21464 - protein, 10 aa, Artificial Sequence
  Description of Artificial Sequence: Synthetic peptide
  Seed: SAYERMCNIL
SRYERMCNIF

SEQ ID NO: 21465 - protein, 9 aa, Artificial Sequence
  Description of Artificial Sequence: Synthetic peptide
  Seed: SAYERMCNI
SVYERMCNV

SEQ ID NO: 21466 - protein, 10 aa, Artificial Sequence
  Description of Artificial Sequence: Synthetic peptide
  Seed: SAYERMCNIL
SAYERMCNII

SEQ ID NO: 21467 - protein, 10 aa, Artificial Sequence
  Description of Artificial Sequence: Synthetic peptide
  Seed: SAYERMCNIL
SAYERMCNIM

SEQ ID NO: 21468 - protein, 10 aa, Artificial Sequence
  Description of Artificial Sequence: Synthetic peptide
  Seed: SAYERMCNIL
SAYERMCNIF

SEQ ID NO: 21469 - protein, 10 aa, Artificial Sequence
  Description of Artificial Sequence: Synthetic peptide
  Seed: SAYERMCNIL
SAYERMCNIW

SEQ ID NO: 21470 - protein, 10 aa, Artificial Sequence
  Description of Artificial Sequence: Synthetic peptide
  Seed: SAYERMCNIL
SAYERMCNIY

SEQ ID NO: 21471 - protein, 10 aa, Artificial Sequence
  Description of Artificial Sequence: Synthetic peptide
  Seed: SAYERMCNIL
SAYERMCNIV

SEQ ID NO: 21472 - protein, 10 aa, Artificial Sequence
  Description of Artificial Sequence: Synthetic peptide
  Seed: SAYERMCNIL
SRYERMCNII

SEQ ID NO: 21473 - protein, 10 aa, Artificial Sequence
  Description of Artificial Sequence: Synthetic peptide
  Seed: SAYERMCNIL
SRYERMCNIL

SEQ ID NO: 21474 - protein, 10 aa, Artificial Sequence
  Description of Artificial Sequence: Synthetic peptide
  Seed: SAYERMCNIL
SRYERMCNIW

SEQ ID NO: 21475 - protein, 10 aa, Artificial Sequence
  Description of Artificial Sequence: Synthetic peptide
  Seed: SAYERMCNIL
SSYERMCNIF

SEQ ID NO: 21476 - protein, 10 aa, Artificial Sequence
  Description of Artificial Sequence: Synthetic peptide
  Seed: SAYERMCNIL
SNYERMCNII

SEQ ID NO: 21477 - protein, 10 aa, Artificial Sequence
  Description of Artificial Sequence: Synthetic peptide
  Seed: SAYERMCNIL
SNYERMCNIL

SEQ ID NO: 21478 - protein, 10 aa, Artificial Sequence
  Description of Artificial Sequence: Synthetic peptide
  Seed: SAYERMCNIL
SNYERMCNIF

SEQ ID NO: 21479 - protein, 10 aa, Artificial Sequence
  Description of Artificial Sequence: Synthetic peptide
  Seed: SAYERMCNIL
SNYERMCNIW

SEQ ID NO: 21480 - protein, 10 aa, Artificial Sequence
  Description of Artificial Sequence: Synthetic peptide
  Seed: SAYERMCNIL
SDYERMCNII

SEQ ID NO: 21481 - protein, 10 aa, Artificial Sequence
  Description of Artificial Sequence: Synthetic peptide
  Seed: SAYERMCNIL
SDYERMCNIL

SEQ ID NO: 21482 - protein, 10 aa, Artificial Sequence
  Description of Artificial Sequence: Synthetic peptide
  Seed: SAYERMCNIL
SDYERMCNIF

SEQ ID NO: 21483 - protein, 10 aa, Artificial Sequence
  Description of Artificial Sequence: Synthetic peptide
  Seed: SAYERMCNIL
SDYERMCNIW

SEQ ID NO: 21484 - protein, 10 aa, Artificial Sequence
  Description of Artificial Sequence: Synthetic peptide
  Seed: SAYERMCNIL
SCYERMCNII

SEQ ID NO: 21485 - protein, 9 aa, Artificial Sequence
  Description of Artificial Sequence: Synthetic peptide
  Seed: SAYERMCNI
SVYERMCNY

SEQ ID NO: 21486 - protein, 9 aa, Artificial Sequence
  Description of Artificial Sequence: Synthetic peptide
  Seed: SAYERMCNI
SVYERMCNW

SEQ ID NO: 21487 - protein, 9 aa, Artificial Sequence
  Description of Artificial Sequence: Synthetic peptide
  Seed: SAYERMCNI
SVYERMCNT

SEQ ID NO: 21488 - protein, 9 aa, Artificial Sequence
  Description of Artificial Sequence: Synthetic peptide
  Seed: SAYERMCNI
SVYERMCNS

SEQ ID NO: 21489 - protein, 9 aa, Artificial Sequence
  Description of Artificial Sequence: Synthetic peptide
  Seed: SAYERMCNI
STYERMCNI

SEQ ID NO: 21490 - protein, 9 aa, Artificial Sequence
  Description of Artificial Sequence: Synthetic peptide
  Seed: SAYERMCNI
STYERMCNL

SEQ ID NO: 21491 - protein, 9 aa, Artificial Sequence
  Description of Artificial Sequence: Synthetic peptide
  Seed: SAYERMCNI
STYERMCNM

SEQ ID NO: 21492 - protein, 9 aa, Artificial Sequence
  Description of Artificial Sequence: Synthetic peptide
  Seed: SAYERMCNI
STYERMCNF

SEQ ID NO: 21493 - protein, 9 aa, Artificial Sequence
  Description of Artificial Sequence: Synthetic peptide
  Seed: SAYERMCNI
STYERMCNT

SEQ ID NO: 21494 - protein, 9 aa, Artificial Sequence
  Description of Artificial Sequence: Synthetic peptide
  Seed: SAYERMCNI
STYERMCNW

SEQ ID NO: 21495 - protein, 9 aa, Artificial Sequence
  Description of Artificial Sequence: Synthetic peptide
  Seed: SAYERMCNI
STYERMCNY

SEQ ID NO: 21496 - protein, 9 aa, Artificial Sequence
  Description of Artificial Sequence: Synthetic peptide
  Seed: SAYERMCNI
STYERMCNV

SEQ ID NO: 21497 - protein, 9 aa, Artificial Sequence
  Description of Artificial Sequence: Synthetic peptide
  Seed: SAYERMCNI
SWYERMCNV

SEQ ID NO: 21498 - protein, 9 aa, Artificial Sequence
  Description of Artificial Sequence: Synthetic peptide
  Seed: SAYERMCNI
SYYERMCNI

SEQ ID NO: 21499 - protein, 9 aa, Artificial Sequence
  Description of Artificial Sequence: Synthetic peptide
  Seed: SAYERMCNI
SYYERMCNL

SEQ ID NO: 21500 - protein, 9 aa, Artificial Sequence
  Description of Artificial Sequence: Synthetic peptide
  Seed: SAYERMCNI
SYYERMCNM

SEQ ID NO: 21501 - protein, 9 aa, Artificial Sequence
  Description of Artificial Sequence: Synthetic peptide
  Seed: SAYERMCNI
SYYERMCNV

SEQ ID NO: 21502 - protein, 9 aa, Artificial Sequence
  Description of Artificial Sequence: Synthetic peptide
  Seed: SAYERMCNI
SVYERMCNA

SEQ ID NO: 21503 - protein, 9 aa, Artificial Sequence
  Description of Artificial Sequence: Synthetic peptide
  Seed: SAYERMCNI
SVYERMCNC

SEQ ID NO: 21504 - protein, 9 aa, Artificial Sequence
  Description of Artificial Sequence: Synthetic peptide
  Seed: SAYERMCNI
SVYERMCNI

SEQ ID NO: 21505 - protein, 9 aa, Artificial Sequence
  Description of Artificial Sequence: Synthetic peptide
  Seed: SAYERMCNI
SVYERMCNL

SEQ ID NO: 21506 - protein, 9 aa, Artificial Sequence
  Description of Artificial Sequence: Synthetic peptide
  Seed: SAYERMCNI
SVYERMCNM

SEQ ID NO: 21507 - protein, 9 aa, Artificial Sequence
  Description of Artificial Sequence: Synthetic peptide
  Seed: SAYERMCNI
SVYERMCNF

SEQ ID NO: 21508 - protein, 10 aa, Artificial Sequence
  Description of Artificial Sequence: Synthetic peptide
  Seed: SAYERMCNIL
SCYERMCNIL

SEQ ID NO: 21509 - protein, 10 aa, Artificial Sequence
  Description of Artificial Sequence: Synthetic peptide
  Seed: SAYERMCNIL
SCYERMCNIF

SEQ ID NO: 21510 - protein, 10 aa, Artificial Sequence
  Description of Artificial Sequence: Synthetic peptide
  Seed: SAYERMCNIL
SCYERMCNIW

SEQ ID NO: 21511 - protein, 10 aa, Artificial Sequence
  Description of Artificial Sequence: Synthetic peptide
  Seed: SAYERMCNIL
SLYERMCNIF

SEQ ID NO: 21512 - protein, 10 aa, Artificial Sequence
  Description of Artificial Sequence: Synthetic peptide
  Seed: SAYERMCNIL
SKYERMCNII

SEQ ID NO: 21513 - protein, 10 aa, Artificial Sequence
  Description of Artificial Sequence: Synthetic peptide
  Seed: SAYERMCNIL
SKYERMCNIL

SEQ ID NO: 21514 - protein, 10 aa, Artificial Sequence
  Description of Artificial Sequence: Synthetic peptide
  Seed: SAYERMCNIL
SKYERMCNIF

SEQ ID NO: 21515 - protein, 10 aa, Artificial Sequence
  Description of Artificial Sequence: Synthetic peptide
  Seed: SAYERMCNIL
SKYERMCNIW

SEQ ID NO: 21516 - protein, 10 aa, Artificial Sequence
  Description of Artificial Sequence: Synthetic peptide
  Seed: SAYERMCNIL
SMYERMCNII

SEQ ID NO: 21517 - protein, 10 aa, Artificial Sequence
  Description of Artificial Sequence: Synthetic peptide
  Seed: SAYERMCNIL
SMYERMCNIL

SEQ ID NO: 21518 - protein, 10 aa, Artificial Sequence
  Description of Artificial Sequence: Synthetic peptide
  Seed: SAYERMCNIL
SMYERMCNIF

SEQ ID NO: 21519 - protein, 10 aa, Artificial Sequence
  Description of Artificial Sequence: Synthetic peptide
  Seed: SAYERMCNIL
SMYERMCNIW

SEQ ID NO: 21520 - protein, 10 aa, Artificial Sequence
  Description of Artificial Sequence: Synthetic peptide
  Seed: SAYERMCNIL
SFYERMCNII

SEQ ID NO: 21521 - protein, 10 aa, Artificial Sequence
  Description of Artificial Sequence: Synthetic peptide
  Seed: SAYERMCNIL
SFYERMCNIL

SEQ ID NO: 21522 - protein, 10 aa, Artificial Sequence
  Description of Artificial Sequence: Synthetic peptide
  Seed: SAYERMCNIL
SFYERMCNIF

SEQ ID NO: 21523 - protein, 10 aa, Artificial Sequence
  Description of Artificial Sequence: Synthetic peptide
  Seed: SAYERMCNIL
SFYERMCNIW

SEQ ID NO: 21524 - protein, 10 aa, Artificial Sequence
  Description of Artificial Sequence: Synthetic peptide
  Seed: SAYERMCNIL
SPYERMCNII

SEQ ID NO: 21525 - protein, 10 aa, Artificial Sequence
  Description of Artificial Sequence: Synthetic peptide
  Seed: SAYERMCNIL
SPYERMCNIL

SEQ ID NO: 21526 - protein, 10 aa, Artificial Sequence
  Description of Artificial Sequence: Synthetic peptide
  Seed: SAYERMCNIL
SPYERMCNIF

SEQ ID NO: 21527 - protein, 10 aa, Artificial Sequence
  Description of Artificial Sequence: Synthetic peptide
  Seed: SAYERMCNIL
SPYERMCNIW

SEQ ID NO: 21528 - protein, 10 aa, Artificial Sequence
  Description of Artificial Sequence: Synthetic peptide
  Seed: SAYERMCNIL
SSYERMCNII

SEQ ID NO: 21529 - protein, 10 aa, Artificial Sequence
  Description of Artificial Sequence: Synthetic peptide
  Seed: SAYERMCNIL
SSYERMCNIL

SEQ ID NO: 21530 - protein, 10 aa, Artificial Sequence
  Description of Artificial Sequence: Synthetic peptide
  Seed: SAYERMCNIL
SSYERMCNIM

SEQ ID NO: 21531 - protein, 10 aa, Artificial Sequence
  Description of Artificial Sequence: Synthetic peptide
  Seed: SAYERMCNIL
SLYERMCNIW

SEQ ID NO: 21532 - protein, 10 aa, Artificial Sequence
  Description of Artificial Sequence: Synthetic peptide
  Seed: SAYERMCNIL
SLYERMCNIL

SEQ ID NO: 21533 - protein, 10 aa, Artificial Sequence
  Description of Artificial Sequence: Synthetic peptide
  Seed: SAYERMCNIL
SQYERMCNII

SEQ ID NO: 21534 - protein, 10 aa, Artificial Sequence
  Description of Artificial Sequence: Synthetic peptide
  Seed: SAYERMCNIL
SLYERMCNII

SEQ ID NO: 21535 - protein, 10 aa, Artificial Sequence
  Description of Artificial Sequence: Synthetic peptide
  Seed: SAYERMCNIL
SQYERMCNIL

SEQ ID NO: 21536 - protein, 10 aa, Artificial Sequence
  Description of Artificial Sequence: Synthetic peptide
  Seed: SAYERMCNIL
SQYERMCNIF

SEQ ID NO: 21537 - protein, 10 aa, Artificial Sequence
  Description of Artificial Sequence: Synthetic peptide
  Seed: SAYERMCNIL
SQYERMCNIW

SEQ ID NO: 21538 - protein, 10 aa, Artificial Sequence
  Description of Artificial Sequence: Synthetic peptide
  Seed: SAYERMCNIL
SEYERMCNII

SEQ ID NO: 21539 - protein, 10 aa, Artificial Sequence
  Description of Artificial Sequence: Synthetic peptide
  Seed: SAYERMCNIL
SEYERMCNIL

SEQ ID NO: 21540 - protein, 10 aa, Artificial Sequence
  Description of Artificial Sequence: Synthetic peptide
  Seed: SAYERMCNIL
SEYERMCNIF

SEQ ID NO: 21541 - protein, 10 aa, Artificial Sequence
  Description of Artificial Sequence: Synthetic peptide
  Seed: SAYERMCNIL
SEYERMCNIW

SEQ ID NO: 21542 - protein, 10 aa, Artificial Sequence
  Description of Artificial Sequence: Synthetic peptide
  Seed: SAYERMCNIL
SGYERMCNII

SEQ ID NO: 21543 - protein, 10 aa, Artificial Sequence
  Description of Artificial Sequence: Synthetic peptide
  Seed: SAYERMCNIL
SGYERMCNIL

SEQ ID NO: 21544 - protein, 10 aa, Artificial Sequence
  Description of Artificial Sequence: Synthetic peptide
  Seed: SAYERMCNIL
SGYERMCNIF

SEQ ID NO: 21545 - protein, 10 aa, Artificial Sequence
  Description of Artificial Sequence: Synthetic peptide
  Seed: SAYERMCNIL
SGYERMCNIW

SEQ ID NO: 21546 - protein, 10 aa, Artificial Sequence
  Description of Artificial Sequence: Synthetic peptide
  Seed: SAYERMCNIL
SHYERMCNII

SEQ ID NO: 21547 - protein, 10 aa, Artificial Sequence
  Description of Artificial Sequence: Synthetic peptide
  Seed: SAYERMCNIL
SHYERMCNIL

SEQ ID NO: 21548 - protein, 10 aa, Artificial Sequence
  Description of Artificial Sequence: Synthetic peptide
  Seed: SAYERMCNIL
SHYERMCNIF

SEQ ID NO: 21549 - protein, 10 aa, Artificial Sequence
  Description of Artificial Sequence: Synthetic peptide
  Seed: SAYERMCNIL
SHYERMCNIW

SEQ ID NO: 21550 - protein, 10 aa, Artificial Sequence
  Description of Artificial Sequence: Synthetic peptide
  Seed: SAYERMCNIL
SIYERMCNII

SEQ ID NO: 21551 - protein, 10 aa, Artificial Sequence
  Description of Artificial Sequence: Synthetic peptide
  Seed: SAYERMCNIL
SIYERMCNIL

SEQ ID NO: 21552 - protein, 10 aa, Artificial Sequence
  Description of Artificial Sequence: Synthetic peptide
  Seed: SAYERMCNIL
SIYERMCNIF

SEQ ID NO: 21553 - protein, 10 aa, Artificial Sequence
  Description of Artificial Sequence: Synthetic peptide
  Seed: SAYERMCNIL
SIYERMCNIW

SEQ ID NO: 21554 - protein, 10 aa, Artificial Sequence
  Description of Artificial Sequence: Synthetic peptide
  Seed: SCLPACVYGL
SQLPACVYGA

SEQ ID NO: 21555 - protein, 10 aa, Artificial Sequence
  Description of Artificial Sequence: Synthetic peptide
  Seed: SCLPACVYGL
SQLPACVYGL

SEQ ID NO: 21556 - protein, 10 aa, Artificial Sequence
  Description of Artificial Sequence: Synthetic peptide
  Seed: SDMRAEIIRM
SWMRAEIIRI

SEQ ID NO: 21557 - protein, 10 aa, Artificial Sequence
  Description of Artificial Sequence: Synthetic peptide
  Seed: SDMRAEIIRM
SRMRAEIIRL

SEQ ID NO: 21558 - protein, 10 aa, Artificial Sequence
  Description of Artificial Sequence: Synthetic peptide
  Seed: SDMRAEIIRM
SRMRAEIIRV

SEQ ID NO: 21559 - protein, 10 aa, Artificial Sequence
  Description of Artificial Sequence: Synthetic peptide
  Seed: SDMRAEIIRM
SNMRAEIIRA

SEQ ID NO: 21560 - protein, 10 aa, Artificial Sequence
  Description of Artificial Sequence: Synthetic peptide
  Seed: SDMRAEIIRM
SNMRAEIIRI

SEQ ID NO: 21561 - protein, 10 aa, Artificial Sequence
  Description of Artificial Sequence: Synthetic peptide
  Seed: SDMRAEIIRM
SNMRAEIIRL

SEQ ID NO: 21562 - protein, 10 aa, Artificial Sequence
  Description of Artificial Sequence: Synthetic peptide
  Seed: SDMRAEIIRM
SNMRAEIIRV

SEQ ID NO: 21563 - protein, 10 aa, Artificial Sequence
  Description of Artificial Sequence: Synthetic peptide
  Seed: SDMRAEIIRM
SDMRAEIIRA

SEQ ID NO: 21564 - protein, 10 aa, Artificial Sequence
  Description of Artificial Sequence: Synthetic peptide
  Seed: SDMRAEIIRM
SDMRAEIIRI

SEQ ID NO: 21565 - protein, 10 aa, Artificial Sequence
  Description of Artificial Sequence: Synthetic peptide
  Seed: SDMRAEIIRM
SCMRAEIIRA

SEQ ID NO: 21566 - protein, 10 aa, Artificial Sequence
  Description of Artificial Sequence: Synthetic peptide
  Seed: SDMRAEIIRM
SEMRAEIIRV

SEQ ID NO: 21567 - protein, 10 aa, Artificial Sequence
  Description of Artificial Sequence: Synthetic peptide
  Seed: SDMRAEIIRM
SCMRAEIIRI

SEQ ID NO: 21568 - protein, 10 aa, Artificial Sequence
  Description of Artificial Sequence: Synthetic peptide
  Seed: SDMRAEIIRM
SCMRAEIIRL

SEQ ID NO: 21569 - protein, 10 aa, Artificial Sequence
  Description of Artificial Sequence: Synthetic peptide
  Seed: SDMRAEIIRM
SCMRAEIIRV

SEQ ID NO: 21570 - protein, 10 aa, Artificial Sequence
  Description of Artificial Sequence: Synthetic peptide
  Seed: SDMRAEIIRM
SQMRAEIIRA

SEQ ID NO: 21571 - protein, 10 aa, Artificial Sequence
  Description of Artificial Sequence: Synthetic peptide
  Seed: SDMRAEIIRM
SQMRAEIIRI

SEQ ID NO: 21572 - protein, 10 aa, Artificial Sequence
  Description of Artificial Sequence: Synthetic peptide
  Seed: SDMRAEIIRM
SQMRAEIIRL

SEQ ID NO: 21573 - protein, 10 aa, Artificial Sequence
  Description of Artificial Sequence: Synthetic peptide
  Seed: SDMRAEIIRM
SQMRAEIIRV

SEQ ID NO: 21574 - protein, 10 aa, Artificial Sequence
  Description of Artificial Sequence: Synthetic peptide
  Seed: SDMRAEIIRM
SEMRAEIIRA

SEQ ID NO: 21575 - protein, 10 aa, Artificial Sequence
  Description of Artificial Sequence: Synthetic peptide
  Seed: SDMRAEIIRM
SEMRAEIIRI

SEQ ID NO: 21576 - protein, 10 aa, Artificial Sequence
  Description of Artificial Sequence: Synthetic peptide
  Seed: SDMRAEIIRM
SRMRAEIIRI

SEQ ID NO: 21577 - protein, 10 aa, Artificial Sequence
  Description of Artificial Sequence: Synthetic peptide
  Seed: SDMRAEIIRM
SRMRAEIIRA

SEQ ID NO: 21578 - protein, 10 aa, Artificial Sequence
  Description of Artificial Sequence: Synthetic peptide
  Seed: SDMRAEIIRM
SAMRAEIIRV

SEQ ID NO: 21579 - protein, 10 aa, Artificial Sequence
  Description of Artificial Sequence: Synthetic peptide
  Seed: SDMRAEIIRM
SAMRAEIIRL

SEQ ID NO: 21580 - protein, 11 aa, Artificial Sequence
  Description of Artificial Sequence: Synthetic peptide
  Seed: SCLPACVYGPA
SSLPACVYGPA

SEQ ID NO: 21581 - protein, 11 aa, Artificial Sequence
  Description of Artificial Sequence: Synthetic peptide
  Seed: SCLPACVYGPA
STLPACVYGPA

SEQ ID NO: 21582 - protein, 11 aa, Artificial Sequence
  Description of Artificial Sequence: Synthetic peptide
  Seed: SCLPACVYGPA
SWLPACVYGPA

SEQ ID NO: 21583 - protein, 11 aa, Artificial Sequence
  Description of Artificial Sequence: Synthetic peptide
  Seed: SCLPACVYGPA
SYLPACVYGPA

SEQ ID NO: 21584 - protein, 11 aa, Artificial Sequence
  Description of Artificial Sequence: Synthetic peptide
  Seed: SCLPACVYGPA
SVLPACVYGPA

SEQ ID NO: 21585 - protein, 9 aa, Artificial Sequence
  Description of Artificial Sequence: Synthetic peptide
  Seed: SDEKATNPI
SDEKATNPL

SEQ ID NO: 21586 - protein, 9 aa, Artificial Sequence
  Description of Artificial Sequence: Synthetic peptide
  Seed: SDEKATNPI
SQEKATNPI

SEQ ID NO: 21587 - protein, 9 aa, Artificial Sequence
  Description of Artificial Sequence: Synthetic peptide
  Seed: SDEKATNPI
SQEKATNPL

SEQ ID NO: 21588 - protein, 9 aa, Artificial Sequence
  Description of Artificial Sequence: Synthetic peptide
  Seed: SDEKATNPI
SQEKATNPM

SEQ ID NO: 21589 - protein, 9 aa, Artificial Sequence
  Description of Artificial Sequence: Synthetic peptide
  Seed: SDEKATNPI
SQEKATNPF

SEQ ID NO: 21590 - protein, 9 aa, Artificial Sequence
  Description of Artificial Sequence: Synthetic peptide
  Seed: SDEKATNPI
SQEKATNPV

SEQ ID NO: 21591 - protein, 9 aa, Artificial Sequence
  Description of Artificial Sequence: Synthetic peptide
  Seed: SDEKATNPI
SEEKATNPA

SEQ ID NO: 21592 - protein, 9 aa, Artificial Sequence
  Description of Artificial Sequence: Synthetic peptide
  Seed: SDEKATNPI
SEEKATNPI

SEQ ID NO: 21593 - protein, 9 aa, Artificial Sequence
  Description of Artificial Sequence: Synthetic peptide
  Seed: SDEKATNPI
SEEKATNPL

SEQ ID NO: 21594 - protein, 9 aa, Artificial Sequence
  Description of Artificial Sequence: Synthetic peptide
  Seed: SDEKATNPI
SEEKATNPM

SEQ ID NO: 21595 - protein, 9 aa, Artificial Sequence
  Description of Artificial Sequence: Synthetic peptide
  Seed: SDEKATNPI
SEEKATNPF

SEQ ID NO: 21596 - protein, 9 aa, Artificial Sequence
  Description of Artificial Sequence: Synthetic peptide
  Seed: SDEKATNPI
SEEKATNPV

SEQ ID NO: 21597 - protein, 10 aa, Artificial Sequence
  Description of Artificial Sequence: Synthetic peptide
  Seed: SDMRAEIIRM
SAMRAEIIRA

SEQ ID NO: 21598 - protein, 10 aa, Artificial Sequence
  Description of Artificial Sequence: Synthetic peptide
  Seed: SDMRAEIIRM
SAMRAEIIRI

SEQ ID NO: 21599 - protein, 10 aa, Artificial Sequence
  Description of Artificial Sequence: Synthetic peptide
  Seed: SDMRAEIIRM
SEMRAEIIRL

SEQ ID NO: 21600 - protein, 10 aa, Artificial Sequence
  Description of Artificial Sequence: Synthetic peptide
  Seed: SDMRAEIIRM
SGMRAEIIRA

SEQ ID NO: 21601 - protein, 10 aa, Artificial Sequence
  Description of Artificial Sequence: Synthetic peptide
  Seed: SCLPACVYGL
SQLPACVYGM

SEQ ID NO: 21602 - protein, 10 aa, Artificial Sequence
  Description of Artificial Sequence: Synthetic peptide
  Seed: SDMRAEIIRM
SPMRAEIIRL

SEQ ID NO: 21603 - protein, 10 aa, Artificial Sequence
  Description of Artificial Sequence: Synthetic peptide
  Seed: SDMRAEIIRM
SMMRAEIIRM

SEQ ID NO: 21604 - protein, 10 aa, Artificial Sequence
  Description of Artificial Sequence: Synthetic peptide
  Seed: SDMRAEIIRM
SMMRAEIIRT

SEQ ID NO: 21605 - protein, 10 aa, Artificial Sequence
  Description of Artificial Sequence: Synthetic peptide
  Seed: SDMRAEIIRM
SMMRAEIIRV

SEQ ID NO: 21606 - protein, 10 aa, Artificial Sequence
  Description of Artificial Sequence: Synthetic peptide
  Seed: SDMRAEIIRM
SFMRAEIIRA

SEQ ID NO: 21607 - protein, 10 aa, Artificial Sequence
  Description of Artificial Sequence: Synthetic peptide
  Seed: SDMRAEIIRM
SFMRAEIIRI

SEQ ID NO: 21608 - protein, 10 aa, Artificial Sequence
  Description of Artificial Sequence: Synthetic peptide
  Seed: SDMRAEIIRM
SFMRAEIIRL

SEQ ID NO: 21609 - protein, 10 aa, Artificial Sequence
  Description of Artificial Sequence: Synthetic peptide
  Seed: SDMRAEIIRM
SFMRAEIIRV

SEQ ID NO: 21610 - protein, 10 aa, Artificial Sequence
  Description of Artificial Sequence: Synthetic peptide
  Seed: SDMRAEIIRM
SPMRAEIIRA

SEQ ID NO: 21611 - protein, 10 aa, Artificial Sequence
  Description of Artificial Sequence: Synthetic peptide
  Seed: SDMRAEIIRM
SPMRAEIIRI

SEQ ID NO: 21612 - protein, 10 aa, Artificial Sequence
  Description of Artificial Sequence: Synthetic peptide
  Seed: SDMRAEIIRM
SPMRAEIIRV

SEQ ID NO: 21613 - protein, 10 aa, Artificial Sequence
  Description of Artificial Sequence: Synthetic peptide
  Seed: SDMRAEIIRM
SGMRAEIIRI

SEQ ID NO: 21614 - protein, 10 aa, Artificial Sequence
  Description of Artificial Sequence: Synthetic peptide
  Seed: SDMRAEIIRM
SSMRAEIIRA

SEQ ID NO: 21615 - protein, 10 aa, Artificial Sequence
  Description of Artificial Sequence: Synthetic peptide
  Seed: SDMRAEIIRM
SSMRAEIIRI

SEQ ID NO: 21616 - protein, 10 aa, Artificial Sequence
  Description of Artificial Sequence: Synthetic peptide
  Seed: SDMRAEIIRM
SSMRAEIIRL

SEQ ID NO: 21617 - protein, 10 aa, Artificial Sequence
  Description of Artificial Sequence: Synthetic peptide
  Seed: SDMRAEIIRM
SSMRAEIIRV

SEQ ID NO: 21618 - protein, 10 aa, Artificial Sequence
  Description of Artificial Sequence: Synthetic peptide
  Seed: SDMRAEIIRM
STMRAEIIRA

SEQ ID NO: 21619 - protein, 10 aa, Artificial Sequence
  Description of Artificial Sequence: Synthetic peptide
  Seed: SDMRAEIIRM
STMRAEIIRI

SEQ ID NO: 21620 - protein, 10 aa, Artificial Sequence
  Description of Artificial Sequence: Synthetic peptide
  Seed: SDMRAEIIRM
STMRAEIIRL

SEQ ID NO: 21621 - protein, 10 aa, Artificial Sequence
  Description of Artificial Sequence: Synthetic peptide
  Seed: SDMRAEIIRM
STMRAEIIRV

SEQ ID NO: 21622 - protein, 10 aa, Artificial Sequence
  Description of Artificial Sequence: Synthetic peptide
  Seed: SDMRAEIIRM
SWMRAEIIRA

SEQ ID NO: 21623 - protein, 10 aa, Artificial Sequence
  Description of Artificial Sequence: Synthetic peptide
  Seed: SDMRAEIIRM
SMMRAEIIRL

SEQ ID NO: 21624 - protein, 10 aa, Artificial Sequence
  Description of Artificial Sequence: Synthetic peptide
  Seed: SDMRAEIIRM
SMMRAEIIRI

SEQ ID NO: 21625 - protein, 10 aa, Artificial Sequence
  Description of Artificial Sequence: Synthetic peptide
  Seed: SDMRAEIIRM
SMMRAEIIRA

SEQ ID NO: 21626 - protein, 10 aa, Artificial Sequence
  Description of Artificial Sequence: Synthetic peptide
  Seed: SDMRAEIIRM
SKMRAEIIRV

SEQ ID NO: 21627 - protein, 10 aa, Artificial Sequence
  Description of Artificial Sequence: Synthetic peptide
  Seed: SDMRAEIIRM
SGMRAEIIRL

SEQ ID NO: 21628 - protein, 10 aa, Artificial Sequence
  Description of Artificial Sequence: Synthetic peptide
  Seed: SDMRAEIIRM
SGMRAEIIRV

SEQ ID NO: 21629 - protein, 10 aa, Artificial Sequence
  Description of Artificial Sequence: Synthetic peptide
  Seed: SDMRAEIIRM
SHMRAEIIRA

SEQ ID NO: 21630 - protein, 10 aa, Artificial Sequence
  Description of Artificial Sequence: Synthetic peptide
  Seed: SDMRAEIIRM
SHMRAEIIRI

SEQ ID NO: 21631 - protein, 10 aa, Artificial Sequence
  Description of Artificial Sequence: Synthetic peptide
  Seed: SDMRAEIIRM
SHMRAEIIRL

SEQ ID NO: 21632 - protein, 10 aa, Artificial Sequence
  Description of Artificial Sequence: Synthetic peptide
  Seed: SDMRAEIIRM
SHMRAEIIRV

SEQ ID NO: 21633 - protein, 10 aa, Artificial Sequence
  Description of Artificial Sequence: Synthetic peptide
  Seed: SDMRAEIIRM
SIMRAEIIRA

SEQ ID NO: 21634 - protein, 10 aa, Artificial Sequence
  Description of Artificial Sequence: Synthetic peptide
  Seed: SDMRAEIIRM
SIMRAEIIRI

SEQ ID NO: 21635 - protein, 10 aa, Artificial Sequence
  Description of Artificial Sequence: Synthetic peptide
  Seed: SDMRAEIIRM
SIMRAEIIRL

SEQ ID NO: 21636 - protein, 10 aa, Artificial Sequence
  Description of Artificial Sequence: Synthetic peptide
  Seed: SDMRAEIIRM
SIMRAEIIRV

SEQ ID NO: 21637 - protein, 10 aa, Artificial Sequence
  Description of Artificial Sequence: Synthetic peptide
  Seed: SDMRAEIIRM
SLMRAEIIRA

SEQ ID NO: 21638 - protein, 10 aa, Artificial Sequence
  Description of Artificial Sequence: Synthetic peptide
  Seed: SDMRAEIIRM
SLMRAEIIRI

SEQ ID NO: 21639 - protein, 10 aa, Artificial Sequence
  Description of Artificial Sequence: Synthetic peptide
  Seed: SDMRAEIIRM
SLMRAEIIRL

SEQ ID NO: 21640 - protein, 10 aa, Artificial Sequence
  Description of Artificial Sequence: Synthetic peptide
  Seed: SDMRAEIIRM
SLMRAEIIRM

SEQ ID NO: 21641 - protein, 10 aa, Artificial Sequence
  Description of Artificial Sequence: Synthetic peptide
  Seed: SDMRAEIIRM
SLMRAEIIRT

SEQ ID NO: 21642 - protein, 10 aa, Artificial Sequence
  Description of Artificial Sequence: Synthetic peptide
  Seed: SDMRAEIIRM
SLMRAEIIRV

SEQ ID NO: 21643 - protein, 10 aa, Artificial Sequence
  Description of Artificial Sequence: Synthetic peptide
  Seed: SDMRAEIIRM
SKMRAEIIRA

SEQ ID NO: 21644 - protein, 10 aa, Artificial Sequence
  Description of Artificial Sequence: Synthetic peptide
  Seed: SDMRAEIIRM
SKMRAEIIRI

SEQ ID NO: 21645 - protein, 10 aa, Artificial Sequence
  Description of Artificial Sequence: Synthetic peptide
  Seed: SDMRAEIIRM
SKMRAEIIRL

SEQ ID NO: 21646 - protein, 11 aa, Artificial Sequence
  Description of Artificial Sequence: Synthetic peptide
  Seed: SCLPACVYGPA
SPLPACVYGPA

SEQ ID NO: 21647 - protein, 11 aa, Artificial Sequence
  Description of Artificial Sequence: Synthetic peptide
  Seed: SCLPACVYGPA
SFLPACVYGPA

SEQ ID NO: 21648 - protein, 11 aa, Artificial Sequence
  Description of Artificial Sequence: Synthetic peptide
  Seed: SCLPACVYGPA
SMLPACVYGPA

SEQ ID NO: 21649 - protein, 10 aa, Artificial Sequence
  Description of Artificial Sequence: Synthetic peptide
  Seed: SCLPACVYGL
SKLPACVYGL

SEQ ID NO: 21650 - protein, 10 aa, Artificial Sequence
  Description of Artificial Sequence: Synthetic peptide
  Seed: SCLPACVYGL
SLLPACVYGI

SEQ ID NO: 21651 - protein, 10 aa, Artificial Sequence
  Description of Artificial Sequence: Synthetic peptide
  Seed: SCLPACVYGL
SLLPACVYGL

SEQ ID NO: 21652 - protein, 10 aa, Artificial Sequence
  Description of Artificial Sequence: Synthetic peptide
  Seed: SCLPACVYGL
SLLPACVYGM

SEQ ID NO: 21653 - protein, 10 aa, Artificial Sequence
  Description of Artificial Sequence: Synthetic peptide
  Seed: SCLPACVYGL
SLLPACVYGF

SEQ ID NO: 21654 - protein, 10 aa, Artificial Sequence
  Description of Artificial Sequence: Synthetic peptide
  Seed: SCLPACVYGL
SLLPACVYGS

SEQ ID NO: 21655 - protein, 10 aa, Artificial Sequence
  Description of Artificial Sequence: Synthetic peptide
  Seed: SCLPACVYGL
SLLPACVYGT

SEQ ID NO: 21656 - protein, 10 aa, Artificial Sequence
  Description of Artificial Sequence: Synthetic peptide
  Seed: SCLPACVYGL
SLLPACVYGV

SEQ ID NO: 21657 - protein, 10 aa, Artificial Sequence
  Description of Artificial Sequence: Synthetic peptide
  Seed: SCLPACVYGL
SKLPACVYGA

SEQ ID NO: 21658 - protein, 10 aa, Artificial Sequence
  Description of Artificial Sequence: Synthetic peptide
  Seed: SCLPACVYGL
SKLPACVYGI

SEQ ID NO: 21659 - protein, 10 aa, Artificial Sequence
  Description of Artificial Sequence: Synthetic peptide
  Seed: SCLPACVYGL
SKLPACVYGM

SEQ ID NO: 21660 - protein, 11 aa, Artificial Sequence
  Description of Artificial Sequence: Synthetic peptide
  Seed: SCLPACVYGPA
SKLPACVYGPA

SEQ ID NO: 21661 - protein, 10 aa, Artificial Sequence
  Description of Artificial Sequence: Synthetic peptide
  Seed: SCLPACVYGL
SKLPACVYGV

SEQ ID NO: 21662 - protein, 10 aa, Artificial Sequence
  Description of Artificial Sequence: Synthetic peptide
  Seed: SCLPACVYGL
SMLPACVYGA

SEQ ID NO: 21663 - protein, 10 aa, Artificial Sequence
  Description of Artificial Sequence: Synthetic peptide
  Seed: SCLPACVYGL
SMLPACVYGC

SEQ ID NO: 21664 - protein, 10 aa, Artificial Sequence
  Description of Artificial Sequence: Synthetic peptide
  Seed: SCLPACVYGL
SMLPACVYGI

SEQ ID NO: 21665 - protein, 10 aa, Artificial Sequence
  Description of Artificial Sequence: Synthetic peptide
  Seed: SCLPACVYGL
SMLPACVYGL

SEQ ID NO: 21666 - protein, 10 aa, Artificial Sequence
  Description of Artificial Sequence: Synthetic peptide
  Seed: SCLPACVYGL
SMLPACVYGM

SEQ ID NO: 21667 - protein, 10 aa, Artificial Sequence
  Description of Artificial Sequence: Synthetic peptide
  Seed: SCLPACVYGL
SMLPACVYGF

SEQ ID NO: 21668 - protein, 10 aa, Artificial Sequence
  Description of Artificial Sequence: Synthetic peptide
  Seed: SCLPACVYGL
SMLPACVYGS

SEQ ID NO: 21669 - protein, 10 aa, Artificial Sequence
  Description of Artificial Sequence: Synthetic peptide
  Seed: SCLPACVYGL
SMLPACVYGT

SEQ ID NO: 21670 - protein, 10 aa, Artificial Sequence
  Description of Artificial Sequence: Synthetic peptide
  Seed: SCLPACVYGL
SLLPACVYGC

SEQ ID NO: 21671 - protein, 10 aa, Artificial Sequence
  Description of Artificial Sequence: Synthetic peptide
  Seed: SCLPACVYGL
SLLPACVYGA

SEQ ID NO: 21672 - protein, 10 aa, Artificial Sequence
  Description of Artificial Sequence: Synthetic peptide
  Seed: SCLPACVYGL
SILPACVYGV

SEQ ID NO: 21673 - protein, 10 aa, Artificial Sequence
  Description of Artificial Sequence: Synthetic peptide
  Seed: SCLPACVYGL
SILPACVYGM

SEQ ID NO: 21674 - protein, 10 aa, Artificial Sequence
  Description of Artificial Sequence: Synthetic peptide
  Seed: SCLPACVYGL
SQLPACVYGV

SEQ ID NO: 21675 - protein, 10 aa, Artificial Sequence
  Description of Artificial Sequence: Synthetic peptide
  Seed: SCLPACVYGL
SELPACVYGA

SEQ ID NO: 21676 - protein, 10 aa, Artificial Sequence
  Description of Artificial Sequence: Synthetic peptide
  Seed: SCLPACVYGL
SELPACVYGI

SEQ ID NO: 21677 - protein, 10 aa, Artificial Sequence
  Description of Artificial Sequence: Synthetic peptide
  Seed: SCLPACVYGL
SELPACVYGL

SEQ ID NO: 21678 - protein, 10 aa, Artificial Sequence
  Description of Artificial Sequence: Synthetic peptide
  Seed: SCLPACVYGL
SELPACVYGM

SEQ ID NO: 21679 - protein, 10 aa, Artificial Sequence
  Description of Artificial Sequence: Synthetic peptide
  Seed: SCLPACVYGL
SELPACVYGV

SEQ ID NO: 21680 - protein, 10 aa, Artificial Sequence
  Description of Artificial Sequence: Synthetic peptide
  Seed: SCLPACVYGL
SGLPACVYGA

SEQ ID NO: 21681 - protein, 10 aa, Artificial Sequence
  Description of Artificial Sequence: Synthetic peptide
  Seed: SCLPACVYGL
SGLPACVYGI

SEQ ID NO: 21682 - protein, 10 aa, Artificial Sequence
  Description of Artificial Sequence: Synthetic peptide
  Seed: SCLPACVYGL
SGLPACVYGL

SEQ ID NO: 21683 - protein, 10 aa, Artificial Sequence
  Description of Artificial Sequence: Synthetic peptide
  Seed: SCLPACVYGL
SGLPACVYGM

SEQ ID NO: 21684 - protein, 10 aa, Artificial Sequence
  Description of Artificial Sequence: Synthetic peptide
  Seed: SCLPACVYGL
SGLPACVYGV

SEQ ID NO: 21685 - protein, 10 aa, Artificial Sequence
  Description of Artificial Sequence: Synthetic peptide
  Seed: SCLPACVYGL
SHLPACVYGA

SEQ ID NO: 21686 - protein, 10 aa, Artificial Sequence
  Description of Artificial Sequence: Synthetic peptide
  Seed: SCLPACVYGL
SHLPACVYGI

SEQ ID NO: 21687 - protein, 10 aa, Artificial Sequence
  Description of Artificial Sequence: Synthetic peptide
  Seed: SCLPACVYGL
SHLPACVYGL

SEQ ID NO: 21688 - protein, 10 aa, Artificial Sequence
  Description of Artificial Sequence: Synthetic peptide
  Seed: SCLPACVYGL
SHLPACVYGM

SEQ ID NO: 21689 - protein, 10 aa, Artificial Sequence
  Description of Artificial Sequence: Synthetic peptide
  Seed: SCLPACVYGL
SHLPACVYGV

SEQ ID NO: 21690 - protein, 10 aa, Artificial Sequence
  Description of Artificial Sequence: Synthetic peptide
  Seed: SCLPACVYGL
SILPACVYGA

SEQ ID NO: 21691 - protein, 10 aa, Artificial Sequence
  Description of Artificial Sequence: Synthetic peptide
  Seed: SCLPACVYGL
SILPACVYGI

SEQ ID NO: 21692 - protein, 10 aa, Artificial Sequence
  Description of Artificial Sequence: Synthetic peptide
  Seed: SCLPACVYGL
SILPACVYGL

SEQ ID NO: 21693 - protein, 10 aa, Artificial Sequence
  Description of Artificial Sequence: Synthetic peptide
  Seed: SCLPACVYGL
SMLPACVYGV

SEQ ID NO: 21694 - protein, 10 aa, Artificial Sequence
  Description of Artificial Sequence: Synthetic peptide
  Seed: SCLPACVYGL
SFLPACVYGA

SEQ ID NO: 21695 - protein, 10 aa, Artificial Sequence
  Description of Artificial Sequence: Synthetic peptide
  Seed: SCLPACVYGL
SFLPACVYGI

SEQ ID NO: 21696 - protein, 10 aa, Artificial Sequence
  Description of Artificial Sequence: Synthetic peptide
  Seed: SCLPACVYGL
SWLPACVYGV

SEQ ID NO: 21697 - protein, 10 aa, Artificial Sequence
  Description of Artificial Sequence: Synthetic peptide
  Seed: SCLPACVYGL
SYLPACVYGI

SEQ ID NO: 21698 - protein, 10 aa, Artificial Sequence
  Description of Artificial Sequence: Synthetic peptide
  Seed: SCLPACVYGL
SYLPACVYGL

SEQ ID NO: 21699 - protein, 10 aa, Artificial Sequence
  Description of Artificial Sequence: Synthetic peptide
  Seed: SCLPACVYGL
SYLPACVYGM

SEQ ID NO: 21700 - protein, 10 aa, Artificial Sequence
  Description of Artificial Sequence: Synthetic peptide
  Seed: SCLPACVYGL
SYLPACVYGV

SEQ ID NO: 21701 - protein, 10 aa, Artificial Sequence
  Description of Artificial Sequence: Synthetic peptide
  Seed: SCLPACVYGL
SVLPACVYGA

SEQ ID NO: 21702 - protein, 10 aa, Artificial Sequence
  Description of Artificial Sequence: Synthetic peptide
  Seed: SCLPACVYGL
SVLPACVYGI

SEQ ID NO: 21703 - protein, 10 aa, Artificial Sequence
  Description of Artificial Sequence: Synthetic peptide
  Seed: SCLPACVYGL
SVLPACVYGL

SEQ ID NO: 21704 - protein, 10 aa, Artificial Sequence
  Description of Artificial Sequence: Synthetic peptide
  Seed: SCLPACVYGL
SVLPACVYGM

SEQ ID NO: 21705 - protein, 10 aa, Artificial Sequence
  Description of Artificial Sequence: Synthetic peptide
  Seed: SCLPACVYGL
SVLPACVYGV

SEQ ID NO: 21706 - protein, 11 aa, Artificial Sequence
  Description of Artificial Sequence: Synthetic peptide
  Seed: SCLPACVYGPA
SALPACVYGPA

SEQ ID NO: 21707 - protein, 11 aa, Artificial Sequence
  Description of Artificial Sequence: Synthetic peptide
  Seed: SCLPACVYGPA
SRLPACVYGPA

SEQ ID NO: 21708 - protein, 11 aa, Artificial Sequence
  Description of Artificial Sequence: Synthetic peptide
  Seed: SCLPACVYGPA
SNLPACVYGPA

SEQ ID NO: 21709 - protein, 11 aa, Artificial Sequence
  Description of Artificial Sequence: Synthetic peptide
  Seed: SCLPACVYGPA
SDLPACVYGPA

SEQ ID NO: 21710 - protein, 11 aa, Artificial Sequence
  Description of Artificial Sequence: Synthetic peptide
  Seed: SCLPACVYGPA
SQLPACVYGPA

SEQ ID NO: 21711 - protein, 11 aa, Artificial Sequence
  Description of Artificial Sequence: Synthetic peptide
  Seed: SCLPACVYGPA
SELPACVYGPA

SEQ ID NO: 21712 - protein, 11 aa, Artificial Sequence
  Description of Artificial Sequence: Synthetic peptide
  Seed: SCLPACVYGPA
SGLPACVYGPA

SEQ ID NO: 21713 - protein, 11 aa, Artificial Sequence
  Description of Artificial Sequence: Synthetic peptide
  Seed: SCLPACVYGPA
SHLPACVYGPA

SEQ ID NO: 21714 - protein, 11 aa, Artificial Sequence
  Description of Artificial Sequence: Synthetic peptide
  Seed: SCLPACVYGPA
SILPACVYGPA

SEQ ID NO: 21715 - protein, 11 aa, Artificial Sequence
  Description of Artificial Sequence: Synthetic peptide
  Seed: SCLPACVYGPA
SLLPACVYGPA

SEQ ID NO: 21716 - protein, 10 aa, Artificial Sequence
  Description of Artificial Sequence: Synthetic peptide
  Seed: SCLPACVYGL
SYLPACVYGA

SEQ ID NO: 21717 - protein, 10 aa, Artificial Sequence
  Description of Artificial Sequence: Synthetic peptide
  Seed: SCLPACVYGL
SWLPACVYGM

SEQ ID NO: 21718 - protein, 10 aa, Artificial Sequence
  Description of Artificial Sequence: Synthetic peptide
  Seed: SCLPACVYGL
SFLPACVYGL

SEQ ID NO: 21719 - protein, 10 aa, Artificial Sequence
  Description of Artificial Sequence: Synthetic peptide
  Seed: SCLPACVYGL
SWLPACVYGL

SEQ ID NO: 21720 - protein, 10 aa, Artificial Sequence
  Description of Artificial Sequence: Synthetic peptide
  Seed: SCLPACVYGL
SFLPACVYGM

SEQ ID NO: 21721 - protein, 10 aa, Artificial Sequence
  Description of Artificial Sequence: Synthetic peptide
  Seed: SCLPACVYGL
SFLPACVYGV

SEQ ID NO: 21722 - protein, 10 aa, Artificial Sequence
  Description of Artificial Sequence: Synthetic peptide
  Seed: SCLPACVYGL
SPLPACVYGA

SEQ ID NO: 21723 - protein, 10 aa, Artificial Sequence
  Description of Artificial Sequence: Synthetic peptide
  Seed: SCLPACVYGL
SPLPACVYGI

SEQ ID NO: 21724 - protein, 10 aa, Artificial Sequence
  Description of Artificial Sequence: Synthetic peptide
  Seed: SCLPACVYGL
SPLPACVYGL

SEQ ID NO: 21725 - protein, 10 aa, Artificial Sequence
  Description of Artificial Sequence: Synthetic peptide
  Seed: SCLPACVYGL
SPLPACVYGM

SEQ ID NO: 21726 - protein, 10 aa, Artificial Sequence
  Description of Artificial Sequence: Synthetic peptide
  Seed: SCLPACVYGL
SPLPACVYGV

SEQ ID NO: 21727 - protein, 10 aa, Artificial Sequence
  Description of Artificial Sequence: Synthetic peptide
  Seed: SCLPACVYGL
SSLPACVYGA

SEQ ID NO: 21728 - protein, 10 aa, Artificial Sequence
  Description of Artificial Sequence: Synthetic peptide
  Seed: SCLPACVYGL
SSLPACVYGI

SEQ ID NO: 21729 - protein, 10 aa, Artificial Sequence
  Description of Artificial Sequence: Synthetic peptide
  Seed: SCLPACVYGL
SSLPACVYGL

SEQ ID NO: 21730 - protein, 10 aa, Artificial Sequence
  Description of Artificial Sequence: Synthetic peptide
  Seed: SCLPACVYGL
SSLPACVYGM

SEQ ID NO: 21731 - protein, 10 aa, Artificial Sequence
  Description of Artificial Sequence: Synthetic peptide
  Seed: SCLPACVYGL
SSLPACVYGV

SEQ ID NO: 21732 - protein, 10 aa, Artificial Sequence
  Description of Artificial Sequence: Synthetic peptide
  Seed: SCLPACVYGL
STLPACVYGA

SEQ ID NO: 21733 - protein, 10 aa, Artificial Sequence
  Description of Artificial Sequence: Synthetic peptide
  Seed: SCLPACVYGL
STLPACVYGI

SEQ ID NO: 21734 - protein, 10 aa, Artificial Sequence
  Description of Artificial Sequence: Synthetic peptide
  Seed: SCLPACVYGL
STLPACVYGL

SEQ ID NO: 21735 - protein, 10 aa, Artificial Sequence
  Description of Artificial Sequence: Synthetic peptide
  Seed: SCLPACVYGL
STLPACVYGM

SEQ ID NO: 21736 - protein, 10 aa, Artificial Sequence
  Description of Artificial Sequence: Synthetic peptide
  Seed: SCLPACVYGL
STLPACVYGV

SEQ ID NO: 21737 - protein, 10 aa, Artificial Sequence
  Description of Artificial Sequence: Synthetic peptide
  Seed: SCLPACVYGL
SWLPACVYGA

SEQ ID NO: 21738 - protein, 10 aa, Artificial Sequence
  Description of Artificial Sequence: Synthetic peptide
  Seed: SCLPACVYGL
SWLPACVYGI

SEQ ID NO: 21739 - protein, 11 aa, Artificial Sequence
  Description of Artificial Sequence: Synthetic peptide
  Seed: SAGQISVQPTF
SQGQISVQPTF

SEQ ID NO: 21740 - protein, 11 aa, Artificial Sequence
  Description of Artificial Sequence: Synthetic peptide
  Seed: SAGQISVQPTF
SCGQISVQPTY

SEQ ID NO: 21741 - protein, 9 aa, Artificial Sequence
  Description of Artificial Sequence: Synthetic peptide
  Seed: SFRGRGVFE
SIRGRGVFF

SEQ ID NO: 21742 - protein, 10 aa, Artificial Sequence
  Description of Artificial Sequence: Synthetic peptide
  Seed: RVSSFIRGTR
RLSSFIRGTV

SEQ ID NO: 21743 - protein, 10 aa, Artificial Sequence
  Description of Artificial Sequence: Synthetic peptide
  Seed: RVSSFIRGTR
RISSFIRGTV

SEQ ID NO: 21744 - protein, 10 aa, Artificial Sequence
  Description of Artificial Sequence: Synthetic peptide
  Seed: RVSSFIRGTR
RLSSFIRGTA

SEQ ID NO: 21745 - protein, 10 aa, Artificial Sequence
  Description of Artificial Sequence: Synthetic peptide
  Seed: RVSSFIRGTR
RLSSFIRGTR

SEQ ID NO: 21746 - protein, 10 aa, Artificial Sequence
  Description of Artificial Sequence: Synthetic peptide
  Seed: RVSSFIRGTR
RLSSFIRGTI

SEQ ID NO: 21747 - protein, 10 aa, Artificial Sequence
  Description of Artificial Sequence: Synthetic peptide
  Seed: RVSSFIRGTR
RLSSFIRGTL

SEQ ID NO: 21748 - protein, 10 aa, Artificial Sequence
  Description of Artificial Sequence: Synthetic peptide
  Seed: RVSSFIRGTR
RLSSFIRGTM

SEQ ID NO: 21749 - protein, 10 aa, Artificial Sequence
  Description of Artificial Sequence: Synthetic peptide
  Seed: RVSSFIRGTR
RLSSFIRGTS

SEQ ID NO: 21750 - protein, 10 aa, Artificial Sequence
  Description of Artificial Sequence: Synthetic peptide
  Seed: RVSSFIRGTR
RLSSFIRGTY

SEQ ID NO: 21751 - protein, 10 aa, Artificial Sequence
  Description of Artificial Sequence: Synthetic peptide
  Seed: RVSSFIRGTR
RKSSFIRGTA

SEQ ID NO: 21752 - protein, 10 aa, Artificial Sequence
  Description of Artificial Sequence: Synthetic peptide
  Seed: RVSSFIRGTR
RMSSFIRGTM

SEQ ID NO: 21753 - protein, 10 aa, Artificial Sequence
  Description of Artificial Sequence: Synthetic peptide
  Seed: RVSSFIRGTR
RKSSFIRGTR

SEQ ID NO: 21754 - protein, 10 aa, Artificial Sequence
  Description of Artificial Sequence: Synthetic peptide
  Seed: RVSSFIRGTR
RKSSFIRGTK

SEQ ID NO: 21755 - protein, 10 aa, Artificial Sequence
  Description of Artificial Sequence: Synthetic peptide
  Seed: RVSSFIRGTR
RKSSFIRGTV

SEQ ID NO: 21756 - protein, 10 aa, Artificial Sequence
  Description of Artificial Sequence: Synthetic peptide
  Seed: RVSSFIRGTR
RMSSFIRGTA

SEQ ID NO: 21757 - protein, 10 aa, Artificial Sequence
  Description of Artificial Sequence: Synthetic peptide
  Seed: RVSSFIRGTR
RMSSFIRGTR

SEQ ID NO: 21758 - protein, 10 aa, Artificial Sequence
  Description of Artificial Sequence: Synthetic peptide
  Seed: RVSSFIRGTR
RMSSFIRGTG

SEQ ID NO: 21759 - protein, 10 aa, Artificial Sequence
  Description of Artificial Sequence: Synthetic peptide
  Seed: RVSSFIRGTR
RMSSFIRGTH

SEQ ID NO: 21760 - protein, 10 aa, Artificial Sequence
  Description of Artificial Sequence: Synthetic peptide
  Seed: RVSSFIRGTR
RMSSFIRGTI

SEQ ID NO: 21761 - protein, 10 aa, Artificial Sequence
  Description of Artificial Sequence: Synthetic peptide
  Seed: RVSSFIRGTR
RMSSFIRGTL

SEQ ID NO: 21762 - protein, 10 aa, Artificial Sequence
  Description of Artificial Sequence: Synthetic peptide
  Seed: RVSSFIRGTR
RISSFIRGTY

SEQ ID NO: 21763 - protein, 10 aa, Artificial Sequence
  Description of Artificial Sequence: Synthetic peptide
  Seed: RVSSFIRGTR
RISSFIRGTS

SEQ ID NO: 21764 - protein, 10 aa, Artificial Sequence
  Description of Artificial Sequence: Synthetic peptide
  Seed: RVSSFIRGTR
RISSFIRGTM

SEQ ID NO: 21765 - protein, 10 aa, Artificial Sequence
  Description of Artificial Sequence: Synthetic peptide
  Seed: RVSSFIRGTR
RISSFIRGTK

SEQ ID NO: 21766 - protein, 10 aa, Artificial Sequence
  Description of Artificial Sequence: Synthetic peptide
  Seed: RVSSFIRGTR
RESSFIRGTK

SEQ ID NO: 21767 - protein, 10 aa, Artificial Sequence
  Description of Artificial Sequence: Synthetic peptide
  Seed: RVSSFIRGTR
RESSFIRGTV

SEQ ID NO: 21768 - protein, 10 aa, Artificial Sequence
  Description of Artificial Sequence: Synthetic peptide
  Seed: RVSSFIRGTR
RGSSFIRGTA

SEQ ID NO: 21769 - protein, 10 aa, Artificial Sequence
  Description of Artificial Sequence: Synthetic peptide
  Seed: RVSSFIRGTR
RGSSFIRGTR

SEQ ID NO: 21770 - protein, 10 aa, Artificial Sequence
  Description of Artificial Sequence: Synthetic peptide
  Seed: RVSSFIRGTR
RGSSFIRGTI

SEQ ID NO: 21771 - protein, 10 aa, Artificial Sequence
  Description of Artificial Sequence: Synthetic peptide
  Seed: RVSSFIRGTR
RGSSFIRGTL

SEQ ID NO: 21772 - protein, 10 aa, Artificial Sequence
  Description of Artificial Sequence: Synthetic peptide
  Seed: RVSSFIRGTR
RGSSFIRGTK

SEQ ID NO: 21773 - protein, 10 aa, Artificial Sequence
  Description of Artificial Sequence: Synthetic peptide
  Seed: RVSSFIRGTR
RGSSFIRGTM

SEQ ID NO: 21774 - protein, 10 aa, Artificial Sequence
  Description of Artificial Sequence: Synthetic peptide
  Seed: RVSSFIRGTR
RGSSFIRGTV

SEQ ID NO: 21775 - protein, 10 aa, Artificial Sequence
  Description of Artificial Sequence: Synthetic peptide
  Seed: RVSSFIRGTR
RHSSFIRGTA

SEQ ID NO: 21776 - protein, 10 aa, Artificial Sequence
  Description of Artificial Sequence: Synthetic peptide
  Seed: RVSSFIRGTR
RHSSFIRGTR

SEQ ID NO: 21777 - protein, 10 aa, Artificial Sequence
  Description of Artificial Sequence: Synthetic peptide
  Seed: RVSSFIRGTR
RHSSFIRGTI

SEQ ID NO: 21778 - protein, 10 aa, Artificial Sequence
  Description of Artificial Sequence: Synthetic peptide
  Seed: RVSSFIRGTR
RHSSFIRGTK

SEQ ID NO: 21779 - protein, 10 aa, Artificial Sequence
  Description of Artificial Sequence: Synthetic peptide
  Seed: RVSSFIRGTR
RHSSFIRGTV

SEQ ID NO: 21780 - protein, 10 aa, Artificial Sequence
  Description of Artificial Sequence: Synthetic peptide
  Seed: RVSSFIRGTR
RISSFIRGTA

SEQ ID NO: 21781 - protein, 10 aa, Artificial Sequence
  Description of Artificial Sequence: Synthetic peptide
  Seed: RVSSFIRGTR
RISSFIRGTR

SEQ ID NO: 21782 - protein, 10 aa, Artificial Sequence
  Description of Artificial Sequence: Synthetic peptide
  Seed: RVSSFIRGTR
RISSFIRGTG

SEQ ID NO: 21783 - protein, 10 aa, Artificial Sequence
  Description of Artificial Sequence: Synthetic peptide
  Seed: RVSSFIRGTR
RISSFIRGTI

SEQ ID NO: 21784 - protein, 10 aa, Artificial Sequence
  Description of Artificial Sequence: Synthetic peptide
  Seed: RVSSFIRGTR
RISSFIRGTL

SEQ ID NO: 21785 - protein, 10 aa, Artificial Sequence
  Description of Artificial Sequence: Synthetic peptide
  Seed: RVSSFIRGTR
RMSSFIRGTK

SEQ ID NO: 21786 - protein, 10 aa, Artificial Sequence
  Description of Artificial Sequence: Synthetic peptide
  Seed: RVSSFIRGTR
RMSSFIRGTS

SEQ ID NO: 21787 - protein, 10 aa, Artificial Sequence
  Description of Artificial Sequence: Synthetic peptide
  Seed: RVSSFIRGTR
RESSFIRGTA

SEQ ID NO: 21788 - protein, 10 aa, Artificial Sequence
  Description of Artificial Sequence: Synthetic peptide
  Seed: RVSSFIRGTR
RTSSFIRGTF

SEQ ID NO: 21789 - protein, 10 aa, Artificial Sequence
  Description of Artificial Sequence: Synthetic peptide
  Seed: RVSSFIRGTR
RSSSFIRGTV

SEQ ID NO: 21790 - protein, 10 aa, Artificial Sequence
  Description of Artificial Sequence: Synthetic peptide
  Seed: RVSSFIRGTR
RTSSFIRGTA

SEQ ID NO: 21791 - protein, 10 aa, Artificial Sequence
  Description of Artificial Sequence: Synthetic peptide
  Seed: RVSSFIRGTR
RTSSFIRGTR

SEQ ID NO: 21792 - protein, 10 aa, Artificial Sequence
  Description of Artificial Sequence: Synthetic peptide
  Seed: RVSSFIRGTR
RTSSFIRGTC

SEQ ID NO: 21793 - protein, 10 aa, Artificial Sequence
  Description of Artificial Sequence: Synthetic peptide
  Seed: RVSSFIRGTR
RTSSFIRGTG

SEQ ID NO: 21794 - protein, 10 aa, Artificial Sequence
  Description of Artificial Sequence: Synthetic peptide
  Seed: RVSSFIRGTR
RTSSFIRGTI

SEQ ID NO: 21795 - protein, 10 aa, Artificial Sequence
  Description of Artificial Sequence: Synthetic peptide
  Seed: RVSSFIRGTR
RTSSFIRGTL

SEQ ID NO: 21796 - protein, 10 aa, Artificial Sequence
  Description of Artificial Sequence: Synthetic peptide
  Seed: RVSSFIRGTR
RTSSFIRGTK

SEQ ID NO: 21797 - protein, 10 aa, Artificial Sequence
  Description of Artificial Sequence: Synthetic peptide
  Seed: RVSSFIRGTR
RTSSFIRGTM

SEQ ID NO: 21798 - protein, 10 aa, Artificial Sequence
  Description of Artificial Sequence: Synthetic peptide
  Seed: RVSSFIRGTR
RTSSFIRGTS

SEQ ID NO: 21799 - protein, 10 aa, Artificial Sequence
  Description of Artificial Sequence: Synthetic peptide
  Seed: RVSSFIRGTR
RMSSFIRGTY

SEQ ID NO: 21800 - protein, 10 aa, Artificial Sequence
  Description of Artificial Sequence: Synthetic peptide
  Seed: RVSSFIRGTR
RTSSFIRGTT

SEQ ID NO: 21801 - protein, 10 aa, Artificial Sequence
  Description of Artificial Sequence: Synthetic peptide
  Seed: RVSSFIRGTR
RTSSFIRGTY

SEQ ID NO: 21802 - protein, 10 aa, Artificial Sequence
  Description of Artificial Sequence: Synthetic peptide
  Seed: RVSSFIRGTR
RTSSFIRGTV

SEQ ID NO: 21803 - protein, 10 aa, Artificial Sequence
  Description of Artificial Sequence: Synthetic peptide
  Seed: RVSSFIRGTR
RWSSFIRGTA

SEQ ID NO: 21804 - protein, 10 aa, Artificial Sequence
  Description of Artificial Sequence: Synthetic peptide
  Seed: RVSSFIRGTR
RWSSFIRGTR

SEQ ID NO: 21805 - protein, 10 aa, Artificial Sequence
  Description of Artificial Sequence: Synthetic peptide
  Seed: RVSSFIRGTR
RWSSFIRGTI

SEQ ID NO: 21806 - protein, 10 aa, Artificial Sequence
  Description of Artificial Sequence: Synthetic peptide
  Seed: RVSSFIRGTR
RWSSFIRGTL

SEQ ID NO: 21807 - protein, 10 aa, Artificial Sequence
  Description of Artificial Sequence: Synthetic peptide
  Seed: RVSSFIRGTR
RWSSFIRGTK

SEQ ID NO: 21808 - protein, 10 aa, Artificial Sequence
  Description of Artificial Sequence: Synthetic peptide
  Seed: RVSSFIRGTR
RWSSFIRGTM

SEQ ID NO: 21809 - protein, 10 aa, Artificial Sequence
  Description of Artificial Sequence: Synthetic peptide
  Seed: RVSSFIRGTR
RSSSFIRGTY

SEQ ID NO: 21810 - protein, 10 aa, Artificial Sequence
  Description of Artificial Sequence: Synthetic peptide
  Seed: RVSSFIRGTR
RSSSFIRGTT

SEQ ID NO: 21811 - protein, 10 aa, Artificial Sequence
  Description of Artificial Sequence: Synthetic peptide
  Seed: RVSSFIRGTR
RSSSFIRGTS

SEQ ID NO: 21812 - protein, 10 aa, Artificial Sequence
  Description of Artificial Sequence: Synthetic peptide
  Seed: RVSSFIRGTR
RSSSFIRGTM

SEQ ID NO: 21813 - protein, 10 aa, Artificial Sequence
  Description of Artificial Sequence: Synthetic peptide
  Seed: RVSSFIRGTR
RMSSFIRGTV

SEQ ID NO: 21814 - protein, 10 aa, Artificial Sequence
  Description of Artificial Sequence: Synthetic peptide
  Seed: RVSSFIRGTR
RFSSFIRGTA

SEQ ID NO: 21815 - protein, 10 aa, Artificial Sequence
  Description of Artificial Sequence: Synthetic peptide
  Seed: RVSSFIRGTR
RFSSFIRGTR

SEQ ID NO: 21816 - protein, 10 aa, Artificial Sequence
  Description of Artificial Sequence: Synthetic peptide
  Seed: RVSSFIRGTR
RFSSFIRGTI

SEQ ID NO: 21817 - protein, 10 aa, Artificial Sequence
  Description of Artificial Sequence: Synthetic peptide
  Seed: RVSSFIRGTR
RFSSFIRGTL

SEQ ID NO: 21818 - protein, 10 aa, Artificial Sequence
  Description of Artificial Sequence: Synthetic peptide
  Seed: RVSSFIRGTR
RFSSFIRGTK

SEQ ID NO: 21819 - protein, 10 aa, Artificial Sequence
  Description of Artificial Sequence: Synthetic peptide
  Seed: RVSSFIRGTR
RFSSFIRGTM

SEQ ID NO: 21820 - protein, 10 aa, Artificial Sequence
  Description of Artificial Sequence: Synthetic peptide
  Seed: RVSSFIRGTR
RFSSFIRGTS

SEQ ID NO: 21821 - protein, 10 aa, Artificial Sequence
  Description of Artificial Sequence: Synthetic peptide
  Seed: RVSSFIRGTR
RFSSFIRGTV

SEQ ID NO: 21822 - protein, 10 aa, Artificial Sequence
  Description of Artificial Sequence: Synthetic peptide
  Seed: RVSSFIRGTR
RPSSFIRGTA

SEQ ID NO: 21823 - protein, 10 aa, Artificial Sequence
  Description of Artificial Sequence: Synthetic peptide
  Seed: RVSSFIRGTR
RPSSFIRGTR

SEQ ID NO: 21824 - protein, 10 aa, Artificial Sequence
  Description of Artificial Sequence: Synthetic peptide
  Seed: RVSSFIRGTR
RPSSFIRGTK

SEQ ID NO: 21825 - protein, 10 aa, Artificial Sequence
  Description of Artificial Sequence: Synthetic peptide
  Seed: RVSSFIRGTR
RPSSFIRGTV

SEQ ID NO: 21826 - protein, 10 aa, Artificial Sequence
  Description of Artificial Sequence: Synthetic peptide
  Seed: RVSSFIRGTR
RSSSFIRGTA

SEQ ID NO: 21827 - protein, 10 aa, Artificial Sequence
  Description of Artificial Sequence: Synthetic peptide
  Seed: RVSSFIRGTR
RSSSFIRGTR

SEQ ID NO: 21828 - protein, 10 aa, Artificial Sequence
  Description of Artificial Sequence: Synthetic peptide
  Seed: RVSSFIRGTR
RSSSFIRGTG

SEQ ID NO: 21829 - protein, 10 aa, Artificial Sequence
  Description of Artificial Sequence: Synthetic peptide
  Seed: RVSSFIRGTR
RSSSFIRGTI

SEQ ID NO: 21830 - protein, 10 aa, Artificial Sequence
  Description of Artificial Sequence: Synthetic peptide
  Seed: RVSSFIRGTR
RSSSFIRGTL

SEQ ID NO: 21831 - protein, 10 aa, Artificial Sequence
  Description of Artificial Sequence: Synthetic peptide
  Seed: RVSSFIRGTR
RSSSFIRGTK

SEQ ID NO: 21832 - protein, 10 aa, Artificial Sequence
  Description of Artificial Sequence: Synthetic peptide
  Seed: RVSSFIRGTR
RESSFIRGTR

SEQ ID NO: 21833 - protein, 10 aa, Artificial Sequence
  Description of Artificial Sequence: Synthetic peptide
  Seed: RVSSFIRGTR
RQSSFIRGTV

SEQ ID NO: 21834 - protein, 11 aa, Artificial Sequence
  Description of Artificial Sequence: Synthetic peptide
  Seed: RVSSFIRGTRV
RWSSFIRGTRE

SEQ ID NO: 21835 - protein, 11 aa, Artificial Sequence
  Description of Artificial Sequence: Synthetic peptide
  Seed: RVSSFIRGTKV
RMSSFIRGTKD

SEQ ID NO: 21836 - protein, 11 aa, Artificial Sequence
  Description of Artificial Sequence: Synthetic peptide
  Seed: RVSSFIRGTKV
RLSSFIRGTKS

SEQ ID NO: 21837 - protein, 11 aa, Artificial Sequence
  Description of Artificial Sequence: Synthetic peptide
  Seed: RVSSFIRGTKV
RLSSFIRGTKT

SEQ ID NO: 21838 - protein, 11 aa, Artificial Sequence
  Description of Artificial Sequence: Synthetic peptide
  Seed: RVSSFIRGTKV
RLSSFIRGTKW

SEQ ID NO: 21839 - protein, 11 aa, Artificial Sequence
  Description of Artificial Sequence: Synthetic peptide
  Seed: RVSSFIRGTKV
RLSSFIRGTKY

SEQ ID NO: 21840 - protein, 11 aa, Artificial Sequence
  Description of Artificial Sequence: Synthetic peptide
  Seed: RVSSFIRGTKV
RKSSFIRGTKK

SEQ ID NO: 21841 - protein, 11 aa, Artificial Sequence
  Description of Artificial Sequence: Synthetic peptide
  Seed: RVSSFIRGTKV
RMSSFIRGTKA

SEQ ID NO: 21842 - protein, 11 aa, Artificial Sequence
  Description of Artificial Sequence: Synthetic peptide
  Seed: RVSSFIRGTKV
RMSSFIRGTKR

SEQ ID NO: 21843 - protein, 11 aa, Artificial Sequence
  Description of Artificial Sequence: Synthetic peptide
  Seed: RVSSFIRGTKV
RMSSFIRGTKN

SEQ ID NO: 21844 - protein, 11 aa, Artificial Sequence
  Description of Artificial Sequence: Synthetic peptide
  Seed: RVSSFIRGTKV
RMSSFIRGTKC

SEQ ID NO: 21845 - protein, 11 aa, Artificial Sequence
  Description of Artificial Sequence: Synthetic peptide
  Seed: RVSSFIRGTKV
RMSSFIRGTKS

SEQ ID NO: 21846 - protein, 11 aa, Artificial Sequence
  Description of Artificial Sequence: Synthetic peptide
  Seed: RVSSFIRGTKV
RMSSFIRGTKQ

SEQ ID NO: 21847 - protein, 11 aa, Artificial Sequence
  Description of Artificial Sequence: Synthetic peptide
  Seed: RVSSFIRGTKV
RMSSFIRGTKE

SEQ ID NO: 21848 - protein, 11 aa, Artificial Sequence
  Description of Artificial Sequence: Synthetic peptide
  Seed: RVSSFIRGTKV
RMSSFIRGTKG

SEQ ID NO: 21849 - protein, 11 aa, Artificial Sequence
  Description of Artificial Sequence: Synthetic peptide
  Seed: RVSSFIRGTKV
RMSSFIRGTKH

SEQ ID NO: 21850 - protein, 11 aa, Artificial Sequence
  Description of Artificial Sequence: Synthetic peptide
  Seed: RVSSFIRGTKV
RMSSFIRGTKI

SEQ ID NO: 21851 - protein, 11 aa, Artificial Sequence
  Description of Artificial Sequence: Synthetic peptide
  Seed: RVSSFIRGTKV
RMSSFIRGTKL

SEQ ID NO: 21852 - protein, 11 aa, Artificial Sequence
  Description of Artificial Sequence: Synthetic peptide
  Seed: RVSSFIRGTKV
RMSSFIRGTKK

SEQ ID NO: 21853 - protein, 11 aa, Artificial Sequence
  Description of Artificial Sequence: Synthetic peptide
  Seed: RVSSFIRGTKV
RMSSFIRGTKM

SEQ ID NO: 21854 - protein, 11 aa, Artificial Sequence
  Description of Artificial Sequence: Synthetic peptide
  Seed: RVSSFIRGTKV
RMSSFIRGTKF

SEQ ID NO: 21855 - protein, 11 aa, Artificial Sequence
  Description of Artificial Sequence: Synthetic peptide
  Seed: RVSSFIRGTKV
RLSSFIRGTKP

SEQ ID NO: 21856 - protein, 11 aa, Artificial Sequence
  Description of Artificial Sequence: Synthetic peptide
  Seed: RVSSFIRGTKV
RLSSFIRGTKF

SEQ ID NO: 21857 - protein, 11 aa, Artificial Sequence
  Description of Artificial Sequence: Synthetic peptide
  Seed: RVSSFIRGTKV
RLSSFIRGTKM

SEQ ID NO: 21858 - protein, 11 aa, Artificial Sequence
  Description of Artificial Sequence: Synthetic peptide
  Seed: RVSSFIRGTKV
RLSSFIRGTKK

SEQ ID NO: 21859 - protein, 11 aa, Artificial Sequence
  Description of Artificial Sequence: Synthetic peptide
  Seed: RVSSFIRGTKV
RCSSFIRGTKK

SEQ ID NO: 21860 - protein, 11 aa, Artificial Sequence
  Description of Artificial Sequence: Synthetic peptide
  Seed: RVSSFIRGTKV
RQSSFIRGTKK

SEQ ID NO: 21861 - protein, 11 aa, Artificial Sequence
  Description of Artificial Sequence: Synthetic peptide
  Seed: RVSSFIRGTKV
RESSFIRGTKK

SEQ ID NO: 21862 - protein, 11 aa, Artificial Sequence
  Description of Artificial Sequence: Synthetic peptide
  Seed: RVSSFIRGTKV
RGSSFIRGTKK

SEQ ID NO: 21863 - protein, 11 aa, Artificial Sequence
  Description of Artificial Sequence: Synthetic peptide
  Seed: RVSSFIRGTKV
RHSSFIRGTKK

SEQ ID NO: 21864 - protein, 11 aa, Artificial Sequence
  Description of Artificial Sequence: Synthetic peptide
  Seed: RVSSFIRGTKV
RISSFIRGTKR

SEQ ID NO: 21865 - protein, 11 aa, Artificial Sequence
  Description of Artificial Sequence: Synthetic peptide
  Seed: RVSSFIRGTKV
RISSFIRGTKK

SEQ ID NO: 21866 - protein, 11 aa, Artificial Sequence
  Description of Artificial Sequence: Synthetic peptide
  Seed: RVSSFIRGTKV
RISSFIRGTKV

SEQ ID NO: 21867 - protein, 11 aa, Artificial Sequence
  Description of Artificial Sequence: Synthetic peptide
  Seed: RVSSFIRGTKV
RLSSFIRGTKA

SEQ ID NO: 21868 - protein, 11 aa, Artificial Sequence
  Description of Artificial Sequence: Synthetic peptide
  Seed: RVSSFIRGTKV
RLSSFIRGTKR

SEQ ID NO: 21869 - protein, 11 aa, Artificial Sequence
  Description of Artificial Sequence: Synthetic peptide
  Seed: RVSSFIRGTKV
RLSSFIRGTKN

SEQ ID NO: 21870 - protein, 11 aa, Artificial Sequence
  Description of Artificial Sequence: Synthetic peptide
  Seed: RVSSFIRGTKV
RLSSFIRGTKD

SEQ ID NO: 21871 - protein, 11 aa, Artificial Sequence
  Description of Artificial Sequence: Synthetic peptide
  Seed: RVSSFIRGTKV
RLSSFIRGTKC

SEQ ID NO: 21872 - protein, 11 aa, Artificial Sequence
  Description of Artificial Sequence: Synthetic peptide
  Seed: RVSSFIRGTKV
RLSSFIRGTKQ

SEQ ID NO: 21873 - protein, 11 aa, Artificial Sequence
  Description of Artificial Sequence: Synthetic peptide
  Seed: RVSSFIRGTKV
RLSSFIRGTKE

SEQ ID NO: 21874 - protein, 11 aa, Artificial Sequence
  Description of Artificial Sequence: Synthetic peptide
  Seed: RVSSFIRGTKV
RLSSFIRGTKG

SEQ ID NO: 21875 - protein, 11 aa, Artificial Sequence
  Description of Artificial Sequence: Synthetic peptide
  Seed: RVSSFIRGTKV
RLSSFIRGTKH

SEQ ID NO: 21876 - protein, 11 aa, Artificial Sequence
  Description of Artificial Sequence: Synthetic peptide
  Seed: RVSSFIRGTKV
RLSSFIRGTKI

SEQ ID NO: 21877 - protein, 11 aa, Artificial Sequence
  Description of Artificial Sequence: Synthetic peptide
  Seed: RVSSFIRGTKV
RLSSFIRGTKL

SEQ ID NO: 21878 - protein, 11 aa, Artificial Sequence
  Description of Artificial Sequence: Synthetic peptide
  Seed: RVSSFIRGTKV
RMSSFIRGTKP

SEQ ID NO: 21879 - protein, 11 aa, Artificial Sequence
  Description of Artificial Sequence: Synthetic peptide
  Seed: RVSSFIRGTKV
RMSSFIRGTKT

SEQ ID NO: 21880 - protein, 10 aa, Artificial Sequence
  Description of Artificial Sequence: Synthetic peptide
  Seed: RVSSFIRGTR
RQSSFIRGTS

SEQ ID NO: 21881 - protein, 10 aa, Artificial Sequence
  Description of Artificial Sequence: Synthetic peptide
  Seed: RVSSFIRGTR
RCSSFIRGTA

SEQ ID NO: 21882 - protein, 10 aa, Artificial Sequence
  Description of Artificial Sequence: Synthetic peptide
  Seed: RVSSFIRGTR
RNSSFIRGTA

SEQ ID NO: 21883 - protein, 10 aa, Artificial Sequence
  Description of Artificial Sequence: Synthetic peptide
  Seed: RVSSFIRGTR
RNSSFIRGTR

SEQ ID NO: 21884 - protein, 10 aa, Artificial Sequence
  Description of Artificial Sequence: Synthetic peptide
  Seed: RVSSFIRGTR
RNSSFIRGTI

SEQ ID NO: 21885 - protein, 10 aa, Artificial Sequence
  Description of Artificial Sequence: Synthetic peptide
  Seed: RVSSFIRGTR
RNSSFIRGTK

SEQ ID NO: 21886 - protein, 10 aa, Artificial Sequence
  Description of Artificial Sequence: Synthetic peptide
  Seed: RVSSFIRGTR
RNSSFIRGTV

SEQ ID NO: 21887 - protein, 10 aa, Artificial Sequence
  Description of Artificial Sequence: Synthetic peptide
  Seed: RVSSFIRGTR
RDSSFIRGTA

SEQ ID NO: 21888 - protein, 10 aa, Artificial Sequence
  Description of Artificial Sequence: Synthetic peptide
  Seed: RVSSFIRGTR
RDSSFIRGTK

SEQ ID NO: 21889 - protein, 10 aa, Artificial Sequence
  Description of Artificial Sequence: Synthetic peptide
  Seed: RVSSFIRGTR
RDSSFIRGTV

SEQ ID NO: 21890 - protein, 10 aa, Artificial Sequence
  Description of Artificial Sequence: Synthetic peptide
  Seed: RVSSFIRGTR
RCSSFIRGTR

SEQ ID NO: 21891 - protein, 11 aa, Artificial Sequence
  Description of Artificial Sequence: Synthetic peptide
  Seed: RVSSFIRGTKV
RMSSFIRGTKW

SEQ ID NO: 21892 - protein, 10 aa, Artificial Sequence
  Description of Artificial Sequence: Synthetic peptide
  Seed: RVSSFIRGTR
RCSSFIRGTI

SEQ ID NO: 21893 - protein, 10 aa, Artificial Sequence
  Description of Artificial Sequence: Synthetic peptide
  Seed: RVSSFIRGTR
RCSSFIRGTK

SEQ ID NO: 21894 - protein, 10 aa, Artificial Sequence
  Description of Artificial Sequence: Synthetic peptide
  Seed: RVSSFIRGTR
RCSSFIRGTV

SEQ ID NO: 21895 - protein, 10 aa, Artificial Sequence
  Description of Artificial Sequence: Synthetic peptide
  Seed: RVSSFIRGTR
RQSSFIRGTA

SEQ ID NO: 21896 - protein, 10 aa, Artificial Sequence
  Description of Artificial Sequence: Synthetic peptide
  Seed: RVSSFIRGTR
RQSSFIRGTR

SEQ ID NO: 21897 - protein, 10 aa, Artificial Sequence
  Description of Artificial Sequence: Synthetic peptide
  Seed: RVSSFIRGTR
RQSSFIRGTI

SEQ ID NO: 21898 - protein, 10 aa, Artificial Sequence
  Description of Artificial Sequence: Synthetic peptide
  Seed: RVSSFIRGTR
RQSSFIRGTL

SEQ ID NO: 21899 - protein, 10 aa, Artificial Sequence
  Description of Artificial Sequence: Synthetic peptide
  Seed: RVSSFIRGTR
RQSSFIRGTK

SEQ ID NO: 21900 - protein, 10 aa, Artificial Sequence
  Description of Artificial Sequence: Synthetic peptide
  Seed: RVSSFIRGTR
RQSSFIRGTM

SEQ ID NO: 21901 - protein, 10 aa, Artificial Sequence
  Description of Artificial Sequence: Synthetic peptide
  Seed: RVSSFIRGTR
RRSSFIRGTV

SEQ ID NO: 21902 - protein, 10 aa, Artificial Sequence
  Description of Artificial Sequence: Synthetic peptide
  Seed: RVSSFIRGTR
RRSSFIRGTK

SEQ ID NO: 21903 - protein, 10 aa, Artificial Sequence
  Description of Artificial Sequence: Synthetic peptide
  Seed: RVSSFIRGTR
RRSSFIRGTI

SEQ ID NO: 21904 - protein, 10 aa, Artificial Sequence
  Description of Artificial Sequence: Synthetic peptide
  Seed: RVSSFIRGTR
RRSSFIRGTR

SEQ ID NO: 21905 - protein, 11 aa, Artificial Sequence
  Description of Artificial Sequence: Synthetic peptide
  Seed: RVSSFIRGTKV
RMSSFIRGTKY

SEQ ID NO: 21906 - protein, 11 aa, Artificial Sequence
  Description of Artificial Sequence: Synthetic peptide
  Seed: RVSSFIRGTKV
RMSSFIRGTKV

SEQ ID NO: 21907 - protein, 11 aa, Artificial Sequence
  Description of Artificial Sequence: Synthetic peptide
  Seed: RVSSFIRGTKV
RFSSFIRGTKK

SEQ ID NO: 21908 - protein, 11 aa, Artificial Sequence
  Description of Artificial Sequence: Synthetic peptide
  Seed: RVSSFIRGTKV
RPSSFIRGTKK

SEQ ID NO: 21909 - protein, 11 aa, Artificial Sequence
  Description of Artificial Sequence: Synthetic peptide
  Seed: RVSSFIRGTKV
RSSSFIRGTKK

SEQ ID NO: 21910 - protein, 11 aa, Artificial Sequence
  Description of Artificial Sequence: Synthetic peptide
  Seed: RVSSFIRGTKV
RTSSFIRGTKK

SEQ ID NO: 21911 - protein, 11 aa, Artificial Sequence
  Description of Artificial Sequence: Synthetic peptide
  Seed: RVSSFIRGTKV
RWSSFIRGTKK

SEQ ID NO: 21912 - protein, 11 aa, Artificial Sequence
  Description of Artificial Sequence: Synthetic peptide
  Seed: RVSSFIRGTKV
RYSSFIRGTKK

SEQ ID NO: 21913 - protein, 11 aa, Artificial Sequence
  Description of Artificial Sequence: Synthetic peptide
  Seed: RVSSFIRGTKV
RVSSFIRGTKK

SEQ ID NO: 21914 - protein, 10 aa, Artificial Sequence
  Description of Artificial Sequence: Synthetic peptide
  Seed: RVSSFIRGTR
RASSFIRGTA

SEQ ID NO: 21915 - protein, 10 aa, Artificial Sequence
  Description of Artificial Sequence: Synthetic peptide
  Seed: RVSSFIRGTR
RASSFIRGTR

SEQ ID NO: 21916 - protein, 10 aa, Artificial Sequence
  Description of Artificial Sequence: Synthetic peptide
  Seed: RVSSFIRGTR
RASSFIRGTI

SEQ ID NO: 21917 - protein, 10 aa, Artificial Sequence
  Description of Artificial Sequence: Synthetic peptide
  Seed: RVSSFIRGTR
RASSFIRGTL

SEQ ID NO: 21918 - protein, 10 aa, Artificial Sequence
  Description of Artificial Sequence: Synthetic peptide
  Seed: RVSSFIRGTR
RASSFIRGTK

SEQ ID NO: 21919 - protein, 10 aa, Artificial Sequence
  Description of Artificial Sequence: Synthetic peptide
  Seed: RVSSFIRGTR
RASSFIRGTM

SEQ ID NO: 21920 - protein, 10 aa, Artificial Sequence
  Description of Artificial Sequence: Synthetic peptide
  Seed: RVSSFIRGTR
RASSFIRGTS

SEQ ID NO: 21921 - protein, 10 aa, Artificial Sequence
  Description of Artificial Sequence: Synthetic peptide
  Seed: RVSSFIRGTR
RASSFIRGTY

SEQ ID NO: 21922 - protein, 10 aa, Artificial Sequence
  Description of Artificial Sequence: Synthetic peptide
  Seed: RVSSFIRGTR
RASSFIRGTV

SEQ ID NO: 21923 - protein, 10 aa, Artificial Sequence
  Description of Artificial Sequence: Synthetic peptide
  Seed: RVSSFIRGTR
RRSSFIRGTA

SEQ ID NO: 21924 - protein, 10 aa, Artificial Sequence
  Description of Artificial Sequence: Synthetic peptide
  Seed: RVSSFIRGTR
RWSSFIRGTS

SEQ ID NO: 21925 - protein, 10 aa, Artificial Sequence
  Description of Artificial Sequence: Synthetic peptide
  Seed: RVSSFIRGTR
RWSSFIRGTV

SEQ ID NO: 21926 - protein, 10 aa, Artificial Sequence
  Description of Artificial Sequence: Synthetic peptide
  Seed: RVSSFIRGTR
RYSSFIRGTA

SEQ ID NO: 21927 - protein, 11 aa, Artificial Sequence
  Description of Artificial Sequence: Synthetic peptide
  Seed: RVSSFIRGTRV
RFSSFIRGTRI

SEQ ID NO: 21928 - protein, 11 aa, Artificial Sequence
  Description of Artificial Sequence: Synthetic peptide
  Seed: RVSSFIRGTRV
RFSSFIRGTRA

SEQ ID NO: 21929 - protein, 11 aa, Artificial Sequence
  Description of Artificial Sequence: Synthetic peptide
  Seed: RVSSFIRGTRV
RFSSFIRGTRR

SEQ ID NO: 21930 - protein, 11 aa, Artificial Sequence
  Description of Artificial Sequence: Synthetic peptide
  Seed: RVSSFIRGTRV
RFSSFIRGTRN

SEQ ID NO: 21931 - protein, 11 aa, Artificial Sequence
  Description of Artificial Sequence: Synthetic peptide
  Seed: RVSSFIRGTRV
RFSSFIRGTRD

SEQ ID NO: 21932 - protein, 11 aa, Artificial Sequence
  Description of Artificial Sequence: Synthetic peptide
  Seed: RVSSFIRGTRV
RFSSFIRGTRC

SEQ ID NO: 21933 - protein, 11 aa, Artificial Sequence
  Description of Artificial Sequence: Synthetic peptide
  Seed: RVSSFIRGTRV
RFSSFIRGTRQ

SEQ ID NO: 21934 - protein, 11 aa, Artificial Sequence
  Description of Artificial Sequence: Synthetic peptide
  Seed: RVSSFIRGTRV
RFSSFIRGTRE

SEQ ID NO: 21935 - protein, 11 aa, Artificial Sequence
  Description of Artificial Sequence: Synthetic peptide
  Seed: RVSSFIRGTRV
RFSSFIRGTRG

SEQ ID NO: 21936 - protein, 11 aa, Artificial Sequence
  Description of Artificial Sequence: Synthetic peptide
  Seed: RVSSFIRGTRV
RFSSFIRGTRH

SEQ ID NO: 21937 - protein, 11 aa, Artificial Sequence
  Description of Artificial Sequence: Synthetic peptide
  Seed: RVSSFIRGTRV
RFSSFIRGTRL

SEQ ID NO: 21938 - protein, 11 aa, Artificial Sequence
  Description of Artificial Sequence: Synthetic peptide
  Seed: RVSSFIRGTRV
RPSSFIRGTRK

SEQ ID NO: 21939 - protein, 11 aa, Artificial Sequence
  Description of Artificial Sequence: Synthetic peptide
  Seed: RVSSFIRGTRV
RFSSFIRGTRK

SEQ ID NO: 21940 - protein, 11 aa, Artificial Sequence
  Description of Artificial Sequence: Synthetic peptide
  Seed: RVSSFIRGTRV
RFSSFIRGTRM

SEQ ID NO: 21941 - protein, 11 aa, Artificial Sequence
  Description of Artificial Sequence: Synthetic peptide
  Seed: RVSSFIRGTRV
RFSSFIRGTRF

SEQ ID NO: 21942 - protein, 11 aa, Artificial Sequence
  Description of Artificial Sequence: Synthetic peptide
  Seed: RVSSFIRGTRV
RFSSFIRGTRP

SEQ ID NO: 21943 - protein, 11 aa, Artificial Sequence
  Description of Artificial Sequence: Synthetic peptide
  Seed: RVSSFIRGTRV
RFSSFIRGTRS

SEQ ID NO: 21944 - protein, 11 aa, Artificial Sequence
  Description of Artificial Sequence: Synthetic peptide
  Seed: RVSSFIRGTRV
RFSSFIRGTRT

SEQ ID NO: 21945 - protein, 11 aa, Artificial Sequence
  Description of Artificial Sequence: Synthetic peptide
  Seed: RVSSFIRGTRV
RFSSFIRGTRW

SEQ ID NO: 21946 - protein, 11 aa, Artificial Sequence
  Description of Artificial Sequence: Synthetic peptide
  Seed: RVSSFIRGTRV
RFSSFIRGTRY

SEQ ID NO: 21947 - protein, 11 aa, Artificial Sequence
  Description of Artificial Sequence: Synthetic peptide
  Seed: RVSSFIRGTRV
RFSSFIRGTRV

SEQ ID NO: 21948 - protein, 11 aa, Artificial Sequence
  Description of Artificial Sequence: Synthetic peptide
  Seed: RVSSFIRGTRV
RMSSFIRGTRV

SEQ ID NO: 21949 - protein, 11 aa, Artificial Sequence
  Description of Artificial Sequence: Synthetic peptide
  Seed: RVSSFIRGTRV
RMSSFIRGTRY

SEQ ID NO: 21950 - protein, 11 aa, Artificial Sequence
  Description of Artificial Sequence: Synthetic peptide
  Seed: RVSSFIRGTRV
RMSSFIRGTRW

SEQ ID NO: 21951 - protein, 11 aa, Artificial Sequence
  Description of Artificial Sequence: Synthetic peptide
  Seed: RVSSFIRGTRV
RMSSFIRGTRT

SEQ ID NO: 21952 - protein, 11 aa, Artificial Sequence
  Description of Artificial Sequence: Synthetic peptide
  Seed: RVSSFIRGTRV
RLSSFIRGTRV

SEQ ID NO: 21953 - protein, 11 aa, Artificial Sequence
  Description of Artificial Sequence: Synthetic peptide
  Seed: RVSSFIRGTRV
RKSSFIRGTRR

SEQ ID NO: 21954 - protein, 11 aa, Artificial Sequence
  Description of Artificial Sequence: Synthetic peptide
  Seed: RVSSFIRGTRV
RKSSFIRGTRK

SEQ ID NO: 21955 - protein, 11 aa, Artificial Sequence
  Description of Artificial Sequence: Synthetic peptide
  Seed: RVSSFIRGTRV
RMSSFIRGTRA

SEQ ID NO: 21956 - protein, 11 aa, Artificial Sequence
  Description of Artificial Sequence: Synthetic peptide
  Seed: RVSSFIRGTRV
RMSSFIRGTRR

SEQ ID NO: 21957 - protein, 11 aa, Artificial Sequence
  Description of Artificial Sequence: Synthetic peptide
  Seed: RVSSFIRGTRV
RMSSFIRGTRN

SEQ ID NO: 21958 - protein, 11 aa, Artificial Sequence
  Description of Artificial Sequence: Synthetic peptide
  Seed: RVSSFIRGTRV
RMSSFIRGTRD

SEQ ID NO: 21959 - protein, 11 aa, Artificial Sequence
  Description of Artificial Sequence: Synthetic peptide
  Seed: RVSSFIRGTRV
RMSSFIRGTRC

SEQ ID NO: 21960 - protein, 11 aa, Artificial Sequence
  Description of Artificial Sequence: Synthetic peptide
  Seed: RVSSFIRGTRV
RMSSFIRGTRQ

SEQ ID NO: 21961 - protein, 11 aa, Artificial Sequence
  Description of Artificial Sequence: Synthetic peptide
  Seed: RVSSFIRGTRV
RMSSFIRGTRE

SEQ ID NO: 21962 - protein, 11 aa, Artificial Sequence
  Description of Artificial Sequence: Synthetic peptide
  Seed: RVSSFIRGTRV
RMSSFIRGTRG

SEQ ID NO: 21963 - protein, 11 aa, Artificial Sequence
  Description of Artificial Sequence: Synthetic peptide
  Seed: RVSSFIRGTRV
RMSSFIRGTRH

SEQ ID NO: 21964 - protein, 11 aa, Artificial Sequence
  Description of Artificial Sequence: Synthetic peptide
  Seed: RVSSFIRGTRV
RMSSFIRGTRI

SEQ ID NO: 21965 - protein, 11 aa, Artificial Sequence
  Description of Artificial Sequence: Synthetic peptide
  Seed: RVSSFIRGTRV
RMSSFIRGTRL

SEQ ID NO: 21966 - protein, 11 aa, Artificial Sequence
  Description of Artificial Sequence: Synthetic peptide
  Seed: RVSSFIRGTRV
RMSSFIRGTRK

SEQ ID NO: 21967 - protein, 11 aa, Artificial Sequence
  Description of Artificial Sequence: Synthetic peptide
  Seed: RVSSFIRGTRV
RMSSFIRGTRM

SEQ ID NO: 21968 - protein, 11 aa, Artificial Sequence
  Description of Artificial Sequence: Synthetic peptide
  Seed: RVSSFIRGTRV
RMSSFIRGTRF

SEQ ID NO: 21969 - protein, 11 aa, Artificial Sequence
  Description of Artificial Sequence: Synthetic peptide
  Seed: RVSSFIRGTRV
RMSSFIRGTRP

SEQ ID NO: 21970 - protein, 11 aa, Artificial Sequence
  Description of Artificial Sequence: Synthetic peptide
  Seed: RVSSFIRGTRV
RMSSFIRGTRS

SEQ ID NO: 21971 - protein, 11 aa, Artificial Sequence
  Description of Artificial Sequence: Synthetic peptide
  Seed: RVSSFIRGTRV
RPSSFIRGTRR

SEQ ID NO: 21972 - protein, 11 aa, Artificial Sequence
  Description of Artificial Sequence: Synthetic peptide
  Seed: RVSSFIRGTRV
RSSSFIRGTRA

SEQ ID NO: 21973 - protein, 10 aa, Artificial Sequence
  Description of Artificial Sequence: Synthetic peptide
  Seed: RVSSFIRGTR
RYSSFIRGTR

SEQ ID NO: 21974 - protein, 11 aa, Artificial Sequence
  Description of Artificial Sequence: Synthetic peptide
  Seed: RVSSFIRGTRV
RTSSFIRGTRP

SEQ ID NO: 21975 - protein, 11 aa, Artificial Sequence
  Description of Artificial Sequence: Synthetic peptide
  Seed: RVSSFIRGTRV
RTSSFIRGTRQ

SEQ ID NO: 21976 - protein, 11 aa, Artificial Sequence
  Description of Artificial Sequence: Synthetic peptide
  Seed: RVSSFIRGTRV
RTSSFIRGTRE

SEQ ID NO: 21977 - protein, 11 aa, Artificial Sequence
  Description of Artificial Sequence: Synthetic peptide
  Seed: RVSSFIRGTRV
RTSSFIRGTRG

SEQ ID NO: 21978 - protein, 11 aa, Artificial Sequence
  Description of Artificial Sequence: Synthetic peptide
  Seed: RVSSFIRGTRV
RTSSFIRGTRH

SEQ ID NO: 21979 - protein, 11 aa, Artificial Sequence
  Description of Artificial Sequence: Synthetic peptide
  Seed: RVSSFIRGTRV
RTSSFIRGTRI

SEQ ID NO: 21980 - protein, 11 aa, Artificial Sequence
  Description of Artificial Sequence: Synthetic peptide
  Seed: RVSSFIRGTRV
RTSSFIRGTRL

SEQ ID NO: 21981 - protein, 11 aa, Artificial Sequence
  Description of Artificial Sequence: Synthetic peptide
  Seed: RVSSFIRGTRV
RTSSFIRGTRK

SEQ ID NO: 21982 - protein, 11 aa, Artificial Sequence
  Description of Artificial Sequence: Synthetic peptide
  Seed: RVSSFIRGTRV
RTSSFIRGTRM

SEQ ID NO: 21983 - protein, 11 aa, Artificial Sequence
  Description of Artificial Sequence: Synthetic peptide
  Seed: RVSSFIRGTRV
RTSSFIRGTRF

SEQ ID NO: 21984 - protein, 11 aa, Artificial Sequence
  Description of Artificial Sequence: Synthetic peptide
  Seed: RVSSFIRGTRV
RTSSFIRGTRS

SEQ ID NO: 21985 - protein, 11 aa, Artificial Sequence
  Description of Artificial Sequence: Synthetic peptide
  Seed: RVSSFIRGTRV
RSSSFIRGTRR

SEQ ID NO: 21986 - protein, 11 aa, Artificial Sequence
  Description of Artificial Sequence: Synthetic peptide
  Seed: RVSSFIRGTRV
RTSSFIRGTRT

SEQ ID NO: 21987 - protein, 11 aa, Artificial Sequence
  Description of Artificial Sequence: Synthetic peptide
  Seed: RVSSFIRGTRV
RTSSFIRGTRW

SEQ ID NO: 21988 - protein, 11 aa, Artificial Sequence
  Description of Artificial Sequence: Synthetic peptide
  Seed: RVSSFIRGTRV
RTSSFIRGTRY

SEQ ID NO: 21989 - protein, 11 aa, Artificial Sequence
  Description of Artificial Sequence: Synthetic peptide
  Seed: RVSSFIRGTRV
RTSSFIRGTRV

SEQ ID NO: 21990 - protein, 11 aa, Artificial Sequence
  Description of Artificial Sequence: Synthetic peptide
  Seed: RVSSFIRGTRV
RWSSFIRGTRA

SEQ ID NO: 21991 - protein, 11 aa, Artificial Sequence
  Description of Artificial Sequence: Synthetic peptide
  Seed: RVSSFIRGTRV
RWSSFIRGTRR

SEQ ID NO: 21992 - protein, 11 aa, Artificial Sequence
  Description of Artificial Sequence: Synthetic peptide
  Seed: RVSSFIRGTRV
RWSSFIRGTRN

SEQ ID NO: 21993 - protein, 11 aa, Artificial Sequence
  Description of Artificial Sequence: Synthetic peptide
  Seed: RVSSFIRGTRV
RWSSFIRGTRD

SEQ ID NO: 21994 - protein, 11 aa, Artificial Sequence
  Description of Artificial Sequence: Synthetic peptide
  Seed: RVSSFIRGTRV
RWSSFIRGTRC

SEQ ID NO: 21995 - protein, 11 aa, Artificial Sequence
  Description of Artificial Sequence: Synthetic peptide
  Seed: RVSSFIRGTRV
RTSSFIRGTRC

SEQ ID NO: 21996 - protein, 11 aa, Artificial Sequence
  Description of Artificial Sequence: Synthetic peptide
  Seed: RVSSFIRGTRV
RTSSFIRGTRD

SEQ ID NO: 21997 - protein, 11 aa, Artificial Sequence
  Description of Artificial Sequence: Synthetic peptide
  Seed: RVSSFIRGTRV
RTSSFIRGTRN

SEQ ID NO: 21998 - protein, 11 aa, Artificial Sequence
  Description of Artificial Sequence: Synthetic peptide
  Seed: RVSSFIRGTRV
RTSSFIRGTRR

SEQ ID NO: 21999 - protein, 11 aa, Artificial Sequence
  Description of Artificial Sequence: Synthetic peptide
  Seed: RVSSFIRGTRV
RSSSFIRGTRN

SEQ ID NO: 22000 - protein, 11 aa, Artificial Sequence
  Description of Artificial Sequence: Synthetic peptide
  Seed: RVSSFIRGTRV
RSSSFIRGTRD

SEQ ID NO: 22001 - protein, 11 aa, Artificial Sequence
  Description of Artificial Sequence: Synthetic peptide
  Seed: RVSSFIRGTRV
RSSSFIRGTRC

SEQ ID NO: 22002 - protein, 11 aa, Artificial Sequence
  Description of Artificial Sequence: Synthetic peptide
  Seed: RVSSFIRGTRV
RSSSFIRGTRQ

SEQ ID NO: 22003 - protein, 11 aa, Artificial Sequence
  Description of Artificial Sequence: Synthetic peptide
  Seed: RVSSFIRGTRV
RSSSFIRGTRE

SEQ ID NO: 22004 - protein, 11 aa, Artificial Sequence
  Description of Artificial Sequence: Synthetic peptide
  Seed: RVSSFIRGTRV
RSSSFIRGTRG

SEQ ID NO: 22005 - protein, 11 aa, Artificial Sequence
  Description of Artificial Sequence: Synthetic peptide
  Seed: RVSSFIRGTRV
RSSSFIRGTRH

SEQ ID NO: 22006 - protein, 11 aa, Artificial Sequence
  Description of Artificial Sequence: Synthetic peptide
  Seed: RVSSFIRGTRV
RSSSFIRGTRI

SEQ ID NO: 22007 - protein, 11 aa, Artificial Sequence
  Description of Artificial Sequence: Synthetic peptide
  Seed: RVSSFIRGTRV
RSSSFIRGTRL

SEQ ID NO: 22008 - protein, 11 aa, Artificial Sequence
  Description of Artificial Sequence: Synthetic peptide
  Seed: RVSSFIRGTRV
RSSSFIRGTRK

SEQ ID NO: 22009 - protein, 11 aa, Artificial Sequence
  Description of Artificial Sequence: Synthetic peptide
  Seed: RVSSFIRGTRV
RSSSFIRGTRM

SEQ ID NO: 22010 - protein, 11 aa, Artificial Sequence
  Description of Artificial Sequence: Synthetic peptide
  Seed: RVSSFIRGTRV
RSSSFIRGTRF

SEQ ID NO: 22011 - protein, 11 aa, Artificial Sequence
  Description of Artificial Sequence: Synthetic peptide
  Seed: RVSSFIRGTRV
RSSSFIRGTRP

SEQ ID NO: 22012 - protein, 11 aa, Artificial Sequence
  Description of Artificial Sequence: Synthetic peptide
  Seed: RVSSFIRGTRV
RSSSFIRGTRS

SEQ ID NO: 22013 - protein, 11 aa, Artificial Sequence
  Description of Artificial Sequence: Synthetic peptide
  Seed: RVSSFIRGTRV
RSSSFIRGTRT

SEQ ID NO: 22014 - protein, 11 aa, Artificial Sequence
  Description of Artificial Sequence: Synthetic peptide
  Seed: RVSSFIRGTRV
RSSSFIRGTRW

SEQ ID NO: 22015 - protein, 11 aa, Artificial Sequence
  Description of Artificial Sequence: Synthetic peptide
  Seed: RVSSFIRGTRV
RSSSFIRGTRY

SEQ ID NO: 22016 - protein, 11 aa, Artificial Sequence
  Description of Artificial Sequence: Synthetic peptide
  Seed: RVSSFIRGTRV
RSSSFIRGTRV

SEQ ID NO: 22017 - protein, 11 aa, Artificial Sequence
  Description of Artificial Sequence: Synthetic peptide
  Seed: RVSSFIRGTRV
RTSSFIRGTRA

SEQ ID NO: 22018 - protein, 11 aa, Artificial Sequence
  Description of Artificial Sequence: Synthetic peptide
  Seed: RVSSFIRGTRV
RLSSFIRGTRY

SEQ ID NO: 22019 - protein, 11 aa, Artificial Sequence
  Description of Artificial Sequence: Synthetic peptide
  Seed: RVSSFIRGTRV
RLSSFIRGTRW

SEQ ID NO: 22020 - protein, 11 aa, Artificial Sequence
  Description of Artificial Sequence: Synthetic peptide
  Seed: RVSSFIRGTRV
RLSSFIRGTRT

SEQ ID NO: 22021 - protein, 11 aa, Artificial Sequence
  Description of Artificial Sequence: Synthetic peptide
  Seed: RVSSFIRGTRV
RQSSFIRGTRC

SEQ ID NO: 22022 - protein, 11 aa, Artificial Sequence
  Description of Artificial Sequence: Synthetic peptide
  Seed: RVSSFIRGTRV
RNSSFIRGTRK

SEQ ID NO: 22023 - protein, 11 aa, Artificial Sequence
  Description of Artificial Sequence: Synthetic peptide
  Seed: RVSSFIRGTRV
RDSSFIRGTRR

SEQ ID NO: 22024 - protein, 11 aa, Artificial Sequence
  Description of Artificial Sequence: Synthetic peptide
  Seed: RVSSFIRGTRV
RDSSFIRGTRK

SEQ ID NO: 22025 - protein, 11 aa, Artificial Sequence
  Description of Artificial Sequence: Synthetic peptide
  Seed: RVSSFIRGTRV
RCSSFIRGTRR

SEQ ID NO: 22026 - protein, 11 aa, Artificial Sequence
  Description of Artificial Sequence: Synthetic peptide
  Seed: RVSSFIRGTRV
RCSSFIRGTRK

SEQ ID NO: 22027 - protein, 11 aa, Artificial Sequence
  Description of Artificial Sequence: Synthetic peptide
  Seed: RVSSFIRGTRV
RQSSFIRGTRA

SEQ ID NO: 22028 - protein, 11 aa, Artificial Sequence
  Description of Artificial Sequence: Synthetic peptide
  Seed: RVSSFIRGTRV
RQSSFIRGTRR

SEQ ID NO: 22029 - protein, 11 aa, Artificial Sequence
  Description of Artificial Sequence: Synthetic peptide
  Seed: RVSSFIRGTRV
RQSSFIRGTRN

SEQ ID NO: 22030 - protein, 11 aa, Artificial Sequence
  Description of Artificial Sequence: Synthetic peptide
  Seed: RVSSFIRGTRV
RQSSFIRGTRD

SEQ ID NO: 22031 - protein, 11 aa, Artificial Sequence
  Description of Artificial Sequence: Synthetic peptide
  Seed: RVSSFIRGTRV
RQSSFIRGTRQ

SEQ ID NO: 22032 - protein, 11 aa, Artificial Sequence
  Description of Artificial Sequence: Synthetic peptide
  Seed: RVSSFIRGTRV
RLSSFIRGTRS

SEQ ID NO: 22033 - protein, 11 aa, Artificial Sequence
  Description of Artificial Sequence: Synthetic peptide
  Seed: RVSSFIRGTRV
RQSSFIRGTRE

SEQ ID NO: 22034 - protein, 11 aa, Artificial Sequence
  Description of Artificial Sequence: Synthetic peptide
  Seed: RVSSFIRGTRV
RQSSFIRGTRG

SEQ ID NO: 22035 - protein, 11 aa, Artificial Sequence
  Description of Artificial Sequence: Synthetic peptide
  Seed: RVSSFIRGTRV
RQSSFIRGTRH

SEQ ID NO: 22036 - protein, 11 aa, Artificial Sequence
  Description of Artificial Sequence: Synthetic peptide
  Seed: RVSSFIRGTRV
RQSSFIRGTRI

SEQ ID NO: 22037 - protein, 11 aa, Artificial Sequence
  Description of Artificial Sequence: Synthetic peptide
  Seed: RVSSFIRGTRV
RQSSFIRGTRL

SEQ ID NO: 22038 - protein, 11 aa, Artificial Sequence
  Description of Artificial Sequence: Synthetic peptide
  Seed: RVSSFIRGTRV
RQSSFIRGTRK

SEQ ID NO: 22039 - protein, 11 aa, Artificial Sequence
  Description of Artificial Sequence: Synthetic peptide
  Seed: RVSSFIRGTRV
RQSSFIRGTRM

SEQ ID NO: 22040 - protein, 11 aa, Artificial Sequence
  Description of Artificial Sequence: Synthetic peptide
  Seed: RVSSFIRGTRV
RQSSFIRGTRF

SEQ ID NO: 22041 - protein, 11 aa, Artificial Sequence
  Description of Artificial Sequence: Synthetic peptide
  Seed: RVSSFIRGTRV
RQSSFIRGTRP

SEQ ID NO: 22042 - protein, 11 aa, Artificial Sequence
  Description of Artificial Sequence: Synthetic peptide
  Seed: RVSSFIRGTRV
RNSSFIRGTRR

SEQ ID NO: 22043 - protein, 11 aa, Artificial Sequence
  Description of Artificial Sequence: Synthetic peptide
  Seed: RVSSFIRGTRV
RRSSFIRGTRK

SEQ ID NO: 22044 - protein, 11 aa, Artificial Sequence
  Description of Artificial Sequence: Synthetic peptide
  Seed: RVSSFIRGTRV
RRSSFIRGTRR

SEQ ID NO: 22045 - protein, 11 aa, Artificial Sequence
  Description of Artificial Sequence: Synthetic peptide
  Seed: RVSSFIRGTRV
RASSFIRGTRK

SEQ ID NO: 22046 - protein, 10 aa, Artificial Sequence
  Description of Artificial Sequence: Synthetic peptide
  Seed: RVSSFIRGTR
RYSSFIRGTG

SEQ ID NO: 22047 - protein, 10 aa, Artificial Sequence
  Description of Artificial Sequence: Synthetic peptide
  Seed: RVSSFIRGTR
RYSSFIRGTI

SEQ ID NO: 22048 - protein, 10 aa, Artificial Sequence
  Description of Artificial Sequence: Synthetic peptide
  Seed: RVSSFIRGTR
RYSSFIRGTL

SEQ ID NO: 22049 - protein, 10 aa, Artificial Sequence
  Description of Artificial Sequence: Synthetic peptide
  Seed: RVSSFIRGTR
RYSSFIRGTK

SEQ ID NO: 22050 - protein, 10 aa, Artificial Sequence
  Description of Artificial Sequence: Synthetic peptide
  Seed: RVSSFIRGTR
RYSSFIRGTM

SEQ ID NO: 22051 - protein, 10 aa, Artificial Sequence
  Description of Artificial Sequence: Synthetic peptide
  Seed: RVSSFIRGTR
RYSSFIRGTS

SEQ ID NO: 22052 - protein, 10 aa, Artificial Sequence
  Description of Artificial Sequence: Synthetic peptide
  Seed: RVSSFIRGTR
RYSSFIRGTV

SEQ ID NO: 22053 - protein, 10 aa, Artificial Sequence
  Description of Artificial Sequence: Synthetic peptide
  Seed: RVSSFIRGTR
RVSSFIRGTA

SEQ ID NO: 22054 - protein, 10 aa, Artificial Sequence
  Description of Artificial Sequence: Synthetic peptide
  Seed: RVSSFIRGTR
RVSSFIRGTG

SEQ ID NO: 22055 - protein, 10 aa, Artificial Sequence
  Description of Artificial Sequence: Synthetic peptide
  Seed: RVSSFIRGTR
RVSSFIRGTI

SEQ ID NO: 22056 - protein, 10 aa, Artificial Sequence
  Description of Artificial Sequence: Synthetic peptide
  Seed: RVSSFIRGTR
RVSSFIRGTL

SEQ ID NO: 22057 - protein, 10 aa, Artificial Sequence
  Description of Artificial Sequence: Synthetic peptide
  Seed: RVSSFIRGTR
RVSSFIRGTM

SEQ ID NO: 22058 - protein, 10 aa, Artificial Sequence
  Description of Artificial Sequence: Synthetic peptide
  Seed: RVSSFIRGTR
RVSSFIRGTS

SEQ ID NO: 22059 - protein, 10 aa, Artificial Sequence
  Description of Artificial Sequence: Synthetic peptide
  Seed: RVSSFIRGTR
RVSSFIRGTT

SEQ ID NO: 22060 - protein, 10 aa, Artificial Sequence
  Description of Artificial Sequence: Synthetic peptide
  Seed: RVSSFIRGTR
RVSSFIRGTY

SEQ ID NO: 22061 - protein, 10 aa, Artificial Sequence
  Description of Artificial Sequence: Synthetic peptide
  Seed: RVSSFIRGTR
RVSSFIRGTV

SEQ ID NO: 22062 - protein, 11 aa, Artificial Sequence
  Description of Artificial Sequence: Synthetic peptide
  Seed: RVSSFIRGTRV
RASSFIRGTRA

SEQ ID NO: 22063 - protein, 11 aa, Artificial Sequence
  Description of Artificial Sequence: Synthetic peptide
  Seed: RVSSFIRGTRV
RASSFIRGTRR

SEQ ID NO: 22064 - protein, 11 aa, Artificial Sequence
  Description of Artificial Sequence: Synthetic peptide
  Seed: RVSSFIRGTRV
RQSSFIRGTRS

SEQ ID NO: 22065 - protein, 11 aa, Artificial Sequence
  Description of Artificial Sequence: Synthetic peptide
  Seed: RVSSFIRGTRV
RQSSFIRGTRT

SEQ ID NO: 22066 - protein, 11 aa, Artificial Sequence
  Description of Artificial Sequence: Synthetic peptide
  Seed: RVSSFIRGTRV
RQSSFIRGTRW

SEQ ID NO: 22067 - protein, 11 aa, Artificial Sequence
  Description of Artificial Sequence: Synthetic peptide
  Seed: RVSSFIRGTRV
RISSFIRGTRP

SEQ ID NO: 22068 - protein, 11 aa, Artificial Sequence
  Description of Artificial Sequence: Synthetic peptide
  Seed: RVSSFIRGTRV
RISSFIRGTRT

SEQ ID NO: 22069 - protein, 11 aa, Artificial Sequence
  Description of Artificial Sequence: Synthetic peptide
  Seed: RVSSFIRGTRV
RISSFIRGTRW

SEQ ID NO: 22070 - protein, 11 aa, Artificial Sequence
  Description of Artificial Sequence: Synthetic peptide
  Seed: RVSSFIRGTRV
RISSFIRGTRY

SEQ ID NO: 22071 - protein, 11 aa, Artificial Sequence
  Description of Artificial Sequence: Synthetic peptide
  Seed: RVSSFIRGTRV
RISSFIRGTRV

SEQ ID NO: 22072 - protein, 11 aa, Artificial Sequence
  Description of Artificial Sequence: Synthetic peptide
  Seed: RVSSFIRGTRV
RLSSFIRGTRA

SEQ ID NO: 22073 - protein, 11 aa, Artificial Sequence
  Description of Artificial Sequence: Synthetic peptide
  Seed: RVSSFIRGTRV
RLSSFIRGTRR

SEQ ID NO: 22074 - protein, 11 aa, Artificial Sequence
  Description of Artificial Sequence: Synthetic peptide
  Seed: RVSSFIRGTRV
RLSSFIRGTRN

SEQ ID NO: 22075 - protein, 11 aa, Artificial Sequence
  Description of Artificial Sequence: Synthetic peptide
  Seed: RVSSFIRGTRV
RLSSFIRGTRD

SEQ ID NO: 22076 - protein, 11 aa, Artificial Sequence
  Description of Artificial Sequence: Synthetic peptide
  Seed: RVSSFIRGTRV
RLSSFIRGTRC

SEQ ID NO: 22077 - protein, 11 aa, Artificial Sequence
  Description of Artificial Sequence: Synthetic peptide
  Seed: RVSSFIRGTRV
RLSSFIRGTRQ

SEQ ID NO: 22078 - protein, 11 aa, Artificial Sequence
  Description of Artificial Sequence: Synthetic peptide
  Seed: RVSSFIRGTRV
RLSSFIRGTRE

SEQ ID NO: 22079 - protein, 11 aa, Artificial Sequence
  Description of Artificial Sequence: Synthetic peptide
  Seed: RVSSFIRGTRV
RLSSFIRGTRG

SEQ ID NO: 22080 - protein, 11 aa, Artificial Sequence
  Description of Artificial Sequence: Synthetic peptide
  Seed: RVSSFIRGTRV
RLSSFIRGTRH

SEQ ID NO: 22081 - protein, 11 aa, Artificial Sequence
  Description of Artificial Sequence: Synthetic peptide
  Seed: RVSSFIRGTRV
RLSSFIRGTRI

SEQ ID NO: 22082 - protein, 11 aa, Artificial Sequence
  Description of Artificial Sequence: Synthetic peptide
  Seed: RVSSFIRGTRV
RLSSFIRGTRL

SEQ ID NO: 22083 - protein, 11 aa, Artificial Sequence
  Description of Artificial Sequence: Synthetic peptide
  Seed: RVSSFIRGTRV
RLSSFIRGTRK

SEQ ID NO: 22084 - protein, 11 aa, Artificial Sequence
  Description of Artificial Sequence: Synthetic peptide
  Seed: RVSSFIRGTRV
RLSSFIRGTRM

SEQ ID NO: 22085 - protein, 11 aa, Artificial Sequence
  Description of Artificial Sequence: Synthetic peptide
  Seed: RVSSFIRGTRV
RLSSFIRGTRF

SEQ ID NO: 22086 - protein, 11 aa, Artificial Sequence
  Description of Artificial Sequence: Synthetic peptide
  Seed: RVSSFIRGTRV
RLSSFIRGTRP

SEQ ID NO: 22087 - protein, 11 aa, Artificial Sequence
  Description of Artificial Sequence: Synthetic peptide
  Seed: RVSSFIRGTRV
RISSFIRGTRS

SEQ ID NO: 22088 - protein, 11 aa, Artificial Sequence
  Description of Artificial Sequence: Synthetic peptide
  Seed: RVSSFIRGTRV
RISSFIRGTRF

SEQ ID NO: 22089 - protein, 11 aa, Artificial Sequence
  Description of Artificial Sequence: Synthetic peptide
  Seed: RVSSFIRGTRV
RQSSFIRGTRY

SEQ ID NO: 22090 - protein, 11 aa, Artificial Sequence
  Description of Artificial Sequence: Synthetic peptide
  Seed: RVSSFIRGTRV
RISSFIRGTRM

SEQ ID NO: 22091 - protein, 11 aa, Artificial Sequence
  Description of Artificial Sequence: Synthetic peptide
  Seed: RVSSFIRGTRV
RQSSFIRGTRV

SEQ ID NO: 22092 - protein, 11 aa, Artificial Sequence
  Description of Artificial Sequence: Synthetic peptide
  Seed: RVSSFIRGTRV
RESSFIRGTRR

SEQ ID NO: 22093 - protein, 11 aa, Artificial Sequence
  Description of Artificial Sequence: Synthetic peptide
  Seed: RVSSFIRGTRV
RESSFIRGTRK

SEQ ID NO: 22094 - protein, 11 aa, Artificial Sequence
  Description of Artificial Sequence: Synthetic peptide
  Seed: RVSSFIRGTRV
RGSSFIRGTRR

SEQ ID NO: 22095 - protein, 11 aa, Artificial Sequence
  Description of Artificial Sequence: Synthetic peptide
  Seed: RVSSFIRGTRV
RGSSFIRGTRK

SEQ ID NO: 22096 - protein, 11 aa, Artificial Sequence
  Description of Artificial Sequence: Synthetic peptide
  Seed: RVSSFIRGTRV
RHSSFIRGTRR

SEQ ID NO: 22097 - protein, 11 aa, Artificial Sequence
  Description of Artificial Sequence: Synthetic peptide
  Seed: RVSSFIRGTRV
RHSSFIRGTRK

SEQ ID NO: 22098 - protein, 11 aa, Artificial Sequence
  Description of Artificial Sequence: Synthetic peptide
  Seed: RVSSFIRGTRV
RISSFIRGTRA

SEQ ID NO: 22099 - protein, 11 aa, Artificial Sequence
  Description of Artificial Sequence: Synthetic peptide
  Seed: RVSSFIRGTRV
RISSFIRGTRR

SEQ ID NO: 22100 - protein, 11 aa, Artificial Sequence
  Description of Artificial Sequence: Synthetic peptide
  Seed: RVSSFIRGTRV
RISSFIRGTRN

SEQ ID NO: 22101 - protein, 11 aa, Artificial Sequence
  Description of Artificial Sequence: Synthetic peptide
  Seed: RVSSFIRGTRV
RISSFIRGTRD

SEQ ID NO: 22102 - protein, 11 aa, Artificial Sequence
  Description of Artificial Sequence: Synthetic peptide
  Seed: RVSSFIRGTRV
RISSFIRGTRC

SEQ ID NO: 22103 - protein, 11 aa, Artificial Sequence
  Description of Artificial Sequence: Synthetic peptide
  Seed: RVSSFIRGTRV
RISSFIRGTRQ

SEQ ID NO: 22104 - protein, 11 aa, Artificial Sequence
  Description of Artificial Sequence: Synthetic peptide
  Seed: RVSSFIRGTRV
RISSFIRGTRE

SEQ ID NO: 22105 - protein, 11 aa, Artificial Sequence
  Description of Artificial Sequence: Synthetic peptide
  Seed: RVSSFIRGTRV
RISSFIRGTRG

SEQ ID NO: 22106 - protein, 11 aa, Artificial Sequence
  Description of Artificial Sequence: Synthetic peptide
  Seed: RVSSFIRGTRV
RISSFIRGTRH

SEQ ID NO: 22107 - protein, 11 aa, Artificial Sequence
  Description of Artificial Sequence: Synthetic peptide
  Seed: RVSSFIRGTRV
RISSFIRGTRI

SEQ ID NO: 22108 - protein, 11 aa, Artificial Sequence
  Description of Artificial Sequence: Synthetic peptide
  Seed: RVSSFIRGTRV
RISSFIRGTRL

SEQ ID NO: 22109 - protein, 11 aa, Artificial Sequence
  Description of Artificial Sequence: Synthetic peptide
  Seed: RVSSFIRGTRV
RISSFIRGTRK

SEQ ID NO: 22110 - protein, 11 aa, Artificial Sequence
  Description of Artificial Sequence: Synthetic peptide
  Seed: RVSSFIRGTKV
RDSSFIRGTKK

SEQ ID NO: 22111 - protein, 11 aa, Artificial Sequence
  Description of Artificial Sequence: Synthetic peptide
  Seed: RVSSFIRGTKV
RNSSFIRGTKK

SEQ ID NO: 22112 - protein, 11 aa, Artificial Sequence
  Description of Artificial Sequence: Synthetic peptide
  Seed: RVSSFIRGTKV
RRSSFIRGTKK

SEQ ID NO: 22113 - protein, 10 aa, Artificial Sequence
  Description of Artificial Sequence: Synthetic peptide
  Seed: RTSDMRTEII
RASDMRTEIW

SEQ ID NO: 22114 - protein, 9 aa, Artificial Sequence
  Description of Artificial Sequence: Synthetic peptide
  Seed: RTSDMRTEI
RVSDMRTEI

SEQ ID NO: 22115 - protein, 9 aa, Artificial Sequence
  Description of Artificial Sequence: Synthetic peptide
  Seed: RTSDMRTEI
RVSDMRTEL

SEQ ID NO: 22116 - protein, 9 aa, Artificial Sequence
  Description of Artificial Sequence: Synthetic peptide
  Seed: RTSDMRTEI
RVSDMRTEK

SEQ ID NO: 22117 - protein, 9 aa, Artificial Sequence
  Description of Artificial Sequence: Synthetic peptide
  Seed: RTSDMRTEI
RVSDMRTEM

SEQ ID NO: 22118 - protein, 9 aa, Artificial Sequence
  Description of Artificial Sequence: Synthetic peptide
  Seed: RTSDMRTEI
RVSDMRTEF

SEQ ID NO: 22119 - protein, 9 aa, Artificial Sequence
  Description of Artificial Sequence: Synthetic peptide
  Seed: RTSDMRTEI
RVSDMRTEW

SEQ ID NO: 22120 - protein, 9 aa, Artificial Sequence
  Description of Artificial Sequence: Synthetic peptide
  Seed: RTSDMRTEI
RVSDMRTEV

SEQ ID NO: 22121 - protein, 10 aa, Artificial Sequence
  Description of Artificial Sequence: Synthetic peptide
  Seed: RTSDMRTEII
RASDMRTEIM

SEQ ID NO: 22122 - protein, 10 aa, Artificial Sequence
  Description of Artificial Sequence: Synthetic peptide
  Seed: RTSDMRTEII
RASDMRTEIF

SEQ ID NO: 22123 - protein, 10 aa, Artificial Sequence
  Description of Artificial Sequence: Synthetic peptide
  Seed: RTSDMRTEII
RASDMRTEIY

SEQ ID NO: 22124 - protein, 10 aa, Artificial Sequence
  Description of Artificial Sequence: Synthetic peptide
  Seed: RTSDMRTEII
RKSDMRTEIW

SEQ ID NO: 22125 - protein, 10 aa, Artificial Sequence
  Description of Artificial Sequence: Synthetic peptide
  Seed: RTSDMRTEII
RRSDMRTEIW

SEQ ID NO: 22126 - protein, 10 aa, Artificial Sequence
  Description of Artificial Sequence: Synthetic peptide
  Seed: RTSDMRTEII
RNSDMRTEIW

SEQ ID NO: 22127 - protein, 10 aa, Artificial Sequence
  Description of Artificial Sequence: Synthetic peptide
  Seed: RTSDMRTEII
RDSDMRTEIW

SEQ ID NO: 22128 - protein, 10 aa, Artificial Sequence
  Description of Artificial Sequence: Synthetic peptide
  Seed: RTSDMRTEII
RCSDMRTEIW

SEQ ID NO: 22129 - protein, 10 aa, Artificial Sequence
  Description of Artificial Sequence: Synthetic peptide
  Seed: RTSDMRTEII
RQSDMRTEIW

SEQ ID NO: 22130 - protein, 10 aa, Artificial Sequence
  Description of Artificial Sequence: Synthetic peptide
  Seed: RTSDMRTEII
RESDMRTEIW

SEQ ID NO: 22131 - protein, 10 aa, Artificial Sequence
  Description of Artificial Sequence: Synthetic peptide
  Seed: RTSDMRTEII
RGSDMRTEIW

SEQ ID NO: 22132 - protein, 10 aa, Artificial Sequence
  Description of Artificial Sequence: Synthetic peptide
  Seed: RTSDMRTEII
RHSDMRTEIW

SEQ ID NO: 22133 - protein, 10 aa, Artificial Sequence
  Description of Artificial Sequence: Synthetic peptide
  Seed: RTSDMRTEII
RISDMRTEIW

SEQ ID NO: 22134 - protein, 9 aa, Artificial Sequence
  Description of Artificial Sequence: Synthetic peptide
  Seed: RTSDMRTEI
RVSDMRTEA

SEQ ID NO: 22135 - protein, 9 aa, Artificial Sequence
  Description of Artificial Sequence: Synthetic peptide
  Seed: RTSDMRTEI
RYSDMRTEK

SEQ ID NO: 22136 - protein, 9 aa, Artificial Sequence
  Description of Artificial Sequence: Synthetic peptide
  Seed: RTSDMRTEI
RYSDMRTEA

SEQ ID NO: 22137 - protein, 9 aa, Artificial Sequence
  Description of Artificial Sequence: Synthetic peptide
  Seed: RTSDMRTEI
RWSDMRTEK

SEQ ID NO: 22138 - protein, 9 aa, Artificial Sequence
  Description of Artificial Sequence: Synthetic peptide
  Seed: RTSDMRTEI
RSSDMRTEA

SEQ ID NO: 22139 - protein, 9 aa, Artificial Sequence
  Description of Artificial Sequence: Synthetic peptide
  Seed: RTSDMRTEI
RSSDMRTEI

SEQ ID NO: 22140 - protein, 9 aa, Artificial Sequence
  Description of Artificial Sequence: Synthetic peptide
  Seed: RTSDMRTEI
RSSDMRTEL

SEQ ID NO: 22141 - protein, 9 aa, Artificial Sequence
  Description of Artificial Sequence: Synthetic peptide
  Seed: RTSDMRTEI
RSSDMRTEK

SEQ ID NO: 22142 - protein, 9 aa, Artificial Sequence
  Description of Artificial Sequence: Synthetic peptide
  Seed: RTSDMRTEI
RSSDMRTEM

SEQ ID NO: 22143 - protein, 9 aa, Artificial Sequence
  Description of Artificial Sequence: Synthetic peptide
  Seed: RTSDMRTEI
RSSDMRTEF

SEQ ID NO: 22144 - protein, 9 aa, Artificial Sequence
  Description of Artificial Sequence: Synthetic peptide
  Seed: RTSDMRTEI
RSSDMRTEW

SEQ ID NO: 22145 - protein, 9 aa, Artificial Sequence
  Description of Artificial Sequence: Synthetic peptide
  Seed: RTSDMRTEI
RSSDMRTEV

SEQ ID NO: 22146 - protein, 9 aa, Artificial Sequence
  Description of Artificial Sequence: Synthetic peptide
  Seed: RTSDMRTEI
RTSDMRTEA

SEQ ID NO: 22147 - protein, 9 aa, Artificial Sequence
  Description of Artificial Sequence: Synthetic peptide
  Seed: RTSDMRTEI
RTSDMRTER

SEQ ID NO: 22148 - protein, 9 aa, Artificial Sequence
  Description of Artificial Sequence: Synthetic peptide
  Seed: RTSDMRTEI
RTSDMRTEG

SEQ ID NO: 22149 - protein, 9 aa, Artificial Sequence
  Description of Artificial Sequence: Synthetic peptide
  Seed: RTSDMRTEI
RTSDMRTEL

SEQ ID NO: 22150 - protein, 9 aa, Artificial Sequence
  Description of Artificial Sequence: Synthetic peptide
  Seed: RTSDMRTEI
RTSDMRTEK

SEQ ID NO: 22151 - protein, 9 aa, Artificial Sequence
  Description of Artificial Sequence: Synthetic peptide
  Seed: RTSDMRTEI
RTSDMRTEM

SEQ ID NO: 22152 - protein, 9 aa, Artificial Sequence
  Description of Artificial Sequence: Synthetic peptide
  Seed: RTSDMRTEI
RTSDMRTEF

SEQ ID NO: 22153 - protein, 9 aa, Artificial Sequence
  Description of Artificial Sequence: Synthetic peptide
  Seed: RTSDMRTEI
RTSDMRTES

SEQ ID NO: 22154 - protein, 9 aa, Artificial Sequence
  Description of Artificial Sequence: Synthetic peptide
  Seed: RTSDMRTEI
RTSDMRTEW

SEQ ID NO: 22155 - protein, 9 aa, Artificial Sequence
  Description of Artificial Sequence: Synthetic peptide
  Seed: RTSDMRTEI
RTSDMRTEY

SEQ ID NO: 22156 - protein, 10 aa, Artificial Sequence
  Description of Artificial Sequence: Synthetic peptide
  Seed: RTSDMRTEII
RLSDMRTEIW

SEQ ID NO: 22157 - protein, 10 aa, Artificial Sequence
  Description of Artificial Sequence: Synthetic peptide
  Seed: RTSDMRTEII
RMSDMRTEIW

SEQ ID NO: 22158 - protein, 8 aa, Artificial Sequence
  Description of Artificial Sequence: Synthetic peptide
  Seed: RVDGKWMR
RTDGKWMR

SEQ ID NO: 22159 - protein, 11 aa, Artificial Sequence
  Description of Artificial Sequence: Synthetic peptide
  Seed: RTSDMRTEIIR
RYSDMRTEIIR

SEQ ID NO: 22160 - protein, 11 aa, Artificial Sequence
  Description of Artificial Sequence: Synthetic peptide
  Seed: RTSDMRTEIIR
RLSDMRTEIIK

SEQ ID NO: 22161 - protein, 11 aa, Artificial Sequence
  Description of Artificial Sequence: Synthetic peptide
  Seed: RTSDMRTEIIR
RMSDMRTEIIR

SEQ ID NO: 22162 - protein, 11 aa, Artificial Sequence
  Description of Artificial Sequence: Synthetic peptide
  Seed: RTSDMRTEIIR
RMSDMRTEIIK

SEQ ID NO: 22163 - protein, 11 aa, Artificial Sequence
  Description of Artificial Sequence: Synthetic peptide
  Seed: RTSDMRTEIIR
RFSDMRTEIIR

SEQ ID NO: 22164 - protein, 11 aa, Artificial Sequence
  Description of Artificial Sequence: Synthetic peptide
  Seed: RTSDMRTEIIR
RFSDMRTEIIK

SEQ ID NO: 22165 - protein, 11 aa, Artificial Sequence
  Description of Artificial Sequence: Synthetic peptide
  Seed: RTSDMRTEIIR
RSSDMRTEIIR

SEQ ID NO: 22166 - protein, 11 aa, Artificial Sequence
  Description of Artificial Sequence: Synthetic peptide
  Seed: RTSDMRTEIIR
RWSDMRTEIIR

SEQ ID NO: 22167 - protein, 11 aa, Artificial Sequence
  Description of Artificial Sequence: Synthetic peptide
  Seed: RTSDMRTEIIR
RWSDMRTEIIK

SEQ ID NO: 22168 - protein, 11 aa, Artificial Sequence
  Description of Artificial Sequence: Synthetic peptide
  Seed: RTSDMRTEIIR
RYSDMRTEIIK

SEQ ID NO: 22169 - protein, 10 aa, Artificial Sequence
  Description of Artificial Sequence: Synthetic peptide
  Seed: RTSDMRTEII
RFSDMRTEIW

SEQ ID NO: 22170 - protein, 11 aa, Artificial Sequence
  Description of Artificial Sequence: Synthetic peptide
  Seed: RTSDMRTEIIR
RVSDMRTEIIR

SEQ ID NO: 22171 - protein, 11 aa, Artificial Sequence
  Description of Artificial Sequence: Synthetic peptide
  Seed: RTSDMRTEIIR
RVSDMRTEIIK

SEQ ID NO: 22172 - protein, 8 aa, Artificial Sequence
  Description of Artificial Sequence: Synthetic peptide
  Seed: RVDGKWMR
RQDGKWMR

SEQ ID NO: 22173 - protein, 8 aa, Artificial Sequence
  Description of Artificial Sequence: Synthetic peptide
  Seed: RVDGKWMR
RLDGKWMR

SEQ ID NO: 22174 - protein, 8 aa, Artificial Sequence
  Description of Artificial Sequence: Synthetic peptide
  Seed: RVDGKWMR
RMDGKWMR

SEQ ID NO: 22175 - protein, 8 aa, Artificial Sequence
  Description of Artificial Sequence: Synthetic peptide
  Seed: RVDGKWMR
RMDGKWMK

SEQ ID NO: 22176 - protein, 8 aa, Artificial Sequence
  Description of Artificial Sequence: Synthetic peptide
  Seed: RVDGKWMR
RFDGKWMR

SEQ ID NO: 22177 - protein, 8 aa, Artificial Sequence
  Description of Artificial Sequence: Synthetic peptide
  Seed: RVDGKWMR
RFDGKWMK

SEQ ID NO: 22178 - protein, 11 aa, Artificial Sequence
  Description of Artificial Sequence: Synthetic peptide
  Seed: RTSDMRTEIIR
RLSDMRTEIIR

SEQ ID NO: 22179 - protein, 11 aa, Artificial Sequence
  Description of Artificial Sequence: Synthetic peptide
  Seed: RTSDMRTEIIR
RISDMRTEIIK

SEQ ID NO: 22180 - protein, 11 aa, Artificial Sequence
  Description of Artificial Sequence: Synthetic peptide
  Seed: RTSDMRTEIIR
RGSDMRTEIIR

SEQ ID NO: 22181 - protein, 10 aa, Artificial Sequence
  Description of Artificial Sequence: Synthetic peptide
  Seed: RTSDMRTEII
RPSDMRTEIW

SEQ ID NO: 22182 - protein, 10 aa, Artificial Sequence
  Description of Artificial Sequence: Synthetic peptide
  Seed: RTSDMRTEII
RSSDMRTEII

SEQ ID NO: 22183 - protein, 10 aa, Artificial Sequence
  Description of Artificial Sequence: Synthetic peptide
  Seed: RTSDMRTEII
RSSDMRTEIL

SEQ ID NO: 22184 - protein, 10 aa, Artificial Sequence
  Description of Artificial Sequence: Synthetic peptide
  Seed: RTSDMRTEII
RSSDMRTEIM

SEQ ID NO: 22185 - protein, 10 aa, Artificial Sequence
  Description of Artificial Sequence: Synthetic peptide
  Seed: RTSDMRTEII
RSSDMRTEIF

SEQ ID NO: 22186 - protein, 10 aa, Artificial Sequence
  Description of Artificial Sequence: Synthetic peptide
  Seed: RTSDMRTEII
RSSDMRTEIW

SEQ ID NO: 22187 - protein, 10 aa, Artificial Sequence
  Description of Artificial Sequence: Synthetic peptide
  Seed: RTSDMRTEII
RSSDMRTEIY

SEQ ID NO: 22188 - protein, 10 aa, Artificial Sequence
  Description of Artificial Sequence: Synthetic peptide
  Seed: RTSDMRTEII
RTSDMRTEIL

SEQ ID NO: 22189 - protein, 10 aa, Artificial Sequence
  Description of Artificial Sequence: Synthetic peptide
  Seed: RTSDMRTEII
RTSDMRTEIM

SEQ ID NO: 22190 - protein, 10 aa, Artificial Sequence
  Description of Artificial Sequence: Synthetic peptide
  Seed: RTSDMRTEII
RTSDMRTEIF

SEQ ID NO: 22191 - protein, 10 aa, Artificial Sequence
  Description of Artificial Sequence: Synthetic peptide
  Seed: RTSDMRTEII
RTSDMRTEIW

SEQ ID NO: 22192 - protein, 10 aa, Artificial Sequence
  Description of Artificial Sequence: Synthetic peptide
  Seed: RTSDMRTEII
RTSDMRTEIY

SEQ ID NO: 22193 - protein, 10 aa, Artificial Sequence
  Description of Artificial Sequence: Synthetic peptide
  Seed: RTSDMRTEII
RWSDMRTEIW

SEQ ID NO: 22194 - protein, 10 aa, Artificial Sequence
  Description of Artificial Sequence: Synthetic peptide
  Seed: RTSDMRTEII
RYSDMRTEIW

SEQ ID NO: 22195 - protein, 10 aa, Artificial Sequence
  Description of Artificial Sequence: Synthetic peptide
  Seed: RTSDMRTEII
RVSDMRTEIF

SEQ ID NO: 22196 - protein, 10 aa, Artificial Sequence
  Description of Artificial Sequence: Synthetic peptide
  Seed: RTSDMRTEII
RVSDMRTEIW

SEQ ID NO: 22197 - protein, 10 aa, Artificial Sequence
  Description of Artificial Sequence: Synthetic peptide
  Seed: RTSDMRTEII
RVSDMRTEIY

SEQ ID NO: 22198 - protein, 11 aa, Artificial Sequence
  Description of Artificial Sequence: Synthetic peptide
  Seed: RTSDMRTEIIR
RASDMRTEIIR

SEQ ID NO: 22199 - protein, 11 aa, Artificial Sequence
  Description of Artificial Sequence: Synthetic peptide
  Seed: RTSDMRTEIIR
RQSDMRTEIIR

SEQ ID NO: 22200 - protein, 9 aa, Artificial Sequence
  Description of Artificial Sequence: Synthetic peptide
  Seed: RTSDMRTEI
RPSDMRTEV

SEQ ID NO: 22201 - protein, 9 aa, Artificial Sequence
  Description of Artificial Sequence: Synthetic peptide
  Seed: RTSDMRTEI
RPSDMRTEY

SEQ ID NO: 22202 - protein, 9 aa, Artificial Sequence
  Description of Artificial Sequence: Synthetic peptide
  Seed: RTSDMRTEI
RPSDMRTEW

SEQ ID NO: 22203 - protein, 9 aa, Artificial Sequence
  Description of Artificial Sequence: Synthetic peptide
  Seed: RTSDMRTEI
RASDMRTEV

SEQ ID NO: 22204 - protein, 11 aa, Artificial Sequence
  Description of Artificial Sequence: Synthetic peptide
  Seed: RTSDMRAEIIR
RVSDMRAEIIR

SEQ ID NO: 22205 - protein, 11 aa, Artificial Sequence
  Description of Artificial Sequence: Synthetic peptide
  Seed: RTSDMRAEIIR
RVSDMRAEIIK

SEQ ID NO: 22206 - protein, 9 aa, Artificial Sequence
  Description of Artificial Sequence: Synthetic peptide
  Seed: RTSDMRTEI
RASDMRTEA

SEQ ID NO: 22207 - protein, 9 aa, Artificial Sequence
  Description of Artificial Sequence: Synthetic peptide
  Seed: RTSDMRTEI
RASDMRTEI

SEQ ID NO: 22208 - protein, 9 aa, Artificial Sequence
  Description of Artificial Sequence: Synthetic peptide
  Seed: RTSDMRTEI
RASDMRTEL

SEQ ID NO: 22209 - protein, 9 aa, Artificial Sequence
  Description of Artificial Sequence: Synthetic peptide
  Seed: RTSDMRTEI
RASDMRTEK

SEQ ID NO: 22210 - protein, 9 aa, Artificial Sequence
  Description of Artificial Sequence: Synthetic peptide
  Seed: RTSDMRTEI
RASDMRTEM

SEQ ID NO: 22211 - protein, 9 aa, Artificial Sequence
  Description of Artificial Sequence: Synthetic peptide
  Seed: RTSDMRTEI
RASDMRTEF

SEQ ID NO: 22212 - protein, 9 aa, Artificial Sequence
  Description of Artificial Sequence: Synthetic peptide
  Seed: RTSDMRTEI
RASDMRTEW

SEQ ID NO: 22213 - protein, 9 aa, Artificial Sequence
  Description of Artificial Sequence: Synthetic peptide
  Seed: RTSDMRTEI
RNSDMRTEK

SEQ ID NO: 22214 - protein, 9 aa, Artificial Sequence
  Description of Artificial Sequence: Synthetic peptide
  Seed: RTSDMRTEI
RPSDMRTET

SEQ ID NO: 22215 - protein, 9 aa, Artificial Sequence
  Description of Artificial Sequence: Synthetic peptide
  Seed: RTSDMRTEI
RCSDMRTEK

SEQ ID NO: 22216 - protein, 9 aa, Artificial Sequence
  Description of Artificial Sequence: Synthetic peptide
  Seed: RTSDMRTEI
RQSDMRTEI

SEQ ID NO: 22217 - protein, 9 aa, Artificial Sequence
  Description of Artificial Sequence: Synthetic peptide
  Seed: RTSDMRTEI
RQSDMRTEL

SEQ ID NO: 22218 - protein, 9 aa, Artificial Sequence
  Description of Artificial Sequence: Synthetic peptide
  Seed: RTSDMRTEI
RQSDMRTEK

SEQ ID NO: 22219 - protein, 9 aa, Artificial Sequence
  Description of Artificial Sequence: Synthetic peptide
  Seed: RTSDMRTEI
RQSDMRTEM

SEQ ID NO: 22220 - protein, 9 aa, Artificial Sequence
  Description of Artificial Sequence: Synthetic peptide
  Seed: RTSDMRTEI
RQSDMRTEF

SEQ ID NO: 22221 - protein, 9 aa, Artificial Sequence
  Description of Artificial Sequence: Synthetic peptide
  Seed: RTSDMRTEI
RQSDMRTEW

SEQ ID NO: 22222 - protein, 9 aa, Artificial Sequence
  Description of Artificial Sequence: Synthetic peptide
  Seed: RTSDMRTEI
RQSDMRTEV

SEQ ID NO: 22223 - protein, 9 aa, Artificial Sequence
  Description of Artificial Sequence: Synthetic peptide
  Seed: RTSDMRTEI
RGSDMRTEL

SEQ ID NO: 22224 - protein, 11 aa, Artificial Sequence
  Description of Artificial Sequence: Synthetic peptide
  Seed: RTSDMRAEIIR
RYSDMRAEIIK

SEQ ID NO: 22225 - protein, 11 aa, Artificial Sequence
  Description of Artificial Sequence: Synthetic peptide
  Seed: RTSDMRAEIIR
RYSDMRAEIIR

SEQ ID NO: 22226 - protein, 11 aa, Artificial Sequence
  Description of Artificial Sequence: Synthetic peptide
  Seed: RTSDMRAEIIR
RWSDMRAEIIK

SEQ ID NO: 22227 - protein, 11 aa, Artificial Sequence
  Description of Artificial Sequence: Synthetic peptide
  Seed: RTSDMRAEIIR
RWSDMRAEIIR

SEQ ID NO: 22228 - protein, 9 aa, Artificial Sequence
  Description of Artificial Sequence: Synthetic peptide
  Seed: RTSDMRAEI
RVSDMRAEF

SEQ ID NO: 22229 - protein, 9 aa, Artificial Sequence
  Description of Artificial Sequence: Synthetic peptide
  Seed: RTSDMRAEI
RVSDMRAEW

SEQ ID NO: 22230 - protein, 9 aa, Artificial Sequence
  Description of Artificial Sequence: Synthetic peptide
  Seed: RTSDMRAEI
RVSDMRAEY

SEQ ID NO: 22231 - protein, 9 aa, Artificial Sequence
  Description of Artificial Sequence: Synthetic peptide
  Seed: RTSDMRAEI
RVSDMRAEV

SEQ ID NO: 22232 - protein, 11 aa, Artificial Sequence
  Description of Artificial Sequence: Synthetic peptide
  Seed: RTSDMRAEIIR
RASDMRAEIIR

SEQ ID NO: 22233 - protein, 11 aa, Artificial Sequence
  Description of Artificial Sequence: Synthetic peptide
  Seed: RTSDMRAEIIR
RASDMRAEIIK

SEQ ID NO: 22234 - protein, 11 aa, Artificial Sequence
  Description of Artificial Sequence: Synthetic peptide
  Seed: RTSDMRAEIIR
RQSDMRAEIIR

SEQ ID NO: 22235 - protein, 11 aa, Artificial Sequence
  Description of Artificial Sequence: Synthetic peptide
  Seed: RTSDMRAEIIR
RGSDMRAEIIR

SEQ ID NO: 22236 - protein, 11 aa, Artificial Sequence
  Description of Artificial Sequence: Synthetic peptide
  Seed: RTSDMRAEIIR
RISDMRAEIIR

SEQ ID NO: 22237 - protein, 11 aa, Artificial Sequence
  Description of Artificial Sequence: Synthetic peptide
  Seed: RTSDMRAEIIR
RISDMRAEIIK

SEQ ID NO: 22238 - protein, 11 aa, Artificial Sequence
  Description of Artificial Sequence: Synthetic peptide
  Seed: RTSDMRAEIIR
RLSDMRAEIIR

SEQ ID NO: 22239 - protein, 11 aa, Artificial Sequence
  Description of Artificial Sequence: Synthetic peptide
  Seed: RTSDMRAEIIR
RLSDMRAEIIK

SEQ ID NO: 22240 - protein, 11 aa, Artificial Sequence
  Description of Artificial Sequence: Synthetic peptide
  Seed: RTSDMRAEIIR
RMSDMRAEIIR

SEQ ID NO: 22241 - protein, 11 aa, Artificial Sequence
  Description of Artificial Sequence: Synthetic peptide
  Seed: RTSDMRAEIIR
RMSDMRAEIIK

SEQ ID NO: 22242 - protein, 11 aa, Artificial Sequence
  Description of Artificial Sequence: Synthetic peptide
  Seed: RTSDMRAEIIR
RFSDMRAEIIR

SEQ ID NO: 22243 - protein, 11 aa, Artificial Sequence
  Description of Artificial Sequence: Synthetic peptide
  Seed: RTSDMRAEIIR
RFSDMRAEIIK

SEQ ID NO: 22244 - protein, 11 aa, Artificial Sequence
  Description of Artificial Sequence: Synthetic peptide
  Seed: RTSDMRAEIIR
RSSDMRAEIIR

SEQ ID NO: 22245 - protein, 11 aa, Artificial Sequence
  Description of Artificial Sequence: Synthetic peptide
  Seed: RTSDMRAEIIR
RSSDMRAEIIK

SEQ ID NO: 22246 - protein, 9 aa, Artificial Sequence
  Description of Artificial Sequence: Synthetic peptide
  Seed: RTSDMRTEI
RGSDMRTEK

SEQ ID NO: 22247 - protein, 9 aa, Artificial Sequence
  Description of Artificial Sequence: Synthetic peptide
  Seed: RTSDMRTEI
RGSDMRTEM

SEQ ID NO: 22248 - protein, 9 aa, Artificial Sequence
  Description of Artificial Sequence: Synthetic peptide
  Seed: RTSDMRTEI
RISDMRTEA

SEQ ID NO: 22249 - protein, 9 aa, Artificial Sequence
  Description of Artificial Sequence: Synthetic peptide
  Seed: RTSDMRTEI
RMSDMRTEK

SEQ ID NO: 22250 - protein, 9 aa, Artificial Sequence
  Description of Artificial Sequence: Synthetic peptide
  Seed: RTSDMRTEI
RMSDMRTEF

SEQ ID NO: 22251 - protein, 9 aa, Artificial Sequence
  Description of Artificial Sequence: Synthetic peptide
  Seed: RTSDMRTEI
RMSDMRTEW

SEQ ID NO: 22252 - protein, 9 aa, Artificial Sequence
  Description of Artificial Sequence: Synthetic peptide
  Seed: RTSDMRTEI
RMSDMRTEY

SEQ ID NO: 22253 - protein, 9 aa, Artificial Sequence
  Description of Artificial Sequence: Synthetic peptide
  Seed: RTSDMRTEI
RMSDMRTEV

SEQ ID NO: 22254 - protein, 9 aa, Artificial Sequence
  Description of Artificial Sequence: Synthetic peptide
  Seed: RTSDMRTEI
RFSDMRTEA

SEQ ID NO: 22255 - protein, 9 aa, Artificial Sequence
  Description of Artificial Sequence: Synthetic peptide
  Seed: RTSDMRTEI
RFSDMRTEK

SEQ ID NO: 22256 - protein, 9 aa, Artificial Sequence
  Description of Artificial Sequence: Synthetic peptide
  Seed: RTSDMRTEI
RPSDMRTEA

SEQ ID NO: 22257 - protein, 9 aa, Artificial Sequence
  Description of Artificial Sequence: Synthetic peptide
  Seed: RTSDMRTEI
RPSDMRTEN

SEQ ID NO: 22258 - protein, 9 aa, Artificial Sequence
  Description of Artificial Sequence: Synthetic peptide
  Seed: RTSDMRTEI
RPSDMRTEC

SEQ ID NO: 22259 - protein, 9 aa, Artificial Sequence
  Description of Artificial Sequence: Synthetic peptide
  Seed: RTSDMRTEI
RPSDMRTEQ

SEQ ID NO: 22260 - protein, 9 aa, Artificial Sequence
  Description of Artificial Sequence: Synthetic peptide
  Seed: RTSDMRTEI
RPSDMRTEE

SEQ ID NO: 22261 - protein, 9 aa, Artificial Sequence
  Description of Artificial Sequence: Synthetic peptide
  Seed: RTSDMRTEI
RPSDMRTEG

SEQ ID NO: 22262 - protein, 9 aa, Artificial Sequence
  Description of Artificial Sequence: Synthetic peptide
  Seed: RTSDMRTEI
RPSDMRTEH

SEQ ID NO: 22263 - protein, 9 aa, Artificial Sequence
  Description of Artificial Sequence: Synthetic peptide
  Seed: RTSDMRTEI
RPSDMRTEI

SEQ ID NO: 22264 - protein, 9 aa, Artificial Sequence
  Description of Artificial Sequence: Synthetic peptide
  Seed: RTSDMRTEI
RPSDMRTEL

SEQ ID NO: 22265 - protein, 9 aa, Artificial Sequence
  Description of Artificial Sequence: Synthetic peptide
  Seed: RTSDMRTEI
RPSDMRTEM

SEQ ID NO: 22266 - protein, 9 aa, Artificial Sequence
  Description of Artificial Sequence: Synthetic peptide
  Seed: RTSDMRTEI
RPSDMRTEF

SEQ ID NO: 22267 - protein, 9 aa, Artificial Sequence
  Description of Artificial Sequence: Synthetic peptide
  Seed: RTSDMRTEI
RPSDMRTEP

SEQ ID NO: 22268 - protein, 9 aa, Artificial Sequence
  Description of Artificial Sequence: Synthetic peptide
  Seed: RTSDMRTEI
RPSDMRTES

SEQ ID NO: 22269 - protein, 9 aa, Artificial Sequence
  Description of Artificial Sequence: Synthetic peptide
  Seed: RTSDMRTEI
RMSDMRTEM

SEQ ID NO: 22270 - protein, 9 aa, Artificial Sequence
  Description of Artificial Sequence: Synthetic peptide
  Seed: RTSDMRTEI
RMSDMRTEL

SEQ ID NO: 22271 - protein, 9 aa, Artificial Sequence
  Description of Artificial Sequence: Synthetic peptide
  Seed: RTSDMRTEI
RMSDMRTEI

SEQ ID NO: 22272 - protein, 9 aa, Artificial Sequence
  Description of Artificial Sequence: Synthetic peptide
  Seed: RTSDMRTEI
RISDMRTEL

SEQ ID NO: 22273 - protein, 9 aa, Artificial Sequence
  Description of Artificial Sequence: Synthetic peptide
  Seed: RTSDMRTEI
RISDMRTEK

SEQ ID NO: 22274 - protein, 9 aa, Artificial Sequence
  Description of Artificial Sequence: Synthetic peptide
  Seed: RTSDMRTEI
RISDMRTEM

SEQ ID NO: 22275 - protein, 9 aa, Artificial Sequence
  Description of Artificial Sequence: Synthetic peptide
  Seed: RTSDMRTEI
RISDMRTEF

SEQ ID NO: 22276 - protein, 9 aa, Artificial Sequence
  Description of Artificial Sequence: Synthetic peptide
  Seed: RTSDMRTEI
RISDMRTEW

SEQ ID NO: 22277 - protein, 9 aa, Artificial Sequence
  Description of Artificial Sequence: Synthetic peptide
  Seed: RTSDMRTEI
RISDMRTEV

SEQ ID NO: 22278 - protein, 9 aa, Artificial Sequence
  Description of Artificial Sequence: Synthetic peptide
  Seed: RTSDMRTEI
RLSDMRTEA

SEQ ID NO: 22279 - protein, 9 aa, Artificial Sequence
  Description of Artificial Sequence: Synthetic peptide
  Seed: RTSDMRTEI
RLSDMRTEC

SEQ ID NO: 22280 - protein, 9 aa, Artificial Sequence
  Description of Artificial Sequence: Synthetic peptide
  Seed: RTSDMRTEI
RLSDMRTEI

SEQ ID NO: 22281 - protein, 9 aa, Artificial Sequence
  Description of Artificial Sequence: Synthetic peptide
  Seed: RTSDMRTEI
RLSDMRTEL

SEQ ID NO: 22282 - protein, 9 aa, Artificial Sequence
  Description of Artificial Sequence: Synthetic peptide
  Seed: RTSDMRTEI
RLSDMRTEK

SEQ ID NO: 22283 - protein, 9 aa, Artificial Sequence
  Description of Artificial Sequence: Synthetic peptide
  Seed: RTSDMRTEI
RLSDMRTEM

SEQ ID NO: 22284 - protein, 9 aa, Artificial Sequence
  Description of Artificial Sequence: Synthetic peptide
  Seed: RTSDMRTEI
RLSDMRTEF

SEQ ID NO: 22285 - protein, 9 aa, Artificial Sequence
  Description of Artificial Sequence: Synthetic peptide
  Seed: RTSDMRTEI
RLSDMRTEW

SEQ ID NO: 22286 - protein, 9 aa, Artificial Sequence
  Description of Artificial Sequence: Synthetic peptide
  Seed: RTSDMRTEI
RLSDMRTEY

SEQ ID NO: 22287 - protein, 9 aa, Artificial Sequence
  Description of Artificial Sequence: Synthetic peptide
  Seed: RTSDMRTEI
RLSDMRTEV

SEQ ID NO: 22288 - protein, 9 aa, Artificial Sequence
  Description of Artificial Sequence: Synthetic peptide
  Seed: RTSDMRTEI
RMSDMRTEA

SEQ ID NO: 22289 - protein, 9 aa, Artificial Sequence
  Description of Artificial Sequence: Synthetic peptide
  Seed: RTSDMRTEI
RMSDMRTER

SEQ ID NO: 22290 - protein, 9 aa, Artificial Sequence
  Description of Artificial Sequence: Synthetic peptide
  Seed: RTSDMRTEI
RMSDMRTEC

SEQ ID NO: 22291 - protein, 8 aa, Artificial Sequence
  Description of Artificial Sequence: Synthetic peptide
  Seed: RVDGKWMR
RSDGKWMR

SEQ ID NO: 22292 - protein, 8 aa, Artificial Sequence
  Description of Artificial Sequence: Synthetic peptide
  Seed: RVDGKWMR
RWDGKWMR

SEQ ID NO: 22293 - protein, 11 aa, Artificial Sequence
  Description of Artificial Sequence: Synthetic peptide
  Seed: RVSSFIRGTKV
RASSFIRGTKK

SEQ ID NO: 22294 - protein, 8 aa, Artificial Sequence
  Description of Artificial Sequence: Synthetic peptide
  Seed: RVDGKWMR
RYDGKWMR

SEQ ID NO: 22295 - protein, 9 aa, Artificial Sequence
  Description of Artificial Sequence: Synthetic peptide
  Seed: RVSSFIRGT
RMSSFIRGS

SEQ ID NO: 22296 - protein, 9 aa, Artificial Sequence
  Description of Artificial Sequence: Synthetic peptide
  Seed: RVSSFIRGT
RMSSFIRGT

SEQ ID NO: 22297 - protein, 9 aa, Artificial Sequence
  Description of Artificial Sequence: Synthetic peptide
  Seed: RVSSFIRGT
RMSSFIRGV

SEQ ID NO: 22298 - protein, 9 aa, Artificial Sequence
  Description of Artificial Sequence: Synthetic peptide
  Seed: RVSSFIRGT
RSSSFIRGV

SEQ ID NO: 22299 - protein, 9 aa, Artificial Sequence
  Description of Artificial Sequence: Synthetic peptide
  Seed: RVSSFIRGT
RTSSFIRGI

SEQ ID NO: 22300 - protein, 9 aa, Artificial Sequence
  Description of Artificial Sequence: Synthetic peptide
  Seed: RVSSFIRGT
RTSSFIRGV

SEQ ID NO: 22301 - protein, 9 aa, Artificial Sequence
  Description of Artificial Sequence: Synthetic peptide
  Seed: RVSSFIRGT
RVSSFIRGI

SEQ ID NO: 22302 - protein, 9 aa, Artificial Sequence
  Description of Artificial Sequence: Synthetic peptide
  Seed: RVSSFIRGT
RVSSFIRGL

SEQ ID NO: 22303 - protein, 9 aa, Artificial Sequence
  Description of Artificial Sequence: Synthetic peptide
  Seed: RVSSFIRGT
RVSSFIRGV

SEQ ID NO: 22304 - protein, 9 aa, Artificial Sequence
  Description of Artificial Sequence: Synthetic peptide
  Seed: RVSSFIRGT
RMSSFIRGM

SEQ ID NO: 22305 - protein, 9 aa, Artificial Sequence
  Description of Artificial Sequence: Synthetic peptide
  Seed: RVSSFIRGT
RMSSFIRGL

SEQ ID NO: 22306 - protein, 9 aa, Artificial Sequence
  Description of Artificial Sequence: Synthetic peptide
  Seed: RVSSFIRGT
RMSSFIRGI

SEQ ID NO: 22307 - protein, 9 aa, Artificial Sequence
  Description of Artificial Sequence: Synthetic peptide
  Seed: RVSSFIRGT
RMSSFIRGC

SEQ ID NO: 22308 - protein, 9 aa, Artificial Sequence
  Description of Artificial Sequence: Synthetic peptide
  Seed: RVSSFIRGT
RASSFIRGV

SEQ ID NO: 22309 - protein, 9 aa, Artificial Sequence
  Description of Artificial Sequence: Synthetic peptide
  Seed: RVSSFIRGT
RQSSFIRGA

SEQ ID NO: 22310 - protein, 9 aa, Artificial Sequence
  Description of Artificial Sequence: Synthetic peptide
  Seed: RVSSFIRGT
RQSSFIRGI

SEQ ID NO: 22311 - protein, 9 aa, Artificial Sequence
  Description of Artificial Sequence: Synthetic peptide
  Seed: RVSSFIRGT
RQSSFIRGL

SEQ ID NO: 22312 - protein, 9 aa, Artificial Sequence
  Description of Artificial Sequence: Synthetic peptide
  Seed: RVSSFIRGT
RQSSFIRGV

SEQ ID NO: 22313 - protein, 9 aa, Artificial Sequence
  Description of Artificial Sequence: Synthetic peptide
  Seed: RVSSFIRGT
RISSFIRGA

SEQ ID NO: 22314 - protein, 9 aa, Artificial Sequence
  Description of Artificial Sequence: Synthetic peptide
  Seed: RVSSFIRGT
RISSFIRGI

SEQ ID NO: 22315 - protein, 9 aa, Artificial Sequence
  Description of Artificial Sequence: Synthetic peptide
  Seed: RVSSFIRGT
RISSFIRGL

SEQ ID NO: 22316 - protein, 9 aa, Artificial Sequence
  Description of Artificial Sequence: Synthetic peptide
  Seed: RVSSFIRGT
RISSFIRGM

SEQ ID NO: 22317 - protein, 9 aa, Artificial Sequence
  Description of Artificial Sequence: Synthetic peptide
  Seed: RVSSFIRGT
RISSFIRGV

SEQ ID NO: 22318 - protein, 9 aa, Artificial Sequence
  Description of Artificial Sequence: Synthetic peptide
  Seed: RVSSFIRGT
RLSSFIRGA

SEQ ID NO: 22319 - protein, 9 aa, Artificial Sequence
  Description of Artificial Sequence: Synthetic peptide
  Seed: RVSSFIRGT
RLSSFIRGC

SEQ ID NO: 22320 - protein, 9 aa, Artificial Sequence
  Description of Artificial Sequence: Synthetic peptide
  Seed: RVSSFIRGT
RLSSFIRGI

SEQ ID NO: 22321 - protein, 9 aa, Artificial Sequence
  Description of Artificial Sequence: Synthetic peptide
  Seed: RVSSFIRGT
RLSSFIRGL

SEQ ID NO: 22322 - protein, 9 aa, Artificial Sequence
  Description of Artificial Sequence: Synthetic peptide
  Seed: RVSSFIRGT
RLSSFIRGM

SEQ ID NO: 22323 - protein, 9 aa, Artificial Sequence
  Description of Artificial Sequence: Synthetic peptide
  Seed: RVSSFIRGT
RLSSFIRGS

SEQ ID NO: 22324 - protein, 9 aa, Artificial Sequence
  Description of Artificial Sequence: Synthetic peptide
  Seed: RVSSFIRGT
RLSSFIRGV

SEQ ID NO: 22325 - protein, 9 aa, Artificial Sequence
  Description of Artificial Sequence: Synthetic peptide
  Seed: RVSSFIRGT
RMSSFIRGA

SEQ ID NO: 22326 - protein, 10 aa, Artificial Sequence
  Description of Artificial Sequence: Synthetic peptide
  Seed: QISVQPTFSV
QESVQPTFSV

SEQ ID NO: 22327 - protein, 11 aa, Artificial Sequence
  Description of Artificial Sequence: Synthetic peptide
  Seed: RVSSFIRGTRV
RWSSFIRGTRQ

SEQ ID NO: 22328 - protein, 11 aa, Artificial Sequence
  Description of Artificial Sequence: Synthetic peptide
  Seed: RVSSFIRGTRV
RWSSFIRGTRG

SEQ ID NO: 22329 - protein, 11 aa, Artificial Sequence
  Description of Artificial Sequence: Synthetic peptide
  Seed: SAGQISVQPTF
SCGQISVQPTF

SEQ ID NO: 22330 - protein, 10 aa, Artificial Sequence
  Description of Artificial Sequence: Synthetic peptide
  Seed: RYWAIRTRSG
RSWAIRTRSL

SEQ ID NO: 22331 - protein, 10 aa, Artificial Sequence
  Description of Artificial Sequence: Synthetic peptide
  Seed: RYWAIRTRSG
RFWAIRTRSV

SEQ ID NO: 22332 - protein, 10 aa, Artificial Sequence
  Description of Artificial Sequence: Synthetic peptide
  Seed: RYWAIRTRSG
RPWAIRTRSK

SEQ ID NO: 22333 - protein, 10 aa, Artificial Sequence
  Description of Artificial Sequence: Synthetic peptide
  Seed: RYWAIRTRSG
RSWAIRTRSA

SEQ ID NO: 22334 - protein, 10 aa, Artificial Sequence
  Description of Artificial Sequence: Synthetic peptide
  Seed: RYWAIRTRSG
RSWAIRTRSR

SEQ ID NO: 22335 - protein, 10 aa, Artificial Sequence
  Description of Artificial Sequence: Synthetic peptide
  Seed: RYWAIRTRSG
RSWAIRTRSC

SEQ ID NO: 22336 - protein, 10 aa, Artificial Sequence
  Description of Artificial Sequence: Synthetic peptide
  Seed: RYWAIRTRSG
RSWAIRTRSQ

SEQ ID NO: 22337 - protein, 10 aa, Artificial Sequence
  Description of Artificial Sequence: Synthetic peptide
  Seed: RYWAIRTRSG
RSWAIRTRSG

SEQ ID NO: 22338 - protein, 10 aa, Artificial Sequence
  Description of Artificial Sequence: Synthetic peptide
  Seed: RYWAIRTRSG
RSWAIRTRSH

SEQ ID NO: 22339 - protein, 10 aa, Artificial Sequence
  Description of Artificial Sequence: Synthetic peptide
  Seed: RYWAIRTRSG
RSWAIRTRSI

SEQ ID NO: 22340 - protein, 10 aa, Artificial Sequence
  Description of Artificial Sequence: Synthetic peptide
  Seed: RYWAIRTRSG
RSWAIRTRSK

SEQ ID NO: 22341 - protein, 10 aa, Artificial Sequence
  Description of Artificial Sequence: Synthetic peptide
  Seed: RYWAIRTRSG
RTWAIRTRSC

SEQ ID NO: 22342 - protein, 10 aa, Artificial Sequence
  Description of Artificial Sequence: Synthetic peptide
  Seed: RYWAIRTRSG
RSWAIRTRSM

SEQ ID NO: 22343 - protein, 10 aa, Artificial Sequence
  Description of Artificial Sequence: Synthetic peptide
  Seed: RYWAIRTRSG
RSWAIRTRSF

SEQ ID NO: 22344 - protein, 10 aa, Artificial Sequence
  Description of Artificial Sequence: Synthetic peptide
  Seed: RYWAIRTRSG
RSWAIRTRSP

SEQ ID NO: 22345 - protein, 10 aa, Artificial Sequence
  Description of Artificial Sequence: Synthetic peptide
  Seed: RYWAIRTRSG
RSWAIRTRSS

SEQ ID NO: 22346 - protein, 10 aa, Artificial Sequence
  Description of Artificial Sequence: Synthetic peptide
  Seed: RYWAIRTRSG
RSWAIRTRST

SEQ ID NO: 22347 - protein, 10 aa, Artificial Sequence
  Description of Artificial Sequence: Synthetic peptide
  Seed: RYWAIRTRSG
RSWAIRTRSY

SEQ ID NO: 22348 - protein, 10 aa, Artificial Sequence
  Description of Artificial Sequence: Synthetic peptide
  Seed: RYWAIRTRSG
RSWAIRTRSV

SEQ ID NO: 22349 - protein, 10 aa, Artificial Sequence
  Description of Artificial Sequence: Synthetic peptide
  Seed: RYWAIRTRSG
RTWAIRTRSA

SEQ ID NO: 22350 - protein, 10 aa, Artificial Sequence
  Description of Artificial Sequence: Synthetic peptide
  Seed: RYWAIRTRSG
RTWAIRTRSR

SEQ ID NO: 22351 - protein, 10 aa, Artificial Sequence
  Description of Artificial Sequence: Synthetic peptide
  Seed: RYWAIRTRSG
RFWAIRTRSY

SEQ ID NO: 22352 - protein, 10 aa, Artificial Sequence
  Description of Artificial Sequence: Synthetic peptide
  Seed: RYWAIRTRSG
RFWAIRTRSS

SEQ ID NO: 22353 - protein, 10 aa, Artificial Sequence
  Description of Artificial Sequence: Synthetic peptide
  Seed: RYWAIRTRSG
RFWAIRTRSM

SEQ ID NO: 22354 - protein, 10 aa, Artificial Sequence
  Description of Artificial Sequence: Synthetic peptide
  Seed: RYWAIRTRSG
RFWAIRTRSK

SEQ ID NO: 22355 - protein, 10 aa, Artificial Sequence
  Description of Artificial Sequence: Synthetic peptide
  Seed: RYWAIRTRSG
RLWAIRTRSK

SEQ ID NO: 22356 - protein, 10 aa, Artificial Sequence
  Description of Artificial Sequence: Synthetic peptide
  Seed: RYWAIRTRSG
RLWAIRTRSM

SEQ ID NO: 22357 - protein, 10 aa, Artificial Sequence
  Description of Artificial Sequence: Synthetic peptide
  Seed: RYWAIRTRSG
RLWAIRTRSV

SEQ ID NO: 22358 - protein, 10 aa, Artificial Sequence
  Description of Artificial Sequence: Synthetic peptide
  Seed: RYWAIRTRSG
RKWAIRTRSK

SEQ ID NO: 22359 - protein, 10 aa, Artificial Sequence
  Description of Artificial Sequence: Synthetic peptide
  Seed: RYWAIRTRSG
RMWAIRTRSA

SEQ ID NO: 22360 - protein, 10 aa, Artificial Sequence
  Description of Artificial Sequence: Synthetic peptide
  Seed: RYWAIRTRSG
RMWAIRTRSR

SEQ ID NO: 22361 - protein, 10 aa, Artificial Sequence
  Description of Artificial Sequence: Synthetic peptide
  Seed: RYWAIRTRSG
RMWAIRTRSG

SEQ ID NO: 22362 - protein, 10 aa, Artificial Sequence
  Description of Artificial Sequence: Synthetic peptide
  Seed: RYWAIRTRSG
RMWAIRTRSI

SEQ ID NO: 22363 - protein, 10 aa, Artificial Sequence
  Description of Artificial Sequence: Synthetic peptide
  Seed: RYWAIRTRSG
RMWAIRTRSL

SEQ ID NO: 22364 - protein, 10 aa, Artificial Sequence
  Description of Artificial Sequence: Synthetic peptide
  Seed: RYWAIRTRSG
RMWAIRTRSK

SEQ ID NO: 22365 - protein, 10 aa, Artificial Sequence
  Description of Artificial Sequence: Synthetic peptide
  Seed: RYWAIRTRSG
RMWAIRTRSM

SEQ ID NO: 22366 - protein, 10 aa, Artificial Sequence
  Description of Artificial Sequence: Synthetic peptide
  Seed: RYWAIRTRSG
RMWAIRTRSS

SEQ ID NO: 22367 - protein, 10 aa, Artificial Sequence
  Description of Artificial Sequence: Synthetic peptide
  Seed: RYWAIRTRSG
RMWAIRTRSY

SEQ ID NO: 22368 - protein, 10 aa, Artificial Sequence
  Description of Artificial Sequence: Synthetic peptide
  Seed: RYWAIRTRSG
RMWAIRTRSV

SEQ ID NO: 22369 - protein, 10 aa, Artificial Sequence
  Description of Artificial Sequence: Synthetic peptide
  Seed: RYWAIRTRSG
RFWAIRTRSA

SEQ ID NO: 22370 - protein, 10 aa, Artificial Sequence
  Description of Artificial Sequence: Synthetic peptide
  Seed: RYWAIRTRSG
RFWAIRTRSR

SEQ ID NO: 22371 - protein, 10 aa, Artificial Sequence
  Description of Artificial Sequence: Synthetic peptide
  Seed: RYWAIRTRSG
RFWAIRTRSG

SEQ ID NO: 22372 - protein, 10 aa, Artificial Sequence
  Description of Artificial Sequence: Synthetic peptide
  Seed: RYWAIRTRSG
RFWAIRTRSI

SEQ ID NO: 22373 - protein, 10 aa, Artificial Sequence
  Description of Artificial Sequence: Synthetic peptide
  Seed: RYWAIRTRSG
RFWAIRTRSL

SEQ ID NO: 22374 - protein, 10 aa, Artificial Sequence
  Description of Artificial Sequence: Synthetic peptide
  Seed: RYWAIRTRSG
RTWAIRTRSN

SEQ ID NO: 22375 - protein, 10 aa, Artificial Sequence
  Description of Artificial Sequence: Synthetic peptide
  Seed: RYWAIRTRSG
RTWAIRTRSQ

SEQ ID NO: 22376 - protein, 10 aa, Artificial Sequence
  Description of Artificial Sequence: Synthetic peptide
  Seed: RYWAIRTRSG
RLWAIRTRSI

SEQ ID NO: 22377 - protein, 10 aa, Artificial Sequence
  Description of Artificial Sequence: Synthetic peptide
  Seed: RYWAIRTRSG
RVWAIRTRSC

SEQ ID NO: 22378 - protein, 10 aa, Artificial Sequence
  Description of Artificial Sequence: Synthetic peptide
  Seed: RYWAIRTRSG
RYWAIRTRSK

SEQ ID NO: 22379 - protein, 10 aa, Artificial Sequence
  Description of Artificial Sequence: Synthetic peptide
  Seed: RYWAIRTRSG
RYWAIRTRSM

SEQ ID NO: 22380 - protein, 10 aa, Artificial Sequence
  Description of Artificial Sequence: Synthetic peptide
  Seed: RYWAIRTRSG
RYWAIRTRSP

SEQ ID NO: 22381 - protein, 10 aa, Artificial Sequence
  Description of Artificial Sequence: Synthetic peptide
  Seed: RYWAIRTRSG
RYWAIRTRSS

SEQ ID NO: 22382 - protein, 10 aa, Artificial Sequence
  Description of Artificial Sequence: Synthetic peptide
  Seed: RYWAIRTRSG
RYWAIRTRST

SEQ ID NO: 22383 - protein, 10 aa, Artificial Sequence
  Description of Artificial Sequence: Synthetic peptide
  Seed: RYWAIRTRSG
RYWAIRTRSY

SEQ ID NO: 22384 - protein, 10 aa, Artificial Sequence
  Description of Artificial Sequence: Synthetic peptide
  Seed: RYWAIRTRSG
RYWAIRTRSV

SEQ ID NO: 22385 - protein, 10 aa, Artificial Sequence
  Description of Artificial Sequence: Synthetic peptide
  Seed: RYWAIRTRSG
RVWAIRTRSA

SEQ ID NO: 22386 - protein, 10 aa, Artificial Sequence
  Description of Artificial Sequence: Synthetic peptide
  Seed: RYWAIRTRSG
RVWAIRTRSR

SEQ ID NO: 22387 - protein, 10 aa, Artificial Sequence
  Description of Artificial Sequence: Synthetic peptide
  Seed: RYWAIRTRSG
RVWAIRTRSG

SEQ ID NO: 22388 - protein, 10 aa, Artificial Sequence
  Description of Artificial Sequence: Synthetic peptide
  Seed: RYWAIRTRSG
RTWAIRTRSE

SEQ ID NO: 22389 - protein, 10 aa, Artificial Sequence
  Description of Artificial Sequence: Synthetic peptide
  Seed: RYWAIRTRSG
RVWAIRTRSI

SEQ ID NO: 22390 - protein, 10 aa, Artificial Sequence
  Description of Artificial Sequence: Synthetic peptide
  Seed: RYWAIRTRSG
RVWAIRTRSL

SEQ ID NO: 22391 - protein, 10 aa, Artificial Sequence
  Description of Artificial Sequence: Synthetic peptide
  Seed: RYWAIRTRSG
RVWAIRTRSK

SEQ ID NO: 22392 - protein, 10 aa, Artificial Sequence
  Description of Artificial Sequence: Synthetic peptide
  Seed: RYWAIRTRSG
RVWAIRTRSM

SEQ ID NO: 22393 - protein, 10 aa, Artificial Sequence
  Description of Artificial Sequence: Synthetic peptide
  Seed: RYWAIRTRSG
RVWAIRTRSF

SEQ ID NO: 22394 - protein, 10 aa, Artificial Sequence
  Description of Artificial Sequence: Synthetic peptide
  Seed: RYWAIRTRSG
RVWAIRTRSP

SEQ ID NO: 22395 - protein, 10 aa, Artificial Sequence
  Description of Artificial Sequence: Synthetic peptide
  Seed: RYWAIRTRSG
RVWAIRTRSS

SEQ ID NO: 22396 - protein, 10 aa, Artificial Sequence
  Description of Artificial Sequence: Synthetic peptide
  Seed: RYWAIRTRSG
RVWAIRTRST

SEQ ID NO: 22397 - protein, 10 aa, Artificial Sequence
  Description of Artificial Sequence: Synthetic peptide
  Seed: RYWAIRTRSG
RVWAIRTRSY

SEQ ID NO: 22398 - protein, 10 aa, Artificial Sequence
  Description of Artificial Sequence: Synthetic peptide
  Seed: RYWAIRTRSG
RYWAIRTRSL

SEQ ID NO: 22399 - protein, 10 aa, Artificial Sequence
  Description of Artificial Sequence: Synthetic peptide
  Seed: RYWAIRTRSG
RYWAIRTRSI

SEQ ID NO: 22400 - protein, 10 aa, Artificial Sequence
  Description of Artificial Sequence: Synthetic peptide
  Seed: RYWAIRTRSG
RYWAIRTRSR

SEQ ID NO: 22401 - protein, 10 aa, Artificial Sequence
  Description of Artificial Sequence: Synthetic peptide
  Seed: RYWAIRTRSG
RYWAIRTRSA

SEQ ID NO: 22402 - protein, 10 aa, Artificial Sequence
  Description of Artificial Sequence: Synthetic peptide
  Seed: RYWAIRTRSG
RTWAIRTRSG

SEQ ID NO: 22403 - protein, 10 aa, Artificial Sequence
  Description of Artificial Sequence: Synthetic peptide
  Seed: RYWAIRTRSG
RTWAIRTRSH

SEQ ID NO: 22404 - protein, 10 aa, Artificial Sequence
  Description of Artificial Sequence: Synthetic peptide
  Seed: RYWAIRTRSG
RTWAIRTRSI

SEQ ID NO: 22405 - protein, 10 aa, Artificial Sequence
  Description of Artificial Sequence: Synthetic peptide
  Seed: RYWAIRTRSG
RTWAIRTRSL

SEQ ID NO: 22406 - protein, 10 aa, Artificial Sequence
  Description of Artificial Sequence: Synthetic peptide
  Seed: RYWAIRTRSG
RTWAIRTRSK

SEQ ID NO: 22407 - protein, 10 aa, Artificial Sequence
  Description of Artificial Sequence: Synthetic peptide
  Seed: RYWAIRTRSG
RTWAIRTRSM

SEQ ID NO: 22408 - protein, 10 aa, Artificial Sequence
  Description of Artificial Sequence: Synthetic peptide
  Seed: RYWAIRTRSG
RTWAIRTRSF

SEQ ID NO: 22409 - protein, 10 aa, Artificial Sequence
  Description of Artificial Sequence: Synthetic peptide
  Seed: RYWAIRTRSG
RTWAIRTRSP

SEQ ID NO: 22410 - protein, 10 aa, Artificial Sequence
  Description of Artificial Sequence: Synthetic peptide
  Seed: RYWAIRTRSG
RTWAIRTRSS

SEQ ID NO: 22411 - protein, 10 aa, Artificial Sequence
  Description of Artificial Sequence: Synthetic peptide
  Seed: RYWAIRTRSG
RTWAIRTRST

SEQ ID NO: 22412 - protein, 10 aa, Artificial Sequence
  Description of Artificial Sequence: Synthetic peptide
  Seed: RYWAIRTRSG
RTWAIRTRSY

SEQ ID NO: 22413 - protein, 10 aa, Artificial Sequence
  Description of Artificial Sequence: Synthetic peptide
  Seed: RYWAIRTRSG
RTWAIRTRSV

SEQ ID NO: 22414 - protein, 10 aa, Artificial Sequence
  Description of Artificial Sequence: Synthetic peptide
  Seed: RYWAIRTRSG
RWWAIRTRSA

SEQ ID NO: 22415 - protein, 10 aa, Artificial Sequence
  Description of Artificial Sequence: Synthetic peptide
  Seed: RYWAIRTRSG
RWWAIRTRSG

SEQ ID NO: 22416 - protein, 10 aa, Artificial Sequence
  Description of Artificial Sequence: Synthetic peptide
  Seed: RYWAIRTRSG
RWWAIRTRSI

SEQ ID NO: 22417 - protein, 10 aa, Artificial Sequence
  Description of Artificial Sequence: Synthetic peptide
  Seed: RYWAIRTRSG
RWWAIRTRSL

SEQ ID NO: 22418 - protein, 10 aa, Artificial Sequence
  Description of Artificial Sequence: Synthetic peptide
  Seed: RYWAIRTRSG
RWWAIRTRSK

SEQ ID NO: 22419 - protein, 10 aa, Artificial Sequence
  Description of Artificial Sequence: Synthetic peptide
  Seed: RYWAIRTRSG
RWWAIRTRSM

SEQ ID NO: 22420 - protein, 10 aa, Artificial Sequence
  Description of Artificial Sequence: Synthetic peptide
  Seed: RYWAIRTRSG
RWWAIRTRSV

SEQ ID NO: 22421 - protein, 10 aa, Artificial Sequence
  Description of Artificial Sequence: Synthetic peptide
  Seed: RYWAIRTRSG
RLWAIRTRSL

SEQ ID NO: 22422 - protein, 10 aa, Artificial Sequence
  Description of Artificial Sequence: Synthetic peptide
  Seed: RYWAIRTRSG
RLWAIRTRSA

SEQ ID NO: 22423 - protein, 11 aa, Artificial Sequence
  Description of Artificial Sequence: Synthetic peptide
  Seed: RVSSFIRGTRV
RWSSFIRGTRH

SEQ ID NO: 22424 - protein, 9 aa, Artificial Sequence
  Description of Artificial Sequence: Synthetic peptide
  Seed: RYWAIRTRS
RYWAIRTRP

SEQ ID NO: 22425 - protein, 9 aa, Artificial Sequence
  Description of Artificial Sequence: Synthetic peptide
  Seed: RYWAIRTRS
RWWAIRTRS

SEQ ID NO: 22426 - protein, 9 aa, Artificial Sequence
  Description of Artificial Sequence: Synthetic peptide
  Seed: RYWAIRTRS
RWWAIRTRV

SEQ ID NO: 22427 - protein, 9 aa, Artificial Sequence
  Description of Artificial Sequence: Synthetic peptide
  Seed: RYWAIRTRS
RYWAIRTRA

SEQ ID NO: 22428 - protein, 9 aa, Artificial Sequence
  Description of Artificial Sequence: Synthetic peptide
  Seed: RYWAIRTRS
RYWAIRTRR

SEQ ID NO: 22429 - protein, 9 aa, Artificial Sequence
  Description of Artificial Sequence: Synthetic peptide
  Seed: RYWAIRTRS
RYWAIRTRG

SEQ ID NO: 22430 - protein, 9 aa, Artificial Sequence
  Description of Artificial Sequence: Synthetic peptide
  Seed: RYWAIRTRS
RYWAIRTRI

SEQ ID NO: 22431 - protein, 9 aa, Artificial Sequence
  Description of Artificial Sequence: Synthetic peptide
  Seed: RYWAIRTRS
RYWAIRTRL

SEQ ID NO: 22432 - protein, 9 aa, Artificial Sequence
  Description of Artificial Sequence: Synthetic peptide
  Seed: RYWAIRTRS
RYWAIRTRK

SEQ ID NO: 22433 - protein, 9 aa, Artificial Sequence
  Description of Artificial Sequence: Synthetic peptide
  Seed: RYWAIRTRS
RYWAIRTRM

SEQ ID NO: 22434 - protein, 9 aa, Artificial Sequence
  Description of Artificial Sequence: Synthetic peptide
  Seed: RYWAIRTRS
RYWAIRTRT

SEQ ID NO: 22435 - protein, 9 aa, Artificial Sequence
  Description of Artificial Sequence: Synthetic peptide
  Seed: RYWAIRTRS
RVWAIRTRK

SEQ ID NO: 22436 - protein, 9 aa, Artificial Sequence
  Description of Artificial Sequence: Synthetic peptide
  Seed: RYWAIRTRS
RYWAIRTRY

SEQ ID NO: 22437 - protein, 9 aa, Artificial Sequence
  Description of Artificial Sequence: Synthetic peptide
  Seed: RYWAIRTRS
RYWAIRTRV

SEQ ID NO: 22438 - protein, 9 aa, Artificial Sequence
  Description of Artificial Sequence: Synthetic peptide
  Seed: RYWAIRTRS
RVWAIRTRA

SEQ ID NO: 22439 - protein, 9 aa, Artificial Sequence
  Description of Artificial Sequence: Synthetic peptide
  Seed: RYWAIRTRS
RVWAIRTRR

SEQ ID NO: 22440 - protein, 9 aa, Artificial Sequence
  Description of Artificial Sequence: Synthetic peptide
  Seed: RYWAIRTRS
RVWAIRTRN

SEQ ID NO: 22441 - protein, 9 aa, Artificial Sequence
  Description of Artificial Sequence: Synthetic peptide
  Seed: RYWAIRTRS
RVWAIRTRC

SEQ ID NO: 22442 - protein, 9 aa, Artificial Sequence
  Description of Artificial Sequence: Synthetic peptide
  Seed: RYWAIRTRS
RVWAIRTRQ

SEQ ID NO: 22443 - protein, 9 aa, Artificial Sequence
  Description of Artificial Sequence: Synthetic peptide
  Seed: RYWAIRTRS
RVWAIRTRG

SEQ ID NO: 22444 - protein, 9 aa, Artificial Sequence
  Description of Artificial Sequence: Synthetic peptide
  Seed: RYWAIRTRS
RVWAIRTRI

SEQ ID NO: 22445 - protein, 9 aa, Artificial Sequence
  Description of Artificial Sequence: Synthetic peptide
  Seed: RYWAIRTRS
RWWAIRTRM

SEQ ID NO: 22446 - protein, 9 aa, Artificial Sequence
  Description of Artificial Sequence: Synthetic peptide
  Seed: RYWAIRTRS
RWWAIRTRK

SEQ ID NO: 22447 - protein, 9 aa, Artificial Sequence
  Description of Artificial Sequence: Synthetic peptide
  Seed: RYWAIRTRS
RWWAIRTRL

SEQ ID NO: 22448 - protein, 9 aa, Artificial Sequence
  Description of Artificial Sequence: Synthetic peptide
  Seed: RYWAIRTRS
RWWAIRTRI

SEQ ID NO: 22449 - protein, 9 aa, Artificial Sequence
  Description of Artificial Sequence: Synthetic peptide
  Seed: RYWAIRTRS
RTWAIRTRR

SEQ ID NO: 22450 - protein, 9 aa, Artificial Sequence
  Description of Artificial Sequence: Synthetic peptide
  Seed: RYWAIRTRS
RTWAIRTRN

SEQ ID NO: 22451 - protein, 9 aa, Artificial Sequence
  Description of Artificial Sequence: Synthetic peptide
  Seed: RYWAIRTRS
RTWAIRTRC

SEQ ID NO: 22452 - protein, 9 aa, Artificial Sequence
  Description of Artificial Sequence: Synthetic peptide
  Seed: RYWAIRTRS
RTWAIRTRQ

SEQ ID NO: 22453 - protein, 9 aa, Artificial Sequence
  Description of Artificial Sequence: Synthetic peptide
  Seed: RYWAIRTRS
RTWAIRTRE

SEQ ID NO: 22454 - protein, 9 aa, Artificial Sequence
  Description of Artificial Sequence: Synthetic peptide
  Seed: RYWAIRTRS
RTWAIRTRG

SEQ ID NO: 22455 - protein, 9 aa, Artificial Sequence
  Description of Artificial Sequence: Synthetic peptide
  Seed: RYWAIRTRS
RTWAIRTRH

SEQ ID NO: 22456 - protein, 9 aa, Artificial Sequence
  Description of Artificial Sequence: Synthetic peptide
  Seed: RYWAIRTRS
RTWAIRTRI

SEQ ID NO: 22457 - protein, 9 aa, Artificial Sequence
  Description of Artificial Sequence: Synthetic peptide
  Seed: RYWAIRTRS
RTWAIRTRL

SEQ ID NO: 22458 - protein, 9 aa, Artificial Sequence
  Description of Artificial Sequence: Synthetic peptide
  Seed: RYWAIRTRS
RTWAIRTRK

SEQ ID NO: 22459 - protein, 9 aa, Artificial Sequence
  Description of Artificial Sequence: Synthetic peptide
  Seed: RYWAIRTRS
RTWAIRTRM

SEQ ID NO: 22460 - protein, 9 aa, Artificial Sequence
  Description of Artificial Sequence: Synthetic peptide
  Seed: RYWAIRTRS
RTWAIRTRF

SEQ ID NO: 22461 - protein, 9 aa, Artificial Sequence
  Description of Artificial Sequence: Synthetic peptide
  Seed: RYWAIRTRS
RTWAIRTRP

SEQ ID NO: 22462 - protein, 9 aa, Artificial Sequence
  Description of Artificial Sequence: Synthetic peptide
  Seed: RYWAIRTRS
RTWAIRTRS

SEQ ID NO: 22463 - protein, 9 aa, Artificial Sequence
  Description of Artificial Sequence: Synthetic peptide
  Seed: RYWAIRTRS
RTWAIRTRT

SEQ ID NO: 22464 - protein, 9 aa, Artificial Sequence
  Description of Artificial Sequence: Synthetic peptide
  Seed: RYWAIRTRS
RTWAIRTRY

SEQ ID NO: 22465 - protein, 9 aa, Artificial Sequence
  Description of Artificial Sequence: Synthetic peptide
  Seed: RYWAIRTRS
RTWAIRTRV

SEQ ID NO: 22466 - protein, 9 aa, Artificial Sequence
  Description of Artificial Sequence: Synthetic peptide
  Seed: RYWAIRTRS
RWWAIRTRA

SEQ ID NO: 22467 - protein, 9 aa, Artificial Sequence
  Description of Artificial Sequence: Synthetic peptide
  Seed: RYWAIRTRS
RWWAIRTRG

SEQ ID NO: 22468 - protein, 9 aa, Artificial Sequence
  Description of Artificial Sequence: Synthetic peptide
  Seed: RYWAIRTRS
RVWAIRTRL

SEQ ID NO: 22469 - protein, 9 aa, Artificial Sequence
  Description of Artificial Sequence: Synthetic peptide
  Seed: RYWAIRTRS
RVWAIRTRM

SEQ ID NO: 22470 - protein, 10 aa, Artificial Sequence
  Description of Artificial Sequence: Synthetic peptide
  Seed: RYWAIRTRSG
RIWAIRTRSV

SEQ ID NO: 22471 - protein, 10 aa, Artificial Sequence
  Description of Artificial Sequence: Synthetic peptide
  Seed: RYWAIRTRSG
RGWAIRTRSV

SEQ ID NO: 22472 - protein, 10 aa, Artificial Sequence
  Description of Artificial Sequence: Synthetic peptide
  Seed: RYWAIRTRSG
RQWAIRTRSI

SEQ ID NO: 22473 - protein, 10 aa, Artificial Sequence
  Description of Artificial Sequence: Synthetic peptide
  Seed: RYWAIRTRSG
RQWAIRTRSK

SEQ ID NO: 22474 - protein, 10 aa, Artificial Sequence
  Description of Artificial Sequence: Synthetic peptide
  Seed: RYWAIRTRSG
RQWAIRTRSM

SEQ ID NO: 22475 - protein, 10 aa, Artificial Sequence
  Description of Artificial Sequence: Synthetic peptide
  Seed: RYWAIRTRSG
RQWAIRTRSV

SEQ ID NO: 22476 - protein, 10 aa, Artificial Sequence
  Description of Artificial Sequence: Synthetic peptide
  Seed: RYWAIRTRSG
REWAIRTRSK

SEQ ID NO: 22477 - protein, 10 aa, Artificial Sequence
  Description of Artificial Sequence: Synthetic peptide
  Seed: RYWAIRTRSG
RGWAIRTRSA

SEQ ID NO: 22478 - protein, 10 aa, Artificial Sequence
  Description of Artificial Sequence: Synthetic peptide
  Seed: RYWAIRTRSG
RGWAIRTRSI

SEQ ID NO: 22479 - protein, 10 aa, Artificial Sequence
  Description of Artificial Sequence: Synthetic peptide
  Seed: RYWAIRTRSG
RGWAIRTRSK

SEQ ID NO: 22480 - protein, 10 aa, Artificial Sequence
  Description of Artificial Sequence: Synthetic peptide
  Seed: RYWAIRTRSG
RGWAIRTRSM

SEQ ID NO: 22481 - protein, 10 aa, Artificial Sequence
  Description of Artificial Sequence: Synthetic peptide
  Seed: RYWAIRTRSG
RHWAIRTRSA

SEQ ID NO: 22482 - protein, 9 aa, Artificial Sequence
  Description of Artificial Sequence: Synthetic peptide
  Seed: RYWAIRTRS
RVWAIRTRF

SEQ ID NO: 22483 - protein, 10 aa, Artificial Sequence
  Description of Artificial Sequence: Synthetic peptide
  Seed: RYWAIRTRSG
RHWAIRTRSK

SEQ ID NO: 22484 - protein, 10 aa, Artificial Sequence
  Description of Artificial Sequence: Synthetic peptide
  Seed: RYWAIRTRSG
RIWAIRTRSA

SEQ ID NO: 22485 - protein, 10 aa, Artificial Sequence
  Description of Artificial Sequence: Synthetic peptide
  Seed: RYWAIRTRSG
RIWAIRTRSG

SEQ ID NO: 22486 - protein, 10 aa, Artificial Sequence
  Description of Artificial Sequence: Synthetic peptide
  Seed: RYWAIRTRSG
RIWAIRTRSI

SEQ ID NO: 22487 - protein, 10 aa, Artificial Sequence
  Description of Artificial Sequence: Synthetic peptide
  Seed: RYWAIRTRSG
RIWAIRTRSL

SEQ ID NO: 22488 - protein, 10 aa, Artificial Sequence
  Description of Artificial Sequence: Synthetic peptide
  Seed: RYWAIRTRSG
RIWAIRTRSK

SEQ ID NO: 22489 - protein, 10 aa, Artificial Sequence
  Description of Artificial Sequence: Synthetic peptide
  Seed: RYWAIRTRSG
RIWAIRTRSM

SEQ ID NO: 22490 - protein, 10 aa, Artificial Sequence
  Description of Artificial Sequence: Synthetic peptide
  Seed: RYWAIRTRSG
RIWAIRTRSS

SEQ ID NO: 22491 - protein, 10 aa, Artificial Sequence
  Description of Artificial Sequence: Synthetic peptide
  Seed: RYWAIRTRSG
RIWAIRTRSY

SEQ ID NO: 22492 - protein, 10 aa, Artificial Sequence
  Description of Artificial Sequence: Synthetic peptide
  Seed: RYWAIRTRSG
RQWAIRTRSA

SEQ ID NO: 22493 - protein, 10 aa, Artificial Sequence
  Description of Artificial Sequence: Synthetic peptide
  Seed: RYWAIRTRSG
RCWAIRTRSK

SEQ ID NO: 22494 - protein, 10 aa, Artificial Sequence
  Description of Artificial Sequence: Synthetic peptide
  Seed: RYWAIRTRSG
RCWAIRTRSA

SEQ ID NO: 22495 - protein, 10 aa, Artificial Sequence
  Description of Artificial Sequence: Synthetic peptide
  Seed: RYWAIRTRSG
RDWAIRTRSK

SEQ ID NO: 22496 - protein, 9 aa, Artificial Sequence
  Description of Artificial Sequence: Synthetic peptide
  Seed: RYWAIRTRS
RVWAIRTRP

SEQ ID NO: 22497 - protein, 9 aa, Artificial Sequence
  Description of Artificial Sequence: Synthetic peptide
  Seed: RYWAIRTRS
RVWAIRTRS

SEQ ID NO: 22498 - protein, 9 aa, Artificial Sequence
  Description of Artificial Sequence: Synthetic peptide
  Seed: RYWAIRTRS
RVWAIRTRT

SEQ ID NO: 22499 - protein, 9 aa, Artificial Sequence
  Description of Artificial Sequence: Synthetic peptide
  Seed: RYWAIRTRS
RVWAIRTRY

SEQ ID NO: 22500 - protein, 9 aa, Artificial Sequence
  Description of Artificial Sequence: Synthetic peptide
  Seed: RYWAIRTRS
RVWAIRTRV

SEQ ID NO: 22501 - protein, 10 aa, Artificial Sequence
  Description of Artificial Sequence: Synthetic peptide
  Seed: RYWAIRTRSG
RAWAIRTRSA

SEQ ID NO: 22502 - protein, 10 aa, Artificial Sequence
  Description of Artificial Sequence: Synthetic peptide
  Seed: RYWAIRTRSG
RAWAIRTRSR

SEQ ID NO: 22503 - protein, 10 aa, Artificial Sequence
  Description of Artificial Sequence: Synthetic peptide
  Seed: RYWAIRTRSG
RAWAIRTRSI

SEQ ID NO: 22504 - protein, 10 aa, Artificial Sequence
  Description of Artificial Sequence: Synthetic peptide
  Seed: RYWAIRTRSG
RAWAIRTRSL

SEQ ID NO: 22505 - protein, 10 aa, Artificial Sequence
  Description of Artificial Sequence: Synthetic peptide
  Seed: RYWAIRTRSG
RAWAIRTRSK

SEQ ID NO: 22506 - protein, 10 aa, Artificial Sequence
  Description of Artificial Sequence: Synthetic peptide
  Seed: RYWAIRTRSG
RAWAIRTRSM

SEQ ID NO: 22507 - protein, 10 aa, Artificial Sequence
  Description of Artificial Sequence: Synthetic peptide
  Seed: RYWAIRTRSG
RAWAIRTRSS

SEQ ID NO: 22508 - protein, 10 aa, Artificial Sequence
  Description of Artificial Sequence: Synthetic peptide
  Seed: RYWAIRTRSG
RAWAIRTRSY

SEQ ID NO: 22509 - protein, 10 aa, Artificial Sequence
  Description of Artificial Sequence: Synthetic peptide
  Seed: RYWAIRTRSG
RAWAIRTRSV

SEQ ID NO: 22510 - protein, 10 aa, Artificial Sequence
  Description of Artificial Sequence: Synthetic peptide
  Seed: RYWAIRTRSG
RRWAIRTRSK

SEQ ID NO: 22511 - protein, 10 aa, Artificial Sequence
  Description of Artificial Sequence: Synthetic peptide
  Seed: RYWAIRTRSG
RNWAIRTRSA

SEQ ID NO: 22512 - protein, 10 aa, Artificial Sequence
  Description of Artificial Sequence: Synthetic peptide
  Seed: RYWAIRTRSG
RNWAIRTRSI

SEQ ID NO: 22513 - protein, 10 aa, Artificial Sequence
  Description of Artificial Sequence: Synthetic peptide
  Seed: RYWAIRTRSG
RNWAIRTRSK

SEQ ID NO: 22514 - protein, 10 aa, Artificial Sequence
  Description of Artificial Sequence: Synthetic peptide
  Seed: RYWAIRTRSG
RNWAIRTRSV

SEQ ID NO: 22515 - protein, 10 aa, Artificial Sequence
  Description of Artificial Sequence: Synthetic peptide
  Seed: RYWAIRTRSG
RVWAIRTRSV

SEQ ID NO: 22516 - protein, 9 aa, Artificial Sequence
  Description of Artificial Sequence: Synthetic peptide
  Seed: SAAFEDLRL
SAAFEDLRM

SEQ ID NO: 22517 - protein, 9 aa, Artificial Sequence
  Description of Artificial Sequence: Synthetic peptide
  Seed: SAAFEDLRL
SAAFEDLRF

SEQ ID NO: 22518 - protein, 11 aa, Artificial Sequence
  Description of Artificial Sequence: Synthetic peptide
  Seed: SAGQISIQPTF
SEGQISIQPTM

SEQ ID NO: 22519 - protein, 11 aa, Artificial Sequence
  Description of Artificial Sequence: Synthetic peptide
  Seed: SAGQISIQPTF
SDGQISIQPTM

SEQ ID NO: 22520 - protein, 11 aa, Artificial Sequence
  Description of Artificial Sequence: Synthetic peptide
  Seed: SAGQISIQPTF
SDGQISIQPTF

SEQ ID NO: 22521 - protein, 11 aa, Artificial Sequence
  Description of Artificial Sequence: Synthetic peptide
  Seed: SAGQISIQPTF
SDGQISIQPTY

SEQ ID NO: 22522 - protein, 11 aa, Artificial Sequence
  Description of Artificial Sequence: Synthetic peptide
  Seed: SAGQISIQPTF
SCGQISIQPTM

SEQ ID NO: 22523 - protein, 11 aa, Artificial Sequence
  Description of Artificial Sequence: Synthetic peptide
  Seed: SAGQISIQPTF
SCGQISIQPTF

SEQ ID NO: 22524 - protein, 11 aa, Artificial Sequence
  Description of Artificial Sequence: Synthetic peptide
  Seed: SAGQISIQPTF
SCGQISIQPTY

SEQ ID NO: 22525 - protein, 11 aa, Artificial Sequence
  Description of Artificial Sequence: Synthetic peptide
  Seed: SAGQISIQPTF
SQGQISIQPTM

SEQ ID NO: 22526 - protein, 11 aa, Artificial Sequence
  Description of Artificial Sequence: Synthetic peptide
  Seed: SAGQISIQPTF
SQGQISIQPTF

SEQ ID NO: 22527 - protein, 11 aa, Artificial Sequence
  Description of Artificial Sequence: Synthetic peptide
  Seed: SAGQISIQPTF
SQGQISIQPTY

SEQ ID NO: 22528 - protein, 11 aa, Artificial Sequence
  Description of Artificial Sequence: Synthetic peptide
  Seed: SAGQISIQPTF
SEGQISIQPTF

SEQ ID NO: 22529 - protein, 11 aa, Artificial Sequence
  Description of Artificial Sequence: Synthetic peptide
  Seed: SAGQISIQPTF
SLGQISIQPTM

SEQ ID NO: 22530 - protein, 11 aa, Artificial Sequence
  Description of Artificial Sequence: Synthetic peptide
  Seed: SAGQISIQPTF
SEGQISIQPTY

SEQ ID NO: 22531 - protein, 11 aa, Artificial Sequence
  Description of Artificial Sequence: Synthetic peptide
  Seed: SAGQISIQPTF
SGGQISIQPTM

SEQ ID NO: 22532 - protein, 11 aa, Artificial Sequence
  Description of Artificial Sequence: Synthetic peptide
  Seed: SAGQISIQPTF
SGGQISIQPTF

SEQ ID NO: 22533 - protein, 11 aa, Artificial Sequence
  Description of Artificial Sequence: Synthetic peptide
  Seed: SAGQISIQPTF
SGGQISIQPTY

SEQ ID NO: 22534 - protein, 11 aa, Artificial Sequence
  Description of Artificial Sequence: Synthetic peptide
  Seed: SAGQISIQPTF
SHGQISIQPTM

SEQ ID NO: 22535 - protein, 11 aa, Artificial Sequence
  Description of Artificial Sequence: Synthetic peptide
  Seed: SAGQISIQPTF
SHGQISIQPTF

SEQ ID NO: 22536 - protein, 11 aa, Artificial Sequence
  Description of Artificial Sequence: Synthetic peptide
  Seed: SAGQISIQPTF
SHGQISIQPTY

SEQ ID NO: 22537 - protein, 11 aa, Artificial Sequence
  Description of Artificial Sequence: Synthetic peptide
  Seed: SAGQISIQPTF
SIGQISIQPTM

SEQ ID NO: 22538 - protein, 11 aa, Artificial Sequence
  Description of Artificial Sequence: Synthetic peptide
  Seed: SAGQISIQPTF
SIGQISIQPTF

SEQ ID NO: 22539 - protein, 11 aa, Artificial Sequence
  Description of Artificial Sequence: Synthetic peptide
  Seed: SAGQISIQPTF
SNGQISIQPTY

SEQ ID NO: 22540 - protein, 11 aa, Artificial Sequence
  Description of Artificial Sequence: Synthetic peptide
  Seed: SAGQISIQPTF
SNGQISIQPTF

SEQ ID NO: 22541 - protein, 11 aa, Artificial Sequence
  Description of Artificial Sequence: Synthetic peptide
  Seed: SAGQISIQPTF
SNGQISIQPTM

SEQ ID NO: 22542 - protein, 11 aa, Artificial Sequence
  Description of Artificial Sequence: Synthetic peptide
  Seed: SAGQISIQPTF
SRGQISIQPTY

SEQ ID NO: 22543 - protein, 10 aa, Artificial Sequence
  Description of Artificial Sequence: Synthetic peptide
  Seed: SAFDERRNRY
SMFDERRNRF

SEQ ID NO: 22544 - protein, 10 aa, Artificial Sequence
  Description of Artificial Sequence: Synthetic peptide
  Seed: SAFDERRNRY
SMFDERRNRY

SEQ ID NO: 22545 - protein, 10 aa, Artificial Sequence
  Description of Artificial Sequence: Synthetic peptide
  Seed: SAFDERRNRY
SFFDERRNRY

SEQ ID NO: 22546 - protein, 10 aa, Artificial Sequence
  Description of Artificial Sequence: Synthetic peptide
  Seed: SAFDERRNRY
SSFDERRNRF

SEQ ID NO: 22547 - protein, 10 aa, Artificial Sequence
  Description of Artificial Sequence: Synthetic peptide
  Seed: SAFDERRNRY
SSFDERRNRY

SEQ ID NO: 22548 - protein, 10 aa, Artificial Sequence
  Description of Artificial Sequence: Synthetic peptide
  Seed: SAFDERRNRY
STFDERRNRF

SEQ ID NO: 22549 - protein, 10 aa, Artificial Sequence
  Description of Artificial Sequence: Synthetic peptide
  Seed: SAFDERRNRY
STFDERRNRY

SEQ ID NO: 22550 - protein, 10 aa, Artificial Sequence
  Description of Artificial Sequence: Synthetic peptide
  Seed: SAFDERRNRY
SWFDERRNRY

SEQ ID NO: 22551 - protein, 10 aa, Artificial Sequence
  Description of Artificial Sequence: Synthetic peptide
  Seed: SAFDERRNRY
SYFDERRNRY

SEQ ID NO: 22552 - protein, 10 aa, Artificial Sequence
  Description of Artificial Sequence: Synthetic peptide
  Seed: SAFDERRNRY
SVFDERRNRY

SEQ ID NO: 22553 - protein, 11 aa, Artificial Sequence
  Description of Artificial Sequence: Synthetic peptide
  Seed: SAFDERRNRYL
SAFDERRNRYM

SEQ ID NO: 22554 - protein, 11 aa, Artificial Sequence
  Description of Artificial Sequence: Synthetic peptide
  Seed: SAFDERRNRYL
SAFDERRNRYF

SEQ ID NO: 22555 - protein, 11 aa, Artificial Sequence
  Description of Artificial Sequence: Synthetic peptide
  Seed: SAFDERRNRYL
SAFDERRNRYY

SEQ ID NO: 22556 - protein, 11 aa, Artificial Sequence
  Description of Artificial Sequence: Synthetic peptide
  Seed: SAFDERRNRYL
SSFDERRNRYY

SEQ ID NO: 22557 - protein, 11 aa, Artificial Sequence
  Description of Artificial Sequence: Synthetic peptide
  Seed: SAGQISIQPTF
SAGQISIQPTM

SEQ ID NO: 22558 - protein, 11 aa, Artificial Sequence
  Description of Artificial Sequence: Synthetic peptide
  Seed: SAGQISIQPTF
SAGQISIQPTW

SEQ ID NO: 22559 - protein, 11 aa, Artificial Sequence
  Description of Artificial Sequence: Synthetic peptide
  Seed: SAGQISIQPTF
SAGQISIQPTY

SEQ ID NO: 22560 - protein, 11 aa, Artificial Sequence
  Description of Artificial Sequence: Synthetic peptide
  Seed: SAGQISIQPTF
SRGQISIQPTM

SEQ ID NO: 22561 - protein, 11 aa, Artificial Sequence
  Description of Artificial Sequence: Synthetic peptide
  Seed: SAGQISIQPTF
SRGQISIQPTF

SEQ ID NO: 22562 - protein, 11 aa, Artificial Sequence
  Description of Artificial Sequence: Synthetic peptide
  Seed: SAGQISIQPTF
SIGQISIQPTY

SEQ ID NO: 22563 - protein, 11 aa, Artificial Sequence
  Description of Artificial Sequence: Synthetic peptide
  Seed: SAGQISIQPTF
SLGQISIQPTF

SEQ ID NO: 22564 - protein, 9 aa, Artificial Sequence
  Description of Artificial Sequence: Synthetic peptide
  Seed: SAAFEDLRL
SAAFEDLRY

SEQ ID NO: 22565 - protein, 11 aa, Artificial Sequence
  Description of Artificial Sequence: Synthetic peptide
  Seed: SAGQISVQPTF
SAGQISVQPTY

SEQ ID NO: 22566 - protein, 11 aa, Artificial Sequence
  Description of Artificial Sequence: Synthetic peptide
  Seed: SAGQISIQPTF
SYGQISIQPTM

SEQ ID NO: 22567 - protein, 11 aa, Artificial Sequence
  Description of Artificial Sequence: Synthetic peptide
  Seed: SAGQISIQPTF
SYGQISIQPTF

SEQ ID NO: 22568 - protein, 11 aa, Artificial Sequence
  Description of Artificial Sequence: Synthetic peptide
  Seed: SAGQISIQPTF
SYGQISIQPTY

SEQ ID NO: 22569 - protein, 11 aa, Artificial Sequence
  Description of Artificial Sequence: Synthetic peptide
  Seed: SAGQISIQPTF
SVGQISIQPTM

SEQ ID NO: 22570 - protein, 11 aa, Artificial Sequence
  Description of Artificial Sequence: Synthetic peptide
  Seed: SAGQISIQPTF
SVGQISIQPTF

SEQ ID NO: 22571 - protein, 11 aa, Artificial Sequence
  Description of Artificial Sequence: Synthetic peptide
  Seed: SAGQISIQPTF
SVGQISIQPTW

SEQ ID NO: 22572 - protein, 11 aa, Artificial Sequence
  Description of Artificial Sequence: Synthetic peptide
  Seed: SAGQISIQPTF
SVGQISIQPTY

SEQ ID NO: 22573 - protein, 11 aa, Artificial Sequence
  Description of Artificial Sequence: Synthetic peptide
  Seed: SAGQISVQPTF
SAGQISVQPTM

SEQ ID NO: 22574 - protein, 11 aa, Artificial Sequence
  Description of Artificial Sequence: Synthetic peptide
  Seed: SAGQISVQPTF
SAGQISVQPTW

SEQ ID NO: 22575 - protein, 11 aa, Artificial Sequence
  Description of Artificial Sequence: Synthetic peptide
  Seed: SAGQISVQPTF
SRGQISVQPTM

SEQ ID NO: 22576 - protein, 11 aa, Artificial Sequence
  Description of Artificial Sequence: Synthetic peptide
  Seed: SAGQISIQPTF
SLGQISIQPTY

SEQ ID NO: 22577 - protein, 11 aa, Artificial Sequence
  Description of Artificial Sequence: Synthetic peptide
  Seed: SAGQISVQPTF
SRGQISVQPTF

SEQ ID NO: 22578 - protein, 11 aa, Artificial Sequence
  Description of Artificial Sequence: Synthetic peptide
  Seed: SAGQISVQPTF
SRGQISVQPTY

SEQ ID NO: 22579 - protein, 11 aa, Artificial Sequence
  Description of Artificial Sequence: Synthetic peptide
  Seed: SAGQISVQPTF
SNGQISVQPTM

SEQ ID NO: 22580 - protein, 11 aa, Artificial Sequence
  Description of Artificial Sequence: Synthetic peptide
  Seed: SAGQISVQPTF
SNGQISVQPTF

SEQ ID NO: 22581 - protein, 11 aa, Artificial Sequence
  Description of Artificial Sequence: Synthetic peptide
  Seed: SAGQISVQPTF
SNGQISVQPTY

SEQ ID NO: 22582 - protein, 11 aa, Artificial Sequence
  Description of Artificial Sequence: Synthetic peptide
  Seed: SAGQISVQPTF
SDGQISVQPTM

SEQ ID NO: 22583 - protein, 11 aa, Artificial Sequence
  Description of Artificial Sequence: Synthetic peptide
  Seed: SAGQISVQPTF
SDGQISVQPTF

SEQ ID NO: 22584 - protein, 11 aa, Artificial Sequence
  Description of Artificial Sequence: Synthetic peptide
  Seed: SAGQISVQPTF
SDGQISVQPTY

SEQ ID NO: 22585 - protein, 11 aa, Artificial Sequence
  Description of Artificial Sequence: Synthetic peptide
  Seed: SAGQISVQPTF
SCGQISVQPTM

SEQ ID NO: 22586 - protein, 11 aa, Artificial Sequence
  Description of Artificial Sequence: Synthetic peptide
  Seed: SAGQISIQPTF
SWGQISIQPTY

SEQ ID NO: 22587 - protein, 11 aa, Artificial Sequence
  Description of Artificial Sequence: Synthetic peptide
  Seed: SAGQISIQPTF
SWGQISIQPTF

SEQ ID NO: 22588 - protein, 11 aa, Artificial Sequence
  Description of Artificial Sequence: Synthetic peptide
  Seed: SAGQISIQPTF
SWGQISIQPTM

SEQ ID NO: 22589 - protein, 11 aa, Artificial Sequence
  Description of Artificial Sequence: Synthetic peptide
  Seed: SAGQISIQPTF
STGQISIQPTY

SEQ ID NO: 22590 - protein, 11 aa, Artificial Sequence
  Description of Artificial Sequence: Synthetic peptide
  Seed: SAGQISIQPTF
SKGQISIQPTM

SEQ ID NO: 22591 - protein, 11 aa, Artificial Sequence
  Description of Artificial Sequence: Synthetic peptide
  Seed: SAGQISIQPTF
SKGQISIQPTF

SEQ ID NO: 22592 - protein, 11 aa, Artificial Sequence
  Description of Artificial Sequence: Synthetic peptide
  Seed: SAGQISIQPTF
SKGQISIQPTY

SEQ ID NO: 22593 - protein, 11 aa, Artificial Sequence
  Description of Artificial Sequence: Synthetic peptide
  Seed: SAGQISIQPTF
SMGQISIQPTM

SEQ ID NO: 22594 - protein, 11 aa, Artificial Sequence
  Description of Artificial Sequence: Synthetic peptide
  Seed: SAGQISIQPTF
SMGQISIQPTF

SEQ ID NO: 22595 - protein, 11 aa, Artificial Sequence
  Description of Artificial Sequence: Synthetic peptide
  Seed: SAGQISIQPTF
SMGQISIQPTY

SEQ ID NO: 22596 - protein, 11 aa, Artificial Sequence
  Description of Artificial Sequence: Synthetic peptide
  Seed: SAGQISIQPTF
SFGQISIQPTM

SEQ ID NO: 22597 - protein, 11 aa, Artificial Sequence
  Description of Artificial Sequence: Synthetic peptide
  Seed: SAGQISIQPTF
SFGQISIQPTF

SEQ ID NO: 22598 - protein, 11 aa, Artificial Sequence
  Description of Artificial Sequence: Synthetic peptide
  Seed: SAGQISIQPTF
SFGQISIQPTY

SEQ ID NO: 22599 - protein, 11 aa, Artificial Sequence
  Description of Artificial Sequence: Synthetic peptide
  Seed: SAGQISIQPTF
SPGQISIQPTM

SEQ ID NO: 22600 - protein, 11 aa, Artificial Sequence
  Description of Artificial Sequence: Synthetic peptide
  Seed: SAGQISIQPTF
SPGQISIQPTF

SEQ ID NO: 22601 - protein, 11 aa, Artificial Sequence
  Description of Artificial Sequence: Synthetic peptide
  Seed: SAGQISIQPTF
SPGQISIQPTY

SEQ ID NO: 22602 - protein, 11 aa, Artificial Sequence
  Description of Artificial Sequence: Synthetic peptide
  Seed: SAGQISIQPTF
SSGQISIQPTM

SEQ ID NO: 22603 - protein, 11 aa, Artificial Sequence
  Description of Artificial Sequence: Synthetic peptide
  Seed: SAGQISIQPTF
SSGQISIQPTW

SEQ ID NO: 22604 - protein, 11 aa, Artificial Sequence
  Description of Artificial Sequence: Synthetic peptide
  Seed: SAGQISIQPTF
SSGQISIQPTY

SEQ ID NO: 22605 - protein, 11 aa, Artificial Sequence
  Description of Artificial Sequence: Synthetic peptide
  Seed: SAGQISIQPTF
STGQISIQPTM

SEQ ID NO: 22606 - protein, 11 aa, Artificial Sequence
  Description of Artificial Sequence: Synthetic peptide
  Seed: SAGQISIQPTF
STGQISIQPTF

SEQ ID NO: 22607 - protein, 11 aa, Artificial Sequence
  Description of Artificial Sequence: Synthetic peptide
  Seed: SAGQISIQPTF
STGQISIQPTW

SEQ ID NO: 22608 - protein, 10 aa, Artificial Sequence
  Description of Artificial Sequence: Synthetic peptide
  Seed: SAFDERRNRY
SMFDERRNRM

SEQ ID NO: 22609 - protein, 10 aa, Artificial Sequence
  Description of Artificial Sequence: Synthetic peptide
  Seed: SAFDERRNRY
SKFDERRNRY

SEQ ID NO: 22610 - protein, 10 aa, Artificial Sequence
  Description of Artificial Sequence: Synthetic peptide
  Seed: SAFDERRNRY
SKFDERRNRF

SEQ ID NO: 22611 - protein, 10 aa, Artificial Sequence
  Description of Artificial Sequence: Synthetic peptide
  Seed: SAFDERRNKY
SQFDERRNKF

SEQ ID NO: 22612 - protein, 9 aa, Artificial Sequence
  Description of Artificial Sequence: Synthetic peptide
  Seed: SAFDERRNK
SYFDERRNK

SEQ ID NO: 22613 - protein, 9 aa, Artificial Sequence
  Description of Artificial Sequence: Synthetic peptide
  Seed: SAFDERRNK
SVFDERRNR

SEQ ID NO: 22614 - protein, 9 aa, Artificial Sequence
  Description of Artificial Sequence: Synthetic peptide
  Seed: SAFDERRNK
SVFDERRNK

SEQ ID NO: 22615 - protein, 9 aa, Artificial Sequence
  Description of Artificial Sequence: Synthetic peptide
  Seed: SAFDERRNK
SVFDERRNY

SEQ ID NO: 22616 - protein, 10 aa, Artificial Sequence
  Description of Artificial Sequence: Synthetic peptide
  Seed: SAFDERRNKY
SAFDERRNKL

SEQ ID NO: 22617 - protein, 10 aa, Artificial Sequence
  Description of Artificial Sequence: Synthetic peptide
  Seed: SAFDERRNKY
SAFDERRNKM

SEQ ID NO: 22618 - protein, 10 aa, Artificial Sequence
  Description of Artificial Sequence: Synthetic peptide
  Seed: SAFDERRNKY
SAFDERRNKF

SEQ ID NO: 22619 - protein, 10 aa, Artificial Sequence
  Description of Artificial Sequence: Synthetic peptide
  Seed: SAFDERRNKY
SQFDERRNKL

SEQ ID NO: 22620 - protein, 10 aa, Artificial Sequence
  Description of Artificial Sequence: Synthetic peptide
  Seed: SAFDERRNKY
SQFDERRNKM

SEQ ID NO: 22621 - protein, 10 aa, Artificial Sequence
  Description of Artificial Sequence: Synthetic peptide
  Seed: SAFDERRNKY
SQFDERRNKY

SEQ ID NO: 22622 - protein, 10 aa, Artificial Sequence
  Description of Artificial Sequence: Synthetic peptide
  Seed: SAFDERRNRY
SLFDERRNRY

SEQ ID NO: 22623 - protein, 10 aa, Artificial Sequence
  Description of Artificial Sequence: Synthetic peptide
  Seed: SAFDERRNKY
SHFDERRNKF

SEQ ID NO: 22624 - protein, 10 aa, Artificial Sequence
  Description of Artificial Sequence: Synthetic peptide
  Seed: SAFDERRNKY
SHFDERRNKY

SEQ ID NO: 22625 - protein, 10 aa, Artificial Sequence
  Description of Artificial Sequence: Synthetic peptide
  Seed: SAFDERRNKY
SIFDERRNKY

SEQ ID NO: 22626 - protein, 10 aa, Artificial Sequence
  Description of Artificial Sequence: Synthetic peptide
  Seed: SAFDERRNKY
SLFDERRNKF

SEQ ID NO: 22627 - protein, 10 aa, Artificial Sequence
  Description of Artificial Sequence: Synthetic peptide
  Seed: SAFDERRNKY
SLFDERRNKY

SEQ ID NO: 22628 - protein, 10 aa, Artificial Sequence
  Description of Artificial Sequence: Synthetic peptide
  Seed: SAFDERRNKY
SKFDERRNKF

SEQ ID NO: 22629 - protein, 10 aa, Artificial Sequence
  Description of Artificial Sequence: Synthetic peptide
  Seed: SAFDERRNKY
SKFDERRNKY

SEQ ID NO: 22630 - protein, 10 aa, Artificial Sequence
  Description of Artificial Sequence: Synthetic peptide
  Seed: SAFDERRNKY
SMFDERRNKM

SEQ ID NO: 22631 - protein, 10 aa, Artificial Sequence
  Description of Artificial Sequence: Synthetic peptide
  Seed: SAFDERRNKY
SMFDERRNKF

SEQ ID NO: 22632 - protein, 9 aa, Artificial Sequence
  Description of Artificial Sequence: Synthetic peptide
  Seed: SAFDERRNK
SYFDERRNR

SEQ ID NO: 22633 - protein, 9 aa, Artificial Sequence
  Description of Artificial Sequence: Synthetic peptide
  Seed: SAFDERRNK
SWFDERRNK

SEQ ID NO: 22634 - protein, 9 aa, Artificial Sequence
  Description of Artificial Sequence: Synthetic peptide
  Seed: SAFDERRNK
SWFDERRNR

SEQ ID NO: 22635 - protein, 9 aa, Artificial Sequence
  Description of Artificial Sequence: Synthetic peptide
  Seed: SAFDERRNK
STFDERRNY

SEQ ID NO: 22636 - protein, 9 aa, Artificial Sequence
  Description of Artificial Sequence: Synthetic peptide
  Seed: SAFDERRNK
SNFDERRNR

SEQ ID NO: 22637 - protein, 9 aa, Artificial Sequence
  Description of Artificial Sequence: Synthetic peptide
  Seed: SAFDERRNK
SQFDERRNR

SEQ ID NO: 22638 - protein, 9 aa, Artificial Sequence
  Description of Artificial Sequence: Synthetic peptide
  Seed: SAFDERRNK
SQFDERRNK

SEQ ID NO: 22639 - protein, 9 aa, Artificial Sequence
  Description of Artificial Sequence: Synthetic peptide
  Seed: SAFDERRNK
SGFDERRNR

SEQ ID NO: 22640 - protein, 9 aa, Artificial Sequence
  Description of Artificial Sequence: Synthetic peptide
  Seed: SAFDERRNK
SIFDERRNR

SEQ ID NO: 22641 - protein, 9 aa, Artificial Sequence
  Description of Artificial Sequence: Synthetic peptide
  Seed: SAFDERRNK
SIFDERRNK

SEQ ID NO: 22642 - protein, 9 aa, Artificial Sequence
  Description of Artificial Sequence: Synthetic peptide
  Seed: SAFDERRNK
SIFDERRNY

SEQ ID NO: 22643 - protein, 9 aa, Artificial Sequence
  Description of Artificial Sequence: Synthetic peptide
  Seed: SAFDERRNK
SLFDERRNR

SEQ ID NO: 22644 - protein, 9 aa, Artificial Sequence
  Description of Artificial Sequence: Synthetic peptide
  Seed: SAFDERRNK
SLFDERRNK

SEQ ID NO: 22645 - protein, 9 aa, Artificial Sequence
  Description of Artificial Sequence: Synthetic peptide
  Seed: SAFDERRNK
SMFDERRNR

SEQ ID NO: 22646 - protein, 9 aa, Artificial Sequence
  Description of Artificial Sequence: Synthetic peptide
  Seed: SAFDERRNK
SMFDERRNK

SEQ ID NO: 22647 - protein, 9 aa, Artificial Sequence
  Description of Artificial Sequence: Synthetic peptide
  Seed: SAFDERRNK
SFFDERRNR

SEQ ID NO: 22648 - protein, 9 aa, Artificial Sequence
  Description of Artificial Sequence: Synthetic peptide
  Seed: SAFDERRNK
SFFDERRNK

SEQ ID NO: 22649 - protein, 9 aa, Artificial Sequence
  Description of Artificial Sequence: Synthetic peptide
  Seed: SAFDERRNK
SSFDERRNR

SEQ ID NO: 22650 - protein, 9 aa, Artificial Sequence
  Description of Artificial Sequence: Synthetic peptide
  Seed: SAFDERRNK
SSFDERRNK

SEQ ID NO: 22651 - protein, 9 aa, Artificial Sequence
  Description of Artificial Sequence: Synthetic peptide
  Seed: SAFDERRNK
STFDERRNR

SEQ ID NO: 22652 - protein, 9 aa, Artificial Sequence
  Description of Artificial Sequence: Synthetic peptide
  Seed: SAFDERRNK
STFDERRNK

SEQ ID NO: 22653 - protein, 10 aa, Artificial Sequence
  Description of Artificial Sequence: Synthetic peptide
  Seed: SAFDERRNKY
SMFDERRNKY

SEQ ID NO: 22654 - protein, 10 aa, Artificial Sequence
  Description of Artificial Sequence: Synthetic peptide
  Seed: SAFDERRNKY
SFFDERRNKY

SEQ ID NO: 22655 - protein, 10 aa, Artificial Sequence
  Description of Artificial Sequence: Synthetic peptide
  Seed: SAFDERRNKY
SSFDERRNKM

SEQ ID NO: 22656 - protein, 10 aa, Artificial Sequence
  Description of Artificial Sequence: Synthetic peptide
  Seed: SAFDERRNRY
SAFDERRNRL

SEQ ID NO: 22657 - protein, 10 aa, Artificial Sequence
  Description of Artificial Sequence: Synthetic peptide
  Seed: SAFDERRNRY
SAFDERRNRM

SEQ ID NO: 22658 - protein, 10 aa, Artificial Sequence
  Description of Artificial Sequence: Synthetic peptide
  Seed: SAFDERRNRY
SAFDERRNRF

SEQ ID NO: 22659 - protein, 10 aa, Artificial Sequence
  Description of Artificial Sequence: Synthetic peptide
  Seed: SAFDERRNRY
SQFDERRNRL

SEQ ID NO: 22660 - protein, 10 aa, Artificial Sequence
  Description of Artificial Sequence: Synthetic peptide
  Seed: SAFDERRNRY
SQFDERRNRM

SEQ ID NO: 22661 - protein, 10 aa, Artificial Sequence
  Description of Artificial Sequence: Synthetic peptide
  Seed: SAFDERRNRY
SQFDERRNRF

SEQ ID NO: 22662 - protein, 10 aa, Artificial Sequence
  Description of Artificial Sequence: Synthetic peptide
  Seed: SAFDERRNRY
SQFDERRNRY

SEQ ID NO: 22663 - protein, 10 aa, Artificial Sequence
  Description of Artificial Sequence: Synthetic peptide
  Seed: SAFDERRNRY
SGFDERRNRY

SEQ ID NO: 22664 - protein, 10 aa, Artificial Sequence
  Description of Artificial Sequence: Synthetic peptide
  Seed: SAFDERRNRY
SHFDERRNRF

SEQ ID NO: 22665 - protein, 10 aa, Artificial Sequence
  Description of Artificial Sequence: Synthetic peptide
  Seed: SAFDERRNRY
SHFDERRNRY

SEQ ID NO: 22666 - protein, 10 aa, Artificial Sequence
  Description of Artificial Sequence: Synthetic peptide
  Seed: SAFDERRNRY
SIFDERRNRY

SEQ ID NO: 22667 - protein, 10 aa, Artificial Sequence
  Description of Artificial Sequence: Synthetic peptide
  Seed: SAFDERRNRY
SLFDERRNRF

SEQ ID NO: 22668 - protein, 10 aa, Artificial Sequence
  Description of Artificial Sequence: Synthetic peptide
  Seed: SAFDERRNKY
SSFDERRNKY

SEQ ID NO: 22669 - protein, 10 aa, Artificial Sequence
  Description of Artificial Sequence: Synthetic peptide
  Seed: SAFDERRNKY
STFDERRNKY

SEQ ID NO: 22670 - protein, 10 aa, Artificial Sequence
  Description of Artificial Sequence: Synthetic peptide
  Seed: SAFDERRNKY
SWFDERRNKY

SEQ ID NO: 22671 - protein, 10 aa, Artificial Sequence
  Description of Artificial Sequence: Synthetic peptide
  Seed: SAFDERRNKY
SYFDERRNKY

SEQ ID NO: 22672 - protein, 10 aa, Artificial Sequence
  Description of Artificial Sequence: Synthetic peptide
  Seed: SAFDERRNKY
SVFDERRNKY

SEQ ID NO: 22673 - protein, 9 aa, Artificial Sequence
  Description of Artificial Sequence: Synthetic peptide
  Seed: RYWAIRTRS
RTWAIRTRA

SEQ ID NO: 22674 - protein, 9 aa, Artificial Sequence
  Description of Artificial Sequence: Synthetic peptide
  Seed: RYWAIRTRS
RSWAIRTRV

SEQ ID NO: 22675 - protein, 9 aa, Artificial Sequence
  Description of Artificial Sequence: Synthetic peptide
  Seed: RYWAIRTRS
RSWAIRTRY

SEQ ID NO: 22676 - protein, 9 aa, Artificial Sequence
  Description of Artificial Sequence: Synthetic peptide
  Seed: RVVPRGQLS
RVVPRGQLL

SEQ ID NO: 22677 - protein, 9 aa, Artificial Sequence
  Description of Artificial Sequence: Synthetic peptide
  Seed: RVVPRGQLS
RYVPRGQLI

SEQ ID NO: 22678 - protein, 9 aa, Artificial Sequence
  Description of Artificial Sequence: Synthetic peptide
  Seed: RVVPRGQLS
RYVPRGQLK

SEQ ID NO: 22679 - protein, 9 aa, Artificial Sequence
  Description of Artificial Sequence: Synthetic peptide
  Seed: RVVPRGQLS
RYVPRGQLM

SEQ ID NO: 22680 - protein, 9 aa, Artificial Sequence
  Description of Artificial Sequence: Synthetic peptide
  Seed: RVVPRGQLS
RYVPRGQLS

SEQ ID NO: 22681 - protein, 9 aa, Artificial Sequence
  Description of Artificial Sequence: Synthetic peptide
  Seed: RVVPRGQLS
RYVPRGQLV

SEQ ID NO: 22682 - protein, 9 aa, Artificial Sequence
  Description of Artificial Sequence: Synthetic peptide
  Seed: RVVPRGQLS
RVVPRGQLA

SEQ ID NO: 22683 - protein, 9 aa, Artificial Sequence
  Description of Artificial Sequence: Synthetic peptide
  Seed: RVVPRGQLS
RVVPRGQLR

SEQ ID NO: 22684 - protein, 9 aa, Artificial Sequence
  Description of Artificial Sequence: Synthetic peptide
  Seed: RVVPRGQLS
RVVPRGQLG

SEQ ID NO: 22685 - protein, 9 aa, Artificial Sequence
  Description of Artificial Sequence: Synthetic peptide
  Seed: RVVPRGQLS
RVVPRGQLI

SEQ ID NO: 22686 - protein, 9 aa, Artificial Sequence
  Description of Artificial Sequence: Synthetic peptide
  Seed: RVVPRGQLS
RVVPRGQLK

SEQ ID NO: 22687 - protein, 9 aa, Artificial Sequence
  Description of Artificial Sequence: Synthetic peptide
  Seed: RVVPRGQLS
RVVPRGQLM

SEQ ID NO: 22688 - protein, 9 aa, Artificial Sequence
  Description of Artificial Sequence: Synthetic peptide
  Seed: RVVPRGQLS
RVVPRGQLT

SEQ ID NO: 22689 - protein, 9 aa, Artificial Sequence
  Description of Artificial Sequence: Synthetic peptide
  Seed: RVVPRGQLS
RVVPRGQLY

SEQ ID NO: 22690 - protein, 9 aa, Artificial Sequence
  Description of Artificial Sequence: Synthetic peptide
  Seed: RVVPRGQLS
RVVPRGQLV

SEQ ID NO: 22691 - protein, 11 aa, Artificial Sequence
  Description of Artificial Sequence: Synthetic peptide
  Seed: RVVPRGQLSTR
RAVPRGQLSTR

SEQ ID NO: 22692 - protein, 11 aa, Artificial Sequence
  Description of Artificial Sequence: Synthetic peptide
  Seed: RVVPRGQLSTR
RRVPRGQLSTR

SEQ ID NO: 22693 - protein, 11 aa, Artificial Sequence
  Description of Artificial Sequence: Synthetic peptide
  Seed: RVVPRGQLSTR
RNVPRGQLSTR

SEQ ID NO: 22694 - protein, 11 aa, Artificial Sequence
  Description of Artificial Sequence: Synthetic peptide
  Seed: RVVPRGQLSTR
RQVPRGQLSTR

SEQ ID NO: 22695 - protein, 11 aa, Artificial Sequence
  Description of Artificial Sequence: Synthetic peptide
  Seed: RVVPRGQLSTR
RQVPRGQLSTK

SEQ ID NO: 22696 - protein, 9 aa, Artificial Sequence
  Description of Artificial Sequence: Synthetic peptide
  Seed: RVVPRGQLS
RYVPRGQLR

SEQ ID NO: 22697 - protein, 9 aa, Artificial Sequence
  Description of Artificial Sequence: Synthetic peptide
  Seed: RVVPRGQLS
RYVPRGQLA

SEQ ID NO: 22698 - protein, 9 aa, Artificial Sequence
  Description of Artificial Sequence: Synthetic peptide
  Seed: RVVPRGQLS
RWVPRGQLV

SEQ ID NO: 22699 - protein, 9 aa, Artificial Sequence
  Description of Artificial Sequence: Synthetic peptide
  Seed: RVVPRGQLS
RWVPRGQLK

SEQ ID NO: 22700 - protein, 9 aa, Artificial Sequence
  Description of Artificial Sequence: Synthetic peptide
  Seed: RVVPRGQLS
RSVPRGQLM

SEQ ID NO: 22701 - protein, 9 aa, Artificial Sequence
  Description of Artificial Sequence: Synthetic peptide
  Seed: RVVPRGQLS
RSVPRGQLS

SEQ ID NO: 22702 - protein, 9 aa, Artificial Sequence
  Description of Artificial Sequence: Synthetic peptide
  Seed: RVVPRGQLS
RSVPRGQLT

SEQ ID NO: 22703 - protein, 9 aa, Artificial Sequence
  Description of Artificial Sequence: Synthetic peptide
  Seed: RVVPRGQLS
RSVPRGQLY

SEQ ID NO: 22704 - protein, 9 aa, Artificial Sequence
  Description of Artificial Sequence: Synthetic peptide
  Seed: RVVPRGQLS
RSVPRGQLV

SEQ ID NO: 22705 - protein, 9 aa, Artificial Sequence
  Description of Artificial Sequence: Synthetic peptide
  Seed: RVVPRGQLS
RTVPRGQLA

SEQ ID NO: 22706 - protein, 9 aa, Artificial Sequence
  Description of Artificial Sequence: Synthetic peptide
  Seed: RVVPRGQLS
RTVPRGQLR

SEQ ID NO: 22707 - protein, 9 aa, Artificial Sequence
  Description of Artificial Sequence: Synthetic peptide
  Seed: RVVPRGQLS
RTVPRGQLC

SEQ ID NO: 22708 - protein, 9 aa, Artificial Sequence
  Description of Artificial Sequence: Synthetic peptide
  Seed: RVVPRGQLS
RTVPRGQLG

SEQ ID NO: 22709 - protein, 9 aa, Artificial Sequence
  Description of Artificial Sequence: Synthetic peptide
  Seed: RVVPRGQLS
RTVPRGQLI

SEQ ID NO: 22710 - protein, 9 aa, Artificial Sequence
  Description of Artificial Sequence: Synthetic peptide
  Seed: RVVPRGQLS
RTVPRGQLL

SEQ ID NO: 22711 - protein, 9 aa, Artificial Sequence
  Description of Artificial Sequence: Synthetic peptide
  Seed: RVVPRGQLS
RTVPRGQLK

SEQ ID NO: 22712 - protein, 9 aa, Artificial Sequence
  Description of Artificial Sequence: Synthetic peptide
  Seed: RVVPRGQLS
RTVPRGQLM

SEQ ID NO: 22713 - protein, 9 aa, Artificial Sequence
  Description of Artificial Sequence: Synthetic peptide
  Seed: RVVPRGQLS
RTVPRGQLF

SEQ ID NO: 22714 - protein, 9 aa, Artificial Sequence
  Description of Artificial Sequence: Synthetic peptide
  Seed: RVVPRGQLS
RTVPRGQLS

SEQ ID NO: 22715 - protein, 9 aa, Artificial Sequence
  Description of Artificial Sequence: Synthetic peptide
  Seed: RVVPRGQLS
RTVPRGQLT

SEQ ID NO: 22716 - protein, 9 aa, Artificial Sequence
  Description of Artificial Sequence: Synthetic peptide
  Seed: RVVPRGQLS
RTVPRGQLY

SEQ ID NO: 22717 - protein, 9 aa, Artificial Sequence
  Description of Artificial Sequence: Synthetic peptide
  Seed: RVVPRGQLS
RTVPRGQLV

SEQ ID NO: 22718 - protein, 9 aa, Artificial Sequence
  Description of Artificial Sequence: Synthetic peptide
  Seed: RVVPRGQLS
RWVPRGQLA

SEQ ID NO: 22719 - protein, 11 aa, Artificial Sequence
  Description of Artificial Sequence: Synthetic peptide
  Seed: RVVPRGQLSTR
RGVPRGQLSTR

SEQ ID NO: 22720 - protein, 11 aa, Artificial Sequence
  Description of Artificial Sequence: Synthetic peptide
  Seed: RVVPRGQLSTR
RIVPRGQLSTK

SEQ ID NO: 22721 - protein, 9 aa, Artificial Sequence
  Description of Artificial Sequence: Synthetic peptide
  Seed: RYLEEHPSA
RMLEEHPSY

SEQ ID NO: 22722 - protein, 9 aa, Artificial Sequence
  Description of Artificial Sequence: Synthetic peptide
  Seed: RYLEEHPSA
RLLEEHPSK

SEQ ID NO: 22723 - protein, 9 aa, Artificial Sequence
  Description of Artificial Sequence: Synthetic peptide
  Seed: RYLEEHPSA
RGLEEHPSK

SEQ ID NO: 22724 - protein, 9 aa, Artificial Sequence
  Description of Artificial Sequence: Synthetic peptide
  Seed: RYLEEHPSA
RHLEEHPSF

SEQ ID NO: 22725 - protein, 9 aa, Artificial Sequence
  Description of Artificial Sequence: Synthetic peptide
  Seed: RYLEEHPSA
RHLEEHPSW

SEQ ID NO: 22726 - protein, 9 aa, Artificial Sequence
  Description of Artificial Sequence: Synthetic peptide
  Seed: RYLEEHPSA
RILEEHPSA

SEQ ID NO: 22727 - protein, 9 aa, Artificial Sequence
  Description of Artificial Sequence: Synthetic peptide
  Seed: RYLEEHPSA
RILEEHPSI

SEQ ID NO: 22728 - protein, 9 aa, Artificial Sequence
  Description of Artificial Sequence: Synthetic peptide
  Seed: RYLEEHPSA
RILEEHPSK

SEQ ID NO: 22729 - protein, 9 aa, Artificial Sequence
  Description of Artificial Sequence: Synthetic peptide
  Seed: RYLEEHPSA
RILEEHPSF

SEQ ID NO: 22730 - protein, 9 aa, Artificial Sequence
  Description of Artificial Sequence: Synthetic peptide
  Seed: RYLEEHPSA
RILEEHPSW

SEQ ID NO: 22731 - protein, 9 aa, Artificial Sequence
  Description of Artificial Sequence: Synthetic peptide
  Seed: RYLEEHPSA
RILEEHPSV

SEQ ID NO: 22732 - protein, 9 aa, Artificial Sequence
  Description of Artificial Sequence: Synthetic peptide
  Seed: RYLEEHPSA
RLLEEHPSM

SEQ ID NO: 22733 - protein, 9 aa, Artificial Sequence
  Description of Artificial Sequence: Synthetic peptide
  Seed: RYLEEHPSA
RLLEEHPSF

SEQ ID NO: 22734 - protein, 9 aa, Artificial Sequence
  Description of Artificial Sequence: Synthetic peptide
  Seed: RYLEEHPSA
RLLEEHPSW

SEQ ID NO: 22735 - protein, 9 aa, Artificial Sequence
  Description of Artificial Sequence: Synthetic peptide
  Seed: RYLEEHPSA
RMLEEHPSA

SEQ ID NO: 22736 - protein, 9 aa, Artificial Sequence
  Description of Artificial Sequence: Synthetic peptide
  Seed: RYLEEHPSA
RMLEEHPSR

SEQ ID NO: 22737 - protein, 9 aa, Artificial Sequence
  Description of Artificial Sequence: Synthetic peptide
  Seed: RYLEEHPSA
RMLEEHPSI

SEQ ID NO: 22738 - protein, 9 aa, Artificial Sequence
  Description of Artificial Sequence: Synthetic peptide
  Seed: RYLEEHPSA
RMLEEHPSL

SEQ ID NO: 22739 - protein, 9 aa, Artificial Sequence
  Description of Artificial Sequence: Synthetic peptide
  Seed: RYLEEHPSA
RMLEEHPSK

SEQ ID NO: 22740 - protein, 9 aa, Artificial Sequence
  Description of Artificial Sequence: Synthetic peptide
  Seed: RYLEEHPSA
RMLEEHPSM

SEQ ID NO: 22741 - protein, 9 aa, Artificial Sequence
  Description of Artificial Sequence: Synthetic peptide
  Seed: RYLEEHPSA
RMLEEHPSF

SEQ ID NO: 22742 - protein, 9 aa, Artificial Sequence
  Description of Artificial Sequence: Synthetic peptide
  Seed: RYLEEHPSA
RQLEEHPSW

SEQ ID NO: 22743 - protein, 9 aa, Artificial Sequence
  Description of Artificial Sequence: Synthetic peptide
  Seed: RYLEEHPSA
RQLEEHPSF

SEQ ID NO: 22744 - protein, 9 aa, Artificial Sequence
  Description of Artificial Sequence: Synthetic peptide
  Seed: RYLEEHPSA
RQLEEHPSK

SEQ ID NO: 22745 - protein, 9 aa, Artificial Sequence
  Description of Artificial Sequence: Synthetic peptide
  Seed: RYLEEHPSA
RCLEEHPSK

SEQ ID NO: 22746 - protein, 11 aa, Artificial Sequence
  Description of Artificial Sequence: Synthetic peptide
  Seed: RVVPRGQLSTR
RLVPRGQLSTK

SEQ ID NO: 22747 - protein, 11 aa, Artificial Sequence
  Description of Artificial Sequence: Synthetic peptide
  Seed: RVVPRGQLSTR
RMVPRGQLSTR

SEQ ID NO: 22748 - protein, 11 aa, Artificial Sequence
  Description of Artificial Sequence: Synthetic peptide
  Seed: RVVPRGQLSTR
RMVPRGQLSTK

SEQ ID NO: 22749 - protein, 11 aa, Artificial Sequence
  Description of Artificial Sequence: Synthetic peptide
  Seed: RVVPRGQLSTR
RFVPRGQLSTR

SEQ ID NO: 22750 - protein, 11 aa, Artificial Sequence
  Description of Artificial Sequence: Synthetic peptide
  Seed: RVVPRGQLSTR
RFVPRGQLSTK

SEQ ID NO: 22751 - protein, 11 aa, Artificial Sequence
  Description of Artificial Sequence: Synthetic peptide
  Seed: RVVPRGQLSTR
RSVPRGQLSTR

SEQ ID NO: 22752 - protein, 11 aa, Artificial Sequence
  Description of Artificial Sequence: Synthetic peptide
  Seed: RVVPRGQLSTR
RSVPRGQLSTK

SEQ ID NO: 22753 - protein, 11 aa, Artificial Sequence
  Description of Artificial Sequence: Synthetic peptide
  Seed: RVVPRGQLSTR
RTVPRGQLSTR

SEQ ID NO: 22754 - protein, 11 aa, Artificial Sequence
  Description of Artificial Sequence: Synthetic peptide
  Seed: RVVPRGQLSTR
RTVPRGQLSTK

SEQ ID NO: 22755 - protein, 11 aa, Artificial Sequence
  Description of Artificial Sequence: Synthetic peptide
  Seed: RVVPRGQLSTR
RWVPRGQLSTR

SEQ ID NO: 22756 - protein, 11 aa, Artificial Sequence
  Description of Artificial Sequence: Synthetic peptide
  Seed: RVVPRGQLSTR
RWVPRGQLSTK

SEQ ID NO: 22757 - protein, 11 aa, Artificial Sequence
  Description of Artificial Sequence: Synthetic peptide
  Seed: RVVPRGQLSTR
RYVPRGQLSTR

SEQ ID NO: 22758 - protein, 11 aa, Artificial Sequence
  Description of Artificial Sequence: Synthetic peptide
  Seed: RVVPRGQLSTR
RYVPRGQLSTK

SEQ ID NO: 22759 - protein, 11 aa, Artificial Sequence
  Description of Artificial Sequence: Synthetic peptide
  Seed: RVVPRGQLSTR
RVVPRGQLSTK

SEQ ID NO: 22760 - protein, 9 aa, Artificial Sequence
  Description of Artificial Sequence: Synthetic peptide
  Seed: RYLEEHPSA
RALEEHPSA

SEQ ID NO: 22761 - protein, 9 aa, Artificial Sequence
  Description of Artificial Sequence: Synthetic peptide
  Seed: RYLEEHPSA
RALEEHPSK

SEQ ID NO: 22762 - protein, 9 aa, Artificial Sequence
  Description of Artificial Sequence: Synthetic peptide
  Seed: RYLEEHPSA
RALEEHPSM

SEQ ID NO: 22763 - protein, 9 aa, Artificial Sequence
  Description of Artificial Sequence: Synthetic peptide
  Seed: RYLEEHPSA
RALEEHPSF

SEQ ID NO: 22764 - protein, 9 aa, Artificial Sequence
  Description of Artificial Sequence: Synthetic peptide
  Seed: RYLEEHPSA
RNLEEHPSK

SEQ ID NO: 22765 - protein, 9 aa, Artificial Sequence
  Description of Artificial Sequence: Synthetic peptide
  Seed: RVVPRGQLS
RSVPRGQLK

SEQ ID NO: 22766 - protein, 9 aa, Artificial Sequence
  Description of Artificial Sequence: Synthetic peptide
  Seed: RVVPRGQLS
RSVPRGQLL

SEQ ID NO: 22767 - protein, 9 aa, Artificial Sequence
  Description of Artificial Sequence: Synthetic peptide
  Seed: RVVPRGQLS
RSVPRGQLI

SEQ ID NO: 22768 - protein, 11 aa, Artificial Sequence
  Description of Artificial Sequence: Synthetic peptide
  Seed: RVSSFIRGTRV
RVSSFIRGTRR

SEQ ID NO: 22769 - protein, 11 aa, Artificial Sequence
  Description of Artificial Sequence: Synthetic peptide
  Seed: RVSSFIRGTRV
RYSSFIRGTRM

SEQ ID NO: 22770 - protein, 11 aa, Artificial Sequence
  Description of Artificial Sequence: Synthetic peptide
  Seed: RVSSFIRGTRV
RYSSFIRGTRF

SEQ ID NO: 22771 - protein, 11 aa, Artificial Sequence
  Description of Artificial Sequence: Synthetic peptide
  Seed: RVSSFIRGTRV
RYSSFIRGTRP

SEQ ID NO: 22772 - protein, 11 aa, Artificial Sequence
  Description of Artificial Sequence: Synthetic peptide
  Seed: RVSSFIRGTRV
RYSSFIRGTRS

SEQ ID NO: 22773 - protein, 11 aa, Artificial Sequence
  Description of Artificial Sequence: Synthetic peptide
  Seed: RVSSFIRGTRV
RYSSFIRGTRT

SEQ ID NO: 22774 - protein, 11 aa, Artificial Sequence
  Description of Artificial Sequence: Synthetic peptide
  Seed: RVSSFIRGTRV
RYSSFIRGTRW

SEQ ID NO: 22775 - protein, 11 aa, Artificial Sequence
  Description of Artificial Sequence: Synthetic peptide
  Seed: RVSSFIRGTRV
RYSSFIRGTRY

SEQ ID NO: 22776 - protein, 11 aa, Artificial Sequence
  Description of Artificial Sequence: Synthetic peptide
  Seed: RVSSFIRGTRV
RYSSFIRGTRV

SEQ ID NO: 22777 - protein, 11 aa, Artificial Sequence
  Description of Artificial Sequence: Synthetic peptide
  Seed: RVSSFIRGTRV
RVSSFIRGTRA

SEQ ID NO: 22778 - protein, 11 aa, Artificial Sequence
  Description of Artificial Sequence: Synthetic peptide
  Seed: RVSSFIRGTRV
RVSSFIRGTRN

SEQ ID NO: 22779 - protein, 9 aa, Artificial Sequence
  Description of Artificial Sequence: Synthetic peptide
  Seed: RVVPRGQLS
RSVPRGQLG

SEQ ID NO: 22780 - protein, 11 aa, Artificial Sequence
  Description of Artificial Sequence: Synthetic peptide
  Seed: RVSSFIRGTRV
RVSSFIRGTRD

SEQ ID NO: 22781 - protein, 11 aa, Artificial Sequence
  Description of Artificial Sequence: Synthetic peptide
  Seed: RVSSFIRGTRV
RVSSFIRGTRC

SEQ ID NO: 22782 - protein, 11 aa, Artificial Sequence
  Description of Artificial Sequence: Synthetic peptide
  Seed: RVSSFIRGTRV
RVSSFIRGTRQ

SEQ ID NO: 22783 - protein, 11 aa, Artificial Sequence
  Description of Artificial Sequence: Synthetic peptide
  Seed: RVSSFIRGTRV
RVSSFIRGTRE

SEQ ID NO: 22784 - protein, 11 aa, Artificial Sequence
  Description of Artificial Sequence: Synthetic peptide
  Seed: RVSSFIRGTRV
RVSSFIRGTRG

SEQ ID NO: 22785 - protein, 11 aa, Artificial Sequence
  Description of Artificial Sequence: Synthetic peptide
  Seed: RVSSFIRGTRV
RVSSFIRGTRH

SEQ ID NO: 22786 - protein, 11 aa, Artificial Sequence
  Description of Artificial Sequence: Synthetic peptide
  Seed: RVSSFIRGTRV
RVSSFIRGTRK

SEQ ID NO: 22787 - protein, 11 aa, Artificial Sequence
  Description of Artificial Sequence: Synthetic peptide
  Seed: RVSSFIRGTRV
RYSSFIRGTRK

SEQ ID NO: 22788 - protein, 11 aa, Artificial Sequence
  Description of Artificial Sequence: Synthetic peptide
  Seed: RVSSFIRGTRV
RYSSFIRGTRL

SEQ ID NO: 22789 - protein, 11 aa, Artificial Sequence
  Description of Artificial Sequence: Synthetic peptide
  Seed: RVSSFIRGTRV
RYSSFIRGTRI

SEQ ID NO: 22790 - protein, 11 aa, Artificial Sequence
  Description of Artificial Sequence: Synthetic peptide
  Seed: RVSSFIRGTRV
RYSSFIRGTRH

SEQ ID NO: 22791 - protein, 11 aa, Artificial Sequence
  Description of Artificial Sequence: Synthetic peptide
  Seed: RVSSFIRGTRV
RWSSFIRGTRI

SEQ ID NO: 22792 - protein, 11 aa, Artificial Sequence
  Description of Artificial Sequence: Synthetic peptide
  Seed: RVSSFIRGTRV
RWSSFIRGTRL

SEQ ID NO: 22793 - protein, 11 aa, Artificial Sequence
  Description of Artificial Sequence: Synthetic peptide
  Seed: RVSSFIRGTRV
RWSSFIRGTRK

SEQ ID NO: 22794 - protein, 11 aa, Artificial Sequence
  Description of Artificial Sequence: Synthetic peptide
  Seed: RVSSFIRGTRV
RWSSFIRGTRM

SEQ ID NO: 22795 - protein, 11 aa, Artificial Sequence
  Description of Artificial Sequence: Synthetic peptide
  Seed: RVSSFIRGTRV
RWSSFIRGTRF

SEQ ID NO: 22796 - protein, 11 aa, Artificial Sequence
  Description of Artificial Sequence: Synthetic peptide
  Seed: RVSSFIRGTRV
RWSSFIRGTRP

SEQ ID NO: 22797 - protein, 11 aa, Artificial Sequence
  Description of Artificial Sequence: Synthetic peptide
  Seed: RVSSFIRGTRV
RWSSFIRGTRS

SEQ ID NO: 22798 - protein, 11 aa, Artificial Sequence
  Description of Artificial Sequence: Synthetic peptide
  Seed: RVSSFIRGTRV
RWSSFIRGTRT

SEQ ID NO: 22799 - protein, 11 aa, Artificial Sequence
  Description of Artificial Sequence: Synthetic peptide
  Seed: RVSSFIRGTRV
RWSSFIRGTRW

SEQ ID NO: 22800 - protein, 11 aa, Artificial Sequence
  Description of Artificial Sequence: Synthetic peptide
  Seed: RVSSFIRGTRV
RWSSFIRGTRY

SEQ ID NO: 22801 - protein, 11 aa, Artificial Sequence
  Description of Artificial Sequence: Synthetic peptide
  Seed: RVSSFIRGTRV
RWSSFIRGTRV

SEQ ID NO: 22802 - protein, 11 aa, Artificial Sequence
  Description of Artificial Sequence: Synthetic peptide
  Seed: RVSSFIRGTRV
RYSSFIRGTRA

SEQ ID NO: 22803 - protein, 11 aa, Artificial Sequence
  Description of Artificial Sequence: Synthetic peptide
  Seed: RVSSFIRGTRV
RYSSFIRGTRR

SEQ ID NO: 22804 - protein, 11 aa, Artificial Sequence
  Description of Artificial Sequence: Synthetic peptide
  Seed: RVSSFIRGTRV
RYSSFIRGTRN

SEQ ID NO: 22805 - protein, 11 aa, Artificial Sequence
  Description of Artificial Sequence: Synthetic peptide
  Seed: RVSSFIRGTRV
RYSSFIRGTRD

SEQ ID NO: 22806 - protein, 11 aa, Artificial Sequence
  Description of Artificial Sequence: Synthetic peptide
  Seed: RVSSFIRGTRV
RYSSFIRGTRC

SEQ ID NO: 22807 - protein, 11 aa, Artificial Sequence
  Description of Artificial Sequence: Synthetic peptide
  Seed: RVSSFIRGTRV
RYSSFIRGTRQ

SEQ ID NO: 22808 - protein, 11 aa, Artificial Sequence
  Description of Artificial Sequence: Synthetic peptide
  Seed: RVSSFIRGTRV
RYSSFIRGTRE

SEQ ID NO: 22809 - protein, 11 aa, Artificial Sequence
  Description of Artificial Sequence: Synthetic peptide
  Seed: RVSSFIRGTRV
RYSSFIRGTRG

SEQ ID NO: 22810 - protein, 11 aa, Artificial Sequence
  Description of Artificial Sequence: Synthetic peptide
  Seed: RVSSFIRGTRV
RVSSFIRGTRF

SEQ ID NO: 22811 - protein, 11 aa, Artificial Sequence
  Description of Artificial Sequence: Synthetic peptide
  Seed: RVSSFIRGTRV
RVSSFIRGTRP

SEQ ID NO: 22812 - protein, 9 aa, Artificial Sequence
  Description of Artificial Sequence: Synthetic peptide
  Seed: RVVPRGQLS
RIVPRGQLY

SEQ ID NO: 22813 - protein, 9 aa, Artificial Sequence
  Description of Artificial Sequence: Synthetic peptide
  Seed: RVVPRGQLS
RLVPRGQLA

SEQ ID NO: 22814 - protein, 9 aa, Artificial Sequence
  Description of Artificial Sequence: Synthetic peptide
  Seed: RVVPRGQLS
RLVPRGQLK

SEQ ID NO: 22815 - protein, 9 aa, Artificial Sequence
  Description of Artificial Sequence: Synthetic peptide
  Seed: RVVPRGQLS
RLVPRGQLV

SEQ ID NO: 22816 - protein, 9 aa, Artificial Sequence
  Description of Artificial Sequence: Synthetic peptide
  Seed: RVVPRGQLS
RMVPRGQLA

SEQ ID NO: 22817 - protein, 9 aa, Artificial Sequence
  Description of Artificial Sequence: Synthetic peptide
  Seed: RVVPRGQLS
RMVPRGQLR

SEQ ID NO: 22818 - protein, 9 aa, Artificial Sequence
  Description of Artificial Sequence: Synthetic peptide
  Seed: RVVPRGQLS
RMVPRGQLG

SEQ ID NO: 22819 - protein, 9 aa, Artificial Sequence
  Description of Artificial Sequence: Synthetic peptide
  Seed: RVVPRGQLS
RMVPRGQLI

SEQ ID NO: 22820 - protein, 9 aa, Artificial Sequence
  Description of Artificial Sequence: Synthetic peptide
  Seed: RVVPRGQLS
RMVPRGQLL

SEQ ID NO: 22821 - protein, 9 aa, Artificial Sequence
  Description of Artificial Sequence: Synthetic peptide
  Seed: RVVPRGQLS
RMVPRGQLK

SEQ ID NO: 22822 - protein, 9 aa, Artificial Sequence
  Description of Artificial Sequence: Synthetic peptide
  Seed: RVVPRGQLS
RMVPRGQLM

SEQ ID NO: 22823 - protein, 9 aa, Artificial Sequence
  Description of Artificial Sequence: Synthetic peptide
  Seed: RVVPRGQLS
RMVPRGQLS

SEQ ID NO: 22824 - protein, 9 aa, Artificial Sequence
  Description of Artificial Sequence: Synthetic peptide
  Seed: RVVPRGQLS
RMVPRGQLY

SEQ ID NO: 22825 - protein, 9 aa, Artificial Sequence
  Description of Artificial Sequence: Synthetic peptide
  Seed: RVVPRGQLS
RMVPRGQLV

SEQ ID NO: 22826 - protein, 9 aa, Artificial Sequence
  Description of Artificial Sequence: Synthetic peptide
  Seed: RVVPRGQLS
RFVPRGQLA

SEQ ID NO: 22827 - protein, 9 aa, Artificial Sequence
  Description of Artificial Sequence: Synthetic peptide
  Seed: RVVPRGQLS
RFVPRGQLI

SEQ ID NO: 22828 - protein, 9 aa, Artificial Sequence
  Description of Artificial Sequence: Synthetic peptide
  Seed: RVVPRGQLS
RFVPRGQLK

SEQ ID NO: 22829 - protein, 9 aa, Artificial Sequence
  Description of Artificial Sequence: Synthetic peptide
  Seed: RVVPRGQLS
RFVPRGQLV

SEQ ID NO: 22830 - protein, 9 aa, Artificial Sequence
  Description of Artificial Sequence: Synthetic peptide
  Seed: RVVPRGQLS
RSVPRGQLA

SEQ ID NO: 22831 - protein, 9 aa, Artificial Sequence
  Description of Artificial Sequence: Synthetic peptide
  Seed: RVVPRGQLS
RSVPRGQLR

SEQ ID NO: 22832 - protein, 9 aa, Artificial Sequence
  Description of Artificial Sequence: Synthetic peptide
  Seed: RVVPRGQLS
RIVPRGQLV

SEQ ID NO: 22833 - protein, 11 aa, Artificial Sequence
  Description of Artificial Sequence: Synthetic peptide
  Seed: RVSSFIRGTRV
RVSSFIRGTRS

SEQ ID NO: 22834 - protein, 9 aa, Artificial Sequence
  Description of Artificial Sequence: Synthetic peptide
  Seed: RVVPRGQLS
RIVPRGQLM

SEQ ID NO: 22835 - protein, 11 aa, Artificial Sequence
  Description of Artificial Sequence: Synthetic peptide
  Seed: RVSSFIRGTRV
RVSSFIRGTRT

SEQ ID NO: 22836 - protein, 11 aa, Artificial Sequence
  Description of Artificial Sequence: Synthetic peptide
  Seed: RVSSFIRGTRV
RVSSFIRGTRW

SEQ ID NO: 22837 - protein, 11 aa, Artificial Sequence
  Description of Artificial Sequence: Synthetic peptide
  Seed: RVSSFIRGTRV
RVSSFIRGTRY

SEQ ID NO: 22838 - protein, 9 aa, Artificial Sequence
  Description of Artificial Sequence: Synthetic peptide
  Seed: RVVPRGQLS
RAVPRGQLA

SEQ ID NO: 22839 - protein, 9 aa, Artificial Sequence
  Description of Artificial Sequence: Synthetic peptide
  Seed: RVVPRGQLS
RAVPRGQLI

SEQ ID NO: 22840 - protein, 9 aa, Artificial Sequence
  Description of Artificial Sequence: Synthetic peptide
  Seed: RVVPRGQLS
RAVPRGQLL

SEQ ID NO: 22841 - protein, 9 aa, Artificial Sequence
  Description of Artificial Sequence: Synthetic peptide
  Seed: RVVPRGQLS
RAVPRGQLK

SEQ ID NO: 22842 - protein, 9 aa, Artificial Sequence
  Description of Artificial Sequence: Synthetic peptide
  Seed: RVVPRGQLS
RAVPRGQLV

SEQ ID NO: 22843 - protein, 9 aa, Artificial Sequence
  Description of Artificial Sequence: Synthetic peptide
  Seed: RVVPRGQLS
RNVPRGQLK

SEQ ID NO: 22844 - protein, 9 aa, Artificial Sequence
  Description of Artificial Sequence: Synthetic peptide
  Seed: RVVPRGQLS
RCVPRGQLK

SEQ ID NO: 22845 - protein, 9 aa, Artificial Sequence
  Description of Artificial Sequence: Synthetic peptide
  Seed: RVVPRGQLS
RQVPRGQLA

SEQ ID NO: 22846 - protein, 9 aa, Artificial Sequence
  Description of Artificial Sequence: Synthetic peptide
  Seed: RVVPRGQLS
RQVPRGQLK

SEQ ID NO: 22847 - protein, 9 aa, Artificial Sequence
  Description of Artificial Sequence: Synthetic peptide
  Seed: RVVPRGQLS
RGVPRGQLA

SEQ ID NO: 22848 - protein, 9 aa, Artificial Sequence
  Description of Artificial Sequence: Synthetic peptide
  Seed: RVVPRGQLS
RGVPRGQLK

SEQ ID NO: 22849 - protein, 9 aa, Artificial Sequence
  Description of Artificial Sequence: Synthetic peptide
  Seed: RVVPRGQLS
RIVPRGQLA

SEQ ID NO: 22850 - protein, 9 aa, Artificial Sequence
  Description of Artificial Sequence: Synthetic peptide
  Seed: RVVPRGQLS
RIVPRGQLG

SEQ ID NO: 22851 - protein, 9 aa, Artificial Sequence
  Description of Artificial Sequence: Synthetic peptide
  Seed: RVVPRGQLS
RIVPRGQLI

SEQ ID NO: 22852 - protein, 9 aa, Artificial Sequence
  Description of Artificial Sequence: Synthetic peptide
  Seed: RVVPRGQLS
RIVPRGQLL

SEQ ID NO: 22853 - protein, 9 aa, Artificial Sequence
  Description of Artificial Sequence: Synthetic peptide
  Seed: RVVPRGQLS
RIVPRGQLK

SEQ ID NO: 22854 - protein, 9 aa, Artificial Sequence
  Description of Artificial Sequence: Synthetic peptide
  Seed: RYLEEHPSA
RMLEEHPSW

SEQ ID NO: 22855 - protein, 9 aa, Artificial Sequence
  Description of Artificial Sequence: Synthetic peptide
  Seed: RYLEEHPSA
RMLEEHPSV

SEQ ID NO: 22856 - protein, 9 aa, Artificial Sequence
  Description of Artificial Sequence: Synthetic peptide
  Seed: RYWAIRTRS
RSWAIRTRT

SEQ ID NO: 22857 - protein, 9 aa, Artificial Sequence
  Description of Artificial Sequence: Synthetic peptide
  Seed: RYWAIRTRS
RGWAIRTRV

SEQ ID NO: 22858 - protein, 9 aa, Artificial Sequence
  Description of Artificial Sequence: Synthetic peptide
  Seed: RYWAIRTRS
RQWAIRTRA

SEQ ID NO: 22859 - protein, 9 aa, Artificial Sequence
  Description of Artificial Sequence: Synthetic peptide
  Seed: RYWAIRTRS
RQWAIRTRR

SEQ ID NO: 22860 - protein, 9 aa, Artificial Sequence
  Description of Artificial Sequence: Synthetic peptide
  Seed: RYWAIRTRS
RQWAIRTRI

SEQ ID NO: 22861 - protein, 9 aa, Artificial Sequence
  Description of Artificial Sequence: Synthetic peptide
  Seed: RYWAIRTRS
RQWAIRTRK

SEQ ID NO: 22862 - protein, 9 aa, Artificial Sequence
  Description of Artificial Sequence: Synthetic peptide
  Seed: RYWAIRTRS
RQWAIRTRV

SEQ ID NO: 22863 - protein, 9 aa, Artificial Sequence
  Description of Artificial Sequence: Synthetic peptide
  Seed: RYWAIRTRS
RGWAIRTRA

SEQ ID NO: 22864 - protein, 9 aa, Artificial Sequence
  Description of Artificial Sequence: Synthetic peptide
  Seed: RYWAIRTRS
RGWAIRTRR

SEQ ID NO: 22865 - protein, 9 aa, Artificial Sequence
  Description of Artificial Sequence: Synthetic peptide
  Seed: RYWAIRTRS
RGWAIRTRI

SEQ ID NO: 22866 - protein, 9 aa, Artificial Sequence
  Description of Artificial Sequence: Synthetic peptide
  Seed: RYWAIRTRS
RGWAIRTRK

SEQ ID NO: 22867 - protein, 9 aa, Artificial Sequence
  Description of Artificial Sequence: Synthetic peptide
  Seed: RYWAIRTRS
RHWAIRTRK

SEQ ID NO: 22868 - protein, 9 aa, Artificial Sequence
  Description of Artificial Sequence: Synthetic peptide
  Seed: RYWAIRTRS
RIWAIRTRV

SEQ ID NO: 22869 - protein, 9 aa, Artificial Sequence
  Description of Artificial Sequence: Synthetic peptide
  Seed: RYWAIRTRS
RIWAIRTRA

SEQ ID NO: 22870 - protein, 9 aa, Artificial Sequence
  Description of Artificial Sequence: Synthetic peptide
  Seed: RYWAIRTRS
RIWAIRTRR

SEQ ID NO: 22871 - protein, 9 aa, Artificial Sequence
  Description of Artificial Sequence: Synthetic peptide
  Seed: RYWAIRTRS
RIWAIRTRG

SEQ ID NO: 22872 - protein, 9 aa, Artificial Sequence
  Description of Artificial Sequence: Synthetic peptide
  Seed: RYWAIRTRS
RIWAIRTRI

SEQ ID NO: 22873 - protein, 9 aa, Artificial Sequence
  Description of Artificial Sequence: Synthetic peptide
  Seed: RYWAIRTRS
RIWAIRTRL

SEQ ID NO: 22874 - protein, 9 aa, Artificial Sequence
  Description of Artificial Sequence: Synthetic peptide
  Seed: RYWAIRTRS
RIWAIRTRK

SEQ ID NO: 22875 - protein, 9 aa, Artificial Sequence
  Description of Artificial Sequence: Synthetic peptide
  Seed: RYWAIRTRS
RIWAIRTRM

SEQ ID NO: 22876 - protein, 9 aa, Artificial Sequence
  Description of Artificial Sequence: Synthetic peptide
  Seed: RYWAIRTRS
RIWAIRTRS

SEQ ID NO: 22877 - protein, 9 aa, Artificial Sequence
  Description of Artificial Sequence: Synthetic peptide
  Seed: RYWAIRTRS
RIWAIRTRT

SEQ ID NO: 22878 - protein, 9 aa, Artificial Sequence
  Description of Artificial Sequence: Synthetic peptide
  Seed: RYWAIRTRS
RCWAIRTRK

SEQ ID NO: 22879 - protein, 9 aa, Artificial Sequence
  Description of Artificial Sequence: Synthetic peptide
  Seed: RYWAIRTRS
RNWAIRTRV

SEQ ID NO: 22880 - protein, 9 aa, Artificial Sequence
  Description of Artificial Sequence: Synthetic peptide
  Seed: RYWAIRTRS
RNWAIRTRK

SEQ ID NO: 22881 - protein, 9 aa, Artificial Sequence
  Description of Artificial Sequence: Synthetic peptide
  Seed: RYWAIRTRS
RNWAIRTRA

SEQ ID NO: 22882 - protein, 8 aa, Artificial Sequence
  Description of Artificial Sequence: Synthetic peptide
  Seed: RYWAIRTR
RTWAIRTA

SEQ ID NO: 22883 - protein, 8 aa, Artificial Sequence
  Description of Artificial Sequence: Synthetic peptide
  Seed: RYWAIRTR
RTWAIRTR

SEQ ID NO: 22884 - protein, 8 aa, Artificial Sequence
  Description of Artificial Sequence: Synthetic peptide
  Seed: RYWAIRTR
RTWAIRTK

SEQ ID NO: 22885 - protein, 8 aa, Artificial Sequence
  Description of Artificial Sequence: Synthetic peptide
  Seed: RYWAIRTR
RWWAIRTR

SEQ ID NO: 22886 - protein, 8 aa, Artificial Sequence
  Description of Artificial Sequence: Synthetic peptide
  Seed: RYWAIRTR
RWWAIRTK

SEQ ID NO: 22887 - protein, 8 aa, Artificial Sequence
  Description of Artificial Sequence: Synthetic peptide
  Seed: RYWAIRTR
RVWAIRTR

SEQ ID NO: 22888 - protein, 8 aa, Artificial Sequence
  Description of Artificial Sequence: Synthetic peptide
  Seed: RYWAIRTR
RVWAIRTK

SEQ ID NO: 22889 - protein, 9 aa, Artificial Sequence
  Description of Artificial Sequence: Synthetic peptide
  Seed: RYWAIRTRS
RAWAIRTRA

SEQ ID NO: 22890 - protein, 9 aa, Artificial Sequence
  Description of Artificial Sequence: Synthetic peptide
  Seed: RYWAIRTRS
RAWAIRTRR

SEQ ID NO: 22891 - protein, 9 aa, Artificial Sequence
  Description of Artificial Sequence: Synthetic peptide
  Seed: RYWAIRTRS
RAWAIRTRG

SEQ ID NO: 22892 - protein, 9 aa, Artificial Sequence
  Description of Artificial Sequence: Synthetic peptide
  Seed: RYWAIRTRS
RAWAIRTRI

SEQ ID NO: 22893 - protein, 9 aa, Artificial Sequence
  Description of Artificial Sequence: Synthetic peptide
  Seed: RYWAIRTRS
RAWAIRTRL

SEQ ID NO: 22894 - protein, 9 aa, Artificial Sequence
  Description of Artificial Sequence: Synthetic peptide
  Seed: RYWAIRTRS
RAWAIRTRK

SEQ ID NO: 22895 - protein, 9 aa, Artificial Sequence
  Description of Artificial Sequence: Synthetic peptide
  Seed: RYWAIRTRS
RAWAIRTRM

SEQ ID NO: 22896 - protein, 9 aa, Artificial Sequence
  Description of Artificial Sequence: Synthetic peptide
  Seed: RYWAIRTRS
RAWAIRTRS

SEQ ID NO: 22897 - protein, 9 aa, Artificial Sequence
  Description of Artificial Sequence: Synthetic peptide
  Seed: RYWAIRTRS
RAWAIRTRT

SEQ ID NO: 22898 - protein, 9 aa, Artificial Sequence
  Description of Artificial Sequence: Synthetic peptide
  Seed: RYWAIRTRS
RAWAIRTRY

SEQ ID NO: 22899 - protein, 9 aa, Artificial Sequence
  Description of Artificial Sequence: Synthetic peptide
  Seed: RYWAIRTRS
RAWAIRTRV

SEQ ID NO: 22900 - protein, 9 aa, Artificial Sequence
  Description of Artificial Sequence: Synthetic peptide
  Seed: RYWAIRTRS
RIWAIRTRY

SEQ ID NO: 22901 - protein, 9 aa, Artificial Sequence
  Description of Artificial Sequence: Synthetic peptide
  Seed: RYWAIRTRS
RLWAIRTRA

SEQ ID NO: 22902 - protein, 9 aa, Artificial Sequence
  Description of Artificial Sequence: Synthetic peptide
  Seed: RYLEEHPSA
RFLEEHPSA

SEQ ID NO: 22903 - protein, 9 aa, Artificial Sequence
  Description of Artificial Sequence: Synthetic peptide
  Seed: RYWAIRTRS
RSWAIRTRQ

SEQ ID NO: 22904 - protein, 9 aa, Artificial Sequence
  Description of Artificial Sequence: Synthetic peptide
  Seed: RYWAIRTRS
RFWAIRTRK

SEQ ID NO: 22905 - protein, 9 aa, Artificial Sequence
  Description of Artificial Sequence: Synthetic peptide
  Seed: RYWAIRTRS
RFWAIRTRM

SEQ ID NO: 22906 - protein, 9 aa, Artificial Sequence
  Description of Artificial Sequence: Synthetic peptide
  Seed: RYWAIRTRS
RFWAIRTRS

SEQ ID NO: 22907 - protein, 9 aa, Artificial Sequence
  Description of Artificial Sequence: Synthetic peptide
  Seed: RYWAIRTRS
RFWAIRTRY

SEQ ID NO: 22908 - protein, 9 aa, Artificial Sequence
  Description of Artificial Sequence: Synthetic peptide
  Seed: RYWAIRTRS
RFWAIRTRV

SEQ ID NO: 22909 - protein, 9 aa, Artificial Sequence
  Description of Artificial Sequence: Synthetic peptide
  Seed: RYWAIRTRS
RSWAIRTRA

SEQ ID NO: 22910 - protein, 9 aa, Artificial Sequence
  Description of Artificial Sequence: Synthetic peptide
  Seed: RYWAIRTRS
RSWAIRTRR

SEQ ID NO: 22911 - protein, 9 aa, Artificial Sequence
  Description of Artificial Sequence: Synthetic peptide
  Seed: RYWAIRTRS
RSWAIRTRN

SEQ ID NO: 22912 - protein, 9 aa, Artificial Sequence
  Description of Artificial Sequence: Synthetic peptide
  Seed: RYWAIRTRS
RSWAIRTRC

SEQ ID NO: 22913 - protein, 9 aa, Artificial Sequence
  Description of Artificial Sequence: Synthetic peptide
  Seed: RYWAIRTRS
RSWAIRTRE

SEQ ID NO: 22914 - protein, 9 aa, Artificial Sequence
  Description of Artificial Sequence: Synthetic peptide
  Seed: RYWAIRTRS
RLWAIRTRG

SEQ ID NO: 22915 - protein, 9 aa, Artificial Sequence
  Description of Artificial Sequence: Synthetic peptide
  Seed: RYWAIRTRS
RSWAIRTRG

SEQ ID NO: 22916 - protein, 9 aa, Artificial Sequence
  Description of Artificial Sequence: Synthetic peptide
  Seed: RYWAIRTRS
RSWAIRTRH

SEQ ID NO: 22917 - protein, 9 aa, Artificial Sequence
  Description of Artificial Sequence: Synthetic peptide
  Seed: RYWAIRTRS
RSWAIRTRI

SEQ ID NO: 22918 - protein, 9 aa, Artificial Sequence
  Description of Artificial Sequence: Synthetic peptide
  Seed: RYWAIRTRS
RSWAIRTRL

SEQ ID NO: 22919 - protein, 9 aa, Artificial Sequence
  Description of Artificial Sequence: Synthetic peptide
  Seed: RYWAIRTRS
RSWAIRTRK

SEQ ID NO: 22920 - protein, 9 aa, Artificial Sequence
  Description of Artificial Sequence: Synthetic peptide
  Seed: RYWAIRTRS
RSWAIRTRM

SEQ ID NO: 22921 - protein, 9 aa, Artificial Sequence
  Description of Artificial Sequence: Synthetic peptide
  Seed: RYWAIRTRS
RSWAIRTRF

SEQ ID NO: 22922 - protein, 9 aa, Artificial Sequence
  Description of Artificial Sequence: Synthetic peptide
  Seed: RYWAIRTRS
RSWAIRTRP

SEQ ID NO: 22923 - protein, 9 aa, Artificial Sequence
  Description of Artificial Sequence: Synthetic peptide
  Seed: RYWAIRTRS
RSWAIRTRS

SEQ ID NO: 22924 - protein, 9 aa, Artificial Sequence
  Description of Artificial Sequence: Synthetic peptide
  Seed: RYWAIRTRS
RFWAIRTRL

SEQ ID NO: 22925 - protein, 9 aa, Artificial Sequence
  Description of Artificial Sequence: Synthetic peptide
  Seed: RYWAIRTRS
RFWAIRTRI

SEQ ID NO: 22926 - protein, 9 aa, Artificial Sequence
  Description of Artificial Sequence: Synthetic peptide
  Seed: RYWAIRTRS
RFWAIRTRG

SEQ ID NO: 22927 - protein, 9 aa, Artificial Sequence
  Description of Artificial Sequence: Synthetic peptide
  Seed: RYWAIRTRS
RFWAIRTRR

SEQ ID NO: 22928 - protein, 9 aa, Artificial Sequence
  Description of Artificial Sequence: Synthetic peptide
  Seed: RYWAIRTRS
RLWAIRTRI

SEQ ID NO: 22929 - protein, 9 aa, Artificial Sequence
  Description of Artificial Sequence: Synthetic peptide
  Seed: RYWAIRTRS
RLWAIRTRL

SEQ ID NO: 22930 - protein, 9 aa, Artificial Sequence
  Description of Artificial Sequence: Synthetic peptide
  Seed: RYWAIRTRS
RLWAIRTRK

SEQ ID NO: 22931 - protein, 9 aa, Artificial Sequence
  Description of Artificial Sequence: Synthetic peptide
  Seed: RYWAIRTRS
RLWAIRTRM

SEQ ID NO: 22932 - protein, 9 aa, Artificial Sequence
  Description of Artificial Sequence: Synthetic peptide
  Seed: RYWAIRTRS
RLWAIRTRV

SEQ ID NO: 22933 - protein, 9 aa, Artificial Sequence
  Description of Artificial Sequence: Synthetic peptide
  Seed: RYWAIRTRS
RMWAIRTRA

SEQ ID NO: 22934 - protein, 9 aa, Artificial Sequence
  Description of Artificial Sequence: Synthetic peptide
  Seed: RYWAIRTRS
RMWAIRTRR

SEQ ID NO: 22935 - protein, 9 aa, Artificial Sequence
  Description of Artificial Sequence: Synthetic peptide
  Seed: RYWAIRTRS
RMWAIRTRQ

SEQ ID NO: 22936 - protein, 9 aa, Artificial Sequence
  Description of Artificial Sequence: Synthetic peptide
  Seed: RYWAIRTRS
RMWAIRTRG

SEQ ID NO: 22937 - protein, 9 aa, Artificial Sequence
  Description of Artificial Sequence: Synthetic peptide
  Seed: RYWAIRTRS
RMWAIRTRI

SEQ ID NO: 22938 - protein, 9 aa, Artificial Sequence
  Description of Artificial Sequence: Synthetic peptide
  Seed: RYWAIRTRS
RMWAIRTRL

SEQ ID NO: 22939 - protein, 9 aa, Artificial Sequence
  Description of Artificial Sequence: Synthetic peptide
  Seed: RYWAIRTRS
RMWAIRTRK

SEQ ID NO: 22940 - protein, 9 aa, Artificial Sequence
  Description of Artificial Sequence: Synthetic peptide
  Seed: RYWAIRTRS
RMWAIRTRM

SEQ ID NO: 22941 - protein, 9 aa, Artificial Sequence
  Description of Artificial Sequence: Synthetic peptide
  Seed: RYWAIRTRS
RMWAIRTRP

SEQ ID NO: 22942 - protein, 9 aa, Artificial Sequence
  Description of Artificial Sequence: Synthetic peptide
  Seed: RYWAIRTRS
RMWAIRTRS

SEQ ID NO: 22943 - protein, 9 aa, Artificial Sequence
  Description of Artificial Sequence: Synthetic peptide
  Seed: RYWAIRTRS
RMWAIRTRT

SEQ ID NO: 22944 - protein, 9 aa, Artificial Sequence
  Description of Artificial Sequence: Synthetic peptide
  Seed: RYWAIRTRS
RMWAIRTRY

SEQ ID NO: 22945 - protein, 9 aa, Artificial Sequence
  Description of Artificial Sequence: Synthetic peptide
  Seed: RYWAIRTRS
RMWAIRTRV

SEQ ID NO: 22946 - protein, 9 aa, Artificial Sequence
  Description of Artificial Sequence: Synthetic peptide
  Seed: RYWAIRTRS
RFWAIRTRA

SEQ ID NO: 22947 - protein, 8 aa, Artificial Sequence
  Description of Artificial Sequence: Synthetic peptide
  Seed: RYWAIRTR
RSWAIRTK

SEQ ID NO: 22948 - protein, 8 aa, Artificial Sequence
  Description of Artificial Sequence: Synthetic peptide
  Seed: RYWAIRTR
RSWAIRTR

SEQ ID NO: 22949 - protein, 8 aa, Artificial Sequence
  Description of Artificial Sequence: Synthetic peptide
  Seed: RYWAIRTR
RFWAIRTK

SEQ ID NO: 22950 - protein, 9 aa, Artificial Sequence
  Description of Artificial Sequence: Synthetic peptide
  Seed: RYLEEHPSA
RWLEEHPSM

SEQ ID NO: 22951 - protein, 9 aa, Artificial Sequence
  Description of Artificial Sequence: Synthetic peptide
  Seed: RYLEEHPSA
RTLEEHPSF

SEQ ID NO: 22952 - protein, 9 aa, Artificial Sequence
  Description of Artificial Sequence: Synthetic peptide
  Seed: RYLEEHPSA
RTLEEHPSS

SEQ ID NO: 22953 - protein, 9 aa, Artificial Sequence
  Description of Artificial Sequence: Synthetic peptide
  Seed: RYLEEHPSA
RTLEEHPST

SEQ ID NO: 22954 - protein, 9 aa, Artificial Sequence
  Description of Artificial Sequence: Synthetic peptide
  Seed: RYLEEHPSA
RTLEEHPSW

SEQ ID NO: 22955 - protein, 9 aa, Artificial Sequence
  Description of Artificial Sequence: Synthetic peptide
  Seed: RYLEEHPSA
RTLEEHPSY

SEQ ID NO: 22956 - protein, 9 aa, Artificial Sequence
  Description of Artificial Sequence: Synthetic peptide
  Seed: RYLEEHPSA
RTLEEHPSV

SEQ ID NO: 22957 - protein, 9 aa, Artificial Sequence
  Description of Artificial Sequence: Synthetic peptide
  Seed: RYLEEHPSA
RWLEEHPSI

SEQ ID NO: 22958 - protein, 9 aa, Artificial Sequence
  Description of Artificial Sequence: Synthetic peptide
  Seed: RYLEEHPSA
RWLEEHPSL

SEQ ID NO: 22959 - protein, 9 aa, Artificial Sequence
  Description of Artificial Sequence: Synthetic peptide
  Seed: RYLEEHPSA
RWLEEHPSK

SEQ ID NO: 22960 - protein, 9 aa, Artificial Sequence
  Description of Artificial Sequence: Synthetic peptide
  Seed: RYLEEHPSA
RWLEEHPSF

SEQ ID NO: 22961 - protein, 8 aa, Artificial Sequence
  Description of Artificial Sequence: Synthetic peptide
  Seed: RYWAIRTR
RFWAIRTR

SEQ ID NO: 22962 - protein, 9 aa, Artificial Sequence
  Description of Artificial Sequence: Synthetic peptide
  Seed: RYLEEHPSA
RWLEEHPSW

SEQ ID NO: 22963 - protein, 9 aa, Artificial Sequence
  Description of Artificial Sequence: Synthetic peptide
  Seed: RYLEEHPSA
RWLEEHPSY

SEQ ID NO: 22964 - protein, 9 aa, Artificial Sequence
  Description of Artificial Sequence: Synthetic peptide
  Seed: RYLEEHPSA
RWLEEHPSV

SEQ ID NO: 22965 - protein, 9 aa, Artificial Sequence
  Description of Artificial Sequence: Synthetic peptide
  Seed: RYLEEHPSA
RYLEEHPSR

SEQ ID NO: 22966 - protein, 9 aa, Artificial Sequence
  Description of Artificial Sequence: Synthetic peptide
  Seed: RYLEEHPSA
RYLEEHPSC

SEQ ID NO: 22967 - protein, 9 aa, Artificial Sequence
  Description of Artificial Sequence: Synthetic peptide
  Seed: RYLEEHPSA
RYLEEHPSH

SEQ ID NO: 22968 - protein, 9 aa, Artificial Sequence
  Description of Artificial Sequence: Synthetic peptide
  Seed: RYLEEHPSA
RYLEEHPSI

SEQ ID NO: 22969 - protein, 9 aa, Artificial Sequence
  Description of Artificial Sequence: Synthetic peptide
  Seed: RYLEEHPSA
RYLEEHPSL

SEQ ID NO: 22970 - protein, 9 aa, Artificial Sequence
  Description of Artificial Sequence: Synthetic peptide
  Seed: RYLEEHPSA
RYLEEHPSK

SEQ ID NO: 22971 - protein, 9 aa, Artificial Sequence
  Description of Artificial Sequence: Synthetic peptide
  Seed: RYLEEHPSA
RTLEEHPSM

SEQ ID NO: 22972 - protein, 9 aa, Artificial Sequence
  Description of Artificial Sequence: Synthetic peptide
  Seed: RYLEEHPSA
RTLEEHPSK

SEQ ID NO: 22973 - protein, 9 aa, Artificial Sequence
  Description of Artificial Sequence: Synthetic peptide
  Seed: RYLEEHPSA
RTLEEHPSL

SEQ ID NO: 22974 - protein, 9 aa, Artificial Sequence
  Description of Artificial Sequence: Synthetic peptide
  Seed: RYLEEHPSA
RTLEEHPSI

SEQ ID NO: 22975 - protein, 9 aa, Artificial Sequence
  Description of Artificial Sequence: Synthetic peptide
  Seed: RYLEEHPSA
RFLEEHPSI

SEQ ID NO: 22976 - protein, 9 aa, Artificial Sequence
  Description of Artificial Sequence: Synthetic peptide
  Seed: RYLEEHPSA
RFLEEHPSL

SEQ ID NO: 22977 - protein, 9 aa, Artificial Sequence
  Description of Artificial Sequence: Synthetic peptide
  Seed: RYLEEHPSA
RFLEEHPSK

SEQ ID NO: 22978 - protein, 9 aa, Artificial Sequence
  Description of Artificial Sequence: Synthetic peptide
  Seed: RYLEEHPSA
RFLEEHPSM

SEQ ID NO: 22979 - protein, 9 aa, Artificial Sequence
  Description of Artificial Sequence: Synthetic peptide
  Seed: RYLEEHPSA
RFLEEHPSF

SEQ ID NO: 22980 - protein, 9 aa, Artificial Sequence
  Description of Artificial Sequence: Synthetic peptide
  Seed: RYLEEHPSA
RFLEEHPSW

SEQ ID NO: 22981 - protein, 9 aa, Artificial Sequence
  Description of Artificial Sequence: Synthetic peptide
  Seed: RYLEEHPSA
RFLEEHPSY

SEQ ID NO: 22982 - protein, 9 aa, Artificial Sequence
  Description of Artificial Sequence: Synthetic peptide
  Seed: RYLEEHPSA
RFLEEHPSV

SEQ ID NO: 22983 - protein, 9 aa, Artificial Sequence
  Description of Artificial Sequence: Synthetic peptide
  Seed: RYLEEHPSA
RSLEEHPSA

SEQ ID NO: 22984 - protein, 9 aa, Artificial Sequence
  Description of Artificial Sequence: Synthetic peptide
  Seed: RYLEEHPSA
RSLEEHPSR

SEQ ID NO: 22985 - protein, 9 aa, Artificial Sequence
  Description of Artificial Sequence: Synthetic peptide
  Seed: RYLEEHPSA
RSLEEHPSI

SEQ ID NO: 22986 - protein, 9 aa, Artificial Sequence
  Description of Artificial Sequence: Synthetic peptide
  Seed: RYLEEHPSA
RSLEEHPSL

SEQ ID NO: 22987 - protein, 9 aa, Artificial Sequence
  Description of Artificial Sequence: Synthetic peptide
  Seed: RYLEEHPSA
RSLEEHPSK

SEQ ID NO: 22988 - protein, 9 aa, Artificial Sequence
  Description of Artificial Sequence: Synthetic peptide
  Seed: RYLEEHPSA
RSLEEHPSM

SEQ ID NO: 22989 - protein, 9 aa, Artificial Sequence
  Description of Artificial Sequence: Synthetic peptide
  Seed: RYLEEHPSA
RSLEEHPSF

SEQ ID NO: 22990 - protein, 9 aa, Artificial Sequence
  Description of Artificial Sequence: Synthetic peptide
  Seed: RYLEEHPSA
RSLEEHPSV

SEQ ID NO: 22991 - protein, 9 aa, Artificial Sequence
  Description of Artificial Sequence: Synthetic peptide
  Seed: RYLEEHPSA
RTLEEHPSA

SEQ ID NO: 22992 - protein, 9 aa, Artificial Sequence
  Description of Artificial Sequence: Synthetic peptide
  Seed: RYLEEHPSA
RTLEEHPSR

SEQ ID NO: 22993 - protein, 9 aa, Artificial Sequence
  Description of Artificial Sequence: Synthetic peptide
  Seed: RYLEEHPSA
RTLEEHPSG

SEQ ID NO: 22994 - protein, 9 aa, Artificial Sequence
  Description of Artificial Sequence: Synthetic peptide
  Seed: RYLEEHPSA
RYLEEHPSM

SEQ ID NO: 22995 - protein, 9 aa, Artificial Sequence
  Description of Artificial Sequence: Synthetic peptide
  Seed: RYLEEHPSA
RYLEEHPSF

SEQ ID NO: 22996 - protein, 9 aa, Artificial Sequence
  Description of Artificial Sequence: Synthetic peptide
  Seed: RYLEEHPSA
RYLEEHPSW

SEQ ID NO: 22997 - protein, 11 aa, Artificial Sequence
  Description of Artificial Sequence: Synthetic peptide
  Seed: RYLEEHPSAGK
RTLEEHPSAGR

SEQ ID NO: 22998 - protein, 11 aa, Artificial Sequence
  Description of Artificial Sequence: Synthetic peptide
  Seed: RYLEEHPSAGK
RWLEEHPSAGR

SEQ ID NO: 22999 - protein, 11 aa, Artificial Sequence
  Description of Artificial Sequence: Synthetic peptide
  Seed: RYLEEHPSAGK
RWLEEHPSAGK

SEQ ID NO: 23000 - protein, 11 aa, Artificial Sequence
  Description of Artificial Sequence: Synthetic peptide
  Seed: RYLEEHPSAGK
RVLEEHPSAGR

SEQ ID NO: 23001 - protein, 11 aa, Artificial Sequence
  Description of Artificial Sequence: Synthetic peptide
  Seed: RYLEEHPSAGK
RVLEEHPSAGK

SEQ ID NO: 23002 - protein, 8 aa, Artificial Sequence
  Description of Artificial Sequence: Synthetic peptide
  Seed: RYWAIRTR
RAWAIRTR

SEQ ID NO: 23003 - protein, 8 aa, Artificial Sequence
  Description of Artificial Sequence: Synthetic peptide
  Seed: RYWAIRTR
RAWAIRTK

SEQ ID NO: 23004 - protein, 8 aa, Artificial Sequence
  Description of Artificial Sequence: Synthetic peptide
  Seed: RYWAIRTR
RRWAIRTK

SEQ ID NO: 23005 - protein, 8 aa, Artificial Sequence
  Description of Artificial Sequence: Synthetic peptide
  Seed: RYWAIRTR
RNWAIRTR

SEQ ID NO: 23006 - protein, 8 aa, Artificial Sequence
  Description of Artificial Sequence: Synthetic peptide
  Seed: RYWAIRTR
RQWAIRTR

SEQ ID NO: 23007 - protein, 8 aa, Artificial Sequence
  Description of Artificial Sequence: Synthetic peptide
  Seed: RYWAIRTR
RQWAIRTK

SEQ ID NO: 23008 - protein, 8 aa, Artificial Sequence
  Description of Artificial Sequence: Synthetic peptide
  Seed: RYWAIRTR
RGWAIRTR

SEQ ID NO: 23009 - protein, 8 aa, Artificial Sequence
  Description of Artificial Sequence: Synthetic peptide
  Seed: RYWAIRTR
RIWAIRTR

SEQ ID NO: 23010 - protein, 8 aa, Artificial Sequence
  Description of Artificial Sequence: Synthetic peptide
  Seed: RYWAIRTR
RIWAIRTK

SEQ ID NO: 23011 - protein, 8 aa, Artificial Sequence
  Description of Artificial Sequence: Synthetic peptide
  Seed: RYWAIRTR
RLWAIRTR

SEQ ID NO: 23012 - protein, 8 aa, Artificial Sequence
  Description of Artificial Sequence: Synthetic peptide
  Seed: RYWAIRTR
RLWAIRTK

SEQ ID NO: 23013 - protein, 8 aa, Artificial Sequence
  Description of Artificial Sequence: Synthetic peptide
  Seed: RYWAIRTR
RKWAIRTK

SEQ ID NO: 23014 - protein, 8 aa, Artificial Sequence
  Description of Artificial Sequence: Synthetic peptide
  Seed: RYWAIRTR
RMWAIRTR

SEQ ID NO: 23015 - protein, 8 aa, Artificial Sequence
  Description of Artificial Sequence: Synthetic peptide
  Seed: RYWAIRTR
RMWAIRTK

SEQ ID NO: 23016 - protein, 11 aa, Artificial Sequence
  Description of Artificial Sequence: Synthetic peptide
  Seed: RYLEEHPSAGK
RTLEEHPSAGK

SEQ ID NO: 23017 - protein, 11 aa, Artificial Sequence
  Description of Artificial Sequence: Synthetic peptide
  Seed: RYLEEHPSAGK
RSLEEHPSAGR

SEQ ID NO: 23018 - protein, 9 aa, Artificial Sequence
  Description of Artificial Sequence: Synthetic peptide
  Seed: RYLEEHPSA
RYLEEHPSY

SEQ ID NO: 23019 - protein, 11 aa, Artificial Sequence
  Description of Artificial Sequence: Synthetic peptide
  Seed: RYLEEHPSAGK
RFLEEHPSAGK

SEQ ID NO: 23020 - protein, 9 aa, Artificial Sequence
  Description of Artificial Sequence: Synthetic peptide
  Seed: RYLEEHPSA
RYLEEHPSV

SEQ ID NO: 23021 - protein, 9 aa, Artificial Sequence
  Description of Artificial Sequence: Synthetic peptide
  Seed: RYLEEHPSA
RVLEEHPSA

SEQ ID NO: 23022 - protein, 9 aa, Artificial Sequence
  Description of Artificial Sequence: Synthetic peptide
  Seed: RYLEEHPSA
RVLEEHPSR

SEQ ID NO: 23023 - protein, 9 aa, Artificial Sequence
  Description of Artificial Sequence: Synthetic peptide
  Seed: RYLEEHPSA
RVLEEHPSI

SEQ ID NO: 23024 - protein, 9 aa, Artificial Sequence
  Description of Artificial Sequence: Synthetic peptide
  Seed: RYLEEHPSA
RVLEEHPSL

SEQ ID NO: 23025 - protein, 9 aa, Artificial Sequence
  Description of Artificial Sequence: Synthetic peptide
  Seed: RYLEEHPSA
RVLEEHPSK

SEQ ID NO: 23026 - protein, 9 aa, Artificial Sequence
  Description of Artificial Sequence: Synthetic peptide
  Seed: RYLEEHPSA
RVLEEHPSM

SEQ ID NO: 23027 - protein, 9 aa, Artificial Sequence
  Description of Artificial Sequence: Synthetic peptide
  Seed: RYLEEHPSA
RVLEEHPSF

SEQ ID NO: 23028 - protein, 9 aa, Artificial Sequence
  Description of Artificial Sequence: Synthetic peptide
  Seed: RYLEEHPSA
RVLEEHPSW

SEQ ID NO: 23029 - protein, 9 aa, Artificial Sequence
  Description of Artificial Sequence: Synthetic peptide
  Seed: RYLEEHPSA
RVLEEHPSV

SEQ ID NO: 23030 - protein, 11 aa, Artificial Sequence
  Description of Artificial Sequence: Synthetic peptide
  Seed: RYLEEHPSAGK
RALEEHPSAGR

SEQ ID NO: 23031 - protein, 11 aa, Artificial Sequence
  Description of Artificial Sequence: Synthetic peptide
  Seed: RYLEEHPSAGK
RNLEEHPSAGR

SEQ ID NO: 23032 - protein, 11 aa, Artificial Sequence
  Description of Artificial Sequence: Synthetic peptide
  Seed: RYLEEHPSAGK
RQLEEHPSAGR

SEQ ID NO: 23033 - protein, 11 aa, Artificial Sequence
  Description of Artificial Sequence: Synthetic peptide
  Seed: RYLEEHPSAGK
RGLEEHPSAGR

SEQ ID NO: 23034 - protein, 11 aa, Artificial Sequence
  Description of Artificial Sequence: Synthetic peptide
  Seed: RYLEEHPSAGK
RILEEHPSAGR

SEQ ID NO: 23035 - protein, 11 aa, Artificial Sequence
  Description of Artificial Sequence: Synthetic peptide
  Seed: RYLEEHPSAGK
RLLEEHPSAGR

SEQ ID NO: 23036 - protein, 11 aa, Artificial Sequence
  Description of Artificial Sequence: Synthetic peptide
  Seed: RYLEEHPSAGK
RMLEEHPSAGR

SEQ ID NO: 23037 - protein, 11 aa, Artificial Sequence
  Description of Artificial Sequence: Synthetic peptide
  Seed: RYLEEHPSAGK
RMLEEHPSAGK

SEQ ID NO: 23038 - protein, 11 aa, Artificial Sequence
  Description of Artificial Sequence: Synthetic peptide
  Seed: RYLEEHPSAGK
RFLEEHPSAGR

SEQ ID NO: 23039 - protein, 9 aa, Artificial Sequence
  Description of Artificial Sequence: Synthetic peptide
  Seed: SFRGRGVFE
SIRGRGVFM

SEQ ID NO: 23040 - protein, 9 aa, Artificial Sequence
  Description of Artificial Sequence: Synthetic peptide
  Seed: SFRGRGVFE
SIRGRGVFP

SEQ ID NO: 23041 - protein, 10 aa, Artificial Sequence
  Description of Artificial Sequence: Synthetic peptide
  Seed: TIERMVLSAF
TMERMVLSAW

SEQ ID NO: 23042 - protein, 9 aa, Artificial Sequence
  Description of Artificial Sequence: Synthetic peptide
  Seed: STRGVQIAS
SMRGVQIAM

SEQ ID NO: 23043 - protein, 9 aa, Artificial Sequence
  Description of Artificial Sequence: Synthetic peptide
  Seed: STRGVQIAS
SLRGVQIAV

SEQ ID NO: 23044 - protein, 9 aa, Artificial Sequence
  Description of Artificial Sequence: Synthetic peptide
  Seed: STRGVQIAS
SKRGVQIAK

SEQ ID NO: 23045 - protein, 9 aa, Artificial Sequence
  Description of Artificial Sequence: Synthetic peptide
  Seed: STRGVQIAS
SMRGVQIAA

SEQ ID NO: 23046 - protein, 9 aa, Artificial Sequence
  Description of Artificial Sequence: Synthetic peptide
  Seed: STRGVQIAS
SMRGVQIAR

SEQ ID NO: 23047 - protein, 9 aa, Artificial Sequence
  Description of Artificial Sequence: Synthetic peptide
  Seed: STRGVQIAS
SMRGVQIAN

SEQ ID NO: 23048 - protein, 9 aa, Artificial Sequence
  Description of Artificial Sequence: Synthetic peptide
  Seed: STRGVQIAS
SMRGVQIAG

SEQ ID NO: 23049 - protein, 9 aa, Artificial Sequence
  Description of Artificial Sequence: Synthetic peptide
  Seed: STRGVQIAS
SMRGVQIAI

SEQ ID NO: 23050 - protein, 9 aa, Artificial Sequence
  Description of Artificial Sequence: Synthetic peptide
  Seed: STRGVQIAS
SMRGVQIAL

SEQ ID NO: 23051 - protein, 9 aa, Artificial Sequence
  Description of Artificial Sequence: Synthetic peptide
  Seed: STRGVQIAS
SMRGVQIAK

SEQ ID NO: 23052 - protein, 9 aa, Artificial Sequence
  Description of Artificial Sequence: Synthetic peptide
  Seed: STRGVQIAS
SMRGVQIAF

SEQ ID NO: 23053 - protein, 9 aa, Artificial Sequence
  Description of Artificial Sequence: Synthetic peptide
  Seed: STRGVQIAS
SFRGVQIAK

SEQ ID NO: 23054 - protein, 9 aa, Artificial Sequence
  Description of Artificial Sequence: Synthetic peptide
  Seed: STRGVQIAS
SMRGVQIAP

SEQ ID NO: 23055 - protein, 9 aa, Artificial Sequence
  Description of Artificial Sequence: Synthetic peptide
  Seed: STRGVQIAS
SMRGVQIAS

SEQ ID NO: 23056 - protein, 9 aa, Artificial Sequence
  Description of Artificial Sequence: Synthetic peptide
  Seed: STRGVQIAS
SMRGVQIAT

SEQ ID NO: 23057 - protein, 9 aa, Artificial Sequence
  Description of Artificial Sequence: Synthetic peptide
  Seed: STRGVQIAS
SMRGVQIAY

SEQ ID NO: 23058 - protein, 9 aa, Artificial Sequence
  Description of Artificial Sequence: Synthetic peptide
  Seed: STRGVQIAS
SMRGVQIAV

SEQ ID NO: 23059 - protein, 9 aa, Artificial Sequence
  Description of Artificial Sequence: Synthetic peptide
  Seed: STRGVQIAS
SFRGVQIAA

SEQ ID NO: 23060 - protein, 9 aa, Artificial Sequence
  Description of Artificial Sequence: Synthetic peptide
  Seed: STRGVQIAS
SFRGVQIAR

SEQ ID NO: 23061 - protein, 9 aa, Artificial Sequence
  Description of Artificial Sequence: Synthetic peptide
  Seed: STRGVQIAS
SFRGVQIAG

SEQ ID NO: 23062 - protein, 9 aa, Artificial Sequence
  Description of Artificial Sequence: Synthetic peptide
  Seed: STRGVQIAS
SFRGVQIAI

SEQ ID NO: 23063 - protein, 9 aa, Artificial Sequence
  Description of Artificial Sequence: Synthetic peptide
  Seed: STRGVQIAS
SLRGVQIAY

SEQ ID NO: 23064 - protein, 9 aa, Artificial Sequence
  Description of Artificial Sequence: Synthetic peptide
  Seed: STRGVQIAS
SLRGVQIAS

SEQ ID NO: 23065 - protein, 9 aa, Artificial Sequence
  Description of Artificial Sequence: Synthetic peptide
  Seed: STRGVQIAS
SLRGVQIAM

SEQ ID NO: 23066 - protein, 9 aa, Artificial Sequence
  Description of Artificial Sequence: Synthetic peptide
  Seed: STRGVQIAS
SLRGVQIAK

SEQ ID NO: 23067 - protein, 9 aa, Artificial Sequence
  Description of Artificial Sequence: Synthetic peptide
  Seed: STRGVQIAS
SGRGVQIAS

SEQ ID NO: 23068 - protein, 9 aa, Artificial Sequence
  Description of Artificial Sequence: Synthetic peptide
  Seed: STRGVQIAS
SGRGVQIAY

SEQ ID NO: 23069 - protein, 9 aa, Artificial Sequence
  Description of Artificial Sequence: Synthetic peptide
  Seed: STRGVQIAS
SGRGVQIAV

SEQ ID NO: 23070 - protein, 9 aa, Artificial Sequence
  Description of Artificial Sequence: Synthetic peptide
  Seed: STRGVQIAS
SHRGVQIAK

SEQ ID NO: 23071 - protein, 9 aa, Artificial Sequence
  Description of Artificial Sequence: Synthetic peptide
  Seed: STRGVQIAS
SIRGVQIAA

SEQ ID NO: 23072 - protein, 9 aa, Artificial Sequence
  Description of Artificial Sequence: Synthetic peptide
  Seed: STRGVQIAS
SIRGVQIAR

SEQ ID NO: 23073 - protein, 9 aa, Artificial Sequence
  Description of Artificial Sequence: Synthetic peptide
  Seed: STRGVQIAS
SIRGVQIAG

SEQ ID NO: 23074 - protein, 9 aa, Artificial Sequence
  Description of Artificial Sequence: Synthetic peptide
  Seed: STRGVQIAS
SIRGVQIAI

SEQ ID NO: 23075 - protein, 9 aa, Artificial Sequence
  Description of Artificial Sequence: Synthetic peptide
  Seed: STRGVQIAS
SIRGVQIAL

SEQ ID NO: 23076 - protein, 9 aa, Artificial Sequence
  Description of Artificial Sequence: Synthetic peptide
  Seed: STRGVQIAS
SIRGVQIAK

SEQ ID NO: 23077 - protein, 9 aa, Artificial Sequence
  Description of Artificial Sequence: Synthetic peptide
  Seed: STRGVQIAS
SIRGVQIAM

SEQ ID NO: 23078 - protein, 9 aa, Artificial Sequence
  Description of Artificial Sequence: Synthetic peptide
  Seed: STRGVQIAS
SIRGVQIAS

SEQ ID NO: 23079 - protein, 9 aa, Artificial Sequence
  Description of Artificial Sequence: Synthetic peptide
  Seed: STRGVQIAS
SIRGVQIAT

SEQ ID NO: 23080 - protein, 9 aa, Artificial Sequence
  Description of Artificial Sequence: Synthetic peptide
  Seed: STRGVQIAS
SIRGVQIAY

SEQ ID NO: 23081 - protein, 9 aa, Artificial Sequence
  Description of Artificial Sequence: Synthetic peptide
  Seed: STRGVQIAS
SIRGVQIAV

SEQ ID NO: 23082 - protein, 9 aa, Artificial Sequence
  Description of Artificial Sequence: Synthetic peptide
  Seed: STRGVQIAS
SLRGVQIAA

SEQ ID NO: 23083 - protein, 9 aa, Artificial Sequence
  Description of Artificial Sequence: Synthetic peptide
  Seed: STRGVQIAS
SLRGVQIAG

SEQ ID NO: 23084 - protein, 9 aa, Artificial Sequence
  Description of Artificial Sequence: Synthetic peptide
  Seed: STRGVQIAS
SLRGVQIAI

SEQ ID NO: 23085 - protein, 9 aa, Artificial Sequence
  Description of Artificial Sequence: Synthetic peptide
  Seed: STRGVQIAS
SLRGVQIAL

SEQ ID NO: 23086 - protein, 9 aa, Artificial Sequence
  Description of Artificial Sequence: Synthetic peptide
  Seed: STRGVQIAS
SFRGVQIAL

SEQ ID NO: 23087 - protein, 9 aa, Artificial Sequence
  Description of Artificial Sequence: Synthetic peptide
  Seed: STRGVQIAS
SFRGVQIAM

SEQ ID NO: 23088 - protein, 9 aa, Artificial Sequence
  Description of Artificial Sequence: Synthetic peptide
  Seed: STRGVQIAS
SGRGVQIAK

SEQ ID NO: 23089 - protein, 9 aa, Artificial Sequence
  Description of Artificial Sequence: Synthetic peptide
  Seed: STRGVQIAS
STRGVQIAP

SEQ ID NO: 23090 - protein, 9 aa, Artificial Sequence
  Description of Artificial Sequence: Synthetic peptide
  Seed: STRGVQIAS
STRGVQIAQ

SEQ ID NO: 23091 - protein, 9 aa, Artificial Sequence
  Description of Artificial Sequence: Synthetic peptide
  Seed: STRGVQIAS
STRGVQIAE

SEQ ID NO: 23092 - protein, 9 aa, Artificial Sequence
  Description of Artificial Sequence: Synthetic peptide
  Seed: STRGVQIAS
STRGVQIAG

SEQ ID NO: 23093 - protein, 9 aa, Artificial Sequence
  Description of Artificial Sequence: Synthetic peptide
  Seed: STRGVQIAS
STRGVQIAH

SEQ ID NO: 23094 - protein, 9 aa, Artificial Sequence
  Description of Artificial Sequence: Synthetic peptide
  Seed: STRGVQIAS
STRGVQIAI

SEQ ID NO: 23095 - protein, 9 aa, Artificial Sequence
  Description of Artificial Sequence: Synthetic peptide
  Seed: STRGVQIAS
STRGVQIAL

SEQ ID NO: 23096 - protein, 9 aa, Artificial Sequence
  Description of Artificial Sequence: Synthetic peptide
  Seed: STRGVQIAS
STRGVQIAK

SEQ ID NO: 23097 - protein, 9 aa, Artificial Sequence
  Description of Artificial Sequence: Synthetic peptide
  Seed: STRGVQIAS
STRGVQIAM

SEQ ID NO: 23098 - protein, 9 aa, Artificial Sequence
  Description of Artificial Sequence: Synthetic peptide
  Seed: STRGVQIAS
STRGVQIAF

SEQ ID NO: 23099 - protein, 9 aa, Artificial Sequence
  Description of Artificial Sequence: Synthetic peptide
  Seed: STRGVQIAS
STRGVQIAT

SEQ ID NO: 23100 - protein, 9 aa, Artificial Sequence
  Description of Artificial Sequence: Synthetic peptide
  Seed: STRGVQIAS
SFRGVQIAS

SEQ ID NO: 23101 - protein, 9 aa, Artificial Sequence
  Description of Artificial Sequence: Synthetic peptide
  Seed: STRGVQIAS
STRGVQIAY

SEQ ID NO: 23102 - protein, 9 aa, Artificial Sequence
  Description of Artificial Sequence: Synthetic peptide
  Seed: STRGVQIAS
STRGVQIAV

SEQ ID NO: 23103 - protein, 9 aa, Artificial Sequence
  Description of Artificial Sequence: Synthetic peptide
  Seed: STRGVQIAS
SWRGVQIAA

SEQ ID NO: 23104 - protein, 9 aa, Artificial Sequence
  Description of Artificial Sequence: Synthetic peptide
  Seed: STRGVQIAS
SWRGVQIAG

SEQ ID NO: 23105 - protein, 9 aa, Artificial Sequence
  Description of Artificial Sequence: Synthetic peptide
  Seed: STRGVQIAS
SWRGVQIAI

SEQ ID NO: 23106 - protein, 9 aa, Artificial Sequence
  Description of Artificial Sequence: Synthetic peptide
  Seed: STRGVQIAS
SWRGVQIAL

SEQ ID NO: 23107 - protein, 9 aa, Artificial Sequence
  Description of Artificial Sequence: Synthetic peptide
  Seed: STRGVQIAS
SWRGVQIAK

SEQ ID NO: 23108 - protein, 9 aa, Artificial Sequence
  Description of Artificial Sequence: Synthetic peptide
  Seed: STRGVQIAS
SWRGVQIAM

SEQ ID NO: 23109 - protein, 9 aa, Artificial Sequence
  Description of Artificial Sequence: Synthetic peptide
  Seed: STRGVQIAS
SWRGVQIAS

SEQ ID NO: 23110 - protein, 9 aa, Artificial Sequence
  Description of Artificial Sequence: Synthetic peptide
  Seed: STRGVQIAS
STRGVQIAC

SEQ ID NO: 23111 - protein, 9 aa, Artificial Sequence
  Description of Artificial Sequence: Synthetic peptide
  Seed: STRGVQIAS
STRGVQIAN

SEQ ID NO: 23112 - protein, 9 aa, Artificial Sequence
  Description of Artificial Sequence: Synthetic peptide
  Seed: STRGVQIAS
STRGVQIAR

SEQ ID NO: 23113 - protein, 9 aa, Artificial Sequence
  Description of Artificial Sequence: Synthetic peptide
  Seed: STRGVQIAS
STRGVQIAA

SEQ ID NO: 23114 - protein, 9 aa, Artificial Sequence
  Description of Artificial Sequence: Synthetic peptide
  Seed: STRGVQIAS
SFRGVQIAV

SEQ ID NO: 23115 - protein, 9 aa, Artificial Sequence
  Description of Artificial Sequence: Synthetic peptide
  Seed: STRGVQIAS
SSRGVQIAA

SEQ ID NO: 23116 - protein, 9 aa, Artificial Sequence
  Description of Artificial Sequence: Synthetic peptide
  Seed: STRGVQIAS
SSRGVQIAR

SEQ ID NO: 23117 - protein, 9 aa, Artificial Sequence
  Description of Artificial Sequence: Synthetic peptide
  Seed: STRGVQIAS
SSRGVQIAN

SEQ ID NO: 23118 - protein, 9 aa, Artificial Sequence
  Description of Artificial Sequence: Synthetic peptide
  Seed: STRGVQIAS
SSRGVQIAC

SEQ ID NO: 23119 - protein, 9 aa, Artificial Sequence
  Description of Artificial Sequence: Synthetic peptide
  Seed: STRGVQIAS
SSRGVQIAQ

SEQ ID NO: 23120 - protein, 9 aa, Artificial Sequence
  Description of Artificial Sequence: Synthetic peptide
  Seed: STRGVQIAS
SSRGVQIAE

SEQ ID NO: 23121 - protein, 9 aa, Artificial Sequence
  Description of Artificial Sequence: Synthetic peptide
  Seed: STRGVQIAS
SSRGVQIAG

SEQ ID NO: 23122 - protein, 9 aa, Artificial Sequence
  Description of Artificial Sequence: Synthetic peptide
  Seed: STRGVQIAS
SSRGVQIAH

SEQ ID NO: 23123 - protein, 9 aa, Artificial Sequence
  Description of Artificial Sequence: Synthetic peptide
  Seed: STRGVQIAS
SSRGVQIAI

SEQ ID NO: 23124 - protein, 9 aa, Artificial Sequence
  Description of Artificial Sequence: Synthetic peptide
  Seed: STRGVQIAS
SSRGVQIAL

SEQ ID NO: 23125 - protein, 9 aa, Artificial Sequence
  Description of Artificial Sequence: Synthetic peptide
  Seed: STRGVQIAS
SSRGVQIAK

SEQ ID NO: 23126 - protein, 9 aa, Artificial Sequence
  Description of Artificial Sequence: Synthetic peptide
  Seed: STRGVQIAS
SSRGVQIAM

SEQ ID NO: 23127 - protein, 9 aa, Artificial Sequence
  Description of Artificial Sequence: Synthetic peptide
  Seed: STRGVQIAS
SSRGVQIAF

SEQ ID NO: 23128 - protein, 9 aa, Artificial Sequence
  Description of Artificial Sequence: Synthetic peptide
  Seed: STRGVQIAS
SSRGVQIAP

SEQ ID NO: 23129 - protein, 9 aa, Artificial Sequence
  Description of Artificial Sequence: Synthetic peptide
  Seed: STRGVQIAS
SSRGVQIAS

SEQ ID NO: 23130 - protein, 9 aa, Artificial Sequence
  Description of Artificial Sequence: Synthetic peptide
  Seed: STRGVQIAS
SSRGVQIAT

SEQ ID NO: 23131 - protein, 9 aa, Artificial Sequence
  Description of Artificial Sequence: Synthetic peptide
  Seed: STRGVQIAS
SSRGVQIAY

SEQ ID NO: 23132 - protein, 9 aa, Artificial Sequence
  Description of Artificial Sequence: Synthetic peptide
  Seed: STRGVQIAS
SSRGVQIAV

SEQ ID NO: 23133 - protein, 9 aa, Artificial Sequence
  Description of Artificial Sequence: Synthetic peptide
  Seed: STRGVQIAS
SGRGVQIAM

SEQ ID NO: 23134 - protein, 9 aa, Artificial Sequence
  Description of Artificial Sequence: Synthetic peptide
  Seed: STRGVQIAS
SGRGVQIAL

SEQ ID NO: 23135 - protein, 11 aa, Artificial Sequence
  Description of Artificial Sequence: Synthetic peptide
  Seed: SVQPTFSVQRN
SMQPTFSVQRW

SEQ ID NO: 23136 - protein, 11 aa, Artificial Sequence
  Description of Artificial Sequence: Synthetic peptide
  Seed: STLPRRSGAAG
SWLPRRSGAAW

SEQ ID NO: 23137 - protein, 11 aa, Artificial Sequence
  Description of Artificial Sequence: Synthetic peptide
  Seed: STLPRRSGAAG
SWLPRRSGAAC

SEQ ID NO: 23138 - protein, 11 aa, Artificial Sequence
  Description of Artificial Sequence: Synthetic peptide
  Seed: STLPRRSGAAG
SWLPRRSGAAG

SEQ ID NO: 23139 - protein, 11 aa, Artificial Sequence
  Description of Artificial Sequence: Synthetic peptide
  Seed: STLPRRSGAAG
SWLPRRSGAAI

SEQ ID NO: 23140 - protein, 11 aa, Artificial Sequence
  Description of Artificial Sequence: Synthetic peptide
  Seed: STLPRRSGAAG
SWLPRRSGAAL

SEQ ID NO: 23141 - protein, 11 aa, Artificial Sequence
  Description of Artificial Sequence: Synthetic peptide
  Seed: STLPRRSGAAG
SWLPRRSGAAM

SEQ ID NO: 23142 - protein, 11 aa, Artificial Sequence
  Description of Artificial Sequence: Synthetic peptide
  Seed: STLPRRSGAAG
SWLPRRSGAAF

SEQ ID NO: 23143 - protein, 11 aa, Artificial Sequence
  Description of Artificial Sequence: Synthetic peptide
  Seed: STLPRRSGAAG
SWLPRRSGAAP

SEQ ID NO: 23144 - protein, 11 aa, Artificial Sequence
  Description of Artificial Sequence: Synthetic peptide
  Seed: STLPRRSGAAG
SWLPRRSGAAS

SEQ ID NO: 23145 - protein, 11 aa, Artificial Sequence
  Description of Artificial Sequence: Synthetic peptide
  Seed: STLPRRSGAAG
SWLPRRSGAAT

SEQ ID NO: 23146 - protein, 11 aa, Artificial Sequence
  Description of Artificial Sequence: Synthetic peptide
  Seed: STLPRRSGAAG
SWLPRRSGAAY

SEQ ID NO: 23147 - protein, 11 aa, Artificial Sequence
  Description of Artificial Sequence: Synthetic peptide
  Seed: STLPRRSGAAG
SYLPRRSGAAT

SEQ ID NO: 23148 - protein, 11 aa, Artificial Sequence
  Description of Artificial Sequence: Synthetic peptide
  Seed: STLPRRSGAAG
SWLPRRSGAAV

SEQ ID NO: 23149 - protein, 11 aa, Artificial Sequence
  Description of Artificial Sequence: Synthetic peptide
  Seed: STLPRRSGAAG
SYLPRRSGAAA

SEQ ID NO: 23150 - protein, 11 aa, Artificial Sequence
  Description of Artificial Sequence: Synthetic peptide
  Seed: STLPRRSGAAG
SYLPRRSGAAC

SEQ ID NO: 23151 - protein, 11 aa, Artificial Sequence
  Description of Artificial Sequence: Synthetic peptide
  Seed: STLPRRSGAAG
SYLPRRSGAAG

SEQ ID NO: 23152 - protein, 11 aa, Artificial Sequence
  Description of Artificial Sequence: Synthetic peptide
  Seed: STLPRRSGAAG
SYLPRRSGAAI

SEQ ID NO: 23153 - protein, 11 aa, Artificial Sequence
  Description of Artificial Sequence: Synthetic peptide
  Seed: STLPRRSGAAG
SYLPRRSGAAL

SEQ ID NO: 23154 - protein, 11 aa, Artificial Sequence
  Description of Artificial Sequence: Synthetic peptide
  Seed: STLPRRSGAAG
SYLPRRSGAAM

SEQ ID NO: 23155 - protein, 11 aa, Artificial Sequence
  Description of Artificial Sequence: Synthetic peptide
  Seed: STLPRRSGAAG
SYLPRRSGAAF

SEQ ID NO: 23156 - protein, 11 aa, Artificial Sequence
  Description of Artificial Sequence: Synthetic peptide
  Seed: STLPRRSGAAG
SYLPRRSGAAP

SEQ ID NO: 23157 - protein, 11 aa, Artificial Sequence
  Description of Artificial Sequence: Synthetic peptide
  Seed: STLPRRSGAAG
SWLPRRSGAAA

SEQ ID NO: 23158 - protein, 11 aa, Artificial Sequence
  Description of Artificial Sequence: Synthetic peptide
  Seed: STLPRRSGAAG
STLPRRSGAAV

SEQ ID NO: 23159 - protein, 11 aa, Artificial Sequence
  Description of Artificial Sequence: Synthetic peptide
  Seed: STLPRRSGAAG
STLPRRSGAAY

SEQ ID NO: 23160 - protein, 11 aa, Artificial Sequence
  Description of Artificial Sequence: Synthetic peptide
  Seed: STLPRRSGAAG
STLPRRSGAAW

SEQ ID NO: 23161 - protein, 11 aa, Artificial Sequence
  Description of Artificial Sequence: Synthetic peptide
  Seed: STLPRRSGAAG
SSLPRRSGAAI

SEQ ID NO: 23162 - protein, 11 aa, Artificial Sequence
  Description of Artificial Sequence: Synthetic peptide
  Seed: STLPRRSGAAG
SSLPRRSGAAL

SEQ ID NO: 23163 - protein, 11 aa, Artificial Sequence
  Description of Artificial Sequence: Synthetic peptide
  Seed: STLPRRSGAAG
SSLPRRSGAAM

SEQ ID NO: 23164 - protein, 11 aa, Artificial Sequence
  Description of Artificial Sequence: Synthetic peptide
  Seed: STLPRRSGAAG
SSLPRRSGAAF

SEQ ID NO: 23165 - protein, 11 aa, Artificial Sequence
  Description of Artificial Sequence: Synthetic peptide
  Seed: STLPRRSGAAG
SSLPRRSGAAP

SEQ ID NO: 23166 - protein, 11 aa, Artificial Sequence
  Description of Artificial Sequence: Synthetic peptide
  Seed: STLPRRSGAAG
SSLPRRSGAAS

SEQ ID NO: 23167 - protein, 11 aa, Artificial Sequence
  Description of Artificial Sequence: Synthetic peptide
  Seed: STLPRRSGAAG
SSLPRRSGAAT

SEQ ID NO: 23168 - protein, 11 aa, Artificial Sequence
  Description of Artificial Sequence: Synthetic peptide
  Seed: STLPRRSGAAG
SSLPRRSGAAW

SEQ ID NO: 23169 - protein, 11 aa, Artificial Sequence
  Description of Artificial Sequence: Synthetic peptide
  Seed: STLPRRSGAAG
SSLPRRSGAAY

SEQ ID NO: 23170 - protein, 11 aa, Artificial Sequence
  Description of Artificial Sequence: Synthetic peptide
  Seed: STLPRRSGAAG
SSLPRRSGAAV

SEQ ID NO: 23171 - protein, 11 aa, Artificial Sequence
  Description of Artificial Sequence: Synthetic peptide
  Seed: STLPRRSGAAG
STLPRRSGAAA

SEQ ID NO: 23172 - protein, 11 aa, Artificial Sequence
  Description of Artificial Sequence: Synthetic peptide
  Seed: STLPRRSGAAG
STLPRRSGAAC

SEQ ID NO: 23173 - protein, 11 aa, Artificial Sequence
  Description of Artificial Sequence: Synthetic peptide
  Seed: STLPRRSGAAG
STLPRRSGAAI

SEQ ID NO: 23174 - protein, 11 aa, Artificial Sequence
  Description of Artificial Sequence: Synthetic peptide
  Seed: STLPRRSGAAG
STLPRRSGAAL

SEQ ID NO: 23175 - protein, 11 aa, Artificial Sequence
  Description of Artificial Sequence: Synthetic peptide
  Seed: STLPRRSGAAG
STLPRRSGAAM

SEQ ID NO: 23176 - protein, 11 aa, Artificial Sequence
  Description of Artificial Sequence: Synthetic peptide
  Seed: STLPRRSGAAG
STLPRRSGAAF

SEQ ID NO: 23177 - protein, 11 aa, Artificial Sequence
  Description of Artificial Sequence: Synthetic peptide
  Seed: STLPRRSGAAG
STLPRRSGAAP

SEQ ID NO: 23178 - protein, 11 aa, Artificial Sequence
  Description of Artificial Sequence: Synthetic peptide
  Seed: STLPRRSGAAG
STLPRRSGAAS

SEQ ID NO: 23179 - protein, 11 aa, Artificial Sequence
  Description of Artificial Sequence: Synthetic peptide
  Seed: STLPRRSGAAG
STLPRRSGAAT

SEQ ID NO: 23180 - protein, 11 aa, Artificial Sequence
  Description of Artificial Sequence: Synthetic peptide
  Seed: STLPRRSGAAG
SYLPRRSGAAS

SEQ ID NO: 23181 - protein, 11 aa, Artificial Sequence
  Description of Artificial Sequence: Synthetic peptide
  Seed: STLPRRSGAAG
SYLPRRSGAAW

SEQ ID NO: 23182 - protein, 9 aa, Artificial Sequence
  Description of Artificial Sequence: Synthetic peptide
  Seed: STRGVQIAS
SGRGVQIAI

SEQ ID NO: 23183 - protein, 9 aa, Artificial Sequence
  Description of Artificial Sequence: Synthetic peptide
  Seed: STRGVQIAS
SQRGVQIAR

SEQ ID NO: 23184 - protein, 9 aa, Artificial Sequence
  Description of Artificial Sequence: Synthetic peptide
  Seed: STRGVQIAS
SARGVQIAY

SEQ ID NO: 23185 - protein, 9 aa, Artificial Sequence
  Description of Artificial Sequence: Synthetic peptide
  Seed: STRGVQIAS
SARGVQIAV

SEQ ID NO: 23186 - protein, 9 aa, Artificial Sequence
  Description of Artificial Sequence: Synthetic peptide
  Seed: STRGVQIAS
SRRGVQIAK

SEQ ID NO: 23187 - protein, 9 aa, Artificial Sequence
  Description of Artificial Sequence: Synthetic peptide
  Seed: STRGVQIAS
SNRGVQIAA

SEQ ID NO: 23188 - protein, 9 aa, Artificial Sequence
  Description of Artificial Sequence: Synthetic peptide
  Seed: STRGVQIAS
SNRGVQIAI

SEQ ID NO: 23189 - protein, 9 aa, Artificial Sequence
  Description of Artificial Sequence: Synthetic peptide
  Seed: STRGVQIAS
SNRGVQIAK

SEQ ID NO: 23190 - protein, 9 aa, Artificial Sequence
  Description of Artificial Sequence: Synthetic peptide
  Seed: STRGVQIAS
SNRGVQIAV

SEQ ID NO: 23191 - protein, 9 aa, Artificial Sequence
  Description of Artificial Sequence: Synthetic peptide
  Seed: STRGVQIAS
SCRGVQIAK

SEQ ID NO: 23192 - protein, 9 aa, Artificial Sequence
  Description of Artificial Sequence: Synthetic peptide
  Seed: STRGVQIAS
SQRGVQIAA

SEQ ID NO: 23193 - protein, 9 aa, Artificial Sequence
  Description of Artificial Sequence: Synthetic peptide
  Seed: STRGVQIAS
SQRGVQIAG

SEQ ID NO: 23194 - protein, 11 aa, Artificial Sequence
  Description of Artificial Sequence: Synthetic peptide
  Seed: STLPRRSGAAG
SYLPRRSGAAY

SEQ ID NO: 23195 - protein, 9 aa, Artificial Sequence
  Description of Artificial Sequence: Synthetic peptide
  Seed: STRGVQIAS
SQRGVQIAI

SEQ ID NO: 23196 - protein, 9 aa, Artificial Sequence
  Description of Artificial Sequence: Synthetic peptide
  Seed: STRGVQIAS
SQRGVQIAL

SEQ ID NO: 23197 - protein, 9 aa, Artificial Sequence
  Description of Artificial Sequence: Synthetic peptide
  Seed: STRGVQIAS
SQRGVQIAK

SEQ ID NO: 23198 - protein, 9 aa, Artificial Sequence
  Description of Artificial Sequence: Synthetic peptide
  Seed: STRGVQIAS
SQRGVQIAM

SEQ ID NO: 23199 - protein, 9 aa, Artificial Sequence
  Description of Artificial Sequence: Synthetic peptide
  Seed: STRGVQIAS
SQRGVQIAS

SEQ ID NO: 23200 - protein, 9 aa, Artificial Sequence
  Description of Artificial Sequence: Synthetic peptide
  Seed: STRGVQIAS
SQRGVQIAY

SEQ ID NO: 23201 - protein, 9 aa, Artificial Sequence
  Description of Artificial Sequence: Synthetic peptide
  Seed: STRGVQIAS
SQRGVQIAV

SEQ ID NO: 23202 - protein, 9 aa, Artificial Sequence
  Description of Artificial Sequence: Synthetic peptide
  Seed: STRGVQIAS
SGRGVQIAA

SEQ ID NO: 23203 - protein, 9 aa, Artificial Sequence
  Description of Artificial Sequence: Synthetic peptide
  Seed: STRGVQIAS
SGRGVQIAR

SEQ ID NO: 23204 - protein, 9 aa, Artificial Sequence
  Description of Artificial Sequence: Synthetic peptide
  Seed: STRGVQIAS
SARGVQIAT

SEQ ID NO: 23205 - protein, 9 aa, Artificial Sequence
  Description of Artificial Sequence: Synthetic peptide
  Seed: STRGVQIAS
SARGVQIAS

SEQ ID NO: 23206 - protein, 9 aa, Artificial Sequence
  Description of Artificial Sequence: Synthetic peptide
  Seed: STRGVQIAS
SARGVQIAM

SEQ ID NO: 23207 - protein, 9 aa, Artificial Sequence
  Description of Artificial Sequence: Synthetic peptide
  Seed: STRGVQIAS
SARGVQIAK

SEQ ID NO: 23208 - protein, 11 aa, Artificial Sequence
  Description of Artificial Sequence: Synthetic peptide
  Seed: STLPRRSGAAG
SYLPRRSGAAV

SEQ ID NO: 23209 - protein, 11 aa, Artificial Sequence
  Description of Artificial Sequence: Synthetic peptide
  Seed: STLPRRSGAAG
SVLPRRSGAAA

SEQ ID NO: 23210 - protein, 11 aa, Artificial Sequence
  Description of Artificial Sequence: Synthetic peptide
  Seed: STLPRRSGAAG
SVLPRRSGAAC

SEQ ID NO: 23211 - protein, 11 aa, Artificial Sequence
  Description of Artificial Sequence: Synthetic peptide
  Seed: STLPRRSGAAG
SVLPRRSGAAG

SEQ ID NO: 23212 - protein, 11 aa, Artificial Sequence
  Description of Artificial Sequence: Synthetic peptide
  Seed: STLPRRSGAAG
SVLPRRSGAAI

SEQ ID NO: 23213 - protein, 11 aa, Artificial Sequence
  Description of Artificial Sequence: Synthetic peptide
  Seed: STLPRRSGAAG
SVLPRRSGAAL

SEQ ID NO: 23214 - protein, 11 aa, Artificial Sequence
  Description of Artificial Sequence: Synthetic peptide
  Seed: STLPRRSGAAG
SVLPRRSGAAM

SEQ ID NO: 23215 - protein, 11 aa, Artificial Sequence
  Description of Artificial Sequence: Synthetic peptide
  Seed: STLPRRSGAAG
SVLPRRSGAAF

SEQ ID NO: 23216 - protein, 11 aa, Artificial Sequence
  Description of Artificial Sequence: Synthetic peptide
  Seed: STLPRRSGAAG
SVLPRRSGAAP

SEQ ID NO: 23217 - protein, 11 aa, Artificial Sequence
  Description of Artificial Sequence: Synthetic peptide
  Seed: STLPRRSGAAG
SVLPRRSGAAS

SEQ ID NO: 23218 - protein, 11 aa, Artificial Sequence
  Description of Artificial Sequence: Synthetic peptide
  Seed: STLPRRSGAAG
SVLPRRSGAAT

SEQ ID NO: 23219 - protein, 11 aa, Artificial Sequence
  Description of Artificial Sequence: Synthetic peptide
  Seed: STLPRRSGAAG
SVLPRRSGAAW

SEQ ID NO: 23220 - protein, 11 aa, Artificial Sequence
  Description of Artificial Sequence: Synthetic peptide
  Seed: STLPRRSGAAG
SVLPRRSGAAY

SEQ ID NO: 23221 - protein, 11 aa, Artificial Sequence
  Description of Artificial Sequence: Synthetic peptide
  Seed: STLPRRSGAAG
SVLPRRSGAAV

SEQ ID NO: 23222 - protein, 9 aa, Artificial Sequence
  Description of Artificial Sequence: Synthetic peptide
  Seed: STRGVQIAS
SARGVQIAA

SEQ ID NO: 23223 - protein, 9 aa, Artificial Sequence
  Description of Artificial Sequence: Synthetic peptide
  Seed: STRGVQIAS
SARGVQIAR

SEQ ID NO: 23224 - protein, 9 aa, Artificial Sequence
  Description of Artificial Sequence: Synthetic peptide
  Seed: STRGVQIAS
SARGVQIAG

SEQ ID NO: 23225 - protein, 9 aa, Artificial Sequence
  Description of Artificial Sequence: Synthetic peptide
  Seed: STRGVQIAS
SARGVQIAI

SEQ ID NO: 23226 - protein, 9 aa, Artificial Sequence
  Description of Artificial Sequence: Synthetic peptide
  Seed: STRGVQIAS
SARGVQIAL

SEQ ID NO: 23227 - protein, 9 aa, Artificial Sequence
  Description of Artificial Sequence: Synthetic peptide
  Seed: STRGVQIAS
SWRGVQIAV

SEQ ID NO: 23228 - protein, 9 aa, Artificial Sequence
  Description of Artificial Sequence: Synthetic peptide
  Seed: STRGVQIAS
SYRGVQIAA

SEQ ID NO: 23229 - protein, 9 aa, Artificial Sequence
  Description of Artificial Sequence: Synthetic peptide
  Seed: STRGVQIAS
SYRGVQIAR

SEQ ID NO: 23230 - protein, 10 aa, Artificial Sequence
  Description of Artificial Sequence: Synthetic peptide
  Seed: SVQPTFSVQR
SCQPTFSVQK

SEQ ID NO: 23231 - protein, 10 aa, Artificial Sequence
  Description of Artificial Sequence: Synthetic peptide
  Seed: SVQPTFSVQR
SAQPTFSVQR

SEQ ID NO: 23232 - protein, 10 aa, Artificial Sequence
  Description of Artificial Sequence: Synthetic peptide
  Seed: SVQPTFSVQR
SAQPTFSVQK

SEQ ID NO: 23233 - protein, 10 aa, Artificial Sequence
  Description of Artificial Sequence: Synthetic peptide
  Seed: SVQPTFSVQR
SRQPTFSVQR

SEQ ID NO: 23234 - protein, 10 aa, Artificial Sequence
  Description of Artificial Sequence: Synthetic peptide
  Seed: SVQPTFSVQR
SRQPTFSVQK

SEQ ID NO: 23235 - protein, 10 aa, Artificial Sequence
  Description of Artificial Sequence: Synthetic peptide
  Seed: SVQPTFSVQR
SNQPTFSVQR

SEQ ID NO: 23236 - protein, 10 aa, Artificial Sequence
  Description of Artificial Sequence: Synthetic peptide
  Seed: SVQPTFSVQR
SNQPTFSVQK

SEQ ID NO: 23237 - protein, 10 aa, Artificial Sequence
  Description of Artificial Sequence: Synthetic peptide
  Seed: SVQPTFSVQR
SDQPTFSVQR

SEQ ID NO: 23238 - protein, 10 aa, Artificial Sequence
  Description of Artificial Sequence: Synthetic peptide
  Seed: SVQPTFSVQR
SDQPTFSVQK

SEQ ID NO: 23239 - protein, 10 aa, Artificial Sequence
  Description of Artificial Sequence: Synthetic peptide
  Seed: SVQPTFSVQR
SCQPTFSVQR

SEQ ID NO: 23240 - protein, 10 aa, Artificial Sequence
  Description of Artificial Sequence: Synthetic peptide
  Seed: SVQPTFSVQR
SQQPTFSVQR

SEQ ID NO: 23241 - protein, 10 aa, Artificial Sequence
  Description of Artificial Sequence: Synthetic peptide
  Seed: SVQPTFSVQR
SLQPTFSVQR

SEQ ID NO: 23242 - protein, 10 aa, Artificial Sequence
  Description of Artificial Sequence: Synthetic peptide
  Seed: SVQPTFSVQR
SQQPTFSVQK

SEQ ID NO: 23243 - protein, 10 aa, Artificial Sequence
  Description of Artificial Sequence: Synthetic peptide
  Seed: SVQPTFSVQR
SEQPTFSVQR

SEQ ID NO: 23244 - protein, 10 aa, Artificial Sequence
  Description of Artificial Sequence: Synthetic peptide
  Seed: SVQPTFSVQR
SEQPTFSVQK

SEQ ID NO: 23245 - protein, 10 aa, Artificial Sequence
  Description of Artificial Sequence: Synthetic peptide
  Seed: SVQPTFSVQR
SGQPTFSVQR

SEQ ID NO: 23246 - protein, 10 aa, Artificial Sequence
  Description of Artificial Sequence: Synthetic peptide
  Seed: SVQPTFSVQR
SGQPTFSVQK

SEQ ID NO: 23247 - protein, 10 aa, Artificial Sequence
  Description of Artificial Sequence: Synthetic peptide
  Seed: SVQPTFSVQR
SHQPTFSVQR

SEQ ID NO: 23248 - protein, 10 aa, Artificial Sequence
  Description of Artificial Sequence: Synthetic peptide
  Seed: SVQPTFSVQR
SHQPTFSVQK

SEQ ID NO: 23249 - protein, 10 aa, Artificial Sequence
  Description of Artificial Sequence: Synthetic peptide
  Seed: SVQPTFSVQR
SIQPTFSVQK

SEQ ID NO: 23250 - protein, 11 aa, Artificial Sequence
  Description of Artificial Sequence: Synthetic peptide
  Seed: SVGRMVGGIGR
SYGRMVGGIGR

SEQ ID NO: 23251 - protein, 11 aa, Artificial Sequence
  Description of Artificial Sequence: Synthetic peptide
  Seed: SVGRMVGGIGR
SWGRMVGGIGR

SEQ ID NO: 23252 - protein, 11 aa, Artificial Sequence
  Description of Artificial Sequence: Synthetic peptide
  Seed: SVGRMVGGIGR
STGRMVGGIGR

SEQ ID NO: 23253 - protein, 11 aa, Artificial Sequence
  Description of Artificial Sequence: Synthetic peptide
  Seed: SVGRMVGGIGR
SSGRMVGGIGR

SEQ ID NO: 23254 - protein, 11 aa, Artificial Sequence
  Description of Artificial Sequence: Synthetic peptide
  Seed: SVGKMIDGIGR
SMGKMIDGIGR

SEQ ID NO: 23255 - protein, 11 aa, Artificial Sequence
  Description of Artificial Sequence: Synthetic peptide
  Seed: SVGKMIDGIGR
SFGKMIDGIGR

SEQ ID NO: 23256 - protein, 11 aa, Artificial Sequence
  Description of Artificial Sequence: Synthetic peptide
  Seed: SVGKMIDGIGR
STGKMIDGIGR

SEQ ID NO: 23257 - protein, 11 aa, Artificial Sequence
  Description of Artificial Sequence: Synthetic peptide
  Seed: SVGKMIDGIGR
SYGKMIDGIGR

SEQ ID NO: 23258 - protein, 11 aa, Artificial Sequence
  Description of Artificial Sequence: Synthetic peptide
  Seed: SVGRMIGGIGR
SAGRMIGGIGR

SEQ ID NO: 23259 - protein, 11 aa, Artificial Sequence
  Description of Artificial Sequence: Synthetic peptide
  Seed: SVGRMIGGIGR
SQGRMIGGIGR

SEQ ID NO: 23260 - protein, 11 aa, Artificial Sequence
  Description of Artificial Sequence: Synthetic peptide
  Seed: SVGRMIGGIGR
SIGRMIGGIGR

SEQ ID NO: 23261 - protein, 11 aa, Artificial Sequence
  Description of Artificial Sequence: Synthetic peptide
  Seed: SVGRMIGGIGR
SLGRMIGGIGR

SEQ ID NO: 23262 - protein, 11 aa, Artificial Sequence
  Description of Artificial Sequence: Synthetic peptide
  Seed: SVGRMIGGIGR
SMGRMIGGIGR

SEQ ID NO: 23263 - protein, 11 aa, Artificial Sequence
  Description of Artificial Sequence: Synthetic peptide
  Seed: SVGRMIGGIGR
SFGRMIGGIGR

SEQ ID NO: 23264 - protein, 11 aa, Artificial Sequence
  Description of Artificial Sequence: Synthetic peptide
  Seed: SVGRMIGGIGR
SSGRMIGGIGR

SEQ ID NO: 23265 - protein, 11 aa, Artificial Sequence
  Description of Artificial Sequence: Synthetic peptide
  Seed: SVGRMIGGIGR
STGRMIGGIGR

SEQ ID NO: 23266 - protein, 11 aa, Artificial Sequence
  Description of Artificial Sequence: Synthetic peptide
  Seed: SVGRMIGGIGR
SWGRMIGGIGR

SEQ ID NO: 23267 - protein, 11 aa, Artificial Sequence
  Description of Artificial Sequence: Synthetic peptide
  Seed: SVGRMIGGIGR
SYGRMIGGIGR

SEQ ID NO: 23268 - protein, 11 aa, Artificial Sequence
  Description of Artificial Sequence: Synthetic peptide
  Seed: SVGRMVGGIGR
SQGRMVGGIGR

SEQ ID NO: 23269 - protein, 11 aa, Artificial Sequence
  Description of Artificial Sequence: Synthetic peptide
  Seed: SVGRMVGGIGR
SIGRMVGGIGR

SEQ ID NO: 23270 - protein, 11 aa, Artificial Sequence
  Description of Artificial Sequence: Synthetic peptide
  Seed: SVGRMVGGIGR
SLGRMVGGIGR

SEQ ID NO: 23271 - protein, 11 aa, Artificial Sequence
  Description of Artificial Sequence: Synthetic peptide
  Seed: SVGRMVGGIGR
SMGRMVGGIGR

SEQ ID NO: 23272 - protein, 11 aa, Artificial Sequence
  Description of Artificial Sequence: Synthetic peptide
  Seed: SVGRMVGGIGR
SFGRMVGGIGR

SEQ ID NO: 23273 - protein, 10 aa, Artificial Sequence
  Description of Artificial Sequence: Synthetic peptide
  Seed: SVQPTFSVQR
SIQPTFSVQY

SEQ ID NO: 23274 - protein, 10 aa, Artificial Sequence
  Description of Artificial Sequence: Synthetic peptide
  Seed: SVQPTFSVQR
SLQPTFSVQK

SEQ ID NO: 23275 - protein, 9 aa, Artificial Sequence
  Description of Artificial Sequence: Synthetic peptide
  Seed: STRGVQIAS
SYRGVQIAN

SEQ ID NO: 23276 - protein, 11 aa, Artificial Sequence
  Description of Artificial Sequence: Synthetic peptide
  Seed: SVQPTFSVQRN
SMQPTFSVQRQ

SEQ ID NO: 23277 - protein, 11 aa, Artificial Sequence
  Description of Artificial Sequence: Synthetic peptide
  Seed: SVQPTFSVQRN
SIQPTFSVQRR

SEQ ID NO: 23278 - protein, 11 aa, Artificial Sequence
  Description of Artificial Sequence: Synthetic peptide
  Seed: SVQPTFSVQRN
SIQPTFSVQRK

SEQ ID NO: 23279 - protein, 11 aa, Artificial Sequence
  Description of Artificial Sequence: Synthetic peptide
  Seed: SVQPTFSVQRN
SLQPTFSVQRR

SEQ ID NO: 23280 - protein, 11 aa, Artificial Sequence
  Description of Artificial Sequence: Synthetic peptide
  Seed: SVQPTFSVQRN
SLQPTFSVQRK

SEQ ID NO: 23281 - protein, 11 aa, Artificial Sequence
  Description of Artificial Sequence: Synthetic peptide
  Seed: SVQPTFSVQRN
SMQPTFSVQRA

SEQ ID NO: 23282 - protein, 11 aa, Artificial Sequence
  Description of Artificial Sequence: Synthetic peptide
  Seed: SVQPTFSVQRN
SMQPTFSVQRR

SEQ ID NO: 23283 - protein, 11 aa, Artificial Sequence
  Description of Artificial Sequence: Synthetic peptide
  Seed: SVQPTFSVQRN
SMQPTFSVQRN

SEQ ID NO: 23284 - protein, 11 aa, Artificial Sequence
  Description of Artificial Sequence: Synthetic peptide
  Seed: SVQPTFSVQRN
SMQPTFSVQRD

SEQ ID NO: 23285 - protein, 11 aa, Artificial Sequence
  Description of Artificial Sequence: Synthetic peptide
  Seed: SVQPTFSVQRN
SMQPTFSVQRC

SEQ ID NO: 23286 - protein, 11 aa, Artificial Sequence
  Description of Artificial Sequence: Synthetic peptide
  Seed: SVQPTFSVQRN
SMQPTFSVQRE

SEQ ID NO: 23287 - protein, 10 aa, Artificial Sequence
  Description of Artificial Sequence: Synthetic peptide
  Seed: SVQPTFSVQR
SKQPTFSVQR

SEQ ID NO: 23288 - protein, 11 aa, Artificial Sequence
  Description of Artificial Sequence: Synthetic peptide
  Seed: SVQPTFSVQRN
SMQPTFSVQRG

SEQ ID NO: 23289 - protein, 11 aa, Artificial Sequence
  Description of Artificial Sequence: Synthetic peptide
  Seed: SVQPTFSVQRN
SMQPTFSVQRH

SEQ ID NO: 23290 - protein, 11 aa, Artificial Sequence
  Description of Artificial Sequence: Synthetic peptide
  Seed: SVQPTFSVQRN
SMQPTFSVQRI

SEQ ID NO: 23291 - protein, 11 aa, Artificial Sequence
  Description of Artificial Sequence: Synthetic peptide
  Seed: SVQPTFSVQRN
SMQPTFSVQRL

SEQ ID NO: 23292 - protein, 11 aa, Artificial Sequence
  Description of Artificial Sequence: Synthetic peptide
  Seed: SVQPTFSVQRN
SMQPTFSVQRK

SEQ ID NO: 23293 - protein, 11 aa, Artificial Sequence
  Description of Artificial Sequence: Synthetic peptide
  Seed: SVQPTFSVQRN
SMQPTFSVQRM

SEQ ID NO: 23294 - protein, 11 aa, Artificial Sequence
  Description of Artificial Sequence: Synthetic peptide
  Seed: SVQPTFSVQRN
SMQPTFSVQRF

SEQ ID NO: 23295 - protein, 11 aa, Artificial Sequence
  Description of Artificial Sequence: Synthetic peptide
  Seed: SVQPTFSVQRN
SMQPTFSVQRP

SEQ ID NO: 23296 - protein, 11 aa, Artificial Sequence
  Description of Artificial Sequence: Synthetic peptide
  Seed: SVQPTFSVQRN
SMQPTFSVQRS

SEQ ID NO: 23297 - protein, 11 aa, Artificial Sequence
  Description of Artificial Sequence: Synthetic peptide
  Seed: SVQPTFSVQRN
SGQPTFSVQRR

SEQ ID NO: 23298 - protein, 11 aa, Artificial Sequence
  Description of Artificial Sequence: Synthetic peptide
  Seed: SVQPTFSVQRN
SQQPTFSVQRR

SEQ ID NO: 23299 - protein, 11 aa, Artificial Sequence
  Description of Artificial Sequence: Synthetic peptide
  Seed: SVQPTFSVQRN
SAQPTFSVQRK

SEQ ID NO: 23300 - protein, 11 aa, Artificial Sequence
  Description of Artificial Sequence: Synthetic peptide
  Seed: SVQPTFSVQRN
SAQPTFSVQRR

SEQ ID NO: 23301 - protein, 10 aa, Artificial Sequence
  Description of Artificial Sequence: Synthetic peptide
  Seed: SVQPTFSVQR
SKQPTFSVQK

SEQ ID NO: 23302 - protein, 10 aa, Artificial Sequence
  Description of Artificial Sequence: Synthetic peptide
  Seed: SVQPTFSVQR
SMQPTFSVQR

SEQ ID NO: 23303 - protein, 10 aa, Artificial Sequence
  Description of Artificial Sequence: Synthetic peptide
  Seed: SVQPTFSVQR
SMQPTFSVQK

SEQ ID NO: 23304 - protein, 10 aa, Artificial Sequence
  Description of Artificial Sequence: Synthetic peptide
  Seed: SVQPTFSVQR
SMQPTFSVQY

SEQ ID NO: 23305 - protein, 10 aa, Artificial Sequence
  Description of Artificial Sequence: Synthetic peptide
  Seed: SVQPTFSVQR
SFQPTFSVQR

SEQ ID NO: 23306 - protein, 10 aa, Artificial Sequence
  Description of Artificial Sequence: Synthetic peptide
  Seed: SVQPTFSVQR
SFQPTFSVQK

SEQ ID NO: 23307 - protein, 10 aa, Artificial Sequence
  Description of Artificial Sequence: Synthetic peptide
  Seed: SVQPTFSVQR
SPQPTFSVQR

SEQ ID NO: 23308 - protein, 10 aa, Artificial Sequence
  Description of Artificial Sequence: Synthetic peptide
  Seed: SVQPTFSVQR
SPQPTFSVQK

SEQ ID NO: 23309 - protein, 10 aa, Artificial Sequence
  Description of Artificial Sequence: Synthetic peptide
  Seed: SVQPTFSVQR
SSQPTFSVQR

SEQ ID NO: 23310 - protein, 10 aa, Artificial Sequence
  Description of Artificial Sequence: Synthetic peptide
  Seed: SVQPTFSVQR
SSQPTFSVQK

SEQ ID NO: 23311 - protein, 10 aa, Artificial Sequence
  Description of Artificial Sequence: Synthetic peptide
  Seed: SVQPTFSVQR
STQPTFSVQK

SEQ ID NO: 23312 - protein, 10 aa, Artificial Sequence
  Description of Artificial Sequence: Synthetic peptide
  Seed: SVQPTFSVQR
STQPTFSVQY

SEQ ID NO: 23313 - protein, 10 aa, Artificial Sequence
  Description of Artificial Sequence: Synthetic peptide
  Seed: SVQPTFSVQR
SWQPTFSVQR

SEQ ID NO: 23314 - protein, 10 aa, Artificial Sequence
  Description of Artificial Sequence: Synthetic peptide
  Seed: SVQPTFSVQR
SWQPTFSVQK

SEQ ID NO: 23315 - protein, 10 aa, Artificial Sequence
  Description of Artificial Sequence: Synthetic peptide
  Seed: SVQPTFSVQR
SYQPTFSVQR

SEQ ID NO: 23316 - protein, 10 aa, Artificial Sequence
  Description of Artificial Sequence: Synthetic peptide
  Seed: SVQPTFSVQR
SYQPTFSVQK

SEQ ID NO: 23317 - protein, 10 aa, Artificial Sequence
  Description of Artificial Sequence: Synthetic peptide
  Seed: SVQPTFSVQR
SVQPTFSVQK

SEQ ID NO: 23318 - protein, 10 aa, Artificial Sequence
  Description of Artificial Sequence: Synthetic peptide
  Seed: SVQPTFSVQR
SVQPTFSVQY

SEQ ID NO: 23319 - protein, 9 aa, Artificial Sequence
  Description of Artificial Sequence: Synthetic peptide
  Seed: SVGKMIDGI
SVGKMIDGV

SEQ ID NO: 23320 - protein, 9 aa, Artificial Sequence
  Description of Artificial Sequence: Synthetic peptide
  Seed: SVGKMIDGI
SVGKMIDGL

SEQ ID NO: 23321 - protein, 9 aa, Artificial Sequence
  Description of Artificial Sequence: Synthetic peptide
  Seed: SVGKMIDGI
STGKMIDGV

SEQ ID NO: 23322 - protein, 10 aa, Artificial Sequence
  Description of Artificial Sequence: Synthetic peptide
  Seed: SVAHKSCLPA
SQAHKSCLPA

SEQ ID NO: 23323 - protein, 9 aa, Artificial Sequence
  Description of Artificial Sequence: Synthetic peptide
  Seed: STRGVQIAS
SVRGVQIAT

SEQ ID NO: 23324 - protein, 9 aa, Artificial Sequence
  Description of Artificial Sequence: Synthetic peptide
  Seed: STRGVQIAS
SVRGVQIAY

SEQ ID NO: 23325 - protein, 9 aa, Artificial Sequence
  Description of Artificial Sequence: Synthetic peptide
  Seed: STRGVQIAS
SVRGVQIAV

SEQ ID NO: 23326 - protein, 10 aa, Artificial Sequence
  Description of Artificial Sequence: Synthetic peptide
  Seed: SVAHKSCLPA
SAAHKSCLPK

SEQ ID NO: 23327 - protein, 10 aa, Artificial Sequence
  Description of Artificial Sequence: Synthetic peptide
  Seed: SVAHKSCLPA
SAAHKSCLPV

SEQ ID NO: 23328 - protein, 10 aa, Artificial Sequence
  Description of Artificial Sequence: Synthetic peptide
  Seed: SVAHKSCLPA
SRAHKSCLPK

SEQ ID NO: 23329 - protein, 10 aa, Artificial Sequence
  Description of Artificial Sequence: Synthetic peptide
  Seed: SVAHKSCLPA
SNAHKSCLPK

SEQ ID NO: 23330 - protein, 10 aa, Artificial Sequence
  Description of Artificial Sequence: Synthetic peptide
  Seed: SVAHKSCLPA
SDAHKSCLPK

SEQ ID NO: 23331 - protein, 10 aa, Artificial Sequence
  Description of Artificial Sequence: Synthetic peptide
  Seed: SVAHKSCLPA
SCAHKSCLPK

SEQ ID NO: 23332 - protein, 10 aa, Artificial Sequence
  Description of Artificial Sequence: Synthetic peptide
  Seed: SVAHKSCLPA
SQAHKSCLPI

SEQ ID NO: 23333 - protein, 9 aa, Artificial Sequence
  Description of Artificial Sequence: Synthetic peptide
  Seed: SVGKMIDGI
SMGKMIDGV

SEQ ID NO: 23334 - protein, 10 aa, Artificial Sequence
  Description of Artificial Sequence: Synthetic peptide
  Seed: SVAHKSCLPA
SQAHKSCLPL

SEQ ID NO: 23335 - protein, 10 aa, Artificial Sequence
  Description of Artificial Sequence: Synthetic peptide
  Seed: SVAHKSCLPA
SQAHKSCLPK

SEQ ID NO: 23336 - protein, 10 aa, Artificial Sequence
  Description of Artificial Sequence: Synthetic peptide
  Seed: SVAHKSCLPA
SQAHKSCLPV

SEQ ID NO: 23337 - protein, 10 aa, Artificial Sequence
  Description of Artificial Sequence: Synthetic peptide
  Seed: SVAHKSCLPA
SEAHKSCLPK

SEQ ID NO: 23338 - protein, 10 aa, Artificial Sequence
  Description of Artificial Sequence: Synthetic peptide
  Seed: SVAHKSCLPA
SGAHKSCLPK

SEQ ID NO: 23339 - protein, 10 aa, Artificial Sequence
  Description of Artificial Sequence: Synthetic peptide
  Seed: SVAHKSCLPA
SHAHKSCLPK

SEQ ID NO: 23340 - protein, 10 aa, Artificial Sequence
  Description of Artificial Sequence: Synthetic peptide
  Seed: SVAHKSCLPA
SIAHKSCLPA

SEQ ID NO: 23341 - protein, 10 aa, Artificial Sequence
  Description of Artificial Sequence: Synthetic peptide
  Seed: SVAHKSCLPA
SIAHKSCLPI

SEQ ID NO: 23342 - protein, 10 aa, Artificial Sequence
  Description of Artificial Sequence: Synthetic peptide
  Seed: SVAHKSCLPA
SIAHKSCLPL

SEQ ID NO: 23343 - protein, 9 aa, Artificial Sequence
  Description of Artificial Sequence: Synthetic peptide
  Seed: STRGVQIAS
SVRGVQIAS

SEQ ID NO: 23344 - protein, 9 aa, Artificial Sequence
  Description of Artificial Sequence: Synthetic peptide
  Seed: STRGVQIAS
SVRGVQIAP

SEQ ID NO: 23345 - protein, 9 aa, Artificial Sequence
  Description of Artificial Sequence: Synthetic peptide
  Seed: STRGVQIAS
SVRGVQIAF

SEQ ID NO: 23346 - protein, 9 aa, Artificial Sequence
  Description of Artificial Sequence: Synthetic peptide
  Seed: STRGVQIAS
SVRGVQIAM

SEQ ID NO: 23347 - protein, 9 aa, Artificial Sequence
  Description of Artificial Sequence: Synthetic peptide
  Seed: STRGVQIAS
SYRGVQIAG

SEQ ID NO: 23348 - protein, 9 aa, Artificial Sequence
  Description of Artificial Sequence: Synthetic peptide
  Seed: STRGVQIAS
SYRGVQIAI

SEQ ID NO: 23349 - protein, 9 aa, Artificial Sequence
  Description of Artificial Sequence: Synthetic peptide
  Seed: STRGVQIAS
SYRGVQIAL

SEQ ID NO: 23350 - protein, 9 aa, Artificial Sequence
  Description of Artificial Sequence: Synthetic peptide
  Seed: STRGVQIAS
SYRGVQIAK

SEQ ID NO: 23351 - protein, 9 aa, Artificial Sequence
  Description of Artificial Sequence: Synthetic peptide
  Seed: STRGVQIAS
SYRGVQIAM

SEQ ID NO: 23352 - protein, 9 aa, Artificial Sequence
  Description of Artificial Sequence: Synthetic peptide
  Seed: STRGVQIAS
SYRGVQIAP

SEQ ID NO: 23353 - protein, 9 aa, Artificial Sequence
  Description of Artificial Sequence: Synthetic peptide
  Seed: STRGVQIAS
SYRGVQIAS

SEQ ID NO: 23354 - protein, 9 aa, Artificial Sequence
  Description of Artificial Sequence: Synthetic peptide
  Seed: STRGVQIAS
SYRGVQIAT

SEQ ID NO: 23355 - protein, 9 aa, Artificial Sequence
  Description of Artificial Sequence: Synthetic peptide
  Seed: STRGVQIAS
SYRGVQIAY

SEQ ID NO: 23356 - protein, 9 aa, Artificial Sequence
  Description of Artificial Sequence: Synthetic peptide
  Seed: STRGVQIAS
SYRGVQIAV

SEQ ID NO: 23357 - protein, 9 aa, Artificial Sequence
  Description of Artificial Sequence: Synthetic peptide
  Seed: STRGVQIAS
SVRGVQIAA

SEQ ID NO: 23358 - protein, 9 aa, Artificial Sequence
  Description of Artificial Sequence: Synthetic peptide
  Seed: STRGVQIAS
SVRGVQIAR

SEQ ID NO: 23359 - protein, 9 aa, Artificial Sequence
  Description of Artificial Sequence: Synthetic peptide
  Seed: STRGVQIAS
SVRGVQIAN

SEQ ID NO: 23360 - protein, 9 aa, Artificial Sequence
  Description of Artificial Sequence: Synthetic peptide
  Seed: STRGVQIAS
SVRGVQIAC

SEQ ID NO: 23361 - protein, 9 aa, Artificial Sequence
  Description of Artificial Sequence: Synthetic peptide
  Seed: STRGVQIAS
SVRGVQIAQ

SEQ ID NO: 23362 - protein, 9 aa, Artificial Sequence
  Description of Artificial Sequence: Synthetic peptide
  Seed: STRGVQIAS
SVRGVQIAG

SEQ ID NO: 23363 - protein, 9 aa, Artificial Sequence
  Description of Artificial Sequence: Synthetic peptide
  Seed: STRGVQIAS
SVRGVQIAI

SEQ ID NO: 23364 - protein, 9 aa, Artificial Sequence
  Description of Artificial Sequence: Synthetic peptide
  Seed: STRGVQIAS
SVRGVQIAL

SEQ ID NO: 23365 - protein, 9 aa, Artificial Sequence
  Description of Artificial Sequence: Synthetic peptide
  Seed: STRGVQIAS
SVRGVQIAK

SEQ ID NO: 23366 - protein, 10 aa, Artificial Sequence
  Description of Artificial Sequence: Synthetic peptide
  Seed: SVAHKSCLPA
SIAHKSCLPK

SEQ ID NO: 23367 - protein, 10 aa, Artificial Sequence
  Description of Artificial Sequence: Synthetic peptide
  Seed: SVAHKSCLPA
SIAHKSCLPV

SEQ ID NO: 23368 - protein, 10 aa, Artificial Sequence
  Description of Artificial Sequence: Synthetic peptide
  Seed: SVAHKSCLPA
SLAHKSCLPA

SEQ ID NO: 23369 - protein, 10 aa, Artificial Sequence
  Description of Artificial Sequence: Synthetic peptide
  Seed: SVAHKSCLPA
STAHKSCLPI

SEQ ID NO: 23370 - protein, 10 aa, Artificial Sequence
  Description of Artificial Sequence: Synthetic peptide
  Seed: SVAHKSCLPA
STAHKSCLPK

SEQ ID NO: 23371 - protein, 10 aa, Artificial Sequence
  Description of Artificial Sequence: Synthetic peptide
  Seed: SVAHKSCLPA
STAHKSCLPV

SEQ ID NO: 23372 - protein, 10 aa, Artificial Sequence
  Description of Artificial Sequence: Synthetic peptide
  Seed: SVAHKSCLPA
SWAHKSCLPK

SEQ ID NO: 23373 - protein, 10 aa, Artificial Sequence
  Description of Artificial Sequence: Synthetic peptide
  Seed: SVAHKSCLPA
SYAHKSCLPA

SEQ ID NO: 23374 - protein, 10 aa, Artificial Sequence
  Description of Artificial Sequence: Synthetic peptide
  Seed: SVAHKSCLPA
SYAHKSCLPK

SEQ ID NO: 23375 - protein, 10 aa, Artificial Sequence
  Description of Artificial Sequence: Synthetic peptide
  Seed: SVAHKSCLPA
SVAHKSCLPI

SEQ ID NO: 23376 - protein, 10 aa, Artificial Sequence
  Description of Artificial Sequence: Synthetic peptide
  Seed: SVAHKSCLPA
SVAHKSCLPL

SEQ ID NO: 23377 - protein, 10 aa, Artificial Sequence
  Description of Artificial Sequence: Synthetic peptide
  Seed: SVAHKSCLPA
SVAHKSCLPK

SEQ ID NO: 23378 - protein, 10 aa, Artificial Sequence
  Description of Artificial Sequence: Synthetic peptide
  Seed: SVAHKSCLPA
SVAHKSCLPV

SEQ ID NO: 23379 - protein, 9 aa, Artificial Sequence
  Description of Artificial Sequence: Synthetic peptide
  Seed: SVGKMIDGI
SQGKMIDGI

SEQ ID NO: 23380 - protein, 9 aa, Artificial Sequence
  Description of Artificial Sequence: Synthetic peptide
  Seed: SVGKMIDGI
SQGKMIDGL

SEQ ID NO: 23381 - protein, 9 aa, Artificial Sequence
  Description of Artificial Sequence: Synthetic peptide
  Seed: SVGKMIDGI
SQGKMIDGV

SEQ ID NO: 23382 - protein, 9 aa, Artificial Sequence
  Description of Artificial Sequence: Synthetic peptide
  Seed: SVGKMIDGI
SIGKMIDGL

SEQ ID NO: 23383 - protein, 9 aa, Artificial Sequence
  Description of Artificial Sequence: Synthetic peptide
  Seed: SVGKMIDGI
SIGKMIDGV

SEQ ID NO: 23384 - protein, 9 aa, Artificial Sequence
  Description of Artificial Sequence: Synthetic peptide
  Seed: SVGKMIDGI
SLGKMIDGI

SEQ ID NO: 23385 - protein, 9 aa, Artificial Sequence
  Description of Artificial Sequence: Synthetic peptide
  Seed: SVGKMIDGI
SLGKMIDGL

SEQ ID NO: 23386 - protein, 9 aa, Artificial Sequence
  Description of Artificial Sequence: Synthetic peptide
  Seed: SVGKMIDGI
SLGKMIDGV

SEQ ID NO: 23387 - protein, 9 aa, Artificial Sequence
  Description of Artificial Sequence: Synthetic peptide
  Seed: SVGKMIDGI
SMGKMIDGI

SEQ ID NO: 23388 - protein, 9 aa, Artificial Sequence
  Description of Artificial Sequence: Synthetic peptide
  Seed: SVGKMIDGI
SMGKMIDGL

SEQ ID NO: 23389 - protein, 10 aa, Artificial Sequence
  Description of Artificial Sequence: Synthetic peptide
  Seed: SVAHKSCLPA
STAHKSCLPL

SEQ ID NO: 23390 - protein, 10 aa, Artificial Sequence
  Description of Artificial Sequence: Synthetic peptide
  Seed: SVAHKSCLPA
STAHKSCLPA

SEQ ID NO: 23391 - protein, 10 aa, Artificial Sequence
  Description of Artificial Sequence: Synthetic peptide
  Seed: SVAHKSCLPA
SLAHKSCLPI

SEQ ID NO: 23392 - protein, 10 aa, Artificial Sequence
  Description of Artificial Sequence: Synthetic peptide
  Seed: SVAHKSCLPA
SSAHKSCLPV

SEQ ID NO: 23393 - protein, 10 aa, Artificial Sequence
  Description of Artificial Sequence: Synthetic peptide
  Seed: SVAHKSCLPA
SLAHKSCLPL

SEQ ID NO: 23394 - protein, 10 aa, Artificial Sequence
  Description of Artificial Sequence: Synthetic peptide
  Seed: SVAHKSCLPA
SLAHKSCLPK

SEQ ID NO: 23395 - protein, 10 aa, Artificial Sequence
  Description of Artificial Sequence: Synthetic peptide
  Seed: SVAHKSCLPA
SLAHKSCLPM

SEQ ID NO: 23396 - protein, 10 aa, Artificial Sequence
  Description of Artificial Sequence: Synthetic peptide
  Seed: SVAHKSCLPA
SLAHKSCLPS

SEQ ID NO: 23397 - protein, 10 aa, Artificial Sequence
  Description of Artificial Sequence: Synthetic peptide
  Seed: SVAHKSCLPA
SLAHKSCLPT

SEQ ID NO: 23398 - protein, 10 aa, Artificial Sequence
  Description of Artificial Sequence: Synthetic peptide
  Seed: SVAHKSCLPA
SLAHKSCLPV

SEQ ID NO: 23399 - protein, 10 aa, Artificial Sequence
  Description of Artificial Sequence: Synthetic peptide
  Seed: SVAHKSCLPA
SKAHKSCLPK

SEQ ID NO: 23400 - protein, 10 aa, Artificial Sequence
  Description of Artificial Sequence: Synthetic peptide
  Seed: SVAHKSCLPA
SMAHKSCLPA

SEQ ID NO: 23401 - protein, 10 aa, Artificial Sequence
  Description of Artificial Sequence: Synthetic peptide
  Seed: SVAHKSCLPA
SMAHKSCLPI

SEQ ID NO: 23402 - protein, 10 aa, Artificial Sequence
  Description of Artificial Sequence: Synthetic peptide
  Seed: SVAHKSCLPA
SMAHKSCLPL

SEQ ID NO: 23403 - protein, 10 aa, Artificial Sequence
  Description of Artificial Sequence: Synthetic peptide
  Seed: SVAHKSCLPA
SMAHKSCLPK

SEQ ID NO: 23404 - protein, 10 aa, Artificial Sequence
  Description of Artificial Sequence: Synthetic peptide
  Seed: SVAHKSCLPA
SMAHKSCLPM

SEQ ID NO: 23405 - protein, 10 aa, Artificial Sequence
  Description of Artificial Sequence: Synthetic peptide
  Seed: SVAHKSCLPA
SMAHKSCLPS

SEQ ID NO: 23406 - protein, 10 aa, Artificial Sequence
  Description of Artificial Sequence: Synthetic peptide
  Seed: SVAHKSCLPA
SMAHKSCLPT

SEQ ID NO: 23407 - protein, 10 aa, Artificial Sequence
  Description of Artificial Sequence: Synthetic peptide
  Seed: SVAHKSCLPA
SMAHKSCLPV

SEQ ID NO: 23408 - protein, 10 aa, Artificial Sequence
  Description of Artificial Sequence: Synthetic peptide
  Seed: SVAHKSCLPA
SFAHKSCLPK

SEQ ID NO: 23409 - protein, 10 aa, Artificial Sequence
  Description of Artificial Sequence: Synthetic peptide
  Seed: SVAHKSCLPA
SPAHKSCLPK

SEQ ID NO: 23410 - protein, 10 aa, Artificial Sequence
  Description of Artificial Sequence: Synthetic peptide
  Seed: SVAHKSCLPA
SSAHKSCLPA

SEQ ID NO: 23411 - protein, 10 aa, Artificial Sequence
  Description of Artificial Sequence: Synthetic peptide
  Seed: SVAHKSCLPA
SSAHKSCLPK

SEQ ID NO: 23412 - protein, 11 aa, Artificial Sequence
  Description of Artificial Sequence: Synthetic peptide
  Seed: STLPRRSGAAG
SSLPRRSGAAG

SEQ ID NO: 23413 - protein, 11 aa, Artificial Sequence
  Description of Artificial Sequence: Synthetic peptide
  Seed: STLPRRSGAAG
SSLPRRSGAAC

SEQ ID NO: 23414 - protein, 11 aa, Artificial Sequence
  Description of Artificial Sequence: Synthetic peptide
  Seed: STLPRRSGAAG
SSLPRRSGAAA

SEQ ID NO: 23415 - protein, 9 aa, Artificial Sequence
  Description of Artificial Sequence: Synthetic peptide
  Seed: STLPRRSGA
SGLPRRSGK

SEQ ID NO: 23416 - protein, 10 aa, Artificial Sequence
  Description of Artificial Sequence: Synthetic peptide
  Seed: STLELRSRYW
SYLELRSRYR

SEQ ID NO: 23417 - protein, 10 aa, Artificial Sequence
  Description of Artificial Sequence: Synthetic peptide
  Seed: STLELRSRYW
SYLELRSRYK

SEQ ID NO: 23418 - protein, 10 aa, Artificial Sequence
  Description of Artificial Sequence: Synthetic peptide
  Seed: STLELRSRYW
SVLELRSRYR

SEQ ID NO: 23419 - protein, 10 aa, Artificial Sequence
  Description of Artificial Sequence: Synthetic peptide
  Seed: STLELRSRYW
SVLELRSRYK

SEQ ID NO: 23420 - protein, 10 aa, Artificial Sequence
  Description of Artificial Sequence: Synthetic peptide
  Seed: STLELRSRYW
SVLELRSRYY

SEQ ID NO: 23421 - protein, 9 aa, Artificial Sequence
  Description of Artificial Sequence: Synthetic peptide
  Seed: STLPRRSGA
SALPRRSGA

SEQ ID NO: 23422 - protein, 9 aa, Artificial Sequence
  Description of Artificial Sequence: Synthetic peptide
  Seed: STLPRRSGA
SALPRRSGK

SEQ ID NO: 23423 - protein, 9 aa, Artificial Sequence
  Description of Artificial Sequence: Synthetic peptide
  Seed: STLPRRSGA
SNLPRRSGK

SEQ ID NO: 23424 - protein, 9 aa, Artificial Sequence
  Description of Artificial Sequence: Synthetic peptide
  Seed: STLPRRSGA
SQLPRRSGK

SEQ ID NO: 23425 - protein, 9 aa, Artificial Sequence
  Description of Artificial Sequence: Synthetic peptide
  Seed: STLPRRSGA
SILPRRSGA

SEQ ID NO: 23426 - protein, 9 aa, Artificial Sequence
  Description of Artificial Sequence: Synthetic peptide
  Seed: STLPRRSGA
SSLPRRSGI

SEQ ID NO: 23427 - protein, 9 aa, Artificial Sequence
  Description of Artificial Sequence: Synthetic peptide
  Seed: STLPRRSGA
SILPRRSGK

SEQ ID NO: 23428 - protein, 9 aa, Artificial Sequence
  Description of Artificial Sequence: Synthetic peptide
  Seed: STLPRRSGA
SLLPRRSGK

SEQ ID NO: 23429 - protein, 9 aa, Artificial Sequence
  Description of Artificial Sequence: Synthetic peptide
  Seed: STLPRRSGA
SMLPRRSGA

SEQ ID NO: 23430 - protein, 9 aa, Artificial Sequence
  Description of Artificial Sequence: Synthetic peptide
  Seed: STLPRRSGA
SMLPRRSGI

SEQ ID NO: 23431 - protein, 9 aa, Artificial Sequence
  Description of Artificial Sequence: Synthetic peptide
  Seed: STLPRRSGA
SMLPRRSGV

SEQ ID NO: 23432 - protein, 9 aa, Artificial Sequence
  Description of Artificial Sequence: Synthetic peptide
  Seed: STLPRRSGA
SFLPRRSGA

SEQ ID NO: 23433 - protein, 9 aa, Artificial Sequence
  Description of Artificial Sequence: Synthetic peptide
  Seed: STLPRRSGA
SFLPRRSGK

SEQ ID NO: 23434 - protein, 9 aa, Artificial Sequence
  Description of Artificial Sequence: Synthetic peptide
  Seed: STLPRRSGA
SSLPRRSGA

SEQ ID NO: 23435 - protein, 10 aa, Artificial Sequence
  Description of Artificial Sequence: Synthetic peptide
  Seed: STLELRSRYW
SWLELRSRYK

SEQ ID NO: 23436 - protein, 10 aa, Artificial Sequence
  Description of Artificial Sequence: Synthetic peptide
  Seed: STLELRSRYW
SWLELRSRYR

SEQ ID NO: 23437 - protein, 10 aa, Artificial Sequence
  Description of Artificial Sequence: Synthetic peptide
  Seed: STLELRSRYW
STLELRSRYY

SEQ ID NO: 23438 - protein, 10 aa, Artificial Sequence
  Description of Artificial Sequence: Synthetic peptide
  Seed: STLELRSRYW
STLELRSRYK

SEQ ID NO: 23439 - protein, 9 aa, Artificial Sequence
  Description of Artificial Sequence: Synthetic peptide
  Seed: STLELRSRY
SWLELRSRY

SEQ ID NO: 23440 - protein, 9 aa, Artificial Sequence
  Description of Artificial Sequence: Synthetic peptide
  Seed: STLELRSRY
SYLELRSRY

SEQ ID NO: 23441 - protein, 9 aa, Artificial Sequence
  Description of Artificial Sequence: Synthetic peptide
  Seed: STLELRSRY
SVLELRSRR

SEQ ID NO: 23442 - protein, 9 aa, Artificial Sequence
  Description of Artificial Sequence: Synthetic peptide
  Seed: STLELRSRY
SVLELRSRK

SEQ ID NO: 23443 - protein, 9 aa, Artificial Sequence
  Description of Artificial Sequence: Synthetic peptide
  Seed: STLELRSRY
SVLELRSRF

SEQ ID NO: 23444 - protein, 9 aa, Artificial Sequence
  Description of Artificial Sequence: Synthetic peptide
  Seed: STLELRSRY
SVLELRSRW

SEQ ID NO: 23445 - protein, 9 aa, Artificial Sequence
  Description of Artificial Sequence: Synthetic peptide
  Seed: STLELRSRY
SVLELRSRY

SEQ ID NO: 23446 - protein, 10 aa, Artificial Sequence
  Description of Artificial Sequence: Synthetic peptide
  Seed: STLELRSRYW
SALELRSRYF

SEQ ID NO: 23447 - protein, 10 aa, Artificial Sequence
  Description of Artificial Sequence: Synthetic peptide
  Seed: STLELRSRYW
SALELRSRYW

SEQ ID NO: 23448 - protein, 10 aa, Artificial Sequence
  Description of Artificial Sequence: Synthetic peptide
  Seed: STLELRSRYW
SALELRSRYY

SEQ ID NO: 23449 - protein, 10 aa, Artificial Sequence
  Description of Artificial Sequence: Synthetic peptide
  Seed: STLELRSRYW
SCLELRSRYW

SEQ ID NO: 23450 - protein, 10 aa, Artificial Sequence
  Description of Artificial Sequence: Synthetic peptide
  Seed: STLELRSRYW
SGLELRSRYW

SEQ ID NO: 23451 - protein, 10 aa, Artificial Sequence
  Description of Artificial Sequence: Synthetic peptide
  Seed: STLELRSRYW
SILELRSRYW

SEQ ID NO: 23452 - protein, 10 aa, Artificial Sequence
  Description of Artificial Sequence: Synthetic peptide
  Seed: STLELRSRYW
SLLELRSRYW

SEQ ID NO: 23453 - protein, 10 aa, Artificial Sequence
  Description of Artificial Sequence: Synthetic peptide
  Seed: STLELRSRYW
SMLELRSRYW

SEQ ID NO: 23454 - protein, 10 aa, Artificial Sequence
  Description of Artificial Sequence: Synthetic peptide
  Seed: STLELRSRYW
SSLELRSRYL

SEQ ID NO: 23455 - protein, 10 aa, Artificial Sequence
  Description of Artificial Sequence: Synthetic peptide
  Seed: STLELRSRYW
SSLELRSRYM

SEQ ID NO: 23456 - protein, 10 aa, Artificial Sequence
  Description of Artificial Sequence: Synthetic peptide
  Seed: STLELRSRYW
SSLELRSRYF

SEQ ID NO: 23457 - protein, 9 aa, Artificial Sequence
  Description of Artificial Sequence: Synthetic peptide
  Seed: STLPRRSGA
SSLPRRSGR

SEQ ID NO: 23458 - protein, 9 aa, Artificial Sequence
  Description of Artificial Sequence: Synthetic peptide
  Seed: STLPRRSGA
SSLPRRSGL

SEQ ID NO: 23459 - protein, 11 aa, Artificial Sequence
  Description of Artificial Sequence: Synthetic peptide
  Seed: STLPRRSGAAG
SALPRRSGAAY

SEQ ID NO: 23460 - protein, 10 aa, Artificial Sequence
  Description of Artificial Sequence: Synthetic peptide
  Seed: STLPRRSGAA
SVLPRRSGAK

SEQ ID NO: 23461 - protein, 10 aa, Artificial Sequence
  Description of Artificial Sequence: Synthetic peptide
  Seed: STLPRRSGAA
SILPRRSGAK

SEQ ID NO: 23462 - protein, 10 aa, Artificial Sequence
  Description of Artificial Sequence: Synthetic peptide
  Seed: STLPRRSGAA
SLLPRRSGAK

SEQ ID NO: 23463 - protein, 10 aa, Artificial Sequence
  Description of Artificial Sequence: Synthetic peptide
  Seed: STLPRRSGAA
SMLPRRSGAK

SEQ ID NO: 23464 - protein, 10 aa, Artificial Sequence
  Description of Artificial Sequence: Synthetic peptide
  Seed: STLPRRSGAA
SFLPRRSGAK

SEQ ID NO: 23465 - protein, 10 aa, Artificial Sequence
  Description of Artificial Sequence: Synthetic peptide
  Seed: STLPRRSGAA
SSLPRRSGAA

SEQ ID NO: 23466 - protein, 10 aa, Artificial Sequence
  Description of Artificial Sequence: Synthetic peptide
  Seed: STLPRRSGAA
SSLPRRSGAK

SEQ ID NO: 23467 - protein, 10 aa, Artificial Sequence
  Description of Artificial Sequence: Synthetic peptide
  Seed: STLPRRSGAA
STLPRRSGAK

SEQ ID NO: 23468 - protein, 10 aa, Artificial Sequence
  Description of Artificial Sequence: Synthetic peptide
  Seed: STLPRRSGAA
STLPRRSGAV

SEQ ID NO: 23469 - protein, 10 aa, Artificial Sequence
  Description of Artificial Sequence: Synthetic peptide
  Seed: STLPRRSGAA
SYLPRRSGAK

SEQ ID NO: 23470 - protein, 11 aa, Artificial Sequence
  Description of Artificial Sequence: Synthetic peptide
  Seed: STLPRRSGAAG
SALPRRSGAAA

SEQ ID NO: 23471 - protein, 11 aa, Artificial Sequence
  Description of Artificial Sequence: Synthetic peptide
  Seed: STLPRRSGAAG
SALPRRSGAAC

SEQ ID NO: 23472 - protein, 11 aa, Artificial Sequence
  Description of Artificial Sequence: Synthetic peptide
  Seed: STLPRRSGAAG
SALPRRSGAAG

SEQ ID NO: 23473 - protein, 11 aa, Artificial Sequence
  Description of Artificial Sequence: Synthetic peptide
  Seed: STLPRRSGAAG
SALPRRSGAAI

SEQ ID NO: 23474 - protein, 11 aa, Artificial Sequence
  Description of Artificial Sequence: Synthetic peptide
  Seed: STLPRRSGAAG
SALPRRSGAAL

SEQ ID NO: 23475 - protein, 11 aa, Artificial Sequence
  Description of Artificial Sequence: Synthetic peptide
  Seed: STLPRRSGAAG
SALPRRSGAAM

SEQ ID NO: 23476 - protein, 11 aa, Artificial Sequence
  Description of Artificial Sequence: Synthetic peptide
  Seed: STLPRRSGAAG
SALPRRSGAAF

SEQ ID NO: 23477 - protein, 11 aa, Artificial Sequence
  Description of Artificial Sequence: Synthetic peptide
  Seed: STLPRRSGAAG
SALPRRSGAAP

SEQ ID NO: 23478 - protein, 11 aa, Artificial Sequence
  Description of Artificial Sequence: Synthetic peptide
  Seed: STLPRRSGAAG
SALPRRSGAAS

SEQ ID NO: 23479 - protein, 11 aa, Artificial Sequence
  Description of Artificial Sequence: Synthetic peptide
  Seed: STLPRRSGAAG
SALPRRSGAAT

SEQ ID NO: 23480 - protein, 10 aa, Artificial Sequence
  Description of Artificial Sequence: Synthetic peptide
  Seed: STLPRRSGAA
SQLPRRSGAK

SEQ ID NO: 23481 - protein, 10 aa, Artificial Sequence
  Description of Artificial Sequence: Synthetic peptide
  Seed: STLPRRSGAA
SALPRRSGAK

SEQ ID NO: 23482 - protein, 9 aa, Artificial Sequence
  Description of Artificial Sequence: Synthetic peptide
  Seed: STLPRRSGA
SVLPRRSGV

SEQ ID NO: 23483 - protein, 9 aa, Artificial Sequence
  Description of Artificial Sequence: Synthetic peptide
  Seed: STLPRRSGA
SSLPRRSGM

SEQ ID NO: 23484 - protein, 9 aa, Artificial Sequence
  Description of Artificial Sequence: Synthetic peptide
  Seed: STLPRRSGA
SSLPRRSGS

SEQ ID NO: 23485 - protein, 9 aa, Artificial Sequence
  Description of Artificial Sequence: Synthetic peptide
  Seed: STLPRRSGA
SSLPRRSGY

SEQ ID NO: 23486 - protein, 9 aa, Artificial Sequence
  Description of Artificial Sequence: Synthetic peptide
  Seed: STLPRRSGA
SSLPRRSGV

SEQ ID NO: 23487 - protein, 9 aa, Artificial Sequence
  Description of Artificial Sequence: Synthetic peptide
  Seed: STLPRRSGA
STLPRRSGR

SEQ ID NO: 23488 - protein, 9 aa, Artificial Sequence
  Description of Artificial Sequence: Synthetic peptide
  Seed: STLPRRSGA
STLPRRSGG

SEQ ID NO: 23489 - protein, 9 aa, Artificial Sequence
  Description of Artificial Sequence: Synthetic peptide
  Seed: STLPRRSGA
STLPRRSGI

SEQ ID NO: 23490 - protein, 9 aa, Artificial Sequence
  Description of Artificial Sequence: Synthetic peptide
  Seed: STLPRRSGA
STLPRRSGL

SEQ ID NO: 23491 - protein, 9 aa, Artificial Sequence
  Description of Artificial Sequence: Synthetic peptide
  Seed: STLPRRSGA
STLPRRSGM

SEQ ID NO: 23492 - protein, 9 aa, Artificial Sequence
  Description of Artificial Sequence: Synthetic peptide
  Seed: STLPRRSGA
STLPRRSGS

SEQ ID NO: 23493 - protein, 9 aa, Artificial Sequence
  Description of Artificial Sequence: Synthetic peptide
  Seed: STLPRRSGA
STLPRRSGY

SEQ ID NO: 23494 - protein, 9 aa, Artificial Sequence
  Description of Artificial Sequence: Synthetic peptide
  Seed: STLPRRSGA
STLPRRSGV

SEQ ID NO: 23495 - protein, 9 aa, Artificial Sequence
  Description of Artificial Sequence: Synthetic peptide
  Seed: STLPRRSGA
SWLPRRSGK

SEQ ID NO: 23496 - protein, 9 aa, Artificial Sequence
  Description of Artificial Sequence: Synthetic peptide
  Seed: STLPRRSGA
SYLPRRSGA

SEQ ID NO: 23497 - protein, 9 aa, Artificial Sequence
  Description of Artificial Sequence: Synthetic peptide
  Seed: STLPRRSGA
SYLPRRSGK

SEQ ID NO: 23498 - protein, 9 aa, Artificial Sequence
  Description of Artificial Sequence: Synthetic peptide
  Seed: STLPRRSGA
SYLPRRSGV

SEQ ID NO: 23499 - protein, 9 aa, Artificial Sequence
  Description of Artificial Sequence: Synthetic peptide
  Seed: STLPRRSGA
SVLPRRSGA

SEQ ID NO: 23500 - protein, 9 aa, Artificial Sequence
  Description of Artificial Sequence: Synthetic peptide
  Seed: STLPRRSGA
SVLPRRSGI

SEQ ID NO: 23501 - protein, 9 aa, Artificial Sequence
  Description of Artificial Sequence: Synthetic peptide
  Seed: STLELRSRY
SWLELRSRF

SEQ ID NO: 23502 - protein, 9 aa, Artificial Sequence
  Description of Artificial Sequence: Synthetic peptide
  Seed: STLELRSRY
STLELRSRW

SEQ ID NO: 23503 - protein, 9 aa, Artificial Sequence
  Description of Artificial Sequence: Synthetic peptide
  Seed: STLELRSRY
STLELRSRF

SEQ ID NO: 23504 - protein, 9 aa, Artificial Sequence
  Description of Artificial Sequence: Synthetic peptide
  Seed: STLELRSRY
SALELRSRV

SEQ ID NO: 23505 - protein, 8 aa, Artificial Sequence
  Description of Artificial Sequence: Synthetic peptide
  Seed: STLELRSR
SYLELRSR

SEQ ID NO: 23506 - protein, 9 aa, Artificial Sequence
  Description of Artificial Sequence: Synthetic peptide
  Seed: STLELRSRY
SALELRSRR

SEQ ID NO: 23507 - protein, 9 aa, Artificial Sequence
  Description of Artificial Sequence: Synthetic peptide
  Seed: STLELRSRY
SALELRSRI

SEQ ID NO: 23508 - protein, 9 aa, Artificial Sequence
  Description of Artificial Sequence: Synthetic peptide
  Seed: STLELRSRY
SALELRSRL

SEQ ID NO: 23509 - protein, 9 aa, Artificial Sequence
  Description of Artificial Sequence: Synthetic peptide
  Seed: STLELRSRY
SALELRSRK

SEQ ID NO: 23510 - protein, 9 aa, Artificial Sequence
  Description of Artificial Sequence: Synthetic peptide
  Seed: STLELRSRY
SALELRSRM

SEQ ID NO: 23511 - protein, 9 aa, Artificial Sequence
  Description of Artificial Sequence: Synthetic peptide
  Seed: STLELRSRY
SALELRSRF

SEQ ID NO: 23512 - protein, 9 aa, Artificial Sequence
  Description of Artificial Sequence: Synthetic peptide
  Seed: STLELRSRY
SALELRSRW

SEQ ID NO: 23513 - protein, 9 aa, Artificial Sequence
  Description of Artificial Sequence: Synthetic peptide
  Seed: STLELRSRY
SALELRSRY

SEQ ID NO: 23514 - protein, 9 aa, Artificial Sequence
  Description of Artificial Sequence: Synthetic peptide
  Seed: STLELRSRY
SRLELRSRF

SEQ ID NO: 23515 - protein, 9 aa, Artificial Sequence
  Description of Artificial Sequence: Synthetic peptide
  Seed: STLELRSRY
STLELRSRM

SEQ ID NO: 23516 - protein, 9 aa, Artificial Sequence
  Description of Artificial Sequence: Synthetic peptide
  Seed: STLELRSRY
SRLELRSRY

SEQ ID NO: 23517 - protein, 9 aa, Artificial Sequence
  Description of Artificial Sequence: Synthetic peptide
  Seed: STLELRSRY
SNLELRSRY

SEQ ID NO: 23518 - protein, 9 aa, Artificial Sequence
  Description of Artificial Sequence: Synthetic peptide
  Seed: STLELRSRY
SQLELRSRH

SEQ ID NO: 23519 - protein, 9 aa, Artificial Sequence
  Description of Artificial Sequence: Synthetic peptide
  Seed: STLELRSRY
SQLELRSRI

SEQ ID NO: 23520 - protein, 9 aa, Artificial Sequence
  Description of Artificial Sequence: Synthetic peptide
  Seed: STLELRSRY
SQLELRSRL

SEQ ID NO: 23521 - protein, 9 aa, Artificial Sequence
  Description of Artificial Sequence: Synthetic peptide
  Seed: STLELRSRY
SQLELRSRK

SEQ ID NO: 23522 - protein, 9 aa, Artificial Sequence
  Description of Artificial Sequence: Synthetic peptide
  Seed: STLELRSRY
SQLELRSRM

SEQ ID NO: 23523 - protein, 9 aa, Artificial Sequence
  Description of Artificial Sequence: Synthetic peptide
  Seed: STLELRSRY
SQLELRSRF

SEQ ID NO: 23524 - protein, 9 aa, Artificial Sequence
  Description of Artificial Sequence: Synthetic peptide
  Seed: STLELRSRY
SQLELRSRW

SEQ ID NO: 23525 - protein, 8 aa, Artificial Sequence
  Description of Artificial Sequence: Synthetic peptide
  Seed: STLELRSR
SFLELRSR

SEQ ID NO: 23526 - protein, 8 aa, Artificial Sequence
  Description of Artificial Sequence: Synthetic peptide
  Seed: STLELRSR
SMLELRSR

SEQ ID NO: 23527 - protein, 11 aa, Artificial Sequence
  Description of Artificial Sequence: Synthetic peptide
  Seed: SSTLELRSRYW
SVTLELRSRYW

SEQ ID NO: 23528 - protein, 11 aa, Artificial Sequence
  Description of Artificial Sequence: Synthetic peptide
  Seed: SSTLELRSRYW
SYTLELRSRYW

SEQ ID NO: 23529 - protein, 10 aa, Artificial Sequence
  Description of Artificial Sequence: Synthetic peptide
  Seed: SSTLELRSRY
SYTLELRSRW

SEQ ID NO: 23530 - protein, 10 aa, Artificial Sequence
  Description of Artificial Sequence: Synthetic peptide
  Seed: SSTLELRSRY
SYTLELRSRY

SEQ ID NO: 23531 - protein, 10 aa, Artificial Sequence
  Description of Artificial Sequence: Synthetic peptide
  Seed: SSTLELRSRY
SVTLELRSRF

SEQ ID NO: 23532 - protein, 10 aa, Artificial Sequence
  Description of Artificial Sequence: Synthetic peptide
  Seed: SSTLELRSRY
SVTLELRSRW

SEQ ID NO: 23533 - protein, 10 aa, Artificial Sequence
  Description of Artificial Sequence: Synthetic peptide
  Seed: SSTLELRSRY
SVTLELRSRY

SEQ ID NO: 23534 - protein, 11 aa, Artificial Sequence
  Description of Artificial Sequence: Synthetic peptide
  Seed: SSTLELRSRYW
SATLELRSRYW

SEQ ID NO: 23535 - protein, 11 aa, Artificial Sequence
  Description of Artificial Sequence: Synthetic peptide
  Seed: SSTLELRSRYW
SQTLELRSRYW

SEQ ID NO: 23536 - protein, 11 aa, Artificial Sequence
  Description of Artificial Sequence: Synthetic peptide
  Seed: SSTLELRSRYW
SGTLELRSRYW

SEQ ID NO: 23537 - protein, 11 aa, Artificial Sequence
  Description of Artificial Sequence: Synthetic peptide
  Seed: SSTLELRSRYW
SHTLELRSRYW

SEQ ID NO: 23538 - protein, 11 aa, Artificial Sequence
  Description of Artificial Sequence: Synthetic peptide
  Seed: SSTLELRSRYW
SITLELRSRYW

SEQ ID NO: 23539 - protein, 11 aa, Artificial Sequence
  Description of Artificial Sequence: Synthetic peptide
  Seed: SSTLELRSRYW
SLTLELRSRYW

SEQ ID NO: 23540 - protein, 11 aa, Artificial Sequence
  Description of Artificial Sequence: Synthetic peptide
  Seed: SSTLELRSRYW
SKTLELRSRYW

SEQ ID NO: 23541 - protein, 11 aa, Artificial Sequence
  Description of Artificial Sequence: Synthetic peptide
  Seed: SSTLELRSRYW
SMTLELRSRYW

SEQ ID NO: 23542 - protein, 11 aa, Artificial Sequence
  Description of Artificial Sequence: Synthetic peptide
  Seed: SSTLELRSRYW
SFTLELRSRYW

SEQ ID NO: 23543 - protein, 11 aa, Artificial Sequence
  Description of Artificial Sequence: Synthetic peptide
  Seed: SSTLELRSRYW
SWTLELRSRYW

SEQ ID NO: 23544 - protein, 9 aa, Artificial Sequence
  Description of Artificial Sequence: Synthetic peptide
  Seed: STLELRSRY
SQLELRSRY

SEQ ID NO: 23545 - protein, 9 aa, Artificial Sequence
  Description of Artificial Sequence: Synthetic peptide
  Seed: STLELRSRY
SQLELRSRV

SEQ ID NO: 23546 - protein, 9 aa, Artificial Sequence
  Description of Artificial Sequence: Synthetic peptide
  Seed: STLELRSRY
SELELRSRM

SEQ ID NO: 23547 - protein, 9 aa, Artificial Sequence
  Description of Artificial Sequence: Synthetic peptide
  Seed: STLELRSRY
SMLELRSRR

SEQ ID NO: 23548 - protein, 9 aa, Artificial Sequence
  Description of Artificial Sequence: Synthetic peptide
  Seed: STLELRSRY
SMLELRSRK

SEQ ID NO: 23549 - protein, 9 aa, Artificial Sequence
  Description of Artificial Sequence: Synthetic peptide
  Seed: STLELRSRY
SMLELRSRM

SEQ ID NO: 23550 - protein, 9 aa, Artificial Sequence
  Description of Artificial Sequence: Synthetic peptide
  Seed: STLELRSRY
SMLELRSRF

SEQ ID NO: 23551 - protein, 9 aa, Artificial Sequence
  Description of Artificial Sequence: Synthetic peptide
  Seed: STLELRSRY
SMLELRSRW

SEQ ID NO: 23552 - protein, 9 aa, Artificial Sequence
  Description of Artificial Sequence: Synthetic peptide
  Seed: STLELRSRY
SMLELRSRY

SEQ ID NO: 23553 - protein, 9 aa, Artificial Sequence
  Description of Artificial Sequence: Synthetic peptide
  Seed: STLELRSRY
SFLELRSRF

SEQ ID NO: 23554 - protein, 9 aa, Artificial Sequence
  Description of Artificial Sequence: Synthetic peptide
  Seed: STLELRSRY
SFLELRSRY

SEQ ID NO: 23555 - protein, 9 aa, Artificial Sequence
  Description of Artificial Sequence: Synthetic peptide
  Seed: STLELRSRY
SSLELRSRR

SEQ ID NO: 23556 - protein, 9 aa, Artificial Sequence
  Description of Artificial Sequence: Synthetic peptide
  Seed: STLELRSRY
SSLELRSRI

SEQ ID NO: 23557 - protein, 9 aa, Artificial Sequence
  Description of Artificial Sequence: Synthetic peptide
  Seed: STLELRSRY
SSLELRSRL

SEQ ID NO: 23558 - protein, 9 aa, Artificial Sequence
  Description of Artificial Sequence: Synthetic peptide
  Seed: STLELRSRY
SSLELRSRK

SEQ ID NO: 23559 - protein, 9 aa, Artificial Sequence
  Description of Artificial Sequence: Synthetic peptide
  Seed: STLELRSRY
SSLELRSRM

SEQ ID NO: 23560 - protein, 9 aa, Artificial Sequence
  Description of Artificial Sequence: Synthetic peptide
  Seed: STLELRSRY
SSLELRSRF

SEQ ID NO: 23561 - protein, 9 aa, Artificial Sequence
  Description of Artificial Sequence: Synthetic peptide
  Seed: STLELRSRY
SSLELRSRW

SEQ ID NO: 23562 - protein, 9 aa, Artificial Sequence
  Description of Artificial Sequence: Synthetic peptide
  Seed: STLELRSRY
SSLELRSRY

SEQ ID NO: 23563 - protein, 9 aa, Artificial Sequence
  Description of Artificial Sequence: Synthetic peptide
  Seed: STLELRSRY
STLELRSRR

SEQ ID NO: 23564 - protein, 9 aa, Artificial Sequence
  Description of Artificial Sequence: Synthetic peptide
  Seed: STLELRSRY
STLELRSRI

SEQ ID NO: 23565 - protein, 9 aa, Artificial Sequence
  Description of Artificial Sequence: Synthetic peptide
  Seed: STLELRSRY
STLELRSRL

SEQ ID NO: 23566 - protein, 9 aa, Artificial Sequence
  Description of Artificial Sequence: Synthetic peptide
  Seed: STLELRSRY
STLELRSRK

SEQ ID NO: 23567 - protein, 9 aa, Artificial Sequence
  Description of Artificial Sequence: Synthetic peptide
  Seed: STLELRSRY
SMLELRSRL

SEQ ID NO: 23568 - protein, 9 aa, Artificial Sequence
  Description of Artificial Sequence: Synthetic peptide
  Seed: STLELRSRY
SKLELRSRY

SEQ ID NO: 23569 - protein, 9 aa, Artificial Sequence
  Description of Artificial Sequence: Synthetic peptide
  Seed: STLELRSRY
SELELRSRF

SEQ ID NO: 23570 - protein, 9 aa, Artificial Sequence
  Description of Artificial Sequence: Synthetic peptide
  Seed: STLELRSRY
SKLELRSRF

SEQ ID NO: 23571 - protein, 9 aa, Artificial Sequence
  Description of Artificial Sequence: Synthetic peptide
  Seed: STLELRSRY
SELELRSRY

SEQ ID NO: 23572 - protein, 9 aa, Artificial Sequence
  Description of Artificial Sequence: Synthetic peptide
  Seed: STLELRSRY
SGLELRSRW

SEQ ID NO: 23573 - protein, 9 aa, Artificial Sequence
  Description of Artificial Sequence: Synthetic peptide
  Seed: STLELRSRY
SGLELRSRY

SEQ ID NO: 23574 - protein, 9 aa, Artificial Sequence
  Description of Artificial Sequence: Synthetic peptide
  Seed: STLELRSRY
SHLELRSRM

SEQ ID NO: 23575 - protein, 9 aa, Artificial Sequence
  Description of Artificial Sequence: Synthetic peptide
  Seed: STLELRSRY
SHLELRSRF

SEQ ID NO: 23576 - protein, 9 aa, Artificial Sequence
  Description of Artificial Sequence: Synthetic peptide
  Seed: STLELRSRY
SHLELRSRY

SEQ ID NO: 23577 - protein, 9 aa, Artificial Sequence
  Description of Artificial Sequence: Synthetic peptide
  Seed: STLELRSRY
SILELRSRR

SEQ ID NO: 23578 - protein, 9 aa, Artificial Sequence
  Description of Artificial Sequence: Synthetic peptide
  Seed: STLELRSRY
SILELRSRK

SEQ ID NO: 23579 - protein, 9 aa, Artificial Sequence
  Description of Artificial Sequence: Synthetic peptide
  Seed: STLELRSRY
SILELRSRF

SEQ ID NO: 23580 - protein, 9 aa, Artificial Sequence
  Description of Artificial Sequence: Synthetic peptide
  Seed: STLELRSRY
SILELRSRW

SEQ ID NO: 23581 - protein, 9 aa, Artificial Sequence
  Description of Artificial Sequence: Synthetic peptide
  Seed: STLELRSRY
SILELRSRY

SEQ ID NO: 23582 - protein, 9 aa, Artificial Sequence
  Description of Artificial Sequence: Synthetic peptide
  Seed: STLELRSRY
SLLELRSRR

SEQ ID NO: 23583 - protein, 9 aa, Artificial Sequence
  Description of Artificial Sequence: Synthetic peptide
  Seed: STLELRSRY
SLLELRSRK

SEQ ID NO: 23584 - protein, 9 aa, Artificial Sequence
  Description of Artificial Sequence: Synthetic peptide
  Seed: STLELRSRY
SLLELRSRM

SEQ ID NO: 23585 - protein, 9 aa, Artificial Sequence
  Description of Artificial Sequence: Synthetic peptide
  Seed: STLELRSRY
SLLELRSRF

SEQ ID NO: 23586 - protein, 9 aa, Artificial Sequence
  Description of Artificial Sequence: Synthetic peptide
  Seed: STLELRSRY
SLLELRSRW

SEQ ID NO: 23587 - protein, 9 aa, Artificial Sequence
  Description of Artificial Sequence: Synthetic peptide
  Seed: STLELRSRY
SLLELRSRY

SEQ ID NO: 23588 - protein, 9 aa, Artificial Sequence
  Description of Artificial Sequence: Synthetic peptide
  Seed: STLELRSRY
SKLELRSRL

SEQ ID NO: 23589 - protein, 9 aa, Artificial Sequence
  Description of Artificial Sequence: Synthetic peptide
  Seed: STLELRSRY
SKLELRSRM

SEQ ID NO: 23590 - protein, 11 aa, Artificial Sequence
  Description of Artificial Sequence: Synthetic peptide
  Seed: STLPRRSGAAG
SALPRRSGAAW

SEQ ID NO: 23591 - protein, 11 aa, Artificial Sequence
  Description of Artificial Sequence: Synthetic peptide
  Seed: STLPRRSGAAG
SALPRRSGAAV

SEQ ID NO: 23592 - protein, 11 aa, Artificial Sequence
  Description of Artificial Sequence: Synthetic peptide
  Seed: STLPRRSGAAG
SPLPRRSGAAV

SEQ ID NO: 23593 - protein, 11 aa, Artificial Sequence
  Description of Artificial Sequence: Synthetic peptide
  Seed: STLPRRSGAAG
SLLPRRSGAAT

SEQ ID NO: 23594 - protein, 11 aa, Artificial Sequence
  Description of Artificial Sequence: Synthetic peptide
  Seed: STLPRRSGAAG
SLLPRRSGAAA

SEQ ID NO: 23595 - protein, 11 aa, Artificial Sequence
  Description of Artificial Sequence: Synthetic peptide
  Seed: STLPRRSGAAG
SLLPRRSGAAC

SEQ ID NO: 23596 - protein, 11 aa, Artificial Sequence
  Description of Artificial Sequence: Synthetic peptide
  Seed: STLPRRSGAAG
SLLPRRSGAAG

SEQ ID NO: 23597 - protein, 11 aa, Artificial Sequence
  Description of Artificial Sequence: Synthetic peptide
  Seed: STLPRRSGAAG
SLLPRRSGAAI

SEQ ID NO: 23598 - protein, 11 aa, Artificial Sequence
  Description of Artificial Sequence: Synthetic peptide
  Seed: STLPRRSGAAG
SLLPRRSGAAL

SEQ ID NO: 23599 - protein, 11 aa, Artificial Sequence
  Description of Artificial Sequence: Synthetic peptide
  Seed: STLPRRSGAAG
SLLPRRSGAAM

SEQ ID NO: 23600 - protein, 11 aa, Artificial Sequence
  Description of Artificial Sequence: Synthetic peptide
  Seed: STLPRRSGAAG
SLLPRRSGAAF

SEQ ID NO: 23601 - protein, 11 aa, Artificial Sequence
  Description of Artificial Sequence: Synthetic peptide
  Seed: STLPRRSGAAG
SLLPRRSGAAP

SEQ ID NO: 23602 - protein, 11 aa, Artificial Sequence
  Description of Artificial Sequence: Synthetic peptide
  Seed: STLPRRSGAAG
SLLPRRSGAAS

SEQ ID NO: 23603 - protein, 11 aa, Artificial Sequence
  Description of Artificial Sequence: Synthetic peptide
  Seed: STLPRRSGAAG
SLLPRRSGAAW

SEQ ID NO: 23604 - protein, 11 aa, Artificial Sequence
  Description of Artificial Sequence: Synthetic peptide
  Seed: STLPRRSGAAG
SKLPRRSGAAS

SEQ ID NO: 23605 - protein, 11 aa, Artificial Sequence
  Description of Artificial Sequence: Synthetic peptide
  Seed: STLPRRSGAAG
SLLPRRSGAAY

SEQ ID NO: 23606 - protein, 11 aa, Artificial Sequence
  Description of Artificial Sequence: Synthetic peptide
  Seed: STLPRRSGAAG
SLLPRRSGAAV

SEQ ID NO: 23607 - protein, 11 aa, Artificial Sequence
  Description of Artificial Sequence: Synthetic peptide
  Seed: STLPRRSGAAG
SKLPRRSGAAA

SEQ ID NO: 23608 - protein, 11 aa, Artificial Sequence
  Description of Artificial Sequence: Synthetic peptide
  Seed: STLPRRSGAAG
SKLPRRSGAAC

SEQ ID NO: 23609 - protein, 11 aa, Artificial Sequence
  Description of Artificial Sequence: Synthetic peptide
  Seed: STLPRRSGAAG
SKLPRRSGAAG

SEQ ID NO: 23610 - protein, 11 aa, Artificial Sequence
  Description of Artificial Sequence: Synthetic peptide
  Seed: STLPRRSGAAG
SKLPRRSGAAI

SEQ ID NO: 23611 - protein, 11 aa, Artificial Sequence
  Description of Artificial Sequence: Synthetic peptide
  Seed: STLPRRSGAAG
SKLPRRSGAAL

SEQ ID NO: 23612 - protein, 11 aa, Artificial Sequence
  Description of Artificial Sequence: Synthetic peptide
  Seed: STLPRRSGAAG
SKLPRRSGAAM

SEQ ID NO: 23613 - protein, 11 aa, Artificial Sequence
  Description of Artificial Sequence: Synthetic peptide
  Seed: STLPRRSGAAG
SKLPRRSGAAF

SEQ ID NO: 23614 - protein, 11 aa, Artificial Sequence
  Description of Artificial Sequence: Synthetic peptide
  Seed: STLPRRSGAAG
SILPRRSGAAV

SEQ ID NO: 23615 - protein, 11 aa, Artificial Sequence
  Description of Artificial Sequence: Synthetic peptide
  Seed: STLPRRSGAAG
SILPRRSGAAY

SEQ ID NO: 23616 - protein, 11 aa, Artificial Sequence
  Description of Artificial Sequence: Synthetic peptide
  Seed: STLPRRSGAAG
SILPRRSGAAW

SEQ ID NO: 23617 - protein, 11 aa, Artificial Sequence
  Description of Artificial Sequence: Synthetic peptide
  Seed: STLPRRSGAAG
SILPRRSGAAT

SEQ ID NO: 23618 - protein, 11 aa, Artificial Sequence
  Description of Artificial Sequence: Synthetic peptide
  Seed: STLPRRSGAAG
SHLPRRSGAAI

SEQ ID NO: 23619 - protein, 11 aa, Artificial Sequence
  Description of Artificial Sequence: Synthetic peptide
  Seed: STLPRRSGAAG
SHLPRRSGAAL

SEQ ID NO: 23620 - protein, 11 aa, Artificial Sequence
  Description of Artificial Sequence: Synthetic peptide
  Seed: STLPRRSGAAG
SHLPRRSGAAM

SEQ ID NO: 23621 - protein, 11 aa, Artificial Sequence
  Description of Artificial Sequence: Synthetic peptide
  Seed: STLPRRSGAAG
SHLPRRSGAAF

SEQ ID NO: 23622 - protein, 11 aa, Artificial Sequence
  Description of Artificial Sequence: Synthetic peptide
  Seed: STLPRRSGAAG
SHLPRRSGAAP

SEQ ID NO: 23623 - protein, 11 aa, Artificial Sequence
  Description of Artificial Sequence: Synthetic peptide
  Seed: STLPRRSGAAG
SHLPRRSGAAS

SEQ ID NO: 23624 - protein, 11 aa, Artificial Sequence
  Description of Artificial Sequence: Synthetic peptide
  Seed: STLPRRSGAAG
SHLPRRSGAAT

SEQ ID NO: 23625 - protein, 11 aa, Artificial Sequence
  Description of Artificial Sequence: Synthetic peptide
  Seed: STLPRRSGAAG
SHLPRRSGAAW

SEQ ID NO: 23626 - protein, 11 aa, Artificial Sequence
  Description of Artificial Sequence: Synthetic peptide
  Seed: STLPRRSGAAG
SHLPRRSGAAY

SEQ ID NO: 23627 - protein, 11 aa, Artificial Sequence
  Description of Artificial Sequence: Synthetic peptide
  Seed: STLPRRSGAAG
SHLPRRSGAAV

SEQ ID NO: 23628 - protein, 11 aa, Artificial Sequence
  Description of Artificial Sequence: Synthetic peptide
  Seed: STLPRRSGAAG
SILPRRSGAAA

SEQ ID NO: 23629 - protein, 11 aa, Artificial Sequence
  Description of Artificial Sequence: Synthetic peptide
  Seed: STLPRRSGAAG
SILPRRSGAAC

SEQ ID NO: 23630 - protein, 11 aa, Artificial Sequence
  Description of Artificial Sequence: Synthetic peptide
  Seed: STLPRRSGAAG
SILPRRSGAAG

SEQ ID NO: 23631 - protein, 11 aa, Artificial Sequence
  Description of Artificial Sequence: Synthetic peptide
  Seed: STLPRRSGAAG
SILPRRSGAAI

SEQ ID NO: 23632 - protein, 11 aa, Artificial Sequence
  Description of Artificial Sequence: Synthetic peptide
  Seed: STLPRRSGAAG
SILPRRSGAAL

SEQ ID NO: 23633 - protein, 11 aa, Artificial Sequence
  Description of Artificial Sequence: Synthetic peptide
  Seed: STLPRRSGAAG
SILPRRSGAAM

SEQ ID NO: 23634 - protein, 11 aa, Artificial Sequence
  Description of Artificial Sequence: Synthetic peptide
  Seed: STLPRRSGAAG
SILPRRSGAAF

SEQ ID NO: 23635 - protein, 11 aa, Artificial Sequence
  Description of Artificial Sequence: Synthetic peptide
  Seed: STLPRRSGAAG
SILPRRSGAAP

SEQ ID NO: 23636 - protein, 11 aa, Artificial Sequence
  Description of Artificial Sequence: Synthetic peptide
  Seed: STLPRRSGAAG
SILPRRSGAAS

SEQ ID NO: 23637 - protein, 11 aa, Artificial Sequence
  Description of Artificial Sequence: Synthetic peptide
  Seed: STLPRRSGAAG
SKLPRRSGAAP

SEQ ID NO: 23638 - protein, 11 aa, Artificial Sequence
  Description of Artificial Sequence: Synthetic peptide
  Seed: STLPRRSGAAG
SKLPRRSGAAT

SEQ ID NO: 23639 - protein, 11 aa, Artificial Sequence
  Description of Artificial Sequence: Synthetic peptide
  Seed: STLPRRSGAAG
SRLPRRSGAAA

SEQ ID NO: 23640 - protein, 11 aa, Artificial Sequence
  Description of Artificial Sequence: Synthetic peptide
  Seed: STLPRRSGAAG
SPLPRRSGAAG

SEQ ID NO: 23641 - protein, 11 aa, Artificial Sequence
  Description of Artificial Sequence: Synthetic peptide
  Seed: STLPRRSGAAG
SFLPRRSGAAS

SEQ ID NO: 23642 - protein, 11 aa, Artificial Sequence
  Description of Artificial Sequence: Synthetic peptide
  Seed: STLPRRSGAAG
SFLPRRSGAAT

SEQ ID NO: 23643 - protein, 11 aa, Artificial Sequence
  Description of Artificial Sequence: Synthetic peptide
  Seed: STLPRRSGAAG
SFLPRRSGAAW

SEQ ID NO: 23644 - protein, 11 aa, Artificial Sequence
  Description of Artificial Sequence: Synthetic peptide
  Seed: STLPRRSGAAG
SFLPRRSGAAY

SEQ ID NO: 23645 - protein, 11 aa, Artificial Sequence
  Description of Artificial Sequence: Synthetic peptide
  Seed: STLPRRSGAAG
SFLPRRSGAAV

SEQ ID NO: 23646 - protein, 11 aa, Artificial Sequence
  Description of Artificial Sequence: Synthetic peptide
  Seed: STLPRRSGAAG
SPLPRRSGAAA

SEQ ID NO: 23647 - protein, 11 aa, Artificial Sequence
  Description of Artificial Sequence: Synthetic peptide
  Seed: STLPRRSGAAG
SPLPRRSGAAC

SEQ ID NO: 23648 - protein, 11 aa, Artificial Sequence
  Description of Artificial Sequence: Synthetic peptide
  Seed: STLPRRSGAAG
SPLPRRSGAAQ

SEQ ID NO: 23649 - protein, 11 aa, Artificial Sequence
  Description of Artificial Sequence: Synthetic peptide
  Seed: STLPRRSGAAG
SPLPRRSGAAE

SEQ ID NO: 23650 - protein, 11 aa, Artificial Sequence
  Description of Artificial Sequence: Synthetic peptide
  Seed: STLPRRSGAAG
SPLPRRSGAAH

SEQ ID NO: 23651 - protein, 11 aa, Artificial Sequence
  Description of Artificial Sequence: Synthetic peptide
  Seed: STLPRRSGAAG
SKLPRRSGAAW

SEQ ID NO: 23652 - protein, 11 aa, Artificial Sequence
  Description of Artificial Sequence: Synthetic peptide
  Seed: STLPRRSGAAG
SPLPRRSGAAI

SEQ ID NO: 23653 - protein, 11 aa, Artificial Sequence
  Description of Artificial Sequence: Synthetic peptide
  Seed: STLPRRSGAAG
SPLPRRSGAAL

SEQ ID NO: 23654 - protein, 11 aa, Artificial Sequence
  Description of Artificial Sequence: Synthetic peptide
  Seed: STLPRRSGAAG
SPLPRRSGAAM

SEQ ID NO: 23655 - protein, 11 aa, Artificial Sequence
  Description of Artificial Sequence: Synthetic peptide
  Seed: STLPRRSGAAG
SPLPRRSGAAF

SEQ ID NO: 23656 - protein, 11 aa, Artificial Sequence
  Description of Artificial Sequence: Synthetic peptide
  Seed: STLPRRSGAAG
SPLPRRSGAAP

SEQ ID NO: 23657 - protein, 11 aa, Artificial Sequence
  Description of Artificial Sequence: Synthetic peptide
  Seed: STLPRRSGAAG
SPLPRRSGAAS

SEQ ID NO: 23658 - protein, 11 aa, Artificial Sequence
  Description of Artificial Sequence: Synthetic peptide
  Seed: STLPRRSGAAG
SPLPRRSGAAT

SEQ ID NO: 23659 - protein, 11 aa, Artificial Sequence
  Description of Artificial Sequence: Synthetic peptide
  Seed: STLPRRSGAAG
SPLPRRSGAAW

SEQ ID NO: 23660 - protein, 11 aa, Artificial Sequence
  Description of Artificial Sequence: Synthetic peptide
  Seed: STLPRRSGAAG
SPLPRRSGAAY

SEQ ID NO: 23661 - protein, 11 aa, Artificial Sequence
  Description of Artificial Sequence: Synthetic peptide
  Seed: STLPRRSGAAG
SFLPRRSGAAP

SEQ ID NO: 23662 - protein, 11 aa, Artificial Sequence
  Description of Artificial Sequence: Synthetic peptide
  Seed: STLPRRSGAAG
SFLPRRSGAAF

SEQ ID NO: 23663 - protein, 11 aa, Artificial Sequence
  Description of Artificial Sequence: Synthetic peptide
  Seed: STLPRRSGAAG
SFLPRRSGAAM

SEQ ID NO: 23664 - protein, 11 aa, Artificial Sequence
  Description of Artificial Sequence: Synthetic peptide
  Seed: STLPRRSGAAG
SFLPRRSGAAL

SEQ ID NO: 23665 - protein, 11 aa, Artificial Sequence
  Description of Artificial Sequence: Synthetic peptide
  Seed: STLPRRSGAAG
SKLPRRSGAAY

SEQ ID NO: 23666 - protein, 11 aa, Artificial Sequence
  Description of Artificial Sequence: Synthetic peptide
  Seed: STLPRRSGAAG
SKLPRRSGAAV

SEQ ID NO: 23667 - protein, 11 aa, Artificial Sequence
  Description of Artificial Sequence: Synthetic peptide
  Seed: STLPRRSGAAG
SMLPRRSGAAA

SEQ ID NO: 23668 - protein, 11 aa, Artificial Sequence
  Description of Artificial Sequence: Synthetic peptide
  Seed: STLPRRSGAAG
SMLPRRSGAAC

SEQ ID NO: 23669 - protein, 11 aa, Artificial Sequence
  Description of Artificial Sequence: Synthetic peptide
  Seed: STLPRRSGAAG
SMLPRRSGAAG

SEQ ID NO: 23670 - protein, 11 aa, Artificial Sequence
  Description of Artificial Sequence: Synthetic peptide
  Seed: STLPRRSGAAG
SMLPRRSGAAI

SEQ ID NO: 23671 - protein, 11 aa, Artificial Sequence
  Description of Artificial Sequence: Synthetic peptide
  Seed: STLPRRSGAAG
SMLPRRSGAAL

SEQ ID NO: 23672 - protein, 11 aa, Artificial Sequence
  Description of Artificial Sequence: Synthetic peptide
  Seed: STLPRRSGAAG
SMLPRRSGAAM

SEQ ID NO: 23673 - protein, 11 aa, Artificial Sequence
  Description of Artificial Sequence: Synthetic peptide
  Seed: STLPRRSGAAG
SMLPRRSGAAF

SEQ ID NO: 23674 - protein, 11 aa, Artificial Sequence
  Description of Artificial Sequence: Synthetic peptide
  Seed: STLPRRSGAAG
SMLPRRSGAAP

SEQ ID NO: 23675 - protein, 11 aa, Artificial Sequence
  Description of Artificial Sequence: Synthetic peptide
  Seed: STLPRRSGAAG
SMLPRRSGAAS

SEQ ID NO: 23676 - protein, 11 aa, Artificial Sequence
  Description of Artificial Sequence: Synthetic peptide
  Seed: STLPRRSGAAG
SMLPRRSGAAT

SEQ ID NO: 23677 - protein, 11 aa, Artificial Sequence
  Description of Artificial Sequence: Synthetic peptide
  Seed: STLPRRSGAAG
SMLPRRSGAAW

SEQ ID NO: 23678 - protein, 11 aa, Artificial Sequence
  Description of Artificial Sequence: Synthetic peptide
  Seed: STLPRRSGAAG
SMLPRRSGAAY

SEQ ID NO: 23679 - protein, 11 aa, Artificial Sequence
  Description of Artificial Sequence: Synthetic peptide
  Seed: STLPRRSGAAG
SMLPRRSGAAV

SEQ ID NO: 23680 - protein, 11 aa, Artificial Sequence
  Description of Artificial Sequence: Synthetic peptide
  Seed: STLPRRSGAAG
SFLPRRSGAAA

SEQ ID NO: 23681 - protein, 11 aa, Artificial Sequence
  Description of Artificial Sequence: Synthetic peptide
  Seed: STLPRRSGAAG
SFLPRRSGAAC

SEQ ID NO: 23682 - protein, 11 aa, Artificial Sequence
  Description of Artificial Sequence: Synthetic peptide
  Seed: STLPRRSGAAG
SFLPRRSGAAG

SEQ ID NO: 23683 - protein, 11 aa, Artificial Sequence
  Description of Artificial Sequence: Synthetic peptide
  Seed: STLPRRSGAAG
SFLPRRSGAAI

SEQ ID NO: 23684 - protein, 11 aa, Artificial Sequence
  Description of Artificial Sequence: Synthetic peptide
  Seed: STLPRRSGAAG
SHLPRRSGAAG

SEQ ID NO: 23685 - protein, 11 aa, Artificial Sequence
  Description of Artificial Sequence: Synthetic peptide
  Seed: STLPRRSGAAG
SHLPRRSGAAC

SEQ ID NO: 23686 - protein, 11 aa, Artificial Sequence
  Description of Artificial Sequence: Synthetic peptide
  Seed: STLPRRSGAAG
SHLPRRSGAAA

SEQ ID NO: 23687 - protein, 11 aa, Artificial Sequence
  Description of Artificial Sequence: Synthetic peptide
  Seed: STLPRRSGAAG
SDLPRRSGAAP

SEQ ID NO: 23688 - protein, 11 aa, Artificial Sequence
  Description of Artificial Sequence: Synthetic peptide
  Seed: STLPRRSGAAG
SNLPRRSGAAY

SEQ ID NO: 23689 - protein, 11 aa, Artificial Sequence
  Description of Artificial Sequence: Synthetic peptide
  Seed: STLPRRSGAAG
SNLPRRSGAAV

SEQ ID NO: 23690 - protein, 11 aa, Artificial Sequence
  Description of Artificial Sequence: Synthetic peptide
  Seed: STLPRRSGAAG
SDLPRRSGAAA

SEQ ID NO: 23691 - protein, 11 aa, Artificial Sequence
  Description of Artificial Sequence: Synthetic peptide
  Seed: STLPRRSGAAG
SDLPRRSGAAC

SEQ ID NO: 23692 - protein, 11 aa, Artificial Sequence
  Description of Artificial Sequence: Synthetic peptide
  Seed: STLPRRSGAAG
SDLPRRSGAAG

SEQ ID NO: 23693 - protein, 11 aa, Artificial Sequence
  Description of Artificial Sequence: Synthetic peptide
  Seed: STLPRRSGAAG
SDLPRRSGAAI

SEQ ID NO: 23694 - protein, 11 aa, Artificial Sequence
  Description of Artificial Sequence: Synthetic peptide
  Seed: STLPRRSGAAG
SDLPRRSGAAL

SEQ ID NO: 23695 - protein, 11 aa, Artificial Sequence
  Description of Artificial Sequence: Synthetic peptide
  Seed: STLPRRSGAAG
SDLPRRSGAAM

SEQ ID NO: 23696 - protein, 11 aa, Artificial Sequence
  Description of Artificial Sequence: Synthetic peptide
  Seed: STLPRRSGAAG
SDLPRRSGAAF

SEQ ID NO: 23697 - protein, 11 aa, Artificial Sequence
  Description of Artificial Sequence: Synthetic peptide
  Seed: STLPRRSGAAG
SDLPRRSGAAS

SEQ ID NO: 23698 - protein, 11 aa, Artificial Sequence
  Description of Artificial Sequence: Synthetic peptide
  Seed: STLPRRSGAAG
SGLPRRSGAAV

SEQ ID NO: 23699 - protein, 11 aa, Artificial Sequence
  Description of Artificial Sequence: Synthetic peptide
  Seed: STLPRRSGAAG
SDLPRRSGAAT

SEQ ID NO: 23700 - protein, 11 aa, Artificial Sequence
  Description of Artificial Sequence: Synthetic peptide
  Seed: STLPRRSGAAG
SDLPRRSGAAW

SEQ ID NO: 23701 - protein, 11 aa, Artificial Sequence
  Description of Artificial Sequence: Synthetic peptide
  Seed: STLPRRSGAAG
SDLPRRSGAAY

SEQ ID NO: 23702 - protein, 11 aa, Artificial Sequence
  Description of Artificial Sequence: Synthetic peptide
  Seed: STLPRRSGAAG
SDLPRRSGAAV

SEQ ID NO: 23703 - protein, 11 aa, Artificial Sequence
  Description of Artificial Sequence: Synthetic peptide
  Seed: STLPRRSGAAG
SCLPRRSGAAA

SEQ ID NO: 23704 - protein, 11 aa, Artificial Sequence
  Description of Artificial Sequence: Synthetic peptide
  Seed: STLPRRSGAAG
SCLPRRSGAAC

SEQ ID NO: 23705 - protein, 11 aa, Artificial Sequence
  Description of Artificial Sequence: Synthetic peptide
  Seed: STLPRRSGAAG
SCLPRRSGAAG

SEQ ID NO: 23706 - protein, 11 aa, Artificial Sequence
  Description of Artificial Sequence: Synthetic peptide
  Seed: STLPRRSGAAG
SCLPRRSGAAI

SEQ ID NO: 23707 - protein, 11 aa, Artificial Sequence
  Description of Artificial Sequence: Synthetic peptide
  Seed: STLPRRSGAAG
SCLPRRSGAAL

SEQ ID NO: 23708 - protein, 11 aa, Artificial Sequence
  Description of Artificial Sequence: Synthetic peptide
  Seed: STLPRRSGAAG
SNLPRRSGAAW

SEQ ID NO: 23709 - protein, 11 aa, Artificial Sequence
  Description of Artificial Sequence: Synthetic peptide
  Seed: STLPRRSGAAG
SNLPRRSGAAT

SEQ ID NO: 23710 - protein, 11 aa, Artificial Sequence
  Description of Artificial Sequence: Synthetic peptide
  Seed: STLPRRSGAAG
SNLPRRSGAAS

SEQ ID NO: 23711 - protein, 11 aa, Artificial Sequence
  Description of Artificial Sequence: Synthetic peptide
  Seed: STLPRRSGAAG
SNLPRRSGAAP

SEQ ID NO: 23712 - protein, 11 aa, Artificial Sequence
  Description of Artificial Sequence: Synthetic peptide
  Seed: STLPRRSGAAG
SRLPRRSGAAC

SEQ ID NO: 23713 - protein, 11 aa, Artificial Sequence
  Description of Artificial Sequence: Synthetic peptide
  Seed: STLPRRSGAAG
SRLPRRSGAAG

SEQ ID NO: 23714 - protein, 11 aa, Artificial Sequence
  Description of Artificial Sequence: Synthetic peptide
  Seed: STLPRRSGAAG
SRLPRRSGAAI

SEQ ID NO: 23715 - protein, 11 aa, Artificial Sequence
  Description of Artificial Sequence: Synthetic peptide
  Seed: STLPRRSGAAG
SRLPRRSGAAL

SEQ ID NO: 23716 - protein, 11 aa, Artificial Sequence
  Description of Artificial Sequence: Synthetic peptide
  Seed: STLPRRSGAAG
SRLPRRSGAAM

SEQ ID NO: 23717 - protein, 11 aa, Artificial Sequence
  Description of Artificial Sequence: Synthetic peptide
  Seed: STLPRRSGAAG
SRLPRRSGAAF

SEQ ID NO: 23718 - protein, 11 aa, Artificial Sequence
  Description of Artificial Sequence: Synthetic peptide
  Seed: STLPRRSGAAG
SRLPRRSGAAP

SEQ ID NO: 23719 - protein, 11 aa, Artificial Sequence
  Description of Artificial Sequence: Synthetic peptide
  Seed: STLPRRSGAAG
SRLPRRSGAAS

SEQ ID NO: 23720 - protein, 11 aa, Artificial Sequence
  Description of Artificial Sequence: Synthetic peptide
  Seed: STLPRRSGAAG
SRLPRRSGAAT

SEQ ID NO: 23721 - protein, 11 aa, Artificial Sequence
  Description of Artificial Sequence: Synthetic peptide
  Seed: STLPRRSGAAG
SRLPRRSGAAW

SEQ ID NO: 23722 - protein, 11 aa, Artificial Sequence
  Description of Artificial Sequence: Synthetic peptide
  Seed: STLPRRSGAAG
SRLPRRSGAAY

SEQ ID NO: 23723 - protein, 11 aa, Artificial Sequence
  Description of Artificial Sequence: Synthetic peptide
  Seed: STLPRRSGAAG
SRLPRRSGAAV

SEQ ID NO: 23724 - protein, 11 aa, Artificial Sequence
  Description of Artificial Sequence: Synthetic peptide
  Seed: STLPRRSGAAG
SNLPRRSGAAA

SEQ ID NO: 23725 - protein, 11 aa, Artificial Sequence
  Description of Artificial Sequence: Synthetic peptide
  Seed: STLPRRSGAAG
SNLPRRSGAAC

SEQ ID NO: 23726 - protein, 11 aa, Artificial Sequence
  Description of Artificial Sequence: Synthetic peptide
  Seed: STLPRRSGAAG
SNLPRRSGAAG

SEQ ID NO: 23727 - protein, 11 aa, Artificial Sequence
  Description of Artificial Sequence: Synthetic peptide
  Seed: STLPRRSGAAG
SNLPRRSGAAI

SEQ ID NO: 23728 - protein, 11 aa, Artificial Sequence
  Description of Artificial Sequence: Synthetic peptide
  Seed: STLPRRSGAAG
SNLPRRSGAAL

SEQ ID NO: 23729 - protein, 11 aa, Artificial Sequence
  Description of Artificial Sequence: Synthetic peptide
  Seed: STLPRRSGAAG
SNLPRRSGAAM

SEQ ID NO: 23730 - protein, 11 aa, Artificial Sequence
  Description of Artificial Sequence: Synthetic peptide
  Seed: STLPRRSGAAG
SNLPRRSGAAF

SEQ ID NO: 23731 - protein, 11 aa, Artificial Sequence
  Description of Artificial Sequence: Synthetic peptide
  Seed: STLPRRSGAAG
SCLPRRSGAAM

SEQ ID NO: 23732 - protein, 11 aa, Artificial Sequence
  Description of Artificial Sequence: Synthetic peptide
  Seed: STLPRRSGAAG
SCLPRRSGAAF

SEQ ID NO: 23733 - protein, 11 aa, Artificial Sequence
  Description of Artificial Sequence: Synthetic peptide
  Seed: STLPRRSGAAG
SCLPRRSGAAP

SEQ ID NO: 23734 - protein, 11 aa, Artificial Sequence
  Description of Artificial Sequence: Synthetic peptide
  Seed: STLPRRSGAAG
SELPRRSGAAL

SEQ ID NO: 23735 - protein, 11 aa, Artificial Sequence
  Description of Artificial Sequence: Synthetic peptide
  Seed: STLPRRSGAAG
SELPRRSGAAF

SEQ ID NO: 23736 - protein, 11 aa, Artificial Sequence
  Description of Artificial Sequence: Synthetic peptide
  Seed: STLPRRSGAAG
SELPRRSGAAP

SEQ ID NO: 23737 - protein, 11 aa, Artificial Sequence
  Description of Artificial Sequence: Synthetic peptide
  Seed: STLPRRSGAAG
SELPRRSGAAS

SEQ ID NO: 23738 - protein, 11 aa, Artificial Sequence
  Description of Artificial Sequence: Synthetic peptide
  Seed: STLPRRSGAAG
SELPRRSGAAT

SEQ ID NO: 23739 - protein, 11 aa, Artificial Sequence
  Description of Artificial Sequence: Synthetic peptide
  Seed: STLPRRSGAAG
SELPRRSGAAW

SEQ ID NO: 23740 - protein, 11 aa, Artificial Sequence
  Description of Artificial Sequence: Synthetic peptide
  Seed: STLPRRSGAAG
SELPRRSGAAY

SEQ ID NO: 23741 - protein, 11 aa, Artificial Sequence
  Description of Artificial Sequence: Synthetic peptide
  Seed: STLPRRSGAAG
SELPRRSGAAV

SEQ ID NO: 23742 - protein, 11 aa, Artificial Sequence
  Description of Artificial Sequence: Synthetic peptide
  Seed: STLPRRSGAAG
SGLPRRSGAAA

SEQ ID NO: 23743 - protein, 11 aa, Artificial Sequence
  Description of Artificial Sequence: Synthetic peptide
  Seed: STLPRRSGAAG
SGLPRRSGAAC

SEQ ID NO: 23744 - protein, 11 aa, Artificial Sequence
  Description of Artificial Sequence: Synthetic peptide
  Seed: STLPRRSGAAG
SGLPRRSGAAG

SEQ ID NO: 23745 - protein, 11 aa, Artificial Sequence
  Description of Artificial Sequence: Synthetic peptide
  Seed: STLPRRSGAAG
SGLPRRSGAAI

SEQ ID NO: 23746 - protein, 11 aa, Artificial Sequence
  Description of Artificial Sequence: Synthetic peptide
  Seed: STLPRRSGAAG
SGLPRRSGAAL

SEQ ID NO: 23747 - protein, 11 aa, Artificial Sequence
  Description of Artificial Sequence: Synthetic peptide
  Seed: STLPRRSGAAG
SGLPRRSGAAM

SEQ ID NO: 23748 - protein, 11 aa, Artificial Sequence
  Description of Artificial Sequence: Synthetic peptide
  Seed: STLPRRSGAAG
SGLPRRSGAAF

SEQ ID NO: 23749 - protein, 11 aa, Artificial Sequence
  Description of Artificial Sequence: Synthetic peptide
  Seed: STLPRRSGAAG
SGLPRRSGAAP

SEQ ID NO: 23750 - protein, 11 aa, Artificial Sequence
  Description of Artificial Sequence: Synthetic peptide
  Seed: STLPRRSGAAG
SGLPRRSGAAS

SEQ ID NO: 23751 - protein, 11 aa, Artificial Sequence
  Description of Artificial Sequence: Synthetic peptide
  Seed: STLPRRSGAAG
SGLPRRSGAAT

SEQ ID NO: 23752 - protein, 11 aa, Artificial Sequence
  Description of Artificial Sequence: Synthetic peptide
  Seed: STLPRRSGAAG
SGLPRRSGAAW

SEQ ID NO: 23753 - protein, 11 aa, Artificial Sequence
  Description of Artificial Sequence: Synthetic peptide
  Seed: STLPRRSGAAG
SGLPRRSGAAY

SEQ ID NO: 23754 - protein, 11 aa, Artificial Sequence
  Description of Artificial Sequence: Synthetic peptide
  Seed: STLPRRSGAAG
SELPRRSGAAM

SEQ ID NO: 23755 - protein, 11 aa, Artificial Sequence
  Description of Artificial Sequence: Synthetic peptide
  Seed: STLPRRSGAAG
SELPRRSGAAI

SEQ ID NO: 23756 - protein, 11 aa, Artificial Sequence
  Description of Artificial Sequence: Synthetic peptide
  Seed: STLPRRSGAAG
SCLPRRSGAAS

SEQ ID NO: 23757 - protein, 11 aa, Artificial Sequence
  Description of Artificial Sequence: Synthetic peptide
  Seed: STLPRRSGAAG
SELPRRSGAAG

SEQ ID NO: 23758 - protein, 11 aa, Artificial Sequence
  Description of Artificial Sequence: Synthetic peptide
  Seed: STLPRRSGAAG
SCLPRRSGAAT

SEQ ID NO: 23759 - protein, 11 aa, Artificial Sequence
  Description of Artificial Sequence: Synthetic peptide
  Seed: STLPRRSGAAG
SCLPRRSGAAW

SEQ ID NO: 23760 - protein, 11 aa, Artificial Sequence
  Description of Artificial Sequence: Synthetic peptide
  Seed: STLPRRSGAAG
SCLPRRSGAAY

SEQ ID NO: 23761 - protein, 11 aa, Artificial Sequence
  Description of Artificial Sequence: Synthetic peptide
  Seed: STLPRRSGAAG
SCLPRRSGAAV

SEQ ID NO: 23762 - protein, 11 aa, Artificial Sequence
  Description of Artificial Sequence: Synthetic peptide
  Seed: STLPRRSGAAG
SQLPRRSGAAA

SEQ ID NO: 23763 - protein, 11 aa, Artificial Sequence
  Description of Artificial Sequence: Synthetic peptide
  Seed: STLPRRSGAAG
SQLPRRSGAAC

SEQ ID NO: 23764 - protein, 11 aa, Artificial Sequence
  Description of Artificial Sequence: Synthetic peptide
  Seed: STLPRRSGAAG
SQLPRRSGAAG

SEQ ID NO: 23765 - protein, 11 aa, Artificial Sequence
  Description of Artificial Sequence: Synthetic peptide
  Seed: STLPRRSGAAG
SQLPRRSGAAI

SEQ ID NO: 23766 - protein, 11 aa, Artificial Sequence
  Description of Artificial Sequence: Synthetic peptide
  Seed: STLPRRSGAAG
SQLPRRSGAAL

SEQ ID NO: 23767 - protein, 11 aa, Artificial Sequence
  Description of Artificial Sequence: Synthetic peptide
  Seed: STLPRRSGAAG
SQLPRRSGAAM

SEQ ID NO: 23768 - protein, 11 aa, Artificial Sequence
  Description of Artificial Sequence: Synthetic peptide
  Seed: STLPRRSGAAG
SQLPRRSGAAF

SEQ ID NO: 23769 - protein, 11 aa, Artificial Sequence
  Description of Artificial Sequence: Synthetic peptide
  Seed: STLPRRSGAAG
SQLPRRSGAAP

SEQ ID NO: 23770 - protein, 11 aa, Artificial Sequence
  Description of Artificial Sequence: Synthetic peptide
  Seed: STLPRRSGAAG
SQLPRRSGAAS

SEQ ID NO: 23771 - protein, 11 aa, Artificial Sequence
  Description of Artificial Sequence: Synthetic peptide
  Seed: STLPRRSGAAG
SQLPRRSGAAT

SEQ ID NO: 23772 - protein, 11 aa, Artificial Sequence
  Description of Artificial Sequence: Synthetic peptide
  Seed: STLPRRSGAAG
SQLPRRSGAAW

SEQ ID NO: 23773 - protein, 11 aa, Artificial Sequence
  Description of Artificial Sequence: Synthetic peptide
  Seed: STLPRRSGAAG
SQLPRRSGAAY

SEQ ID NO: 23774 - protein, 11 aa, Artificial Sequence
  Description of Artificial Sequence: Synthetic peptide
  Seed: STLPRRSGAAG
SQLPRRSGAAV

SEQ ID NO: 23775 - protein, 11 aa, Artificial Sequence
  Description of Artificial Sequence: Synthetic peptide
  Seed: STLPRRSGAAG
SELPRRSGAAA

SEQ ID NO: 23776 - protein, 11 aa, Artificial Sequence
  Description of Artificial Sequence: Synthetic peptide
  Seed: STLPRRSGAAG
SELPRRSGAAC

SEQ ID NO: 23777 - protein, 11 aa, Artificial Sequence
  Description of Artificial Sequence: Synthetic peptide
  Seed: SVQPTFSVQRN
SMQPTFSVQRT

SEQ ID NO: 23778 - protein, 11 aa, Artificial Sequence
  Description of Artificial Sequence: Synthetic peptide
  Seed: SVQPTFSVQRN
SMQPTFSVQRY

SEQ ID NO: 23779 - protein, 10 aa, Artificial Sequence
  Description of Artificial Sequence: Synthetic peptide
  Seed: SSTLELRSRY
SWTLELRSRY

SEQ ID NO: 23780 - protein, 10 aa, Artificial Sequence
  Description of Artificial Sequence: Synthetic peptide
  Seed: THLMIWHSNL
TDLMIWHSNL

SEQ ID NO: 23781 - protein, 10 aa, Artificial Sequence
  Description of Artificial Sequence: Synthetic peptide
  Seed: THLMIWHSNL
TRLMIWHSNI

SEQ ID NO: 23782 - protein, 10 aa, Artificial Sequence
  Description of Artificial Sequence: Synthetic peptide
  Seed: THLMIWHSNL
TRLMIWHSNL

SEQ ID NO: 23783 - protein, 10 aa, Artificial Sequence
  Description of Artificial Sequence: Synthetic peptide
  Seed: THLMIWHSNL
TRLMIWHSNV

SEQ ID NO: 23784 - protein, 10 aa, Artificial Sequence
  Description of Artificial Sequence: Synthetic peptide
  Seed: THLMIWHSNL
TNLMIWHSNA

SEQ ID NO: 23785 - protein, 10 aa, Artificial Sequence
  Description of Artificial Sequence: Synthetic peptide
  Seed: THLMIWHSNL
TNLMIWHSNI

SEQ ID NO: 23786 - protein, 10 aa, Artificial Sequence
  Description of Artificial Sequence: Synthetic peptide
  Seed: THLMIWHSNL
TNLMIWHSNL

SEQ ID NO: 23787 - protein, 10 aa, Artificial Sequence
  Description of Artificial Sequence: Synthetic peptide
  Seed: THLMIWHSNL
TNLMIWHSNV

SEQ ID NO: 23788 - protein, 10 aa, Artificial Sequence
  Description of Artificial Sequence: Synthetic peptide
  Seed: THLMIWHSNL
TDLMIWHSNA

SEQ ID NO: 23789 - protein, 10 aa, Artificial Sequence
  Description of Artificial Sequence: Synthetic peptide
  Seed: THLMIWHSNL
TDLMIWHSNI

SEQ ID NO: 23790 - protein, 10 aa, Artificial Sequence
  Description of Artificial Sequence: Synthetic peptide
  Seed: THLMIWHSNL
TDLMIWHSNV

SEQ ID NO: 23791 - protein, 10 aa, Artificial Sequence
  Description of Artificial Sequence: Synthetic peptide
  Seed: THLMIWHSNL
TELMIWHSNL

SEQ ID NO: 23792 - protein, 10 aa, Artificial Sequence
  Description of Artificial Sequence: Synthetic peptide
  Seed: THLMIWHSNL
TCLMIWHSNA

SEQ ID NO: 23793 - protein, 10 aa, Artificial Sequence
  Description of Artificial Sequence: Synthetic peptide
  Seed: THLMIWHSNL
TCLMIWHSNI

SEQ ID NO: 23794 - protein, 10 aa, Artificial Sequence
  Description of Artificial Sequence: Synthetic peptide
  Seed: THLMIWHSNL
TCLMIWHSNL

SEQ ID NO: 23795 - protein, 10 aa, Artificial Sequence
  Description of Artificial Sequence: Synthetic peptide
  Seed: THLMIWHSNL
TCLMIWHSNV

SEQ ID NO: 23796 - protein, 10 aa, Artificial Sequence
  Description of Artificial Sequence: Synthetic peptide
  Seed: THLMIWHSNL
TQLMIWHSNA

SEQ ID NO: 23797 - protein, 10 aa, Artificial Sequence
  Description of Artificial Sequence: Synthetic peptide
  Seed: THLMIWHSNL
TQLMIWHSNI

SEQ ID NO: 23798 - protein, 10 aa, Artificial Sequence
  Description of Artificial Sequence: Synthetic peptide
  Seed: THLMIWHSNL
TQLMIWHSNL

SEQ ID NO: 23799 - protein, 10 aa, Artificial Sequence
  Description of Artificial Sequence: Synthetic peptide
  Seed: THLMIWHSNL
TQLMIWHSNV

SEQ ID NO: 23800 - protein, 10 aa, Artificial Sequence
  Description of Artificial Sequence: Synthetic peptide
  Seed: THLMIWHSNL
TELMIWHSNA

SEQ ID NO: 23801 - protein, 10 aa, Artificial Sequence
  Description of Artificial Sequence: Synthetic peptide
  Seed: THLMIWHSNL
TRLMIWHSNA

SEQ ID NO: 23802 - protein, 10 aa, Artificial Sequence
  Description of Artificial Sequence: Synthetic peptide
  Seed: THLMIWHSNL
TALMIWHSNV

SEQ ID NO: 23803 - protein, 10 aa, Artificial Sequence
  Description of Artificial Sequence: Synthetic peptide
  Seed: THLMIWHSNL
TALMIWHSNL

SEQ ID NO: 23804 - protein, 10 aa, Artificial Sequence
  Description of Artificial Sequence: Synthetic peptide
  Seed: THLMIWHSNL
TALMIWHSNI

SEQ ID NO: 23805 - protein, 10 aa, Artificial Sequence
  Description of Artificial Sequence: Synthetic peptide
  Seed: TGMDPRMCSL
TTMDPRMCSV

SEQ ID NO: 23806 - protein, 10 aa, Artificial Sequence
  Description of Artificial Sequence: Synthetic peptide
  Seed: TGMDPRMCSL
TWMDPRMCSI

SEQ ID NO: 23807 - protein, 10 aa, Artificial Sequence
  Description of Artificial Sequence: Synthetic peptide
  Seed: TGMDPRMCSL
TWMDPRMCSL

SEQ ID NO: 23808 - protein, 10 aa, Artificial Sequence
  Description of Artificial Sequence: Synthetic peptide
  Seed: TGMDPRMCSL
TWMDPRMCSV

SEQ ID NO: 23809 - protein, 10 aa, Artificial Sequence
  Description of Artificial Sequence: Synthetic peptide
  Seed: TGMDPRMCSL
TYMDPRMCSA

SEQ ID NO: 23810 - protein, 10 aa, Artificial Sequence
  Description of Artificial Sequence: Synthetic peptide
  Seed: TGMDPRMCSL
TYMDPRMCSI

SEQ ID NO: 23811 - protein, 10 aa, Artificial Sequence
  Description of Artificial Sequence: Synthetic peptide
  Seed: TGMDPRMCSL
TYMDPRMCSL

SEQ ID NO: 23812 - protein, 10 aa, Artificial Sequence
  Description of Artificial Sequence: Synthetic peptide
  Seed: TGMDPRMCSL
TYMDPRMCSV

SEQ ID NO: 23813 - protein, 10 aa, Artificial Sequence
  Description of Artificial Sequence: Synthetic peptide
  Seed: TGMDPRMCSL
TVMDPRMCSA

SEQ ID NO: 23814 - protein, 10 aa, Artificial Sequence
  Description of Artificial Sequence: Synthetic peptide
  Seed: TGMDPRMCSL
TVMDPRMCSI

SEQ ID NO: 23815 - protein, 10 aa, Artificial Sequence
  Description of Artificial Sequence: Synthetic peptide
  Seed: TGMDPRMCSL
TVMDPRMCSL

SEQ ID NO: 23816 - protein, 10 aa, Artificial Sequence
  Description of Artificial Sequence: Synthetic peptide
  Seed: TGMDPRMCSL
TVMDPRMCSM

SEQ ID NO: 23817 - protein, 10 aa, Artificial Sequence
  Description of Artificial Sequence: Synthetic peptide
  Seed: TGMDPRMCSL
TVMDPRMCSV

SEQ ID NO: 23818 - protein, 10 aa, Artificial Sequence
  Description of Artificial Sequence: Synthetic peptide
  Seed: THIMIWHSNL
TRIMIWHSNL

(The sequence listing continues in the following parts.)
